United States Patent Application Publication US 2008/0066201 A1 - sequence listing, part 4

SEQ ID NO: 20816 - DNA, 337 bp, Glycine max
  Clone ID: LIB3106-060-Q1-K1-C4
ggaatatgctagcagaaacatcactgttaatgcagttgctccagggtttattgcatccgacatgactgccaagctaggacaagacattgagaaaaagattttggagacgatcccattaggaagatatggccaaccagaagaagttgccggactggttgaattcttggctcttaatcaagctgccagttacatcactgggcaggttttcaccattgatggaggtatggtgatgtaaatcagcaacctgtttacctggcaacatgaacttttgcacttttgaactactcttgtactatgatagtttgtctttgctgaagtttgcttaaagatggtttta

SEQ ID NO: 20817 - DNA, 311 bp, Glycine max
  Clone ID: LIB3106-060-Q1-K1-C5
gaagaacagagcctcgctgaaaccgaagcgggcctggaaagttgggagcccaacggcgaagacgccggcgatgagagcttcgtcgaaccgccggaagaggccaagctcttcgttgggaacttgccttacgacgttgatagccagaaattggccatgcttttcgaacaggccggaaccgttgaaatcgctgaggttatttataacagggaaactgaccagagtcgcgggtttgggtttgtgacgatgagtactgttgaagaagctgaaagcgctgtggagaaattcaaccgctatgatatcgatggaagact

SEQ ID NO: 20818 - DNA, 423 bp, Glycine max
  Clone ID: LIB3106-060-Q1-K1-C6
cccacgcgtccgcggccaccggagccggcaccgtctttgattctggcacggtcttcaccaggctagttgcaccggtatacacggctgtccgggacgagttccggcgaagagtggcgatggcggcaaaggcaaacctaacagtgacatccctaggaggctttgacacatgctacacagtcccaatagttgcacccaccatcacattcatgttctcaggcatgaacgtgacgctgccacaggacaacattctcatacacagcactgctggcagcacctcatgcttgggcatggcttcggctcctgataacgtgaactcagtgctcaatgtcattgccaacatgcagcaacaaaacaccgtgtgctctatgacgtgcccaattcaaggtttggagttgctcgtgaactttgcaccaaataattaaa

SEQ ID NO: 20819 - DNA, 237 bp, Glycine max
  Clone ID: LIB3106-060-Q1-K1-C7
cccacgcgtccgcttcaagattgtattcttgtcaggaagatatcttgacaaaatggccgtaacagaagcaaacctaaagaaggctggcttccacacatgggagcagttaattctcaaggatccacatcttatcactccaaatgcactttcatacaaatcagcaatgagagagaatctgttgaggcagggatacagaattgttggaatcattggagaccaatggagccatctgcttgg

SEQ ID NO: 20820 - DNA, 407 bp, Glycine max
  Clone ID: LIB3106-060-Q1-K1-C8
cccacgcgtccggtggattacaagaacaatttgagtgggatgctggttacacagctcgatttggcatcatatatgtggattacaagaacaatttgagtagataccctaagtcctctgcgttttggctgaaaaaattccttctcaagtgatctaaatctattgttcctttggcatgcatgcccagtttttcttcttgtttgtttcctggatatcacagacatgcagtgtgtatcacttgctcttcgattcggatcaatgtaatcaagtcatcgttgatatcaaataaataatggcatgccagagaatggaataaattatcttttcaacaatgtgttcgagttgttgcatcaatgcctatatatatttaataattaaaaaaaaaaatatatttattttttttttttttt

SEQ ID NO: 20821 - DNA, 350 bp, Glycine max
  Clone ID: LIB3106-060-Q1-K1-C9
cttccttgtctctttctcttctcaacaacatgcagatcttcgtcaagactttgactggcaagaccatcaccctcgaggtcgagagtagcgacaccatcgacaacgtcaaggccaagatccaggacaaggaaggtatccctcctgaccagcagaggttgatttttgctggtaagcagctggaagatggtcgcactcttgctgattataacatacaaaaggaatcaacacttcacttggtcttgaggctcaggggaggaaccatgattaaagtgaagactctaactggaaaagaaattgaaattgacattgagccaactgatacaatcgaccggatcaaggaacgcgttgag

SEQ ID NO: 20822 - DNA, 427 bp, Glycine max
  unsure at all n locations
  Clone ID: LIB3106-060-Q1-K1-D1
cccacgcgtccgcccacgcgtccggataactagaaacagtgtgatgaaaatgaaggtccttgttttcttcgttgctacaattttggtagcatggcaatgccatgcgtacgatatgttccctctccgaatgaacactggctatggtgcccgtactccggaggtgaaatgcgcaagttggaggcttgctgtggaagcacacaacatctttggctttgagaccattcctgaagagtgcgttgaagcaacaaaggaatacatccatggcgaacaatatagatcagactccaaaacagttaaccaacaagcttacttttatgccagagacctcgaagtccatcccaaggacacanttgtgttcagtatagatggcaccgtactctttaatattccatactacaaaaaacatggatatggggtggagaaatta

SEQ ID NO: 20823 - DNA, 333 bp, Glycine max
  Clone ID: LIB3106-060-Q1-K1-D10
cccacgcgtccgcccacgcgtccgcaactagccaatgacaagaggaccaagccttatgtgaagaaaatggccaagagccaagactatttcttcaaggagttctctagagccattaccttgctctcagagaacaaccctctcactggcacaaagggtgaggtcagaaagcagtgcaatgttgccaacaagcaccatgatcaggacccttgaattttcctccccttgtctatgatcgaggaagaaaatctgtaatatattatgcaaaaaataattaaggtcttttccttttaaatgggctggttcaatgaaccgagaccactgcaggttcatggg

SEQ ID NO: 20824 - DNA, 355 bp, Glycine max
  Clone ID: LIB3106-060-Q1-K1-D11
gttggccatggcaaacatgattgtggcttccaccaaacctctggttccagtctgcaccagttcccgttcccccacacccaaagtccccattctccaaatttcactccccaaagccccaaccttgaaactgaaactcccgatttcaaagccccagatgctgtccctccttggagggatagcaccactggtcttggccagaccctccctcgcagaagaaattgagaaagcagcactctttgacttcaacctcacccttcccataataatggtggagtttctgctgctgatggttgccttggacaagatatggttcaccccgcttgggaaattcatggacgagagggacgcggcgatc

SEQ ID NO: 20825 - DNA, 384 bp, Glycine max
  Clone ID: LIB3106-060-Q1-K1-D12
cttacttcccaagctggtatagtagaaagcttggatgtcttggtaaaggagtttgtagctgccagcgatgaagagaagaaatccgtgtttacccgattggaagaggaagttgtgaagcttaagggttccgcctcaaggtacgggaagatttacttgaaagctgccaagaattacagggaaaaaggttctgattatgctaagaacgaaattcagcgcctacagcgcattcttgacaagtccattagccctgcgaaggccgacgagttaactctaaagaaaaatatcttgtcgacatatgctgcttgacttattggtgcattgttaaccaactctcatggaagctcgtgatccaccgcagctgccgatgattgtttgactttgata

SEQ ID NO: 20826 - DNA, 405 bp, Glycine max
  Clone ID: LIB3106-060-Q1-K1-D2
cccacgcgtccgcccacgcgtccgcccacgcgtccggttttgcagccatggaaacaggcatagcatgctacactcgcgggcctttcttgcctagtgtttcttccaagcactctccaccctccatctctccatcttttggcttgaggagtctgaaatcgagctctttatttggagaatctctaagagtggcatccaaatcaacactaaaggtttcaaagacaaagaatacttcactcgtgaccagatgtgaaattggtgacagtctggaagaattcctcacaaaagcaacaccagataaggggttgatcaggttgttggtgtccatgggagaagcattaagaacaatttccttcaaagtgaagactgcttcttgtgggtgaacacaatgtgttaatactttttggg

SEQ ID NO: 20827 - DNA, 382 bp, Glycine max
  unsure at all n locations
  Clone ID: LIB3106-060-Q1-K1-D3
accatccccatcaccggaactggtatcaaccctgctcgtagtcttggtgctgctatcatcttcaacaaggaccttggttgggatgaacactggatcttctgggtgggaccattcatcggtgcagctcttgcagcactctaccaccaggtcgtaatcagggccattcccttcaagtccaagtgattcaatcaaacggttcatgcttaatcaagttgggaacaacaacaacaacaaaaatcaagccaatgtttgtgggttttggtttcatttcattaagatgatcntgttatctcttttcttctttttaaaatttaaagtctttgtattttgtatgtaaagatgtaaaattatgattattaggtggtgcatgtgtcgcgtcatg

SEQ ID NO: 20828 - DNA, 330 bp, Glycine max
  unsure at all n locations
  Clone ID: LIB3106-060-Q1-K1-D5
attccctccatttctgagaatggcgaaggctgcggagaagaagccagcggctgagaagtctccggcggagaagaagcctaaggcagagaaaaagattccgaaggaaggcggtggcgagaagaagaagaagaggtcgaagaagagcgtggagacctacaagatctatatcttcaaggtgctgaagcaggtacaccctgacatcggtatttctagcaaggccatggggatcatgaacagcttcatcaacgacatcttctagaagctcgcgcangaagcggcgcgtctcgccaggtacaacaaggaggcctactattacctccagggagattc

SEQ ID NO: 20829 - DNA, 368 bp, Glycine max
  Clone ID: LIB3106-060-Q1-K1-D6
cccacgcgtccgcccacgcgtccgccaacacttccgaaccttgcattgtatctacccacttctcaaccaacaatggcaatggcaacccaagcctctctcttcaccccacccctctccggtctcaaacccagcgaccgagccaccgcgccatggaaacaatcctccaccctctccttctccacctcgaagcccctcaagttctcgcgaacaatcagagcagcagccaccgaccagaccacagaggcaccggttgggttcaccccaccggaactggacccaaacaccccttccccgatcttcggaggcagcaccggcgggctcctgcgcaaggcccaaagggaggagttttatgtcatcacatgggactt

SEQ ID NO: 20830 - DNA, 332 bp, Glycine max
  Clone ID: LIB3106-060-Q1-K1-D7
cccacgcgtccgcccacgcgtccgatggtcttgggctatgcacagcactctctaacctttgttccaacagagagcagtatgcattttgggatgcattccatccatctgaaaaggccaacagactaattgttgaggaaattatgtcaggttctaaagcctacatgaacccaatgaaccttagcaccatcctagctttggacgcaaacacatgaagatacacacatctaataaatcctagcacttgtattggccttccctgctagttaatgacatctctctttccacatttttagattctaattgtggttattgtattaatatgagtgaggaac

SEQ ID NO: 20831 - DNA, 377 bp, Glycine max
  Clone ID: LIB3106-060-Q1-K1-D8
gtgtagcggtctcaagcatgagaaactccaataaaaaaaataaaagggaaaacgaatttgctcatatggagtacatgaacataactgtaattacttcgaacaaaccttatgggatatctgatggctccaacccattttttgatggcctcaaagttcctaaattcaatctaaagaaaggcggggtgcatagtggtcatgttcaacaagggcttagagataaattttgttttgtgaagaatgggaaagggagatgtcaggacggttatacagctgaggtggatggtcctgactcggtgaaggtacttgtcgccactaaagcaaagcctaacagggacgttaggaattagcttgacaaaaaaatattttaaaagcttttt

SEQ ID NO: 20832 - DNA, 309 bp, Glycine max
  Clone ID: LIB3106-060-Q1-K1-C2
aaaaaaaaaaaaaaaaaaaaaaaaaaaaaataaaaaaaaaaacaaaaaaaaaaaaaaagggggaaaaaaaaaaagaaaaaccagaaaaaaaaagggggcgggcgttttgggggatcaaggttatcgaccccgtgcttgcagggtgatattttttttttagggtcccctaattcaaatccatggccggtgttttaacaccatgtggactggaaaacccagggctttcccaaattaattcgcttgaaaacacatccctttttctcaggttgggaaataagaaaagggcccggcccctatggcctttccaaa

SEQ ID NO: 20833 - DNA, 233 bp, Glycine max
  Clone ID: LIB3106-060-Q1-K1-A12
ggtagtataactggccggacccacgcgtccgagctcttctcttaaccccacccttttcttgtctcaaagccagctaccgcgccttgctgccatggaagcaaaactcgagcctctccttctccagcccgaagccccttaagttctccagaacaatcatagcatcagccgtcgactagaccacatatgcaccagcaaaagtatatgctgcacccttcgggttcaccttcacctta

SEQ ID NO: 20834 - DNA, 352 bp, Glycine max
  Clone ID: LIB3106-060-Q1-K1-A3
cacccgtccgcccacgcgtccgaaagaaaatacacttaaaaatttgaaaaaaagaaaataaaattaggagcaaattttatttctttttaatttaaattccaaaattttctccactcgtttattttctatttagcatttcaaacagtgtaaatgataaaaaaaacttggaaaaaattaaagatgtaggccaaaaagaaaaaacaatgaaaagatgttcagtgacaagtggaacaggaagtctgttggtatatatatatctgtaatgaaaagagttaatatacttgttacatatacatagtcttatttaatgttgatgtgttgaatatcaaccatcaatgatattcattgctga

SEQ ID NO: 20835 - DNA, 406 bp, Glycine max
  Clone ID: LIB3106-060-Q1-K1-A4
ccacttccaacgccatgcctctttttggaattttccagataccctcatttatggacagaatcactgacctcgccatcttcattactccgctatggatttcggttatcgtcggcgtcgtcgtgggctgggcgtggaagcccaaatgggcctttcaccccaaagacgctcttctcaagtttcgctcccctcgccctcccaatccccaaaacgacaccgcttttacctactccgccaccagttccttcgcgcgtgagaaagacgcgagtgggagtcctgtggtgacggaagacgatttgctgcatcttgtggaagttggttgaggaaaaagatggagggcggggcatggattcagatgatggaccgttctaccccgaccatgacttatcaagcgtggcgtagggatcct

SEQ ID NO: 20836 - DNA, 303 bp, Glycine max
  Clone ID: LIB3106-060-Q1-K1-A5
cccacgcgtccgagaagattcgtgaagagcgtggttacacctacatggatgtttgtgaggtctgcccagaaaagttgccaaattatgaacagaaaatcaaaagcttctttgaagagcatcttcacactgatgaggagatccgcttttgtgctgctggaagtggctattttgatgttagggatcgcaatgaagcttggattcgtgtgtgggtcaagaaaggaggaatgatcatcttacctgccggaatttatcatcgctttacgctagatgagagcaactacattaaagctttgcgtttttttg

SEQ ID NO: 20837 - DNA, 430 bp, Glycine max
  Clone ID: LIB3106-060-Q1-K1-A6
gtttcgttccatgaatgaagctatctcgaagtcatggaaaaaagtttgtctcctagaagcaaaacaaacggagggtggttttcatgttgggggcgtctcaaattgaagcttccatggtcgaagagaacaagcacttataaacccattggtggttttaactatgaccctttaagctatgctcaaaactttgacgagggatgggaggaggatgatgaagaatctttacatcgcgggttctctgctagatatgcagcaccttcctcacataataaattgctcaagcaatgatagggttgattgaagcttcatttaaggtcagctagtatatatgtactgaaaaactggtcttatatttcttgtcacattttactttaccctctaatgatcttgaatcttgattatataaattactcatgtttggtgcagcaaa

SEQ ID NO: 20838 - DNA, 392 bp, Glycine max
  Clone ID: LIB3106-060-Q1-K1-A7
attataccttaccaccccttccttccaccaccctttctttctctcctttatacacacacaggacacacacatcacaagaaagagggagaaaaataaaaacaaaaacaaaaacaaaaggtggtagattcatgaaccacaacacaacacacattattttaatacaaaactaacaactttgaattcccaaaaattcaaataattcccctcttctggccttttccttaagatttctaaccccttctctcttctgtgttgctacccttttcaggtactcttcctactaaattgaaggaaaaagttggtattataggaagttaatcactgctttgatgacttggtaagaaaacttgaactaacaatggtaagtttgaaaaggcgcaaacttttgggac

SEQ ID NO: 20839 - DNA, 318 bp, Glycine max
  Clone ID: LIB3106-060-Q1-K1-A9
gaaaaataaagcgttccatagcctcccataaaaatgaagaatactatcttctctgctctctttctactttgtgccttcaccacctcatacctaccttcaaccaccgcggtggtcgataccaacggtgatattcttcagaatcctggcacatactttatcttgtccgtttttcgacccggcggcggagtagaattcgccgccactcaaacgaaacttgccctctcactgttgtgcagactctcttcgggaggggatttccagtaatcttatcgtcccagttacgaatccctatcatcggcgaaggacaactcttcagca

SEQ ID NO: 20840 - DNA, 263 bp, Glycine max
  unsure at all n locations
  Clone ID: LIB3106-060-Q1-K1-B1
tggctatgatcaactcanagtgcatcaacacaacagggtcatcacacaagttgcacaaccccaagctcccaccctcaaaacccaccctctcccttttctcccttcagaacctcccaaagggcctaacctcccacgtctcaacttccacagcaggcactgccatcgcaggcgcaatattctcctcactcgcaaactgcgacgcagccttagctgcatcgcaaattgctgaattagccgaaggtgataaccgcgggctggcattg

SEQ ID NO: 20841 - DNA, 331 bp, Glycine max
  Clone ID: LIB3106-060-Q1-K1-B10
cccacgcgtccgaatcactctagctgttgcaaatttctactatttttcaatggcttctgcagatgttgagttccgttgctttgttggtgggcttgcttgggtcaccggcaacgatgccctcgagaaagccttttcaatctacggcgacatcgttgaatcgaaggtccgtttgatgcaggcaccgcaactgatctcacacgattcggattcggattttttctcgatcctcttctgatctgtgatctctgatctatttgcgttacttgatctatgatatgatacttgtgttactatatgattcttttattactcacgccaataggtacgttca

SEQ ID NO: 20842 - DNA, 315 bp, Glycine max
  Clone ID: LIB3106-060-Q1-K1-B12
aaaaggttgcagcaacaatggcagccatggctgcactccagagctcaatggccggtctctccctctcttccaactctttcttaggccaactccttcctcccatcactctcccttctcttcttccgggtaagtcaacagagaagcaatgtcccattgtaatgaggcttaaacgatgggagcggaaggagtgtaaaccaaacagtcttcctatcttgcacaaaatgcatgttaaacttggagatacggtgcaagtcatatctggacgagaaaggggtaaagttggggagattactaaaatcttcaagcataacagca

SEQ ID NO: 20843 - DNA, 368 bp, Glycine max
  unsure at all n locations
  Clone ID: LIB3106-060-Q1-K1-B2
cccacgcgtccgcttccacgctgattctgactctcttcctggtcttcaccttcctcggtctcattctcctcgctctcggcatcctctccattcccagctcctcgcgcggcaatttgcccaaacctaacgatctcgcatccatcgctcgcaacacaatcgagacttccgacagtgacgagaggggggagcagtgggttgaagtagtgtcgtgggagcccagagcctttgtttatcacaattttctgacgaaggaggaatgcgaatatctaattgacatagcaaagccaagtatgcataagtcaacagttgtcgatagtgaaactggaaagagtaaagacagcanaatgcgtacaagctctggaactttt

SEQ ID NO: 20844 - DNA, 287 bp, Glycine max
  Clone ID: LIB3106-060-Q1-K1-B4
gagaaagtgaaggtgcttcggcgactcctgcagacaccaggggtacaccaggggccagcctgtttcgacgctctgggtgcgaagctcatagaatccgatggcttgccctactgcatcaccagcggcttttccatcggcgcttccaggtgggctctgcccgacaccggcttaatcttctacggcgaaatgctggagcagggccaactcatcatccaagccgtttccattgccgtcattgagcgacgccaacaactgctacagcaatgccatgagaccttaagcgaacc

SEQ ID NO: 20845 - DNA, 333 bp, Glycine max
  Clone ID: LIB3106-060-Q1-K1-B5
atccgcgcatattctcatttcaatttgcatttgcatttgcgtttcatttggcgttttgtttctttctggaagcttcgttcgggcatcaatggcgtccttcgatgaagctcctcccggaaactccaagaacggcgagaagatcttcaaaaccaagtgcgctcagtgccacaccgtcgacaaaggtgccggccacaaacaaggacccaatctgaatggtttgtttggaagacaatctggtacaactcctggatattcctattccactgctaacaaaaaacatgggcgtgatttgggaggaaaaagaccctctatgattacttgctcaaccccaaa

SEQ ID NO: 20846 - DNA, 426 bp, Glycine max
  Clone ID: LIB3106-060-Q1-K1-B6
atatctctggattatgtggaaagggaattcaaccatgtaaaaaatgatggagaattggtaggctgggtcacagatgggcttattgcaaggccattgccaaataggatttgcataggcgacactgcaccctcaaactcagtgagtagctgacatggccaaagactggtggctttcattcatgaccacttgcattacatagctgcatgaggaagctagttggactcaagatgtcttgggatcaagggcattggttggttctttgccatccattggtgagtagcacatcccacgcttgcaaacaaacaactcagtgaatggcaccaaataaccacgaactagtttgaattgaaagcatgtggcaacatggtgtgacaaaacccccggtctgccaccccttgtcattgtcaatgaatggactcctactga

SEQ ID NO: 20847 - DNA, 325 bp, Glycine max
  Clone ID: LIB3106-060-Q1-K1-B8
cccacgcgtccgcccacgcgtccgtctttttccaaactctaaaaatttttagttccacaaaaccaaaccaaaatggcagcagcctcggcctcatccaccatgatatcaacaccagccttatctccaagcacaagcatccaaaagcaccatcatttgaagccatccaacgtgtgctttcaaggccttagacccctcacaagggtcacaaccaaagtgagcagcaccaccaaaagggttattccaaagggtggtgtcggtgttagagctgaactcaactcagcacttgtcataagcctcagcactgggctcttcctctttttgggga

SEQ ID NO: 20848 - DNA, 396 bp, Glycine max
  Clone ID: LIB3106-060-Q1-K1-A11
agcttatgaagagtgggttcaccagcccattgtcagcaaggaaggcccccgtttctttgaaaatgagattctggagttcttgacgcgcacagtctggtgggcaataccagtcatttggctgccagttgtatgctggtttatatataagtccatacgaatgggcctcagttgtcctcatttagctctattggtggttcttggcatttttgtttggacactgcttgaatactcattgcatcgttttcttttccacattaaaacaaagacctactgggggaataccttgcattatcttctccatggctgccaccataagcaccccatggatggcttaagactcgttttcccttctgctgcaacagctatattattgatgccgttctggaacttggtgaa

SEQ ID NO: 20849 - DNA, 265 bp, Glycine max
  unsure at all n locations
  Clone ID: LIB3106-060-Q1-K1-B9
ttttcactaggtcccgttgtgtgtgcacggaatcaaatttctcatcgacgatggcgaataccctacaacgcgccctacgcgccaccatggcccggcggttctccaccgacgcattggccgaaattaaacgaggcgagatcggaatggtttctggaattcctcaagagcaccttcgtaggagggttgtaatttactcntctgctagaactgcatctcaacagggatctgggaaggttggaaaatggaagatcaactttttatctac

SEQ ID NO: 20850 - DNA, 94 bp, Glycine max
  Clone ID: LIB3106-060-Q1-K1-C1
atttgtgaaactaacaacaacacaatggcagcatgcgggcacctgataacgcaatggaaagccaactaaggcccggcggttctacaacgacgca

SEQ ID NO: 20851 - DNA, 416 bp, Glycine max
  Clone ID: LIB3106-060-Q1-K1-C10
cccacgcgtccgatttgctttgtgcagagtgcaaaatcagtgaaatcaccatgcttcgtagcttgaccaaacttcgttgtttggccgttcaatcacgccaagttctatcacctctgtcttctcgccgtctccttcaccacttgccgccgccgcaatcgcttcactccgcttccaatttccgcatttctagtccttccttcattttctcgtggtgtcctccccacgcatctcagccttccccttctttggttcaagtgcgtcatgcttcgtccaaggagcgaaagcgaaagccagtgccttcacccgtttccaaggttaagaaaaccaaaatgaaatcttattcgtctttcaagtccagattcagagcaatgaatgatgggaacatcagacgctggaaggagggaaagcgccacaat

SEQ ID NO: 20852 - DNA, 182 bp, Glycine max
  unsure at all n locations
  Clone ID: LIB3106-060-Q1-K1-C11
gaaattgttgatgcttaaattaagtttcaaattatataccttttcttttctgttttgtctctgcttatgatttgaattttagaataaatttttaaaaatgtgaatgatgaaggagacaatacctgttgttacttctttgaatttggactcacctatagcagatgaaaccaaattatcanggg

SEQ ID NO: 20853 - DNA, 439 bp, Glycine max
  Clone ID: LIB3106-059-Q1-K1-G6
cccacgcgtccgaaagaatcgagtgattttcgtttgcgttgctgttgcgactgagtgagtgaagatggcgtgcttgcacgaccacagttgcgaagaccatgactgttcctctaactggtctctctacaaacacatcgacctctccaaggtaactgctttgaatgaggcaaatccaggaagtgttaagtcagttttcaaagcttgggaagagcgtctggattcttctggggttcacttggaaagcaatgagggtgatcctgagttacttgtcttcattccatttacttcagatgtcaagattaagaccatatccatagttggtggagctgatggaacaagtccttccaagatgagagtgttcatcaatcgagaaggaattgacttttcagatgcgcaaagcatgcaggctattcaggaatgggatttggttgagaatatg

SEQ ID NO: 20854 - DNA, 392 bp, Glycine max
  Clone ID: LIB3106-059-Q1-K1-G7
cccacgcgtccgcccacgcgtccgaaaacactatagcaatagaaacatttgctgttgaaaaacccctcactcttcatcactacactagctagccacatacaatgtcgaccaaatttaaggtgtttcgtgaattcacaagcgatgactcattcctaaaccaagttatccctgaaaacatcaccgaattccaagtgactctgtccctcgctagagactacgatggcaacaactcaaccaacggaaagttcattccttactgggacactgaaaaggtcactcccgaagtgataaaaaaattcaagaaaaaatacgaacccaccgcactgagggttaaggttcttgtcagcattggaaacaaaaacaaacaatttcctttcaccattggctcggac

SEQ ID NO: 20855 - DNA, 439 bp, Glycine max
  unsure at all n locations
  Clone ID: LIB3106-059-Q1-K1-G8
gaatactcttgggaggcctgttcccacaaggccatgggagcagaattatggaaacagcacgtatggaggatatgggtctacaatgaattataattctgggtatggatctggaatgtatggatcttcttatggtggactaggaggaggaatgtatggatcatcttatggtggggggatgtatggtaacagtatgtacaggggaggatatggtggcatgtatgggtcatccgggatgtacgggggtggaatgtataacagtggcttagggggtccaatgggtggttatggcatgggtggtggtccttatggagaacaagaccccaacaatccgtatggtgcccctccatccccacctggattntggatttctgccctacgtgtgatgcanggtgtggttaactnttttggtcgaatatcaatactcatagaccagaacaca

SEQ ID NO: 20856 - DNA, 358 bp, Glycine max
  Clone ID: LIB3106-059-Q1-K1-G9
ctaaggtgatccatacgatccttgttaaagttccacgtctcacatgcagtactgtgcctggggggattgcttatgacggtctctacttggaatcgagagatagcacatgtacctttgatagggaagctgaaccctacagctatgacatacagattacatatgaaggcctttacactactatgctagcagttaaagttgcaatagcaacttgatgaaacctcatgccataacttgaaactagagtcatgtacatattcacctatgatagattcctttattcgtgttcgagattttagccacgcatttgtttatcaccaggagatgatcatgagtatgctagtcaatgatttgaattatt

SEQ ID NO: 20857 - DNA, 447 bp, Glycine max
  unsure at all n locations
  Clone ID: LIB3106-059-Q1-K1-H1
gtgttattggtgggtttaggaagtactaacaggaaatggctgtgatcccgtgtcactgttggcgttccgtcggatccgacaaaccctacctctctggtcagagtctccgccgttgcgctccttcccccgccgtctccgtttcatttcgacgccgaatatcatgcgtcgcctcttccgctgtcgctcagaaagttgggctgaaagattttcttcacttggatgattttgataaggatactattttgaagatgttggaccgggcccttgaggtcaaggcattgctgaagtcaggggacaggtcatttcggccttttgaggggaagacaatggcaatgatatttacaaagccgtccatgagaacacgtgtttcgttcgagactggctntacattgttaggtggccatgctatatatttaggacccgatgacattcaaatgggcaagcgag

SEQ ID NO: 20858 - DNA, 236 bp, Glycine max
  Clone ID: LIB3106-059-Q1-K1-H12
gtcgcgagcaccgccctttttttttttttcttttataataaactcatctcccctcaagccttttgtaaccaacccatgttctttctcgcatttacactaaaaaaactatcaaaaacacccctaaccttccacaacaacatcaaaactacaaccccacatcaacaaaaccccaacctaaaaacacaacaacccctaccactaaacactacccaaaaacaccaaccaatcgaaaccac

SEQ ID NO: 20859 - DNA, 145 bp, Glycine max
  Clone ID: LIB3106-059-Q1-K1-H2
cccacgcgtccgtttttttttttttttttttttttttttttttttttttttttttttttttgttattttggtatttttaatatggttatataaaaaaaaaaattttaataattaataataaataaataattttttaatgttaaat

SEQ ID NO: 20860 - DNA, 429 bp, Glycine max
  Clone ID: LIB3106-059-Q1-K1-H3
gccaaaggccatatcatcttttattattcgaaataatgtgcgggatcatacacaagattggggggaccctgcattttggaagggccaagaaataggaactctaaagggaacaccatggtgagcacaaaggtttactccaaggaaaacaccatggagagtacaaaggtggacacttaggagaacaacgacattgggagcacaaagagggacttgtggataagatcaaggacaagatccatggcgatggccatgacaagggtgagaaaaagatgaagaatgacaataagaaaaacgatcatggacatgaccattatggtcatagcatcagccgtgacagtgattagatcttataagttaagcaagagtacaggacgatattagtgacagagtcaggattcctatttctgccttatgagataattcagataa

SEQ ID NO: 20861 - DNA, 455 bp, Glycine max
  Clone ID: LIB3106-059-Q1-K1-H4
cccacgcgtccgcttaatgcgtacccaaagacacctccaactacaataccgcctgttaacataagtgagtctgaggaacttcagccagtgtcaattataccggaaagccctctagagtcatcttcagttgctgcttctgcaattgatgctgttgaagatcctgcatttacaaacttcttcagtacattgaaggttactggaaattatgcttccaatatggaaaattttagacagcattctgcaactgtcacttctgctcctggtggtttgttatctactgcacctactgtgcaaataccatctgcctctcattcaacttcatcgatatcaggcttcccccttgactctcttgaaacagccaagagtggcaatcaagtcattaatcttgttaagccttctactttttttgcatcaacgtcttcatcttcactgttagttccacctatttattcatc

SEQ ID NO: 20862 - DNA, 446 bp, Glycine max
  Clone ID: LIB3106-059-Q1-K1-H5
ctgggaagaggcagtgcagtggttctactactttgcttcttgctgcttcactcgcagatgggtcgtgctgccacctacacagttggagattctgggggttggacctttaacactgttgcctggcccaaaggaaagctctttcgggctggtgacacacttgctttcaattatagccctgggactcacaatgtggtggccgtgaacaaggctggatatgatagctgcaagactccaagaggagccaaagtgtataagtcagggacggatcagatcagacttgccaagggacagaactacttcatctgcaattatgttggtcactgcgagtctgggatgaaaattgccatcaacgctgcctgagtttaataatatggttaacttcccatacatattgtattgtaatgcaaattgcaccctttagtgggaagttagctcctttaaataat

SEQ ID NO: 20863 - DNA, 438 bp, Glycine max
  Clone ID: LIB3106-059-Q1-K1-H6
ttaagaattacaacaagctggtgtctcttggcttcaagattatattcttgtcgggaagaacactggacaaacaggccgtaacagaagcaaacttaaagaaggctggctaccacacatgggaaaaattaattctcaaggatccacaagatccttccactccaaatgcagtttcatacaaaacagcagcgagagagaaactgataaggcagggatacaacattgttgggatcattggagaccaatggagcgatctcctcggaggccacagaggcgaaagcaggacctttaagcttcctaatcccctgtactacattcagtagttccttcacctctcaacaatctagcttgctcctatctatctatatgtaataagatgcgttcaaataggggcactagcttcactttatgttgcttcagctgtgtgtcaacaagtcatgt

SEQ ID NO: 20864 - DNA, 408 bp, Glycine max
  Clone ID: LIB3106-059-Q1-K1-H7
cccacgcgtccgcacgatggcaattacaatacaattgggtcgcggtggagtggaaaagcagagtcaggttacaacaacattcttcagtgagagcagtatttataaaaaaaattggtgtaaatactttttttattgtttgtaatttaatattttttttcttttcattcttgtacttttttttatttttcttcttacaaattatgttttgtccctagaacattgtaaatattttttcttactgttctgtttaaatcgttttaagaactaaaaataaattaagcaaggattaaaaacatttaaaaaaataaaataaaatatactcagtgacaaaaagtaaaaagatatttaattttattaaataaaaatattagaagatgtttgacccttcattggtgggatttacatgat

SEQ ID NO: 20865 - DNA, 408 bp, Glycine max
  Clone ID: LIB3106-059-Q1-K1-H9
caattgtggtggatgtgttgaattggactgattcgccggaatgccaggagaaggcatcatggattttgatggttatggcacacaagtcctatggtgacaagcaggccatgattgaggcaggggttgcatcatccctgcttgagttgtcccttttgggttccacattggctcagaaaagggcctcaagaatattggagattttgagggtggacaaagggaagcaagtttctgggagctatggcttgggtgcagctgtctctgcccctatttgcggctcttcgtcggcgaggccagacggaagaggaggaggaagagagtgttttgaggaggacgaagagatgatgagtgaagagaagaaagccgtgaagcaattagtccagcagagtttgcagaacaacatgaggaaaa

SEQ ID NO: 20866 - DNA, 162 bp, Glycine max
  Clone ID: LIB3106-060-Q1-K1-A1
aaggcatcatcatgtttccaggaatgttcatgcgcaagccagacaaagctgcagcactgaagcagctgaaatctcacgcggccatgttcggggcatgggttgttgttattcgagtcaccgctgacgttcttcactttctcagcaccgagaaagaggaactta

SEQ ID NO: 20867 - DNA, 205 bp, Glycine max
  Clone ID: LIB3106-060-Q1-K1-A10
cctacacgttagggcacgcacacgggttctgttacttttcatacgacatcgctatcgggctacggcccagtttgagggataggctgtgagaacaataccgccgaccacgccagcgactgctaacatcggtcgggacctcaataggaaaacctaagtggcacagcttacgtctatgaacgctacgagttcctctgttacaacagtc

SEQ ID NO: 20868 - DNA, 433 bp, Glycine max
  Clone ID: LIB3106-059-Q1-K1-G5
gcacaaccgatcttttcctctgagaagacgtgtcggtagctgaagcattttataagcctcgactttcctgaactagttttaacatacaatctttcaagtacacctccccagcttccatttaagaatggagatcactagaataggccaatggttaagtcttctgatatgtgtactactattactgcagacagaaggggttcctgtgggaatcacttttgttgaaaatgcagtggcaaaaggggctgtttgtttggatgggagtcctccagcttaccacttccacaagggatctggagcagggattaacaactggatagttcactttgagggaagaggatggtgcaacaacgttactacttgcctttcccgtaaggacactcgattaggttcatctaagaaaatggatacatcactttccttttctgggtttttc

SEQ ID NO: 20869 - DNA, 378 bp, Glycine max
  Clone ID: LIB3106-059-Q1-K1-F11
gcaaaaatggcacctgcaacactgtctctgtctctcctcctcctgttctcactcagcatcggcgtaaccgttagatcgagcgactacgactacgattgtgtgtacactgcatacgttagaaccggttcggtgttgaagggcggaacggactctaagatcgggctgaagctgtacgacaagtacggctactacatctacattaaaaacctcgaagcatggggcggcttgatgggcaagggctacgactacttcgagcgcggcaacctcgacatcttcagcggaaggggaccctgtcttgacggacccgtctgtgccgttaacgttacttctgacggatcgggttctcaccacggctggtaccttaactacgtccaggtc

SEQ ID NO: 20870 - DNA, 447 bp, Glycine max
  Clone ID: LIB3106-059-Q1-K1-F12
ctcaagttctcattcctctggagtctccttctctcagtttcactcttgggtgtgaagtcatgacatagccaccaaaatggtgggagaagaacaattcctccaacatgcaagcgcattgagtgccccacccatgatgtgattgaagtgggtgatggctatgaaatccgacgctataataataattcaactgtgtggatgtcaacttctcccattcaagacatttctctggttgaagctacaagaactggcttcaggagtctatttgattatatccaaggcaagaacaactacaagcaaaaaattgagatgacagcgcctgtgatcacagaagtttcacctagtgatggacccttttgtaaatcctcatttgttgtcagcttctttgtgccaaaattgaaccaagcaaacccttcttctgcaaagggtctccatgtccaaagatggaac

SEQ ID NO: 20871 - DNA, 453 bp, Glycine max
  Clone ID: LIB3106-059-Q1-K1-F2
cggaaatcatcaggatcaaagaaggataacatagaaactgaatctgcatcagaggaaggcggggcaaagtctgatactgaagatcccaaggctgcagaggaggagaaaaatgaaggaaatgataactctaattctggaggaaagcaacttgagaatggagataaaactgaacaaattgatgaacaggccaagaagccagatgtagatatggaagaaaatgatctgaatgatacaaacaataaattagaaaatgattcacatgaaattaagaacagtcatgtgaaccgcgaaaatgtgattgctgaaaagcctgaaagtgaagaagctcaaaagcaagaagttgaaccagcagagaaagttgccgaagaagctgctaatactgcggagactgaaaaatccctactgactgaattagaaaaagaaaagaatgaggagaaaacagatactgcgact

SEQ ID NO: 20872 - DNA, 60 bp, Glycine max
  Clone ID: LIB3106-059-Q1-K1-F3
gcgaaaagcaatagaatttataagagagagtatcttgtcctttatttcatgatatgatca

SEQ ID NO: 20873 - DNA, 453 bp, Glycine max
  Clone ID: LIB3106-059-Q1-K1-F4
cccacgcgtccggcgaaggtggtctcacttgactcgattgcacgtgatccacgacacactgtgcgcttggcaaaagcttcgaatccacttcctcagtaacatctgcaagaagtcttgtccttcaccatgccaccaaagcctttagactatgggtccataaatgaaaacgtgtagaagagtcaatatgctgtcagaggtgaatcataccttcgagcttctgagcttcagaaagagggcaaaacgattatatttactaatgttggcaacccacatgcattgggacagaaaccactgagcttccctcgtcagggtgatgctttgtgccaagctgcattcctacttgatgatcctaatgttggactgctattccctgctgatgcaattgcaagagctaaacactatctttcattgacactgggcggtttaggcgcttatagtgactcccgcgggctt

SEQ ID NO: 20874 - DNA, 449 bp, Glycine max
  Clone ID: LIB3106-059-Q1-K1-F5
gtagttgagaactaagaagaaggaaatggcttcctcaatgatctcctccccagctgttaccaccgtcaaccgtgccggtgccggcatggttgctccattcaccggcctcaaatccatggctggcttccccacgaggaagaccaacaatgacattacctccattgctagcaacggtggaagagtacaatgcatgcaggtgtggccaccaattggcaagaagaagttcgagactctttcctacttgccagacctcgatgatgcccaattggcaaaggaagtcgaataccttctaaggaaaggatggattccttgcttggaattcgagttggagcacggtttcgtgtaccgtgagcacaacaggtcacctggatactatgatggacgctactggaccatgtggaagctgcctatgtttggctgcactgatgcttctcaggtgttgaaggagc

SEQ ID NO: 20875 - DNA, 444 bp, Glycine max
  Clone ID: LIB3106-059-Q1-K1-F6
gtttgttgtgagctataagctagtttatcgtgaggagaatatgaagttgtttgttttcttggttgctgcagtagttttggtagcatggccatgccatggcgcaggctaccaaaggttccctctccgaatgaaaactggctatggtgagcgttcttcggaggtaaaatgcgcaagttttaggcttgctgtggaagcacacaacatccgagcctttaaaaccattcctgaagagtgcgttgaaccaacaaaggactacattaatggcgaacaatttagatcagactctaaaacagttaaccaacaagctttcttttatgctagtgaacgcgaagtccatcacaacgacatatttatattcggcatagataacaccgtactctctaatatcccatactatgaaaaacatggatatggggtggaggaatttaatgaaaccttatatga

SEQ ID NO: 20876 - DNA, 414 bp, Glycine max
  Clone ID: LIB3106-059-Q1-K1-F7
cccacgcgtccgcccacgcgtccggtccagtagcgtccatcgtagtatcctggaccatgtggaagctgcctatgtttggttgcactgatgcttctcaggtgttgaaggagcttcaagaggctaagactgcataccccaacggcttcatccgtatcatcggattcgacaacgttcgccaagtgcagtgcatcagcttcatcgcctacaagcccccaggcttctaagtgtgaaaaatttgcaaagcatttgtagccgccaccccactttgtttgtttgtacttaaactacattcccatttgtttttgctttttgagatttcatcatcctgtatttttggtttctgttttcggacttcaatggaaattaatggatgagaactaatgaataagctattgtgttgtgttgctttgtttc

SEQ ID NO: 20877 - DNA, 441 bp, Glycine max
  Clone ID: LIB3106-059-Q1-K1-F8
cccacgcgtccgaaaaaaagtattgataatgtttctcagtgcttttccacgagagtcacaagtaacatacgtacaatgctcagaaaacgaaaatcctagagtaaactctcacttcaaacattcttatccaattttccactcaaattcccaaagagtttgtttcccaatttttccttaatcattgtctatctcagcaagtcactaaatctgtgtccccgtggcatgcattttataagccaccaccctcaactcagtttcactcacattttaattcaaaccacaccactccttcctttccaggtcctccaagtgaccttcttcattctctccatatgctttttccttgttttcattttttctcttttgatcatttcttgttgtggggttggaagaaggaggctatgtttttatttttattttaggctgtagaatacatacaaa

SEQ ID NO: 20878 - DNA, 449 bp, Glycine max
  Clone ID: LIB3106-059-Q1-K1-F9
gtgaggataaaaaatggctatggccacagctgtcgtgtgtcctcagaacatcgccggagccatcgtgagctcacctagcaagaccaagaagagagtggtacacgtgagaggcataaattcatttgggggactgaaggctagcaatggtgttgtctctttggggattcctatgagcactgagaagtgctttgctaaggttgtgagctcagtgaaagcagctacatcaaatgggaaaggaaaaggaggggctctttcttccacgtgcaacgctgctggtgagatattcacgattgctgctatcatcaatggacttgttcttgtcggggttgctgttggctttgtgctcttgcgagttgaagcatgggtcgaggagtccgaagcagagtgaaaattcaatcagataagcaagcaattaattaatatccagaatagttgtatgttcctatatt

SEQ ID NO: 20879 - DNA, 456 bp, Glycine max
  Clone ID: LIB3106-059-Q1-K1-G1
aattactactttctctctctttgtaacttgtaagcatggagtcctcaaagatctatgcttagctcttcctttgcatgctcttcgtctcctccgccactcccattctcggttgtggctactgtggcaaaccccccaaaaagcacaagcctggtaaaacaccaaagacacccacagtacccgttgttaagccaccagtcacaatccctcccattgttaagccaccagtcacaatccctcccattgttaatccaccagtcacaatccctcccattgttaatccaccagtcacaatccctcccattgttaatccaccagtgacagttccacccgttgtgcttccaccaatagtgaagcccccgggttttctccctccaattcttaacccaccaagtacaccaacaccgtcgccggggaaaggaaggaacactccatgtccaccaccaaagtctcctgcac

SEQ ID NO: 20880 - DNA, 148 bp, Glycine max
  Clone ID: LIB3106-059-Q1-K1-G10
tgtagattccctctagactttcagaattgtgtttctgaaagtaatgaaattactttttcaggatatgactaatgattttcatgttgaatacaggttgacacctttttccattgaataaattgaaagctgcgcttgcttattactttct

SEQ ID NO: 20881 - DNA, 406 bp, Glycine max
  Clone ID: LIB3106-059-Q1-K1-G12
ggagagaactttaaacagtgtgtttaaaatgttggtccttgttttcttcgttgcgacaatttgggtagcatggcagtgccatgcgtacgatatgttccctctccgaatgaacactggctatggtgcccgtactccggaggtgaaatgcgcaagttggaggcttgctgtggaagcacacaacatctttggctttgagaccattcctgaagagtgcgttgaagcaacaaaggaatacatccatggcgaacaatatagatcagactccaaaacagttaaccaacaagcttacttttatgccagagacctcgaagtccatcccaaggacacatttgtgttcagtatagatggcaccgtactctctaatattccatactacaaaaaacatggatatggggtggagaaattt

SEQ ID NO: 20882 - DNA, 430 bp, Glycine max
  Clone ID: LIB3106-059-Q1-K1-G2
gaaaaaagcgatcatagtttcacttcggccttatccagtttagggtttcggttctctacccgatctttcacgtatcgaaaccttaaatttacgatcaggtctgagcaatctggttggtagaacctttggtcttagtgagtcaagttttatgtctgaattagacgatcaaattcctactgccttcgatccttttgctgatgcaaatgctgatgactcgggtgctgggtcaaaggagtatgtgcatattcgtgtacagcagcgaaatggtaggaaaagcctgacaaccgttcagggattgaaaaaggaattcagctataacaagatacttaaagacgtcaagaaagagttctgttgcaatggaacagttgttcaggacccagaactaggacaggttattcaacttcaaggtgatcagaagaagaatgtttct

SEQ ID NO: 20883 - DNA, 414 bp, Glycine max
  Clone ID: LIB3106-059-Q1-K1-G3
cccacgcgtccgcccacgcgtccggcaagctcttgttgaaagagtgatggtaactcgacttgacctttatggtaaatgggtcaagaaatgtaaccatgctgagatatatcaagaaatctctgatgaaaacttggagttaatgagggaacggctcatggagacagtaatatggcccacagatgacacaaacacagaaaagattggttgataattcatctcaaatttttactttgtcttccaacctcttcctagtctaggtatattttttgtttcaatatcaatctgtcttgtttccaaaattgtcatttgtgtcattttcctttaataggattctcagttttatgttatgtaaattatgtatatatatgtaccttgttaaatacacaatccattatgtatcgctagtttcagatg

SEQ ID NO: 20884 - DNA, 400 bp, Glycine max
  Clone ID: LIB3106-059-Q1-K1-F10
ccactgttgtttgccacatagttctgagttttataggacaaaaaaaatgacagaagaacttgccaaatctgatgagtcagaatgagtaacaccaccacctgctgctgctgctccttcacaagttcctactgctgctgatgctgaacatgttcctgaggctccaaaggatgtgactgatgataaatctgtaattccagtgcctacttctgatgacaagcctgatgaatccaatgctcttgtcttggttgagaatactcaagaagttgctgaagtgaaaccaactgaaggctctatcaaccgatatgcggtgcttgcaagagttgcaactgagaataagttgtcattaatcaaatcatggtaaaaaagttaaatatcaaaaactgtatacaaggcttacata

SEQ ID NO: 20885 - DNA, 452 bp, Glycine max
  Clone ID: LIB3106-059-Q1-K1-G4
cttttcttcttcttcgctccgtgccatgtcttcctctctcgctcttccttccactcccttcgtcgccaatggaacaagaatcttcgctctcaagcactctctccctcgctctagggtttccatgagcgtctccgctggatctcaggcttccgttcaccaggctttgttcgccgattacaaggcctccacttcattcctcttcccgggccagggtgctcaagctgttggaatggggaaagaagctcaaaatgtgcctgctgctgcggttttgttcaacaaggcaaatgacattttggggtttgatcttcttgatatatgcatcaatgggccaaaagaaaagttagattccaccgttattagccagcctgctatttatgtcacacgtcttgctgctatagagctacttcgtgcacgtgaaggaggtcagcagattattgactcagttgatgtta

SEQ ID NO: 20886 - DNA, 449 bp, Glycine max
  Clone ID: LIB3106-059-Q1-K1-D7
ttctaacaagcaatggctatgagatcgtgggtgagtcgaggaggatccatgactcgtttgatggactcaacaaatcgaggggctttgagtcggttcttgagcgacaagggtcgcattctcagcgaggaggaacaggccaaagagaatgtctacatccagaaatgggagagggagaggttggagaaacagaagcaactgtctgagaaggccaaggctctcacggacaaagatgcttctgctgctgctcataagaaacctgaaggtgctcaaaaggactgagtttatctttcacacaacccgtcaaggtcactttgtgggaaataagcatggagaataaaacacattgaccctgagtgaactttggtctttgtatagattgtgtttcttgtttatttgtagtttcgtgacggatgaaaccatgccattgcatccaccaaacttggtacgtt

SEQ ID NO: 20887 - DNA, 194 bp, Glycine max
  Clone ID: LIB3106-059-Q1-K1-D8
tcaccttattcatcccttttatccaaatcacaacaacttctctccccatacctacattatcaaatacttcccatacactgaaactgatcttatattaacataatttcacccctacattcaatatcttctttacaactcattctataattaataacacatataatcatttaaataccacaacaaacctatcatct

SEQ ID NO: 20888 - DNA, 419 bp, Glycine max
  Clone ID: LIB3106-059-Q1-K1-D9
agaagttattgagtgcttgtacttaaattgaattctgcataaggctttaaagagttgattgaaaaaaaaaaaaaaaaaaaaaaaaaaaaaaaaaaaaaaaaaaaaaaaaaaaaaaaaaaaaaaaaaaaaaaaaaaaaaaaaaaaaaaaaaaaaaaaaaaaaaaaaaaaaaaaaaaaaaaaaaaaaaaaaaaaaaaaaaaaaaaaaaaaggggggccctttaaaaaggacaaaatttaacatacccttctttcaaattaaaaacttttttaaaaggggcccaaaattaaaataaagtggactgtttttaaaaacttaggaattgaaaaaacctttagttacccaaataaaaagccttggaaaaaaatccccttttaccaaattgggaaaatcctaaaaagccctaaacgattggcctttc

SEQ ID NO: 20889 - DNA, 418 bp, Glycine max
  Clone ID: LIB3106-059-Q1-K1-E1
cccacgcgtccgcccacgcgtccgaaaagagttctttcaaaatgcaaacagccttaaccttggctgcccccaacgttgtgccattggcacccacaaagagtgtctcccatattaccatctttcccaccaaattgaaagccccgcgctcctcacctcgttactctccgattagggttgcaaccgtggagcccgacacttcaactgtcgactacaactctgcgttctcagtgtttcctgcagaagcatgcgaaactgtaggaggggaagcctgcatggcggagatgtaccctgaaacgaagctacagccagaggctaagactccacgagtcgttacagagaacgttgagagagagtatcttgaatacgatgatcctaaaacggtatttcgaggagaggcttgtgatgatcttggaggaac

SEQ ID NO: 20890 - DNA, 441 bp, Glycine max
  Clone ID: LIB3106-059-Q1-K1-E10
ccacttttgagtgccacagagttctgagtttcataggagaaaaaaaatgacagaggaacaaaccaaaacggttgagtcagaatcagtaacaccaccacctgctgctgctgctccttcacaggttcctcctgctgctgaggctgaacatgttcctgaggctccaaaggatgtgactgaggagaaatctgtaattccagtgccttcttctgatgacaagcctgatgaatccaaggctcttgtcttggttgagaagactcaagaagttgctgaagtgaaaccaactgagggctctatcaaccgagatgcggtgcttgcaagagttgcaactgagaagaggttgtcattaatcaaagcatgggaagaaagtgaaaaatcaaaagctgaaaacaaggctcacaaaaagctttcatcagtttctgcatgggaaaacaagtagaaagc

SEQ ID NO: 20891 - DNA, 391 bp, Glycine max
  Clone ID: LIB3106-059-Q1-K1-E11
cccacgcgtccgcccacgcgtccgcccacgcgtccgcttacacatcgcaaacgccaacctagaaaaaaaaaaaaaaaaaaaaagaaaaaaaaaaaaaaaaaaaaaaaaaaaaaaaaaaaaaaaaaaaaaaaaaaaaaaaaaaaaaaaaaaaaaaaaaaaaaaaaccaaaaaaaaaaaaaaaaaaaaaaaaaaaaaggccccccttttaaaaaaaccaaatttaacacccccaaaaaacccccatcaaaccccccaaaaagaacccaaaaaaaaaaaaaattaacaggggttaaaaaactaaagaaaccgaaaaacccgtgcgctacccaaccaaaatcccattgaaaaaaaaccccttttaaacaaatgccaaatacccaaaaagccccac

SEQ ID NO: 20892 - DNA, 115 bp, Glycine max
  Clone ID: LIB3106-059-Q1-K1-E12
aaaaaaaaaaaaaaaaaaaaaattaaaaaatttaaaaaaaaaaaaaaaaaaaaagaacaaaagataaaaaaaaatacaaacttacgtacacatacttacaacatcatacttactt

SEQ ID NO: 20893 - DNA, 421 bp, Glycine max
  Clone ID: LIB3106-059-Q1-K1-E2
cccacgcgtccgcggacgcttgggcggacgcttgggcgatataactagaaacagtctgatgggaattaaggtacttgctttcgtcgttgctacaattttgttagcatgtcaatgccatgcgtacgatatgttcactgtccgaatgaacactggctatggcgcccctactccgtgaagtgaaatgtcgcacgttggaagcttgctgtggaagcacacaacatcttctgctttgagactaatcctgaaaagtgcgatgcatcatcaaatgaatacatccatggcaaacaatatacatcatactttcaaacagttaaccaacaagcttacttttatgccatagacctcgaaattcattctaaggacacatttgtgtttagtatatattgcaccgtactctctaatatcacatactacgaaaaac

SEQ ID NO: 20894 - DNA, 452 bp, Glycine max
  Clone ID: LIB3106-059-Q1-K1-E4
cccacgcgtccgcccacgcgtccgcccacgcgtccgcccacgcgtccggccttgttgctgcgatggccagccacgcggctcttgcttctacaaggatcccttcaaacacaaggttcccatccaaggcctctcactctttcccaacccaatgcgccttaaagagacttgaggtgacagaattctctgggcttagatccacttcatgtgtcacatatgctaacagtgctagagaatcttccttttttgatcttgtagcttcccaactcactcccaagaccaatggatcaactcctgtgaggggagagacagtggccaagttgaaggtggcaatcaatggtttcggacgcattggtagaaacttccttcgctgctggcacggccgaaaagactcaccccttgaagtcgttgttgtcaacgacagtggtggtgtcaagaatgcttcgcacctgctg

SEQ ID NO: 20895 - DNA, 431 bp, Glycine max
  Clone ID: LIB3106-059-Q1-K1-E5
gatgaagccccctatgggtggtaagcctcctgtgggtaatgtccctatgggtaatggggctgtcgatgatgttgaatagtatgatgaatgctcagaaaggtggcaatggtggtggtggtaatgggaagaaaggaggaggtggtggtggtggaggacctgtgcctgttcaagtgcataacatgggtggtggaaatgagggtaaaaatggaaatggaggaaagaaaggtggcggcggaaataatcagaatcagggtggaggtaacaaaaacaacggtggcaaaaatggacgtgggatgccagagggttagaatggatacagcaaaaataatggtggtggtggaattccaaataacaatgtgaatggaggtaaaaagggtaataatggaatgggtgaaggtgttcaagctatgaacattgtttcaaacatggtt

SEQ ID NO: 20896 - DNA, 443 bp, Glycine max
  Clone ID: LIB3106-059-Q1-K1-E6
gcaccttccaagagattgctggaagcaaggacactgttggacagtatgagagtcacactggcttcacccttccaggactctaccgtgttgttcacggtattgatccctttgatccaaagttcaacatcgtctctcccggtgccgacatgagcatatacttcccatacactgaaactgagcgtaggttaacagagttccaccccgacattgaagagcttctttacagctcagtggagaatgaagaacacatatgtgtattgaaggaccgcaacaagccgatcatcttcaccatggcaagacttgaccgtgtgaagaacatcacgggacttgtggagtggtatggcaagaatgcgcgcctccgcgagttggtaaacctcgtggtggtggccggagacaggaggaaggagtccaaggacttggaagagaaggccgagatgaagaag

SEQ ID NO: 20897 - DNA, 427 bp, Glycine max
  Clone ID: LIB3106-059-Q1-K1-E8
ggaactccaaaaagaccctgaactccaagcttggtggaaagaacttgtagaggtgggtcatggtgatttgaaagataagccatggtggcaaaagatgcaaactcgtgaagagttggttgaagcttccgctatcctcatatggattgcttcagcccttcatgctgctgttaactttggacagtatccatatggaggtttaatcctaaacaggccaactattagcaggagattcatgcctgaaaaggggtctcctgaatatgatgcgttggctaagaaccctgagaaggagtttttgaagactattactggcaagaaggagaccctcattgaccttacagttatagaaatcttgtcaaggcacgcatctgatgagttctaccttgggcagagagatggtggtgactactggacttttgatgccggtcca

SEQ ID NO: 20898 - DNA, 446 bp, Glycine max
  Clone ID: LIB3106-059-Q1-K1-E9
cccacgcgtccgaattgcttctgctgaacgttatgacattgctgtatgtgctgcggattggcgtcttacggcgtttaaatcagttgatgatagtacaagattctggatcaagggttgaaggttttcagttcaaggtcttttagggaaagaaatgtgttccagtgcttttgttgatggaacaatggtgatttttcgtttggcaccacaggattatcaccgtttccattttccagtatcaggaatttttgagcaatctgtagatatccctggatgcttgtatactgtgaatcccattgctgtaaatagtaagtactgtaatgtcttcacggagaacaagagagttatttcaagaatttcaactgtagattttggaaaggtggcatttgttgcaataggagctacaatggttggtagcattacttttacaaagaaaaagggcgattatg

SEQ ID NO: 20899 - DNA, 453 bp, Glycine max
  Clone ID: LIB3106-059-Q1-K1-F1
aaatgagtcaaatgtcatctggaattgttggtgttggttatattggcaccaactatatggtgccattattactaccaccaccattttcttccttgtgttttaacacctttatcaaacacaagggattggtgttggatagtaatcataaaggaaggagaagaggacatgggattgtggcatctagcaacgttgcttcaccttccatatgggatgattggaaacctgtcaaagccccttccactccttccctcagtgacattctttggccctctgctggggcatttgcggcaatggcaatattgggaaagatggatcagttattggcaccaaaaggactctcaatcgcatttgcgccatttggggctgtttctactatcctctttgccacacccacagctcctactgcccggaagtacaatgtgtttatggcccaaataggctgtgctgcaattg

SEQ ID NO: 20900 - DNA, 451 bp, Glycine max
  Clone ID: LIB3106-059-Q1-K1-D5
agcttgcagaagcgatttctcatttctcattcttaacaacacacttcaacaatggccaaaagcttcaaatacatcatcctcggaggaggagtttccgctggttatgcggcgagggagtttgccaaacagggcgttaagccaggggagttggctatcatttccaaagaagcggtagcaccttatgaacgtcctgctctgagcaaggcttacctttttccagagtcccctgctagacttcctgggttccatgtctgtgttggaagtggaggggaaaggttgcttcctgagtggtacgcagagaaagggatagagttaatacttagcacagaaatagtaaaggtggaccttgcggcaaaatctctgatcagtgcgggaggagaaacattcaattatcagattttgattgttgcaactggctcaacagttataaggctgacagattttggtgtat

SEQ ID NO: 20901 - DNA, 436 bp, Glycine max
  Clone ID: LIB3106-059-Q1-K1-B9
caatggcttatatcaatggttgtgaagtccttaccttatctctataccaggaggaactgtcggaatgtatgaagcgaatgttgatgatgttggctataggctggtggccatttatactcctgtaagaaaggatggagtagaaggccattcaatttcagtatccacagagccaattgcagttgagcctgatgttcttaaagaagtgaaccagaaccttgaacttggatcagtgaagttagaggtattgtgtgacaaagaccaaactctcaaaaaagatttcatcagtgggcacatatgagagacgtatcctcgaaattaacaggaaaagagtcaaggtggtaaagcctgccactaagacttcttttccagctacagaaattcgtggtagttatgcccctccctttcatgtggagcctttgaagaatgatcaacacct

SEQ ID NO: 20902 - DNA, 454 bp, Glycine max
  Clone ID: LIB3106-059-Q1-K1-C1
cccacgcgtccgaacacaacaaacaaatgagctgccctgcgatggctcagttgctctcaagcgactctttattacaaacgcttctttccttattatgctttcaatgttttgggtggccttgacaatgaaggaaagggatgtgtcttcacatatgatgctgttggttcctatgagagggttggatatagctctcagggttctggatccacacttattatgccatttcttgataaccagctgaagtctcctagcccactcctgttacctgcgcaggatgctgttactccattgtctgaagcagaagcagttgatctggtcaaaactgtttttgcatctgcaactgagagagatatatacactggagataaagttgaaatcgtcgtcctaaatgccagtggtattcgtcgtgaatacatggacctaaggaaagattaatgctttacagaaatttact

SEQ ID NO: 20903 - DNA, 357 bp, Glycine max
  Clone ID: LIB3106-059-Q1-K1-C11
tcgcccacgcgttcgcccacgcgttcgcttccttaagctccttagtgctgctccttgcagctctggttctatcccctcaagttcttgcaaactatgagaatcccccagtgtacaagcctcccactgagaaaccaccagtttataagcccccacttgagaagcctcctgtttacaaacctccagttgaaaaccccccaatttataagcctccagtagagaagccaccagtgtacaagcccccagttgagaaacccccagtttataagcccccagttgagaaaccaccagtgtacaagcccccagttgaaaaaccaccagtgtacaagcccccagttgaaaaacccccagtgtacaagc

SEQ ID NO: 20904 - DNA, 460 bp, Glycine max
  Clone ID: LIB3106-059-Q1-K1-C3
cccacgcgtccgaagatccaaattctcgagtctcaaatcagtgaaaagttggaagaagtgaagaagaaggacaaaattatagcagaaaaagaaaattccattgaagataaatcaattaccatacaatccttgcagaatgagattgcttctctccagaaaaaagggtcactggatgctgaggagcaggttggaaaggctcatgcacgtgctggtgaactacagaagcaggtggacaaacttaaaagggaactagaaacacaaaacaaggagaaagtgaactgggaaactcgagtacctgagttagagaataagattcatgacttgaactcaaaattagaagatcttcaaaagataaatgaggaacagaagacaaaaattcaaaaaagtgaacgcgctcttaaagttgctgaggaagaaatgttaaaggcaaaagttgaggctactgccatagaaaaagagc

SEQ ID NO: 20905 - DNA, 429 bp, Glycine max
  Clone ID: LIB3106-059-Q1-K1-C4
tcttggtagagatttgaagtttaaaccttcaaattaatcataccattttaatttgcctttagattctgagtcactgctgctatggcgctacgcgtacttcttgtgttggggatgttgctgatgttgtgccttgttaaggtttcatctgatccaaagatagaagaagaaatactggaagcagatgaagaactgcagttttccgataacgagccacttatcgtgagagacgcgtacagaaggctaatgcaagatatggattgtggtgggttgtgcaagacgaggtgcagtgcacattctaggcccaacttgtgcactagggcgcgtggcacgtgctgtgtgaggtgcaagtgtgtcccacctggtacatctggaaatagggaactatgtggaacctgctacactgatatgaccacccatggcagcaagacc

SEQ ID NO: 20906 - DNA, 296 bp, Glycine max
  Clone ID: LIB3106-059-Q1-K1-C5
aaaaaaaaataaaaaaaataaattaaaaaatttaaaaaaaaaaaaaaaaaaaaaggaaaaaaagagaaaaataggggggccactttctaggctcccagagtatataatcgggcgtgcgacctcttgtatcttatttatcgtgccctatattcaaaattcatgtcctctcgctttccaatcgtctaaattgtgaaaactctggcgcttttcaaattattctgcttgtgaaacatctgccttttgccagatgtcgcgttatgcaaaagacccccgttgctctcgctttctaaaatttt

SEQ ID NO: 20907 - DNA, 432 bp, Glycine max
  Clone ID: LIB3106-059-Q1-K1-C6
gaaaaagcctgtgtttgcttatcgattgctggctcatggaactatggaggagaagatatataagcgccaggtaacaaaggagggacttgctgctagggtggttgatagacagcaggtgcataggaccatttctaaagaagaaatgctgcatctgtttgagcttggtgatgatgacaaccctgagactttggctgatctaagtcaagaaaatgagcatcaagacaaccctattttggttgggcattcactgaaacacacagcaccacattcaaatggcagtagttattctgataagttaatggaaagcttacttagcaagcatcatccgcggtggattgccaattttcatgaacatgaatccctgctacaagaaaacgaataggaaaagctatcaaaagaggagcaagatatggcttgtgaggtttaccagaa

SEQ ID NO: 20908 - DNA, 240 bp, Glycine max
  Clone ID: LIB3106-059-Q1-K1-C7
gaaaaagaaaaaagaaaataatgtctctagttactgcagagatcaaagccaaagcagaggtgtatcatggagatgaactctgccaagagaagtcaaagttgctgctaaaggaggtagggctacctaatgggcttttgccattgaaggacattgaggaatgtggctatgagagggatagactgtttatggaacttagtcagcacacattggttaccaatgcctttcaacacacttgaccaa

SEQ ID NO: 20909 - DNA, 441 bp, Glycine max
  Clone ID: LIB3106-059-Q1-K1-C8
ttctagatcgcgagcggcgccctttttttttttttttactataacaatcaataacgacaaggacattagcaaatatataaaaatccaaaaactccatcctcctccacaagaggcaaagtccaaaatagagctaatgctcctaacaaggtaaatccactggttccagaaaccgatttattcagacctctcattttttgcacgagcaagacactaaatcgcaactagacaagcacataatgtgtagacaagcaactttgcagtacaccaccttaaaaagacttcttggcaacgaatacaagcaggtcaatgacacgtgagctgtatccccactcgttgtcgtaccaagaaacaagcttcacaaagttcttattcaatgcaattccagcctttgcatcaaaaatacttgatctgctatcgcccacaaagtccgtggagaccaca

SEQ ID NO: 20910 - DNA, 440 bp, Glycine max
  Clone ID: LIB3106-059-Q1-K1-C9
cccacgcgtccggggaggtgcaacagcaaggggcgtttcactgattaaacttgttcctctggtccgcttttgcttcaaacactcctctgctctttcaaaaaccatttgttttcaggtttattcgacagaggcatcttctggcatagagagagtgacaaatcaagtcctgaaagaatttcttgccactgttgaaaatgcaccaacatccaatgcaaaagtctattacgcatatatcaataagatgtgcaagcctggaaatctttcagttgccagtaagatgctacaaattttaaatgataagagcattgctgttacccttaatgtgtataacttcatattagtggaggcaagtcagaagaatgacattgacctttcttgtcaagttttctagaaattattggtgtcttgtaaatccccaagtgcaacctcatgccttaagt

SEQ ID NO: 20911 - DNA, 420 bp, Glycine max
  Clone ID: LIB3106-059-Q1-K1-D1
cttgattccgatgcgaatggtaattgcagaaaccccaaccctcctttcctctccctcctcgtagatcgagtcagaatcatggccaaagctgaaggtggcaaggaaccaataaatgaacaagcagtagcaaatatgtatgctgcaatgaggtctgagctcaaccaaatttactccaaaataactgaactggagatggaagttagtgagcacacattggttaccaatgccattcaaccacttgaccaatctagacgatgctatcgtatgattggaggggtgcttgtggagagaaccatcaaagaggtcttgcctgctgtgcagcgaaataaagaaggactcgaagaggttgtggcaaggcttaacgaggcgttggaaaagaagaaaaaggaaatttctgagtttgaagctaattataaaatc

SEQ ID NO: 20912 - DNA, 449 bp, Glycine max
  Clone ID: LIB3106-059-Q1-K1-D10
cccacgcgtccgctcttcacagaaacatcgatcagcagaagaaagaaactacagaaaaaagagaaaagacatggcttccacttgtgcagtttcattggctatgccagtaacttatgccagccagaagagggtactggtgcctagctctgatgcattattcctcaagccactgcctctacgttcttattcttccaaggcaatggcagcatcaaaagtacccaatggaaggtttcaggtgagggcttccatgaaggagaaagttgtgacaggcctcacagcagctgcattcacagcctcaatgatggctcctgatgtggccgaggccgccgtttcgccttctctcaagaacttcttgctcagcatcgccgccggtggtgttgttgttgctgccattatcggtgcggtggtcggggtttccaatttcgatcccgtcaagcgaagctgatcga

SEQ ID NO: 20913 - DNA, 445 bp, Glycine max
  Clone ID: LIB3106-059-Q1-K1-D11
tgcaaagtttgtagacaaaggcgttcaagttaagcttactggtggaagacaagtgacagggactctgaaagggtatgatcaattgcttaaccttgtcctagatgaagctgtagagtttttaagagatcctgatgatcctctcaaaactactgaccagaccagaaatcttggcttaattgtttgtagaggaactgctgtgatgcttgtgtccccaactgatggtacagatgagatcgccaacccctttatgcagccagatgggtcctaagtgtgaagtatttgtatcttaaagtctgtatgctagctgatcaatacgtcatcgcttagctactgagacattaatgcggggatactgattaacgttttgtctattttgtaggcttggatatttattatatgctttggattaatagaatatcacccattttatgttattggtccgatg

SEQ ID NO: 20914 - DNA, 432 bp, Glycine max
  Clone ID: LIB3106-059-Q1-K1-D12
cggacgcgtgggcttttttgtgcacaacaatcaaacaaacaaacctaccacctgttcttctgtgtatttctatgctgtgtcaatttctcgtgccagttgagactcttgacaattacaactaccttggacattacctttgcttctgttctgtatttccatcatcgtcttcttcttccttacattctatcataataataataaactcattctacgcactcttgcattgcctccacctcgttttcctcactacgtctattatataaacctgataatggctgctgaagtatattaccaggctattggcactttgcagtcccattcttatctgaataatttaaataatcaccaaaaacatcaaaacaatttagtaagattggtggctagggattttatcagcagtaatggcttgtcaacgagaagaagtaaccgctc

SEQ ID NO: 20915 - DNA, 153 bp, Glycine max
  Clone ID: LIB3106-059-Q1-K1-D2
acaccaccaatccaacagaagatgtttctacacattgttttccttctttcccttgtgtcataggcttcttatgccagtgtccaagacttctgagtggcatacctcaatggtgcacacacccttttaggcttcccctgcatgtctcctggttat

SEQ ID NO: 20916 - DNA, 210 bp, Glycine max
  Clone ID: LIB3106-059-Q1-K1-D3
cccacgcgtccgatttctttcacacaaaaaaatctatttacatttaacgaaaaaaaaaaaaagaaaaaaggaaaaaaaaaaaaagaaaaaaaaaaaaaaaaaaaaaaaaaaaaaaaaaaaaaaaaaaaaaataaaaaaaaaaacaaaaaaaaataaaaaagaatgataaaaatttaaatataaaagaacataacttaaaaacagaaaata

SEQ ID NO: 20917 - DNA, 448 bp, Glycine max
  Clone ID: LIB3106-059-Q1-K1-B8
aacacgcgtacggtcgtcatcaacaactcgtagcagagatacaacatgcatatcaaaacagcgtctgtatgtcccaatcgagacagacatgggtaggaaggaagattttgagctgcatgctgagaaagcagagactgcgacactcgactcaatcaaactaagacttgcttatcctatatggatagtacaagcaggccaccgttggacctgtcaacaccagccgtacgggaatgttcaacatgagggacagagctaaatgggatgcatggaaggctgttgaagggaaatccaaggacgaagcaatgagtgattacatcactaaggtgaaacagctgctggaagcagccggcatgcctgcttgataacattgtcatgccttgctttcttattctgtgctagaagttcccaacagtttggaaataaacaattgcagtgtttgaagctttta

SEQ ID NO: 20918 - DNA, 58 bp, Glycine max
  Clone ID: LIB3106-059-Q1-K1-D4
cccacgcgtccggaaagataaaaagaactgttttatatttgaacggtggaaatgtttt

SEQ ID NO: 20919 - DNA, 456 bp, Glycine max
  Clone ID: LIB3106-059-Q1-K1-A5
cccacgcgtccggagaggagttagatgaactaaagaggaaacacaaactagctgtctcagagcttttgatggaaattcctccagaaatgtgccagaaggtcctaaatatatgcaacctgcagatgcctgacagtgaaatggccaggcttgcccttcattaatctaaatgccactttgtgtggtttatggtagtagttcacttagaaagctcattttaggagtgaaatttagaagttgtgatcttgcttgttgcttggaactgttgatattttgggtttcataattcatgcataagagggtaaatttttaatggcacaagtgttcttggtataatatatgttgtcaagaggaattgcagctgggttaactagggactgggaattggggactggggagtcatctttgcaggagaaatctcgttacggcataacgtcccaagagcttggaggacttaat

SEQ ID NO: 20920 - DNA, 449 bp, Glycine max
  Clone ID: LIB3106-059-Q1-K1-A6
gagataactagaaacagtgtgatgaaaatgaaggtccttgttttcttcgttgctacaattttggtagcatggcaatgccatgcgtacgatatgttccctctccgaatgaacactggctatggtgcccgtactccggaggtgaaatgcgcaagttggaggcttgctgtggaagcacacaacatctttggctttgagaccattcctgaagagtgcgttgaagcaacaaaggaatacatccatggcgaacaatatagatcagactccaaaacagttaaccaacaagcttacttttatgccagagacctcgaagtccatcccaaggacacatttgtgttcagtatagatggcaccgtactctctaatattccatactacaaaaaacatggatatggggtggagaaatttaactcgaccttgtatgatgaatgggttaacaagggcaatgcacc

SEQ ID NO: 20921 - DNA, 281 bp, Glycine max
  Clone ID: LIB3106-059-Q1-K1-A7
cccacgcgtatcgaccacgtttctcgaaaaaattataaaaaaaaaaaaaaaaaaaagaaaaaaagtgaaaataaaaaaaaaaaaaaaaaaaaaaaaaaaaaaaaaaaaaaaaaaaataaaaaaaaaaaaaaaaaaaaaaaaaaaaaaaaaaataaaaaaaaaaaaaaaaataaaaaaaaaaaaagggattccatttaaaggaaaaaaattttataattcttaaaaaggtatttattacctttaataaattacaccaaaaattaaaaaaaatgacgtttttt

SEQ ID NO: 20922 - DNA, 316 bp, Glycine max
  Clone ID: LIB3106-059-Q1-K1-A8
agctgctgttcttgcgcgtgaacaagcctcttgtaagccaaaaccatggttaagcataacgagtgttatcccaaacggacacttgcgtaagcactggcagaactatgtgaagacttggttcaatcagccagcacggaagacaaggagacgattggctcgtcagaagaaagctgtgaagatataccccagacctactgctgtacctctcaggcccattgtacatggtcaaactttgaaatacaacatgaaagtgagaggtgtacggttaatttatcttgattaactcatggttgtatgtcttaatagtcaatttgta

SEQ ID NO: 20923 - DNA, 211 bp, Glycine max
  Clone ID: LIB3106-059-Q1-K1-A9
gcatctcctatattattttcttagtgttctacctctctatgttgcttgtatggatatctacttgttgtatatggagcatttgtttttatgtacttggtctatatatacatttggtgataattgtctattttatctgcgtctgttctctttgctacatagactgatactttttgatattccccactatgtgcttcacacagtgtatgcccac

SEQ ID NO: 20924 - DNA, 408 bp, Glycine max
  Clone ID: LIB3106-059-Q1-K1-B1
cccacgcgtccggtgtaaagaaggtgtatattggggaactttagctggtgtttatcttggaatggaatatggggtagagaggatccgtggcaccagagattggaagaatgccatgattgggggtgcagtaactgcgactctgttatctgttgccaccaccaacaacaaagacaaaattgtacctgatgccattactggggcagcaattgctactgctgcagagttcataaattaccttacctgaatgaatgaaagtggatgtcttgctggttttcttgcatgttttggaaagggattgcaactcagcctcttttgtcatatactttgtaacggttccatcttgatattggtgcagttacttctaagatatgctatttatttaactttctataaaacctatgttttgat

SEQ ID NO: 20925 - DNA, 429 bp, Glycine max
  Clone ID: LIB3106-059-Q1-K1-B10
cccacgcgtacgacaaaagtggcagtattatgtggcatcaccgaagtgcagggagctgccaacagcgtcgagatcaacaatctcgctcgctttgctgtagaggaacaaaacaaaagagagaattcagttctggagtttgtgagggtgattagtgcacagcagcaagtggtttctggagtgaattactacataacattggaagcaaaagatggtgagattaaaaatgagtataaagcgaaggtttgggagagggaatcccaagagttgctagaattcatgccaacattaagtgcaggaggcgagatcgaccatctcgctcgctttgctgtagaggaacaaaacataagagatgaatgcaaatctggagtttgtgggggtgattagggcaaagcagcatgtggtggaagggttcatatactacatcacttt

SEQ ID NO: 20926 - DNA, 388 bp, Glycine max
  unsure at all n locations
  Clone ID: LIB3106-059-Q1-K1-B11
cccacgcgtccgcccacgcgtccgcccacgcgtccgaatccttcctcggactagctccgtctgcgccttccgcgcgctctcaatagaacacatctggtccctcgaagcccctctccgcgacgcccactggcgctccctctacggcctctcctaccctgtcttcaccaccgtcgtcgacaagctgaaaccccacatcgccctctccaacctttccctcccttccgactacgccgtcgctatggtcctctcccgcctcgcccacggcctctccgccaaaaccctcgcctaccgctactccctcgacccttacctcgtctgcaagatcaccaacatggtcactcgcctnctcgccaccaagctctaccctgaattcatcaagatccccgtc

SEQ ID NO: 20927 - DNA, 384 bp, Glycine max
  Clone ID: LIB3106-059-Q1-K1-B12
cccacgcgtccggatcggtgttcacttgatctcatcataatcgtcagcgtcaggggaagaagatgccgatcagagacatcgccgtcggaaggcctgaagaggcgactcaccccgacacgttgaaggcggctttggctgagttcatctcaaccttcatcttcgtgttcgccggctcaggctccggcatcgcctacaacaagctcaccgacaacggcgctgccacccctgccggcctcatctccgcctccatcgcccatgcattcgccctcttcgtcgccgtctccgtcggcgccaacatctccggcggccacgtcaaccccgccgtcaccttcggcgccttcgtcggcggcaacatcaccttcctgcgcggcatcgtctacgtca

SEQ ID NO: 20928 - DNA, 369 bp, Glycine max
  Clone ID: LIB3106-059-Q1-K1-B2
cccacgcgtccgaaaaaaataaaaaaaatattataaaaaatttaaaaaaaaaaaaaaaaaaaagggaaaaaggaaaaataaaaggcgacaaatttaaaaaataccaaaataaaatacacattcatacgaccggatcctttttatattccaggtttataactcattctactgaccttttattttcaacttaatgactctaaaaaccctgtcttttacccaactttttacaccttgcacctcttgaaaaaccttgtagttacccatttatctaattttcctttaaccaccttttttcataactatttattatctaaaatgcccaattccaaacccctttgcaaacctttattaaacctgaatggctaattg

SEQ ID NO: 20929 - DNA, 423 bp, Glycine max
  Clone ID: LIB3106-059-Q1-K1-B3
cccacgcgtccgggtggctattgggaaacatgagaaaagaataattgggacggaatccctgatatatttggacagagttgtgatttaccttcatgctcggaagagactgcatcctactgaatactggttttcttttttttcacagcccttaaaaatatcatgtcttgttaaatgtgaatttggttgtaggttgtaagttatataaagatcctttcaaaaagtgttaattccttttctggctgtgctgggcgtttatgggcatttgtcattaatctccgaaagtaattttatgttgatgcttactttactagtatattaataatatcaagttttcagacgtaagcaaaataaaagcaagccttaaagaatttaagctgttgaattaatctgttaggtaaaaaaagattttaaaagggcggccgc

SEQ ID NO: 20930 - DNA, 451 bp, Glycine max
  Clone ID: LIB3106-059-Q1-K1-B4
cccacgcgtccgcccacgcgtccgagctaaccgccaggcataccgtaccctccttgtgacagttccaggacttggtcagtacatctctggtgccattctctttgaggaaactctctaccaatccacaactgatggcaggaagattgtcgacgtgctcctcgagcaaaacattgttcccggtattaaagtcgacaagggtttggtaccccttgctggttccaacgacgagtcatggtgccaaggtcttgatggtcttgcctctcgctcggctgcatactaccagcaaggtgcccgtttcgccaaatggcgtactgttgtgagcatccccaacggtccctctgctctggcagttaaagaagctgcctggggtctggctcgctatgcagcaattgctcaggacaatggattggtcccaattgtggaaccagagatcttgcttgatggggagcat

SEQ ID NO: 20931 - DNA, 267 bp, Glycine max
  Clone ID: LIB3106-059-Q1-K1-B5
cgacaaacttggcaacaaagagcgccgggttgtggacggggtgctggaaaaagcacaagactgttcgataatccatttgtgttagggtttggtctctctctcatcccatctaacaccactgctatcagaataatcacacaccttaatagcaattgcgacacgccgaagcttcattcatactcaattcttcaccgacggcgacccatttcgatagatgcattgttaggaaactagggtttaaggaagcttttgctttggatcatattg

SEQ ID NO: 20932 - DNA, 444 bp, Glycine max
  Clone ID: LIB3106-059-Q1-K1-B6
cggcgagcttgatttctccaaccatgaagtgttttcgagtcccaacatgggtgagcttcccagcagcggttcaatggacagtttcttcgacgagcttctcaaggacacgcacgcctgcacccacacccacacctgtaaccctcccggccccgatttctcccacactcacacgtgctaccatgtccacaccaaaatcgtacccgaccctgaggaggaccatgtcgccaccgatgacaccgccgagtccgccgagaagaagtcgtcgtcgtcgaagaagcggtctctggggaacaaagaggccgtccggaagtaccgcgagaagaagaaggcgcgtgcagcgtcgctggaggacgaggttgtgaagttgagggctctgaaccagcactagatgaagaagctgaaggcgcaggcggctctcgaggccgaaatcgcgaggctcaagtg

SEQ ID NO: 20933 - DNA, 398 bp, Glycine max
  Clone ID: LIB3106-059-Q1-K1-B7
cgatggtgcagaggctcacttatcgcaagcgccatagctatgctaccaaatccgaccagcaccgggttgttaagacccctggtgggaagttggtgtaccagaccactaagaagagagcaagtggacctaagtgccctgtcactggcaagaggatccaagggattccacacttaagacctgctgaatacaagaggtctagattgcctaggaaccggaggaccgtaaaccgagcctatggaggtgttttatccgggggagctgttagagaaaggattattcgcgctttccttgttgaagagcaaaaaattgtgaaaaaggtattgaagatccagaaggcaaaagaaaagcaggcatcaaagaattaagcttgtgagttattcgtgagtgaaaaaaagatc

SEQ ID NO: 20934 - DNA, 453 bp, Glycine max
  Clone ID: LIB3106-059-Q1-K1-A3
catattctttgttgcaatatcacaaacacctcgtccgtcacaatgcagctagctgtggcgggcaacgctgtcgtttcaccgtcgccgttccgacctcatccccttctccggtcatccttctccggcgtctccgttaagctcactccccaatccataacgttttcacgcttgaagcccctcaccgtcttcgccgccaccaagaaggccgtcgctgtcctcaaggggacctccgccgtcgaaggcgtcgccactctcatccaagaagacgatggcccgacgacagtttctgttagcatcactggccttactccggggcttcatggttttcacctacatgagtatggtgataccacaaatgggtgtatatcaacaggagcacattttaatcctaataacttgacacatggtgctcctgaggatgaagtccgtcatgcgggcgacctgggaaacata

SEQ ID NO: 20935 - DNA, 195 bp, Glycine max
  Clone ID: LIB3106-058-Q1-K1-H1
gaataataaggtttcattgctaactatatattttggaagattttggactattatttatgttgtggaattgagatttgtgcctaaagtttaatcgtatttatagctttgtaatgggggtgtgtcacggcttcatatgtctgtagctcttttgtctttttattcaagttgattgaattgatgagatttcagtatttg

SEQ ID NO: 20936 - DNA, 367 bp, Glycine max
  Clone ID: LIB3106-058-Q1-K1-H10
ggaacattacaagagtctgtgcatcggttaacccaactgcacaggtagtgtccaaatgatggagcctcatgaggagactggatgccaggctcctgaacgccccattctttgcattaataattgtggcttctttggaagagcagctaccatgaacatgtgttccaagtgttacaaggacatgctgttgaagcatgagcaggacaaatttgcagcatcatccgttgaaaacattgtgaatggcagttccaatggcaatggaaagcaggctgtggctactggtgctgttgctgtacaagttgaagctgtggaagtcaagattgtctgtgctcagagttctgtggattcgtcctccggtgatagtttggag

SEQ ID NO: 20937 - DNA, 404 bp, Glycine max
  Clone ID: LIB3106-058-Q1-K1-H11
cccacgcgtccggagtgcgttgaagcaacatttgaatacatccatggcgaacaatatagatgagactccagaaacagttaaccaacaagcttacttttatgccagagacctcgaagtccatcccaaggacacatttgtgttcagtatagatggcaccgtactctctaatattccatactacaaaaaacatggatatggggtggagaaatttaactcgaccttgtatgatgaatgggttaacaagggcaatgcaccggcactgcccgagactcttaagaattacaacaagctggtgtctcttggcttcaagattatattcttgtcaggaagaacactggacaaacaggccgtaacagaagcaaacttaaagaaggctggctaccacacatgggaaaaattaattc

SEQ ID NO: 20938 - DNA, 428 bp, Glycine max
  unsure at all n locations
  Clone ID: LIB3106-058-Q1-K1-H12
cccacgcgtccgctcagaaacgttcctgttgttggaggctgcagaagaaacaagcgtgtagagcgtcctataacaagcccttgttctgccgccattgacactgcttctaattcttctaactcttcttctgctcccactgctgctgcttcactacaaccccagatcgacactgcttcaacctcaaatcacatcaaccctttgttctatggattaccaagtagctctagcgatgtgaatcttccattgttctctaggttcggttctagaatctccagttccgggtttgatcttcagttgaataatgccctcggattaagtttttcatcccgggttttgtccaatgaagctagtgataataaccgttacagaagcgggtttggttcaaacaatatgcttctttcaagttatacatncactactactactac

SEQ ID NO: 20939 - DNA, 386 bp, Glycine max
  Clone ID: LIB3106-058-Q1-K1-H3
gtgaatccatgaccgtgaccatggcggctgcttttacaagtacaagtgcaacactgagactggcaaatgttggagagagcagaggtttgcagctgcgtaagtgtaaccctaatcctaataagctgaaggttatgggggggtttggaggttgttctggagtggcagtgggtgtgagagaaagaaaaggaattggaagggttagggttcgggttcgggcgagttcttcgtcggacgaggcagtgagtgcgcagtcaaaagtgactcagaaagtattctttgacgtcagtattggaaatccagttgggaagcttgtgggacgtattgtgattggactgtacggcgacgatgtcccccaaacgggcgagaactttcgggccctttgtact

SEQ ID NO: 20940 - DNA, 323 bp, Glycine max
  Clone ID: LIB3106-058-Q1-K1-H4
gcgtcacgactagggataactgaaccgacttcgaataatacctcagccatggtgcacgtagtcttatagaggaactatggtaagacattgcagaatccgcgtcgttcgtactagaaggatcgtatcgacgcggagttgaagctggttggtgagtacgggcttcggtgcaagagagagctgtggagggtgcaggacgcgctctatcgaagtacgaaacatcgcgcggaacctattcaacctcgacgagaagaactcgcgccggatctttgagggagaggggctgctccgaacgatgttccgttacgggaatactcgatgagaca

SEQ ID NO: 20941 - DNA, 244 bp, Glycine max
  Clone ID: LIB3106-058-Q1-K1-H5
aattccaaagggcacaggcctaccacaaacaaaccaccactaaaaaatcccccaaattataaccctactactcacaaacctccatcataaaacccatcaactaaaaaacctccaaaacataacccaccacattcacaaaccaccaacaaaaaaacccccatcttataaacccacattttagaaaccaccaaaatacaaacccccattttaaaaaccaccacaatacaagcccccatcagaaaaa

SEQ ID NO: 20942 - DNA, 447 bp, Glycine max
  Clone ID: LIB3106-058-Q1-K1-H7
cttaattcacaccactatctaatttagagcctgtttggatgcaaagtagagaaggacccctggtgggcaaacttaacgaatatcccaggaatgaggaatgaaatagcttctgctatctactcactcttgccactgagagcttttgaaagtttcaaactctcaaaagcacgcacttatgacttatatccaaaatttctctactggaaaaagtttctctcaaaatcgtttgtaaatatggcacttaaccttcttaagctcatctccctggcaatcaaaatgagcattacaaaaagacccttaatttgaagaagtgggtcccattaacaagacctcgtacccatgttgttttgagtttgattcagcgacagaaagcaacataattatgctcccaaacgatgtcatttcctccggtgaaaaatactcgtttttgatttcaaagtgcattac

SEQ ID NO: 20943 - DNA, 322 bp, Glycine max
  Clone ID: LIB3106-058-Q1-K1-H8
acagcgcacacttggcagaactgaagcgacttagaattatacctcagccgtcgttcacgtagtcctatagaggaactatggtacgacattgcagaatccgtgtagttcatactagaaggatctaatcaatacgaatttgtatctgaaaggtgagtacgggcttcggtgcaagagagagctgtggagggtgcaggacgcgctcagtcgaatacccaacatcgcgcggaacctattcaacctcgacgagaataactcgcgccagatcttctaaggagactcgctgctccgaaagatcgttccgtacgggaaaacccatgagaca

SEQ ID NO: 20944 - DNA, 313 bp, Glycine max
  Clone ID: LIB3106-058-Q1-K1-H9
gagaatcttgagaggttctatagagtcagaactcattcactgtagatgggccatgcttgcttgtccaggtattttggttccagaggcattgggcttatgcaactgggtaaaggctcatgaatgggcagcagttcctggggtccaagcaacctacctaggctatccagttccatggggcaccctacccaccattctggccattgaataccttgctatttcctttgtggagcaccaaatgagcatggagaaggacccagagaagtagaaatacccttatggtgctcttgatcctttgggatactcttaggaccct

SEQ ID NO: 20945 - DNA, 460 bp, Glycine max
  Clone ID: LIB3106-059-Q1-K1-A1
tttaaatggtctttctggtggatgcatttagtagggaaattttccttttttgtttgtaatggctgtagatgagagaactctacaactggcatgatgttgccaaaaggactgaaattgtatatgatcgtgctttcaagtgctccaatcaaaatctacttgaacgtctctcacgatacctcttttgtggagcatgggcgggcaagctgtttttcttggttatgattgttggattcttgttatggcagctattggaattatggcagcctgcagatgatatagaggaggtaccagatttcactcttccatgcagctgtgatgaagagatgttggagaaaaactcagtgaaatgagtaatgtgataaattattttggtgaaccatggagttaatgttttgcagaatatcaaaagaatacaagtgctggtaacactaatccaagttcccagatcttgaaatggaga

SEQ ID NO: 20946 - DNA, 423 bp, Glycine max
  Clone ID: LIB3106-059-Q1-K1-A10
cttgttctcattttgcccccttttttcttctgctctcccgaatcagaaacccgaatcattggttgggatttcagaggaaagaaatttaaacagagcacgaagatgaagggtctcttcaagtccaagcctcgcactcctgcagatgtagtgcgccagaccagagatcttctgctctttgttgatcgcagccccgaaacccgcgaaagcaaacgtgaagagaagatgtccgagctatttaaaaatatcagggagctaaagtcaatcctgtatggaaatagtgaatctgaaccagtgtctgaagcctgtgcgcagttgactcaggagttctttaaggaggatacgttgcgactgcttatcaagtgtcttccaaaattgaatttggaggccagaaaagatgccactcaaggttgtgcaaatttacaa

SEQ ID NO: 20947 - DNA, 446 bp, Glycine max
  Clone ID: LIB3106-059-Q1-K1-A11
ctgctacttactactatagtgtctgattcacaggccagagggcaaagattttgagcacaatggcctcgacacagtgctttttgcaccaccacgccctcaccactccagctagagcttcaacacagcgcctagttgtgagcaccaaaccaaaccacattgtttgcaaggcagcacagaagcaggttactgtccaagagggtgaggacactactactggccttgtctctcgcaggttggccctcactgtgctcattggtgctgctgctgttggctctaaggtggcacctgctgatgcagcctatggagaagctggtattttacccttttgccccttctttagatgaccaactgatgattgtcatgcatgactcatattcattcagaacctcaatcgtgcagataattgaggtcaaatatggctaatatggcttgcaaactttgtttgg

SEQ ID NO: 20948 - DNA, 389 bp, Glycine max
  Clone ID: LIB3106-059-Q1-K1-A12
ggaacaagggcgcataatttattaaagccacgaaagagaaaacggcgatagtgaagtctcttacatgacttgttgacacacagctgaaacaacataaagtgaagctagtgcccctatttgaacgcatcttattacatatagatagataggagcaagctagattgttgagaggtgaaggaactactgaatgtagtacaggggattaggaagcttaaaggtcctgctttcgcctctgtggcctccgaggagatcgctccattggtctccaatgatcccaacaatgttgtatccctgccttatcagtttctctctcgctgctgttttgtatgaaactgcatttggagtggaaagatcttgtggatccttgagaattaatttttcccatgtgt

SEQ ID NO: 20949 - DNA, 445 bp, Glycine max
  Clone ID: LIB3106-059-Q1-K1-A2
cccacgcgtccgggagtacattgtttagatgcaaacaaatatattggggatctcctggcagaatttaaagctgcaaaggatcggagtaaaggagaaatcttgcactgtaaactgatattcaagaaaaagttatttcgtgagtcagatgaagctgtgacagagcctatgtttgtgcaattatcttatgtacagatgcaacatgattatattttgggaaattaccctgttggaagggatgatgctgctcagctttctgccttacaaatcttagctgagattggatttcttagcacaccagaatcatgcattgactggaattcacttctggagcgtttcctgcccagacaaatttcaatgacacgagcaaaacgggaatgggagtatgacattctttctcgttatcgctcattggagaatctgacaaaagatgatgcgcgacaacaat

SEQ ID NO: 20950 - DNA, 185 bp, Glycine max
  Clone ID: LIB3106-058-Q1-K1-F2
gccagcctattagaaatacaggcaaaaatgataactaaatgagcagcagctggcgactctgtgaagttcaaaggctgtgaacgaatttcttgagcatcagaaggaaaatataacaaatttgataaaacagagtctggcagattttcacgcctatatatatcaccaactgccgttctagatcgcga

SEQ ID NO: 20951 - DNA, 334 bp, Glycine max
  Clone ID: LIB3106-058-Q1-K1-F3
gggcgtgtgaaaaactgccatgatgtgttagtttcgaaagcaattgcagcaacgatcccaatgcttttggaagctttggcgccacaatgggtagctctctttttgcatccatgtcttaactcggggtgatttctttatctttttcccaaggatgtgtagggcgttatgcaataaaagctgaactagtttatctacgtaactttaaaatgtgattcagtggatattcgtttgttaaaaaaaaaaaaaaaaaaaaataaaaaaaaaaaatataaaaaaataacaaaaaaaacaaaaaaattaaaaagaaagaatatattgctaaaaattaaatttt

SEQ ID NO: 20952 - DNA, 333 bp, Glycine max
  unsure at all n locations
  Clone ID: LIB3106-058-Q1-K1-F4
accacgcgtccgcccacgcgttcgatgacattgtgctactttgtctagggctagcagcactgtaacctcgactcacctctacgaaatccggaccctctttcaaaccttttatttttccaccaaatctgcgatggcaacaacatcggaggtgccggcgaaccggcgtcgcgcggcgaaccccgcggaggagatggacttcgagacgacggatggcgtgaaggccatcgcaagcttcgaggagattgggatcaaggacgatctgctccgcggaatctaccagtacggcttcgagaagccctncgncattcagcagcgggccgtcacgcccatcat

SEQ ID NO: 20953 - DNA, 417 bp, Glycine max
  Clone ID: LIB3106-058-Q1-K1-F5
aacaaatcaaagccatggccacctccaacttctctattgttctctccgtctccctagccttgtttttggtgctacttaccaaggcacactcgaccgataccgtttctttcaccttcaacaagttcaacccagtccaaccaaacattatgctccaaaaagatgctagtatttcatcctctggggtgttacaactcaccaaagttggcagcaacggcgtgcccacctcgggatctctcggtcgtgccctttacgctgccccaatccagatttgggacagcgaaaccggcaaggtagccagctgggctacatcctttaaattcaacattttcgcacccaacaaatcaaactcagctgacgggcttgccttcttcttggcacccgtcgggtctcagccccaatccgacgatggatttcttg

SEQ ID NO: 20954 - DNA, 253 bp, Glycine max
  Clone ID: LIB3106-058-Q1-K1-F6
gttttgattcagtcagagtacttacgaagtttatgttcttgcgtgcttcgcgtggacctttgatcctatctgtcatgagctgcaggactagcataacccgttggatttattagatatgcatttgaggtttgcaatattttcaaatctatatatacaccacctggcgcgtcaaacccgcgagcaggcgatctagatcatcacaactgacggcctctttgctgctacaagcttccatgagtatggcatcaacgac

SEQ ID NO: 20955 - DNA, 437 bp, Glycine max
  unsure at all n locations
  Clone ID: LIB3106-058-Q1-K1-F7
gtcaggaagaacactggacaaacaggccgtatcagaagcaaacttaaagaaggctggctacgacacatgggaaaaattaattctcaaggatccacaagatccttccactccaaatgcagtttcatacaaaacagcagcgagagagaaactgataaggcagggatacaacattgttgggatcattggagaccaatggagcgatctcctcggaggccacagaggcgaaagcaggacctttaagcttcctaatcccctgtactacattcagtagttccttcacctctcaacaatctagcttgctcctatctatctatatgtaataagatgcgttcaaataggggcactagcttcactttatgttgtttcagctgtgtgtcaacaagtcatgtaagagacttcactatngttgtttctctttcgtggctttaataaattat

SEQ ID NO: 20956 - DNA, 348 bp, Glycine max
  Clone ID: LIB3106-058-Q1-K1-F8
gccatggaattctgtgcaactctaccactttctcagcttgcttatgtctacccgttaacaggtagtagtaacaaagcttatgcattttggtctagcaagcgatggatctcatcacgaccaacacgcttacactgtagcaagatgcttgtacctggatttggagaagcatcaccagaagcaaaggctggtgaaaacatacacaatttcttcacctttgttgcagtgaacactgttgctgctcaacttgagagctcccatcatgaagcatatgaggagctgatggaatacctgagtagacactgcgtgaatgatggtgaccagatctgtgccactatgttcatagaatca

SEQ ID NO: 20957 - DNA, 436 bp, Glycine max
  Clone ID: LIB3106-058-Q1-K1-F9
cccacgcgtccgcccacgcgtccggctcccgcgaccggaggagtgaagaagccccaccgctgcaggccgggaaccgtggcgctgagggaaatcagaaagtatcagaagagcaccgagcttctcatcaggaagcttccgtttcagagactcgtgagggaaatcgcgcaggacttcaagaccgatttgcgttttcagagtagcgccgtttctgcgcttcaggaagctgctgaggcctacctcgttgggttgttcgaggacactaacctttgcgcgattcatgcaaagagggttaccattatgcctaaggatattcagcttgctcgcaggatcagaggcgagagggcttaggttggttagggttctgattttgaaggaggcgagacggcttagaaaaagaatcatctatctatgtgtttatgtgggcatgtgaaacgtg

SEQ ID NO: 20958 - DNA, 307 bp, Glycine max
  Clone ID: LIB3106-058-Q1-K1-G1
cccacgcgtccgaccacgcttacgcggacgctttgatcgtccacgcgtccgcccacgcattcgaaaaaggagaaacataaaaaaggacaataagtaaatatatattaaacatacatatattaactcaaaatgactaactttatctttttcccaaagataatataagacgctatacaataaaaagctgaactagtttatctacttaactttaaaatgtgattcactggatattcctttgttaaaaaaaaaaaaccaacaatatttaaatatcctccattataaaataccaacaattttaaaaatattc

SEQ ID NO: 20959 - DNA, 433 bp, Glycine max
  Clone ID: LIB3106-058-Q1-K1-G11
cctaaacctatctttcttctctctctgtgtgttcgcttcatcggcaaccagaagcagccatggccactggaaggactgtgaaggatgtttcacctcatgagttcgttaaggcgtactcctctcacctcaagcgatccggcaagatggagctgccagagtggactgatattgtgaaaactgcaagatttaaggagttggctccttatgatcctgactggtactatgtcagagctgcttccatggcaagaaagatctacttgagaggaggacttggtgttggtgcctttcagaggatttatggtgggagcaagaggaatggtagtcgccctcctcatttttgcaagagcagtggtgccattgctcgtcacattcttcaacagttgcagaacatgaacatcatttaactggacaccaagggtggcaagaaaatcac

SEQ ID NO: 20960 - DNA, 380 bp, Glycine max
  Clone ID: LIB3106-058-Q1-K1-G12
gaccacgcgtccggggagatcctacctatctttttgtggagatttacagaacttttgcaacatttgcaattaatgccgcgttcgctcatcttggaggtgtcgtgccatggaatcaagcggagaacaagttcatctgcccttgccatggatctcagtacaatgaccaaggaagagtcgtgagaggacctgctccattgtctctggcattagcacattgtgatatagatgatgggaaggtcgtgttcgttccttgggttgaaacagatttcataacacgtgatgctccatggtgggcttatactccttaaaacctctgctgtcataatatatatttaaacatgaaattcaaacattctgctttgtattaatgcataaatata

SEQ ID NO: 20961 - DNA, 331 bp, Glycine max
  Clone ID: LIB3106-058-Q1-K1-G2
aacgagtagcacgatctgttgtttttgttctttttcgttttctacgaggaaggaaaatagcgataacagaggaagaaagaaaattacacagtttcaatttcagtatcagctacactttttagaaatggctactctatcaagcttcatcgctacgccgaagaatcccaatacccactttctctcaggttcctcattgacgatggacaaatgcttcttgaaaatcagctccagtgaacactttgcaggttcctctttaaagactaaagcaacacgttaccagccacttgttattcgagcaggtggtgattgtggaagaccaagtaatggaagt

SEQ ID NO: 20962 - DNA, 410 bp, Glycine max
  Clone ID: LIB3106-058-Q1-K1-G3
gatcgagataactagaaacagtgtgatgaatttgaaggtccttgttttcttcgttgctacaggtttggtagcatggcaatgccatgcgtacgatatgttccctctccgaatgaacactggctatggtgcccgtactccggaggtgaaatgcgcaagttggaggcttgctgtggaagcacacaacatctttggctttgagaccattcctgaagagtgcgttgaagcaacaaaggaatacatccatggcgaacaatatacatcagactccaaaacagttaaccaacaagcttacttttatgccagagacctcgaagtccatcccaaggacacatttgtgttcagtataaatggcaccgtactctctaatattccatactacaaaaaacatggatattgggtggagaaattta

SEQ ID NO: 20963 - DNA, 382 bp, Glycine max
  unsure at all n locations
  Clone ID: LIB3106-058-Q1-K1-G4
tcgaccacgcgtccgaccacgcgtccggtccttgatctcttcggtgttacaattttggtagcatggcaatgccatgcgtactatgtgttccctctccgaatgaacactgactatggtgcccgtactccggaggtgaaatgcgcaacttggaggcttgctgtggaagcacacaacatctttggctatgagaccattcctgaagagtgcgttgaagcaacaaaggaatacatccatggcgaacaatatacatcagactgcataacagttaaccaacaagcttacttttatgccagagacctctaagtccatcccatggacacattcgtgttcagtatagatggcaccgtactctctaatattccatactacaganaacatggat

SEQ ID NO: 20964 - DNA, 389 bp, Glycine max
  Clone ID: LIB3106-058-Q1-K1-G7
cccacgcgtccgcccacgcgtcctggaggagaagcagaaagaggagacgaagcggtggcgccgaagaagccccgaaccacgtcgaggaaccctgatttggtcaggggaattggcaaatattcgaggtcgcagatgtaccacaagaggggcatctgggccatcaaggccaaaaacggcggtgttttgcccctccacgatcccaagcccaaacccgaggccccggcccagaagccgcccaagttctacccggccgatgacgtgaagaagcccctcgtcaacaagcacaagcccaagcccgcgaaactcagggctagcattactccagggactgttctgatcctgcttgctgggaagttcaagggaaagagggttggtttcttgaagcagct

SEQ ID NO: 20965 - DNA, 385 bp, Glycine max
  Clone ID: LIB3106-058-Q1-K1-G8
gctctaccggtcttgacgacccaggccgacccacgcgtccgaccacgcgtgcgcacgaatgggtcacattatcaacatggcacaaggcatacaggcccttaagggcaactacaatgtgcataaaccccaacctcctaaatcttcaagtaatcttgattttgcatctaaaaaactgaaaaattcatcaaactctatgttggttctgaaaaaagattcaatttttatgcaaaactcttgctcctttacgatttcacgatcagcggctacagactgtatgcttgacggtgcaagcagacgtccacgatccgcccgcaaatcctcaggccattccagaaccgtacgcattcccggcgacaagtccatctctcaccggcactttatgttc

SEQ ID NO: 20966 - DNA, 454 bp, Glycine max
  Clone ID: LIB3106-058-Q1-K1-F12
gtgacgggaagggagtgatgttcttcttaagagaggtgagtgcagagcaaaaggtggggcggctggattcaaagttgcaattgtgggggctgctggaggaattggtcaatccctttctttgctgatgaagatgaacccattggtttcagttcttcatctttatgatgttgtcaacacccctggtgtcacagctgatgttagccacatggacactggtgctgtggtaatttccttttcatagggttattgattgtcaattaaattgtaacataagactgagttgtagttgttgtgttaatgctgaggctagttacaatagtttttattggagtatatgatcaattagtttgttaagaattatttacacatggttaggttaacaaaataaataggagcattgtaattcacttttcctatcttttaatcaatatgacatctcttgagacttattctc

SEQ ID NO: 20967 - DNA, 433 bp, Glycine max
  Clone ID: LIB3106-058-Q1-K1-D7
gttgccattctcatcctcctctgtctctctctcttcaccattgccatggatccgtacaagcgccggccatccagcgccttcaagtctcccttctggactacaaattctggtgctcctgtttggaacaacaactcctctttaaccgttggagctagaggtccaattctgcttgaggattatcatcttgtggagaagcttgcaaactttgacagggaacgtatcccagaacgtgttgtccatgccaggggagctagtgcaaagggtttctttgaggtcacacatgacatttctcacctgacatgtgcagatttccttcgagcccctggagttcagacgcctgtaattgttcggttctcaactgtcattcatgagcgtggtagccctgaaaccttgaaggaccctcgaggttttgccgtgaagtttacaccagaga

SEQ ID NO: 20968 - DNA, 397 bp, Glycine max
  Clone ID: LIB3106-058-Q1-K1-D8
aacatatctcatttatagtttactattgaatgatgggtttgaaaatggcaatggtgatcctaggcctgctggccatgttccttttggtctcctcagaggtggcatccgcgaattcaaaagaggtgacaaatggagttgaagatgccaaatatcctggtggaggctatggtgggggttacccaggcaatggcggtggtggctatcctggccgtggtggtggctaccctggtcgtggtggtggctatccaggtcgcggtggtggttaccctggtcgtggtggcggctatccaggccgtggaggagggtattgtcgctatggctgttgcggtggccggacatacaatggaggttgtagaaggtgctgctactacgccggtgaagcttgtgctgcacaaac

SEQ ID NO: 20969 - DNA, 410 bp, Glycine max
  Clone ID: LIB3106-058-Q1-K1-D9
gttgccatgagggagttttcttcttgttttgtagaaaatggtgttcaggttgctgactcatgctcatcaagcaccacaagagcagcacaaaatgtggtcacgtgtgtctatcagtgcaaattaagaggccattcaagcttgattacagtctcgtggacaaaaactctgattggtcaaggcttgagtgtggaaattgatgacttgggaaagcattgcctctgcaaggttgagataaagccatggctcttctcaaagagaaaagggtcaaagaatttggaggtccaatctggtaaagttgacatcttttgggatttgagtagtgccaagtttggttcagggcctgagccaatggaggggttctacttagcggttgtgttcaacaaggagacggtgttgctcctaggggatct

SEQ ID NO: 20970 - DNA, 458 bp, Glycine max
  Clone ID: LIB3106-058-Q1-K1-E1
agaaacatgactattgctttccaattagctgtttttgcattaattgctatttcatttatttgattgattagtgtacctgttgtatttgcttctcctgaaggttggtcgaataacaaaaatgttgtattttccggtacatcattatggattggattagtgtttctcgtgggtattcttaattctctcatttcttgaagctctatttattctagatcaaaaacgaaatgacccctcccccagaattctttcggattgtcgggcacattaaaaaaggaatggataagttcctaaaaataaagaaaactataacacattataaggaggggtcaaatattaattaagataaaagatatagaatatctatctgtatatatatatatatagatataatttattaataattagaactttcttttttcttaaaaaaaaaaaaagttaattaaaagatttgattgaat

SEQ ID NO: 20971 - DNA, 451 bp, Glycine max
  Clone ID: LIB3106-058-Q1-K1-E10
tgaaaatgttgcaggtggcaatagtgcaattggctgcgttgcaggtttttgttattttttggagtggtggtgctgattacatgccgccttcaaggttggatgggttcgtctaccaaaatgggtacttagatttggatactgttttgatagaagcgttttatgatccggtgtgcccatacagcagggattcatggcctccactcaaacaagctcttcatcactattcttctcgggtttcgttcctccttcatctcctccctttaccttaccatgacaatgctttcgtcgcgacccgtgctttgcacattgtgaacacattgaacgcatctgcaacgttccccttgctggaatggttcttcaagcatcaggagaaattttacggggcccaaacacggaacttatctaaggcttctattgtagatgagatagtgaagtcttgcacagaagcagc

SEQ ID NO: 20972 - DNA, 459 bp, Glycine max
  Clone ID: LIB3106-058-Q1-K1-E11
tctcagttctcactcaaaattcaaaatcctatttaaggtgtttatgaaggcatcacgcattggtttgttcggtatggtggtgctgctttttgtggctgaagttcaagtgtcaaaggcagtgacctgcagcccagtgcagctgagtgcatgtgtgagtgcaataacctcttcaacccctccatcaaacctatgctgctccaagatcaaggaacagaaaccatgcctttgccaatatctcaagaaccccaatctcaagaagtttgttgactctcctaatgcaaggagagttgctaacacttgtggaactcccttcccaaggtgctaaggtgttactaaatttgaagtggttttaatttctctgcctgattatgcatcttgatatctatccatgtgttctggccagagaccaaatagtgaaagaacatatatatatatggggtatcatatatatatatatat

SEQ ID NO: 20973 - DNA, 414 bp, Glycine max
  Clone ID: LIB3106-058-Q1-K1-E12
gatttgatccaattgaaattttaaaaatgactgggataaacttaagaattcaattattgaagttgaataagtaaacaatttaattggattggtcgaatggtatcaaaaaaatggagtactaactcccatttcttatttattattgaattaaccgatcaacttgctttgttatcgaacatttctttttgatttcaaaaattttccggaaaaaatttgaatctatttttatatgcgaatcaatcctactacttctggtcctgaggtttctgcgcttgaaaaaaaaaatctgggacgtatcgcccaaataattggtccggtactagatgtagcttttcccccaggtaagatgcctaatatttacaacgctctgatagttaagggtcgagatactgttggtcaacaaattaatgtgac

SEQ ID NO: 20974 - DNA, 393 bp, Glycine max
  Clone ID: LIB3106-058-Q1-K1-E3
gcatgtttagtttcaaacaacagcacccaaattctgtttcatgcgtcctcctggggctatcgttgcacctggtgagagtatcatagcaacagtgttcaagtttgtagagcaaccagaaaataatgaaaagcctgaaaaaactggactcaaatttaaaatcatgagcttgaaggtgaaaggattaattgattacgtccctgaactgtttgatgagcagaaggaccaagtagcagtggagcagattttgcgagttgtttttctagatccagagcgtccctgtcctgctttggaaaaactgaaccgacagctggctgatgctgatgctgcccttgaggcacgcaagaaacctgcagaagatgcaagtcctaaaattatcggggaaagacttgtcat

SEQ ID NO: 20975 - DNA, 256 bp, Glycine max
  Clone ID: LIB3106-058-Q1-K1-E4
accacgcgtccgctttggataacaacaactatatgtgcttaccctatgctgaagacatggaggatgatggccacaggatgaagaatgccaacatgctgaataagattgcagtcttgtggaagaagcctcaaacatagttgagatgatgtctgatttatgaagcgttctgaaattgtagtccaataaatagcgtgttcatgtgatgtctattactatgtctcttgcaaacgtctgacccctacattatcctctgtac

SEQ ID NO: 20976 - DNA, 171 bp, Glycine max
  Clone ID: LIB3106-058-Q1-K1-E6
tgatcgagataactttaaacagtgtgatgaaaatgaaggtccttggtttcttcgttgctacaattttggtagcatggcaatgccatccgtccaaaatgttccttttccgaatgaacactggctatggtgcccgtactccgaaggtaaattccccaagttgaaggcttgctg

SEQ ID NO: 20977 - DNA, 355 bp, Glycine max
  Clone ID: LIB3106-058-Q1-K1-E7
acgggctatgcgtgtaagcttggctcaaggataacgtgcataaggttaatagagatttgggagggcttagatgttcaacaatggtgccatagaaatgagaagaggatgcacttgatgtaattttctgaggaattccttttcatttcttgtggtttataaattatttactcccactttcgaaggatctgctgacccgaatgttatattttgtgcatttttgctgatactaacattggcctatttattgcctccttcttggctcaccgagccatacattgaatcacatactctattctgtgtaacatttgctatgaaataatcagcaaaggtgtaaagtttgtaccatattgaatac

SEQ ID NO: 20978 - DNA, 381 bp, Glycine max
  Clone ID: LIB3106-058-Q1-K1-E8
cccacgcgtccgagcatggccatgccatgtttcaggctaccaaaggacatctgggataatggaaactggctatggagagcgttcttcgtaggtaaaatgcgcaagttttaggctagctgcggaagcacacaacattcgagcctttaaaaccattcctgaagagtgcgttgaaccaacaaaggactactttaatggcgaacaatttatatcagactctaaaacagttaaccaacaagctttcttttatgctagtgaacgcaaagtccatcacaacgacatatttatattcggcatacataacaccgtactctctaatatcccatactatgaaaaacatggatatggggtggaggaatttaatgaaaccttatatgatgaatg

SEQ ID NO: 20979 - DNA, 442 bp, Glycine max
  Clone ID: LIB3106-058-Q1-K1-E9
cccacgcgtccgcccacgcttccgagggagtgttacatcttaaactaccaatgctacaagcgccccaacgacagaatgctcggcaccgagttctgtggcaagcttatcagacgcaccgaaaacctgggccccagcgagtaccgcttcctcctcaaagccatcgtcagctccggcatcggcgaacaaacgtacgccccaagaaacatcttcgagggccgcgaggccactcccacgttgcgcgacagcatcggagaaatggaggagttctttcacgacagcattggaaaactcctcgcgaaatctaacgtcttcccctccgagatcgacgtcctcgtcgtcaacatctccatgctcgccaccgtcccttccctctcctctcgaatcatcaaccactacaaaatgcgccacgatgtcaaggtctacaaccttcaccggcatgggc

SEQ ID NO: 20980 - DNA, 439 bp, Glycine max
  Clone ID: LIB3106-058-Q1-K1-F1
cccacgcgtccgcatagactattgattaagatagctattgtcattgatttgctagctccaacgaatggggtctagcagattatcattcattgtagtacttgtgcttgtaaccttttcatccatgatcattgactcaagggttgcagaggcacgtaccctgccaaaatcagccttattgccttccaaagttgatatacctactgttgttcctcttccactggtggcaccactgccaaatttgcctgttactctccctccagtgcctgaactacctgcagtacctaaagtaccaattcctgaagtaatagttaataacgccaaaataatcccttgagtacctatgatctatccagtcactactacttattttgtcacttgctaaattaacttgttggtgccatcccagggtggttctggttctggtgggggttaatttctg

SEQ ID NO: 20981 - DNA, 384 bp, Glycine max
  Clone ID: LIB3106-058-Q1-K1-F11
tcactttctctctgtatttctctttctcattttctactctttccttttcatcgcatcttagttttatttgcacatcttgtagttcccatggatactgctctcatggaagagcacaatattcttaatgatcatgatcataataacaagtctgacgcacatttgacttctgccgctgcttttgtacacggtcgaattcaagaccctcgttatgacgcttgcactatatgccttgaaactttctatgatattcatcctttcacactgactaacttcaatcatgactttcatcttcaacgcattctcgaatgacgtcaaagaaccttccaatgtcccatttattgacagcctatccatctcaaatattccactttccaacaattactt

SEQ ID NO: 20982 - DNA, 366 bp, Glycine max
  Clone ID: LIB3106-058-Q1-K1-D6
cggacgcgtgggctggaatggttgaatccaattcagttggaacattttcaccggtgcaaaagcaagagagtcagaggggactttttgttgatagaggtgttggatcttctagacctgtaaaatcttctagttcaaatattttctctactgatctcaatttggatagcgataccaagaattcaatgccagctgctgctggagctgttgctgctgcagctgttgctgatcagatgctggatccccaggaagatagacatttggcaatgatcctggtgtgtctgtcaacccgttgtaaaacgatcgctgtacttgaacttactagatatcttaactggttaggtcatgataacgaacacttctatgatg

SEQ ID NO: 20983 - DNA, 411 bp, Glycine max
  Clone ID: LIB3106-058-Q1-K1-C1
gcatgctacactcgcgggcctttcttgcctagtgtttcttccaagcactctccaccttccatttctccagcttttggcttgaggagtctgaaatcaagctctttatttggagaatcgctaagagtggcctccaaatcaacaataaaggtttcaaagacaaagaatacttcactcgtgaccagatgtgaaattggtgacagtctcgaagaattcctcacaaaagcaacaccagataaggggttgatcaggttgttggtgtccatgggagaagcattgagaacaatttccttcaaagtgaagacggcttcatgtggtggaacacaatgtgttaatacttttggggatgagcagcttgcaatggatttgctagctaatcagcttctttttgaagccttaaattactctcatttc

SEQ ID NO: 20984 - DNA, 454 bp, Glycine max
  Clone ID: LIB3106-058-Q1-K1-C11
gaagaacccgtgaaggaacagcccctctctgctgggaactctgcgcgacccaagcttcagagatacgcgcttcgttcgtcctgtaaatccaaggaaaacaagcaagacaccgcacccgatctctccatttcttctgaatctaagagggggttaagtactccacacgtaagcagaagtgtaggtggtcttgatttctctggcaacaaggataagtctactagtgctaaaccaccaagaaggctctccaatcctgtgaaagcagcatctcccactccaaaccctaagttggttggcaacattaccccaatctcagagagcagaacaatgaggtctggtaaaggtcaagtgtctcaaagcagaagccagacaccggcctctgacatttccagaacatcgagcagaatgaagttcaatctcctatcttcctcttcatattggctaaaccagatcaagc

SEQ ID NO: 20985 - DNA, 408 bp, Glycine max
  Clone ID: LIB3106-058-Q1-K1-C12
gtcatggaatgatactcagatctgccactatatgacgtacgacatgtcaacccattaacaggaacttctaacactgcacatccgctttgaacgacctcgcactctatctctactctactaacacacttacattctagaaaaatgatcgtactcagatgagcctaatgatcacgctaagcaaattccggtgccgactaccaccgtaactaaagctgcgccttcaggtacactgaagcatgtcaaactgacagctaccatcatgaatcatgatagcagctgatggaatacatgtgtggacactcagggaattgatgaaaacaatgctgaatctctatgtacatcaaagtcttttgacgttaaaattcatgactatcaatggtagaacttccatcatgctacttcaaaaat

SEQ ID NO: 20986 - DNA, 383 bp, Glycine max
  Clone ID: LIB3106-058-Q1-K1-C3
cacacgcgttcacacctctgctcacgctgcttgtgttgcagctcagcttctagcacatctagggctaaaggtaaaggagaagggtcacgtaaaggttcacatcattgtccatgtcaacgtccatgtatactctaccacatgcaatatcactgaccagctgatatacatgctcgaacgcattgacaagcgtgttattgagaggtctgataaggtagccgctaagactaacaagaatgccttcaagcatgcctgactgctggacaaacttaaagctggactcgccataggtatcaccattgataatgctgtaacgacgtatgattcttccacatattattgcgcacctatacatacgccttgacataaggatatcattactaata

SEQ ID NO: 20987 - DNA, 441 bp, Glycine max
  Clone ID: LIB3106-058-Q1-K1-C4
gtcttcaacaactgagactaaatctcttgtaacttaaattttggaatccatgtttgcaaacgatgttgcgagtccaatacgactttgtttccttcaccatagatgaacttgatctttgaaagattggcaaatggagtgaaagaaacaggaacttcaaattggtttcctttgaaaccaaaatattcaagtgatgtaaggcttgcaaggttagaatcaaaatttccaatgaagtgattttcagaaatttccaacttccggagagatgtcatgttaacaaaagatgagggaagtggtccctcaaattggtttccggatagatctaactccttcaacttctttagcttaaaccaatccgtgggaagaaaggtgccatttatatcacattgttgaagagacaaaacttttaaagatgtcaattccccgatatttttaaaaactcat

SEQ ID NO: 20988 - DNA, 426 bp, Glycine max
  Clone ID: LIB3106-058-Q1-K1-C5
cctgttcatacttgtttcttcaatttcatttcttttattacttttcctctttgcattccaagtggccactgttgaggttgcacaacaaacaccaacaactgtgacagaaaatgaagcaaccgaggtaaccaagattgaggaaactaccccagaacaaccagctacccaggttactaccaccgaagaaccaaaggaagaaaccaccaaagaagcaaaagaggaagaagaagccccagttgagactaatgaggcaacagaagtgacagaggaagtgaagcctgaggtagaagagaacccagcacctgagagaacagaagaagaagaagtgaaagaggaaactaaagaaaccgaatcagcaccagtggaggaacagaagcaagaggagaacaaaccagctgaaacccgtgaagaaaccaaaacagaaca

SEQ ID NO: 20989 - DNA, 428 bp, Glycine max
  unsure at all n locations
  Clone ID: LIB3106-058-Q1-K1-C6
gataattttctttgtagttgatagccatggttacccgtggaaagcttgaggttgacattgagctcaagtccaacgcagacaagtactggcaaacccttaggaattctactgaaatattccctaaggccttcccacatgattacaaaagcattgaggttcttgagggtgatggcaagtctcctggttctatccgccacataagttatggtgaaggttcaccacttgtgaaatcatcctttgagaagattgaggctgttgatgaggaaaagaaggtagtgtcgtacactatcattgatggggaactcctncagcactacaaaacattcaagggagacatttcagtgactccaattggcgatggatgcgaagtaaagtggaatgctgcgtacgaaaaggttagccatgatatttctgatccaacccttgtc

SEQ ID NO: 20990 - DNA, 59 bp, Glycine max
  Clone ID: LIB3106-058-Q1-K1-C7
accacgcatacgaaaaaataaatttaaaaattttaaaaacaaaaaaaaaaaaaggggga

SEQ ID NO: 20991 - DNA, 401 bp, Glycine max
  Clone ID: LIB3106-058-Q1-K1-C9
cttcagagcgcaggcaaacaacttcttctcatacatggcatctcaaggtttgtgtccttcgagaaaaaatattcttcttttggactctgaagggaagcgtgtggcagtcaagtattactcagatgactggccaacaaacaatgcaaagttagcttttgagaagtttgtatttactaagactgttaagacaaatgctcgtacggaagctgaggtaacactacttgagaacaatatcattatttacaaatttgtacaagacctgcatttctttgtcactggtggtgaagatgaaaatgagctcattctagcatcagttcttcaaggtttctttgatgcagtcacccttctgttgaggagtaatgttgacaaaagagaggcacttgagaacttagatctcattc

SEQ ID NO: 20992 - DNA, 373 bp, Glycine max
  Clone ID: LIB3106-058-Q1-K1-D1
cccacgcgtccgcccacgcgtccggaaaaaggtggaaaaggtggtggtgggcgtgccagtgggagtgtaggacggtggagaaaatgaataccaaaggggaatcatccctcctaacgccgtgtttggagatccaaagggcatccccatccagcaaaccatttacagggacactcctgctcctttcaactgcccttactgcgctcataccgctctcactaccgtcagatcaaagcccagtctggcagcatttgttggatgcttgatgccaatgatgcttggagtttgctttctttgcccttcaatggattgcctttggcataaatatcactactgtcctaaatgtcaagaaaaggttgctgattttgagaaatca

SEQ ID NO: 20993 - DNA, 390 bp, Glycine max
  Clone ID: LIB3106-058-Q1-K1-D11
cccacgcgtccgcatctgcttctcactgatctccattcccattccatggcttccactgaatgatcccctggcaagaaaattcagattcaaagggatgacactacatttgacgcatatgtggttggaaaagaggatgctcctggaattgttgtgattcaggagtggtggggtgtggattacgaaattaagaaccatgccgtgaagatttctcagcttggtagtgggtttaaagctcttattccagatttatacagaggaaaggttggtctggatgttgctgaagctcagcatttgatggatggtcttgattggcaaggtgctgcgaaagatattgctgcttcggttaactggcttaaagcaaatggctcaaagaaggctggtgtaactgga

SEQ ID NO: 20994 - DNA, 460 bp, Glycine max
  unsure at all n locations
  Clone ID: LIB3106-058-Q1-K1-D12
cccacgcgtccgcccacgcgtccgcccacgcgtccgcttgaagatctccatccttcatgttgtacttgagagttttccaaaaatatcagaaaagatggaaaatgtaagggaacttcatttgcagtacactcccataagtatgtctgtctagttgtggagttgttcagttaccaagtagcactgtcgtgttaccagaactgactgatattatagcttttggatggaaagggtagcaatggctaaaacaggaagaaggtgaagaaaaagcgggttcaatagtatcttcaaaggtagaacggctttgtgcctaaggatgcaaccatttattattttttcaaaaggtttcatgcagtttgttcatgtgaaagatttagactgattgataataatttcagaattcttcatgaatgtatcanagaatntcaatttttaaagatgcgactttgtgcgagcatctttt

SEQ ID NO: 20995 - DNA, 412 bp, Glycine max
  Clone ID: LIB3106-058-Q1-K1-D3
atagtcgacgttttaagctaatagtcagtgttcaatttttcctcagggactcagatagtgagttttgaagaatagggggactccgataatgaattaaaaaaaaggggaccgatttagtgaaatgagaaaaatagggtacattttttgcaattaagccacgataaaattctagaactttcagctaggggaatttctttccaaatgctttagctaagttgacacttcccccaccccgcacaaacaaatgtttgcacgtagaagtgtaccttgaacttaccttttggaacgctgaacccatgtagtattttagtcacatgcctcatcatgttgcctatcggagtttgttcatcaagacctactggtttgatcactttatcttttctgatatactctgcattggtattaatctttt

SEQ ID NO: 20996 - DNA, 348 bp, Glycine max
  Clone ID: LIB3106-058-Q1-K1-D4
cttctccccacttcctctatataatacacactatacaacataacattcgtatatacacacaggaccaaccactctttttacttgatttacttcctccatggcatctttcatcatcataccactcctacttctttctatctgcgtcgtacatgtcttacatcaccgtcgaggctattgtcggggctacccaggtaatggcggtagcggctatcctggccgtggtggtggctaccctggtcgtggtgtcagcttataaaagtgacaacccggaacccttcatggaccagcgcgtgaaacgctacggtccaatcttcaccacccacgtgttcggcgaacccaccgttttct

SEQ ID NO: 20997 - DNA, 121 bp, Glycine max
  Clone ID: LIB3106-058-Q1-K1-D5
gccacgctcgggaacgcatatgttatattatacttaagaattcagactccgtcgtaataattgtttcggatatttgatgctgaacttcaagaaatagaaaaataagacattttaaggacga

SEQ ID NO: 20998 - DNA, 450 bp, Glycine max
  Clone ID: LIB3106-058-Q1-K1-B9
cccacgcgtccgggagattatccaccgttttttctgccctggctgagactgcagcgtcaagggcagtagctgtaactgtcgttggtgcagcagctacccttcttgtaaagagatccaaaacttctgagtcatcacagattcaattcaaagcatgtgaagattgtggaggttctggtatatgttctgaatgcaaaggtgaaggattcgttcttaggaaacgttccgatgaaagtgctgagaaggcaagagtgcaagctaagaacatggcaacccgattcacagcgggacttccaaagaaatggagctattgcacaaagtgctcttctggtcgatcctgttcaacctgtggtggcagtggaaagctaagttactagtttagcattacatgttgtctacccagttcaaaagacagttagtttcctaacatttcacatgttcttggttaaatca

SEQ ID NO: 20999 - DNA, 451 bp, Glycine max
  Clone ID: LIB3106-058-Q1-K1-A5
caattctgaatttgcgggttttggatttggacttggtcgtcaacacagtctaatgtaatatcgttttgctccttcgcttatgaagcttcttcttcttcttcttcttgttcctgcaacgcactgaattcgatcaatcaatccatcttcaattgctttgtttcgatcggaggaaaatggccgatcagttatcgaagggagaggaattcgagaaaaaggctgagaagaagctcagcggttggggcttgtttggctccaagtatgaagatgccgccgatctcttcgataaagccgccaattgcttcaagctcgccaaatcatgggacaaggctggagcgacatacctgaagttggcaagttgtcatttgaagttggaaagcaagcatgaagctgcacaggcccatgtcgatgctgcacattgctacaaaaagacttatattaacgagtctgtatc

SEQ ID NO: 21000 - DNA, 443 bp, Glycine max
  Clone ID: LIB3106-058-Q1-K1-A6
gaaatttctggcgatctctgcgttttcccctattttttctgaatcccacagaatggcatccgacaggggtcaaggtggaattcagcagttgttggctgctgaacaagaggcacaacggattgtgaatgctgcaaaaaatgaaaaattggctaggttgaaacaggccaaggaagaggctgaaaaggagattgctgaataccgagctcaactagaggctgagtttcaaaagaaagtgtcagacagtactggagattctggagctaatgtcaagcggcttgagcaagagaccgaagaaaaaatccatcacctgaaaacggaggctgcaagaatatcggatgatgttgtcgccatgctcctcaagtatgtgacaagtgtgaaaaattaggaccctttgatatatattggtgctgaggactcctaaattatgatgattattattctga

SEQ ID NO: 21001 - DNA, 411 bp, Glycine max
  unsure at all n locations
  Clone ID: LIB3106-058-Q1-K1-A7
cccacgcgtccgcttttgttgttcttcatggtctgcatggctctcttctccgctgccagttgctangccaagacaccctcactcatctctaccctcgtaacaaggcttccaccattcataacaagccaacaacagcacaaccacgtgccaaatttgacatgctgcaagtcttgggaggaagaggactatgcaatggagaagcaggtcttaaacaagagctgaagagggaacttggtgttgatgagaaggcaccagcatcagcaacaagtgacaaagagcaagagttagaggaagaatcatcaacaacacagtccttggcaagtgatgctgcagaagatggttttgagaaggaactgatggggttaactggggggtttacggggggtgagaagggtttgaaaaagttcattc

SEQ ID NO: 21002 - DNA, 452 bp, Glycine max
  Clone ID: LIB3106-058-Q1-K1-A8
gggacttctttaggtttataacataaaaatacagttctgcaaagaaacagctgggagctgctccggtcactgcatgtgctggagcatatgcttaagctggaagttctagtgggcattaaagagtttgtttcagggtgtgggttggttccctacgcagacatggcagtagggtgctggatgaacaagatttggttccccttctgaagttctgttgtaactgacagatacattatatttcaatatggaagctttacattattttctcgaaggcaagtgttggtattcttagagtaacatttcgtctgcatcgggcatcttttgagtagatctttgagtccaaaattcatgtctttgtctctcccccagtaactcgatattgtgggtgaaatttgaaaattaaaaatggatgtaattactacggcatctatatttttaataataccaggatgaat

SEQ ID NO: 21003 - DNA, 423 bp, Glycine max
  Clone ID: LIB3106-058-Q1-K1-A9
cccacgcgtccgcccacgcgtccgcccacgcgtccggcaaagcaatggcttcgtcttccctggcttcagttcctctctcctcggcttccctcaatattccactttcttcctccaaaccttcctctagctttttatcttctccaattcccgcattctctcgcactcccaaaaccctgtttgccgaatcaaaatcccacttttacccaaagagaaacgataatgggttttccatcagagcccaaaccctagacttctcggattcattcttcgaagggggtttcggctccgaagacgacccctcttcccccggtggacccggcttcacgggcgtggaggaaaaggaggaaccccaatgcccaccgggtctcagacagtacgagactatgatggttttgaggcccgacatgtccgaggatgaacgac

SEQ ID NO: 21004 - DNA, 385 bp, Glycine max
  Clone ID: LIB3106-058-Q1-K1-B1
gggattagaaactgtcttttacatgttttgtttaggctgtttaagcatggcaactggcttggacccgtggagctcaatgtccggattttagcagaaaatccgaagggtcgagtttgggtttttcccacggtgttcgaagtccgatcaggagtcactctcaaatccacccatatatattgaagccctgaaacggatttctcaattttcactctcactcaccaatactactccgtcgcttctccgttctcactccctaagacctcatgccagaaccctatcgcaccttccaagccaacattatcgcaccttcacgaccaacaacatcaaccttctcgtacttttcacttcttctatgaacattggtagccttgaacttacatttttt

SEQ ID NO: 21005 - DNA, 361 bp, Glycine max
  Clone ID: LIB3106-058-Q1-K1-B10
cccacgcgtccgcccacgtttccgcaacccttttgcgtgcttagcagagagagacgcacccggtgggctaagacccgcgaggtgttataggcaaattaagaacaaaccataccccaagtcacggttttgccgtggtgttcctgatcccaagatcaggatttacgatgttggtatgaagaagaagggtgttgatgaatttcctttctgtgtccatctggttagttgggagaaggaaaacgcttctagtgaggccctggaagctgctcgtattgcttgcaacaagtacatggccaaatttgctggaaaggatgctttccacttgagagtcagggtgcacccatttcatgttcttaggatcaac

SEQ ID NO: 21006 - DNA, 215 bp, Glycine max
  Clone ID: LIB3106-058-Q1-K1-B11
ctgatgctgcttgtggcttatccatggagatttcttctgtcagttacaagtgctgccactggcaaccatctcatcacaaggctcaatttccaaaaagtgccaatgccttaattaaaaaaaacctttaccctcctaaattattgaacccttccccaatttggttgttaattttcctgaagaacccttaattttcccactttgaattccattgggtt

SEQ ID NO: 21007 - DNA, 434 bp, Glycine max
  Clone ID: LIB3106-058-Q1-K1-B12
cttcggaaacaagtgtacgtgggacccttccttcgcaagcaagagagagaaagtgctgctggcgaggcaaaattcaacaatgggtttgtgaagaatctatcagaatcaaccaccgatgatgagttgaagaacacttttggtgaatttggaactattactagtgctgtagtaatgagggatggggatgggaaatcaaagtgttttggatttgtgaattttgagaatgctgatgatgctgctagggctgttgaggctctcaatggcaaaaattttgatgacaaagaatggtatgttggaaaagctcagaagaaatctgaaagggagaatgaattgaaacaacgatttgagcagagcatgaaagaagctgctgataaatatcaaggcgcaaacttgtatgtaaaaaatttagatgatagcattggtgatgaaaaact

SEQ ID NO: 21008 - DNA, 435 bp, Glycine max
  Clone ID: LIB3106-058-Q1-K1-B2
cccacgcgtccgcccacgcgtccggccaaattatgcagaattttcttcattgcttggtccccggatacatgtagggttaggagcaagatgatttatgccagctccaaagatagattcaagagggagcttgatggaattcagattgagctgcaagcaactgatcctactgagatgggtcttgatgtgttcaaaagccgtgccaattaaatgattccgattattcataaataggagttgtgatggggatggtcaacttggctaatttggactcaattttccaagttttgacatgaggtctattgcagcttcaacaaagcttctcttgttccagtgtatcttgtggtttgtggcatataacccgtgtttgggtgtaatcttagtcctattcctagtagttaattttgtaactgttctttgtgtgattgaacgaaaatt

SEQ ID NO: 21009 - DNA, 412 bp, Glycine max
  Clone ID: LIB3106-058-Q1-K1-B4
ctcttccaccgcacactctctgctcctagggtttctccttcgagtgagggaaatggctcccgaaccgcctagtacgggtctgtttgttggactgaacaagggtcacgtcgtcaccaagaaggaattgcccccacgcccctcagatcgtaaggggaaaacaagcaagagggtgcactttgtgaggaacctcataagagaggttgctggttttgcaccctatgaaaagcgtataactgagttgctgaaggttgggaaggataagagggcactgaaggttgcaaagagaaagcttggaacccacaaacgtgcaaagaagaagcgtgaggaaatgtccagtgttctcaggaagatgagggctggtggtgctggagacaagaagaaataagtcttatttactcctttccagattcac

SEQ ID NO: 21010 - DNA, 419 bp, Glycine max
  Clone ID: LIB3106-058-Q1-K1-B5
cccacgcgtccggaatgtctcatggaagaggcagtgcatctttacctattgtggtcactgtggtttcactactgtgccttttggttcttttggaacgtgctgatgcagcaacttacaccgttggaggacctgggggatggaccttcaacactaatgcttggcccaaaggaaaaagattcagagctggtgatatcctaatcttcaattatgattcaacgacccacaatgtggttgctgtggacagaagtggatacaacagctgcaaaacgccagggggtgctaaagtgttcagttcagggaaggaccaaatcaaactagcaagagggcagaactacttcatatgcaactaccctggtcactgcgaatctgggatgaaagttgccattaatgcaatgtgatggtgcttaatacttcttgag

SEQ ID NO: 21011 - DNA, 348 bp, Glycine max
  Clone ID: LIB3106-058-Q1-K1-B7
tcgagaaaacccacaggaggctctttttgaggtttccggcgctgtgaaaacttgcggagaaacagctcctgtctccagggctcttgctcaagacagcatataagtagaacctcctactgctgaacaacgcactgacgatcaaagtttcagaaacgttgaatactactctggcgaccaaaattcaaattaagagacccctgaaattaagcttgaaactgctccaaccgaattacgttttccaactacaaatcataccacacatagctttacccgatacaatgaacatcatcgatgcgaagctttcaatggagaaagcgcaccataatgagactagtttgccaaatatta

SEQ ID NO: 21012 - DNA, 434 bp, Glycine max
  Clone ID: LIB3106-058-Q1-K1-B8
ctcaaacaccgaagccaaaaggaacaacacctaggccagtggaacctcagttgaatgtgaagagcaaaaacatgctgagggaatatggagggcagtggctgagctgcgccacacgccatgtgaggatctatgctgcgtatatcgacccggtgacttgtgagtttgatcaaacccagatggataagctcacccttattcttgatcccactgatgagtttgtgtggaatactgagacttgcaacatggtttattcttacttccaggagcttgttgatcactacgagggcgctccattgacagaatacacacttcgcctgattggttcagacatagagcactatataagaaagatgttatacgatggggcaatcaagtataacatgaatgcaagggttctgaatttcagcatgggcaagccacggatcatgttcaac

SEQ ID NO: 21013 - DNA, 388 bp, Glycine max
  Clone ID: LIB3106-058-Q1-K1-A4
ctggaaccgggattgccccatttcgctcatttttatggaaaatgttctttgagaagcacgaggattacaagttcaatggtttggcatggctcttcttgggtgtccctacaagcagctcattgctttacaaggaggagtttgagaagatgcaagagaaaagtcctgaaaacttcaggcttgacttcgctgtgagtcgagagcaaacaaacgagaaaggggagaagatgtacatccaaacccgaatggctcaatacgcagaagagctttgggaattactgaagaaggataacacttttgtgtacatgtgtggactaaaaggaatggaaaagggaattgatgacattatggtgtcattggctgccaaagatggcattgattggactgagta

SEQ ID NO: 21014 - DNA, 164 bp, Glycine max
  Clone ID: LIB3106-057-Q1-K1-G3
tcgacgcttcagaagacatggcctcattgggtgggttacaaaatgtgagcggcatcaagtttgtgatcaaataggtgtcaatagtcaatgcaaagttcgagctgaagccgtttccatatccactgaatggtttggagcctgtgatgatctagcagtcacttgag

SEQ ID NO: 21015 - DNA, 216 bp, Glycine max
  Clone ID: LIB3106-057-Q1-K1-G5
cccacgcgtccgcccacgcgtccgctccttcctccgtcaccatcgttttgtgcgtgagcgtgtctccatttctttccccatcagcgaaaagacagaacaagctccgttgactttttccattttccaattttctcggtgattctatcagccttcgacacaatcgcgcgccaaacgttgaattggtgccaccactcagggagagtctctaacagacca

SEQ ID NO: 21016 - DNA, 167 bp, Glycine max
  unsure at all n locations
  Clone ID: LIB3106-057-Q1-K1-G7
ccggaancccggagcgcccacgcgaccgggcaacagaaacaaaagaggcagcaagagggggcaccaccgaagagcaaggagcagacaagggcgaggggagcaacaaagacgaaagcacagcagcacaggaacaaaacaaaagaggggaggcagaccaggagagagaa

SEQ ID NO: 21017 - DNA, 274 bp, Glycine max
  Clone ID: LIB3106-057-Q1-K1-G8
aaaatcctcaattttctgagcagccgaacactctctctctgtctctcgaaaattctcagtgggcagagaaaatctgaatcatgtcgtggcaagcgtatgtcgacgatcaccttctgtgtgacatcgaaggtaaccacctcactcacgctgctatcatcggccatgacggcagcgtttgggctcagagtaccgacttccctcagatcaaacctgaggaggtaactgccatcatgaatgactttaatgagcctggatcacttgctccaacaggatt

SEQ ID NO: 21018 - DNA, 447 bp, Glycine max
  Clone ID: LIB3106-057-Q1-K1-G9
cccacgcgtccgcccacgcgtccgcccacgcgtccgagagagtgagaaaagaaggaagaagaggaagaagagatggcagatgaactacccgtcaaagcttttggttgggctgcttcagacacttctggcacccttgccccttttcatttctccagaagggaaaatggcgtcgatgacgtcactctcaagattctcttctgcggggtttgccactctgatctccacactctcaaaaacgactggggtttcaccacctaccctgtcgttcctgggcatgaaattgttggtgttgtgacagaagttggaaacaatgtgaaaaacttcaaagtgggtgataaagttggagttggtgtgatagtggagtcttgcaaggaatgtgaaaattgccaacaggatctggagaattactgtccccggcctgtgtttacctataactctccttattat

SEQ ID NO: 21019 - DNA, 211 bp, Glycine max
  Clone ID: LIB3106-057-Q1-K1-H1
cccacgcgtccgtccacgcgtccgcccacgcgtccggggagggcgcattagttttaggggagaagtgcaaaattaccaaaacacagtgtctcaagtggtaaatttactgggaaatgaggactcagctgcaaattacttgagcaagtgcatatactcaattgggttgggtagcaatgattacctcaacaactacttcatgcctcaattctat

SEQ ID NO: 21020 - DNA, 269 bp, Glycine max
  Clone ID: LIB3106-057-Q1-K1-H10
catcctctattactctatcctactccattttcactcgccttcctcatttctcacgaacagtttataacaaaaagtgggcaggccaaatattattctgtcaatgcaagcttatcaatcatatacacccaaaagcaagaatagttaatgaacatctaatgctcaatcatcaacaacttctactcctaaacccaatatacccttctatacctcgaataactttcatattgtaatgttatacaatgataaatatctaaatagcatcaattatc

SEQ ID NO: 21021 - DNA, 385 bp, Glycine max
  Clone ID: LIB3106-057-Q1-K1-H12
cagccacagtttctgaggagaagaatatagtcgttcgagatggcccgtacgaagcagactggtcgtaagtccacaggaggaaaggctcctaggaagcagcttgcaaccaaggctgcacgtaagtctgcaccaactactggtggtgtgaagaagccacatcgttaccgtcctggtaccgttgctcttcgtgagattaggaaataccagaagagtaccgagcttttgatcaggaagctccccttccagaggctggttcgtgaaattgctcatgacttcaagactgatctgcgttttcagagccactccgtgcttgcattgcaagaagctgctgaagcataccttgttgggctctttgaggacactaacctgtgtgccattcacgctt

SEQ ID NO: 21022 - DNA, 167 bp, Glycine max
  unsure at all n locations
  Clone ID: LIB3106-057-Q1-K1-H2
gcagcgacagcnaagagggaagaanggatcatcaagggcatagccagaacccatgtatgggggtatgttggagtggagctcaattagcatatggttctaacccatatcagccagaccaaataactggtccaccggggtctgatatgacatcagtaggtgccattcaa

SEQ ID NO: 21023 - DNA, 204 bp, Glycine max
  Clone ID: LIB3106-057-Q1-K1-H3
tccacgcgtccgacaaccccgaaatggcttctgcttctgttcccatggctttctcgctgagctctgttatcaacaacaacaagccttcatccgaagccttcttcaggccactactcctacggcaaccaaagaggaccctttttactcacaaatgcagtgtcaaactccaaggctcaaatcaatgcatctttgaaggagaaggca

SEQ ID NO: 21024 - DNA, 212 bp, Glycine max
  Clone ID: LIB3106-057-Q1-K1-H4
cccacgcgtccgcccacgcgtccgttctttctctgcgattttttcttcaatttccagatcggcgaaactaaagaagatggagaaagcgatcagcagacagaagattttgcttcatcatctgaacccttcatcgtctacccacgtcaacgaatgatcctctgtctatgcttcagcatgtgtggcgggggacagcgctgcttatcaaaggacat

SEQ ID NO: 21025 - DNA, 210 bp, Glycine max
  Clone ID: LIB3106-057-Q1-K1-H5
gggagactcgccatgttttgcttatctaacctttctactatcaaacccattgtggctaatgccactcgtccccataacaacgattctgatcaaaccaaaccttcaattccagttcccgccacaaaatctttaccttgcagaaacaggcttttgaatgtagccccaaagccttctgtaatgcaaatggaacgcattgttggcgctggaagc

SEQ ID NO: 21026 - DNA, 322 bp, Glycine max
  Clone ID: LIB3106-057-Q1-K1-H6
ctcactcgttcattccaacctacccttattcttcttcttcaattccacacccatcatggaccgtttgccgatcctctttctcctcgccaccctcatcaccctcgccttcggtgcccgccacgatattctccggttacccttcgaagcatccactttgttcaaatcacccggtggcgatcaaaacgattagggcacgaggtgggccgttttaattgccggttccaatggctactggaattacaggcaccagtctgatgtttgccatgcgtatcaactactgaggaaaggtggtctcatagtttaaaatatttgtgtatttatg

SEQ ID NO: 21027 - DNA, 168 bp, Glycine max
  unsure at all n locations
  Clone ID: LIB3106-057-Q1-K1-H8
cccacgcgtccgcccacgcgtccganctttctctgcgattttgtcttcaatttgcagatcgggaaactaaagaagatggagatagcgatcagcagacagaagattttgcttcattatctctacccttcatcgtctacccacgttaacgaattatcctgcttctatgct

SEQ ID NO: 21028 - DNA, 445 bp, Glycine max
  unsure at all n locations
  Clone ID: LIB3106-057-Q1-K1-H9
tcgtctcgggccgnnttctctgcttatctctatcctacatctctctcttcccttggcctnntcctcgtttcctcgcagagactggttgagaactataaaaggtgtgtcaattgtccctttctgaatttgtgcccagtgcaacgggtcggtcatagcagagacactccgagtagcatagaagagtgaagcggtcattctannatgctcagtcttcacagtgcctgctgcnntcctaaactccaagaaaccccgtctaaattccttgaagaaacggtcagaaattgtgatgcggtggacataggggagaaatanttctcaatagccgttncaattatcttnnntctgttgggccactccatccttaattactataaggatnntagattactatnnttatgaggacttcgtggtgaatnggtcctggaatatgcccgtatttatttga

SEQ ID NO: 21029 - DNA, 370 bp, Glycine max
  Clone ID: LIB3106-058-Q1-K1-A1
gtgcctctcttccatctccccagccaaaacctctctcaggaaggccacattacgcccttccggcttcgcaacccttaacactcggtcttctccttcctcttcatcttccttcccctctctcattcaagacaggcctgtttttgctgcccctgcccccatcatcaccccaactgtgagagaggatatggcaaaggaatacgagaaagctattgaagaacttcagaaattgttgagggagaagagtgaactcaaagcgacagctgctgaaaaagtggagcagataacagcttctctagggacatcatcatctgatggcatcccatcatcagaagcctcagacaggatcaaagctggtttcattcacttcaag

SEQ ID NO: 21030 - DNA, 107 bp, Glycine max
  unsure at all n locations
  Clone ID: LIB3106-057-Q1-K1-G2
naagaaaggaggctcagaanagcgggacgtcacgccagccagaaccacagatcggaaaggggtatatcgccttcaaatactgtcgtccacggcggtgaaactcgcct

SEQ ID NO: 21031 - DNA, 385 bp, Glycine max
  Clone ID: LIB3106-058-Q1-K1-A10
acggtatgaactgctcaatgtttttgtggaatgttttattgcttcctcttggaatttctaatgagaaaaattgggatcatgctcatgacagttcacctgaatttacgaatagagatttgagaagccagtagtaccaacagttgcttcttactgttgcaacagactatgtgcatcttgtagcttaaccactgaacacatggtggattgacttgcaagaaaatgggaattggcttacatatcatgctttatgatatgctatctgttgacattttagattatgtgctacttcatatactactccttgcatgtatcagaatattcctatattgcagatggttgcatatatttgacaaaatcccttttttaaaataaatttaatctttat

SEQ ID NO: 21032 - DNA, 447 bp, Glycine max
  Clone ID: LIB3106-058-Q1-K1-A11
cccacgcgtccggtttttttctcccatcatataaaaccgaccctctcctttccctcttcacgagaccaatggctcccccaaaggccgagaagaagcccgcggagaaaaagcccgcagagaaggctccggcggagaagaagcccaaggccgagaagaagatatcgaaggaaggaggaagcgagaagaagaagaagagaacaaagaagagcgtggagacctacaagatttacatcttcaaggtgctgaagcaggttcaccccgacatcggaatctcaagcaaggccatggggatcatgaacagtttcataaacgacatcttcgagaagctcgcccaggagtcgtcgcgattggctaggtataacaagaagcctaccattacttccagggagatccaaacggcggtgcgtttggtcctccctggggagttggccaaacacgctgtctctg

SEQ ID NO: 21033 - DNA, 419 bp, Glycine max
  Clone ID: LIB3106-058-Q1-K1-A12
ggcaaaaggacacgtgtgaacaaaacagcaaaacagtgaaacctgagaatctgaactgagaggaagccatggcagtgagaataaacagctccattcaaaacaccctctgtctcctcaaccctcctctgttttccctccgttacagagcttcttccctgaagttgaaaccccaattgcattttcgtcaaaacccctctcgaggagctttattctgcacatgcgccaccaccgatatcactccccaaagtaccgaacactttgtcctcactacccctctctactacgtcaatgctcctccccacatgggtagcgcttacaccaccatcgctgccgatgccattgctcgcttccagcggctattggggaagagtgttatatttattactggcacggatgaacatggggagaaaattgcaact

SEQ ID NO: 21034 - DNA, 243 bp, Glycine max
  Clone ID: LIB3106-058-Q1-K1-A2
ttcctttttcgacccacgcgtacgcattagaccttaaaaaaaccatctatatatccaatctgtttaaatctcctaatctcaataatgtcaattgtgcaatattccatgggtaattggcttcctaatcactaccctactactaatactcctttattttctattcttctaaaaattaataattttctatgttttaacactcccaataaaaaactttcatatcatatttcttaattcccatctcaa

SEQ ID NO: 21035 - DNA, 433 bp, Glycine max
  Clone ID: LIB3106-057-Q1-K1-E10
cccacgcgtccgcttttcagtgtccttaaaatcttctctgcttcagaccagagcttgttcagaggaatcatcctcaggagatgccaatgaggtgttcacagatttgaaggaaaagtgggatgctcttgaaaacaagtccacagtacttctttatggtggaggggctatagttgctatttggctatcgtcaattcttgtgagcgccatcaactcagttcccttgcttccaaagattatggagttggtagggcttggatacactggatggtttgtctaccgataccttctgtttaagtctagcaggaaggagctagctacagacattgaatcactgaagaagaaaattactggaactgaatagagtggtgttagcaggtatcaagtcaagtttatcttctgagcaccaatttgttttgttgtgctggtatcccct

SEQ ID NO: 21036 - DNA, 384 bp, Glycine max
  Clone ID: LIB3106-057-Q1-K1-E12
aaaaaatttctagagcgagaaagtgtgaggagagagaaagtagctgatcctccatggcctggaccaaggaacgcgaaaactttgtctacaccgccaagctcgccgaacaagccgaacgctatgaagaaatggtggaagcaatgaagaatgtggcgaagctgaacgtggaattgacggtcgaggagcggaaccttctgtcggtagggtacaagaacgtggtgggtgctcgtagggcttcgtggaggattctatcgtcgattgaacagaaagaagaagctaaagggaacgatgtgagtgtgaagaggataaaggagtataggcagaaggtggagtctgagttgtccaatatctgcagtgatatcatgactgttattgatgaacacc

SEQ ID NO: 21037 - DNA, 168 bp, Glycine max
  Clone ID: LIB3106-057-Q1-K1-E2
tcgcccacgcgtccgcccacgcgtccgcactttcgaccatattctcttcttcttctctgtctcgatcatggtgcaaacaaggaatgttcagaggtgtcaggcagcgccattggggttcatgggtatcggaaattcttcaccctttttctgatgatgaggttgtggcta

SEQ ID NO: 21038 - DNA, 197 bp, Glycine max
  Clone ID: LIB3106-057-Q1-K1-E3
aaaaatctcaaaataaaacaaccaaaccacacacttcacacccttttcaacatccttatcgggtacaataacaagaagaaacaatgtcttgctccaatctcacaatgtttgtatcctcaaaacctttccttccttgttagtcaatctgaattgctcatccttagcagcatcaacatacacaccattcacatcacaaa

SEQ ID NO: 21039 - DNA, 168 bp, Glycine max
  Clone ID: LIB3106-057-Q1-K1-E4
acgaccacgcgtccggaaaaaggagatgaaagacaaggatggcaaaactgattcagaggatatgagtaagaaagaagatgatgggaaggatgatgaagagaagaaggaaaagaaggagtagtatgacaaaattgaagtaatgaatgttaaggtggaagtagatgatgg

SEQ ID NO: 21040 - DNA, 231 bp, Glycine max
  Clone ID: LIB3106-057-Q1-K1-E6
aagacgaaaggaacaagtacaaccctcgaaagtgaattaggaagaaaacacattgaaggaagaccatgacacagaataagattccagataaattcaataatacacaatttttttttttttattttcatttccccccctctagtagtcagtggtgggaagctgtagagatgaaagcagaagttattgtaggccataaggcctgtctagttatggaagaagtcatagaaatga

SEQ ID NO: 21041 - DNA, 230 bp, Glycine max
  Clone ID: LIB3106-057-Q1-K1-E7
gccaccttgaatgttccccctcttcctccttcaccgagagacgatgccatacaactttacgctgctggcaaaggatttggatgcgatactagcgttgtgatcaatatacttgctcattgagatgctacccagcgtgcctacattcaacaagaatactaagcaatgtattctggtgatcttctcaaacgcttatcttcagagctttctggcaagttggatactgctctact

SEQ ID NO: 21042 - DNA, 274 bp, Glycine max
  Clone ID: LIB3106-057-Q1-K1-E8
cccacgcgtccgaatttctctctgccttgctcatttacacacctgtccaacctttcacttgcagctgtatttgaatccctctctctcctttccaaatggccagcgttgaggttgcacatcaaacaccaacaacagttccagaaaatgaaacaaccgaggtaatcaagacccatgaaacaacctcggaaccagtaccagccactgaggctcctgcaacagaacaagcagcagctgaggttcctgctcaagaagaacaacaagcaacttaggttcc

SEQ ID NO: 21043 - DNA, 418 bp, Glycine max
  Clone ID: LIB3106-057-Q1-K1-E9
ggcgagtgaggaatgcagagaaatgagaattcgtcattggctgagtccttctgaggcgagggggccctgccaaacgcagaagctccggcagaaattgccaccgcaaacacgtcgaagacgggtagtaatagcactcgctttcattctcccacattcccaattctgagcgttaagatgagtgagaaagagaaaggcaataatagtgagggacagtcgacgttgctgcacggcaagtacgagcttggtcgtgtgctggggcacggaacgttcgccaaggtgtaccacgcgcggaacctgaatacagggcagcacgtggccatgaaggtggtgggaaaagaaaaggtgataaaggtcggaatgatggagcaggtgaagagggagatctcggtgatgaagatggtgaaacaccataacatcg

SEQ ID NO: 21044 - DNA, 167 bp, Glycine max
  Clone ID: LIB3106-057-Q1-K1-F1
tccacgcgtcctgtcacgcgtccgtccacgcgttcgtcacaaacaaaaccacttgcatttgatccattccaacttctcaacccaaccaacaacaaccataacacaagacagtgtcagcgcggtaccctgtcctttttgagcttgttagttcattcggggagatagtg

SEQ ID NO: 21045 - DNA, 458 bp, Glycine max
  Clone ID: LIB3106-057-Q1-K1-F10
gcggcaactaaaccttaatgcaagaattaggtttcatcaccgatgtgcatggatcttgcaacagcttcaagatcaacaagctcgctcgctttgctgtagaggaacaaaacaaaagagagaattcagttcttgagtttgcgaggtattttactgcattcctacattatatctttacattaaaattctttctcaacctaataatattctgtatcacttacttcaatgtaatttttagtagagccttgttttttgcattttttatatcatcttttattcttcatgatttatctatttttataatgctttttatatcttaattgaatgaacttttttatttatctatatctattgtatttattttattgtatttttttttgtttaatcatttacttttttctatttatttgatcttattttatttctactttttttatttaatttttttttttctttttttt

SEQ ID NO: 21046 - DNA, 377 bp, Glycine max
  unsure at all n locations
  Clone ID: LIB3106-057-Q1-K1-F12
cccacgcgtccggcaagatttgcattaatggcgtcctcagagccaatacctccaggggcagagcccgaaagccacctttcttctctcatctacgagatatcaaatgaagtccaagggatcatggagaacatgtttaagactgtcactgaaattaatcaaagttctgctgtggtagaggaggagatagagaaatgcaaaggttctgctctcgagaggaaaagagccttagatgaagagaaggattactttcaaaaagctgcttatgctgttcttgacatgctcagcanagaagtaaacgctctangttaccgggaagagcttgaagattaaaaaaacctcattcctgtaagaaaacttaatctttcaaatgacttcta

SEQ ID NO: 21047 - DNA, 110 bp, Glycine max
  Clone ID: LIB3106-057-Q1-K1-F2
caagggcataaaccactgctgatctagaaggtgatgttgaacctaccctatcagatgaaggtgtacctgccctatcagatgaagctgaaccagagccagttgatccttga

SEQ ID NO: 21048 - DNA, 217 bp, Glycine max
  Clone ID: LIB3106-057-Q1-K1-F3
caaagagctaacatgagattcaagaccggcatggctaatgaagaggaacagaaaaaccacgtcttcggcatcaaagatctcggtcacaagactctccttcagagtgatgcactctatcagtatatacttgaaaccagtgtctatgcaagagagcacgagtgcttgaaagagatacgcatgatgactgcaaaacacccactgaacatcatggcaacac

SEQ ID NO: 21049 - DNA, 130 bp, Glycine max
  Clone ID: LIB3106-057-Q1-K1-F4
cccacgcgtccgtccacgcgtccgtccacgcgtccgtgaggattggggaggtggcggaggcgagtgcggtggtggtgttgccggtctccgcggcggaggagagggagattttggaggtgccggatgagag

SEQ ID NO: 21050 - DNA, 115 bp, Glycine max
  Clone ID: LIB3106-057-Q1-K1-F6
aattgttttatatatgtatttcttgttataattgtacatttaattttatatgaaaatagagtcaagggaaatttgttcaacgtgattacttttatctctatttcaatacttgagt

SEQ ID NO: 21051 - DNA, 217 bp, Glycine max
  Clone ID: LIB3106-057-Q1-K1-D7
cccacgcgtccgcccacgcgtccggttgagaactaagaaggagaagcaaatggcttcctcaatgatgtctgtcccagctgttaccactgtcaaccgtgccggtgccggcatggttgctgcattcactggcctcaagtccatggttggctgtgtcactagaaagaccaacaatgacattacgttcattgctagcaacggtggaagagtgcaatgcatg

SEQ ID NO: 21052 - DNA, 308 bp, Glycine max
  Clone ID: LIB3106-057-Q1-K1-F7
cttgtctgttatcactgtgttgcgagcagtgatcgattctgcgaactgcgattcgcattgccaatttaaacagcgtgcgttcgtacgtcggagatggagtcgctaccgacgacgaatcgaggaggagcgagatcgaagcccgatcagacctcgaaatcgtccctcgtcatggccttcttctcctgcgtcgcgtggctctacgtcgctggaaggttatggcaagactcatagaatcggaatttgctcgctaggtcttctgaaaaagaattcatctcatatgtctaatgttcttacagtggaagataagt

SEQ ID NO: 21053 - DNA, 212 bp, Glycine max
  unsure at all n locations
  Clone ID: LIB3106-057-Q1-K1-F8
cccacgcgtccgtgttgcctcagctgagcctgaaaacaagccttcagaagctgcaattggggattgagcagancctgaaaacaagccttcagatactgttgttgaaactgttgcttaaggcatttgtgtttctatatttttatgtggaagtaggtctgnttcatatagtatttcatgtgctttgtgcatgtcagctattatatttggtgtgt

SEQ ID NO: 21054 - DNA, 128 bp, Glycine max
  Clone ID: LIB3106-057-Q1-K1-F9
cccacgcgtccgctctctctagataggtaaatatggctactccgccggtggtaaggggtccgatcttcacggcggtgagggcggtcggcgttgccgttactgtccttgtattgactttattcgtccat

SEQ ID NO: 21055 - DNA, 288 bp, Glycine max
  Clone ID: LIB3106-057-Q1-K1-G10
gccacttctgaatctattgaatcaacaatcatgtcggacgaagagcaccatttcgagtccaaggccgacgccggagcctccaaaacctaccctcagcaagccggtaccatccgcaagaacggctacatcgtcatcaaaggccgcccctgcaaggttgtggaagtttcgactttcaaaactggaaagcacggtcacgctaagtgtcactttgttggaattgatattttcactgtcaagaaacttgaggatattgtgccctcttcttacaactgcgatgtgcctcatgtg

SEQ ID NO: 21056 - DNA, 404 bp, Glycine max
  Clone ID: LIB3106-057-Q1-K1-G11
cgttttcttcagaaaatttgccatcgttgagggaagcgcgagagccttcgttgttcaagatgagagctaagtggaagaagaagcgcatgaggaggttgaagaggaagcgccgaaagatgagacaaagatctaagtaggtgcttgaacaaggagtggagatgatgtgcttttccatctgctaccagcttcatgacattttatgctgtcatggctcttatgatgatcttgaggtctagtggcgaggggagcttccatcttgactttagtttagctttactggtctaaagattgctgctttagtgtgggttaagttatgatattgagagttttgtgttatctaattatgtactggtacgttttgtatactttttggtttatcttaatagcttaaatattagtatttt

SEQ ID NO: 21057 - DNA, 441 bp, Glycine max
  unsure at all n locations
  Clone ID: LIB3106-057-Q1-K1-G12
acccacgcgtccgaatttctcaaatatcaagttatgacgagtttgcactttgcagagatggaaaagaaagagagaaagatcatggtggctgtggatgagagccaagagagcatgcatgcactctcctggtgcatcaccaatcttatttccgaaaccaacaagcttgttctgctttatgtcaggccaccttctgctttctactccttggatgccgcagggtataacttttcctccgatgttgttgatgctatggaaaagtacagtatgcacttggctaattcagtcatggaaagagctgaagctgtttgcagagacttgaacgctactaatatcaatatggagagagtggttggtgtaggacatgccaagaatgtaatatgcagtgctgtcaagaaactagaggctgacacctnggtcatgggaactcatggctatggattc

SEQ ID NO: 21058 - DNA, 109 bp, Glycine max
  Clone ID: LIB3106-057-Q1-K1-B2
tcgcaattatttgggcttccattttggctcaaatgttgtaatcattttcctatatctgtgtagggagtattgtctaagtgtttcaagtaactggattcagtggtggctt

SEQ ID NO: 21059 - DNA, 171 bp, Glycine max
  Clone ID: LIB3106-057-Q1-K1-B4
tcggcgcttcacgatgggtgcttacaagtatgtttcggagctatggcgcatgaagcagtctggtggtatgagattcttgcagcgggtgaggtgctgggagtaccgccagcaaccttctattgtccgtttgacatggtctacttgtttagacaagtgtcgccgcttgggttt

SEQ ID NO: 21060 - DNA, 208 bp, Glycine max
  Clone ID: LIB3106-057-Q1-K1-B5
gtttggaccaatccataggcgaagaagagaaaaaagagacaaggaccgtcttgagttaatgggattgagtgtagcagccagcagccataagcaacgcaacaattccatttccagtttttgattcgtcacgtcagacaaaggaaggggttagggtgtgacctgagatcaaaatgttgtggaggcttctatcttctcacttcaaaactct

SEQ ID NO: 21061 - DNA, 229 bp, Glycine max
  Clone ID: LIB3106-057-Q1-K1-B7
tcaatctttaattttcagtcatcactttatattggtcacattttcaaagtaacaaatataggatattgtgtgaaaagatggcaaaacttgctggctgtgtagctcatttttttattgcagcaatggttttgagcacgttgtacgtgaccttaactgtggcacaattagagatagcttctacttcacaaatggagactggagaagggtttgctttgtctgtttctggtgt

SEQ ID NO: 21062 - DNA, 232 bp, Glycine max
  Clone ID: LIB3106-057-Q1-K1-B8
cccacgcgtccggtccttccggggcttggttgtcaaagccgccaccgttgttgcccccaaggacactgcgataaatcctctgggagatagagtgctaataaaaattaaggaagcagaggataaaactgagggtgggattttgcttacatcaactgctcatacgaagcctcaagggggtgaggtggttgctgttggggaaggaaagacagttggtaagaacaatgttgatatt

SEQ ID NO: 21063 - DNA, 430 bp, Glycine max
  Clone ID: LIB3106-057-Q1-K1-B9
cccacgcgtccgggtgtgtgtaacaggtgctggaggattcgtagcgtcttggcttggtaagcttcttctttccaaaggctacattgtccatggaactgtgagagaccctgaacctgctactcagaaatatgaacacttgctcaaactccacggagcttctgaaaacctcactctcttcaaggcagatctcttgaactacgaatctcttcgctcagcaatttctggatgcactgcagttttccatcttgcttgccctgtaccctcaatcagtgttcccaaccctcaggcaattctttcttttgggctttcattgcttacaaaaacaataaaaaaggtatgtcatttaatcaattcttctgcaggttgaaatgattgagcctgctgtgaaaggaacaactaatgtacttgaagctagccttgaaactaaagt

SEQ ID NO: 21064 - DNA, 417 bp, Glycine max
  Clone ID: LIB3106-057-Q1-K1-C10
cttcttcttcttcttcttcactctacaaccactaaactaagtggttggttttggttgagtgtcatttttttgaagctcttaaacttaaggcttaagccatggcatcctcatcctctctgcatctatctcaggcccttctggcacgtgctgtgtaccttcatggctcttcttcttctgaccgtgtctcactctccttcccatcattctctggcctcaagtcacattctacatgcaaagcagcagcagccacgtcctcgcgtagaaggggtgcttgtccatccaccaacgttgttcgagccgctgcggttgagacactcgaccaaaccaccgaggtttctctggtggagaaatccgtcaacaccattcggttttttgccaatgattcctttgagaaaggccaactttgtcaccctggtc

SEQ ID NO: 21065 - DNA, 443 bp, Glycine max
  Clone ID: LIB3106-057-Q1-K1-C11
cccacgcgtccgcccacgcgtccggctttgcaaggcagcccttggccatgggaaaggatagagacaacatcaaggatggtagcagaggctgtgatatttttgaagagaagattcgaagattaccaggtggagaaacatgggatagaaaaatgaaaagaaaacgttccgtgggtactgttgttgccagatccattgatggtgaaggagagctgaaaaaggttatgcatataaggctagctaatgagtcaggtccgcagggttctgatgcccaaggtttgagatcaggatattctggcagtaatagcaagcttgatggtgcttccgtgcctgccacttttacgactgccaataatgagcaagaaaaggtgtcaaggggttcagtggatggatcaaataaggaacgggttgtgcttaaaggaaataaggttaatgttcgcaacaat

SEQ ID NO: 21066 - DNA, 445 bp, Glycine max
  Clone ID: LIB3106-057-Q1-K1-C12
aaaccctagcccctcttctcttcattcttcactcaggaaacaagcataatggccttgtgtaataaggttggaaatgtcttgaggcagggtgctgctcgcagcacacaagcacctgtttcatccatgcttaattacattcgctgcatgtcttcaagcaagctttttattggaggcctttcatatggagttgacgatcagtctcttaaggatgcattttctggctttggagatgtggttgatgcaaaagttataactgacagagactctggaagatcaaggggatttggatttgtcaacttctccaatgatgagtctgcaagttcggcactctctgcaatggatgggaaggatctagatgggcgaagcattagggtatcctatgcaaatgatagaccttctggacctcaatctggcggcggcggccgtggtggttatcgcagttggg

SEQ ID NO: 21067 - DNA, 118 bp, Glycine max
  Clone ID: LIB3106-057-Q1-K1-C3
tccacgcgtccgagggaagaagaacttagctacaagctaatgaaggatcaaagagaatggggcaagcaatggcattaatgactagcttacgtggttcctctcaggctgtattggaagg

SEQ ID NO: 21068 - DNA, 347 bp, Glycine max
  Clone ID: LIB3106-057-Q1-K1-C5
cttcacattttagaagaataccccctcttttgctgcatcagaggagttgtaaattaagagcatggctgcacaagctcttgtatcatcatcttctcttaccttctcagcggaggctgcaagacaaagtcttggaccaagatcactccaatctccatttggcttctccagaaaagccttctttcttgttaaggcagctgctaccccctctgtcaagcaaggatcagacaggcctttgtggtttgcatcaaagcaaagtctgtcttacttgtatggcagcttttctgttgactatggatttgaccctttgggacttttagaccctgaaggaacaggatggttcattgagc

SEQ ID NO: 21069 - DNA, 193 bp, Glycine max
  Clone ID: LIB3106-057-Q1-K1-C6
tgagatgaggtggagtggtgtcggaatcgactagtggtggaggaatgaacagttttttgtcttttgttgtttctcgtcacatctttttgctgttttccaaggcttgctcaaagtgcttgcttgaattgacaccaactttacttttaatcttttagtcttttatgaagacgtagtctttgtttttcttttcatg

SEQ ID NO: 21070 - DNA, 123 bp, Glycine max
  unsure at all n locations
  Clone ID: LIB3106-057-Q1-K1-C7
ggctganacacactgtcaccaaagaccaacccttttttcctacatagtgctctgccctaaggatagggtttaggtccccatacacacactcacaattggtggttgagtgcttgtacagaaaat

SEQ ID NO: 21071 - DNA, 235 bp, Glycine max
  Clone ID: LIB3106-057-Q1-K1-C8
tccacgcgtccgcccacgcgtccgcagagttgcagaagtgtgtgcgagtgtgagatgattgagaagattgacgaaggaacttatggtgttgtctacaaggctagggataagaagactggagaactagtggcattgaataaggtaaagactaacatagagagggatggctatccgatgtcatccttgatggaaataaacattctcttgtcttttaatcattcctgcaatgtgaatg

SEQ ID NO: 21072 - DNA, 239 bp, Glycine max
  Clone ID: LIB3106-057-Q1-K1-C9
gattcggcggcggcgaccaaaacggcggcgttacgttcgatggtttgcttcgtatatgggcgcttgattgttcccccgctaattaattaaacctctcgggtattggctgcgcgcgtttcgttacattaattaaacaagtgttgggttttgtactttgtccaagtttgagaaattacagtgattaattgaatccaaaacaaaccaccggtgtaatcaaaaaaaaaagttctagatcgcga

SEQ ID NO: 21073 - DNA, 122 bp, Glycine max
  Clone ID: LIB3106-057-Q1-K1-D1
cccacgcgtccggaggcttcacgcttgagtagccatggctcttcttaagctgccaggttcaggctatcaactggttgaattctaagaatgtcaatagcaggaggaaacgtttaatttcttgt

SEQ ID NO: 21074 - DNA, 440 bp, Glycine max
  Clone ID: LIB3106-057-Q1-K1-B11
cccacgcgtccgcattggcattgggtaacattgttgctcttcctctctcaaacttggaacgttctctaaagttatcttcttcttcatcctcttgttgtatcaccaaactcttccccatttcccgcatcaatgtctctcccacctcggtattagttcgagcctcttcctcatcctctttcgggtctcgcctcgaagacaccatcaagaagaccgtagctgagaacccagtcgtcgtttattccaaaacctggtgcacctattcttccgaggtcaaaatcctcttcaaaaaactcggcgtcgaccctctcgtcttcgaattagacgaaatgggtcctcaagggccacagttgcagaaggtattggaaaggatcacagggcatcacactgtgccaaatgtatttattggtggcaaacacattggcggctgtacagatacactg

SEQ ID NO: 21075 - DNA, 419 bp, Glycine max
  Clone ID: LIB3106-057-Q1-K1-D10
caccaatctcacccatttcaaaaaatggcctttagtgttactattcgtaaaatggccgctcttgttctttaccaattctgtctcaaactcttgctcctaatttcagtctttcagctttcctttgctgctaggagactcaaccagctggttcaggaccagtcacagttactccattaccacaacggtcctcttctatacggcaaaatcgccgtgaacctaatctggtatggtcacttcaaaccatcccaaaaggccatcatcaccgatttcgttacctcactgtcatccccatcgtctcagagcagccagccatctgttgccacgtggtggaaaaccacggagaagtactaccacctgagtcccaagaacaagaaggctgcttcttctctttctctatcactgggcgatcagtttctcga

SEQ ID NO: 21076 - DNA, 217 bp, Glycine max
  Clone ID: LIB3106-057-Q1-K1-D11
agtttacccactacatttctcgatcaaagcctatcaaattcaaaaagaattcatgcgcctatgattgatcagtgatcaatgtccattttcatagcttatctgttttgagagtgtagcttaaaattgtataatctgtgttttgtgccaagcttcagatcataaggtccatttggtttgcaatagaagcaaaatatgcactcgaaaaaatacttcttac

SEQ ID NO: 21077 - DNA, 438 bp, Glycine max
  Clone ID: LIB3106-057-Q1-K1-D12
cccatttcctctcagaaccctcgatcactctcacgcgctcctatatcctctccttcgccggcgctctctccaacgatcacaacaacatcgtcatcccatggcaaacgccgcatctggtatggcagtccatgatgactgcaagttaaggtttttggagctgaagacaaagaggacacaccgtttcatagtttttaagattgaggagcagcagaagcaggtcattgtggagaagcttggtgagccagcccaaggctatgaagatttcactgccagccttcctgctgatgagtgccgttatgctgtttatgattttgagtatctgactgaagggaatgtccctaaaagcagaatttttttcattgcatggtcccctgacacatcaagggtgaggagcaagatgatctatgcaagctccaaagacagattcaagagggagct

SEQ ID NO: 21078 - DNA, 206 bp, Glycine max
  Clone ID: LIB3106-057-Q1-K1-D2
cccacgcgtccgcccactcgtccgcagtcaccacctctgaactctctctctcatgtataaggggacatggctcatcatgaagattcaagtgcatggaattcgagtaaacctgaccctaagctcaatgaaagaattctgacttctctggcacggatgactgttgctgctcacctgtggcacgacttagagattggttaacagacccc

SEQ ID NO: 21079 - DNA, 204 bp, Glycine max
  Clone ID: LIB3106-057-Q1-K1-D4
caatgatttgggcttccattttggctcaaatgttgtaatcattttcctatagctgtttagggattatcttctaagtgttccaagtaactggattcagtggtggctttgactgtatttggcatctgatactattatgaattaatggcttgtattatcatgtaaatgttaatatgcatgtctggctgtctttacagcggctttgat

SEQ ID NO: 21080 - DNA, 485 bp, Glycine max
  Clone ID: LIB3106-056-Q1-K1-H1
aacccgggtctcgacacacgcgtgcgcccacgcgtccgtgaaattcgaacaatgattttttcattttctttttaatacttttttgggttagactccctaagaatctgtcgatatttccaattaaatcttcttgttcctgtgaaggtcctataaaaaaaagggctatgccctttctttactcagaagggccttattccaagttccaccaaacaagtttttattcatttgaaacatctttttttccgaatacaagaaaaaattcatttcaatttcaattatttctataagataaaatcgatatagatagattttatcttatagaaataattgaaaaatacattcaattatgtcttcgcgtatcaaatattttcttttcatatcgatgcgtacgatatttttccagcaattaatgtatgtgagacagaaactttcacttacagttttttctttttaatattgtatttcattttttttaataattaata

SEQ ID NO: 21081 - DNA, 412 bp, Glycine max
  Clone ID: LIB3106-056-Q1-K1-H10
cccacgcgtccggtctaatcagaaatggcctcttcagtgatggcatctgtggccctcaacgttggcctttcactggtgaggagtcctcaattagaggccttccctccctctcaaggaactcctcttcattcagagttgtggccagtggtggcaagaagatcaagactgacaagccttatggaattaatggtggcatggctttgagggaaggagttgatgcatctggcaggaaaggaaagggaaagggcgtttaccagtttgtagacaaatacggtgctaatgtcgatggttacagtcctatctacgacaccaaggactggtcttcaaccggtgatgtctacgctggctgtacgactggccttggctatctgtgctgtgactctacttggtcttcttgcttgtggtgcacttt

SEQ ID NO: 21082 - DNA, 450 bp, Glycine max
  Clone ID: LIB3106-056-Q1-K1-H11
gaaagttgtgagaggagttttcacgtcttttttaaatgggtgcttcgctatcggtctcgggaaaatccatccatgaattcatggtcaaggatgctaagggcagagacgtgaacctcagcatctacaaagggaaggttcttcttgtagtaaatgtcgcttcaaaatgtggatttacgaataccaattacacccagttaactgagctttacagcaaatacaaagacagaggccttgagatactggcatttccatgcaaccagtttctgaagcatgagcctgggagtagccaggacgtataggaatttgcctgcacaagatacaaggccgcgtatcccatttttggaaaggtacgtgtcaatggacctgatacagcacctgtctacaaattccttaaagcaaataaatcatgatttctgggttctaggataaagtggaatttcaacaagtttt

SEQ ID NO: 21083 - DNA, 379 bp, Glycine max
  Clone ID: LIB3106-056-Q1-K1-H12
tgacaaggtccttcctttttccaattcaaattacaacctagtctgaacaccgaagccacgcgaaacgctctttgttgttgtgggctatctttcattctttcttgatctggcacaagaaaaaatgtatggaaccaaaagcaaaatagaccttgcctttgaataccaatcccaagttgcagttttgaggcccagcatccattccaggagagcaaatctgactgtgaaattccaagacctttatgggttcacagttgaagggaatgtggatgatgtgaatgtgttgaatgaggtaagggagaaagtgaggcaacagggaagggtttggtgggcattggaggccagcaaaagggcaaattggtatttgcaaacaaccatatgg

SEQ ID NO: 21084 - DNA, 434 bp, Glycine max
  unsure at all n locations
  Clone ID: LIB3106-056-Q1-K1-H2
gtgagagcggcgaagaagaagaagaacaataatgaaggacgccggaaagagccacaaggcgaatgcaaagctgtcgccggagacgcggaaggatcggaaatcggcgacggggctgagtggatcgccgaagaagggaggccacggcgggaagttcacgtggatcggcaacggctacgagaacgtcgagatggagcacggtgctatggacgccaaggacccgaacttcgaggatccagcggagatcgccgccgtgtgatcgcggtggtttccggtgacgagatctgtacatactaataattgctaagagacgcggttttcgaattcaataatatgaagcaagtangagaagaagcgctttctgtgattgattgttatagatctgatctgtctctggaatttggtagtggcatggcacttgtgttgttgtacatata

SEQ ID NO: 21085 - DNA, 90 bp, Glycine max
  Clone ID: LIB3106-056-Q1-K1-H4
cctaaaaatatttataaaacaaacaaaaaaaaaacactataaagggaccttttaaacaaaacaaaaacataaaaaaaaaacaaaaaatat

SEQ ID NO: 21086 - DNA, 452 bp, Glycine max
  Clone ID: LIB3106-056-Q1-K1-H5
gtttgttttgtgctttagataaaagttctgtctatatcaagaggggttttaagatcatagtgggtgttttgcaacaatggctaagttctttgctgctatgatcttggcactctttgccatttccatacttcaaacagtggtaatggctgctaatgaacaaggaggccacttgtatgacaacaagagcaaatatggaagtggaagtgtcaagagttaccaatgcccatcacaatgctcgaggagatgtagccagacccaataccacaagccctgcatgtttttctgtcagaagtgctgcatgaaatgcctgtgtgtgccctcggtgtattatggtaataaagctgtgtgcccttgctacaacaactggaagaccaatgaaggaggacccaagtgcccttgagcttcaacttgtttaactttaaatgtcgctttcctacatatttattgctttc

SEQ ID NO: 21087 - DNA, 451 bp, Glycine max
  Clone ID: LIB3106-056-Q1-K1-H6
cgaggagaagcagaaggagcaaaagcaatgtcgccgaagaagccgagaaccacgacaggggaccctgatttggttagggggattggcaagtattcgaggtcgcagatgtaccacaagaggggcatctgggccatcaaggccaaaaacggtggcgttttgccccgccacgatcccaagcccaagcccgaggccccggcccagaagccgcccaagttctaccccgcggacgatgttaagaagcccctcgtcaacaagcacaagcccaaacccgcgaaactcagggctagcattactccagggactgtgttgatcctgcttgctgggaggttcaagggaaagagggttgttttcctgaagcagctcccatctggattgcttcttgtaactggtccctttaagatcaatggggttcctctcagaagggtgaaccaatcgtatgtcattggtacat

SEQ ID NO: 21088 - DNA, 70 bp, Glycine max
  Clone ID: LIB3106-056-Q1-K1-H7
gacaccacgcgtccgcaccacgcgtccgcaggacttaaagatgccttttttgaagctttcatagactaca

SEQ ID NO: 21089 - DNA, 456 bp, Glycine max
  unsure at all n locations
  Clone ID: LIB3106-056-Q1-K1-H8
attcactgaaactgctgttggtaagacaaggtctcctacaacagaagcagactctagaaagcaaattgatctgaacttgagtatgagtgaggacgaaggatctttcacaactataccaagtgacaatgtaaaaatgaaggcacaaatagatttggaagcccctgctcttcccgagacagaagaggatgctgttcttgaagaaaagctgcttgaaacttctctagcatcactgcaagtcccacaagacacagttgaactagcaaaggatgaacttatgacaaatgcagcagaggcaattgttgtcctgtcatctcttacctgtgatcaaggggatgattgtgtgatcagcaaaagtccatcagaaagtccaaaggtggacctgctaaattggtttgcagatgttgtttcctcatgcaaagataatgtanagggaaactgtgatgtttcaagggaaaa

SEQ ID NO: 21090 - DNA, 251 bp, Glycine max
  Clone ID: LIB3106-057-Q1-K1-A10
tttattccgtgtttcaaaagagggactcctattttgtttcagacaaagttttgttgcgaaggataaaactacgaggagcgttcctccatacgaatccaaggaggagagaggagacacagacacaaaggaaacggaaaaagcaacacacacaaaaaaggtctgagccttctcttatatgcaatacatagtttctgacacataccaaaaacatattatcaatataaaaggaccacatggatcatgaaaacatc

SEQ ID NO: 21091 - DNA, 280 bp, Glycine max
  Clone ID: LIB3106-057-Q1-K1-A11
gaatttattttcaaaaaccttctcttttcttaattgggtttccatctttgatttggggtcgttgccatggctccaaaggatcgcaagcaagttgctgatgctgcttcttctggtggtgggggtggcttttttgcttctattgcttccagcttgtccaatttcggtagtgccatgtccaaatccgttaatggtttggtgggctacgaggggctggaggttgttaatccagtaggaggtactgatgatgctgaataggaattcaagtaaggttctatggatt

SEQ ID NO: 21092 - DNA, 432 bp, Glycine max
  unsure at all n locations
  Clone ID: LIB3106-057-Q1-K1-A12
cccatcaaaacaatcattcctctgttaccaaaaccacactgtaaccggcctgtttttggtattggcttcaaatgagttcggctactaagaacgcggcaaacgcggttggggccaaaacggcaagagcatgtgacagctgcataaccaaacgtgcacgttggtactgtgctgccgatgatgcttttctctgccaggcctgcgactcttctgttcactcggcgaatcctttggctcgaagacacgaacgagtccgcttgaaaacggcgtcctacaagtccactgatgaacaacaacaacaacaacaacaacaaccttccacgtggcacactaagaaacctcgaacgccgaggcacgggaaacattctcgtaacaacaaccctntccatttggtccctgaagagggttcggaggaggcgaattcccatgatgaga

SEQ ID NO: 21093 - DNA, 161 bp, Glycine max
  Clone ID: LIB3106-057-Q1-K1-A4
attgtgataattttcgatgtagttgatagctatggctacccgaggattgctggaggttgaggttgatctgaagtccaacgcagacaagtactggcaaacccttaggaatgttactgaaatattccctaaggccttattatatgattacaaaatgattgagg

SEQ ID NO: 21094 - DNA, 95 bp, Glycine max
  Clone ID: LIB3106-057-Q1-K1-A5
cttgtcctaagcctcaacacatacacaaactcaaacacacacactctttcttctatcttcgggcaatttgagttgagattctgagagtaacaatc

SEQ ID NO: 21095 - DNA, 167 bp, Glycine max
  Clone ID: LIB3106-057-Q1-K1-A6
tttacgcgttcgatatgatccttccatctagcagcaccttaggatggcatagtcttaaaggtaatgtgctgggtcaaacgaagaatggcttatggtggatacctaggcacccagagtctatgaagggcgtagtaagttactattggctttgtgtagtttaaaataag

SEQ ID NO: 21096 - DNA, 113 bp, Glycine max
  Clone ID: LIB3106-057-Q1-K1-A8
actagttctagatcgcgagcgtccgtccttttttttttttttttttttttttttaatttttggttttgtttttttttttttttgttttttttttttttttttttttttttttt

SEQ ID NO: 21097 - DNA, 448 bp, Glycine max
  Clone ID: LIB3106-056-Q1-K1-G9
tgaacacacacatagaaactccaacaacaagtatgaagaagatgattctaaccctcttcttaggatgattttatctctcctctgcctctcccacgcctccgtggtggatttctgcgtagcagactacacaggccccaatggccccgcagggtactcatgcaagagcccagcaaaggtcacggtggacgacttcgtctactccggccttggcaccgccggcaacacctcaaacatcatcaaagccgcggtgacgccggcgttcgacgcgcaattccccggcgtcaacgggcttggaatctccattgcacgcctagacctagcagccggtggagtcatccctcttcacacgcaccctggtgcctcagagctgctggtggttgtgcagggaacaatctgcaccggcttcgttgcttcggacaacactgtgtacctcaaaaccctaaaaagg

SEQ ID NO: 21098 - DNA, 234 bp, Glycine max
  Clone ID: LIB3106-057-Q1-K1-A9
cacgatcaactgttcagacaagaggtttaatctgaatgactaagagcactaagccgggacatattagctagcacaccaagtcgtgtcgtcactcacactgtttaacaaattctagcttcaatgaagagcatagtacttcagactctattgctcgcaaagatacgcaaagtctcaaactccacctatgctgaattcaccactccagtttcactccaatgcatcctaagttgcttt

SEQ ID NO: 21099 - DNA, 403 bp, Glycine max
  Clone ID: LIB3106-057-Q1-K1-B10
aaaatgggctatggtagatgcagagcatcctttgttttggacggtttcagtctaaagcccgtgccataccccgttctgctaatcttatcactgatccttctattcctcggcatttcatggtacttgtcgtatgaagaagtagttgaagccgctgaagaacaactggggtggatgctgttagccacaccagtggtgctaatactcgtagttcgttggttatcgtcagtggatacttcagaatggttcttctttaactcctcgccatgggagaggcgtatgagaacccaccacttcccatcagagggtagctccccttggggtgttgctgctttgatcctgcttgttctcgtgcttcttcattatcactccacttttcttgatgcctggtttgtttgattttatt

SEQ ID NO: 21100 - DNA, 433 bp, Glycine max
  Clone ID: LIB3106-056-Q1-K1-F12
tttaagagggaaccttacttggcattatctatattgtgtttctgtttaaggattattctaggggtgttgcccacgattatgtgacgtctcaaagaattctggacttcctatgcttctcatttgaacatgcaaatatttggcgaggtgatggaacgtgttcttaatgtaattgatgtcaagaggatttggaccaagctaagactatacaagaccaggaactttcatgaaagggtgaggagtgcccgggtttgggcatcatctctggcttctgtttcccttggtgactcatcagctaggtgatggtctcaaatctcaatgtttgaactttgaactaaccatgttgttctagtcattttgagggttgtgaagagtttatcagatgaccttttgcacataactccctagttctgttactaattttgtttggtagtag

SEQ ID NO: 21101 - DNA, 455 bp, Glycine max
  Clone ID: LIB3106-056-Q1-K1-F3
gaaaggctcgtatgcgcgacttctctctcttgcattgattcaacgttgtccattctccgagacatcacaaagaaacccaactgagagagtgaagaataagaagaataaaaagaagaagaagggacgacaacaatggggggtttcgcaatgggttctgccttcgattccaaatctgggcagattattatggctgctttgcttttgatgattatgtccttctatgctggcaacctttttggcaacaatgttcccctttacgtctctcagcttgtttctcattcttctcccaacaatgtctcctccaacggtgctaccaaatttactaacaaagttgctctgacttactggaaaaccccgcttgtaattccagaaactggggtggatgtgtgccctttgacattcaatgagtatattccttgccatgatgcttcctatgtggcaacattggccccgac

SEQ ID NO: 21102 - DNA, 453 bp, Glycine max
  Clone ID: LIB3106-056-Q1-K1-F5
gggaaacctacaagtcaccgttgctgctatttagggcttaattgagttaattatgaatgagaggcatagtgataccacaactcaggatccagctgctaatgctttcttagccagtaccatgcgctatatagagttccagaaacaaaaagggggtgcggtaggcgagaagtatgaagccatcaaggtttcacatgctggatgaccgatacccttgttgttgtcgtgttagattttgaagcaatttgttcttgggcagttccagctactgtttacaattgtctttagatttcaactgaagaaccacaagtttgtgttcctttctgatatgtgctgacagcaaatgtacactccgtcattgagttaagactctgattcattgtgtaactaatgagacttggccaccattaaacattgttagatctttttttctttcaattttacaccaattaagag

SEQ ID NO: 21103 - DNA, 366 bp, Glycine max
  Clone ID: LIB3106-056-Q1-K1-F6
gtatgctgtcataacatacttacctatggacatttaaagtgggctccagttcatgactcgggttatgaacaattacgtgcggtggatcgatagatgacattattacaactctattcgaatagacaacttgacactttaaaatatacgacaagtcgtgtagtaaaatgttaactggtaaacatatcaagtggaaaagctttttagaggacctggattgactacaaaggtctgtgattatcttaacattctacctactattcttgagagaggatcatgtcattgttccttacttgtgtagcacggactatgataagatgtatcattgagaaacttaatgatcctattgtcgtaatttgatatgcaatt

SEQ ID NO: 21104 - DNA, 342 bp, Glycine max
  Clone ID: LIB3106-056-Q1-K1-F7
gggatttgcgtttactgatctcaagtcttctactctcactgtcgtagcgtagtgattgtgtcgtttctcttctcagttctcatggggacgatcttgctgctccgaaaaagggttttcctaacatcgaccattccatttccgggctgttcagttcgtgaatagactgttgcttgttttaacatgttatgattacgtcttttctttgtactattatatgcttctatttcctgcttccttttttcgcttcatttattccctttactttttttatcttgtttcttattctttttccatcatttgtttttcttaacgtttcttcttttttttctttcatattttttt

SEQ ID NO: 21105 - DNA, 176 bp, Glycine max
  Clone ID: LIB3106-056-Q1-K1-F8
cccacgcgtccggtctggtccaatcttaatttatatgtagtttctatggccaaacagccgggtatagttctagaatttactaataagattgaggatgtacatattctggaatacataattgatgcttttgctcccgaaagaaattgttcgagtaaaaaaaaaaaaactaataagat

SEQ ID NO: 21106 - DNA, 343 bp, Glycine max
  Clone ID: LIB3106-056-Q1-K1-G10
cccacgcgtccggaaacatttggaggaaatttaaggagcaaagagtcatctccattttttggaaatggatcttcttgacatcgactccattgccgctgccataaagggttgttccggcgtaatccaccttgcatgtcctaacatcattggtcaagtcgaagatcccgagaaacagatattggaaccggcgataaaaggaacggttaatgtgttgaaggcggcgaacgaagcaggggtggagcgcgtggtggcgacttcatcgatttcgtcgattatgccaagtcctaattggccagctgataagattaagggagaagagtgttggacggaccttgaatactgc

SEQ ID NO: 21107 - DNA, 440 bp, Glycine max
  Clone ID: LIB3106-056-Q1-K1-G11
ggcgcagtgcctccagaatctcccttcctcttacaacaagttcacttacaactgcgatggcgacacgttcaactacctcgttgagaacggattcacttactgtgtggttgctgttgagtctgctggacggcagattccaattgctttcctcgaacgaatcaaggaggattttaccaagaagtatgctggaggaaaagctgcaacagcggctgctcatagcctcaacagagagtttggacctaagttgaaggaggagatgcagtactgtgttgatcacccagaggaaattagcaagcttgctaaagtgaaagctcaggtttcagaagtcaaaggagttatgatggaaaatattgagaaggttcttgaccgtggggagaaaattgagcttttggtggataaaacagagaaccttcgctctcaggctcaagatttcaggcagc

SEQ ID NO: 21108 - DNA, 410 bp, Glycine max
  Clone ID: LIB3106-056-Q1-K1-G12
cccacgcgtccggttctatatcgcgagcggttgcccttttttatttttttttggaagaacggaaggccttatgaaaagagaggaaaagaaaataatagacttaaaaaagcacactgcatattcatcaaagcatcatcaaagcacactgcatcctaacagcacacgtacgtagaaaggtgaagttccaggtcttgcacaacatacacaacacaccataatttattttatatacaatcttatggtgcccaagatgcagatgcatggactaattaaacaacaacgttagtctgataggcagtgtccatagatatattgggtacccataaaatggccttgcttccaaggaaatggcaaacagggttagttccaggatcaactcccatgagttcatgaagcatgtgatgattcat

SEQ ID NO: 21109 - DNA, 454 bp, Glycine max
  Clone ID: LIB3106-056-Q1-K1-G2
cctgcctggtgccaatgttgccactggacctgcacttcctcaacaccttgctgtgcatccggattcccagcctactcttcctctgggacattttgctaatatgattagctatccattcttgcctcagagctatacctacatgccatcagcatttcagcaggcttttcctggaaatagcacataccaccaatctctggcagccatgcttccacaatataaaaatagcatttctgtcagtagcttacctcagtctgctgctgctgctgctgttgcatctggatatggttttggaagttccaccagcattcccggaggaaattatccattgaacccacctgctgcgcctactagtacaactattggatatgatgatgttataaactctcagttcaaggagaacaatcatattatttctctacagcagaatgagaattctccgatgtgggttcacgga

SEQ ID NO: 21110 - DNA, 458 bp, Glycine max
  Clone ID: LIB3106-056-Q1-K1-G3
gaagaagaagaggcatgcccagaagaaaagggagatattcccttgcaatgtcatgcgccggagacaccaactttggtggatactggtggtatagcagtgacgaatacgacgaaaccgacacccttatgtcctcgaaaagcctctcgtgggattcctacgggtcccggcgccggcgcaggaataatgaacggagctacgacatgcgtgttctgccgctgaacggtaaggtgaaggatacattcgcggtggagaagcgctacagcgacccttacagagatttcaggacttcgatgctcgaaatgatcgtcgagaagcagattttctcgaccgctgatttggagaatctcttgcagtgttttctgacgatgaattcgcatcaccattataagatcattgtccatgtcttcaccgagatttgggaggctctgttctctgactggtattgataattagagaga

SEQ ID NO: 21111 - DNA, 330 bp, Glycine max
  Clone ID: LIB3106-056-Q1-K1-G4
gacacacgcgtccggtgaaacagaaactgattacaatatgaatcagtgtgatgaaaattaacgtccttgcggggctcctttctacaactttgggagcatcacaattccatgcatacaacatgtcccatcttccaataaacacttactttcgtgcccctactccgtaagtaaactgcaccaagttaaacgcttacactagaagcacacaacatcttttactttaaaaccatacactaacacttcgatcaatcaactaactgaaacatccattgctaacaatatataacatacttctaaacatttaaccaacattcttactattatgccata

SEQ ID NO: 21112 - DNA, 450 bp, Glycine max
  Clone ID: LIB3106-056-Q1-K1-G5
caattccgcgctttaacaacagaaagaaattcacacatttccctttcaatggcacgaaccaggcaaacagcgcgcaagtccaccggcggcaaggctcctcggaagcagctcgccacaaaagccgctagaaagtccgctccggcaaccggcggagtaaaaaagccgcaccgttttaggcccggcacggtggcgctgagggagatccgaaagtaccagaagagcacggaacttctgatccggaagctcccgttccagcggctggtgcgcgagatcgcactggatttcaaaaccgatttgcggtttcagagtagcgctgtttccgcgcttcaggaagcggcggaagcttatttggttgggttgtttgaagatactaatctttgtgccattcacgcaaagcgcgtcaccatcatgcctaaggatattcaacttgcaaggaggatcaggggcgag

SEQ ID NO: 21113 - DNA, 187 bp, Glycine max
  Clone ID: LIB3106-056-Q1-K1-G6
ggaaacagaaactgaattacaatatgaattgaatgaagatgagggtaaggttcgatagtggtaagaacatgtggaggaaagggaaacagaaacaggagcagaagcgcaacctgaagagaagaaagatgagggtatggttcgggacagtgaaaaactcgtgtaggaaacgcaaacggatacagaagga

SEQ ID NO: 21114 - DNA, 359 bp, Glycine max
  Clone ID: LIB3106-056-Q1-K1-G7
ccactttgtagtgtggcaatccacaattgttttctttaattttacgattccaatccctcccgaaaaaaaaaaaaaaaaaaaaaaaaaaaaaaaaaaaaaaaaaaaaaaaaaaaaaaaaaaaaaaaaaaaaaaaaaaaaaaaaaaaaaaaaaaaaaaaaaaaaaaaaaaaaaaaaaaaaaaaaaaaataaaaaaagtcccccccttttaaagtctccaaccttctaaccccatcaatccaattacaaacctcttaaaaatatcccccaaaataaaattcatatcccttttttaaaaaccatattccctttaaaaccctttaatttcccaatttaaatcccttttaaaaaaaatccttttt

SEQ ID NO: 21115 - DNA, 444 bp, Glycine max
  unsure at all n locations
  Clone ID: LIB3106-056-Q1-K1-G8
cccacgcgtccggatcgagataactagaaacagtgtgatgaaaatgaaggtccttgtttgcttcgttgctacaattttggtagcatggcaatgccatgcgtacgatatgttccctctccgaatgaacactggctatggtgcccgtactccggaggtgaaatgcgcaagttggaggcttgctgtggaagcacacaacatctttggctttgagaccattcctgaagagtgcgttgaagcaacaaaggaatacatccatggcgaacaatatagatcagactccaaaacagttaaccaacaagcttacttttatgccagagacctcgaagtccatcccaaggacacatttgtgttcagtatagatggcaccgtactctctaatattccatactacaaaaaacatggatatggngtggagaaatntaactcgaccttgtatgatgaatg

SEQ ID NO: 21116 - DNA, 449 bp, Glycine max
  Clone ID: LIB3106-056-Q1-K1-F11
ctcttgctgacttggcctctactcaccccattaggttgggacttgctctcaacttttctgtgttctattatgaaatccttaactcgccagatcgtgcttgtaatcttgccaagcaggcatttgatgaggcaatttccgagcttgacacattgggtgaagagtcatacaaagatagtacattgatcatgcaacttctccgtgacaatctgactttgtggacatcatacatcacggacgatgctggagatgagatcaaggaaacatctaagcaacaaccaggcgaataggcgatggcagttgcgatgtggtagttgattggatatgtattaccgataatatggatccaatgtggcttgccatagtgggattattgcattaatgaattttatgatttcaagtgcgcgttgcgcttgggatttacaatgtttcagtggattgtctaatgtgtt

SEQ ID NO: 21117 - DNA, 447 bp, Glycine max
  unsure at all n locations
  Clone ID: LIB3106-056-Q1-K1-D9
cccagtcgtccgcccactcttccggttctttctctttcattcatccttggtaatggcttntgcatggcaagcaaccttagcaggcaacacctatgccttttcttccaggagattctccttgaagcaccaaaagaacagtaagagaaggttttctttgttcactgttagagctgattctgatgactctgactgcaatgaggaagagtgtgccccggataaggaagtntttttttgtttttttttttttttttttttttttttttttttttttttttttttttttttttttttttttttntttttttttttttttttttttttttttttttttttttttttttttttttttttttttttttttttttttttttttttttttttttttttttttttttttttttttttttttttttttttttttttttttttttttttnttttttttttt

SEQ ID NO: 21118 - DNA, 397 bp, Glycine max
  Clone ID: LIB3106-056-Q1-K1-E1
ggaagaatagaatgggatctggaagtggatattctcactggagagttcttcaggagaaggggtggatggatgaagcatccgatgctcaccaatcagctccgccacgccactcctggccttggcatcgccgtcgtcgccttcggtatctacctcgtcggcgaacaagtctacaataggctctatgctcccgatcctcattcgatttctcacgtgaaagccggggatcaccactaaacgtttggacggacgcactccattccatcatcacttaatttgcttgctagcattgttctcgcagcctttaatgtttatattttcagaccgtgttcgcttctttgtgcactcactatgttgtcttgtatgcctacattttatgcctttaatttttttttacatt

SEQ ID NO: 21119 - DNA, 305 bp, Glycine max
  Clone ID: LIB3106-056-Q1-K1-E10
cagtgagtgatcggtgttcacttgatcctttataagtcgtcatcatcatcatcatcatcacggttgattgaagaagatgccgagcagaaacatcgccatcggaaggcctgaagaggctactcaccccgacacgttgaaggcggggttggctgagttcatctccaccttgatcttcgtgttcgccggttcaggttccggcatcgcctacaacaagctcaccgacaacggcgccgccactcccgccggcctcatcttcgcttccatcgcccatgctttcgccctcttcgtcgccgtcttcgtcggct

SEQ ID NO: 21120 - DNA, 413 bp, Glycine max
  Clone ID: LIB3106-056-Q1-K1-E11
gtgaccgacagtgaaggatggactgttgctgctgctcacacacatacatacaagctatctagacaggatatgtgtacgattacggagtaaaaaatgaaaatgatcaataatccatgattctgagactgtataaatatataacataacagaccagtgagtgaatagtgtgattaagctattgacgtcgatgcgagaaatgagaatgaagaagctgattttaatactcatagcagcatctaccttcgtttctgtagctagatctgcgtctgatcatttcttcgaaaactatggcgtatcactggcagttgctgcaacacccggacctacacctgtcatggaacccctcactcttattcacggagctgctttcaaaggagccgtctgtttggatggaacatcgcctggttaccact

SEQ ID NO: 21121 - DNA, 370 bp, Glycine max
  Clone ID: LIB3106-056-Q1-K1-E12
gttgagttgttccaagactcggctgcgtcggtctctctcggtttcaactgtgaactgtgatgtggtgatggtttcataaatctgactgcatccatggcttcggagaagatttcctcgattctcttgttttctgctgtaattttgcttgtccgtgatgctccttctgccatagctggggacatagttcacgacgacgattcaactcccaaaaagcccggttgcgagaaccagttcgttctggtaaaagtgcaaacttgggtcaatggtgtcgaggatgttgaatttgttggtgtgggtgccagatttggcagagctattgtgtccaaagagaaaaatgcatagcacacgcgccctattctttcagatcctc

SEQ ID NO: 21122 - DNA, 418 bp, Glycine max
  Clone ID: LIB3106-056-Q1-K1-E2
cccacgcgtacggaactaatgaataagctattaatttccatggaagaagtttgactgctcgcggtggtgcttctcacaatgttctcctctgcctatggctatggatatggtggtggctgggttaatgcacatgccaccttctatggaggaagtgatgcctcaggaacaatgggtggggcatgtggatatggcaacctctacagccaagggtatggaacaaacactgctgctttgagcactgctttgttcaacaatggtcttagttgtggctcatgctatgaaataaggtgtgtgaatgaccataggtggtgcctccctggctccattatggtcactgccaccaatttctgccctccaaacaatgccttaccaaacaattcacgatgatggtgcaacccttctatgcaccattttgacc

SEQ ID NO: 21123 - DNA, 456 bp, Glycine max
  Clone ID: LIB3106-056-Q1-K1-E3
atcttgatttcacgctcagcctggcgtcacctgacaattttgaagcattggggttgcaaagtggaattgttctgaacaagccttgttcttatcgtcgccgctgtagacatggtttatcactctagttttgtgaatgaagatggagtgagtagagcatgtgggtgccctcttcttcctctcaagagccacattaagggacctgctcctgtttcagatcaagacagaactgatattgtggatgaagccataaccttcttccgagccaatgtgttcttcagaaactttgacatcaagagccctgctgataagcttctcatatacttgaccttttacattaatgttgctctcaagaggcttgaaggttgcagaaccttggcagaaggaaccaaggcaatcatcaacttgggtctcgaaaaggttcctgtccctggagagtctggctttccattttcgggc

SEQ ID NO: 21124 - DNA, 449 bp, Glycine max
  Clone ID: LIB3106-056-Q1-K1-E4
cttgcatagactattgattaagaaagctattgtcattgatttgctagctccaacaatgggttctagcagattatcattcattgttagtacttgtgcttgtaaccttttcatccatgatcattgactcaagggttgcagaggcacgtaccctgccaaaatcagccttattgccttccaaagttgatatacctactgttgttcctcttccactggtggcaccactgccaaatttgcctgttactctccctccagtgcctgaactacctgcagtacctaaagtaccaattcctgaagtaatagttaataacgccaaaataatcccttgagtacctatgatctatccagtcactactacttattttgtcacttgctaaattaacttgttgttgccatcccagggtggttctggttctggtggggtttaatttctgtcattcaattacatgcta

SEQ ID NO: 21125 - DNA, 459 bp, Glycine max
  unsure at all n locations
  Clone ID: LIB3106-056-Q1-K1-E5
cccacgcgtccgcgagataactagaaacagtgtgatgaaaatgaaggtccttgttttcttggttgctacaattttggtagcatggcaatgccatgcgtacgatatgttccctctccgaatgaacactggctatggtgcccgtactccggaggtgaaatgcgcaagttggaggcttgctgtggaagcacacaacatctttggctttgagaccattcctgaagagtgcgttgaagcaacaaaggaatacatccatggcgaacaatatagatcagactccaaaacagttaaccaacaagcttacttttatgccagagacctcgaagtccatcccaaggacacatttgtgttcagtatagatggcaccgtactctctaatattccatactacaaaaaacatggatatggcgtggagaaatntaactcgaccttgtatgatgaatgggttaacaagggcaatgc

SEQ ID NO: 21126 - DNA, 535 bp, Glycine max
  unsure at all n locations
  Clone ID: LIB3106-056-Q1-K1-E6
actcggtctggaattacccgggctcgactccacgtcgtctcgtcccatctcgtctcgtgcccatataccaaactctacatatatgatggtaatagcccaatgaaatgacccctagtggtgcctanntaatgcaaccaaatcagagtcacatatgagtcaatggagtgcccatgaggaaaaatcnncagcttcttttccaatganntatccatcaacttgggtnaggaatccactcaccccaaaatgtgaacaacaactaacacaagnggtcactctctttggtcagcttccactcttccttgcccaacactgtcttgtagttttggtgctatgctatcaaagcttccatatgttactccttccaataatccccctcaagttcttgaaaccaataagaccaaccacaaagtgaagattgaggagtgcagatttcatggtgctgctaatggagatcagaacaaaaatgcatggtggaatccttgataaataagagagaaccgctagcaacacactctnttaaacacatacttcattg

SEQ ID NO: 21127 - DNA, 399 bp, Glycine max
  Clone ID: LIB3106-056-Q1-K1-E7
acgcggcgtacggacatcgcactactaatcactagatcatgaacatttattagatttgcagcatcagcgctaagaacgctggctcagttacgatgtggagcagctcttatccgctgttaaatactacgatgcggattacacaatacctgcgtgagaaaaccactgcataatagcgcattgccgcatttatatatactaacatatattgctacatggaccggataaccgttctcaccaattgcaatctcagatggtggattacgacttatgcgagtttctgagatttggactcatcagacactacgtcatcgataggcatatttgtggcctaatcatgcacttgacggtacacattaatgcagatgctacgaggcttgtaggcagcagaagattgtctga

SEQ ID NO: 21128 - DNA, 456 bp, Glycine max
  Clone ID: LIB3106-056-Q1-K1-E8
aaaaggccatataattttttttatttgaaataatgtccgggatcatccacaagattgaggggaccctccatgtgggagggcacaagaaagaggagcacaaaggagaacaccatggtgagcacaaaggtgaacacaaaggagaacaccatggtgagcacaaaggtgaacacaaaggagaacaacaccatggggagcacaaggagggacttgtggataagatcaaggacaagatccatggtgatggccatgacaagggtgagaaaaagaagaagaaggacaagaagaagaaggagcatggacatgaccatcatggtcatagcagcagcagtgacagtgattagatcttatatgttaaggtgtacggtacgatggtagtgaggagccagaatccctcttcctgctttatgatataataaaaataaaatagcgattccggaaatcatgtctgtagctgct

SEQ ID NO: 21129 - DNA, 397 bp, Glycine max
  Clone ID: LIB3106-056-Q1-K1-F1
ctcaaattcgatttgtaccaaattttcttcacaaaatgtctggtcgtgggaaaggtggcaggggtttgggaaagggaggtgccaagaggcacagaaaagttcttcgtgataacattcaaggtatcacgaaacctgcgattcgtaggttagcgagaagaggtggcgttaagaggatcagtggtttgatctatgaggaaaccagaggagttctgaagattttcttggagaacgtgattcgagatgctgtgacctacaccgagcacgctaggaggaagacggtgactgccatggatgtggtttatgcgctcaagaggcatggaaggaccctctatggtttcggaggctgaatgattgattcttagtattattaaattatgttgcatgatataatattatg

SEQ ID NO: 21130 - DNA, 430 bp, Glycine max
  unsure at all n locations
  Clone ID: LIB3106-056-Q1-K1-F10
tgctagccacacacacatatcattccctcttttcactaccgcaatgaccacccaagcttccagcttcgttttcaccgatccctgcgtcgcaacccctttccgccgccaccggaatcccttcgttgttcgagcccaagcggaaccttcagataaatccgttgaaattatgaggaagttctcagagcaatactcccgtaagtcaggaacatacttttgtgttgacaagggggtcactttcttttgtatcaatgttttttctgaccatatttattctttntgtttctccattttactcttttcttctttttctttgtatgattttctttttgttttttttttatttttgaatttattctttttttgttctttttattttttttatttttttatttttctttatatttaattttactttttttttttttttttt

SEQ ID NO: 21131 - DNA, 457 bp, Glycine max
  Clone ID: LIB3106-056-Q1-K1-D8
cccacgcgtccgcccacgcgtccgaaagctatggccacctccaacttctctattgttctcgccgtctccctagccttctttttggtgctacttaccaaggcacactcgaccgataccgtttctttcaccttcaacaagttcaacccagtccaaccaaacattatgctccaaaaagatgctagtatttcatcctctggggtgttacaactcaccaaagttggcagcaacggcgtgcccacctcgggatctctcggtcgtgccctttacgctgccccaatccagatttgggacagcgaaaccggcaaggtagccagctgggctacatcctttaaattcaacattttcgcacccaacaaatcaaactcagctgacgggcttgccttcttcttggcacccgtcgggtctcagccccaatccgacgatggatttcttggtcttttcaacagtcccttaaagg

SEQ ID NO: 21132 - DNA, 405 bp, Glycine max
  Clone ID: LIB3106-056-Q1-K1-C2
gattttgattgttgcaactggctcaacagttataaggctgacagatttcggtgtagaaggaggtgatgcgaaaaacatcttttatttgagggaggttgacgatgctgacaaattgtacgcagcaatcaaggcaaagaagaatgggaaagctgtggttgttgggggaggatacattggtctggagcttagtgcagtgttgaaactcaacaatattgatgttaccatggtctacccggagccttggtgtatgccacgatcttttacggctggtatagctgaattctatgagggatattacgcaaatattggtgtaaatattattattggaaacagttttattttgttcattcttattccgtttgatcggttatttttaccttgattcttatcgtaaatttttttgta

SEQ ID NO: 21133 - DNA, 459 bp, Glycine max
  Clone ID: LIB3106-056-Q1-K1-C5
gagcttcccttttaatggattccttgtgtttttgaccctttattttgttgtggtgagagggcctaatttcagtaagtatgtgaggttcaacactatgcaagccgttgtccttgatgtgctcttgattttccctgacctccttgaaagagggtttaatcccaaagatgggttgggattggatttgataatgagtttggatagcactgtgtttttgttcctcttggtgtgcttgatttatggttcttcttcttgcttgctgggtcaaatccccagattacccattgttgctgaggcagctgataggcaagttctttgaatcaccaatccgttattgagataatttaattgtatagcaaagcaacttcagcctaagtagtgtaaaagttagcattttcactgccttaatagttactatcttggaaagtttctgcaaaacggattttagttgtttcttacatt

SEQ ID NO: 21134 - DNA, 426 bp, Glycine max
  unsure at all n locations
  Clone ID: LIB3106-056-Q1-K1-C6
ctaaactaaaaatggatcgagaatggggatcgaagccggggagcggaggtgcggcgtcggcgcagaacgaagccatagaccggcgagagcgtctccggcgattggctctggagaccatagacctggcgaaggatccctatttcatgcgcaaccacctcggaagctacgaatgcaaactctgtctcactctccacaacaacgagggcaactacttggctcacactcagggaaagcgccaccaaaccaacttggccaaacgtgcagctcgcgaggccaaggactcccccgcgcagccccaacctcacaaacgcaaagtcactcttcgaaaaacagtgaagattggacgacctgngtaccgtgtcaccaagcagtatgacccggagactaaacaaagatctctcctattccagattgaatatccggaga

SEQ ID NO: 21135 - DNA, 451 bp, Glycine max
  Clone ID: LIB3106-056-Q1-K1-C7
atatgctcaagcctgggatgatgcattaagcaaggcaagatttgagttccgatggatggagcagtttgctttgtcattggatccgatgacagccatgtccttccatgacgaaaccctgccagcagatggtgcaaaagtggctcatttctgctcaatgtgtggccctaaattctgctctatgaagataaccgaggatgtgaggaagtatgctgaggaacatggctatggaactgatgaagctttgcagcgtgggatggatgctatgagtgctgaatttcaagctgtcaagaaaactatcagcggggagcaacatggtgaagctggcggagagatttacttgccagaagaatacgttagttccaagaggacttaaatggagcaaatcagttggaagaacttggagctagcttcccaactggcttatcaaggtgtggagaagcattattaagcc

SEQ ID NO: 21136 - DNA, 85 bp, Glycine max
  Clone ID: LIB3106-056-Q1-K1-C8
gggcagtgttttgtttttggattgcttattgctttacatgtggttgttgttatgttgatgaatacttacaacacaattgaggtat

SEQ ID NO: 21137 - DNA, 445 bp, Glycine max
  Clone ID: LIB3106-056-Q1-K1-C9
atggtggggaaaacaaatgcatactatgtggaatccactggagcatctttcactttagattgtagtgttagtctcatccaccgatactgtggaacactccctcgagataagtactcctgtgtaaagcccaattttgagtttctgtctgtggaagggggttatcagtgtaaattaatattaccatctaattcagctttccaaacaataattggtccttctggaaaagatatgcgtttggcaaagcatcttgcatgtttcgaagcttgtaagaagctgcatcaaatgggtgccttaaatgaacatttggttccattaattgaagattcttcagaagatgaccatattgtgaaaaataaagaatcaagttctggtgcagggaccacataaagaaaggagttacatggaaaagctaacattcatgcattaaggtgtgcatggggagaca

SEQ ID NO: 21138 - DNA, 220 bp, Glycine max
  Clone ID: LIB3106-056-Q1-K1-D1
gagagtccaaattcggatttttgaaacggcttttactccatttcgcttctccttcactgtcgcacactctcacacactccgggggatcgtttctccctaccgattcacgaaaccctaatatttatggttcctattccgttgagcgaatatttagggttagattgagctgaggtgacatattcatcagcatcttctttgataaaatatgtaatggtttcat

SEQ ID NO: 21139 - DNA, 408 bp, Glycine max
  Clone ID: LIB3106-056-Q1-K1-D10
gcttaggatcacccaagatagaacctaagactcacaacacaacacacagagagagtttgaggaagaaatcatcatggcttcagcagcatctgggtttgtgctgtctcttaatgttgcagcttccaccacaaactcaagggtggtcttgttcaacacaaagaaccacgcttctaggcttcttgtgagggcttcagacgagcctgcagcggcggcacccgcaaccaccacccctccagctgaagctgaagcaaagccaaaaccaccacctattggccccaagagaggtgctaaggtgaagattcttaggaaggaatcctactggtacaaaggcactggttcagtggttgctgttgatcaggaccccaacactcgctaccctgttgtggttcgattcaacaaagtcaacta

SEQ ID NO: 21140 - DNA, 447 bp, Glycine max
  Clone ID: LIB3106-056-Q1-K1-D11
atagcgtcaatggcatcatcatttgtgggtactttattacccaaccacttcacacaaaccaagcactgatctgttcctgcaaggagatcacgtgctccaagaaggaggagagtgcacttagcaacaacaagagcagagaccatgactactgtcatagaaaaactgggcattaagattgagaggaaccctcctgagtccaagctcactcaactgggtgttaggcaatggcccaaatggggttgccctccaagtaagttcccatggacatatgaagccaaagagacttgctatcttctggaaggaaaagtgaaggtctttcctagtgggtcgaatgagtcagttgaaattgctgctggtgacttggttgtgtttcccaaagggatgagttgcacttgggatgtgtctgttggtgttgacaagcactaataatttgaataaatcctacaa

SEQ ID NO: 21141 - DNA, 449 bp, Glycine max
  unsure at all n locations
  Clone ID: LIB3106-056-Q1-K1-D12
cccacgcgtccgcccacgcgtccgatcgagttaactagaaacagtgtgatgaaaatgaagggccttgttttcttcgttgctacaattttggtagcatggcaatgccatgcgtacgatatgttccctctccgaatgaacactggctatggtgcccgtactccggaggtgaaatgcgcaagttggaggcttgctgtggaagcacacaacatctttggctttgagaccattcctgaagagtgcgttgaagcaacaaaggaatacatccatggcgaacaatatagatcagactccaaaacagttaaccaacaagcttacttttatgccagagacctcgaagtccatcccaaggacacatttgtgttcagtatagatggcaccgtactctctaatattccatactacanaaaacatggatatggngtggagaaatttaactcgaccttggatga

SEQ ID NO: 21142 - DNA, 380 bp, Glycine max
  Clone ID: LIB3106-056-Q1-K1-D2
tttcataaggactttagttcttccaaaaaaaaataatagacttaaaaaagcacactgcatggtcatcaaagcatcatcaaagcacactgcatcctaacagcacacgtacgtagaaaggtgaagttccaggtcttgcacaacatacacaacacaccataatttattttatatacaatcttatggtgcccaagatgcagatgcatggactaattaaacaacaacgttagtctgataggcagtgtccatagatatattgcgtacccataaaatggccttgcttccaaggaaatggcaaacagggttagttccaggatcaactaccatgagttcacatagcagggatgattcatgggcttatgtatataactgccctatattta

SEQ ID NO: 21143 - DNA, 443 bp, Glycine max
  Clone ID: LIB3106-056-Q1-K1-D3
gtggaagaagagaaagtggcatcgcttaggtacagatacagacacaacctggtaaaaatcgggaccccagtgccgcacaattttgcttcactcgcagcggaggtttacttttgatctagtacctgctatccctatgtataagcatggacttctagcatactattgtttgattaaccaagttcttccatattggttgaggaagcctcgagtcaatatttagtttttgctgccatctgtgggtttctgatggatgatgccgggcatcgtgaaaatggaaggcacaaagcagcagatcaatataaatctgctcagggacagtggttgatgcaacatcagccttccatgaagcagattatggcaattatggctgaaagagatgcagccattcaagaaagaaatctggccatttccgagaaaaaagcagcatatgctgagcgcgatat

SEQ ID NO: 21144 - DNA, 453 bp, Glycine max
  Clone ID: LIB3106-056-Q1-K1-D4
gttcagtctttcttggaactttgttactctcacacatgtctcgctccgtgcctttggtttgaaccatttttgtcttgcttctgcttctggtggccactgagatgatggggccaacaatggtggcagaagcaagaacttgtgagtctcagagccaccgtttcaaggggccatgtttgagtgacaccaactgtggctctgtttgccgaaccgaacgtttcactggaggacactgccgtggcttccgtcgcagatgcttctgcaccaaacattgttaattttaaaaaattaattaagagtgctttgatagaagatgatagatctatcatctttctactcgtgttgttaattaaccactttgtgtttgagaataaaggttacccattctactatgggtttctttgtttgcctcttattttatctagttagagatccttttatgaaacgagtgatcag

SEQ ID NO: 21145 - DNA, 475 bp, Glycine max
  Clone ID: LIB3106-056-Q1-K1-D5
cgacaccacgcgtgcgggttgttagaatagcttcaatccaaccacgtgcatcatcttcaatttcccaacccaacccgactttttcatcatctgaatcaaatgcaaactcacaattcaacaaatctttgctctcatggaaccgactcaagcctccctcaaccaaatgcaacttccccaaactccgccacaagtggaagcaataccaaggaatcaaccactgggaaggcttgctggatcctcttgacgatgacctacgctgggaaatcctaagatatggccactttgtggatgctacatatagctcctttgactttgacccttcttctcttacctatgccacatgtctttactcgaagaaatcgctattgaacaagtgcgggttgggaaactatggataccgattgactaaatatctacatgtcacgtgtgggattcacatgccaacatggataaataaatgttttaaacaagcctg

SEQ ID NO: 21146 - DNA, 452 bp, Glycine max
  Clone ID: LIB3106-056-Q1-K1-D6
gaaacagtgtgatgaaaatgaaggtccttgttttcttcgttgctacaattttggtagcatggcaatgccatgcgtacgatatgttccctctccgaatgaacactggctatggtgcccgtactccggaggtgaaatgcgcaagttggaggcttgctgtggaagcacacaacatctttggctttgagaccattcctgaagagtgcgttgaagcaacaaaggaatacatccatggcgaacaatatagatcagactccaaaacagttaaccaacaagcttacttttatgccagagacctcgaagtccatcccaaggacacatttgtgttcagtatagatggcaccgtactctctaatattccatactacaaaaaacatggatatggggtggagaaatttaactcgaccttgtatgatgaatgggttaacaagggcaatgcaccggcactgcccgag

SEQ ID NO: 21147 - DNA, 154 bp, Glycine max
  Clone ID: LIB3106-056-Q1-K1-D7
tgcatcaagcagcgtgatctctaatactctagatagcaggtgtgccgacttgtggcatgctatggcacttcactgtatggaggagcaattgaatggactcttgtagactagcactttgagaggaactttgatcgacgctggctataaagaacat

SEQ ID NO: 21148 - DNA, 425 bp, Glycine max
  Clone ID: LIB3106-056-Q1-K1-C12
gtctgcctctccctttgtttcaatttccccttgcttattctggaacaatgtctgagaaaaggacagcttataaccttattgaaaatcttgtggacacatttgttgataagaaaaaatctgtatcattctttgaagatgataagtcagactcagtgagttctcagatcaatagactgtttggacgccagaaacccgtgcaccatgttttagggggtggaaaatctgcggatgtcttgttatggaggaacaagaagatttctgctagtgttttaacaagtgcaacaattgtatgggtgcttttcgaatggcttaattataattttcttactattttatgctttgctttggttcttgtcatgcttgcccagtttctatggtcaaatgcttccggcatgtttaacagttcaccgtctaatgtaccccgt

SEQ ID NO: 21149 - DNA, 436 bp, Glycine max
  Clone ID: LIB3106-056-Q1-K1-A8
gcgcccacgcgtccgcccacgcgtccggtgactactggacttctgatgccgggccattagaggcctttaagaggtttggaaagaatcttgaagagattgaaaagaagcttatagagaagaacaataatgagacattgagaaaccgctatgggccggctaaaatgccttacactttgctctatccttctagtgaggagggattgactttcagaggaattcccaacagtatctctatctaagggctctatggttgctgaagtactgtccctggctttaaataaatgtgaaatagaaggagtctgattccttcatcagttgtgtatgtttaagttatgtatttggagtggctgaatgtacttgtatttgtcattaataaaccatgtttgtgtaatggaaaccaaaatggtaaatgcaatcatgcaagtttgaacttttt

SEQ ID NO: 21150 - DNA, 439 bp, Glycine max
  Clone ID: LIB3106-056-Q1-K1-A9
cacatggatcccgaccctatctgtgccttttcctatgtttgcgaattaaatgaagcattcagaaaccataactgaagaaaactaaggaaggaaggaagagtgagcgtgaaagatgccttgggcgaggctttcagggtctccaaggctcgacgttgctattgacatgggcaatccatttctcaatctcactgttgatggtttccttaagatcggagctgtcgcagccacgcgatcagctgctgaagatacttatcatattatccaaaaggggaatatctcaagtcatgatttcgagaaaacgttgaagaagatgtgcaaagaaggtgtatattggggaactatagctggcgtttatgttggaatggaatatggggtagagaggatccgtggcaccagagattggaagaatgccatgattgggggtgcagtaactggggcc

SEQ ID NO: 21151 - DNA, 457 bp, Glycine max
  Clone ID: LIB3106-056-Q1-K1-B1
cccacgcgtccgcccacgcgtccgggagactgttcctgattggatagcaattgtaggaagtggttatattggccttgaattcagtgatgtatatacggcccttggaagtgaggttacttttattgaagctttagaccagctcatgcctggatttgatcctgaaattagcaagttggctcagagggttctcataaatccccggaatattgactatcatactggagtttttgcatccaagatcactcctgcaagagacggaaaacctgtcacaattgagctcattgatgcaaagaccaaggaacagaaggacactttagaggtggatgctgcactaatagcaacaggaagggctccattcacacaaggtcttggattggagaatattgatgttgtaacgcagcgtggttttgttcctgtcgatgagcgcatgagagtacttgatgcaaatggaaacctg

SEQ ID NO: 21152 - DNA, 135 bp, Glycine max
  Clone ID: LIB3106-056-Q1-K1-B10
cccacgcgtccggaaatatttgattacttgaaaaataaaaaaaaaaaaaaaaaaaaaaaaaagaaaaattaaataacaaacagtgtaaaacaatacaaacttacatacactaacatccaacataaattactctac

SEQ ID NO: 21153 - DNA, 120 bp, Glycine max
  Clone ID: LIB3106-056-Q1-K1-B11
cttggatttttacaccttaatccgattcagatattatgtcttcttactcgattgttgaaagtctaagtcgttgagtttttagttccagaatcaattttcaatcccacaagtaattttggg

SEQ ID NO: 21154 - DNA, 449 bp, Glycine max
  Clone ID: LIB3106-056-Q1-K1-B12
cccagcgcgtccgtgagattataccccaatcattttgttctcggtatggtttggctattggtgcatcagtggctccctttgtccgtgtgcttgtatgcatatgtttcccagttgcctttccaattagtaagttgttggattttttgctgggccatcgacatgaagccctattccgtagagctgagttgaaaacactcgtaaatttgcatggtaatgaggctggaaaagggggggaactgacacatgatgaaacaacgatcattgctggggcacttgaactcagtgagaagacagcgagtgatgccatgactcctatatctgaaacatttaccgttgatattaattcaaagcttgatagggaactgatgaatgaaatattggagaaagggcacagcagagtcccagtctattatgagcagcctacaaacattattggccttggactggtc

SEQ ID NO: 21155 - DNA, 314 bp, Glycine max
  Clone ID: LIB3106-056-Q1-K1-B2
tctcataataatcgtcaccctcaatgtgacgactattcaatacttaatgggatctcatgcaaaatttatagaatgagatgttttggtgcacaaaaaaacaaaaaaaaaaaaaaaaaaaaaccaaataaaaaaaaaaaatataaaattaaaaataaaaaataaaaaaataacaaaaataaaaaaaaaaataaaaaaataaaataaaaaaaaaaagggccgccccttttaaagatccaaattttacttacccgtccttcctacttaaaaccttttatttggggcccccaaattaaatttaattgccacttttttaa

SEQ ID NO: 21156 - DNA, 465 bp, Glycine max
  Clone ID: LIB3106-056-Q1-K1-B3
cccacgcgtccgaaaagcaccgcacaacgctttacgaaccttaccttacctctctctgttagacgtttatcacagtgagtgaccgctatcaacggcatacacagcgcgagtttgtttatccacattccgcaatgagaagatgatgacgacgccgtttcagcaaccgccccaaaccgtacggagactggtggtggaagtggttgacgcgcgcatcctgcttcttatagatggccaatgcagctcgagcccttacttggtgtgcttgacttcgactgtcatattatgcttattttttttctgtttaagttgcttgaccttttttgtaacttgtttttcttttttattttttttgtttttgttttctttttttttcttgttttatattttttctttttttttttattttttttgtttatttttttatttttttttttttttttatttttcttttttatttattttttt

SEQ ID NO: 21157 - DNA, 462 bp, Glycine max
  Clone ID: LIB3106-056-Q1-K1-B5
aaaaaggttttagatcgtaaaaactaatcactacgaaaacaagagatatcgaagatggctctgcccaaagctaaggagatcgtgtcgtccaattccgtcgtcgttttcagcaaaacctattgccctttctgcgtcgatgtgaagaagctcttcggtgacctcggtgccaattacaaggccatcgaactcgacactgaatccgatggaaaagagctccaagcagcattagttgagtggacggaccagcgaaccgtgcctaatgtgtttattggtggaaaccacattggtggctgtgactcaacaactgccctgcacactcaggggaagctggttcctctgctgatatctgctggagctgttgccaaatcaactgcttaaaggatctcccatttctaggttatgcagttaaataaaaataaaaacccaagtagttgggtcggttatataattcaggtcccagaa

SEQ ID NO: 21158 - DNA, 454 bp, Glycine max
  Clone ID: LIB3106-056-Q1-K1-B6
gtgatttcagtgagtgatcggtgttcacttgatctcatcataatcgtcagcgtcaattggggaagatgccgatcagaaacatcgccgtcggaaggcctgaagaggcgactcaccccgacacgttgaaggcggctttggctgagttcatctcaaccttcatcttcgtgttcgccggctcaggctccggcatcgcctacaacaagctcaccgacaacggcgctgccacccctgccggcctcatctccgcctccatcgcccatgcattcgccctcttcgtcgccgtctccgtcggcgccaacatctccggcggccacgtcaaccccgccgtcaccttcggcgccttcgtcggcggcaacatcaccttcctccgcggcatcgtctacgtcatcgcccagctcctcggctccatcgtcgcctccctcctcctggccttcgtcaccgcctccactgttcc

SEQ ID NO: 21159 - DNA, 457 bp, Glycine max
  Clone ID: LIB3106-056-Q1-K1-B7
cacaaagctgctggagcatttggtggcatcagaatttggagccggcctcaaattcctgtgccttttccttctcctgccggggacattaccatacttgctggagattggttcaagcttgaccaccgaagactgagacgactcctagagaatggtcataatctccccttccctgatggccttcttatcaatggacgtggttggaatggaaacaccttcactgttgatcaaggtggaacctgacagcaagtggaccaagaccaaaccctcagggatcataccactatggattgatcaaaccgagtcgaaccatcatgcttgcaaattctgctccttatatcaatggcaagcagaggtatgcggtcaacggtgtctcatacaatgaaccagataccccattgaaacttgccgactacttcaacatccctggagttttctacgttggaagcattcctaccta

SEQ ID NO: 21160 - DNA, 444 bp, Glycine max
  Clone ID: LIB3106-056-Q1-K1-B9
gctgcatcagaggagttgtaaattaagagcatggctgcacaagctcttgtatcatcatcttgtctgaccttctcagcggaggctgcaagacaaagtcttggaccaagatcactccaatctccatttggcttctccagaaaagcctcctttcttgttaaggcagctgctaccccccctgtcaagcaaggatcagacaggcctttgtggtttgcatcaaagcaaagtctttcttacttggatggcagccttccgggtgactatggatttgaccctctgggactttcagaccctgaaggaacaggagggttcattgagccgaaatggctagcatatggtgagataatcaatggtcgttatgcaatgttgggtgcagttggtgcaatagcacctgaaattctaagcaaggctggtctgatcccctcagagacagcactcccatggttc

SEQ ID NO: 21161 - DNA, 443 bp, Glycine max
  Clone ID: LIB3106-056-Q1-K1-C1
caaagccatggccacctccaacttctctattgttctctccgtctccctagccttcttttgggtgctacttaccaaggcacactcgaccgataccgtttctttcaccttcaacaagttcaacccagtccaaccaaacattatgctccaaaaagatgctagtatttcatcctctggggtgttacaactcaccaaagttggcagcaacggcgtgcccacctcgggatctctcggtcgtgccctttacgctgccccaatccagatttgggacagcgaaaccggcaaggtagccagctgggctacatcctttaaattcaacattttcgcacccaacaaatcaaactcagctgacgggcttgccttcttcttggcacccgtcgggtcttagccccaatccgacgatggatttcttggtcttttcaacagtcccttaaaggacaagtctt

SEQ ID NO: 21162 - DNA, 319 bp, Glycine max
  Clone ID: LIB3106-056-Q1-K1-C10
catggtggggaaaacaatttcatactatgtgttattttctgtagcatctttcactttagatagtagggtttatatcatccaccgatactgtaaaacactccctcgatataagtactcctgtttaaagcccaattttgagtttctgtctgttgaatgttgttatcattgtaaattaatatttccatctaattcagctttccaaacaataattggtccttctctaaaagatattcgtttggcaaatcatcttgcatgtttctaagcttgtaataagcttcatcaatattgttccttaaattaacattttttttcattaatt

SEQ ID NO: 21163 - DNA, 421 bp, Glycine max
  Clone ID: LIB3106-056-Q1-K1-C11
cccacgcgtccgggagaatatgaagttgtttgttttctttgttgctgcagtagttttggtagcatggtcatgccatggcgcaggctaccaaaggttccctctccgaatgaaaactggctatggtgagcgttcttcggaggtaaaatgcgcaagttttaggcttgctgtggaagcacacaacatccgagcctttaaaaccattcctgaagagtgcgttgaaccaacaaaggactacattaatggcgaacaatttagatcagactctaaaacagttaaccaacaagctttcttttatgctagtgaacgcgaagtccatcacaacgacatatttatattcggcatagataacaccgtactctctaatatcccatactatgaaaaacatggatatggggtggaggaatttaatgaaaccttatat

SEQ ID NO: 21164 - DNA, 462 bp, Glycine max
  Clone ID: LIB3106-056-Q1-K1-A7
cccacgcgtccggaatggcacaaattaacatcatggcacaagggatacaaacccttaatggcaattccaatttccataaaccccaagttcctaaatcttcaagttttcttgtttttggatctaaaaaactgaaaaattcagcagattctatgttggttttgaaaaaagattcaatttttatgcaaaagttatgttcctttaggatttcagcatcagtggctacagcctgcatgcttcacggtgcaagcagccggcccgcaaccgtccgcaaatcctctggcctttccggaaccgtccgcattcccggcgacaagtcgatctcccaccggtccttcatgttcggcggtctcgcgagcggtgaaacgcgcatcaccggccttctggaaggcgaggacgtcatcaatactggcaaggccatgcaagccatgggcgccaggatctcgtaggaaggcgacacctgga

SEQ ID NO: 21165 - DNA, 95 bp, Glycine max
  Clone ID: LIB3106-055-Q1-K1-F4
cacactggctgtctgaactagtgtatggtctcaatcaatgggaaagggttgatcatctaaggtaacgatgatgactttgctgaagctcgatggtg

SEQ ID NO: 21166 - DNA, 369 bp, Glycine max
  Clone ID: LIB3106-055-Q1-K1-G3
acaatttcagcacactggcggtcgttactagcggatctgagattcattaacaggccaaatcgaacgctatggacagcccagcaatcgtgcacttataggatattgatgcgactgtcacagggtacacaacacgagtaaaaatatagagatagcgaatagatgaccttgacatcgtggcgcatatatacagatgcagcagctgtattcttgactgcctggaaatcttgcgcaagtactttggtgctagacttgaaaagaagatctatgtcgataaaccatcctgggtatccaagttttaccaactcgattatcttcggacgaaaagggaccgagaaagtggcactaatagaaattgatgatagccaaccg

SEQ ID NO: 21167 - DNA, 86 bp, Glycine max
  Clone ID: LIB3106-055-Q1-K1-G4
aatttcagcacactggcggtcgttactagtggatcgtaattcattaacgggccaaattgatcaatatggtcagcccagcaaccgtt

SEQ ID NO: 21168 - DNA, 270 bp, Glycine max
  Clone ID: LIB3106-055-Q1-K1-G5
tgtatttaagacaagtgaccttcggtactagaggatactactgataatcggcggtatcgcgacgatcgcgttcgtcgcttatagccaggattgggacttagaggcgttgagcgatagtcctaaggacggtaacgttacgcatctggctattcatacgacacgagagaccaaccgagcgaatcaccggtaactcttgaactaggatggattacaattgcgactcgtgcatcaagtcgaggacaataacgtgatacacgacgaggtgatcgc

SEQ ID NO: 21169 - DNA, 104 bp, Glycine max
  Clone ID: LIB3106-055-Q1-K1-G7
tgtagttcagattcgtgacacttggggaccagaggatcctattgataatcggtagtaccgcgacgggcgcgttcgttgctactggccaggattgtgacttatag

SEQ ID NO: 21170 - DNA, 415 bp, Glycine max
  Clone ID: LIB3106-055-Q1-K1-H5
acgaatataaataaaattaattaaaaatcagataaatgaatatgaaccttaatgattgaaagcattaaaaggaatcccagtgacccagtagccctgcctggggtctacaaaaagatgactgcaaagtaattttctttactgctctcaacattttatcaaaacatagcagatcaattacatgccattcatgcagaagtggagtcggatgatgatgcagccctcttcttggcaaagtattcctcagctcgagcaaggttctttgcaactgaaagcttaacccacttcttgcgcccaagcaatacggtgagagagcaaccggcagcctcgagcttttcctttgcagatgctgaaaaggcacgggccttcaagttcagctttaccttcagcttcccgtcaccaagaatcttcaaaggga

SEQ ID NO: 21171 - DNA, 288 bp, Glycine max
  Clone ID: LIB3106-055-Q1-K1-H6
acgaatattaataaaattaagtaaaaatcagctaaattaatatgaaccttaatgattgaaagcattaaaaggaatcccagtgacccagtagcccttcctgggggcttcaaaaagatgactgcaaagtaattttctttactggtctcaacattttatcaaaacataacagatcaaatacatgccattcatgcataagtggagtcagattatgattcaacccttttcttggcaaagtattcccttaacttgagcaagggtttttgcaacctgaaggttaacccaattttt

SEQ ID NO: 21172 - DNA, 161 bp, Glycine max
  Clone ID: LIB3106-055-Q1-K1-H8
acgaatataaataaaattaattaaaaatcagttaaattaatatgaaccttaatgattgaaagcattaaaaggaatcccagtgacccagtagcccttcctggggtctccaaaaagatgactgcaaaggaatcttctttactgctctcaacattttatcaaaa

SEQ ID NO: 21173 - DNA, 415 bp, Glycine max
  Clone ID: LIB3106-056-Q1-K1-A1
cccacgcgtccgcttagctacaagctaaggaaggatcaaagagaatggctcaagcaatggcgatcaatgactagcttacgtggttcctctcaggctgtgttggaaggtagccttggctccacacgcttgaatgtggggagtggaagcagggtggcctcagtcacacgtgcagggttcacagttagagcacagcaacaacaagtgaatggtggtgaggtacaaagtagccgtagggcagtgctttcacttgttgctgctggtttgaccactggctcttttgttcaagctgtgcttgctgatgccaaacctatcaaagttggaccaccttcctcaccttctggcggattacctggaacattgaactcagatgaaccaagagaccttaagctgccattgaaagatagggtctttcttt

SEQ ID NO: 21174 - DNA, 450 bp, Glycine max
  Clone ID: LIB3106-056-Q1-K1-A10
accagagttccaaattttttggtttggggatagatagagtgatacgcgtcacattttcatagtaataaaaaaatggcagcggcggcggcagtgacggtgctactcccacctaggattccgaccaccaccaacgttacccgctgctctgctttgccttctctccctcctcgcgtctccaacaccaaaaccactttgttctcaccttccctcaacaacttttcagtgtcccgaaaatcttctctgcttcagacgagagcttcttcagaggaatcatcctcagtagatgccaatgaggtgttcacagatttgaaggaaaagtgggatgctcttgaaaacaagtccacagtacttctttatggtggaggggctatagttgctatttggctatcgtcaattcttgtgagcgccatcaactcagttcccttgcttccaaagattatggagttggta

SEQ ID NO: 21175 - DNA, 453 bp, Glycine max
  Clone ID: LIB3106-056-Q1-K1-A12
gccagttcccatttttaagccaataccgaatccagttcccatttataagccaattcccattgttaagccagtaccgaaaccagttcccatttataagccaattccaatttttaagccagtaccaacaccaattcctttttttaagcctataccaaagcctgttcctattgttaaacctattcctattccagtttttaaacccatacctaaaccatttccaattgttaaacctatcccttaagccaaagtcattttttaagccagagactttcttcagaaaacctattcctaaacttcacccaaatctgataaagcacggtcttctacattttccaattcacaatacaattcctacaatttcaactccataagatgatttggccgtgtcctataaaattattgtacttagaacgttatcccattctatttccaatatagctacgtttggtctaa

SEQ ID NO: 21176 - DNA, 414 bp, Glycine max
  Clone ID: LIB3106-056-Q1-K1-A2
agccttcggccaagccttccgtgagccgttaagatgccttgggtgaggctttcagagtcttcaaggctcgacgttgctattgacatgggtaatccatttctcaatctcactgttgatgggttccttaagatcggagctgtcgcagccacgcgatcagctgctgaagatacttatcatattatccaaaaggggaatatctcaagtcgtgatttcgagaaaactttgaagaagatgtgtaaagaaggtgtatattggggaactatagctggcgtttatgttggaatggaatatggggtagagaggatccgtggcaccagagactggaagaatgccatgattgggggtgcagtaactggggccctggtatctgcagccagcaacaacaagaaagacaagattgcgatagatgccatt

SEQ ID NO: 21177 - DNA, 421 bp, Glycine max
  Clone ID: LIB3106-056-Q1-K1-A3
ctcttggcttcaagattatattcttgtcaggaagaacactggacaaacaggccgtaacaggggcaaacttaaagaaggctggctaccacacatgggaaaaattaattctcaaggatccacaagatccttccactccaaatgcagtttcatacaaaacagcagcgagagagaaactgataaggcagggatacaacattgttgggatcattggagaccaatggagcgatctcctcggaggccacagaggcgaaagcaggacctttaagcttcctaatcccctgtactacattcagtagttccttcacctctcaacaatctagcttgctcctatctatctatatgtaataagatgcgttcaaataggggcactagctttactttatgttgtttcagctgtgttgtaacaagtcattgtagatac

SEQ ID NO: 21178 - DNA, 473 bp, Glycine max
  Clone ID: LIB3106-056-Q1-K1-A4
gtcgagacacgcgtgtgcgcacacgtgcgcccacgcgtccgcactctcttcgcagcggcacactccgtggcattcaaggcgttgaagagagttgtcaagatgtacacatcgaggaagaaaattcacatggataaggatgctgagccaactgaatttgaggaatcagttggacaggcattgtttgatctagaaaataccaacaatgagctgaaaagtgatctgaaagatttatacataaactcagctgtccaaattgatgtttctggcaaccgaaaggctgtggttatccatgtcccctacagactaaggaaaggattccggaagattcatgtcaggcttgtgagagaacttgagaaaaagtttagtggaaaagatgtaatcttgattgccaccaggaagatagtaaggccaccaaaaaaaggttctgctgttcagcgccctcgtaccagaacactcactgctgtacatgaggc

SEQ ID NO: 21179 - DNA, 449 bp, Glycine max
  Clone ID: LIB3106-056-Q1-K1-A5
atcgcgatcttctgaaacatgtctggggaagaggaagaaaacgccgcagagctcaaaattggagacgagtttttgaaggcaaagtgcttaatgaactgtgaagttgcattgattcttgagcacaagtatgagcagcttcaacagacatccgatgatcccatgaatcaagtttctcaggtatttgaaaagtcactgcagtatgtgaagcgcttcagccgctataaaaatcccgatgctgttagacaagttcgagaaattctcgccagatatgaattggctgagtttgagttgtgtgtccttggcaacctttgcccagaaactgtggaggaagctattgctatggttccatctatcaagtcaagaggacggtctcaggatgatgaagcaatccagaaaatgttaaatgacctgtcgttgattaagaaatttggataaatacgtcaaagtgt

SEQ ID NO: 21180 - DNA, 423 bp, Glycine max
  Clone ID: LIB3106-054-Q1-K1-H6
ggaacacgctgatctcagtgttctctcaatactttcatgggatccgctgtcttagtacggatgtggagatgtgcaatctggggtttaagcccaatttcatgacttatggcagtgtactcagtgcatgtgccagcatttctgatctgaaatggggtgcccatttgcatgctcggattcttcgcatggaacatagcctggatgcgtttttgggaagtggtctcatagacatgtatgccaaatgtggatgcttagcactggcgaggcgtgtgtttaacagtttaggggaacagaatcaagtttcttggacttgcttgatttcaggggttgcacagtttggacttggtgatgatgctttggcactatttaaccaaatgaggcaggcttctgtggtgttggatgaattcacccttgtgacaattcttg

SEQ ID NO: 21181 - DNA, 443 bp, Glycine max
  unsure at all n locations
  Clone ID: LIB3106-054-Q1-K1-H7
tgcactcataatgcaagagatctctaggaaatgtgcttgggaaacatccaagggcgttcgtaaatgctgtatactgaaacatgtgagaaatatcttccttttttgctaaccacttttcattgtgattgtgatgtgacataacatacaggtctaggcattagagatacattacaatgccattttggaagtaccggtattgcaaatactttttctttaaatttccaaaatatttcttttgttacagtaggagattttgggcagtgatgggggaataagagacttggtgaaagagagctaaaagtcacatggcaaatccttatgggattttaacacaaatcctacagaacctcaaacctatggtaaatcctggtgaggtgatgctgtangatctactctaagattcaatgcctatacttctcaattctcattccattttggcttgg

SEQ ID NO: 21182 - DNA, 397 bp, Glycine max
  Clone ID: LIB3106-054-Q1-K1-H9
gcttgctgcaatcggattcactccgcagctgcagagctcaaaaccctagagaggaggaggagagagcgtgcaagttccggccaccaccgaccatgacattcaagcgcaggaatggaggtcgcaacaaacacggccgcggccacgtcaaattcatccggtgctccaactgtggcaaatgctgtcccaaggacaaggccatcaagaggtttctggtgaggaacattgttgaacaggctgcagtcagagatgtgcaggaagcttgtgtctatgaacaatatactcttccgaaactctatgtgaagatgcagtactgtgtttcttgtgctatccactctcatgttgtgagggttcgatcccgcactgacaggaggaaacgtgagcctccacagagattcat

SEQ ID NO: 21183 - DNA, 421 bp, Glycine max
  Clone ID: LIB3106-055-Q1-K1-A12
cccacgcgtccggtttatcgtgaggagaatatgaagttgtttgttttctttgttgctgcagtagttttggtagcatggccatgccatggcgcaggctaccaaaggttccctctccgaatgaaaactggctatggtgagcgttcttcggaggtaaaatgcgcaagttttaggcttgctgtggaagcacacaacatccgagcctttaaaaccattcctgaagagtgcgttgaaccaacaaaggactacattaatggcgaacaatttagatcagactctaaaacagttaaccaacaagctttcttttatgctagtgaacgcgaagtccatcacaacgacatatttatattccgcataaataacaccgtactctctaatatcccatactatgaaaaacatggatattgggtggaggaatttaatg

SEQ ID NO: 21184 - DNA, 219 bp, Glycine max
  Clone ID: LIB3106-055-Q1-K1-A5
cgaccatgcgtccgatccaaaactctaataccttcaaagaacctagtagtgaatcagtgatggcacctaaggcagagaagaagccagcggagaagaagccggtggaggagaagaagtcgacggtgggagacaaggctccggcggagaagaagccgaatgccggaaagaaccttccgaaggagggaggagccggcggagaaggggggaagaagaaaaaga

SEQ ID NO: 21185 - DNA, 302 bp, Glycine max
  Clone ID: LIB3106-055-Q1-K1-A6
gcgtccggcaggatgtcgaagagaggacgcggtggttcggcggggaacaagttccggatgtcgctgggtctgccggtggcggcgacggtgaactgcgccgacaatacgggggcgaagaacctctacatcatatcggtgaaagggatcaaagggcgtttgaaccgtctcccctcggcttgcgttggcgacatggtgatggccaccgtgaagaaggggaaacccgatctgaggaagaagggtttgccagctgtcattgttcgccagcgcaagccatggcgccgaaaggacggcgtctacatgta

SEQ ID NO: 21186 - DNA, 64 bp, Glycine max
  Clone ID: LIB3106-055-Q1-K1-A7
gtgtttctattctctacatgtacagactaaaactagctcaggcagctgttaccatacttgacta

SEQ ID NO: 21187 - DNA, 267 bp, Glycine max
  Clone ID: LIB3106-055-Q1-K1-A8
ttcagtgttgaaattgaagcggtggcactaatctaagaattatgactgctctaacgcaagaggagcttcttgcgcaacaccttgaacagcaaaagatccatgatgatgaacctgtcgacgaggatgatgatgacgaggaagtggatgatgatgatgacgatgaggatgatgaccatgacgaaggactatgaacgtgatgcatctggtacgtcgaagcataccagaagtgaaaagaagagtcgcaaggcaatgcttatacttggaatg

SEQ ID NO: 21188 - DNA, 72 bp, Glycine max
  Clone ID: LIB3106-055-Q1-K1-B3
gtattttattaggactggagagacgtattagtgaaaacaccaattaggaagcgcgtattggtgctacaaggc

SEQ ID NO: 21189 - DNA, 154 bp, Glycine max
  Clone ID: LIB3106-055-Q1-K1-B5
tacacgagctgtgacgtctcatgcgaccatacgtcagcttgcacgctctagaacgcgtgccgtatgaaagaagtgttgtgggcggaaagaggcagaggtgcaatcaccagtgtggaagcacgaaacggtccttcccggctttacattttttcta

SEQ ID NO: 21190 - DNA, 458 bp, Glycine max
  unsure at all n locations
  Clone ID: LIB3106-055-Q1-K1-B6
cccacgcgtccggtgtgaattactacaccacttattatgcggaacatgctgaacctgtcagtgccaaccgaaccttctacacagacatactagccagtctcagtacggaaaggaatggtctacatgttggaaccccgactgatttgaattggctctttatcttttcaaagggaattcatcttcttatggcacacataaaggataaatacaagaatcttcctatttacatcactgaaaatggcatggctgaatcaaggaatgactcattaccagtcaatgaagcccgcaaggatagtataaggattagataccatgatggccatcttaaaattcttcttcaagcgatcaatgaaggtgttaatttgaagggctattatgcatggtcattntcggacagttttgaatgggatgctggttacacaattcgattcgggctcatatttgtggattacaagaac

SEQ ID NO: 21191 - DNA, 210 bp, Glycine max
  Clone ID: LIB3106-055-Q1-K1-B7
atgcgtccgcccacacgttctagaacggtcgctgcaccactgattatgcgggacatgctgtacctgtcggtgccaaccgaaccgtggacacacacatacgagccagacgcagcaccgaaaggaatgacctacatgttggaacctcagctgacttgaatagggtctacatctttacaaagggaattcatcttattatgggacacataaagg

SEQ ID NO: 21192 - DNA, 197 bp, Glycine max
  Clone ID: LIB3106-055-Q1-K1-C5
acgctctagaacgggtggagactttgatccatatgaagcacagtaatctcttgtaatatcagatgctaattaggataaggcggaaggcatgagacatacaatagatgcagatatagctactatactaactatgacacgagtagaggctatcaatgcgatttcataactagctgatgcgtacgaatatctgaataact

SEQ ID NO: 21193 - DNA, 287 bp, Glycine max
  Clone ID: LIB3106-055-Q1-K1-C6
gaaagatattgaagagggtacgaaatatgatcatatatttgagaatgataaaatggatgaagacactgaggttaaggaaacaattgaaggcaaacaagaaaatgaaaaagtggaagctgagaaaccagaagtagatgctatggaagtagagagtggcatttcgcataaggaggggagtgataaaaaggagaaaaaagatgtggcgatggaagacgaggatgaagatgagggtaaggataatattgataagtcaaaagaagaagagaaggcagaagatagttagggtg

SEQ ID NO: 21194 - DNA, 174 bp, Glycine max
  Clone ID: LIB3106-055-Q1-K1-D2
aagacccgggacgacccacgcgaacgggccaagccaggagagcacaaccaaagcaacaccccaaacggacaaaaccacgggacccaaggcgaaagcaccgagcgcaggaaccaacaacaacaagcccgcaaacgaagccaacaaaaaggcaccaccccaacgccaaccaaagag

SEQ ID NO: 21195 - DNA, 186 bp, Glycine max
  Clone ID: LIB3106-055-Q1-K1-D3
actgttactgtacgcttaatccctgaacgagtgaaatgctacttgagaattcataactatcgcaggaactcatcaagtgcatcaaaactatatgcagcacttggtttactagactctccatacggcctagatatagctcacgtatgtagatcgaaagcaaccctaaaggagcacccttagcggtca

SEQ ID NO: 21196 - DNA, 416 bp, Glycine max
  Clone ID: LIB3106-055-Q1-K1-D6
aacaacaatgttgatttattactactacaaatgaagaaaaagccttaaaaaataaagcatgaaatgccattacaaatgaactcattaaaggctcccacaagcagggacatgaacatcattcctccgaccaaactgaacaaacatatatcaaacagacaggaaaaagatgattaaatcttggtctagttgatgattatattatatagtatcatatataattaagcggtaagctgttcctgcttgtgggtctcaataacaacatcactctgagggtaagcaacacaagtgaggacaaaacctgtagcaatctggtcatcatcaaggaaattaccgtcggattgatcgactgagccttgcttaatcattccggcacacgaagaacaagacccagccctacacgagaacggaagatcaat

SEQ ID NO: 21197 - DNA, 365 bp, Glycine max
  Clone ID: LIB3106-055-Q1-K1-D7
aacaacaatgctgatttatgactagtgccaatgaagaaaaagccttaaacaatgaagcatgaaatgccattacaaatgaactcattaaaggctcccacaagcagggacatgaacatcattccttcgaccaaactgaacatacataaatcaaacagacaggaaaaagatgattaaatcttggtctagttgatgattatattatatagtatcatatataattaagcggtcagctgctccttcttgtgggtctgaatatcaacatcactctgagggttagcaacacaattgatgacaaaaccttcataaatttggtcatcaataaagtaattaccgatggattgatcaaagtaacctttctttaatat

SEQ ID NO: 21198 - DNA, 456 bp, Glycine max
  Clone ID: LIB3106-054-Q1-K1-H4
ccaacccgtccgcccacccgtccgcccacccgtccgattggatgcaaggttcctgagtgcgtggaaggaggaaagagttgaacctgcaaaggtctttaaataaggtggcattggtgatatcgtgactgatcaacctgtagacaagaaaaaattggttgatgatgttaggaaggctctttatgcagccaaaatctgtagttatgcacagggaatgaatttgatccgtgcaaagagtattgaaaagggttgggatttgaagttgggtgaactggcccgtatttggaaaggtggttgcatcattagagcaatattcttagacagaatcaagcaagcgtatgatagaaaccctaatctggcaaaccttcttgtggatccagagtttgcaaaggaaataatcgatcgccaatctgcctggaggagagttgtttgccttgctatcaattctggtatcagcac

SEQ ID NO: 21199 - DNA, 391 bp, Glycine max
  Clone ID: LIB3106-054-Q1-K1-G1
gggggttgaatgaatgatacgcgtcacattttcttgatgataaaaaaatggcagcggcggcggcagtgacggtgctactcccacctaggattccgaccaccaccaacgttacccgctgctctgctttgccttctctccctcctcgcgtctccaacaccaaaaccactttgttctcaccttccctcaacaacttttcagtgtcccgaaaatcttctctgcttcagaccagagcttcttcagaggaatcatcctcagtagatgccaatgaggtgttcacagatttgaaggaaaagtgggatgctcttgaaaacaagtccacagtacttctttatggtggaggggctatagttgctatttggctatcgtcaattcttgtgagcgccatcaactc

SEQ ID NO: 21200 - DNA, 449 bp, Glycine max
  unsure at all n locations
  Clone ID: LIB3106-054-Q1-K1-G10
cccacgcgtccgcccacgcgtccgcccacgcgtccggtgagttgcaacttgacagtggggtgggtgatctaatatctatcaagaacacaaattggtcagatgctgtgttgtggaatccttaccttcaaatggaagcatgttacaaagattttgtttgcgttgaaaatgctaagattggaagtgtccagctagagccagaacaaacttggacagctgtgcagcaccttagcatagcttgaactgtaaatgtgtttctacatcagcaattatttttgtcatatttgataccccaacaaatatgtatcttctgtattaataattttctatgccactactgtcgagggaaggatagtgtacaagagttaaacctcattacattcgtaacattatcgtaacaacaataaggaataataatttttttttaaaaatatnnatttttnttttttttt

SEQ ID NO: 21201 - DNA, 438 bp, Glycine max
  Clone ID: LIB3106-054-Q1-K1-G12
aaattattaaaatatgaagtctgctcttatctaaatcacccttatttatccagagtaggtagccttcagcagaatataagaagctgcaaagttcccttcttttggggcagagtcaattcatcaattaggagttgggtgagagaatggaagcctcagagcagaacaattcaaaggtagtgttgattgattctttgcagtcatgggagttccacgtcaaccaagcctataatcagaatactcctgttgttgttcacttcactgcttcatggtgcatgccatcggtggctatgactcctgtttttgaagaactggcttcaagctatccggaagttctgtttctcactgttgatgttgatgaagtcaaggaggtagccaccaaaatggatgtaaaggcaatgccaacatttttgctgcttaaagacggtgcttctgtggaca

SEQ ID NO: 21202 - DNA, 367 bp, Glycine max
  Clone ID: LIB3106-054-Q1-K1-G3
agttgctgcttcttcagccactccgcacctcgcagcctctgtgccctcaacaaccatggcgtggaatcgaaactaccgttccagatcccacccaaatcgacgtcaaactcttcaatcgctggagcttcgaggatgttgaggttaatgatatgtctctggctgattacattggagtgtccccatcaaagcatgctacatatgttcctcacactgctggtaggtactcagtgaagaggttcaggaaagcgcagtgccccattgttgagaggctcaccaactctctgatgatgcacgggaggaacaatggaaagaagctcatggctgtcaggattatcaagcatgccatggagatcatccacttgctcac

SEQ ID NO: 21203 - DNA, 51 bp, Glycine max
  Clone ID: LIB3106-054-Q1-K1-G4
aaaaaaaaaaataaaaaaaaaaaaaaattataaaaaaaaaaaaaaaaaaaa

SEQ ID NO: 21204 - DNA, 455 bp, Glycine max
  Clone ID: LIB3106-054-Q1-K1-G5
tccgggtgacgacgcgtccgccgccttcctttcttccttttgcaacaacaaaatcatcggcgccaaagccttctacaggggcggcgaatcctacctcgaaagaccaatcgacgaatctcaagaatcgaaatcgccacgcgacaccgaaggccacggcacgcacaccgcctccaccgccgcaggcgccgtcgtctccaacgcaagcctcttccactatgcgcagggcgaagccagaggaatggctacgaaagcaagaatcgcagcctataagatctgctggaagctaggttgcttcgactctgacatcctcgccgccatggacgaggctgtctccgacggcgtccacgtcatctcgctctccgtcggcgcgtccggctacgcgccccagtactaccgtgactcaatcgccgtgggagcgttcggcgctgccagacacaacgttctcgtctcgtgct

SEQ ID NO: 21205 - DNA, 457 bp, Glycine max
  Clone ID: LIB3106-054-Q1-K1-G6
atttcgttgcgcctttgatctctgtccccgctgcgtctctcgtaatcatgcctaagcagatcgacgagattaaggatttccttctcactgccagaaggaaggatgcgaggtcagtgaagatcaagaggagcagagatgtggttaagttcaaggtcagatgctccaagtacctctacacactttgtgtgtttgacccagagaaagctgataaattgaagcaatctcttcctccaggtttgagtgttcaagacctgtaaaggtactgggcgagagatcaagaagaagcaattcattgattcttctgaagtttgattctctgtagttgaagcttgagatttttgtcagttggtcttttattatagattattgctaagacatggttgtttttatctgttttggaaaatgaaacttgaatttatgtctaatggagtattctagtgctgtggaactatatata

SEQ ID NO: 21206 - DNA, 323 bp, Glycine max
  Clone ID: LIB3106-054-Q1-K1-G7
gtgtatttccctacctctcccttcaagatgcacatcttcgtcaagaccctcaccggggggaccatcacccttgaggtggaaagctctgacaccatcgacaacgtcaaggccaagatccaggacaaggaaggaatccccccggaccagcaacgtctcattttcgccggaaagcaacttgaggacggccgtacccttgctgactacaacattcagaaggagagtactcttcacctcgtcctccgtctccgtggtggcatgcagatcttcgttaagacactcaccggcaagaccataaccctagaggttgaaagcttcgacaccat

SEQ ID NO: 21207 - DNA, 320 bp, Glycine max
  Clone ID: LIB3106-054-Q1-K1-G8
acgcgccggccggaattcccggtcgccacgcgtcgctagttctaatcgagcgggaggcttcaatttccaattaggtttcgcttaagaccaattaccatgggagtcttcacctttgcgtcgaaatccggcccaatggacccagcaacattcgcgacatcagctcgcactcactacactaaagaagctcggcaccgtctcgcgtgattctcgggggcagcctcttttccggtctctactcgtggttcaggatagggggggctgatcgtggagggcgtgtctgtcactgacctcagtgtgtgtgactgatctgtgactatctg

SEQ ID NO: 21208 - DNA, 391 bp, Glycine max
  Clone ID: LIB3106-054-Q1-K1-G9
cccacgcgtccgcccacgcgtccgcgacgcagaaggttcatccaatctccgaatggttgagtcgcattgcaaccatgtcgaggagaaaggtcagagagccaaaggaggaaaacgtgactcttggcccagctgttagagatggcgaacatgtctttggcgtcgctcgcatatttgcctcctttaatgataccttcattcatgtcactgatctgtctgggagggaaacgcttgtccgcatcactggtggaatgaaagttaaggctgacagagatgaatcatctccttatgctgctatgcttgcagctcaggatgttgctgccagatgcaaggaacctggcattactgctcttcatatcaagctccgtgccacgggtgggaacaagacaaaaac

SEQ ID NO: 21209 - DNA, 313 bp, Glycine max
  Clone ID: LIB3106-054-Q1-K1-H10
cccactcgtccgaaaaaccatggtgtcaccaatctcacttattgtcctcttgttagcagtttctttagcagattcagcttcacttcaagaaagttttgtccaatgtctcaacttgaattcggacaaaacatttccattttactcatcaatctacactgcaagcaacccttcattcaccatcatccttgactccttcgcacagaacctaatgcttttggtgccttcagtgccaaaaccctagttcatattcacaccctctcgtgatttccatgttcaagcatcattaatcttctccaagaaacttgttattcac

SEQ ID NO: 21210 - DNA, 487 bp, Glycine max
  unsure at all n locations
  Clone ID: LIB3106-054-Q1-K1-H11
agaaaaccgggcgcgacccaacatccgatttatcaaaagtttgcacattcttctngtcaaatataccaaccattatcccccggccgttattatttaaaattacttactcttacacactacttaatatctcaattctattgtctcctaaattccatatactatccatactttcacaactctttttacttattaaaccctttcatttccctacctatataccttccaacctaaccctctctttcctgcttacttataatctaatattcctgttccctacatcctttccattatcctctcattctcaacttctaaactaacacaccctttaccgtaccatatatctccgcttttcttttcatttacgctctattcaactctctttattatccatatctcttactcctatttcctctcctaacattcccttccttctttatactaattttctccttctcttttaactttataatctctccttctttttttt

SEQ ID NO: 21211 - DNA, 288 bp, Glycine max
  Clone ID: LIB3106-054-Q1-K1-H12
cgtgaagctcgtcaactgccaggacatattgcccacgcgctacacgcttgacgtggacttgaatgacgcggttaaccccgacgttctcaacgcgaaggataagaaggtcactgctctcaaggagaccaagaagcgcctcgaggagaggttcaaaaccgggaagaaccgttggttcttcaccaagctcaggttctgagcggtaatcttatctagttttgttattcgaatgcttttggatcttgcttgaatagatacttaataatgctgggttgagattatatatgggaa

SEQ ID NO: 21212 - DNA, 473 bp, Glycine max
  Clone ID: LIB3106-054-Q1-K1-H2
gcccggaatccccgggcggacgaaggcgtccgccaacccgtccgccaacccttccgactttttttgacaggagaccttcatttttgcagaggggctctctgaaaatcaatgcaattaccaaaaaatgggaacccactaaggttgtacctcaggctgatagagttcttgttcgtttggaggagctatcagataaaacagttggtggagttttgctgcccaagtcagctgttaaatttgagcgatatcttgtgggagaaatcctaactgttggtgctgaggctggagaactaaaggctggaacaaaggtactattcactgacatgaatgcttatgaggtggatttggggactgatgcaaaacactgcttctgtaaagcaagtgacttattggccgtggttgagtaaggtttgccactgtatgagacaaaacgggagcaatcctttttatgatatatctttgacaaatgtattttt

SEQ ID NO: 21213 - DNA, 446 bp, Glycine max
  unsure at all n locations
  Clone ID: LIB3106-054-Q1-K1-H3
cacgcgntccgtcccacccctaatgggaaatcccccgccgagtcccggcaggcccccggtggcatcgccggcaagcgctctcgttccgactacgatgtttctggcgttcatgacttgcccagttactttccccatgacgatgatagaggagggctccgagtaattagagatactgaatcccttgatgcatcttatgagcgttacctccgtagtgcgcaagtttcatcatatggttcgggacagtctactagaaccattggtgggcgaattcccaatcgtgctattgatgattcacatgttgccaatattgggggagtcgacaggggaacaaatgcaaaagacaaaatgccgggattaagtagtggaagggctgaccattctcttccaccagatgctaccagtacactggttggggagggtttgccttccaactgtacaagacggga

SEQ ID NO: 21214 - DNA, 428 bp, Glycine max
  unsure at all n locations
  Clone ID: LIB3106-054-Q1-K1-F9
gtctaaaaataaaagaacagctcggtaagtcgaaaacccgaaagggcggcttaggcaggaatgagcgtctcggtgggtcgaaaacccgaaagggcgacccaggcaaaaattagagacatcaaacagaaaataattagcctgataggtcgaaaacccgaaagggtgatctatgcaaaatttaaggatcaaaagacaaagtaactgcatcgagaagatcttcgttcatttggggcacaatggaatgtcaaggagaccctgaatctgaagcatccaaacagtggaattcaaggttgtcagagggaacaacggttattgtgttcaatgaaccttcgatttatatttaccattntccaaactttgtaagatcagtggagccatgccattggcaggtcaccactctttcaaaataatttgagcctgttggcttt

SEQ ID NO: 21215 - DNA, 463 bp, Glycine max
  Clone ID: LIB3106-054-Q1-K1-E6
ctgaggttttgaggcacatcatgtctttcctttcggatggtgattcttccaaattaccgatggcaacaaacttttctgggaaggaacaaattaaagaaaacaatggagtagctgggcccagccaggaagcaacttggatgaaatctatttattcagaaaagccacctctgttagaaaggcctgcaaatatccttcctacctttgaccagaatgataaaagaactcttgtgcaagaattgcagatgagtagtatccagaaggacttctgttttgatgaattggagagtatagtaaaaattaaacaggcagaggctaaaatgtttcaatcacgtgctgatgatgctagaagagaagctgaagggttgaagcgcattgcccttgcaaagaatgagaaaattgaggaagaatataccaatcgaattgccaagttacgattgactgagactgatgaaattcgtaaaca

SEQ ID NO: 21216 - DNA, 447 bp, Glycine max
  unsure at all n locations
  Clone ID: LIB3106-054-Q1-K1-E7
gcctcgccattcatttgcctccttccacttccaccctctatctatcttccttcatgatggtccatatccatttcgtgtttcaccacaaagacttcatttttcacactcagtctcttttttttcttttcttcccaaaatttctgttttttttttttggccttttgaagcttccgaggtggcaaagatgaactaatcctgaaatatataactcaagttttacaattcaagccaacatgaatcctgtaataccatgctctattggcaatgtttcaattattcctggattcacctattcaacaaggaagaataacactttaacaagattgaacttgtcaaggagcactgtaaaacctggatcatcatcttggagatttctattaccttcatttgttgccagtggagcatttccacanaacaaaaggatactctcttttcataagaagtcta

SEQ ID NO: 21217 - DNA, 462 bp, Glycine max
  Clone ID: LIB3106-054-Q1-K1-E8
cccacgcgtccgttggaaacatttttaagaaagctttagagaaaaatgatgctggggagcatttcccagtaattgccttcaacttaggtggaaacctcgtaataaggatcgtaagcgagcaaactgatattcttgaaccatttactgcgtcgagtttgccaagttctcttatattgtggaaggaagcaaatgctaaaggaagtctatttcaaagatttccttcagatttgttgacacagctgaagacagattgtctcgtcctgcacaatcatcgttatgccatatccccacgcaagcttcaatataataccaagttatctgacttttttgagattctggcaacatctgaggatagagatggaaagactttcgtttccacagcacgtggtaagaaatatcccgtgactgtcaacctatggcaaccagagaaaaatgcttttgaatgggctacatcttttaaag

SEQ ID NO: 21218 - DNA, 253 bp, Glycine max
  Clone ID: LIB3106-054-Q1-K1-E9
gatcaaggaaacatctaagcaacaaccaggcgaataggcgatggcagttgcgattggggagttgattggatatgtattaccgataatatggatccaatgtggcttgccatagtgggattattgtattaatgaattttatgatttcaagtgcgcgttgcgcttgggatttacaatgtttcagtggattgtctaatgtgttttatggatgagaagaatgtggtttagtgatttataaattttttattgttgctta

SEQ ID NO: 21219 - DNA, 432 bp, Glycine max
  Clone ID: LIB3106-054-Q1-K1-F1
gttttgttccttagggattcagcatcagtggctacagcctgcatgcttcacggtgcagggcagccggcccgcaaccgcccgcaaatcctctggcctttccggaaccgtccgcattcccggcgacaagtcgatctcccaccggtccttcatgttcggcggtctcgcgagcggtgaaacgcgcatcaccggccttctggaaggcgaggacgtcatcaatacgggcaaggccatgcaggccatgggcgccaggatccgtaaggaaggcgacacctggatcatcgatggcgtcggcaatggcggcctcctggcgcctgaggcgccgctcgatttcggcaatgccgccacgggctgccgcctgaccatgggcctcgtcggggtctacgatttcgacagcaccttcatcggcgacgcctcgctcacaaagcgcccgat

SEQ ID NO: 21220 - DNA, 456 bp, Glycine max
  Clone ID: LIB3106-054-Q1-K1-F10
ctgaagaataaattaggatttgatgaagcttttaactacaaagaagagccagacgtcagggcagctttgaaaaggtactttccagaaggcattgacatttactttgagaatgttgggggcaagacacttgatgcagtactcccaaacatgaaatttcatggccgcatacctgtctgtggaatgatctcgcagtacaatcttactcagttcgatggtgtaacaaatttggcaaatctcatatttaagcgggttaaaatggaaggttttattgcaactgatttctatcatttatatccaaaattcttggagtttgtcctgcctcatatcagagaagggaaggttgtgtatgtggaagacattgctgagggccttgagaatggccctgcagccttggttggcctctataccggtcgcaatgttggtaaacaaagtggtgttgttactcacaagtaaaat

SEQ ID NO: 21221 - DNA, 448 bp, Glycine max
  Clone ID: LIB3106-054-Q1-K1-F11
aaaagcgtgaatcatgtcggacgaatagcatcacttcgattctcaggcggatgcgggagcgtccaagacgtatcctcagcaggctggtaccattcgcaagaatggctacatcgtcatcaaatccaggccttgcaaggttgtagaggtctctacgtcaaagacaggcaagcatggacatgcaaagtgtcactttgttgcaattgatatttttaatgggaaaaagcttgaagatattgttccatcatcccacaactgtgatgttccacatgtgaatcgcactgactatcagcttattgatatctctgaagacggctttgtgagtctgttgactgataatggaaataccaaggatgatctgaagcttcctactgatgaggcattgcttgctcagattaaagatggattttctgaaggaaaagatcttgtggtttttgttatgtctgcaatg

SEQ ID NO: 21222 - DNA, 421 bp, Glycine max
  Clone ID: LIB3106-054-Q1-K1-F12
gttgttcccttcttttttctttctccgccccttttttgttgttccttcttctcgggcggcgctttgtgatctctctctgcaaccatgtccgtcgagaaagagagagagacccaggtttacttggccaagcttgccgagcaggccgagagatacgaagaaatggttgagtgtatgaagaaagtagcaaaacttgatcttgatctgactgtggaagaaaggaaccttctctcagtgggatacaaaaatgtgattggtgcacgaagggcctcttggcgcataatgtcctcaattgagcagaaggaagagtctaagggaaatgagcacaatgttaaactgatcaagagttactgccaaaaagttgaggaggaactctccaaaatctgtggtgacattctgactattatagaccagcatttgattc

SEQ ID NO: 21223 - DNA, 387 bp, Glycine max
  Clone ID: LIB3106-054-Q1-K1-F2
gttggcattgcaaaaagagagagaatggcgaccacacccggtttgtgtggcagtgtgtggttgagcacctcgttcctgaggaagcaggcaatggcatcagtgaacatgagaatgctgaaggctaatgctggtgtttttggcttaaagggagggcgtggagggcgtgtgagtgcgatggcaagttacaatgtgaagctgataaccccagaaggagaacaagaatttgaatgcccagatgatgttttcattcttgaaaaggctgaggaatttggcattgaccttccctactcatgcaaggctggtgcttgctcttcctgtgccggcaaagttgtttctggcaaagtcgaccaatctgatggtagttaccttgatgatacccaaatcggt

SEQ ID NO: 21224 - DNA, 412 bp, Glycine max
  Clone ID: LIB3106-054-Q1-K1-F3
aagccaacggcatcatggaagacagtttcagagtacgagcagagagagccttggtcgctgcaatcccttcttcttctctcaacactctctggtctctcaccgaagacgaaatcaataactccccttccaatcgcacccccaaacctaaacccaaaccctacccctcttcaagctcccgggttcagctccagaagggcctccacgatctcgacgacgacgacgacgacgatgacgaagaagaagaagagcctcgtggagtctctaaaccccctgattacgacgatgaacagtggcagattagggctggtattggccgagattgcaccctcgattacgaggaagaggaggatcaatatgacaagcaggctataagcaaagagaattcgggtgatcgtgtgtatatgaaggatct

SEQ ID NO: 21225 - DNA, 449 bp, Glycine max
  Clone ID: LIB3106-054-Q1-K1-F4
tcttgacaaacttgcactaaaatatgatcgggaaggggaaccatcacagctagcagcgtgttggcatttttgtcagtactgttgatccattaaaagaacccccgcttgtgactgctaacactgtcctatctattctttctgttgactacccagtggataaggtctcctgttatgtctctgatgatggtgctgctatgttgacatttgaagctctggctgagacatcagaatttgctaggaaatgggttcctttcagcaagaaatataatatcgaacctcgggcacctgagtggtattttgcacagaagattgactacttgaaagataaggttcaaccatcatttgtcaaagatcgtagagcaatgaagagagaatatgaagaatttaaaattcgcatcaatggacttgttgcaaaggcacaaaagattcctgaagaaggatgggtgatg

SEQ ID NO: 21226 - DNA, 484 bp, Glycine max
  Clone ID: LIB3106-054-Q1-K1-F5
cgaaatcccggggcggacgcagccgtccgcccacccttccgccaacccgtccggtcctttgccattgaaatctctccaaaaccttgggttagtcgctttcaattttgcgagctctgtttcgagttggaagaagaaaacgagtccagctgcagcgtcggagtcggaggcagaggcagaggcgtttgcgtcggctctggcgagcgggaaggaagcgactttgttggagttctactcccccaagtgcaggctctgcaattccttgctcaaatttgtctccgaagtcgaaaccagaaactctaattggctcaacattgttatggctgatgctgagaaccccaattggctacccgagctccttaattatgatgttagctatgttccttgctttgtgcttcttgacaacaatggaaaggccctggcaaagacgggtgtcccaaatagccgtttacatgttattgcaggactctcccatcttctcaaaatg

SEQ ID NO: 21227 - DNA, 455 bp, Glycine max
  Clone ID: LIB3106-054-Q1-K1-F6
aaagtgaacggcagctgggaagctaaacgacggcgtggagtgatgatattggaggagaggtgttctgcagcagcagtagcagtagccagcagcttcaaccatttgaaaatccttcttccaatctactccttctctctggccctccttcttcgtatttcctctctctgaaaattgaatatgacatgacttgtttcaattcttaatgatccaattttacgttatacagtgggaagacttctcttcttttccaatttgcattcaatgtagcactgcactccgactcaaataacaaagtcatcttcatttgcaaccgccataggttggattccaaacccccttttctttctcagggtattgacccctcttctcatgtattccaccgtatacagatgaagtacgtgaatgatgatgaagacattcgcaagtactttgctgctttccacctgtatgataca

SEQ ID NO: 21228 - DNA, 362 bp, Glycine max
  Clone ID: LIB3106-054-Q1-K1-F7
cccacgcgtccgggaaaattagaatcaaatggcttaggattacctacatcaccgtgatggcagatgttcagaaccgggtgttgcaggctgctgccaaacatgaatcccaaccatccgatagtgaaggtaaccaagatccagtacctgaaccgacagttcctctcaatcagaatgtatgagtcattccagattgtcatgtgctaacatgaaaattagaagagagattaatatggtcacagcaaatttaacttccatgattgaaagtttggaagttgacattatccaaacactgctgccacggactctgccctgcctgtaggcgttttgaatatatagaaaaagaagaagaaatatttcatgaa

SEQ ID NO: 21229 - DNA, 151 bp, Glycine max
  Clone ID: LIB3106-054-Q1-K1-F8
cccacgcgtccggtactttccaaacttaataatgttaaacgcctgtattaatccaggagagaatgggcctttgaaactaaagaaaaacaaactaagattggcccaaactgaagaaatacaaaaaaatggcttgagatcaagcctaaccacg

SEQ ID NO: 21230 - DNA, 327 bp, Glycine max
  unsure at all n locations
  Clone ID: LIB3106-054-Q1-K1-E5
cagttttacattgttcgtangttattttttcaggttcagtaactcattcacagaagaagaatccaagcttgtggattagaaggggttcattttgccgattcccaagctatggctgctaagcttcttgcaaacttaattgtaattggtggaggaataatgacaagagcatttgttcaggcatatcgtcaagcactttctaatgcctcaagaaatggtgttgcacaagagacaatacaaaatactatccgcagagctagcaaagggatgacacaacaagaggctcggcagattcttggtgttactgaggaaacttcctgggaggagatt

SEQ ID NO: 21231 - DNA, 133 bp, Glycine max
  Clone ID: LIB3106-054-Q1-K1-D11
cccacgcgtccgtcaatttatccaattaattagtgttttattttcttgaggcaaaagcaatgttttgagtttttaatattttccatttgttcgaagactatattgtgtaaggaacttattgtagttcatactc

SEQ ID NO: 21232 - DNA, 387 bp, Glycine max
  Clone ID: LIB3106-054-Q1-K1-D12
ttcaaacgtccaaatgatctagatccaccaaaccaaaccaaaccaaaatggcaggaggcgaagcctcattcatgatatcaacaccatccttatcttccaccatacaaaaacaccatcatttgaagccatccaacgtgagctaccaaggtcttagacccctcgcaaggttcaccaaaacctgatcaaccaaagcgagcaccactaccaaaagggttattccaaaaggtggtgttagagctaaactcaactcagaccttgtgataagcctgatcactgacctcttcctcttctagagaaaggacgtgttcttaaacttccaaaggtagaacgtgagcaaatcatgtgcctgagcagaacggcctgacacactttgaggctggtgataca

SEQ ID NO: 21233 - DNA, 356 bp, Glycine max
  Clone ID: LIB3106-054-Q1-K1-D2
ctactcaacacaatctctgagcacaaattgctccatctcaaccccatcaaagacgcaactcagttttttccaccaaaagcaggtagttttctggaggaacagcaagaagggcagctgcagcagcagaagaagctatgtgataacatgtgcagcaggtgactcacagacagtggtgattggcctggctgcagactcagggtgtgggaagagcaccttcatgaggaggctgaccagtgtgtttggaggagcagcagagccaccaaagggtggcaaccctgactccaacactctcatcagtgacaccaccactgtcatatgcttggatgattaccactctttggacagaactggaagaa

SEQ ID NO: 21234 - DNA, 412 bp, Glycine max
  Clone ID: LIB3106-054-Q1-K1-D3
ctgatatcaatcacaatttctctctcttcttcactcttcattctcatttctcttctgagttggtgccatggctaagagctcattcaagatggaacacccacttgagaggaggcaggctgaagcatctcgaataagagagaagtatcctgacagaattccagtaattgttgaaagggctgagaagagtgatgttcctgaaattgacaagaaaaagtatcttgtacccgctgatttgactgttggtcagtttgtgtatgtggtgcggaagagaatcaagctgagtcctgagaaggcgatcttcatttttgttaagaatattttaccaccaactgcggcaatgatgtctgcaatttatgaggaaaacaaggatgaagatggctttctatatatgacttacagtggagagaacaca

SEQ ID NO: 21235 - DNA, 437 bp, Glycine max
  Clone ID: LIB3106-054-Q1-K1-D4
ccaacccgtccggtgtttacaattactatagccacatatatacacacagtagtagttaaagtcttaaagattagaataagatcagtgatggaaagaaagttcatttcagtagttgttttgggagtatgtttggtgctgggaatgtcccaatatgttgatgcaaggaacttggagaaaaaatcaaaggaagaggtgaagaagccagaatcgtgcttagatggagggtccattggtggtgttgggggcattggcggcattggcggtgctggtggaggtggtggtggtttaagaggtggctatggaggaggagctggtggtgatagtggtttaggtggtggatatggaggaggagcatggagttgttgattttgaagtcttttaagttgtattagttttttttggtgttatagattttgtattttttttttttatttttt

SEQ ID NO: 21236 - DNA, 431 bp, Glycine max
  Clone ID: LIB3106-054-Q1-K1-D5
tttcttcttttggttaattaagggggggccactttaagtagttaccacccccttttagacatagttcttctccctcggttctctattctctacactgggaaaccaaaatgaaggtagcatttgcagctgttctacttatatgccttgtcctcagctcctccttgttcgaggtgtcaatggctggttctgctttctgttcctccaagtgctcgaagaggtgttctagagctgggatgaaggacaggtgcatgaagttctgcgggatttgctgcagcaagtgcaactgtgtgccatctgggacttatgggaacaagcatgagtgcccttgctacagagacatgaagaactccaagggcaaggccaaatgcccttgattatttttttttttcttcaccatccacacatcaacttcaagcctttgattcagtcac

SEQ ID NO: 21237 - DNA, 422 bp, Glycine max
  Clone ID: LIB3106-054-Q1-K1-D6
ttttctttcctaagaagggtcattaacccttctcttctctgcagcaactgggccgaaccctaaggtcttcttcgacatgaccatcggcggtcaatctgctggccgcatcgtgatggagctctacgccgacgtcactccccgcaccgccgagaacttccgcgcgctttgcaccggcgagaagggcgtagggcggagcggcaagcccctccactacaagggctcgtccttccaccgcgtgatcccgagtttcatgtgtcagggtggcgacttcaccgccggaaacggaaccggcggcgagtcgatttatggcgccaagttcgccgacgagaacttcgtgaagaagcacaccggtcccggcatcctctccatggcgaacgccggtcccggaaccaacggatctcagttcttcatttgcacggaga

SEQ ID NO: 21238 - DNA, 396 bp, Glycine max
  Clone ID: LIB3106-054-Q1-K1-D8
gtttgtgttcttggtttcctcccctttctctctctctctgccttgcatttttggctcgttttctcaataggggtttcgaaaatgccgatgtttcagccttgtcggaaggacttggttgccgggtacgagggtggtggcgacggccagattctagatctggacaccgccgtgaaagacggcgttttgggcggcgtggagggcggcgtcctgggaggtggggttggtgagaaggtggatctggggaagatgattgaggagcttgagttatgtgaagtgccgagtgtgttcatttgcccaatctcattggaaccaattcaagaccctgttactctctgcacaggccaaacctacgagaggtccaacattcttaaatggtttaacttgtgacacttcacc

SEQ ID NO: 21239 - DNA, 427 bp, Glycine max
  Clone ID: LIB3106-054-Q1-K1-D9
gtgatctgcagctacgatgggtaagggaacggggagtttcggtaagaggaggagcggggcccacaccctctgtgtgaggtgtggccgccgcagcttccacctccagaagagtcgttgctctgcgtgcgcttaccccgctgcgcgcaccaggaaatataactggagcgtgaaggccattaggagaaagaccaccggaactggaaggatgaggtacttgcgtaacgtgcctcgcagattcaagagcggcttcagagagggtaccgaagctgcacccaggaagagaggagctgctgcctctgcctaagctttgaatgaatgacagcaatttttgctgggtcagtgaattataggagttaatgtttctgtgttggtgccaaactctttggaacacattttctttctgtcgttttaatttcatttaatatgt

SEQ ID NO: 21240 - DNA, 455 bp, Glycine max
  Clone ID: LIB3106-054-Q1-K1-E1
cccacgcgtccgatttgatctgcgactgagagaagagaagagaattgtgatggggggaggagagggtcacggcacaacctacaaaggtgttaccattcatcagccaaagcgctggcacactatcaccggcaagggtttgtgcgcggtcatgtggttttgggtattctacagggcaaagcaagatggtcctgttgtattgggctggagacatccttgggagggtcaccatgatgatcatggcaagggccattagcattccttaggcatgagctccaagaacaggaagaacagaatttgaagtgtctgttgctgtggatgtgttgttcaaatgtttactttgatcaattcaataaatttggctgtaaaataagagatttctttttgcatgatttcatgagcattagatatgtctgtgcaccttacctgctaactgggatgaaagtcatgctatgttt

SEQ ID NO: 21241 - DNA, 432 bp, Glycine max
  Clone ID: LIB3106-054-Q1-K1-E10
cttggttgtaggttgtcttctctattattgacctgtgctataaatctttgtttgggagagagacaaacagatctataatgtaaagggaagggaggttcacattcacattacaagcaacaacttaacgcttaacaacagcactctccctaatccttctgtgtatgcaaaatgagaccatgcaaatgcaaatgcaatgttctctctgctctcattcttcttgtcacattcctttttattgcttcttccgtccactgtgaagacccatatcggtacctcacttggaaggtcacctatggtgacatctatcctcttggtgtcaagcaacaagggatcttaattaatgggcagtttccagggcctcaaatagatgctgttacaaatgacaacttgattatcaatgtctataactacctcagagaaccgttcctcatt

SEQ ID NO: 21242 - DNA, 287 bp, Glycine max
  Clone ID: LIB3106-054-Q1-K1-E11
gtggttgaaagttaaaaagtagcaaagatgtttccattcgggcacaaaggtcaaaggatgaaggggactattggggttattccaaaaaatgtgtttgatattaaccaccttacccatgtttaccggatccgtcggacccgcttaaaacttttaaggcgggcccttcataccagtacctttttaagcctcttcattttccatccaactaattagggctcccaaggctattggtggaaaaggaaaagttggaaaggctccaattttggagggaaggttacctttcccac

SEQ ID NO: 21243 - DNA, 451 bp, Glycine max
  unsure at all n locations
  Clone ID: LIB3106-054-Q1-K1-E12
attgtttgttgttgtaactcgttcttcttcttttgttgttctgtgtttgtgttggttggttctctcacctgaaaatgtcttgctgcggtggtaactgtggttgcggaagctcctgcaagtgcggcaacggctgcggaggctgcaagatgtacccagacttgagctacactgagtcaaccaccaccgagaccttggtcatgggagtggcacctgttaaggctcaatttgagggtgctgaaatgggtgtgcccgctgagaacgatggctgcaaatgtggaccaaactgctcctgcaacccctgcacttgcaagtgaggtgttgggagagcaagcttcaagcagagatagcccttaattaggaataatgataaactattaatgtgtagctaaaaacttatgtattatgtctgtgatggttttcgngcactctggtgttttgtgttaaacaaaca

SEQ ID NO: 21244 - DNA, 355 bp, Glycine max
  Clone ID: LIB3106-054-Q1-K1-E2
gttgtgataataataacagacaacgaaaccctcaaacgaagggaacaatgcgaatataagtgagagaagaatatatcaatatcgtctccaaatacgacgtctttcaggttggagttttagcacaagatgtctctgagaataaaagcagtagtagataagtttgtccaagagttgcaggaagcgttagatgctgatattcaggataggatcatgaaggacagagagatgcaaagttacattgaggagcgtgaacaagaagttgctgagcgtgaagctgcttggaaagctgatctttctcgtcgtgaggcagagattgctcgtcaagaagcaaggctgaaaatggagagagacaatc

SEQ ID NO: 21245 - DNA, 400 bp, Glycine max
  Clone ID: LIB3106-054-Q1-K1-E3
atttatgactcgatatcagagaaatggggccttgttgatgtgggtgtcatagtttgtgggcgttcaacacttcagacaagtgttgctgaagaaatcaggtcacacagtatgacaagacaacgccatcattccatcttccatttccacagtcacagctttgatctctagcttccctaatggaagatggaagacatgcattcactaaagaaaaaagcatatatatatataatgtgtattgtatatagcagtaatcaaattctagaaccctttgtagcattggtgctatagtagcctacagtccttagaagggttctaattctaagcgggatgatatgattttactccttaattatgtgaatatatgcattatcactcagacatatttatatgcaattttcag

SEQ ID NO: 21246 - DNA, 439 bp, Glycine max
  Clone ID: LIB3106-054-Q1-K1-E4
cccacgcgtccgcccacgcgtccgcccacgcgtccgctctcactcatggcaacaacacgcatgtttttccgaccaaccatgatccgggcctccgctggttctcccgccaagcccgacccgagaaacaggaagcccgtttcctccaactggtgggctcctctgttcggatggcccgcggatccggactacatgggcccattgcagaaggcgagtgagaaatcggatccggagcgggaagtgggcctggacctgggccggcccagatccaagttcacagcggggtgcttcacggagaagaaggcgaaagagctgagaaagaagaccgtggaaacgtcgacgtttcatgacatcatgtaccactccgctattgcatccagactcgcgtccgatgtttccaaagggtacgagaaataaatgtttgggtttaattaaatgtttt

SEQ ID NO: 21247 - DNA, 450 bp, Glycine max
  unsure at all n locations
  Clone ID: LIB3106-054-Q1-K1-D10
aaagcacaatttttttgcttcaacgggccttaccttacctgaagatggcttcggtgtcgtttgccgtgggattattaccttgctcttcttcttcttgctatacccgcgtctcttatggttcagttcgatttcccgtattgaacaacgccaactcactgaaactcagctcctcagctaacatctccagtccaattcttcaccaaaagctttgcactgttccttctccccttgctctaaggcctcgccctctcaccattgtatccgctaagggctacaaaatgaaaacccacaaggcatctgcaaagcggtttagggtgactgggcgaggcaagatagtgcgtangagagctggcaagcaacatttgctcgttaagaagaataccaagcgcaaatcccgactctccaaaatgcatgcggtcagctagagcgactatgacaatgtaattggag

SEQ ID NO: 21248 - DNA, 467 bp, Glycine max
  Clone ID: LIB3106-054-Q1-K1-B7
gttagatatttaaataattaaagtaaaaaaaatattcagccccccttttgatggggtcgtggatttgtcattgatctcgacgattctaagaggcgttcccctgcaacaattttgaaaaattaagatctagttgtcttattgttgcatatataatgagacattaattatgtgtgtgtgagtgaacaaaaataaaacagtgaaggaaagtagttgatagcataaactattgcattggagtttgcagggtaaaaaaaccctaacaccaaatcaagagaccaaataagggaggaacaaaggaagatcaggacaagagattaaaggggatgaaatgagtgaaagacatgagacaatgtaaagagagaaggaatatgtttatattatttttttagttattatgttattgatacaaaattcattgattttattaaaatagtaatttcgtcaaataacctaattaatcatttttg

SEQ ID NO: 21249 - DNA, 416 bp, Glycine max
  unsure at all n locations
  Clone ID: LIB3106-054-Q1-K1-B8
cttcatttcatcgtttcgttacgttctgcttcgcgtggaccaacaagaagtgtgggtgtcattcaatggccagcgctcagctctcagcaatatcttcgtcgatctctacggcgtcgtttgaagggcttcgaccttcggctgttcagtttgcttccgcgggcagaattagaattggcaatctctcccaaaggtctttccggggcttggttgtcaaagccgccaccgttgttgcccccaaatacaccgcgattaagcctctgggagacagagtgctgataaaaattaaggaagcagaggagaaaactgagggtgggattttgcttccatcaactgctcaaacgaagcctcaagggggtgaggtggttgctgttggagaaggaaagacaattgggaaagacaatgtanagattagtgtg

SEQ ID NO: 21250 - DNA, 70 bp, Glycine max
  Clone ID: LIB3106-054-Q1-K1-B9
gaaaatatataatttggaaaaaaaatatatataaaaaaaaaaaaaaaaaaaaaaaaaagaagataatatt

SEQ ID NO: 21251 - DNA, 358 bp, Glycine max
  Clone ID: LIB3106-054-Q1-K1-C1
agaggagttgctgttaaggacccatctgctccccatggaggtcgtcttttgattgaggactatgcttatgcttctgatgggctagagatattggatgccatcaagtcctgggtgcaagaatatgtctcattctactacaactcagatgaggaactccaaaaagaccctgaactccaagcttggtggaaagaacttgtagaggtgggtcatggtgatttgaaagataagccatggtggcaaaagatgcaaactcgtgaagagttggttgaagcttccgctatcctcatatggattgcttcagcccttcatgctgctgttaactttggacagtatccatatggaggtttaatcctaaaca

SEQ ID NO: 21252 - DNA, 421 bp, Glycine max
  Clone ID: LIB3106-054-Q1-K1-C10
cggacgcgtgggcggacgcgtggggaacaagtagttgagaactaagaaggagaagggagggcttcctcaatgatctcttccccagctgttaccactgtcaaccgtgccggtgccggcatggttgctccattcactggcctcaagtccatggctggcttccccaccagaaagaccaacaatgacattacctccattgctagcaacggtggaagagtgcaatgcatgcaggtgtggccaccagttggcaagaagaagtttgagactctttcctacctgccagaccttgatgatgcacaattggcaaaggaagtagaataccttcttaggaagggatggattccttgcttggaattcgagttggagcacggtttcgtgtaccgtgagcacaacatgtcaccaggatactacgatggacgctact

SEQ ID NO: 21253 - DNA, 416 bp, Glycine max
  Clone ID: LIB3106-054-Q1-K1-C11
aagatagtaatggataacaaacatgatcactgatcaaaactattcacatcttcacgcagttcctcttcacatttttagatatcatccttctacctttgcctatggaggctttctccgtacaatcactcaccgccaccaccattccctcctctctgtcacgtagaggtgccactgacaaaccttctgccacctcccatgttaacctttcccatttcatgaggtacccttgtaccacaagatcaacaaaacaaaaaattctttgcaccagagctcaagcttcaggttcaacgaaatctagtacgggtagtgcagaggggatttctgagaaaacagattccaaggatgacaacttagtatttgttgccggtgctactggtagaggtggttcacggacagtgagggagcttataaagctt

SEQ ID NO: 21254 - DNA, 424 bp, Glycine max
  Clone ID: LIB3106-054-Q1-K1-C12
ctccattatcagtcctttttcaggcgtggtttttacctaaccctacaattcgccgatcgttccagttagggtttttcgctctcagcgaaaacggtgtatatagaaaccctatctattcctccgatgcaccaggggaattgaatatatataataagaaaaaggcaaaaaaaagaggtgaaaaaaatttgtctggtaaattgttaattctgttgttttgcgtgtttctggactcaggagctgcgctgttcccggggaaaagcatgtacagtatgaacactaaatgcagtgctggggattgccaattgatgtcatggtcttcaccattgccaccacagtttctttgaaactgctcaaggtctagggttctatttaacttctgcacctgagcttttatatttaagagtgtttatagatattgggctag

SEQ ID NO: 21255 - DNA, 416 bp, Glycine max
  unsure at all n locations
  Clone ID: LIB3106-054-Q1-K1-C2
tctagatcgcaatcgcctcaggaattcaagttatcaaacaaaatgagaggcagaaagactgccaacttcaaatagatagctcaatgaaattaattgtagttctgctgtatttcatttttggtttacctttgtatcttcggaagcattacaattttatttgaaatgtaaaattttgtttttccaaaaaaaaaaaaaaaaaaaaaaaaaaaaaaaaaaaaaaaaaaaaaaaaaaaaaaaaaaaaaaaaaaaaaaaaaaaaaaaaaaaaaaaaaaaaaataaaataaaatcccactaaaaaaataaaggttggggtaaaaataaaaaaaaatttttaataaaatataaaaaaanggggggggggcttttttaaaaaaaaaattttttttctccccgttggggagaaatatttttttttt

SEQ ID NO: 21256 - DNA, 434 bp, Glycine max
  Clone ID: LIB3106-054-Q1-K1-C3
acagagagaatggctgcggaaaacgttgttgagttcacagacttacccgtcaagaggcgaagagaagaagaagaaggaaccaatggcgtctccaacgacgccgtttcagcgctccccaatgaccctcaataccctggcatctctgcggttattcccggttggttctccgaaatcagcccaatgtggcccggggaggcacattccttgaagatggaaaagattttgtttcaagggaagtctgactatcagaatgtcatggtcttccagtcatcaacatatggcaaagttcttgttttggatggagtcattcagcttacagaaagggatgagtgtgcctaccaagagatgatcactcatcttcctctttgctctattccaaatcccaaaaaggttttggttattggtggaggagatggtggagtgctgcgggaagt

SEQ ID NO: 21257 - DNA, 331 bp, Glycine max
  Clone ID: LIB3106-054-Q1-K1-C4
ccccccagtagtagttaaagtcttagggagtagaataagatcagtgatggagagaaagttcatttcagtagttgttttgggagtatgtttggtgctgggaatgtcccaatatgttgatgcaaggaacttggagaaaaaatcaaaggaagaggtgaagaagccagaatcgtgcttagatggagggtccattggtggtgttgggggcattggcggcattggcggtgctggtggaggtggtggtggtttaggaggtggctatggaggaggagctggtggtgatagtggtttaggtggtggatatggaggaggagcaagaggtggtggagttgga

SEQ ID NO: 21258 - DNA, 389 bp, Glycine max
  Clone ID: LIB3106-054-Q1-K1-C5
gtaagggattttcttttttattaattccgtcggggttcaattttttaaagaccaaaccaaaaacctgttcatcgatctgttggatctgcaagtgaattggccaaaagaaaatggttaccaaatcaaaggaaactcacctgagcaggctaaaaaataaggtcgataacgggggcggcggcgcgtgggagtccctctgcctcgtgcgaaagctgaaagttcggcggtcggagaaagttctgaagcatggtctctctatccttaacgaccccaaacaccgatcctctctcggctccgatgaatggaccttgtatgagcaggttgcagttgctgctatggattgccaatgtctcgacgttgccaaggactgtacaaaagttcttcagaagaga

SEQ ID NO: 21259 - DNA, 460 bp, Glycine max
  Clone ID: LIB3106-054-Q1-K1-C7
ggaagagagggttctctgagactgaaactgatgaaacagccaccgttgatttggggctgaacctctcacccaaggaagctgctgctgctgatggtgcacatccacgtgagaagccaaagacttcgccgaaggagaagacccttctgcttcccgatcccgccaagcctcctgccaaggcgcaagtggtgggatggccacccgtgaggtctttccggaagaacatgttcgcagcccaaaagagcagcggcggagaggaaagcgaaaagagcagccctaatgcaagctttgtcaaagttagcatggatggagcaccttacctccgcaaagttgacttgaagatgtacaagagttacccagagctctctgatgccttgggcaaaatgtttagctccttcaccattggaaattgtgaatcccaaggcttcaaggatttcatgaatgagagcaagttgatggatct

SEQ ID NO: 21260 - DNA, 380 bp, Glycine max
  Clone ID: LIB3106-054-Q1-K1-C8
cccacgcgtccgcccacgcgtccgaagaacttagctacaagctaaggaaggatcggatggaatggctcaagcaatggcatcaatgactagcttacgtggttcctctcaggctgtgttggaaggtagccttggctccacacgcttgaatgtggggagtggaagcagggtggcctcagtcacacgtgcagggttcacagttagagcacagcaacaacaagtgaatggtggtgaggtacaaagtagccgtagggcagtgctttcacttgttgctgctggtttgaccactggctcttttgttcaagctgtgcttgctgatgccaaacctatcaaagttggaccacctcccccaccttctggcggattacctggaacattgaact

SEQ ID NO: 21261 - DNA, 435 bp, Glycine max
  unsure at all n locations
  Clone ID: LIB3106-054-Q1-K1-C9
cccacgcgtccgctgcaacactgtctctgtctctcctcctcctgttctcactcaggatggccgtaaccgttagatcgagcgactacnactacgattgtgtgtacactgcatacgttagaaccggttcggtgttgaagggcggaacggactctaagatcgggctgaagctgtacgacaagtacggctactacatctacattaaaaacctcgaagcatggggcggcttgatgggcaagggctacgactacttcgagcgcggcaacctcgacatcttcagcggaaggggaccctgtcttgacggacccgtctgtgccgttaacgttacttctgacggatcgggttctcaccacggctggtaccttaactacgtccaggtcacctccactgggccccacctttcctgcgctcaagatcagtacgaggtggagcagtggc

SEQ ID NO: 21262 - DNA, 390 bp, Glycine max
  Clone ID: LIB3106-054-Q1-K1-D1
agtttatattgtgtactactccatgtatgggcatgttgagaaactagcagaagaaataaagaaaggggcttcctctgtggaaggtgttgaggccaagttatggcaggtacctgagacactgctggatgaggtgcttggtaagatgagtgcaccacccaagagtgacgtaccagtcattacccccaatgaactatccgaggctgatggctttgtattcggcttcccaacaaggtttggaatgatggctgctcagtttaaagcctttctagatgctactggaggcttatggagagcacaacagcttgcaggcaagcctgctggcctcttctacagcaccggttcacaaggtggtggacaagagactacagcactcactgctatcactcaact

SEQ ID NO: 21263 - DNA, 322 bp, Glycine max
  Clone ID: LIB3106-054-Q1-K1-B5
aggaaaaaccgaaggaaaaattgccattaaaaatgaaaactttgccgggggctcttataggcatgacggtaaccatcaacgtcaccatcaacaacgccatggccaatgttaaggacaagattcacgtcacggcgggccttcatccggagaatcaccccgggaagcacctcggagagcaactgacacatgcacggaccatcatccataacgacatacacattgatttaacccttaatcttcgtctcaggcttattgatcctatcattaagcctttcgttatggcatacgctcacgactacattaatgacaagatgatctaccc

SEQ ID NO: 21264 - DNA, 383 bp, Glycine max
  Clone ID: LIB3106-054-Q1-K1-A1
cccacgcgtccgcccacgcgtccgcccacgcgtccgcgcaaaactgtcagagcaaaccgagccaaagttgggtacattgggcctgccactgatttcaactacgatcacagacatcttggtactggccctcaaacactccttgaaattgctgagggttgccacccatttttcaagacactctcaaatgccaaaaaccctgttatcattgtcggtgctggggtttttgagaggaaggatcaggatgcaatttttgctgctgttgaaaccattgcacaaaaagcaaatgttgtcagacctgactggaatggccttaatgtattggttcttcatgctgcccaagcttgtgggcttgaccttggacttgttccacaatctgagaaaag

SEQ ID NO: 21265 - DNA, 287 bp, Glycine max
  Clone ID: LIB3106-054-Q1-K1-A10
ggcttatattcagatgaagtcaattgcagcttcgttattggagaggtttgagattgaggctttggataaggacacgtgtccggagcatgttttgtcttttaacaataagatcaaaaggagggtggcttttaattgtaaaataaaggattaattaattctaaggtcaagaatattctcttcacaattacctggctttcaacaatcttcaaaataattgtgaatttctgctgttttaatgaaatcattagttaaaaatatataacatgatcaacgggttctaattaatt

SEQ ID NO: 21266 - DNA, 357 bp, Glycine max
  unsure at all n locations
  Clone ID: LIB3106-054-Q1-K1-A12
catctgactctcgtctacgtcctgatagaatggcccttgagaagggtgacctatgcaggctggttatgagaagagcagtttggaggagaggcaaagagctgagaagagaaaccgagaggccaagggccataagttcactcctagatggtttgatttaacagatgaagtaactcctaccccttggggtgacttggaagtttaccaatacaacggtaaatatacccaacattgtgctgccgttgatagttctgagtgcattgaagtgcctgacatcagaccagaattcaacccttggcaatatgataatttggatgctgaataatgagcatccttgnggaattctttctattttttttg

SEQ ID NO: 21267 - DNA, 393 bp, Glycine max
  Clone ID: LIB3106-054-Q1-K1-A2
cccacgcgtccgcaaaaatattattaagatgatcaacattattggagcacttgttctagtctgtgcatttctcttcctcagttgtgtgtatgcacaagacacaacaacccttgtgcctgcaatcataacttttggtgattctgctgtggatgtagggaacaatgactatcttcccacccttttcaaggctgattaccctccttatgggagggactttgttaaccaccaacctactgggaggttttgcaatggcaaattagctactgatttcactgctgacacattgggtttcaagacctatgctccagcatatcttaacccacatgcatcaaggaaaaaccttcttattggagcaaactttgcttcagctgcatctggttatgattaaaatgc

SEQ ID NO: 21268 - DNA, 369 bp, Glycine max
  unsure at all n locations
  Clone ID: LIB3106-054-Q1-K1-A3
gcgtccgcccacccgtccncnttnntacaaaatggacgattctcacgatgagctctacattagtcggacgctgttaaatttttatgatagctgggaattaacaagtcccctgcgcttgcttttttggtcgcgatgatacgatactttgtgaaattacttgtactttacttttttgcttagttttacgacgaaacttctttatctgttaaaaaaacactaacttcaataggcccctttggaattcgggcgccaaagcgcccgaatacctggaatttttaaccatataaaaaaatattatttcatacaataaattttaataaaaaaggggccccctttctaaagatccaaatttttctcccccgtctttcc

SEQ ID NO: 21269 - DNA, 439 bp, Glycine max
  unsure at all n locations
  Clone ID: LIB3106-054-Q1-K1-A4
cccggaatccggtcggccacgcgtccgccaacccgtccgccaacccgtccgttttaacacacactttctctctctctctctctcacgcaggacttgtagcaatggcgagccctcccactccacgcgaagagttcgtgtacatggcgaagctggcggagcangccgagcgctacgaggagatggtggagttcatggagaaggtctccgcctccgccgagagcgaggagctgaccgtggaggagcgtaacctcctctccgtcgcctacaagaacgtgatcggcgctcgccgcgccttctggcgcatcatctcctcaatcgagcagaaggaggagagccgcggcaacgaggaccacgtcgccgtcatccgcgactaccgctccaagatcgaggccgagctctccaacatctgcgacggaatcctcaaactcctcgacacgcg

SEQ ID NO: 21270 - DNA, 198 bp, Glycine max
  Clone ID: LIB3106-054-Q1-K1-A5
ttccgaaaaaatattaattgaatacctgaaaaaaaaaaaaaatgccttgcgtcagcctcaccaccaacgtgtccctcgaaggcctcgacacctcttccatcctcgccgaagccacctcctccgtcgccagcataatcggcaaacccgaaacctatgtgatgattgtactgaaaggatcagtacccatagcttttggtg

SEQ ID NO: 21271 - DNA, 233 bp, Glycine max
  unsure at all n locations
  Clone ID: LIB3106-054-Q1-K1-A6
gcagggggctctaaattctactctnagccgcagatctctcagggctggcatcttctcagggaaggtgggaagatgtacacattaagggagaaaatccacaaggataaggatgctgaaccaactgagtttgaagaggcagttggacaggcattgtttgatctggaaaataccaaccaggagcttaaaagtgatctgaaagatttatacataaactcagctgtgcaagttgatgt

SEQ ID NO: 21272 - DNA, 404 bp, Glycine max
  Clone ID: LIB3106-054-Q1-K1-A7
agcgaggcttatttgttcattcattcaatatctggtgcaaagtttcagtatttcggagggaaacagttatggatctctccgtttctttctccaaaacccgtcctcctccgttctctccctctttctgccgtccaatcactccgcaactgctgcgattctcccgaaactccggaacctttcgccgccgttgatttcccgccaaaacaagctcgcggtcacagccattcaggtttcggatctatccgagaattacgacgattctgtcctcgaagacgttccgcaccttaccgactttcttcccaatttgccggtgatagacaaatcttttggatttaatactgctgtggaagaagcccacatagccattaacgctgcacatggggaggttgaaaatgttgaaaatg

SEQ ID NO: 21273 - DNA, 301 bp, Glycine max
  unsure at all n locations
  Clone ID: LIB3106-054-Q1-K1-A8
cggacgcgtgggcggacgcgtgggaatgaatcatcaccacatgccctctaagcgagnagtttagttgagttcaattttgatcatttgtcagaatatggcttttttatactacaattaaatcatgttcttaacacagttttcaagtggaaaaaaaaaaaaaaaatttttacaccctttaaaaagataaatacaatacaaatagaaaggaaaaataaaaaaaaacaacctactggtaagattatcaatggcaaaaaaactaaggggtttcacttataaaaanatggggggcggccttttaaag

SEQ ID NO: 21274 - DNA, 416 bp, Glycine max
  Clone ID: LIB3106-054-Q1-K1-A9
cccacgcgtccgcaactcaatttttctctcaaccggcccaatttagcataagccgagcggggccaccgcaacagcagcagccacctcgtccttcatggggacgcgcctcctggaggcccattccggggcggggcgggtgcaggcccggttcgggtttggcaagaagaaagccgccgccccgaagaaagtttccagggggtcgggctctagctccgataggcccctgtggtatccgggcgccaaggcgcccgagtacctggatgggagccttgtcggagactacgggttcgacccatttgggctagggaagcccgccgagtacctgcagttcgagttggactcgctggaccagaaccttgcgaagaacgtggctggggacatcattgggaccaggaccgagctcgcggacgtgaagt

SEQ ID NO: 21275 - DNA, 118 bp, Glycine max
  Clone ID: LIB3106-054-Q1-K1-B10
gtttgttgtacttaaactacattcccatttgtttttgctttatgagatttcatcggcctgtatttttggtttctgttttcggacttcaatggaaattaatggatgagaactaatgaat

SEQ ID NO: 21276 - DNA, 451 bp, Glycine max
  Clone ID: LIB3106-054-Q1-K1-B11
cccacgcgtccggcaaatactgatgcaactttggttaacaccggcgacactggtgcggggtgactccagcaaacaacaccggtgcgactctgtctctagcgaacaactccggtttgactccactcaacactgttctgatgaatcaagatatttccactttgtcgttccctatgaattttatttttttttgcatcaaatcacaaaaaagttaaatgataagaacttcttgctgtggcgacagcaaatcaagtcagcgatcactatgcgtggactcaatcgcttcgttgtgaatcctcaaatccctccgcaatatgtctttgatgaagattgcgatcttgatcgcgttaatcctctcttctcgatgtggtaggaacaagaatagtttcttcttgttggcttcagtcaacgctctcgagctcgatgcttgctcgtgttcttggatagacgtact

SEQ ID NO: 21277 - DNA, 423 bp, Glycine max
  Clone ID: LIB3106-054-Q1-K1-B12
ctcaaagaaaagccaccttaacatctcttctctgaaaattctctttagagagatagagggaggaagaaagaatggcagcttgcactgtctactcaacacaatctctgagcacaaattgctccatctcaaccccatcaaagacgcaactcagttttttccaccaaaagcaggtagttttctggaggaacagcaagaagggcagctgcagcagcagaagaagctatgtgataacatgtgcagcaggtgactcacagacagtggtgattggcctggctgcagactcagggtgtgggaagagcaccttcatgaggaggctgaccagtgtgtttggaggagcagcagagccaccaaagggtggcaaccctgactccaacactctcatcagtgacaccaccactgtcatatgcctggatgaatacccac

SEQ ID NO: 21278 - DNA, 446 bp, Glycine max
  unsure at all n locations
  Clone ID: LIB3106-054-Q1-K1-B2
cccaaaacgcancgttttcccttcgcaactctctccgcacttccaccttcgcactcgcgcagacgaagctcccgttctgggcaaacccgataacaacaacaactcttcaccctatcttcccaaaatcgataagacgggacgcttctgcagccccagagccgccagagaactcgcactgtcgataatctatgctgcgtgcttggagggaatggacccggttcggctctttgagaaacggatgaatgcgcggcgagaagccggatataaatttaatgaggaaaagttgttggagtataatcatatgagtttcggagggccgcctgttactgttggatcggacgaagaagcaaatgagctactgcggcacattgaagaagagtctgccattgaagcagaagtccttacagctcctccaaagctggtatacaacaaactgattttaagat

SEQ ID NO: 21279 - DNA, 450 bp, Glycine max
  Clone ID: LIB3106-054-Q1-K1-B3
cacagagttagaggagaaatcatcatggcatcagcagcatctgggtttgtgttgtcacgtagtgttgcagctgccaccacaaactcaagggtggtcatgttcaacacaaagaacaacgcttctaggcttgttgtaagggcttcagatgagcctgcagcggcggcacccgccaccgccacacccccagctgaagctgaagctaaaccaaagccaccacctattggccccaagagaggtgctaaggtgaagattcttaggaaggaatcttactggtacaaaggcactggttcagtggttgctgttgatcaggaccccaacactcgctaccctgttgtggttcgattcaacaaagtcaactatgccaatgtatcaacaaacaactatgctttggatgagattgtggaagtggaatgagtctaatttatttgtaatttgattcttggcatgcta

SEQ ID NO: 21280 - DNA, 422 bp, Glycine max
  Clone ID: LIB3106-054-Q1-K1-B4
gaggagttgtaaattaagagcatggctgcacaagctcttgtatcatcatcttctcttagcttgtcagcggaggctgcaagacaaagtcttggaccaagatcactccaatctccatttggcttctccagaaaagcctcctttcttgttaaggcagctgctaccccccctgtcaagcaaggatcagacaggcctttgtggtttgcatcaaagcaaagtctttcttacttggatggcagccttccgggtgactatggatttgaccctctgggactttcagaccctgaaggaacaggagggttcattgagccgaaatggctagcatatggtgagataatcaatggtcgttatgcaatgttgggtgcagttggtgcaatagcacctgaaattctaagcaaggctggtctgatccctcaggagacagc

SEQ ID NO: 21281 - DNA, 470 bp, Glycine max
  Clone ID: LIB3106-052-Q1-K1-H9
ctcacacttaataatctaagacttttttaaaatatcatacaaactcttatacaggtgggcttatattaaattatcttccaactcccttatttacacttcaccaatcctcctcctttcctctaaaatactatacacactttatgctatctcacatattatcaaataaaccatcctatcaaatcatttatccatctcacctttctatcccatcatataaaactactaataccctatttacacacatctctttatttacatgacacttattccatcctattttaatacatttactcacatttatcccatgtctaaatatttttcaaattttatttaatctatcattatatttaatattatccaatattattataccctatctctctataataatattattattttaatctatatttaattttatttaaacatattatcattttatcttcatactataatcatattatattatt

SEQ ID NO: 21282 - DNA, 286 bp, Glycine max
  Clone ID: LIB3106-052-Q1-K1-G10
ctacctcaatccattatatgtccaatacactcactgatcactttacatccatgtgcaggctcaaaactttctttcacttgatcacctataaattaatgcactaaattgaatccaccaattctataaattacattaacaatcttcttgcttaatattaccaatatcatgattctactactcataataaattcatcatcaatatacaacaaatacaaaatattgcttaattcatttatttattattaacattcttattaattatcaatatgtctaaactttaaaccat

SEQ ID NO: 21283 - DNA, 398 bp, Glycine max
  Clone ID: LIB3106-052-Q1-K1-G11
aaacaattaaaacagttgtgggttgtcagccgcggtcttgcactcttatttggggggtctgaaaaggacgcgccgggagaggcgcgtggcaaattatggatggtcgaacccgcaagcattatatgattggtgtggtgcgtcttgcatcagaggtggacgcaattcataataacaataaagggtggatgaggatccagaggttcttggccacactggccataactgtctccatactcttgggaaatggaaaccccgttcagtgctttgacggcggtagccaccaaaaacagcaacacagtttgtgtgaagagctcattatcccctacggttacccctgctccgagcatactattcaaacgaaggatgggtttcttgttaggtcttcaacgtggctcttc

SEQ ID NO: 21284 - DNA, 210 bp, Glycine max
  Clone ID: LIB3106-052-Q1-K1-G12
aataactagaaacagtgtgatgaaaatgaaggtccttgttttcttcattgctaggaggtttctagcatggcaatgccatgcgtaccatatgatacctctcctaatgaacactggctatggtgcccgtactccggaggtgaaatgctcaagcttgatgcttgctttggaagcacacaacatctttggctttgagaccattccttaacagtg

SEQ ID NO: 21285 - DNA, 416 bp, Glycine max
  Clone ID: LIB3106-052-Q1-K1-G2
cagaaagctaaaggctaaagcctaaaaccttcttcctttacacctcgctggaaccagcggtggatcctcagcctgagccagtcagctacatatgcggagattgtggaatggagaatacgctgaagcccggtgacgttatacagtgccgtgagtgcggttaccgaattctttacaagaagcgcactcgtcgcattgtccagtacgaggcacgctgaagaaaactgctataacgttagcaagtgatttccatgaagaaattgttactacatctgtgttgtgtgatattgaagaactacttttaattatacagtagattgctttttgggtgatgtttagcaaaagataaaaactctgaatgtgaatatattacaaacatgcgtgtttcattagtttgcaattgtattcctactatgggt

SEQ ID NO: 21286 - DNA, 205 bp, Glycine max
  unsure at all n locations
  Clone ID: LIB3106-052-Q1-K1-G3
cccacgcgtccgnccacgcgtccgggatttttccgttctaatactctatctgagagtgatggatatttatcaaatctgttcctatctaacgaagcgctattggatcaaatgacaaagacattgttgagaaaaagatggcttttcccagatgagatggttgttgctatctgctccaataacgaatcattggtttaactgaataact

SEQ ID NO: 21287 - DNA, 411 bp, Glycine max
  Clone ID: LIB3106-052-Q1-K1-G4
cccacgcgtccgactttttctacttaccttttctcttaatccaaatacgatggcagcgatggtaaccacaaccctctcttcaaaccccaaactctcattcttcaacggaaagcccgtcacatattcttcccgcgtcgcgcccaccaccaaattatcctcatccaaacaaggcacaatttccatgtccctaaccccacccccctacgacctccagtccttcaaattccagcccatcaaagaatccatcgtgtcacgggaaatgacgcgccgctacatgaccgacatgataacctacgccgacaccgacgtcgtaatcgtcggagccggttcggccgggctctcctgcgcgtacgagctcagcaagaaccccgccgtgagcgtggccatagtcgagcagtcagtgagcccccg

SEQ ID NO: 21288 - DNA, 404 bp, Glycine max
  Clone ID: LIB3106-052-Q1-K1-G5
gtccgcccacgcgtccgcccacgcgtccgaccacgcgtccgcgtagtgtctgcagtgtgcactgctcttgcatagggagggaaagagcgaagactagagaagaaagagaagcttctgctgcatcactatggcgttggcgctgcttcttcctgttcttcttcttcttcccacttcgctttctgtttctgctcaaactcaaccaaactaccactacgcctgccaaatcagccaaatcaacctcaaaatcgctcacttagaatcggttcttgaagaaagtaacacacgattaaaggaaagggatgcgcacctggaagagtgtgagaggcgaatgaatgaattatcggaaaaaattcaccatctgcattctactctctctgcaatgaaggctgattcattgcattctg

SEQ ID NO: 21289 - DNA, 346 bp, Glycine max
  Clone ID: LIB3106-052-Q1-K1-G6
cggacgcgtgggggccaataagaagcacgtcagctgctatgaatggtgaataaaacacagaagaaacaaattgctacatagcacacactccctcttctcttctacggttatggcgtccacgttgggcacttcttcaattgcggttcttccttcgcgctgcatctcttctttttcttccaagccttccattcacacactctctctaacttcagggcagagctatgggcggaaattttatggaggaattggaattcatggcatcaagggaaggtctcagctctcagttgccaatgttgccactgaagttaactctgtagaacaggcccaaagtattgcttctaaagaa

SEQ ID NO: 21290 - DNA, 378 bp, Glycine max
  Clone ID: LIB3106-052-Q1-K1-G7
gtggaccccgtttccctgcttctcatgaatatacaattgagtatttgcaaaatcgttcacatatcaaggttgatgttctccctttagaagatgtgccaaaggatattgccaactatcatgtctgcatagtaaaaaacatgaggctagattcagaaataatttctcgtgcagttcagatgcagcttataatgcagtatggtgttgggctggaaggtgttgatattgatgctgcaacaaagcatggaatcaaagttgctaggataccaggtgatgtttcgggaaattcagcttcatgtgctgaaatggccatatatctaatgctgggtctcctccgtaagcaaaatgaactgcacgtttccatacaacaaaaagagcttg

SEQ ID NO: 21291 - DNA, 321 bp, Glycine max
  Clone ID: LIB3106-052-Q1-K1-G8
cttaacccccgcaccctgcttcttaggaaaaatcggaagcatctgattagaatcgatggcatattaagggtgatgggctgcctttaaaagatacgccataggatcttgtcacctatactatccgcatagtaccaaacattacgttacatacataaataaatactactgcagttcagaggcactttatcatgcacgatgctcttggaatgaaaagaggacatattgatgctgcaacaaaccatggactgaaatttgacacaataccacgtgatgagatcccaaagtaaacatcatgtgctgaaatggtcatatatctcatcg

SEQ ID NO: 21292 - DNA, 322 bp, Glycine max
  Clone ID: LIB3106-052-Q1-K1-G9
gtgggttgcttgagtactggacgtaggcacgggttgtggccgaaccagtataaaacggtgtttgcattctctcttcccttatcttgtttatgttattgcaatcaattttgccttgcatgtttatagaacattattaaattgattgttgttgcttcttctgcattctaagcctatccctcttaagattattgaggccacaaggtccaacaaaaacaatagcaccaaggtgttgtgtctatgaaagaataaacatcctatttgatctgctgcaagactaaaccttaattgataaattttggttatgtccaatattctttaaatg

SEQ ID NO: 21293 - DNA, 399 bp, Glycine max
  Clone ID: LIB3106-052-Q1-K1-H1
gctggggtgaaaatggctacttcaagatggaattggggaagaacatgtgtggtgttgcgacgtgtgcatcttatccaattgtggcataaattgcataacaatatggtccctggtgactaccaccttgtcatgcttcagagtttagagcgtattgctgatgccagtattgatgaatgatgattaaagataagtgtaattgtatgatgaaaattgctcctagttgggttggcatgatgtataaaataagctagaagttgttgtaaatcacataagtatattatggccttaattgtgtgtatcacagacataataacgatcatatattgatagttcatagttacatattgtattgtattgatgctcccgcttcaaatatcagttataagatagcattgtctt

SEQ ID NO: 21294 - DNA, 204 bp, Glycine max
  Clone ID: LIB3106-052-Q1-K1-H10
cccactcattctattaaaatttattatatcactgtcatttattcacatccatatgcactctctattccctcctcctccctttgcctctttcgcttttgctatataggttttctttttttttttttaactagctcattctccttgtcgatgcctgtaaaaagaattaagattctttgtggccttataaaccacttcagctaacat

SEQ ID NO: 21295 - DNA, 353 bp, Glycine max
  unsure at all n locations
  Clone ID: LIB3106-052-Q1-K1-H12
cccacccgtccacactaanaagggggtttcgctgaaaaagctgaggaagataatgacttctgcgagcgcttgcctttcgacatcgacagcgtagaattggcgtcgctcttcgggcaggctggcaccgttgaggttgctgaggttatttataatagggccactgaccggagtcgtgggtttggatttgttaccatgagtacacttgaagagcttaagaaggctgtcgagatgttcagtggttacgaactaaatggaagagtgttgactgttaaataagctgcttcaaaaggagcacaatctgaacgcctaccacgcccaccacgttcctttagttctggtttaagagtctatgt

SEQ ID NO: 21296 - DNA, 294 bp, Glycine max
  Clone ID: LIB3106-052-Q1-K1-H2
gttgctgcagtagttttggtagcatggccatgccatggcgcaagctaccaaaggttccctctccgaatgaaaactggctatcgtgagcgttctttggaggtaaaatgcgcaagttttaagcttgctgtggaagcacacaacatccgagcctttaaaaccattcctgaagagtgcgttgaaccaacagaggactacattaatggcgaacaatttagatcagactctaaaacagttaaccaacaagctttcttttatgctagtgaacgcgaagtccatcacaacgacatatttata

SEQ ID NO: 21297 - DNA, 376 bp, Glycine max
  Clone ID: LIB3106-052-Q1-K1-H3
cgaagatacatgagggtttaaagtctggatcattttggtacaaacccatccaagtgtgtcatcctcctcataagcttggagttagcttattgatattttgattgcaagtgtgataattgatgcaaccaaactttagcctggacaccaatggccgatgttgcttacgaatactgtgggctacttcattcagcaggtcaaacttgttacttctaacaccattattggaagcattgcctgatccactctctccgggcctgtctaacattctcagatcgacagaaggtgaatctctgaggatggtgttggataatgtggtccaagggctttctctacaaaatacagcttgagagctagtgaaagattttactgctttctc

SEQ ID NO: 21298 - DNA, 331 bp, Glycine max
  Clone ID: LIB3106-052-Q1-K1-H4
gataatttgtcgtgtgaattataaatcctaggattggagcaaaactcaagaacaaggagtttgagaccaaatttgcagagctggcaataactgacaaaaatttcaactacctgtcagactcagttacctatttggaagctaaaaaaggcaaatacaatgacataatacactacgatagacaggaagaaatatttcttttatatgaatggaaaccagcaagttagcaacggataaaagatcacatgtaagagagtgctctgtaggatatttggagtgtcatttaagggcataacggagttggaggatcagaaagttacgtgtttgctctttc

SEQ ID NO: 21299 - DNA, 248 bp, Glycine max
  Clone ID: LIB3106-052-Q1-K1-H6
cccacccgtccgaggagattgagcactggcattagtgtcttaactttctcctgcgagcgcatgttcggttcaaaccaacactttgaacccattgtgctgtactgatgatcagatcctggataaggctacattacccacgtccacaccgctgaaaggtacgatgtgtaatctcttatcaacgttactgcaaacatcatcaatcgttctactgcgcttgcttacagcgtggctgttatgactggcacacc

SEQ ID NO: 21300 - DNA, 121 bp, Glycine max
  Clone ID: LIB3106-052-Q1-K1-H7
cataaactgaaattactttttatttttccacctcgatcatactgtggtcaaggggcacgtttatatctaagggtcttgaagcacattctattacattttcaattgatttaattatttgttt

SEQ ID NO: 21301 - DNA, 419 bp, Glycine max
  unsure at all n locations
  Clone ID: LIB3106-052-Q1-K1-G1
tgctgatagcccatatgcaggtggtgttttcttagtttcaattcattttcctcctgagtatgccttcaagccaccaaaggttgcttttcggactaaggtgttccacccaaacatcaacagcaatggcagtatatgtcttgacattctcaaggaacaatggagcccagctctaaccatttccaaggtccttttgtcaatttgctcattgttgacggatcccaaccctgatgatccacttgtacctgagattgcacacatgtacaagaccgacagggccaagtatgaggctacagcccgcagctggacccagaagtatgccatgggatgaccgtattgagattttagctgttcaatgaagctgcaaaatcataatttatgntaaaaaacaaaagatattttgaacggaatttgaatgcttt

SEQ ID NO: 21302 - DNA, 149 bp, Glycine max
  unsure at all n locations
  Clone ID: LIB3106-052-Q1-K1-E3
aaaaaaaaataataatttaaatatttttttacnntaaaagggtctaacgttctagggggttcttatttacgatcgcgtgcactcagcatcctcgctcttgctatattgacacttaactttcctgggccgcgccgctaaaaacaacaact

SEQ ID NO: 21303 - DNA, 411 bp, Glycine max
  Clone ID: LIB3106-052-Q1-K1-E4
cgtatacgtattaataatccaacttcttacccgcaatgaacattatgcagagctcgggttgtttctcttaaacaagattctgtagccctataaagaagttgcactacaactcctagagtctggtcgtcagaatgcccaaactatgaagcttgatctggatatgctgagacaactgggtttacatcatgattatgttttactgctcgcgcaggatggatactaacttgaagccttacgatatgcactgaaatacaccgtagataccatccggccatcattgttcttagaagcagcatttcattccaatgactcccaacatcttgatgcagctcttaaattctttacagcattccttcctagctttaaaaacacctttgaccataatagatactgccccatacttaatgaaat

SEQ ID NO: 21304 - DNA, 349 bp, Glycine max
  Clone ID: LIB3106-052-Q1-K1-E5
cccacccgtccgaaaagaaccaggtcgtattgtaatgggtctttatgggaaggctgtgccaaaaactgcagaaaacttccgagcactttgcacaggggaaaagggaactggtaaaagtggaaagcctctccattacaaaggtagctcattccatagaattattcctagctttatgcttcaaggaggtgattttacacaaggaaatggaatgggtggagaatcaatttacggagagaagtttgctgatgagaacttcaagttaaagcatactggaccaggacttctatcaatggcaaatgctggtcctaataccaatggttcacaatttttcattacaactgtgacaact

SEQ ID NO: 21305 - DNA, 418 bp, Glycine max
  Clone ID: LIB3106-052-Q1-K1-E6
gtttgtatggagggtgttgcctttactcacaatcctcatgtctttagtagtattcttgtacttgcaggattcttacagggcccatttacatcctctcgtaaagttaccgcggagtaagtgcagtcttcttccccatcgtcatttctggataaccagcaaacgcattgtgaccccacaagggatcatttctggttcagtggagataaatgaagggaaaataatatctgtcatcaagggatatagtaagcaggggaagtctaagcaagaaaaaataattgattatggaggtgctgttgtcatgcctggcttgattgatgtgcacgtacatcttgatgagccaggaagaactgcgtgggaaggatttgatactggtaccagagctgctgctgcttgtggtgtaacaacagttgttgacatg

SEQ ID NO: 21306 - DNA, 350 bp, Glycine max
  Clone ID: LIB3106-052-Q1-K1-E7
cccacgcgtccgggccaagccaggtctgcacaaccaaagcaacaccccaaaagggttgagcttctgtgcccatggcgaggccacttaactttgttaccaacaacaaccagccttaatcctaagccttcttcaggccactacccttacgccaaccaaagaggacccttttcaccacgaaagcgatgtctaactccacacctcaaatcaatgcatctaagaaggagaaggcaattgccggacttacagcaccttctgtgacagcatctatggtggtaacggatgaggcacatgctgctggatatgagttcttgctttatgtaaagaactatctactcaacatcttttctggt

SEQ ID NO: 21307 - DNA, 384 bp, Glycine max
  unsure at all n locations
  Clone ID: LIB3106-052-Q1-K1-E8
cccacgcgtccgcccacgcgtacggtgatctgcagctactatgggtaagggaacggggggtttctgtaagaggaggaacaagacccacaccctctgtgtgaggtgtggccgccgcagcttccacctccagaagagtcgttgctctgcgtgcgcttaccccgctgcgcgcaccaagaaatataactggagcgtgaaggccattatgagaaagaccaccggaactggaacgatgaggtacttgcgtaacgtgcctcgcagattcaagagcggcttcagagagggtaccgaagctgcacccaggaagagaggagctgctgcctctgcctaagctctgaatgaatgacagcaatttttgcttggtcagtgaattatangagttaaatg

SEQ ID NO: 21308 - DNA, 363 bp, Glycine max
  Clone ID: LIB3106-052-Q1-K1-E9
ttccaatgtgggacccaattacatgtcagcatgctcttcttcaggtttgcctgggggggttcaaatggctcaggctaatgctatgatgggttcttcatcgatggtgtccaattttggagttcatcatgcgggttctaataattcaagcagtgcaaatctttcactagggaaaagaggggaagcaggtggaagtactgtagtggacatggcttctatttataacaactctgagggtcaaaacaagaattcaaagcctgcttcacctatgtcagcaactgcgcttcttcagaaagcagcgcaaatgggttccaccagaagcaccaacccttccattttcagtggtagttttggagtgattaactc

SEQ ID NO: 21309 - DNA, 265 bp, Glycine max
  Clone ID: LIB3106-052-Q1-K1-F1
gggtggcgccttttagatgttacagatttgtctgactggagttggtgccttttagaggttggagtatgactgactggatatggacccttctcgctagatacatgaactgcaactttatatgtagtaatcaataaataccagcgctactgattgcatatattgatattgagatcaaaggtgtcatcaagcgataaaggttatttcttacttcaatgatgatatacatgtttcgggactaacaccctgaacattaaaaaaatgtaat

SEQ ID NO: 21310 - DNA, 231 bp, Glycine max
  Clone ID: LIB3106-052-Q1-K1-F10
cccacacatcacatttaatctcatttttaaactcacaaacacatacttatacttgagggtttataacaatgaagccaattctatcatactttcttcatctataccttcccctcattgcattcaccatgtatcctcccatttttctttcccttcatatctctcactatcgcatattataaaatctattttactacctcatattaccaattcttttaaaaaatattaactcta

SEQ ID NO: 21311 - DNA, 229 bp, Glycine max
  Clone ID: LIB3106-052-Q1-K1-F11
ccgaacccgtcgaccactcccactactcttagttttcgctctaccctttgggtctaaagccatgaccacgtctttacttaacatcaaccatcaccactatctcaaaatctagattatcttggggtcaactacaatgcacaacgctcccactggacttcgcggccttacctccatcaattggcacaaccgcaggaccactgctcatcttaatcacatttccacccacaat

SEQ ID NO: 21312 - DNA, 422 bp, Glycine max
  Clone ID: LIB3106-052-Q1-K1-F12
cccacgcgtccgctgacctatcttggtagagatttgaagtttaaaccttcaagggagcaaaccattttaatttgcctttagattctgagtcactgctgctatggcgctacgcgtacttcttgtgttggggatgttgctgatgttgtgccttgttaaggtttcatctgatccaaagatagaagaagaaatactggaagcagaagaagaactgcagtttcccgataacgagccacttatcgtgagagacgcgaacagaaggctaatgcaagatatggattgtggtgggttgtgcaagacgaggtgcagtgcacattcgaggcccaacttgtgcactagggcgtgtggcacgtgctgtgtgaggtgcaagtgtgttccacctggtacatttggaaatagggaactatgtggaacctgctacactg

SEQ ID NO: 21313 - DNA, 318 bp, Glycine max
  unsure at all n locations
  Clone ID: LIB3106-052-Q1-K1-F2
cccacgcgtccgggatggaatgggatctacattctgaaatccgaattccatgttacatgggttgtggtaccttgaatgttggatggagtgttcattatgtttcacccgtgtttatgtctatgtttgtatcattatataagtacactcgggatttctggtagcctaagcgcaaacgtaacttgcttaattgcaaggataaatggggatcatatgtgtttgacactttttgtgacaaacattatctggcaccgcttaaaatgataatttgtattgatgatgcattttatgaattaagcttgaaaccatagatttgattna

SEQ ID NO: 21314 - DNA, 246 bp, Glycine max
  unsure at all n locations
  Clone ID: LIB3106-052-Q1-K1-F3
ccgacgcgtcagnctacacatccattctagtaacatcatagtatacgcagatgacgcgtgtgatgcacaagctcggtctgcacgtcatcttcatggatctgagaagcaagctctctgtacttaggctgacacggacgctcgcccccgggatgcatcttatgcgaagcaggatcactttactgatcgtgttcttcaagtccaccccgatgaggtcgcaagcatctctcagtatgcataggctggctt

SEQ ID NO: 21315 - DNA, 420 bp, Glycine max
  unsure at all n locations
  Clone ID: LIB3106-052-Q1-K1-F4
cttgaagaagaagcatgcttctggaacttataaaagcctagtattttatctagaggcgtgtgaatctgggagtatctttgaaggtcttcttccagaaggtctgaatatctatgcaacaacagcttcaaatgctgaagaaagcagttggggaacatattgtcctggggagtatcctagtcctccccctgaatatgaaacctgcctgggtgacctgtacagtgttgcttggatggaagatagtgacatacacaatttgcgaacagaaactttacatcaacaatacgacttggtcaaagaaaggactatgaatggaaattcaatctatggttcccacgtgatgcagtatggtgacataaggcttagcaagaacaatctngtcttatatttgggtacaaatcctgctaatgataaatttacttt

SEQ ID NO: 21316 - DNA, 375 bp, Glycine max
  Clone ID: LIB3106-052-Q1-K1-F5
ccacgcttccgcaagattccggaacttctagcatcgtcctattcacaatagctggctgtcattaccaaaaactctctgaacaacacactctacaatctctgactcaactatccaacaacttctgcagtaaccatcaaatgccctcggttaacatagtttcccattgcgactcccaagccaatcccttactatcaaacctacatctatgacctttacagtacctcttcaaagcaaaatattgctgaactcaaaatgcctacaaaaactataaatgaactctactatgaggttgctagtcacgtctatgaacttaaattcaaactatattttccacggccttcaaaaacgtcacattgcggttaataaaaataatct

SEQ ID NO: 21317 - DNA, 390 bp, Glycine max
  Clone ID: LIB3106-052-Q1-K1-F6
ccgagcttaggagaatagaacaggaccaggaggcatcaccattgccacaatggttaaaggtcgccaaggagaacgcgtgagactctacctcaggggttcaattcttggatacaagaggtccaagtcaaatcaatacccaagcacctccctaatccagattgagaatgtaaactctaaggaagaagttgcgtggtactgtgggaagcgcatggcttacatctacaaagcgaatgtaaagaagaacggaagccactatcgctgcatatggggtaaggtcaccatgcctcatggctacagtggtatatttcgagctaaattcaagtccaatcttccacctacgtcaatgggtgcaagggttagagtattcatgtattcaagcaatatatgaga

SEQ ID NO: 21318 - DNA, 396 bp, Glycine max
  Clone ID: LIB3106-052-Q1-K1-F7
attaagttctacttttcaccattgtatggaactaatttacatatacttatactggaacaagtataacaatgaagacaattaattcattgtttggcctcttgttccttctcctaattgcatttaccatgaagcctgccgttgctagtggtgttcatgacacagatgatcgcatgttagaaaatggaggtgactacttcatcttacctagttttgatgaagagggtggtggagttacacttgctagcattggtgtgacacaccctcttgcagttgttcaatcttcctcaaagaaccatcttggcttgccagcatcaattaaaactaaagaaacaatgatcatcttcactgatgaaatggtaagcattaaattcaccaatgttcctgactacaataatg

SEQ ID NO: 21319 - DNA, 336 bp, Glycine max
  Clone ID: LIB3106-052-Q1-K1-F8
accacgctttcgtccacaccatcgtatgcaactaattagcatcaacttatacttgtacgaatgtaacaataaatacattccattcattgtatggccattaattctatctcctcatagcatcaaccatttatcctgccgttgctattggtgttcatgacacagaatatcgcatgtaaaacaacggatgtgactacttcatcttacctattcttgttgaagagggtggcggagttacacttgctagcattggtgtgacacaccactcttgcagttgttcaatctatctcaaagaaccatcttggcttgccagcattaattaaaactcctgttacaatg

SEQ ID NO: 21320 - DNA, 129 bp, Glycine max
  unsure at all n locations
  Clone ID: LIB3106-052-Q1-K1-F9
gcatcttattacatataaatactttcaaataggcgcactaacttcactttatntgttttcatttatttctcaacatatcactataaacatttctacattaattcttcccaaccttttcatttatcattc

SEQ ID NO: 21321 - DNA, 291 bp, Glycine max
  Clone ID: LIB3106-052-Q1-K1-E2
ctcacgcgcttctatattcgatcttacatcgaagctctcgggagcaaccacaacaccggctgcatcacatggcaaacgcagcatctggtatggcagtccatgattactgcaacttgaggtttttggagctgaaggcataaaggacacacctgttcatagtttttaagattgaggagcatcataaacaggtcattgtggagaagcttgctcagcctgtccagggctattaagatttcactgacagtcttccttcttaacagtgccgctatgctgggtatgaacactagtatc

SEQ ID NO: 21322 - DNA, 356 bp, Glycine max
  Clone ID: LIB3106-052-Q1-K1-C5
ttaaaacaaaacagacggaattacaatatttagcattctcacccaggaactgcttctgggagcttcattggtatttttattctcgggagtttttgaatttgagcaactcacatacatctacgcttctatttccgattcccaatctcaggttaaagaacctatttttgggaagaatttaccgtctcaatttgcacatgtatgtaacaaaactgttgatcatacatttacacctatgatcacgtcttttaacttacgtttattgctcaaatgttatgagtgatttcatttttaggaccatctcttgttattttgattttaaatcttacatctcttggtcctattttttgccttatttt

SEQ ID NO: 21323 - DNA, 354 bp, Glycine max
  Clone ID: LIB3106-052-Q1-K1-C7
cccacgcgtccgcccgcagcagccatggttctcaaaactgaactatgccgatggaggggttccaagatctacccaggaaagggcatcagatttgttcgtggtgattctcaggttttcctgtttgcaaactcaaaatgtaagaggtatttccacaatctcctgaagccttcaaagctcacctggactgcaatgtacacaaagcaacacaaacaggacattgctcaagaagctgtgaggaagaggatacatgctgacaaaaagccttactctaggtccattgttggtgcgaccttggaagtaatccagaataagagagctgagaagccagaatttcgagatgcagctagggaagct

SEQ ID NO: 21324 - DNA, 384 bp, Glycine max
  unsure at all n locations
  Clone ID: LIB3106-052-Q1-K1-C8
ctcacgcgctcctatattcgctcctccaccgtcgctctctcgaacaaccacaggaggcgtcttcatcacatggcaaacgcagcatctggtatggcagtccatgatgactgcaagttgaggtttttggagctgaaggcaaaaaggacacaccgtttcatagtttttaagattgaggagcagcagaagcaggtcattgtggagaagcttggtgagcctgcccagggctatgaagatttcactgccagccttcctgctgacgagtgccgatatgctgtttatgattttgagtatctgactgaagggaatgtccctaaaagcagaatntttttcattgcgtggtcccctgacacatcaagggtgaggagcaagatgatttatgcaagc

SEQ ID NO: 21325 - DNA, 177 bp, Glycine max
  Clone ID: LIB3106-052-Q1-K1-D1
tattttacaatctaaactactcatttattcaatccaatcttttttttttctttctttttcttttcttccatcccttataccttatttcattttattatattattttttatatttttttttcttttatttcattttttaattatttatttcttatcttttttacttttcttctttaaa

SEQ ID NO: 21326 - DNA, 137 bp, Glycine max
  Clone ID: LIB3106-052-Q1-K1-D10
cccacacgtccgcacaaattgtatttttctgcactagcgcaccagtttatatgatacggtgatcatgtttaaacgctctaatattataagttttacctctatttttgttaatatacacatatcattctgctttttct

SEQ ID NO: 21327 - DNA, 438 bp, Glycine max
  Clone ID: LIB3106-052-Q1-K1-D11
aagagctctaatctacatatccattttaggaacatgaatgttcacccatatggcggtgtttaataacttgctcggtccactaataatttcaatggagctcaactgaaggctgtttgtgttgaggctggcatgtttgctctactccgtgatgcaactgaggtgaaccattatgtctttaatgaatgttttatttcagtccaagccatgaagtatgcatgcctctatttttatgcttaagcttgatttttgaactagctatttttcattttactaaatattctttgtcctatttttctcatgtgtaactttattgttgttgtgcaattttgtattttattcttttatttttttttaggttattatatatgttgtatttctactcttttttctttttatactttatttttttaaaatccttattattgtttttttattttt

SEQ ID NO: 21328 - DNA, 371 bp, Glycine max
  unsure at all n locations
  Clone ID: LIB3106-052-Q1-K1-D12
cccacgcgtccgagagtttgttgttagctataagctagtttatcgtgaggagaagatgaagttgtttgttttctttgttgctgcantagttttggtagcatgtccatgccatggcgcaggctaccaaaggtttcctctccgaatgaaaactggctatggtgagcgttcttcggaggtaaaatgcgcaagttttaggcttgctgtggaagcacacaacatcctttcccttaaaaccattcttgaagagtgctttgaacctacataggactatattaatggctaacaatttaaattagacttttaaacatttaccaacatgcttttttttattctatttatcttcaattttattacaactacttatttatatt

SEQ ID NO: 21329 - DNA, 350 bp, Glycine max
  Clone ID: LIB3106-052-Q1-K1-D2
accctcaactcaaatccaatcctttggttggtttcgaattcgacggcgaccaaattcccaacacatggactcggttctcttgcacttgcatctccacactctccctcctctctcctccgccactcaccgccctctctgccaccctctcgccgcctcctccgcttctttccaccgctcttctcctcctctcccacgcttccgcttctcgccgcttctcgccgctaacaccctcaccgctaataacatctcgccaagaagtggactatacactgttggtgactttatgacaaagaaagaggatttacatgtggtgaaaccgacaacatctgtggatgaagctttagaaattc

SEQ ID NO: 21330 - DNA, 386 bp, Glycine max
  Clone ID: LIB3106-052-Q1-K1-D3
ctttgcagctgctgcatatctgaagtccattgatttcccaaaagataaaaaggtttatgtgattggagaagatggtatcttgaaggagcttgagcttgctggatatcagtaccttggtgggccggaagatggtgggaaaaagatagaactgaagccaggatttttgatggagcatgatgaagatgttggagcagttgttgttggatttgatcgccacttcaactactataaaatccagtatgggacactctgtatacgtgaaaaccctggatgtcttttcattgctacaaaccgagatgctgttactcatctcacagatgctcaagaatgggcaggtggtggctcaatggttggcgctatcagtggatctactcaacgtgagccat

SEQ ID NO: 21331 - DNA, 465 bp, Glycine max
  Clone ID: LIB3106-052-Q1-K1-D4
catacacattctaacatacaacttatttattgttctcatagtatacatagccttcttgtgggtgctacttaccaactcacactctatccatacctgttctttcaatctcaacatgtttaacccatttcaaccaaacattattctccaaaaagattctagtatttcatcctctctggttttacaactcaccaaaattggcagctacggcgtacctacactttaatctctcgatcgtaccctttacgcttctccaatccatattatagacagcgaatccttcattttttcttatcttttctacatcttttaaatttaacattttctcatctcacatattatatctatcttactgtcttgccttctttttggcacccttctgtttttactctaatttctactaatttattttttgtctttttaacattatcctaaaggactaattttttcaaatctttttattttttt

SEQ ID NO: 21332 - DNA, 382 bp, Glycine max
  Clone ID: LIB3106-052-Q1-K1-D6
cccacgcgtccgtgttgacaaacacattctttaatggctctcaagatgtgggctccttgcactgccaatgcactcaaagtctcttctacctccagacctcatctcttgcatcctttttctttctccagatgcttgtcttgcgacttggatggacttaagtatgcagattcacacgaatgggtcaagcacgaaggctcagtcgccaccattggtatcactgaccatgcccagcaccatcttgtagaggctgtgtatgtggagctgccagaatcaagtggcacagttacgcagaaatctggcttcggagcctgtgaaagtgttaaagcaacaagtgacataaactctacaatctcgggggagattgttgaggttaacaaaaagc

SEQ ID NO: 21333 - DNA, 381 bp, Glycine max
  Clone ID: LIB3106-052-Q1-K1-D7
gatttctctctcctcgactcgatcccaattccactagggattcaattccgatgcgggggcgagcttgttagatccacggcaaggtttcctttcccagattcttttgtaaaaaaaattcttcctctgcccaacaggtattgcacactagttgaactgaggggtcatgtatgcatgtggaatgaaatctataataacactaaaaacagggctagctgactatcttttaacaaggagtaagttgtaaaaaaatggaccatgacaagactgggtgccaagctcctactgaaggacctatattgcgcatgaacaactgtgggttttttggaagtgcagctaccatgaacatgtgttctaaatgccacaaagacatattgctgaaac

SEQ ID NO: 21334 - DNA, 281 bp, Glycine max
  Clone ID: LIB3106-052-Q1-K1-D8
ctagcttctaaactctaacacttctctatctcttcgatcatcaactttccacagggcggccgaagttcgacccctaccagatagtctacgtcttcatacgcgttaccggcagcgaagtctgctcggcgagttccgtgtcccacaatatcggaactgtcggtctatgcctccagaagatcggagaagacatcgtccaataaaccgccgaggactggaatggcctccgcgtcaccgtcaagctcaccgttcagaatcatcaggcgaacgtcacggtggtctcc

SEQ ID NO: 21335 - DNA, 102 bp, Glycine max
  Clone ID: LIB3106-052-Q1-K1-D9
ctcacttgtacactctaacaattttcttttacacataacataaactatccatatgagggctttatttcaacatccaccacatagtttactttttaatattct

SEQ ID NO: 21336 - DNA, 208 bp, Glycine max
  Clone ID: LIB3106-052-Q1-K1-E1
cttcaaacttttaacccattaactcataatctatgcctaatcccatatcgaattcgcgtgcgatcaaattaacaacatattcactcaatttttttgcacttgctatataactctactgaaatctttactcatcgcctactcacaatgattacaaaacactctatcttcttctccttcatttcaaatcacctgtctttatccctctata

SEQ ID NO: 21337 - DNA, 266 bp, Glycine max
  Clone ID: LIB3106-052-Q1-K1-E10
ctcaaacgtgcgacccaattacatgttatcatgctcttcttcaggtttgccttggagggttcaaatggctcaggctaatgctattatgggttcttcatcgatggtgtccaattttggagttcatcatgcggtttctaataattcaagctgtgcatatctttcactatgtaaaagaggtgtagcatgttgaattactgtaatggacatggcttctatttataacaactcttagggtcaaaacaagaattcaaatcctgcttcaccta

SEQ ID NO: 21338 - DNA, 410 bp, Glycine max
  Clone ID: LIB3106-052-Q1-K1-C4
cgttgttgggggttcagacagcgcaattgaaagctcaggagcattgttccgataaatggggcgcaggaaaacaaaacaaaaggaaaaagatgattagcattctcacccaggaacggcttctgggagcttcattgggagttgtattgacgggagttgttgtgtttgagcaacgcagatacatctacgcttctatttccgattcccaatctcaggttaaagaacctatatttgggaagaagtcacgttctgaatttgcacatgtatggaacaaaactgtggatcagacatttggacctttgataaagtctctcagctcacgtggatggtagaaatgttatgagtgattttatttttagtaccatctcttgtaattttgatatcaaaacatacaatacttggcccttaatttt

SEQ ID NO: 21339 - DNA, 273 bp, Glycine max
  Clone ID: LIB3106-052-Q1-K1-E11
cccactcgtccgataaatttgaatggcattcaggctgataatcacagaaacgttgtgcttcatcttcccgctcatcttcaaactatgttgctctccgcttctgtgacttcaatttggactccaatggacatgggtttcacatgaaagcatgcaactgtcgttacatgttatatcagtatggctcagctgctttctttaatattgaggatcattaagtgtaatagtacctggtattagttaagaggcatgcatcttggtttacttcaatatatt

SEQ ID NO: 21340 - DNA, 449 bp, Glycine max
  Clone ID: LIB3106-052-Q1-K1-E12
ggatgtgcctcttctgcattctggaaattatggtgatattgataatggaaccgtaggtgaagataaactgaaaatggaaaacatcactttttatgtggagcatcctcgtccaattgaaccacctgctgagcctgcccctccaccacctcaaccattgaagctaactaagcaagaacagaagaaactccgaacacaaagacgtatagccaatgagaaagagcgacaggagatgataagacagggtgtaatagaaccaccaaaaccaaaggtcaagattagcaacttaatgaaagtacttggcactgaagcaactcaagatcctactcggcttgaaaaggaaatacgtagtgcagctgctgagcgtgaacaggctcacatatataggaatattgcacgctaacttactcctgcttagcctctggtagaaaaagaaaaaaagcttttttatt

SEQ ID NO: 21341 - DNA, 401 bp, Glycine max
  Clone ID: LIB3106-052-Q1-K1-A5
cccacccgtccggccagaaagaatctattgctctgaagtaattgggcctcgtcttgaggggagcaagaatggttctctaacattttatgcaccggatgacaagaagtttccatcggagaatctttgctatgctgcgggacgtgctggaggcaccatgacaggagttcttagtgcagcaaatgagaaagctgtagaaatgtttgttgaagaaaagattagttatctggatatattcaaggctgtggaactaacttgtcaggaacatcaaaaggaattagtagcatctccgtcactcgaagaaattattcactatgaccaatgggctcgacaatatgctgctagtctgcaaaaagcgttaagtgtttgaatcccatatttctgacatattttagaagttgggg

SEQ ID NO: 21342 - DNA, 334 bp, Glycine max
  Clone ID: LIB3106-052-Q1-K1-A7
acgcgtcacgcatacatccaaatcttaaaaatattcagtggagaacaacactaaagtgggctctgttggcgcgcatatccagcatgcaggcatcacaggcaaggctgttcaaggagtacaaagaggtgcagcggcaaaaggctgtggacatcaataattaactaccctatgcacaatcaaacattattgaatggaacgatcttatcaatggaccctctgagactccttatgagggtggtgtgttccagcttgcgttttctgttccggagcagtatcctttacagccacctcaagtccggtttttgactaaaaaatttcacccaaatgtgcattt

SEQ ID NO: 21343 - DNA, 244 bp, Glycine max
  Clone ID: LIB3106-052-Q1-K1-A8
cgagaactggacacggtttgtcaagtttcacacttatcaaagagctatatcttgcggggaacaaattaagtgatgttggaagactacacaggctatttaagctaacacttctagagttgagctttaacaatatcacatcaacaaaagcattacgccagctagcgtctaactacaactcacttaatgccgttaatctccttgcaaattcgattcacagcaatatcaatgatgaccagcttagcaa

SEQ ID NO: 21344 - DNA, 153 bp, Glycine max
  Clone ID: LIB3106-052-Q1-K1-A9
cccactcgtccttccacacgtccttaaacagtgtgatgaaaatgaaggtccttggtgggttttttgctacaattttggtagcatttcaattccatgcgtactatattttctctcttttaatgaacacttgccctttaacaagaaaatctttta

SEQ ID NO: 21345 - DNA, 391 bp, Glycine max
  Clone ID: LIB3106-052-Q1-K1-B1
tcatgttatcattgctatgacccttcaagcttttcatggctctgcatgttgtttccggtcccaccttcttcacttttcttcttccaccgcttcatctccaccattccttgcttcgaggaggttccaatcatgcccttcaacaagaaaatctctcaagttgaattgcagttcaagtggcaataatggtgaccaagattaccttctggatgctccagtttctgttggagatggattctctttcagtggagggaagtattcagatggccctagtccaagtgatgaatggtttaagcaagggaaaaaggttaaagcctattcaatacctggcactggtgaaaaggcaaaagatccaatttttggacttgctatgggttccggttctcaagctact

SEQ ID NO: 21346 - DNA, 378 bp, Glycine max
  Clone ID: LIB3106-052-Q1-K1-B10
aaaaacctcaaactcaaaactaacgacgacccaccgaacctaagcacacaaacagagagttagagacgaaatcctcatctcaccaatggcgaagctgaagacgagcattgattcatcgttctgggacttcaacgtggcgtcccctcagctgcacgaaggatgggtcaagtccgttccgggcgacccgtttccgttggacggctccgtcgccagcagagtgctccggccacgacagctctccgtcatcggaaacgggttgcctcttcccgtcatcgttccctcgctctctcccacttcgcccaaggacttgggttccttctgtctccagtccctcctcctcaaactagctaatcctcgctggtggcttaccatgactgg

SEQ ID NO: 21347 - DNA, 226 bp, Glycine max
  Clone ID: LIB3106-052-Q1-K1-B11
ggttattgtaggtcaaaattccaattaaagtaggatataacgcaattaggttatttcgaatgtgtttcaccaaccacaacattgaaggagtaaatagtattttgttactgttttttgttgtctctaaggagtggcagtactgatggtttttacattctactgtaatagaaatttgtttacaatgaggtgcagagatgttattgattggggcagatgattgctgtgc

SEQ ID NO: 21348 - DNA, 295 bp, Glycine max
  Clone ID: LIB3106-052-Q1-K1-B12
cttcgtcacccgcctgaggaaaaaagaaacagaaaaagaaattaaacataaacaccatgttttattttcataaatatggaatagaaaaacgaaagtcttgaaaaagaagaaaaaaaaaacaattcttttcccttagggtttgactgtgaattgctacatcgcgtgtggcccaaacagtggaatcaccgattccgtcaagttcggtcctctgcagggaaagatctgtccccaattgcccgaaagtttcggattctagagagagaaagtgggtgtcagtagacgcagctagagagag

SEQ ID NO: 21349 - DNA, 199 bp, Glycine max
  Clone ID: LIB3106-052-Q1-K1-B2
cgttgatttaattgatatcacccgcaatgcttggcacggatatggatgctcgttcgactgctactttcattacgattgtgagtacatagatttctatcaaccataaccggctcccaggaaggcctaatccctcgctttcattatcaaatgtattacgtagactaggacatgccgtgccaagattccatagcaagattac

SEQ ID NO: 21350 - DNA, 372 bp, Glycine max
  Clone ID: LIB3106-052-Q1-K1-B3
ctctcagcaaaaacacgccgcgtccgttgctgaagttccaattgccaccgtgtcggaggacgacgacgacgacgacgcaattgacatggatttcgaacaactcggtaaggcactcttcgaagccgggacgctcgcttccaacaccaagcgcaagaaaccgcggaagaaatgccagaacaagctcccttcgtcttctccacatccaaaaacaacaacaactatagttcaaaatgacgtgcctgtggtgccatgcttttatatatatgcacaggaagagcagtctttgggggatattagttctgtatgttctagttactcgtccctttctattaaagggaatggaagtgacgtggaggatcccgatccttcaca

SEQ ID NO: 21351 - DNA, 86 bp, Glycine max
  Clone ID: LIB3106-052-Q1-K1-B4
cggacgcgtgggcggacgcgtgggcggacgcgtgggaaaaaaaaaaaaaaaaaaagaggagggctataaaaaaaaaaaaaaaagag

SEQ ID NO: 21352 - DNA, 353 bp, Glycine max
  unsure at all n locations
  Clone ID: LIB3106-052-Q1-K1-B6
cccacgcgtccgaatgagctgtaaatttatagcatggctgcacaagctcttgtatcaggagcatctcttaccttctcagccgaggctacaagacaaattcttggaccaagatcactccaatctccattttgcttctcaagaaaagtctcctttcttgttaaggcagctgctactccccctgtcaagcaaggatcatacagacctttgtggtttgcatcaaagcaaagtctttcctacttttatagcagccttcctgttgactatggattagaccctctgggactttctgacccttaangnacatgaaccatcaatcatccttaatgtctagnntnnngtgagataaccaatgt

SEQ ID NO: 21353 - DNA, 402 bp, Glycine max
  Clone ID: LIB3106-052-Q1-K1-B7
gccgtttctaattaatgataggtgtcaagtggaagtgcagtgatgtatgcagctgaggcatcctaacagaccggtagactgaacaaatgtggggttattagtccgcgttttgatgttggtgtcaaagagattgaaggttggactgctaggctgctcccctcaagacagtttgggtatattgtgttgactacctcagctggcatcatggatcatgaagaagctaggagaaagaatgttggtgggaaagtgctgcgtttcttttactagtttaattagtttcctttgaagattttgctctgatttcagttcttgaaactcaccggttgtaatgatcaatgtgttagacccgtagtttatcaagtatagcattagcaggagatgtttttctggtgggtgcttgtt

SEQ ID NO: 21354 - DNA, 367 bp, Glycine max
  Clone ID: LIB3106-052-Q1-K1-B9
gcacgctgatgctatccacagaggtaggtggtcaaatcatccctactgccaggagggtgttctatgcttcccagattactgccaaacccaggcttcttgagcctgtctacctggttgaaatccaggctcctgagcaagctcttggtggaatctacagtgttcttaaccagaaacgtggacatgtgttcgaggaaatgcaaaggcctggtaccccactttacaacatcaaagcatacctccctgtcattgagtcctttggtttctcgagcacattgagggctgcaacatcaagccaggctttcccacaatgtgtctttgatcactgggacatgatgtcttctgacccattggagactggatcacaagc

SEQ ID NO: 21355 - DNA, 357 bp, Glycine max
  Clone ID: LIB3106-052-Q1-K1-C1
cacaaactatcatggccacggcaacagcagctgccacctcgtcctttatggggacgcgtctcctggaggctcactccggagcggggcgagtgcacgcccgattcggcttcggcaagaaaaaggctcccgccccaaagaaagcctccaggggatcgggccgagacaccgacagacccctttggtatccgggcgccaaagcgcccgaatacctcgatgggagtcttgtcggagactacgggttcgatccgtttgggctagggaagcccgcggagtacctgcagttcgagctggactcgctggaccagaaccttgcgaagaacgtggctggggacatcattggaaccaggaccgagctcg

SEQ ID NO: 21356 - DNA, 53 bp, Glycine max
  Clone ID: LIB3106-052-Q1-K1-C10
cttacactctcttttatacgatcttttttacaatctgtactaaacaaccaaaa

SEQ ID NO: 21357 - DNA, 450 bp, Glycine max
  Clone ID: LIB3106-052-Q1-K1-C11
cccacgcgtccgttttttttttttttttttttattttttttttattttttataggtgtttttttttttaaaatttttttattattataaaataaaaaatatttatataaaaatataaaattttaatattttttatatttaatttaatataattaatatattaaataataaaatataatttattttctatatataaaaaaatttattttttataaaaattatttatatataaaattaatattttattaatataatctttatttatattatttataaaattttaaataatattatattttattatttattatattaatttatattatttttaataataaaattttataatttattatattttaatataatattatcttattttattttaatttcttttattattattttatatttttataaaataaatataatattttataattaaattatt

SEQ ID NO: 21358 - DNA, 333 bp, Glycine max
  Clone ID: LIB3106-052-Q1-K1-C12
cctttcgtcaccatgccaccgacactctcactctcactagtgttggtggtgctggttgtcgccgccgtggacgcgcattttccggcgaccggcgagcttccaacgttccgcgaggcgccggcattccgcaacggaagagaatgccgcaaccgcccgcgaagcgactccgtgatccacatcgcgatgacgcttgacgcgacctacctccgaggctccgtcgccggagtgttctccgtgctgcagcacgcgtcgtgtccggagaacgtcgtgttccacttcatagccaccacgcaccgccggacggagctccgtcgcatcatcaccgcgacgttc

SEQ ID NO: 21359 - DNA, 432 bp, Glycine max
  Clone ID: LIB3106-052-Q1-K1-C2
tcgaccacgcgtccggaaaaatgatcttagctccttggtgtgacgaggaggaggttgaggctgatgtcaaagcggggacaaagggtgagatgggagcagctaacactctttgcagtccctttgatcagccagaactcccagaaggcaccaagtgctttgcatcaggaaagcctgcaacaaagtggacatactggggaagaagttactaggctactggctgttgattgtggtattttctggaattaatttggtatttaatggtaccttgtacgaatttgtggatcacacagatattagttttcttctcttgggaatatttttcaactgatagttttactttgatttttatatggtgcaatatttattttggattaaaagatgagtattacatttgttgccgtacaattattgttggggagcgtattggactct

SEQ ID NO: 21360 - DNA, 270 bp, Glycine max
  Clone ID: LIB3106-052-Q1-K1-C3
catagatttattacatcactattgtaatggagggaacatgaacggaaacacgatcgaggggtactctcattccgagttagacatgtaacattttcatgcatgaaaaccctaactcctcaatcccttgcgcctctaactcttcctcttaagaattgcttaaacaagtccaagctgtcttaaagcgccatcactccttcgctactacgcaattgcataacttgaggccaaagcgcgccatgttggctctactaaaggccactaacaagctcg

SEQ ID NO: 21361 - DNA, 415 bp, Glycine max
  Clone ID: LIB3106-052-Q1-K1-A4
ctgaactttacaactgataatgttggttatgttcttgcaatatcacgtgttgctattgtgggcttccagcttacactgtaccgatcagttcaaaaagcttgtggacccattaatctagtacgcataacacgtgtgttatccatacctctctagcaatgatttcccttcatgacaatgttgtcaggcttcacactggacatagtgatcaatattgcctccattctgaagaatgttatgattgagacaatttcaactagtttattacttctgctaaataaagctttgtaacaacattcaaggggaacagctaatagtttcgctatgaccggtatgtcaatattcaaaacaattctgtccttctagtgccggttccttattattttggtcacaaaagcttataaatgttttttttctg

SEQ ID NO: 21362 - DNA, 392 bp, Glycine max
  Clone ID: LIB3106-051-Q1-K1-H1
atcacacatacacacactcaaatacatacactagtagtgtggtgtgtgcccttcctttatccttttgctttttgtgtgcaattaacacacactcacacaaaaatgacggcatgccaagattggccagagccagtgattcgagtccaagccttggctgcaagtggcttagccacaatccccgaacgtttcataaagcctaagtcccaaagacccactaatagtaacaattatgctccaaagaccaattcctctcaaattggtcatcataagaacaataccaccaacagcaacatcccagtgattgacatgaagcacatctacggtggtgacgagggaaagagggctgagacgctccggctcgtgtcggaggcgtgccaagaatggggtttttt

SEQ ID NO: 21363 - DNA, 76 bp, Glycine max
  Clone ID: LIB3106-051-Q1-K1-H10
aaaaaaaaaaaaaaaaaaaaataaaaaaaaaaaaaaaaaaaaaaaaaaagaaaaggaaaaaaaaaaggggcgcccg

SEQ ID NO: 21364 - DNA, 388 bp, Glycine max
  Clone ID: LIB3106-051-Q1-K1-H11
attaattctcaaggatccacaagatccttccactccaaatgcagtttcgtacaggacagcagcgagagagaaactgataaggcagggatacaacattgttgggatcattggagaccaatggagcgatctcctcggaggccacagaggcgaaagcaggacctttaagcttcctaatcccctgtactacattcagtagttccttcacctctcaacaatctagcttgctcctatctatctatatgtaataagatgcgttcaaataggggcactagcttcactttatgttgtttcagctgtgtgtcaacaagtcatgtaagagacttcactatgttgttttctctttcgtggctttaataaattatgcgcccttatttgttctagatcgcga

SEQ ID NO: 21365 - DNA, 284 bp, Glycine max
  Clone ID: LIB3106-051-Q1-K1-H12
cccaattcgaccacacgtacgaataataatcaagaatccacaatatccttacaattcaaatacaaaatcgtacaagacaacaactaaaagagcaactaataaaacaaccatacaacatatgataagatcattgcataccaatgatatctatctcctatcacgccataatattcgaaagcactacctttaaacttcctaaatccatagactacaatccttaatccctttatctttcaacaatctatctttctcttatatatctatatataatatatttctttcaa

SEQ ID NO: 21366 - DNA, 401 bp, Glycine max
  Clone ID: LIB3106-051-Q1-K1-H2
atttaaggtgctttctataatctacatacactaataaagaagtgtgtgggctagcttaatactaaagctttatgagagcaattaacacacaacaaaaacaaaaatgacagaatagccaaaaattgaccaaagccaagagatacaagaccaagcgggggctgcttgtggctgatcccactttccttgcacgttttttaaagcctaagtcctttttacgggagtacttaattcaattatgctgcccagacttttacctctcagattggggaaaacccgtgcggtacccccatttactcgctttgagtgattgacctttatcacatcttcggttattaccagagagcccgggctgatacgcttttgctaacgttggacgcgtctcaagggtgatgggtcccccc

SEQ ID NO: 21367 - DNA, 389 bp, Glycine max
  Clone ID: LIB3106-051-Q1-K1-H3
cccacgcgtccggagaattatggaaattgatgagcacatcggttgtgcagtgagtgggttgattgcagatgctcgaacacttgttgagcatgcacgggtggaaactcagaatcacaggttctcctatggtgagcctatgactgttgagtccaccacccaagctctttgtgatctagccttgcgctttggtgaaggtgatgaagagtccatgtcccgaccatttggagtatctctcctcattgctggtcatgatgagaatggacctagcttatactacactgatccatctggcacattttggcaatgcaatggcaaagctattggttcagggtcagaaggtgcagacagttctctacaagaacaattcaacaaggacctaacccttcaag

SEQ ID NO: 21368 - DNA, 396 bp, Glycine max
  Clone ID: LIB3106-051-Q1-K1-H4
cccacgcgtccgctcagtaatctgagagagaaacaaaaacaatgaaggtgtccattgccaagttccactcccttcccctatgttttttccttctcttggccttcaacacaaaacccctcctagcagcagaaccagagccagtggttgataagcaagggaaccctttggagccaggagtagggtactacgtgtggccactttgggctgatgaaggaggcctcacactaggccaaacaaggaacaagacatgccctctttatgttatccgtgacccttcattcattggcaccccagtttcattcttagcaccaggccttgaccatgttccaacactcactgatctaaccattgatttccatgtggtgacagtgtgtaaccagccaacagtgtggaggc

SEQ ID NO: 21369 - DNA, 388 bp, Glycine max
  Clone ID: LIB3106-051-Q1-K1-H5
cccacgcgtccgagaggcgagtgatatacatcgtgcctcctcattccgggctcccattccaccggagagagagagagagagggagagggagatggtgtctctgaaacttcagaagcggcttgccgcaagcgttctcaagtgtggtagaggcaaggtttggcttgaccctaatgaggtcaatgaaatctccatggccaattctcgactaaacataaggaagttggttaaggatgggtttattatcaggaagccaactaagattcactctcgctctcgtgctcgtcgaatgaaggaggccaagatgaagggacgccactctggatatggtaagcgtaagggtacaagagaggctaggctccccaccaaaatcctttggatgaggaggatg

SEQ ID NO: 21370 - DNA, 389 bp, Glycine max
  Clone ID: LIB3106-051-Q1-K1-H6
aaaaacgaggagtggaataggcccgcggggcaccccatctagagtcgcttgactttaagtacgctctctcacactctattcccaatcaattttttttccttcttttaaaaaccttagtcaccaagaaattaaaagagcatcatcaccgttgaagctaaacgtgttgcgtgtgtgaagaacaaaacaacatcctctgcacacacacacaaacatcattattttttttcttcctcttcgaaccactaaaaaaaatgtttgatccacgaagaaaccaacccacaatttcgtttccattgtccaatgaaataggacaaataactcatggttatgacacatggggtgccacaaacactgattgtatggcatcaaagaaaccactcagaaattac

SEQ ID NO: 21371 - DNA, 95 bp, Glycine max
  Clone ID: LIB3106-051-Q1-K1-H7
cccacgcgtccgcccacgcgtccgcccacgcgtccggttctagatcgcgagcggccaccctttaatgtctattaaatgcaatttctatttctatt

SEQ ID NO: 21372 - DNA, 393 bp, Glycine max
  Clone ID: LIB3106-051-Q1-K1-H8
cccacgcgtccgcaaaaagaaggctacaccaacacctccaaaaaaagctgctgctgctgctcctgccaatgatgagcttgccaagtggtatggtcctgacagaaggatcttcttgcctgagggtctcttggaccgatccgaaatcccagagtacttgaccggagaagtccctggagactatggttatgacccatttggtcttagcaagaagccagaagactttgccaaatatcaggcatttgagttgattcatgccagatgggcaatgcttggtgctgctggattcatcattcctgaggccttcaacaaatatggagcaaactgtggtccagaagctgtttggttcaagactggagctctgcttcttgatgggggtacgctgaactactttgg

SEQ ID NO: 21373 - DNA, 324 bp, Glycine max
  Clone ID: LIB3106-052-Q1-K1-A1
ccgttcggattccgggtcgacacgcgtccgttcttttttttgtctgagtccattttgagcatggcgagaaaactaagcatgggggtactttgcattgttcaaatgctgcttcttcttgtggaaaacgatgctgagattgttgtgtccaccgtggaggctccagctccgcagcctcacaagaacaccacccacaccctgtccagcgctccagctccgctgcctcacacaaacaccaccaagtcccatgttcccaatttgcagcatggcatcaccgaaggcagtcttaaaccacaagaatgtgggccacgttgcaccgctagatgc

SEQ ID NO: 21374 - DNA, 289 bp, Glycine max
  Clone ID: LIB3106-052-Q1-K1-A10
cccacgcgtccggattaacataataagcaagcaattaattaagaagaagagaagagtgggatggttgtggtgatttctcttcctttcataatcttctgctttcatctgggttttggatgttacttcttttgaagagccatatgattgaaattggttcaaaccaacctacatgtatttttgattcctattccaccttcatgttctgtttcatctaacacctatttttcctttttctccatcaccctactcttactctttgctatatctctcttatatttcttgattttta

SEQ ID NO: 21375 - DNA, 381 bp, Glycine max
  Clone ID: LIB3106-052-Q1-K1-A11
gaaagggtcatagggtactgttgtggttagggattcgaattttgattatcgaatggcggaattctgaatcaatcaatcagtaattagagccattaacgactgcaatggtctgcgagaagtgtgagaagaaattatcgaaggtgatagtaccagacaaatggaaagaaggggccagcaatactaccgagggtggtggccgcaagatcaacgagaacaagcttctcttcaagaaaaacagatggaccccttacggaaacactaagtgcaccatttgcaagcagcaagtgcaccagaatgctaagtactgccacacctgtgcttactctaaaggagtttgtgcaatgtgtggaaagcatgttcttgataccaagttttacaaac

SEQ ID NO: 21376 - DNA, 412 bp, Glycine max
  Clone ID: LIB3106-052-Q1-K1-A12
gagattttaagggttaccggaaagaatgaattattgcagaaccaaggatttagtgactttgatagaatgcgattcataaatctgagtcatatggcttctccaaactcaacaccaaacttcactggctggaacagcctgtcacatgaagtaagaacctcagttttatgttctattcagtgtaaaattctctaccactccacagtctccatttcctactttttcttgtccccccaacataaaatttatgtttcatttatgcattgttttaaaaaaaaaaatctgattcttaacctatccagttctggtacttaattgcttagattccctcttctccattttgtttaaggtggcaatattgcctctttgttaaatgtgtatgctttaaactttgttatataacacacagtaacta

SEQ ID NO: 21377 - DNA, 282 bp, Glycine max
  Clone ID: LIB3106-052-Q1-K1-A2
gcgtccacgcgtccgttcaaatcttaaaaatattcagtgaagatcaacctcaatggcatcgcgtggcgtgcgaccagttcttccccctccattaacttccatctccgacccacctcctcttttcgatggcaccaccaggttgtacatcagttattcttgcccctatgcacaacgtgtgtggatcgctaggaactacaaggggctacaagataagatcaatttggtccctattaaccttcaagacaggccagcttgtataaggagaaagtctaccctgaaaat

SEQ ID NO: 21378 - DNA, 366 bp, Glycine max
  Clone ID: LIB3106-052-Q1-K1-A3
gatttgttgaagacaattacaaggacataaataagattttcatggctaagtactttggtgtgaggctgcatgctatgtttggagttgcactggctttaggactagtgctggctaggaatacaaaatttacatcatggccaatattgagttgaagattggcttgtcgaaagaggaagtaatgtagcgtactaaggggattgctcaagaggaccaaggatgcaagtctgcatggtgcaacagccattaaaatttcggtcatgagcaatttttctgcagggggttttgaatcagttctcattttcttcccattatcgtggccaaataagcttgaaagaaactgcatgacactgataccaatcaagagtt

SEQ ID NO: 21379 - DNA, 426 bp, Glycine max
  Clone ID: LIB3106-051-Q1-K1-G9
atttctctttctttctcaaagctattataattgtaaaacatacgggaacagtaaattttaataaaagttggattatcaaacatatcatactatcttattaattcctacactgtctttctctttttcttttcctttatttttctttttttctgttacctttcttctttttttttttctctttttttttttctcttattttttttcttttcttttgttttttcttttttcttttttttcttttttttttcttttctttattcttcttttttctttttttttttttttttttcattttttcttttattctctttttttttttactttattttttatttttattctttttctttttattttttttctctttcttttcttttttcttttttgtttttttattttttctttttttttttttctttttttttt

SEQ ID NO: 21380 - DNA, 385 bp, Glycine max
  Clone ID: LIB3106-051-Q1-K1-F3
aataaataaatattttccgagccgtatgaatattgagtcacaccgaaccgtgtggttcttgctagccagccagatcatctgcaaggacttgttctccttccttcccaacagccatgtcttcttttcttcccgcctcagccgagtcacttgatctggcagtggaggccaaagacccgtctgagtccatctccattctttatcaggtacttgatgatccttcttcttctccagatgctctgcgcatgaaagagcaggccatcacaaacctcactgagcatctcagggaacagaatagggcagaggatttgcacagccttcttacacagttgaggcccttcttttccttgattcctaaggcaaaaactgcaaagatagtgaggggcat

SEQ ID NO: 21381 - DNA, 381 bp, Glycine max
  Clone ID: LIB3106-051-Q1-K1-F4
aatcaatctagctgttgcaaattgctactatttttcaatggcttctgcggatggggacttgcgaggctttgttggtgggcttgcttgcgtcaccggctacgatgccctagagaaagccttttcaatctacggcgacatcgatgaatctaaggttatcaacgaccgtgagactggaatgtccataggattcgagatttgtgaccttcgtctcagagcagtcaatgaaagatgctatcgcaggaatgaacggccaggaccttgacggccgtaacatgactgtcaacgaagctcagacccgcgccagcctgggcgatggtgcaagcaatggtttcggaagtggtggtggatacaaccgaggtatcgctggatatggtgttagtg

SEQ ID NO: 21382 - DNA, 380 bp, Glycine max
  Clone ID: LIB3106-051-Q1-K1-F5
atactatttgataccttttgactagctggctaacattctgaaagatgtgaatagtgttgtaaattttgaaggaaattagagcgattcggtaaattttcgtcttctgagtatagaagagaggcgttcccacgccgtcttacgtcgctttcgccgattccgagcctttgatcgaattcagcagtgaagatgtaagtgtagctgtgactgatatcttgaagctacctctgatggataaaagcaatggctgcagcttctctagtatattttcaattgctgtcttttcaagtgccatttttgttgtctccttgattttggttcgtctcctttatgtcttatatcgtagcagcaggcccttgagcaaaagggcttcaaaacctgtt

SEQ ID NO: 21383 - DNA, 364 bp, Glycine max
  Clone ID: LIB3106-051-Q1-K1-F6
ctcatacgtgcgatttgatgtgtggctgagtgaagtgatgagagatgtgaatggtgttggacattttcacggaacatcctacgaaggtgttaccattcatcagctaagtctctaacacagtatcacctacacgggcttacacgcgatcatgtcgatttcgagcttttgctcggcttcagcagataatatgtgtgtatagctctgactactttcttgaaactagtctctgatggatatcatgccatggctgctgattatctagtatatattgaactgctagatcaggaagtacaatttttgatgtctcctttattttggatctgatgcttatatgattactttgatcaatgcaggaccttgagca

SEQ ID NO: 21384 - DNA, 175 bp, Glycine max
  Clone ID: LIB3106-051-Q1-K1-F7
ccggctcgtgctagtcaatgatctgggacctaactagggttgtgtcatgaaatttgataatcattggatgtggaatacgaaatgtcaattatggctgaaacttctattagtacttcagatctatatgtatatatagcatatgatgacaactgtagatggaaaaatgtgggctgga

SEQ ID NO: 21385 - DNA, 391 bp, Glycine max
  Clone ID: LIB3106-051-Q1-K1-F8
ctcatataatactctgtatcatttcatttcgataatcatccatagctactgaagaaaatggcaaccatctctgctgctatcacaaccccatcgatctcccgcgcaactcttgtgcaaaagcgggtctcatctcccgttcttggtttgccagcaatgggtaaggtgggaagagtgagttgctccatggaggaaaaaccttattctgtgaaggaaagcagctctagcatgttggggatgggggcatctctgatggcagctgccagcgctgcagccatgtcaggcccagccatggccttggtagatgagagactgagcactgaaggaaccggacttccctttggcctcagcaacaatcttcttggttggatccttttcggcgtctttggtctta

SEQ ID NO: 21386 - DNA, 337 bp, Glycine max
  Clone ID: LIB3106-051-Q1-K1-F9
aacaaccatcaatcataaacccatgaattctaagagagaaacgtgagagggctttgaaaatgtgaaagtttatgtgaacttacagtacttctgattttgctcactttggagtactactatcctttttcttggttcacatttggtcttttcacttgcatggtgtgtctccatattatttttcctttctgtattatagggacccctttctttttttctttaaaccgcttatttttgatcgggtgtaattgatgattttcatgctttttactacttgattgattcatatatctatctttatgaggtttctatcatacttttttttatttgtgcttttttt

SEQ ID NO: 21387 - DNA, 385 bp, Glycine max
  Clone ID: LIB3106-051-Q1-K1-G1
cccacgcgtccggatggctcacactcgactcactaactcgctctgttcggctcggctaagcaatctcaatcccaatcccaaactcattcctctctgcacttgctcatgccgtcccttctcttcgcaatccctaattctccattctcaccctcttttcctcgccaaacccaaacctctcctgcggttcgcccgccgaaccggaccgcccctcgtcctcgccgacgtcggccaggccgaacccgaacttcctcaaaccagtgccctcacggtcattcccgaagacgaggaggatttgccctcaaaatctcaacagcagcttaggaaccgggtggcttttggacttggcattgggattagtgtaggaggcattgatttggctggtgga

SEQ ID NO: 21388 - DNA, 201 bp, Glycine max
  Clone ID: LIB3106-051-Q1-K1-G10
gccacgcgtccggtttaacttataattgcgtgatcgattcctattcgggggagtcgcttctctgtcacgcgaagcagaaacacgaactaagaatccatggcgacaccaacgactacgaatagaaaaccggtgttcgtgaaggtggatcagctaaaacctggcaccaacggacacacgctgacggtgaaggtggtcagtttc

SEQ ID NO: 21389 - DNA, 280 bp, Glycine max
  Clone ID: LIB3106-051-Q1-K1-G11
cccacgcgtccgaattaatcttgtggacaattaacatctcaaaaaaaagaaaaagaaaaaaaaaaaaaaaaaaaaaaaaaaaaaaaaaaaaaaaaaaaaaaaaaaaaaaaagaaaaaaaaataaaagataaaaaaaatgaaaaaaaattataaagcaaaaatatattaattcaattgaccgacttaatacaaattaattactgtctaaataatagcatcacgaaagtaaaaccctttacataacataatttattggcattgtagaatattacctattaaa

SEQ ID NO: 21390 - DNA, 388 bp, Glycine max
  Clone ID: LIB3106-051-Q1-K1-G12
gtcactcaagcggtaagaggcatattggcacagctggggtatgagaagtgggaggatgtgattggccggactgatttgttccaaccaagagacatatctctagcaaaaactcagcatctagatctgagttatatcctctctaatgttgggttacctaaatggagcagcacagaaattaggaatcaggagcctcataccaatggtcctgttctggatgatgttttgctagcatacccagagattgcctatgccattgaaaatgaaaaggtggctaataagaccataaaaatatacaacattgatcgagctgcatgtggacgtatagctggtgtcattgcaaataagtacggtgacactggttttgctggacagtttgaatattacattt

SEQ ID NO: 21391 - DNA, 390 bp, Glycine max
  Clone ID: LIB3106-051-Q1-K1-G2
cactcactcattttgcaaagagagagagagagagagagagagaaatggcactgagggcagccgtactccgccacgttcgtgtgccactccaagccgctccgaaactgcagccatggcgtgccatgtcatcacacggcgacgatcatctctccaaagaggaggtcgtcgaaagagtcctcgctgtcgtcaaagatttccccaaagtcgatccttccagggtgagtccagatgtacatttccagaaggatttgggtttggatagcttggacaatgtggaaattgtaatggcactagaagaggagttcaagctagagatcccagacaaggaagctgataaaattgactcttgtcatcttgctattgagtatatttctaaccatccaatggctg

SEQ ID NO: 21392 - DNA, 84 bp, Glycine max
  Clone ID: LIB3106-051-Q1-K1-G3
gatctagatcgcgagcggacaccgtttgattgttagtttgttctgtgccgttgggatcatgcttgctatgtcgattaagtttaa

SEQ ID NO: 21393 - DNA, 392 bp, Glycine max
  Clone ID: LIB3106-051-Q1-K1-G4
aatcctaatgcatagtgtatcattacgggtcatagtttgggtggagcactcgcaatcttgtaccctacgatcatgttcttgcatgatgagaagttgctgattgagaggttggaagggatctacacgtttgggcaaccaagagttggagatgaatcatatgcacagtatatgagacatatattgagggaaaattctatcaggtattgcacgtttgtttattgcaatgacataattccgaggttgtcctatgatgataaggacttgctcttaaagcactttgggatctgccttttctttaacaggcgctatgaactcatgattctcgaagaagagccgaataagaactatttctcgccatggtgtgtgatacccatgatgttcaatgctgtttt

SEQ ID NO: 21394 - DNA, 356 bp, Glycine max
  Clone ID: LIB3106-051-Q1-K1-G5
cacacgcgttcgacttcacccaatcactgggttagtacggacacaaactgagaagccatactcacatcaaacaatacaaccatgcttaagccaacaacaccttctcagatcttacaatgatatttaaatcgcgtatgatgatgactgcaactctgcatattatgagttatagcacaacgtgttgcgggagataattcactctcacaagctgataagataagcactttgacagggcagccacgagtcaaattccagcaatatgctggttacattacagtggacgacaagcataagagagccttggtttactactttgttgaagctgaagtggaaccagctttaaagctactagttct

SEQ ID NO: 21395 - DNA, 384 bp, Glycine max
  Clone ID: LIB3106-051-Q1-K1-G6
cccacgcgtccgcccacgcgtacggttgtgctctttgccatgggtggctacggtacctatctgggttttcgcattcgttattctgataatctggaggaaaaggctaaagccaaggatttgcatcccaagcttttagctggtatgtgattcttctttgctcttggagctactgctggaattacagctctactcacttcggataaacccatttttgagagtcctcacgctgttacaggagtcattggtcttgctttgctgacaatacaaactatactgcctacactctttgagggaaatcctggactaaggaatgttcatggtatcctgggtagtggtataatgacactttttctaggtcattttgccctgggacttcaactaggc

SEQ ID NO: 21396 - DNA, 389 bp, Glycine max
  Clone ID: LIB3106-051-Q1-K1-F2
gttctagatcgcgagcggcctccctattttctgtggttggaacttaaaggccttggcaattcgatttggtttatgaagatttaatcacccgtaattttgggttcccgtgttccgactttaactggaagttaagggatgagacctaatgaaaaatagaaacatcgaaatccgtatcacactttgtgtgtatgacccatataaagctgttaaattgaagcaatatcattactaaaagttctgagtgttcaagacactggggggcacttttaagggagaccaatttaaaacccctgacttgaaacttaagaacttcttatatgtgtagctaaaactaagaccaatggccccactttttaaaatctttagatggtaaaaaccatgtggttccc

SEQ ID NO: 21397 - DNA, 358 bp, Glycine max
  Clone ID: LIB3106-051-Q1-K1-G7
cccacgcgtccggcttcacgtaatcactggcttagtgcggtcaggggcggagactcctaactcacatgacacaacacatccattcttaagccagcaccaccttctcatatcttacaatgatcttccaatcgtgatatatgatgtctgcaactctgctattatttgatatagcgcattgcgtgcatggtagactatcaactgtcacacgctgataagataagcattttgccagggcaggcatcattcaaattgcattgatatgctggttacattaccatggaggactagcagaagagagtcttgtactactactttgttgaagcttacgtggaaccagcttcatagccactagttctat

SEQ ID NO: 21398 - DNA, 390 bp, Glycine max
  Clone ID: LIB3106-051-Q1-K1-G8
cccacgcgtccggttggatgttcttatattgctggttattgctggggctgaagtgccagagttactcacatatatgcatccttgcgtggaagactggcagtggtgatagatgacattgatagcttaatgctgtgttatgatgtatgtctctttgctcttaattgacatctcgcaatgcgacctgcaaagttagagagtaccagacgcagctatgactagatcttggctattgcatgctcataggcaaatgacatcatgtatgctaactgcatccaatggctcgattatgacatgatagtctgtgcactacacgttgttatcactgaagagagaccggcgttagcgtcgctatctctaaggatctatgcagaacgcgtgctgtaagatgaa

SEQ ID NO: 21399 - DNA, 120 bp, Glycine max
  Clone ID: LIB3106-051-Q1-K1-D2
ctcatactgagtccgaggagaagatattattacagtcagacagcttctgcctagagcactcttcatcatatcattccaaacagagctctttagtttcatccagcatcaattgctttctca

SEQ ID NO: 21400 - DNA, 320 bp, Glycine max
  Clone ID: LIB3106-051-Q1-K1-D3
cccacgcgtccggttatggtctaatgcatcatagacacttagtagttgagccattttttaactcgttgtattcagtaacaacaatttcattcagttaagggtgcaaagagagttatggatgtagcatttaaaaagtgcatgatgctgtgtagcatttgcgtgattgtcttgaatgatgtaaaggtttgtgaatcatacgaggaattcattttgagtctgactaagcttcttcagtgtaaaagctgaccttttgtgtgttgtctgcgcattgatcatggatttgactgcggagcttggtgcccgtggttcgaagccgttta

SEQ ID NO: 21401 - DNA, 84 bp, Glycine max
  Clone ID: LIB3106-051-Q1-K1-D4
cattggcttaccctctagtcattccatttgcagaggccgtcaatatcagggctgggaccttgatggctgtattggccatacaca

SEQ ID NO: 21402 - DNA, 390 bp, Glycine max
  Clone ID: LIB3106-051-Q1-K1-D6
cccacgcgtccgcttttggtccaatgcagcataaacacctaatagtttagccattttttctctcgttttattcagtaacaacaatttcattcagtcaagggtgcaaagagagtcatggctggagcattaaaaaagtgcatgatgctgtgttgcacgagcatgattgtctcgaatgaagaaatggcaggagaatcatacgaggaagccatcgcgagtctgaccaagcttctcagtgaaaaagctgacctcggtggtgttgccgccgcaaagatcaaggatctgacggctgagcttgatgccgacggttcgaagccgtttaacccgtacgagaggatcagaaccggcttcatccaatttaagaatgagaaatttgagaaaaatcctgatcta

SEQ ID NO: 21403 - DNA, 391 bp, Glycine max
  Clone ID: LIB3106-051-Q1-K1-D8
cccacgcgtccggcattttccctgatttaatttggtaatataaggttaacttgcatgtaaattttgctttcaaagacaaagcaaagaggtagcagggcgtccgaattcattaatctctaaagtctcgagtctgaaactaaagacaaccaagtgttagtgttacacacacagacacagcatccaatatccatcgagagatgttggaggcgaagtgtctgaagaaagcagtggttccttccactctgattgaggacccttctcctggaagccttcagtgcacacgtcttgctctccgtgtttgcgaggacccaagttcttgttttgtctacatagcctccggtccccacatttataagctccacattgctctgggagaatcttcagtcagcga

SEQ ID NO: 21404 - DNA, 61 bp, Glycine max
  Clone ID: LIB3106-051-Q1-K1-D9
accacacgtccggacacccagtagagtttctgtctgcttacaacgtgcgcgacggggctta

SEQ ID NO: 21405 - DNA, 269 bp, Glycine max
  Clone ID: LIB3106-051-Q1-K1-E1
gcgcaggttcgacgccacgcgtacgcatgggccgactcctgctacctaatgtttaagtctagcacgaacgagctagctgcggacattgagtcactgaagaagaaaattactggaactgaatagagtggtgttagcaggtaccaagtcaagtgtatcttctgtgagcatcatttgttattgccgtgctgcgtatctcatgtataagagtcatatgtatcccttgaagtagaatttaattcctctcatacctgtacatgaactcatttcat

SEQ ID NO: 21406 - DNA, 68 bp, Glycine max
  Clone ID: LIB3106-051-Q1-K1-E10
aacacacatacatacaaccttatgtaaatgaatgctcatactttatatggtaagggacttttgctaac

SEQ ID NO: 21407 - DNA, 368 bp, Glycine max
  Clone ID: LIB3106-051-Q1-K1-E11
cacacgcgtacgtccaactcaccctatcaggctgcgcgttgctcagaagttctggcgcttttactatcacattgttaactctcctgatcggacttgcagccttgcataacaggcttttgatgaggctattgtagaattggatacattgcgagaggagtcatacatggatagcacttcgatcatgcatctgctacgagataacgcttactctctcgacctaggacctgttggatgattgtacagattatgatctagaaaccgcacccaaaggtgacggcgaacaaaatcaaacataccatgactctgagcttattagtcattgaacataccttttggaatggttcatagggagaacgtgttgaatgcta

SEQ ID NO: 21408 - DNA, 400 bp, Glycine max
  Clone ID: LIB3106-051-Q1-K1-E12
ctctctctctctggtgccatggaatccggtagtgcccgatgtttatatgctctggggttctgaaatcatcgccgaggaaataacaaatgcaacttccaaacctcgcgaagcttccttcacacacttccttctattccttgttcgtcgaacaagctctttaacattccatcaccacaacttcctacctacaccttccgatattgcatcttcaactgtttaggttacatttcacacgtaataattgattgcttctttcgattggatcggtcggaaccatcgctcgaagagaatcttcggtgacgtagaagcaatatcagtttactgtatgtattggttcggattaataataataacgaagaaattgaaaggaaatcagaggtgaaaatagccagaagaagat

SEQ ID NO: 21409 - DNA, 390 bp, Glycine max
  Clone ID: LIB3106-051-Q1-K1-E2
atttcgctgcgcctctgttctctgtcactgctgcgtgtgtcgtaaccatgcctgggcacatccacgagattaaggacttccttgtcactgctagaacgaaggacgcaaggtcggtgaagatcaagaggagcagagatgtggttaagttcaaggtcagatgctcgaagtacctctacacactttgtgtgtttgacccagagaaagctgataaatcgaagcaatctcttcctgcaggtttgagtgttcaagacctgtagaggtacagggcgagagaccaagacgaagcagttcattgattcttctgaacttcgtttctctgtagttgaaacttgagattcttttgaggttctcttatttgtagatcattgctaggacatggatgctttcatc

SEQ ID NO: 21410 - DNA, 317 bp, Glycine max
  Clone ID: LIB3106-051-Q1-K1-E3
gtactactcaactaaggccagcaacatatgttcaagcatttgtctgaggcttgtacgatcaagaaagtctcttcataatcatcatcatgtgtcaccatcgtcatcttggtcgtcaccttcttcatcgtattcatcttcttcttcgtggtctttggcgcattataataatcataatcataactcatcgccctcactttgcatgagagacaaaggtcgaggtcaaggacgaagaagcagcaaacacaacaaatgttctaatggacttagaggctgctatccctatggcaacatgaggaacgcacatgtaagccatggta

SEQ ID NO: 21411 - DNA, 186 bp, Glycine max
  Clone ID: LIB3106-051-Q1-K1-E4
cttacgcgtacgaacatctgatttcgtttctgtcttccattgtctcaagggagggttacatcaatggattccgactgacttgacattcgttttaagctactattcttaattccaggttatgcacatgtactatttgacatcttcctatattcacttgattttccgtgtaattcgtaatgatttact

SEQ ID NO: 21412 - DNA, 122 bp, Glycine max
  Clone ID: LIB3106-051-Q1-K1-E5
ctactactcatttaatgccagcttcatattttgaagcatatttctcaggggtgggggatcaataatgggtcttcataatcatcatcatgtgtcaccatctttttcttcgtcgtcaccttttt

SEQ ID NO: 21413 - DNA, 367 bp, Glycine max
  Clone ID: LIB3106-051-Q1-K1-E8
cctacacgtatgtctaaccctttttcatatactacaattttaacgttaagactgtacatagtgaatcgtataattactggatcaatacagacctagtgacgtctgtccacacttcatttgcaaagatgcactatggaacgctagaagacgatctgatcagcgccaaacgaatccatgacaatgattttctatccagcatcgatcctcatgtgattctgacatacaaggcacaggagaaaaagagcactgcgcatgaagatcctggatccaagccagattggactgagagctatcttttcactgtctcagacagtgcatataaacttaatctatagatattggataaagacaactttattctagatga

SEQ ID NO: 21414 - DNA, 219 bp, Glycine max
  Clone ID: LIB3106-051-Q1-K1-E9
gccacacatacgtccacacattcgaaatttaaagcgcttgcatcatagggctccgaacacatgcttatgtgaaggactgaacaatgcttatcacttcactcactgccactatattctttagcctctctatagtaaatagttaaacatcaaaacggtatgctttattaggcatatccattagagaattatcctttattgcaccctattaatagtctataa

SEQ ID NO: 21415 - DNA, 347 bp, Glycine max
  Clone ID: LIB3106-051-Q1-K1-F1
cccacgcgtccggagcgagctatctcggaacagagcgttgaaaatgaaggtgcttgcattgttagcagctacaattttgagagtatgacactgctctgcgtacgatatgttccgtatcagaatgaacactggctatggtgccagtacttcggaagtgaaatgcgcaagtcggatgctagatgcagaagcactcaacatctcaggctgtgataccattcctgagtagtgcgatgaagcaccaaatgaatacattcattgcgaacaatatacatcacactacaaatcagctaaccaactagcttacttttatgccaaagaccttgaactgcattccagggacacatttg

SEQ ID NO: 21416 - DNA, 341 bp, Glycine max
  Clone ID: LIB3106-051-Q1-K1-F10
gagatacctagaaacagtgtgatgaaaatgaaggtccttgctttcttgggtgctacaattttggtagcatggcaatgccatgcgtacgatatgttccctctccgaatgaacactggctatggtgcccgtactccggaggtgaaatgcgcaagttggaggcttgctgtggaagcacacaacatctttggctttgagaccattcctgaagagtgctttgaagcaacaaaggaatacattcatggcgaacaatatagatcagactttaaaacagttaaccgacaagcttacttttatgccagagacctttaatttcattctaaggacacatttgtgttcagtat

SEQ ID NO: 21417 - DNA, 407 bp, Glycine max
  Clone ID: LIB3106-051-Q1-K1-F11
atggcaaccatctctgctgctatcacaaccccatcgatctcccgctcagctctggtgcaaaagcgggtatcatcttccgttctcggattgccatcaatggctaaggtgggaagagtgagttgctccatggatgaaaaaccttattctgtgaaggaaagcatctctagcatgttgcagatggcggcatctctgatggcagctgccaacgctgcagccatgtcaggcccagccatggccttggtagatgagagactgagcactgaaggaaccggacttccctttggcctcagcaacaatcttcttggttggatccttttcggcgtctttggtcttatctggactcactattttgtctacactttcactcttgaagaggatgaagagtcatgactgtccctttaaatatc

SEQ ID NO: 21418 - DNA, 313 bp, Glycine max
  Clone ID: LIB3106-051-Q1-K1-D12
accacgcgtacgcgaaccttgcattgtatctacccacttctcaaccaagaatggggatggcaacccaagcctgtctcttcaccccacccctctccggtctcaaacccaacgaccgagccaccgagccatggaaacaatcctgcagcctctacttctccacctataagcccatcaagttctcgcgaacaatcagagcagcagtcaccgaccagaccacataggcaccggttgggttcaccccaccggaactggacccaaacaccccttcctcgaatctttgatgcagcaccggcagacttctgcgcaaggccca

SEQ ID NO: 21419 - DNA, 341 bp, Glycine max
  Clone ID: LIB3106-051-Q1-K1-F12
ggtagctcattttagtgcgggctttcattacatcgatgccatggagacccgggaaggattatattccccccacttgttacagccttcagttaccaaaaatctctgcattatctcgtttcccaaatgctttatccaaaaccactcaccacgtttcagtgctaagagtaagagcttctcgtccttcagtgagcaatgcagacgaggatgtcttgcaaatattttttaaggcgagagaattaaatggggattttatatcaagagcttgcgatttactattgagaagagatttcagaagttctggtgattatgatattagcgagctcaccaacaacactttttaa

SEQ ID NO: 21420 - DNA, 339 bp, Glycine max
  Clone ID: LIB3106-051-Q1-K1-B4
cccacgcgtccggagaaatttatcttgaccttgtatgataaatgggttggcatgggctatgcaccgggactgcccgagactcttaagaattacaacaagctggtgtctcttggcttcaagattatattctagtcaggtagaacactgtacaaacatgccgttacagaatctaacttactgaaggctggcttactactcacgggaaaaattaattcttaaggatccacaagatcctttcacttcaaatgtcagtgcattcaattcagcaactatagatatactgatatggcaggtatacatcattgatgggatcattggataccaatggagcgatctact

SEQ ID NO: 21421 - DNA, 384 bp, Glycine max
  Clone ID: LIB3106-051-Q1-K1-B5
acgcccacgcgttcggagtaatgtttctcgttcttgtatcatgaatgtattgggaagggctattcttagggtctgacttcgactctctctgcaatgcatcccgtatggactctctatggctcatgagcataatcgcgtctcgttgaactattcactatcagcccgtttcagatgcctcctttccgaaggctggctacccctcatgggagaaattgattctgaaggattcacaagatcctttcactctaaatgcatttttatacaaaacagcatcgagagataaactgattaggcagggatacaacattgttgggatcattggagaccaatggagcgatctcctcggaagccacatacgctaaagcaggacctttaagcttccta

SEQ ID NO: 21422 - DNA, 258 bp, Glycine max
  Clone ID: LIB3106-051-Q1-K1-B6
gccacagcgtatcgtaagtagtctagggtccaagctcccactatccactgagattcagccctctgtcactttgattcgcctgcaagggattataccatacgctcgatgggaattgcccttaaaggcgtctcatacgactaatccgcctcaacagggtcaccaacggcacgtgcctttggggagcctaggcctgctactgcttatcaacaaacgaaccgactacgcacacatctgatgtagcccctagtcggacttata

SEQ ID NO: 21423 - DNA, 384 bp, Glycine max
  Clone ID: LIB3106-051-Q1-K1-B8
cccacgcgtccgatggcaacagaaacaaaagtggcagtattaggtggcatcaccgaagtgcagggagctgccaacagcgtcgagatcaacaatctcgctcgctttgctgtagaggaacaaaacaaaagagagaattcagttctggagtttgtgagggtgattagtgcacagcagcaagtggtttctggagtgaattactacataacattggaagcaaaagatggtgagattaaaaatgagtataaagcgaaggtttgggagagggaatcccaagagttgctagaattcatgccaacattaggtgcaggaggcgagatcgaccatctcgctcgctttgctgtagaggaacaaaacataagagagaatgcaaatctggagtttgtg

SEQ ID NO: 21424 - DNA, 438 bp, Glycine max
  Clone ID: LIB3106-051-Q1-K1-B9
ggtaccgttccggggttcgacggcacgcgtccggccacgcgtccgaaacctggctcctttttttagctctttccttatttagccttggacactccaaactgtgaaggccatttttagcaaaggaaaaaaaagtgagccagtgtgagagagagtggtcatcagtcatcaccggtgattgattaagatgcagcaatcaaacggctctgattcgacgactacgatggagcagagcgcgccgtcggcttcgaggcaatcaccggcggtggctaggcctcagcagtgggtgccgatgcattaccctgcggcggctgctatggtaatgccgcaccacatgttgccgtctcagcattatgcgccgccggcgtacgtgccttaccaccaccaggtcgcggctcattctcagcaccaggaccagaacggatcctgcggtgagaacaa

SEQ ID NO: 21425 - DNA, 347 bp, Glycine max
  Clone ID: LIB3106-051-Q1-K1-C1
acgcgacgcgtccggcgacgttttccctccattggatggagatggcaacatgagatggttcttggaagggtctggagtggattagcgctgatcagatgaaggcggcgaaagagcaaggcaatctgaaagtaggatcttctttaagaaatgctgtcccacattcgtaccggtaccaccagactggagatcgcctactacggactaaacgatctcagtctccggcctcaaggcaaccatatactggtgcatatgaccgactacgtaaacgtgcacgacgctctgcacgactcccaacacgtagacgtcgacgttgacaccggctactgaagccacaggaccatgcctta

SEQ ID NO: 21426 - DNA, 408 bp, Glycine max
  Clone ID: LIB3106-051-Q1-K1-C10
gatagagataactagaaacagtgtgatgaaaatgaaggtccttgtttggtgcggggctacaattttggtagcatggcaatgccatgcgtacgatatgttccctctccgaatgaacactggctatggtgcccgaactccggaggtgaaatgcgcatgttggaggcttgctgtggaagcacacaacatctttggctttgagaccattcctgaagagtgcgttgaagcaacaaaggaatacatccatggcgaacaatatacatcagactcctgaacaggtaaccaacatgcttacttttatgccagagacctagaagtccatcccaaggacacatttgtgttcagaatagatggcaccgtactctctaatattccatactacaaaaaacatggatatggggtggagaaatt

SEQ ID NO: 21427 - DNA, 409 bp, Glycine max
  Clone ID: LIB3106-051-Q1-K1-C11
aatggataacatcacagcaagtgaagtagctggtttcggagtgggtgcggtgctgctctgtgccactgttgctgccaccaaagtcgatgctttcttctcttcttctcagcgcagctcattagggatgtgcaagcgatgtggcaatcttaggcgattggcttgctcgacatgcaaaggaactgggtctatcatagaagggggaatacttggtattaaactcgtagaacatttgtttgaaacaattggtaatagtgaaccaaacgtgaagcagatagcatgtgtaaaatgtcaagccaaaggttacttctcatgtcctaattgctctgaactataatcactgtggctttatgttctatacctacaaggatttttgcccaaaacattcaatgtcaacatgtaacattgtgaa

SEQ ID NO: 21428 - DNA, 392 bp, Glycine max
  unsure at all n locations
  Clone ID: LIB3106-051-Q1-K1-C12
cccacgcgtccgcccacgcgtccgggtttatagcagtgccttgcggttggtgcgttctatgctaccattaccacaccttaaagttggatatttaactgcacctcctgtgggggcatcgattgcatctcataatgactggaaacgatcagaattccttttggatcatgaaaagcttcagcagatacccagaggagaatataaacaagtaccaanctaaaatcttttaaggcaaatggtaaaagcagggagtggagataggaagactatcaaagtaaatttagcaaatataatttctgaataagcatgtgctgatctaacctaaccacctggtgcaggcctttgcatagatccaagttatggatcagttaacttggttgctgactctggggaat

SEQ ID NO: 21429 - DNA, 388 bp, Glycine max
  Clone ID: LIB3106-051-Q1-K1-C2
gccacacatgcggcttaatcatctgtaaagtctactgagatgtcttcatgagttggttcatcccagggtctagcttgaacaatccccaataagatccaatataggatctagaatgcttatcactgcatagaattcttttgaggatgtgagcgacacattcgtacctgaactaggatgctggagatctacttcaggtgtctcaactagcacttgtgagtgcacaacatgatctagatattgacattgatccaggatttcttgaaagtgcttgcaattatgctcaactactaacacgtagacattcgactttattcaccgtaaacttatgcacttgaccttgcccggacgcaaacattactgagacctaatgaaccacttgattagatct

SEQ ID NO: 21430 - DNA, 367 bp, Glycine max
  Clone ID: LIB3106-051-Q1-K1-C3
gggaagcctaagcgaaaccctaaccctaacggagagatggcggagcactgggcatggatattcgggacggagaaggacagggtgaactgtccgttctacttcaagatcggcgcgtgcaggcacggcgaccggtgctcccggcttgacacgaagcccacaattagcccaacgttggttctgtcgaacatgtaccagaggcccgacatgaacatgaacatcatcaccaaccccgatcagccccagccccaatctatcgaccccgataaggtccaggatcacttcgacgacttctactaagatctctttgaggagcttatcaagtacggccccattcatagcttgaatatatgcgacaacctcgccgatc

SEQ ID NO: 21431 - DNA, 307 bp, Glycine max
  Clone ID: LIB3106-051-Q1-K1-C5
cccacgcgtccggaaaaaaaaaacagaattacacagaaactgagtcagggtaaaaatttattatggatcataggttacgttgttttgtgacaatacccaaaattccttttctatcgctactgcctctgattctcgtcttcagatacgttcacacatccttcgacctcgctactatacccttcaacgatggctattctccgctcttcggagatagcaacgttgctcgctcagaggatggcaacggcgtacaactccggctcgatcgctacacaggttcgggtttcatttcctacagtatgtaccagta

SEQ ID NO: 21432 - DNA, 330 bp, Glycine max
  Clone ID: LIB3106-051-Q1-K1-C6
cccacgcgtccggttacatattccaagcctacacatatattaagaagggcgcattatgcactattgacataggatccatagcacttctacttctccatcatttcttctgaatctctatttcctcttattattcacgacaggcgtgtcttcactgcctttgaactcattatgataccaactgtcagtgaggattttgcataggaatacgatcgagctattgcagaattacagaaattgttcagggtgaagagtgtactcaaagtcacaactgctgagatagtgtagcatataacagcatctctgggatcatcatcatatgatggcattcta

SEQ ID NO: 21433 - DNA, 332 bp, Glycine max
  Clone ID: LIB3106-051-Q1-K1-C7
cccacgcgtccggcaatgtgggattgattttcaccaaaggtgacctgagggaggtcagtgaggaggttgccaagtacaaggttggagctcctgctcgtgttggtttggttgccctaattgatgctgttgttcctcctggcaacacagggctcgatccctcccagacctgtttcttccaggtgctcatcattcctaccacgattaacaagggttctgttgaaatcattacccctgtggagctcattatgaagggagtcatggttggatcttctgaagctgctttgcttgccaatctagtgatatggcccttcttgtatggtcttggggttctt

SEQ ID NO: 21434 - DNA, 51 bp, Glycine max
  Clone ID: LIB3106-051-Q1-K1-C8
cccacgcgtccgcccacgcgtccgcccacgcgtccgctagttctagatcgc

SEQ ID NO: 21435 - DNA, 301 bp, Glycine max
  Clone ID: LIB3106-051-Q1-K1-C9
taccacacatagatccattcatcaattctaatggccgatcatctcaccggctaacgtatctccgaaatcaaggaagccttcagcctctttgacaaggacttgtatcgttgtattaccaccaatgaacttttgaccgtgattccgtcactttaccataacccatctgaggcatagcttcatgacattatgaatgacgctttattcttataggaatgttaccatttatttcccataattccttaatctcatgtctttcacgattaaatacactgattcagattataatcttaatgaggctttc

SEQ ID NO: 21436 - DNA, 155 bp, Glycine max
  Clone ID: LIB3106-051-Q1-K1-D10
aacacacatacgtccacccatcattatatgcatccacttatttaaaaggctaagggacttttgcttactacgaagatcttaagacttacacttcatctacgctaatcctggtaactcatctcatattactacgataacacatgttgtcactttac

SEQ ID NO: 21437 - DNA, 383 bp, Glycine max
  Clone ID: LIB3106-051-Q1-K1-D11
cacacgcgtcacatcatggcagctgcttatcctatggcaagctaactcgagtcgggcttcactaaaactcttgtagctcccaacggcctctctgtctattcactactcaacctcctgccttctaagaagcagtttagcttgactgttagggccatgcaatctgtaaggccaacctatcaagcgattcaaccaatcaacggtgatcccttcattggaagccttgaaaccccagttacattcagccccttgattgcatggtacttatcgaacctgcccgcatacaggaccgcactgagcctactactaagagggatcgaggtgagcctgtcccatggctaccttttagagggcccattcgttaagggctagtctcttaggaacac

SEQ ID NO: 21438 - DNA, 261 bp, Glycine max
  Clone ID: LIB3106-051-Q1-K1-B3
gtgacggataatcgtaagtggcctatcgtccatgttgccaccatccacggatattaagcacgcgtcattacgatctgccggcaaaggatcctaccacactcttgatggtaattgctcttcatggcctatcgtactcttattcaggataaccagggtcattcatcgccactgtgcctatcatcacccgagctgtgatactggttatggccaaacaatccgagtacgctctcgaagatcttcgcacattgtctaacttgaaga

SEQ ID NO: 21439 - DNA, 333 bp, Glycine max
  Clone ID: LIB3106-050-Q1-K1-H7
cccacgcgtccgtccacgcgtccgtttgcattgaccattgtcttccaatttcagtgtgtgacatggaaattggaaaaactgttgagcaatttgccgtatgacgatttggacatctcagaggaagtcaaggagcaggtggatttggtgagaacacaattgagacgagccacggataaatatgggtttatgatttcaaagatgccatctcatgaattatcccagccactggctgaagaaattagtcaggttcttggcaaatctgtgagtaggttgcacaaacaacacagctgccctgaagattatcagaactagacagcattcctatcaactatg

SEQ ID NO: 21440 - DNA, 280 bp, Glycine max
  Clone ID: LIB3106-050-Q1-K1-H8
cccacgcgtccgcccacgcgtccgggaactttcgctagtcgcctgtccaacctgctcggcgggcctcacatggccaccgtcgatctcgatcgcgacgaactcgccttctacgactccctggctttccagctatcagaaattgtaaaacaaggtcaattggtgtcagatgaaattattatacgtttattgacaaagagacttgcagctggtgaagcttaatgcgaactgggatttatacttgatggtgttcctggaacaattaagcaagcataaatcttgg

SEQ ID NO: 21441 - DNA, 449 bp, Glycine max
  Clone ID: LIB3106-050-Q1-K1-H9
gtttgttgtgagctataagctagtttatcgttaggagaatatgaaggtgcttgttttctttgttgctgcagtagttttggtagcatggccatgccatggcgcaggctaccaaaggttccctctccgaatgaaaactggctatggtgagcgttcttcggaggtaaaatgcgcaagttttaggcttgctgtggaagcacacaacattcgagcctttaaaaccattcctgaagagtgcgttgaaccaacaaaggactacattaatggcgaacaatttatatcagactctaaaacagctaaccaacaagctttcttttatgctagtgaacgcgaagtccatcacaacgacatatgtatattcggcatagataacaccgtactctctaatatcccatactatgaaaaacatggatattgggtgcaggaatttaaagaaaccttatatgatgaat

SEQ ID NO: 21442 - DNA, 387 bp, Glycine max
  Clone ID: LIB3106-051-Q1-K1-A1
gttacgttacctatgggacatttgagctgctagtacatatatgtgcgggtgacaccgagaaggaaagcaggaaaaaaacaaaaaggagcagatgggtagctcaggtttatcatggaaattggcggatcatccaaagcttgcaaagggtaagactgtggctgttgtggtattggatggttggggagaggccacacccaatgagtacaactgcatccacaaggccgaaacaccctgcatggattcacttaaaaagggtgctcctgaacggtggagattggtcagggctcatggtactgctgtaggacttccaacagaagatgacatgggcaatagtgaagttggtcacaatgaccttggagctggtcgcatatttgctcaaggtgctaa

SEQ ID NO: 21443 - DNA, 300 bp, Glycine max
  Clone ID: LIB3106-051-Q1-K1-A10
aactatttaacaccatagtaactttgaactactctatagttatctatgggaatcgattcttctttatggtgctaatgaccaatgcacactgaaccgatacagtttttatcaccatcatcaagttgaacccttaacatgctatcatgatgctggagcatgaagctagcagtttactcgatggagaactacaatttagcaaagctggtacgaaacacgatacgagaatacaatctttgcagtgaaccgtttaccgtaggacggcttatgaaagtgacaaagaagcctgctatgttgacatct

SEQ ID NO: 21444 - DNA, 163 bp, Glycine max
  Clone ID: LIB3106-051-Q1-K1-A11
cccacgcgtacgccataacaatggtctatggcgcgatagtcagctttggttctagatccttgtcattggtaggattgagcaagatactctgtgccgtgcactgtgacaacagcttcatgaatcatcatccataggaatataccaggttgtatcaatatccatc

SEQ ID NO: 21445 - DNA, 389 bp, Glycine max
  unsure at all n locations
  Clone ID: LIB3106-051-Q1-K1-A12
ggaatattcgacaggtagagtttcttcaatggctcctaaagttgataagaagaatgatccaaaggcccaggccttgaagactgctaaggcagttaagtcaggtgctacctttaagaagaaggtaaagaagatccgaacttctgtcactttccacaggccgaagaccttgaagaaggacaggaaccccaagtaccctcgcattagcgccccgccgaggaacaagcttgatcattatcagatcctgaaataccccctcaccactgagtctgccatgaagaagattgaggacaacaacactttggttntcattgtcgacctgcgtgccgacaagaagaagatcaaggatgccgtgaagaaaatgtatgacattcaggccaaaaaagtgaaca

SEQ ID NO: 21446 - DNA, 382 bp, Glycine max
  Clone ID: LIB3106-051-Q1-K1-A2
aacaggcgtgctggtcctatgcctgtgctctgcagttgattgagaggcttgtttatgctgagggtgctgaaaatggcttggaattcacaattgtgaggccttataattgtattggaccacgtatggatatcattcccggcattgatggcccaagtgagggtgatcctagtattctggcatgctttagcatcaatctcctacgaggagagcctctaaagcttgtggacggtggccaatcccagaggacttttgtgtatattaaggatgctattgaagctgtcttattgatgattgaaaatcccgccagggctaatggacatatttttaatgagggaaacccagacaatgaggttacagttaggcagcttgctgaaatgatgac

SEQ ID NO: 21447 - DNA, 265 bp, Glycine max
  Clone ID: LIB3106-051-Q1-K1-A3
acggtcacacgaacgggactctcaacgcttacctgtaaggacatttgatgctaactggattcctcacactcgcttaagggaaaccaccgtactcagatcaagatgccagtctttcatggcaatatgcacttcttatgagaccacaaaccttgatgcatcatagctgaccagcattaagcttgcagtgaaactgactgctaggtatgaaacgacttatgtctaaaaattacatgaagacttgttattagtgcatgaaatggcattc

SEQ ID NO: 21448 - DNA, 221 bp, Glycine max
  Clone ID: LIB3106-051-Q1-K1-A4
gaaggacgttcgaactaataacagggtaactgctgcatgaatgatctgctaccgggatgttaccaccgtcaaccgtgccagtgccggcatgattgctagatgaagtttcctcaggtccatggctggctttcatacgctgtaaaactgcaagtgacattaccgacattgaatgcaactgtggatgagtgcattgcaggcatgagttgactgatatcgtcaag

SEQ ID NO: 21449 - DNA, 397 bp, Glycine max
  Clone ID: LIB3106-051-Q1-K1-A7
ggagtgttcggggtagacgtacgcgtacgctagaaacagtgtgatgaaaatgaaggtccttgttttcttcgttgctacgattttggtagcatggcaatgccatgcgtacgatatgttccctctccgaatgaacactggctatggtgcccgtactccggaggtgaaatgcgcaagttggaggcttgctgtggaagcacacaacatctttggctttgagaccattcctgaagagtgcgttgaagcaacaaaggaatacatccatggcgaacaatatagatcagactccaaaacagttaaccaacaagcttacttttatgccagagacctcgaagtccatcccaaggacacatttgtgttcagtatagatggcaccgtactctctaatattccatactac

SEQ ID NO: 21450 - DNA, 374 bp, Glycine max
  Clone ID: LIB3106-051-Q1-K1-A8
cttccatcaagatcagaataataatgtaactaggagtgatggttgctacggttttggtagcatggcaatgccatgcgtacgatatgttccctctccgaatgaacactggctatggtgcccgtactccggaggtgaaatgcgcaagttggaggcttgctgtggaagcacacaacatctttggctttgagaccattcctgaagagtgcgttgaagcaacaaaggaatacatccatggcgaacaatatagatcagactccaaaacagttaaccaacaagcttacttttatgccagagacctctaagtccatcccaaggacacatttgtgttcagtatagatggcaccgtactctctaatattccattactacaaaaa

SEQ ID NO: 21451 - DNA, 417 bp, Glycine max
  Clone ID: LIB3106-051-Q1-K1-A9
cccacgcgtccgcgcaaacaaaatcaagtagtaagagcgagaagagaggagaagaaagggagagagataatgcagtgttatggcttaaccgtaccgggaagcgtgcccaccgtatctccagtgttcttgaggcccaacaggcccattatcgcgacccgaatcgcgtttcccaaggcgaccctgaataagaaccagggcttcgtggtggagctgagcttctacgagcttctgggcatacccgaatcggtttcggtaacggagatcaagaacgcctacaagcaactcgcccgaaagtaccaccctgacgtgtcgccaccgggtcgggtcgaagagtacaccaagaggtttattcaggtgcaggaggcctacgaaaccttatctgatcctttccgaagagctatgtacgataaggacatg

SEQ ID NO: 21452 - DNA, 419 bp, Glycine max
  Clone ID: LIB3106-051-Q1-K1-B1
ggtaccgaatctcgcagggtcgacccaggcgtacgcccacgcttccggcagaaatttagctcgaccttgtatgatgaatgggttaacaagggcaatgcaccggcactgcccgagactcttaagaattacaacaagctggtgtctcttggcttcaagattatattcttgtcaggaagaacactggacaaacaggccgtaacagaagcaaacttaaagaaggctggctaccacacatgggaaaaattaattctcaaggatccacaagatccttccactccaaatgcagtttcatacataacagcagcgagagagaaactgataaggcagggatacaacattgatgggatcattggagaccaatggagcgatctcctcggaggccacagaggcgaaagcaggacctttaagctttctaatcc

SEQ ID NO: 21453 - DNA, 390 bp, Glycine max
  Clone ID: LIB3106-051-Q1-K1-B10
cggacgcgtgcgccgactcgttcgtaaggcgccgcacaaacatattcaggcgacgatgaggaaaacactcttcatcgaaccaacgtcagtgcttgtgtcacgtttaagtgttatccatttgcgtccagccccacccatcttcgaatgataacacgacatttggctcccgtgtgaagatcaagcgtgaccttaatgctattacccttttcaagcacatgcatgttaaggggattgttggaattgttgaatcaggtcttggtattttcaagatcttggtcagctgttcctgtcacctgggtcatatgaaatttgccttatttatgtgacaaaaggctctggcttaatggtcaaaattgcatggttgatccataaaacctgtttgataatgtt

SEQ ID NO: 21454 - DNA, 408 bp, Glycine max
  Clone ID: LIB3106-051-Q1-K1-B12
gcgaaggtgctttcttagttgtgctgctaacgacaatccatggaaatgagaagcgccaaattcttcttcttcttcttttcaactctctgtcttctctacggattttccaacgccaccgatattcactattgcgataagaaagctgactatgatgttgaggtcaaaggggttgaaatatctcctgatcccatcgcacgaggccagcctgctacattcagcattgctgcaactacaggtaaagctttatctggagggaagctagtgattgatgtgtcatatttcggatggcacatacacagtgagacccatgacctttgtggagaaactacttgccctggttcagctggtgattttgtgattgctcattcccaagttttacctggattcactccacctggttcatacact

SEQ ID NO: 21455 - DNA, 200 bp, Glycine max
  Clone ID: LIB3106-051-Q1-K1-B2
cccacgcgtccggccacacgtacgttgagcttaaatcataaccgctcttgtatgggttcttcacttgggctacaatcatcatggcgtaatgacatcaggttggaaatgtcttgaggcaaggtgctattcgcagcacacataccactgttgcgtccatgcttaattacatccgacgcatggattgatgcctgctactcatt

SEQ ID NO: 21456 - DNA, 402 bp, Glycine max
  Clone ID: LIB3106-050-Q1-K1-H5
ccgatctcgtctccgaaaccgcctagaaatcgaaggagctcgccgccgaagcctgcaagaaggccgacatcctcaaatccgccgcgctccgccaccgccccgccctctgcgacgccgcaggagctcgagaagttcggcgtcaccgacgacctcagatctttcgtcaagggcctcacttgcaccaccttgcagaactttcctctcagttccgatgaatcggaggtttctgatgtgactactgtgggatccaatgttcggaaaggatctaaacaagtttcgggaaaagcatggccatttcggttaacctccggtaaaggaaattccagaatggaaattgaaccattgtcaactgcttttaaaggaagacccctttggaagaaatttttcacacctggcaacact

SEQ ID NO: 21457 - DNA, 423 bp, Glycine max
  Clone ID: LIB3106-050-Q1-K1-F9
cccacgcgtccgcccacgcgtccgcttcccttgccgatgcatattcaaaggttttgatgccaccgaagggtttgacggagaagctaaagaagagcgtctctgatatgactactgtccttgaaaggtgtgtgaataggctggagtgggagcgttcgcaagagcaagctaggcaaaaggctgaggatgagatagaacaggaaagaatacaaatggctatgattgattggcatgatttcgtggtggttgaaacaatagattttgctgatgatgaggatgaagagttaccttcttcaatgactattgaggaggttataaggagaagcaaggtgacagccatggaagaagacattgttgagccaggaaaggaggtcgaaatggaaatggatgtggaagaggcccagcttgttgaggagggtatgagag

SEQ ID NO: 21458 - DNA, 260 bp, Glycine max
  Clone ID: LIB3106-050-Q1-K1-G1
gggaaaacaaattgtcatgtttctggactattatggttcgctgtctcctatagttgacgaggctgaccgtgctttcatgtctgattcgatgagaaaaacagtgaggaaacttgctaggtgttttcctactgctatagtgaccagcagatgcaaagacaaggtgtacaattttgttcgcttggcagagctatattaggcaggaagttatggcatggatattaaaggaccaacaagtagcttcgtatacaacatagatagca

SEQ ID NO: 21459 - DNA, 399 bp, Glycine max
  Clone ID: LIB3106-050-Q1-K1-G10
tccacgcgatcggtgggagacctccatactgttaggacaaagggtacttggtggattgtgctatggagtatctggaaatgccagatgtgatgtcatatgtggtggattctgagtggatacattatgaatatgatgacctgataacaatatgtgaggtgattactatcatcatgaatcctgatgactctatacgtgcatcaattcatgcattatgcactatatgcaagagcaaaatgcacataccattaaatgatggagctaaaggcattatcactgactgtgcgatgaactagcactatggtcataatagatctaattatacttagctaacttaacatgcactatatctgaagcatgcagacctataaccattaatacttctgtgactacacatcttat

SEQ ID NO: 21460 - DNA, 459 bp, Glycine max
  unsure at all n locations
  Clone ID: LIB3106-050-Q1-K1-G11
cggacgcgtggggttttttgtagcagaatttatgtgcggtgtgttgtagcagcgattagaaggaaggaggaaagatgaacacagacatcactgcatcgacgaagccagagtacccagtcattgatcgcaaccctcctttcaccaaagtcgtcggcaacttcaacaccctcgactatctccgattcgtcacaatcaccggcgtttccgtcaccgtcggctacctctccgggattaagcctggaattaggggtccttcgatggtgacagggggtttgatcggagtgatgggtgggttcatgtatgcttaccagaactccgctgggagactcatgggtttcttccccaacgatgatgaggtagctcgctacaacaaaaaataattcctttttttgtgctcatcatanaacatanacaaaaaaaaaacccttctttgtgccagtgtttgaacttcaataatca

SEQ ID NO: 21461 - DNA, 262 bp, Glycine max
  Clone ID: LIB3106-050-Q1-K1-G12
gcaaaggcagaaagagctcatagctctctgtttgtgacacagtagcaaatttcagcattagcttagaaaatggagttcgttcctgaagaaggcaagcaccttcacaaggattgctccactttgattttgcctgctctgtcgattggcattgtggagcagctagttgcagatctttagatttcatcaatgggttctgagagagttgggtatttggatgatcctaacgttttgccctgtgttggcaatgatgcttatggaccct

SEQ ID NO: 21462 - DNA, 450 bp, Glycine max
  Clone ID: LIB3106-050-Q1-K1-G2
cccacgcgtccgctccctttccctttccctttgctcattcgatcagctcttaaatctaagagaatccaagtttgaacgtgaggggtgatcagaaccaaaatggccaatctcagtagtcctggatttaaactccttttgggggcctttcttggtaacgttggtccaaatccaaaccaaggtgcaatgctaccagtacaaagttggagatctagattcctgggggatccccatttcaccaagttcacacctctacgacaaatggtccaaatatcacaacctcaggaccggtgattcgcttctgtttctatacccaccaagtcaagattcagtgattcaagtaacagcagaatcctacaagagctgcaaccttaaagatccgattttgtacatgaacaatggcaacttcttgttcaacattacatcagagggggacttctacttcacaagtgg

SEQ ID NO: 21463 - DNA, 288 bp, Glycine max
  Clone ID: LIB3106-050-Q1-K1-G3
attcgagcacgacgtcacgcgtacgctttcgttcacatgatcttcaacgctttcttggatgcgtgctattacagccttgggattggaaaagagagctttcctcatgatgaacttgaggcaacagcatggacagaagatggtcttataatggctgctcgtcataagaaatataagcatctacagggtgttcagtttcatccagagagcatcataaccccagaaggcaagacaattgtccgtaattttgtcaagcttatcgagaaaagggaggctggtggctcttgaaac

SEQ ID NO: 21464 - DNA, 259 bp, Glycine max
  unsure at all n locations
  Clone ID: LIB3106-050-Q1-K1-G4
gcttcccttcactctcagttctgccacatattaacattttcggcgcacaatgaaggtcatgggcgcctacttgctcgccgttttgggaggcaacgcagccccttccgccgatgacttgagggacatccttggctccgttggagctgacgcgaacgatgacaacatcagcaacttcttgtctgaagttaagggcaaagacattgtggagcttatcgcctgcggtagggaaaagctggcctncgtgccttctggcggtggc

SEQ ID NO: 21465 - DNA, 184 bp, Glycine max
  Clone ID: LIB3106-050-Q1-K1-G5
atttaactcatatcatcttcaggcctttcttggctggtagatatcacagcctcggaattgaaaaagagagctttcctcatgatgaacttgaggcaacagcatggacagaagatggtcttataatggctgctcgtcataagaaatataagcatctacagggtgttcagtttcatccagagaggat

SEQ ID NO: 21466 - DNA, 182 bp, Glycine max
  Clone ID: LIB3106-050-Q1-K1-G6
caccaatcttctctccacgcccttcttgggttaccgtctgaagtgcagcaatggcagatggattgcattcgcagcatccatcggtagttcagaagttatctggacagtcttatcttgtgtccaggcttgctcctaatcactccagaaactgttctaccactggtagttacttcattggaggt

SEQ ID NO: 21467 - DNA, 173 bp, Glycine max
  Clone ID: LIB3106-050-Q1-K1-G7
cccacgcgtccgcctcactcaaacttgggattacagaaaccaacaacagttcttgcactgaggtttcacgatgttgctggaacttgcacttggtttgtttgtgttagctttgtttctgcacttgcgtcccacaccaagtgcaaaatcaaaagcacttcgccaccttccaaacc

SEQ ID NO: 21468 - DNA, 332 bp, Glycine max
  Clone ID: LIB3106-050-Q1-K1-G8
cttgctcgcagaggcacagctcttggcacatgatgtagaagatactggcgttgctgttgaagagacccgggatataaccacagacaatactgggaaaactcatgatgaattgagaaagatgctggcacatatgtttgatgacaatgccagattaaggaaacaaatcagttctggtattcgtcgtgctctaaatgcaaatatcaattacgaagaggacggtgaagaaatccatttgcaaaaaactggcctaagcaagttcttagaaagatagctctgtcaatactacaccgtgtatctatgattgaggtacttctctggtaattatggtctat

SEQ ID NO: 21469 - DNA, 354 bp, Glycine max
  Clone ID: LIB3106-050-Q1-K1-G9
gcctgttcatcattctcatatgctcaatcattcccgctcgcactcgctcttcccttcctctggtggcgacaatgtcaactcctgctaggaagaggctgatgagagacttcaagaggctgcaacaagacccggctgcagggatcagtggagccccccaggataacaacataatgctgtggaatgctgtcatatttggtcctgatgatactccatgggatggaggcacgttcaagttgacactccaatttactgaggactatccaaataaaccaccgactgtacgatatgtgtctcgcatgtttcatacaaatatttatgctgatggaagtatttgcttggatatattacaaaatc

SEQ ID NO: 21470 - DNA, 258 bp, Glycine max
  Clone ID: LIB3106-050-Q1-K1-H1
gccatgagccacacatctactggactgagttttcagttttacagttactggcaggcaaacagcgaccaagagtccatgctgtcagatgaaacctgcccacgggccgtgtgcgacaactttgagcttgcaaaagcgtgccataccaagagcaaaatgatgagcacttttgtcaccatagcaaatgttgcaagaccaaagccgcgtctgacattcattggccaccttcacctcttaaaagataaacttcacacataaatt

SEQ ID NO: 21471 - DNA, 442 bp, Glycine max
  Clone ID: LIB3106-050-Q1-K1-H10
tccggttcgttgtgagctattatctacggtatttttaggagtatatgaaattgcatgtgttctcaattgggggaatatttttgctccatggccaatccatagcacatgctaccaaatgttttctttttgaatgaaaacttgtttatcgaagcatcctactgccgaaaaatgcacacctattaaacttgctactgaagcacacaacattcttatcctttaaaaccattctctaatagtgcgatgaaccaacaatggactacattaattaccaacaattcatatcatactctaaaacagtatacctacaaactttcttttattcttctgaacaccaagttcattacaactacatatttatatttgacatatataacaccgtactttataatttccatacattaaaaacattttttttaattaaggaatttaatgaaaccttata

SEQ ID NO: 21472 - DNA, 463 bp, Glycine max
  Clone ID: LIB3106-050-Q1-K1-H11
agaaagaatcccaggcgaggagaaagatggttgggaaggagcaggatgtgtcgttgggagcgaacaagttccccgagagacagccaattgggacggcggcgcagagccaagacgacggcaaggactaccaggagccggcgccggcgccgctggttgacccgacggagtttacgtcatggtcgttttacagagcagggatagcagagtttgtggccacttttctgtttctctacatcactgtcttaaccgttatgggagtcgccggggctaagtctaagtgtagtaccgttgggattcaaggaatcgcttgggccttcggtggcatgatcttcgccctcgtttactgcaccgctggcatctcatggggacacataaacccggcggtgacatatgggctgtttttggcgaggaagttgtcgttgccccaggcgattttctacatcgtgatgcaatgctagggtgc

SEQ ID NO: 21473 - DNA, 384 bp, Glycine max
  Clone ID: LIB3106-050-Q1-K1-H12
cactcttctagctccttgcaatggctgactttgatcgctcttctagtgaaatttctacacgttctactgattcagggaggcgagggtcttccaaagttgaattttctgaagatgaggaaactcttatcatcaggatgtataaactgctaggggagaggtggtctttaattgctggaaggatttctggaagaacagcataggaaatagagaagtattggacttcaagattctcaggttctagtgaataaggtgccaagagttctactacgattggtgttcagtctacgatgagcaagaagattttgcgtgcaagattagtgtgattttgtgggacataaaaactgaattaaagttggccttattgtatacgtatgtgtatttgta

SEQ ID NO: 21474 - DNA, 471 bp, Glycine max
  Clone ID: LIB3106-050-Q1-K1-F8
cgtctcggactcctctgtccttcatctctaacacgttcacctttgtaacgggttctacactctccgttcgcctcgacactccaactcactcctcctcgtccacaagctccacctccccctcggcgacaagtggctcgacgagtacatggacgagacctccaagctctgggagacctctcacctcctcaaatccgccatctccaacttcgaacctttctactcccagggcttcaaccttctctcctccctcgactcatcccacccccaggtagtgagggctatatcagggtgcagaagggaggctttgggtttggaggagcagaaccgcgctctgatggagactcgggtccacacgcttggtctgcgtctggacgagagggtatccgtggagtccaagctcaacggcttcaacggcttcaggggcgttctctacgcaatggaggacgtgagttcgatgcttttaatgatcct

SEQ ID NO: 21475 - DNA, 123 bp, Glycine max
  Clone ID: LIB3106-050-Q1-K1-H2
tgaacacgaagcaggatcaccagggtgctccttaaatttctccaaacatgcacggctagcgtggtccctgtttggttcatgcctatgcatcaagatgatggagatggtacgctctcacaggat

SEQ ID NO: 21476 - DNA, 347 bp, Glycine max
  Clone ID: LIB3106-050-Q1-K1-H3
gagagagcgagcagtttcagacacagagagtggggtttgggattggagggattgacgctgcgtctcttcctcttctctttcgatccatccctcattcctaatcctgcaatccaaccacctcagcctcacactcacatatacacatatctgaacgcgtatcgtccctcctatggcttcaaagcgcatcctcaaggagctcaaggacttgcagaaagacccaccaacttcttgcagcgctggtccagtagctgaggacatgttccattggcaagcaacaataatgggtcctgctgatagtccttatgctggaggtgtattcctagtcactattcacttccttccgatta

SEQ ID NO: 21477 - DNA, 62 bp, Glycine max
  Clone ID: LIB3106-050-Q1-K1-H4
gagagagcaagctgaagttgacacagttagtttgactctgtaatggcggaagagacgacgcg

SEQ ID NO: 21478 - DNA, 463 bp, Glycine max
  Clone ID: LIB3106-050-Q1-K1-E12
atccgaactgtccgatctttattcaatggttacaaatgcactaactgtgtgagggcaagggataggagactgcaccgaatccagttggacaataaacatgcagattctctcatattttcaataggaatagtgattctgtatttgttcacctgctgaaggtatccactgctgaaatgaatgagctcaacactcctacttcctcggttcttccactgttatacaaacaaattgaaagtggacattattattttccgtgggaaaattttcagttctatttgattattgtttgaagtcttatcgatactatttagattaagccaactttggtataaatataagttcctcacaagtgacctctcaatgttgttgaccttttacttcagtaactttgctgcaacccgatcttcgctttggataggattccctattgtaaaaaaatacagtatttaatgtaataaatcta

SEQ ID NO: 21479 - DNA, 432 bp, Glycine max
  Clone ID: LIB3106-050-Q1-K1-E2
attcgaggctacgacgtcacgcgcacagatggcattggccctcagcatggtattcatatttgacggagccaattcatctctgagcagcagctgtggttgtattaaccggtctggttggagcaaattttgtgcaagcaacccttgataaactcagctttcgtgatccaattgctcggggaatagcaactgcttctagtgcccacgggcttggaacagcagctttgtctgccaaggaacccgaggctctcccattttgtgccattgcttatgctctgaatggtatatttggatccatactttgctcgattcctgctgttagacaaagtttgcttgcaattgttggctgagactgtcatttatgtcacggcctggtgctattcattccattcaatgccataataactccagtgcttatctgttggctgcacaaaa

SEQ ID NO: 21480 - DNA, 422 bp, Glycine max
  Clone ID: LIB3106-050-Q1-K1-E4
gctttacaagacggcacagcagtcttcattggagtgtagactaacagagcaaagatggaatgtccagaggagatgaaccgtttacttgataaggtccctgaaatagttgagtcaagtctacctaagcaagctgatagcattagtggttagcttatggcttttgagaaatcaagatgggtaaagaagacacttcaattggatgatagcaacatatatggattatgattcaagttggatacacttatcaattagcacctatagaagagataaaaaaaaaagaagtaaatgaatcaaacttctcaaataaaataaaatcaccttacgcatctcaaattctgtagaagttttttcgttaacttttgcaaagctgagatgataacttgggttaacatatagataaatttgaatatttatctcaaaaa

SEQ ID NO: 21481 - DNA, 424 bp, Glycine max
  Clone ID: LIB3106-050-Q1-K1-E5
ggccacctctgctattcagcaatcatcattttcaggtcaaactgctctgaagcagctcaatgagttggtccgcaagaccggtggcgccggcaaaggtcgcaccaacatgcgccgtaccgtcaagagtgctcctcagagcatttggtatggccctgatcgtcccaagtacctgggtccattctcagagcagattccgtcatacctgaccggagaattccccggtgactacggatgggacactgctggactatcagctgacccggaaaccttcgccaggaaccgggagctggaggtgattcacagcagatgggccatgcttggtgcacttggctgcacctttccagagatccttgaaaaaatggtgtgaaattcggcgaggccgtgtggttcaaggcttggtcacagatctttctcgagggaggac

SEQ ID NO: 21482 - DNA, 296 bp, Glycine max
  Clone ID: LIB3106-050-Q1-K1-E6
atttctctcttcttcatcttgctcttacattttgggtaatgtttgaaacttgggggtagctgagctgtttgacaaaaatgaatattgcacaagttacagcatggcagcctgggatttgtgtgaaaaatatatctcagttacacaggcttcaatcaaaaccatgtgttttaccaaatagttttgagccttgcttacaaagcttaagagcaacacaatcggttagctcaaaatgttggcccatgttacaatctcggaaacctcttcatatttgcttaggccctgggaaaaggatgatg

SEQ ID NO: 21483 - DNA, 290 bp, Glycine max
  Clone ID: LIB3106-050-Q1-K1-E7
caagaacttggggagaagaacactttggattttggaaagtccataagtatggaaatagcagaactggtgagagctgggatatagttgtagacgaggaaacttattatgaggccgaacctcattatggatgggcggatgttgtgggtgattcaacccaattactttcaattgagcctcgggagaggcctcctggtgtcttgcgtaatttagactttggttcaccttcatcgtctgaagctcatgatgactcacctgatgaagattattcctcttcacaatgaagataaaca

SEQ ID NO: 21484 - DNA, 164 bp, Glycine max
  Clone ID: LIB3106-050-Q1-K1-E8
attgaaaaaaaaaaaaaataaaaaattaaatttaaaaaaaaaaaaaaaaaaaaaaaggaaagggaaaaaaaaaaaaaaaaaaaaaaaaaaaaaaaaaaaaaagcaagaaagaaaaacgaataaaaaaaaaaaaataacaaaagtatgacaaaggaggaaacaaa

SEQ ID NO: 21485 - DNA, 419 bp, Glycine max
  Clone ID: LIB3106-050-Q1-K1-E9
cccacgcgtccgcccacgcgtccgaacaattacaacctctgactcacccttccctctccttgcttgagcatgaaagcttccactctacccttttgcccaacccatctccccaaaacctctcatttctctcttcatctccttccaatggcttccattcccacactctcttcacccctacccacaatctctgctcactcctcaccccattcaaacccaaacaaccactgcactctctctcccacctctctcttcggcaccaggatcaccctcctacgcgccacctcatcgtctcgttccctccccaacaccaattgccgtgcggcatcagccaccgtgtcgtttagcctccccaccccgaaacccctttcggatacgcctgagaaaaccccaaagtggtcggcgagggctataaaatcata

SEQ ID NO: 21486 - DNA, 413 bp, Glycine max
  Clone ID: LIB3106-050-Q1-K1-F10
gttgttgttgtagctatcagtaggtgaatttaaaaccctagccctcactctcaccaccatggtctcaagtcttgagctatgttccagggataatcgggcagggatgtacaaagaacgagagcgaggtggtgtttccgcttccgcctctaaatccgaggatcggaagcgaatcaacgactttctcgatgagcacttaggacgatcctctccttccacttaccgccccatcaacaccgcttccaagaattccaacctacaagtggaggaatctgagacggatagtgaagagtctgatgtctagtggctctgatggtgatgacacctttgggatctcgtggttctgtaatctaagagggcatgagttcttttgtgaggtggatgatgattacatacaggattactttaacctttgt

SEQ ID NO: 21487 - DNA, 210 bp, Glycine max
  Clone ID: LIB3106-050-Q1-K1-F11
gattgtttgttgttgtaactcgttcttctttttttgttgttctgtgtttgtgtttgtttgggctctgacctgaaaatgtcttgctgcggtggtaactgtggttgccgaagcttctgcaagtgcggcaaccgctgctgaggcttcaagatgtacccagacttgagctacactgagtcaaccaccaccgagacctttgtcattggagtggca

SEQ ID NO: 21488 - DNA, 277 bp, Glycine max
  Clone ID: LIB3106-050-Q1-K1-F2
acgaccaccgcgcggcaacaagcgagatagccgtttctagtatcagggactggagggagcatggcttgattcacaccgtgatccgtgatctcctgattggtcactcgaatgtcttaagcaggccttgatttgcgattgccagggctgtagcaagggctacactgccaactactgatgatgcttacttcattcatgatgatgcataatgagctttcaagatggcttagggccaatctgcatgtgctacaatacaaatcagttcgatgctggacctgac

SEQ ID NO: 21489 - DNA, 447 bp, Glycine max
  Clone ID: LIB3106-050-Q1-K1-F3
ctgatatgctagccaaactttcttcgaccattaatggtgtacccattggcacaccgactcgtctgagctggctctttatctatccggagggaatttataagctcatgacatacataagggacaactacaataatccaccagtgtacattaccgaaaatggcgttgcggaatcaaagaatgactcacttgcaatcaatgaagcccgaaaggatggtattcgaattagataccatgatggccatctcaaatccctgcttcatgcgatcaaagatagagttaatgtgaagggctactatatatggtcattttcagatagctttgaatgggatgctggttacacagctcgatttggcatcatatatgtggattacaagaacaatttgagtagataccctaagtcctctgcgttttggctgaaaaaattccttctcaagtgatctaaatcta

SEQ ID NO: 21490 - DNA, 351 bp, Glycine max
  unsure at all n locations
  Clone ID: LIB3106-050-Q1-K1-F4
cccaccgtccggcaatcataaagaaagctgtggctagaatcagggaattgaaggagcttggcttggaattcactgtcataagtgttggcaagaagggtaactcttatttcatcagaaggccttatattccggttgacaggtttctagaaggtggcacacttccaactgctaaggaagctcaggccattgctgatgatgttttctcactctttgtgagtgaagaggttgacaaggtggagcttctatacaccaagttcgtgtcgttggtgaaatcggatcccgtgattcataccttgcttnctctttcgccaaagggagagatttgtgatgtgaattgtgtgtgtggtgatg

SEQ ID NO: 21491 - DNA, 375 bp, Glycine max
  Clone ID: LIB3106-050-Q1-K1-F6
gtttttgtagatagaagccatcagtcatggttaggcttctatcatcgtcttcaccccctggttttacatttctcactcgattcgaatctgcaactgcaagattcaatttctctccgtcaacacgttctcactctcacttgaagcggctctcctcaatttgttgccagcatgcaaatccatctcctttttcctcttccactccctttctcgcttcttccaaccaccccattaattttccatccttttcctcttcttcagatcccttcacactcgaatcccattctttcaatcaaatcaaaaccggggctttcccaaaacccaagggtattacagcttggacgcttggaataccttctggtcttggtatgaacctaa

SEQ ID NO: 21492 - DNA, 399 bp, Glycine max
  Clone ID: LIB3106-050-Q1-K1-F7
actttttctacttaccttttctcttaatccttatacgatggcagccatggcaaccacaacgctctcttcaaaccccaaactctcattcttcaacggaaagcccgtcacatattcttcccgcgtcgcgcccaccaccaaattatcctcatccaaacaaggcacaatttccatgtccctaaccccacccccctacgacctccagtccttcaaattccagcccatcaaagaatccatcgtgtcacgggaaatgacgcgccgctacatgaccgacatgataacctacgccgacaccgacttgcgaatcgtcggagccggttcggccgggctctcctgcgcgtacgagctcagcaagaaccccggcgtgagcgttgccatagtcgagcagtcagtgagccccgg

SEQ ID NO: 21493 - DNA, 460 bp, Glycine max
  Clone ID: LIB3106-050-Q1-K1-E10
gtttgttgttgtaactcgttcttcttcttatgttgttctgtgtttgtgtttgttttttctggtcaccggaaaatgtcttgctgcggtggtaactgtggttgcggaagctcctgcaagtgcggcaacggctgcggaggctgcaagatgtacccagacttgagctacactgagtcaaccaccaccgagaccttggtcatgggagtggcacctgttaaggctcaatttgagggtgctgaaatgggtgtgcccgctgagaacgatggctgcaaatgtggaccaaactgctcctgcaacccctgcacttgcaagtgaggtgttcggagagcaagcttcaagcagagatagcccttaattaggaataatgataaactattaatgtgtagctaaaaacttatgtattatgtctgtgatggttttcgtgcactctggtattttggggtaaacaatcattcttagaata

SEQ ID NO: 21494 - DNA, 256 bp, Glycine max
  Clone ID: LIB3106-050-Q1-K1-C4
cgtaagtttattattcttctctttgcgtctccatggacgaagaagaggtgcgcaagatcgggagcaagttcgacaagaacggcgacggcaagatctcgtgcgcggagctgaaggagatgatggcggcgctgggatccaaaacgacgtctgacgaggtgaagcgcatgatggcggagctggaccgtaacggcgacggctacattgatttgaaggagttcggcgaggtccactgcggcagctgttgctactggaggga

SEQ ID NO: 21495 - DNA, 370 bp, Glycine max
  Clone ID: LIB3106-050-Q1-K1-C5
ccaacacgtgtttctgcaaccatggtgtccttcactctatcccctacaaccccttgtcaggtatgctcaggaaagagtgggattttcagaccctcacaggcacttgttgtgaagccagtgaagaggcagatgatggggaagagcaagggaatgagaattgcatgccaagccaccagcattcctgctgatagagacgctgacatgggcaaaagacagctcatgaatctgcttcttcttggtgccatttcactcccctctgctggaatgctgattgcctacacctacttttttagccctccaggttcaggtgcttcagctggtggtactggtggcaaagatgctgatggaaatgatgtaatggcagagaatt

SEQ ID NO: 21496 - DNA, 309 bp, Glycine max
  Clone ID: LIB3106-050-Q1-K1-C6
attgacggatcgatccacagcatatctgtaagcttattgaactaaactgtttaactttaatccaaaataagcatatcgcatgagaaggtgtcccaagaaggaagacagaccctcaggcacgttataattaaaaaaataaattatcgtcctattaataattgatttagcgagtgagtgtttcttttttttctctctctctctgaacttgaactcaacccttacttcgttccgcgacaacgatgaccaactacggcacaattccaacctccttcttgcctttgaccaacctcgacttcatctcacgcgcca

SEQ ID NO: 21497 - DNA, 399 bp, Glycine max
  Clone ID: LIB3106-050-Q1-K1-C8
tcgctcctgaagtcttgaatcgacggatcgacccagcgcgtgcgtccacgcgtccggatcgagataactagaatcagtgcgatgaatatgtatgagcttgcaagaatcgtagctccagggaaagtcgcacgcaaccgcgagcgctcaatacgagaaggccgctgataaagccaagatgaagctcacaggcttcataggtgagaagagatgcgctcctgtaatgctccgaatggcatggcactctgctggaacttacgacgtgagctcagagaccggtggtcccttcggaaccataaagcacccatccgaactcgctcacggcgctaacaacggtcttgacatcgacgttaggctcttggagccactcaaagaggagttggctattttgagctacgccta

SEQ ID NO: 21498 - DNA, 448 bp, Glycine max
  Clone ID: LIB3106-050-Q1-K1-C9
gaaaaaaggagagtgcttagagagagagctttacatattattttcattttcatcttttttggagtatcaacaaatggcaaccactgtgatgaccactctcccccaattcagtggtcttagaccccaattctcagctgcccctgtgaagaacttggttgctgtgcaacccatgagtcgcaaggggaagggtgcattgggagctcgatgtgactacattggttcatccactaatctgattatggtggcttctacaaccctgatgctgtttgctggaaggtttggattggctccatcagcaaacaggaaagccactgcagggctaaagctggaggtgagggactcaggcttgcagactggtgaccctgctggcttcacccttgctgacaccttggcctgtggatctgttggccacatcattggggttggggttgttcttggtctcaagaac

SEQ ID NO: 21499 - DNA, 263 bp, Glycine max
  Clone ID: LIB3106-050-Q1-K1-D1
cccacgcgtccgcccacgtttccgcccactcttccttttgaatatagacaagaacacagagagagaccttcaaatagtggtagagaaagggtcacagctcctaaacaaggccaaagctgagctcgttgattttacaagctatgcagatgtctcaaaccagccagttcaagacccccaagtgcactaacaacccggttcgtttgtaaatttttagtgaatgcaccattcaaacatttcgcattactgcttatatatagttcaat

SEQ ID NO: 21500 - DNA, 451 bp, Glycine max
  unsure at all n locations
  Clone ID: LIB3106-050-Q1-K1-D10
cccacgcgtccgcccacgcgtccggtttgctgngagctataagctagtttatcgtgaggagaatatgaagttgtttgttttctttgttgctgcagtagttttggtagcatggccatgccatggcgcaggctaccaaaggttccctctccgaatgaaaactggctatggtgagcgttcttcggaggtaaaatgcgcaagttttaggcttgctgtggaagcacacaacatccgagcctttaaaaccattcctgaagagtgcgttgaaccaacaaaggactacattaatggcgaacaatttagatcagactctaaaacagttaaccaacaagctttcttttatgctagtgaacgcgaagtccatcacaacgacatatttatattcggcatagattacaccgtactctctaatatcccatactatgaaaaacatggatattgggtggaggaattt

SEQ ID NO: 21501 - DNA, 460 bp, Glycine max
  Clone ID: LIB3106-050-Q1-K1-D11
cggacgcgtgggtagggttttaggaaaagatactgtctcgcgagtgaacacaggttacagggatggctttctttggtagaattgggaatttattaagacagacagcaagcaggcaggttagttcagaattgcgatcatccccttcgttttttcaggctatacgcagtatgtcatctgctccaagcacaaagctgtttatcggaggtgtttcatattctactgacgagcaaagtttgagggaagctttttcaaaatatggtgaagttgttgatgctaggataattatggatcgtgaaactggtagatccagaggatttggctttattacatacacttcggttgaggaggcatcaagtgccattcaggccttggatggtcaggacctacatggtcgcccgattagggtgaattatgctaatgaaagacctcgtggatatggtggcggtggctttggttcata

SEQ ID NO: 21502 - DNA, 398 bp, Glycine max
  Clone ID: LIB3106-050-Q1-K1-D12
cccacgcgttcgcccactcttccgcccacgtttcctctcacgcgtccgcacgccatggctgacatcgccaccttccccttcaaactctctcactttccgactctcttctcttcttctgattccaaactcttcggccttcccctctccaatccctattccctcaaattcgacccttcttctctctccactacctctctctcctacgtcaaagcccgctactacggcagctgcagctgccctacccgctccctcaacgacttccgcttcctcaagtcctcctattccgactacgactataaagctctcgacctctccactctcatgtcagataccgtgaggcttattgatcagagccagaatattgtcggagtaatgtcaattgatgactccattcatat

SEQ ID NO: 21503 - DNA, 247 bp, Glycine max
  Clone ID: LIB3106-050-Q1-K1-D2
aggcatgcgtccacgcgtccgtatcgagataatttgaatttgtgtgatgaaaatgaaggtccttgcttggttcgttgctacaattttggtagcatggcaatgccatgcgtacgatatgttccctctccgaatgaacactggctatggtgcccgtactccggaggtgaaatgcgcaagttggaagcttgctgtggaagcacacaacatctttggctttgagaccattcctgaagagtgcgttgaagca

SEQ ID NO: 21504 - DNA, 66 bp, Glycine max
  Clone ID: LIB3106-050-Q1-K1-D3
gtattattaaaaaaaatttaaagtaacattacattttaacatagacactaatctagatggcaagat

SEQ ID NO: 21505 - DNA, 423 bp, Glycine max
  Clone ID: LIB3106-050-Q1-K1-D4
acggcgtccgaccacgcgttcgtgcagcagaaggtgtgaatatagggatggcgggcatgtctggatgtaggggccgttggcagtgggcggaggcgaaatccatgggagtgggctgtaggttcccttcctcaactaccaaaaggagtttccggcctgtgattgcttctgtttctgctatctccgataataactctcactcttacactagcagcggaagaaagctagaagaagaaggcatcaaagggtcaggaactaccgtcagagatcgcaggttgcttagaattcgccaagagaaacgacagcgggaatacgacctccttaacaactaccctgcttgggcaaaagtcctggaaaacgcttgcaaagacgatgctgaactccgtgccgttctcggagatagcattggcaaccccgaactcatga

SEQ ID NO: 21506 - DNA, 420 bp, Glycine max
  Clone ID: LIB3106-050-Q1-K1-D5
gtgatatgcaaagcatgtctctctgtgcttttctctcctccacagcttcacacctcacttgccttgcctccgtctcttcttccacctctccactttcccgcaaattttctctcactttccgggaaaaaaacagaaccccaattgcaccacctcacaagctccccttcttctcagcaaggcctgcccccaccagagtagtgtaggtgaagtctcaggccacagcacctgcttcttctgaggctgtgaaggtgacaccggtgccttctgagatgaaggcatgggtgtatggagaatattggggtgtggatgttctgaagctggactccaatgttgctgtgcctgatgtgaaggaagatcaggtgttaatcaaaggtggtgctgctgctcttaaccctgttgatgccaagaggaggcagggaa

SEQ ID NO: 21507 - DNA, 377 bp, Glycine max
  Clone ID: LIB3106-050-Q1-K1-D6
accacgcgttcggcagcagaaggctgttaagttcgcgacggacggcatgggcacaggtctcggcaactcgccaaccgcaaacaccggaagaatccacgcgctcctcaacttcggcaaaaagaaggcggcggcgccgccaccgaagaaaaaggaagtgaaagtgaaaccctccggcgaccggctggtgtgggttcctaatgcggagccgccggagtggctcgacggaagcatgatcggcgaccgcgggttcgacccgttcggtttcgcgaagcccgcggagtacctgcagttcgacctggactcgctggaccagaacctcgcgaaaaacgtcgccggcgatgtgaaccgaaccagggtggaaggcgccgacgttaaac

SEQ ID NO: 21508 - DNA, 383 bp, Glycine max
  Clone ID: LIB3106-050-Q1-K1-D7
attagttcttaatttgtttcctcttgcttccttctccttctaaattattattactagtacaacttatcatatatatatatatatatatatacctctggttatagcagcaaactaggctagcttagcttgcactttgaaaatatatatacacagaccaagtacaaccccaagctctagctagctagggacatgtctagccgaagatccagacaacattcagggtctacaaggatctccgatgaccaaatcatcgaacttgtttccaaattgcgccaacttggtcctgagattcgcaataggcgaactgacaaggtttcagcgtccaaggttctacaagagacctgcaactacatcagaagcttgcacagaaaggtgagtgactt

SEQ ID NO: 21509 - DNA, 346 bp, Glycine max
  Clone ID: LIB3106-050-Q1-K1-D9
gtcatgagccacatatctactggtggtggatccagtttggagtcattggaaggcaaagagcttccaggagtccttgctctcgatgaagccctcccagttgccgcgtaagacaattttcagcttggaaaatctttccatcctcagatttcggggtcagcaatcttgtaaaagagcatatgttgtaggacccttccgagtccgttagtgtcaatcttatcatgcttgagttattattggcttcacacataaattgcgtgtaactggaaaccctggcttagagccatacattcgaataaatcttttagctgctgccaaataaagaaggccgactctagaagggctgact

SEQ ID NO: 21510 - DNA, 446 bp, Glycine max
  unsure at all n locations
  Clone ID: LIB3106-050-Q1-K1-C12
cacctttgttcactcttcttctcttgcggcttgggttttagcgcagcttcttctagatttaaggaagatgggtaaggaaaaggttcacatcagtattgtggtcattggccatgtcgactctgggaaatccactaccactggtcacctgatttacaagcttggaggcattgacaagcgtgttattgagaggtttgagaaggaagctgctgagatgaacaagaggtctttcaagtatgcctgggtgctggacaaacttaaggctgagcgtgaaagaggaatcaccattgatattgctttgtggaagtttgaaacaacaaagtattattgcacagttattgatgcgcctggacatagggatttcattaagaatatgattactgggacatcccaagctgactgtgctgntcttatcattgattcgaccactggtggttttggagctggta

SEQ ID NO: 21511 - DNA, 404 bp, Glycine max
  Clone ID: LIB3106-050-Q1-K1-A3
gtgatttcagtgagtgatcggagttcacttgatctcatcataatcgtcagcgtcaattgaagaagatgccgatcagaaacatcgccgtcggaaggcctgaagaggcgactcaccccgacacgttgaaggcggctttggctgagttcatctcaaccttcatcttcgtgttcgccggctcaggctccggcatcgcctacaacaagctcaccgacaactgcgctgccacccctgccggcctcatctgcgcctccatcgcccatgcattcgccctcttcgtcgccgtctccgtcggcgccaacatcttcggcggccacgtgaaccccgccgtcaccttcggcgccttcgtcggcggcaacatcaccttcctgcgcggcatcgtctacgtcatcggccagctcctcggc

SEQ ID NO: 21512 - DNA, 239 bp, Glycine max
  Clone ID: LIB3106-050-Q1-K1-A4
gagatttcagtgagtgatctgtgttcacttgtactcatcataatcgtcagcgtcaattgaggaagatgccgatcagaaacatcgccgtctgaaggcctgaagaggcgactcaccccgacacgttgaaggcggctttggctgagttcatctcaaccttcatcttcgagttcgccggctcaggctccggcatcgcctacaacaagctcaccgacaacggcgctgccacccctgccggcctc

SEQ ID NO: 21513 - DNA, 98 bp, Glycine max
  Clone ID: LIB3106-050-Q1-K1-A5
cccacgcgtgcgaaaaaattaaaatttaaatttaaaaataaaaagaaaaaaaaaagggaaaaggaaaaaaaaaaaaaaaaaaaataaaaataaaaggg

SEQ ID NO: 21514 - DNA, 235 bp, Glycine max
  Clone ID: LIB3106-050-Q1-K1-A6
atgcctctgccttattgtacttctttattatatatataatttgggcagtaagtacttttgattgagtcaagctatttatctgtttcagttgtttattgatgagaggcaaatattaaattgtgttttcgtttgtacaagtatgattcactgtattttgactattttctctgaatcatgaattatatttatctcccctaaaaaaaaaaaaaaaaaaaaaaaaacaaaataataagat

SEQ ID NO: 21515 - DNA, 359 bp, Glycine max
  Clone ID: LIB3106-050-Q1-K1-A7
cccacgcgtccggaaatagccaagttaaattctgaagaactacttactaccttggtattcgggggttgttcccagcttcttccttctgttatcaattattttatttaactttattcgcaccttgctaaattcttaagcttaggctggtgaatttccttttgttcagttatagaaagagaaggaaaatatgattagactcctgagaaacatgggttgtaccggatcaagaaaaatgttttgaaatcggatggttgttgtgtctaattgtctatagcagctgatattatttattagcataccattctgctgttgagggtaggtgatgaatgatgaggattcttatttgaaaaaaaaaataa

SEQ ID NO: 21516 - DNA, 241 bp, Glycine max
  Clone ID: LIB3106-050-Q1-K1-A8
gccaacagaagatgtttctccacattgttttcctcctttcccttctctcatccacttcccatgccactgtccaagacttctgtgtggcagaccttaagggtgcagacaccccttcaggctacccctgcaagccacctgcaaatgtaacttcagatgactttgtgtacacaggcttagctgaagctgcaaatgtcacaaacataatcaatgctgctgtgaccccagcttttggtgctcaatt

SEQ ID NO: 21517 - DNA, 280 bp, Glycine max
  Clone ID: LIB3106-050-Q1-K1-A9
caaagatctgcaactctctctcatgatttttctctcggtgttgccatgacggaaccgacagagccatccacgtcatcttcattggcgagggacccaaccaccgtggttcacccaaggcgcgagccattcgagcacggcctcttgccaatcccgcgcctcatcttctccgacccgacgcaaaccctaatctcgttgaagcagaagcttctcgagttatcctctaaccagcgagtcgactcggcggcaatctccgagtcactgcagatccccattgagcacg

SEQ ID NO: 21518 - DNA, 459 bp, Glycine max
  Clone ID: LIB3106-050-Q1-K1-B11
cccacgcgtccggggttttttcgcttctgttatacactctgttacggcgcaacctagcaggcttcaaatccaatggcttcagagaagaaactttcgaacccaatgagggagataaaagtgcagaagctcgtccttaatatctatgttggcgagagtggagatcgtctgaccagagccgccaaggtgttggaacaacttagtggccaaaccccagtgttttccaaagcaaggtacactgttcgttcctttgggattagaagaaatgagaagattgcatgctatgtcactgtcagaggtgacaaggcaatgcaacttttggagagtggtttgaaggtgaaggaatatgaacttcttagaaggaactctagtgatactggttgctttggctctggtattcaggagcatatcgatttgggaatcaagtatgatccttcaactggtatttatggaatggatttc

SEQ ID NO: 21519 - DNA, 450 bp, Glycine max
  Clone ID: LIB3106-050-Q1-K1-B12
aaaaagagagaagatgacgcggggaaagctttagatcgaagcgcagaagcgaaacgcagagaggaatcagaagggaaagggctctcagctcgaggccagagccgttggcctcaaagtcatctgccccatctgcaaggcccaacttgcaaatcaaaaccaactggttgatcattatgcttccaaacatccgaaggagaaacctcctgcagagtcaagctagttatatttgagcaaatggtacaaaaagtccccaaaaaattgctctctaggtgtgccttcgtgcttttaatgtaattctccctgcttgcaggcaagttgcaacatgttttaagttaatcatgttaatgtgcattattgtgagatcctaaaggatcataaaaactgcgtctatcattataagaatatcatcatgttgctaaacttgggggtggtcataaaggtagtatctgg

SEQ ID NO: 21520 - DNA, 269 bp, Glycine max
  Clone ID: LIB3106-050-Q1-K1-B2
atcgcatcaaaaaaaaaaaaaaaaaaaaaatttaaaaataaaaaaaaaaaaaaaaaaaaaaagaaaaaaaaaaaaaaaaaaaaaaaaaaaaaaaaaaaaaaaaaaaaaaaaaaaaaaaaaaaaaaaaaaaaaaaaaaaaaaaaaaaaaaaaaaaaaaaaaaaaaaaggggaggattaaaaaaaacaaaaaagtaacaaacaaaataagaaaaaaaaaaaatataagtattgaacaaaaaagattataaaaaaaaaagcccggataaaaa

SEQ ID NO: 21521 - DNA, 236 bp, Glycine max
  Clone ID: LIB3106-050-Q1-K1-B3
gccacgcgagcgaacacattcacgatcagattctctattaactgaataaagtgatggttgcatgaccagtaaggagactcatttccgatttgtggaacctcacgctcacctgttgcagcttcaacatcagcatcaactgaagcgtctttaacctcattgatgaagcgacattgtctaagaaaagtcgcgtactcggtgaggagttgtcagacggcgcagtggatccagtccgcaac

SEQ ID NO: 21522 - DNA, 437 bp, Glycine max
  Clone ID: LIB3106-050-Q1-K1-B4
gaagttaaataacaagagagtgagttaagtttcagtagagagaaaatgagcgtgaaggtgaattgcgtgggtggcgacactcataacgtcttcgtgtacggtagtctgttagctgatgaagttgtccataccctattgaagcgcgtccctccaaccgcacctgccatccttcacgactatcacaggtttaagatcaaaggtcgcgtttatcccgctattctccctgtccagaataacaaagtttatggcagggtgcttcttggtatctccggagtagaactagatattttagatgaatttgaggatgttgaatatactagaactgatgttgaggtttccttgaaggaatggaaacaagttcacatgaatgatttcgtcaagatgactgatggctttaggcaagagttggagttaccaggatcaaagccaagagtgca

SEQ ID NO: 21523 - DNA, 356 bp, Glycine max
  unsure at all n locations
  Clone ID: LIB3106-050-Q1-K1-B6
atgaacccttatcatttagtctcaatggctacaatggtggcacctttgcaccaggtagatgttctaaatacgttgccaattgtagtgctggcgattcatccactgaaccctatatcgttggacactacttattacttgctcatgaatctgctgccacattatacaagacaaaatatcaggctcgtcaaaaaggacaaattgggatcactaatccaacacactactttttgccaaaatctcaaagtgctgcagattacaaggcagcaagtagagctctggacttcttcttatggtggtattctgatccagttttctatggtgactatncggagagtatgaaatcttcagtaggttct

SEQ ID NO: 21524 - DNA, 412 bp, Glycine max
  Clone ID: LIB3106-050-Q1-K1-B7
gttctttctctcgcaatcttcactacattcaccgagcatttgcattcacattgaatatggctgagactacacaatctaatgctgagttgttggagtggcctaagaaagataagcgccgcttcctgcatgttgtgtatcgtgttggtgatcttgatcgcaccattaagttttatactgaatgttttgggatgaagcttttgaggaaaagagatattccagaggagaaatatgccaatgcttttcttggatttggccctgaacaatcccattttgttgtggaattaacatacaattatggggtgacctcatatgatattggaactggatttggacattttgctatcgcaacttcagatgtttacaaattggttgaagacatccgggcttaggggtggaaatgtcaccagggaag

SEQ ID NO: 21525 - DNA, 224 bp, Glycine max
  Clone ID: LIB3106-050-Q1-K1-B8
ggcaacaaggatttggaatcagagttctactttggatcctatgtggtcagaatgctctacgatgtgagcgaatctgggagtggcaaaacaggcaatagaaataacaaagctgttaattgtccaaataagcaaggctaccgaagctgcttgccttccaaaaacggtgttggccctaagcaaagttgtggcgattacaccagggtttgctaagaactcgttcaaac

SEQ ID NO: 21526 - DNA, 460 bp, Glycine max
  Clone ID: LIB3106-050-Q1-K1-B9
cattatagcaattcacacaacacaacacagtttaatggggaggttgtttgtggtgaatctggaagggaagatctatagctgcaaacactgccatacccatcttgcgctttacgatgacatctactccaggacattccattgcagacatgggaaagcttatctcttcaataaggttgtgaatgtttctattggcgaaatggaggacagaccgatgatgactgggttacataccgtggctgacattttctgtgtgggttgtggatcaatcgtgggttggaaatatgagactgcctatgaaaaaaaccagaagtacaaggaaggaaaatcagtgcttgaacggtacaaagtgtcaggtcctgatggaagcaattattggatcagcaatgaggcacatgttggtggaagtgatgcagatgatgcttagtcatcctaccattcccaattcaccgtatttggatga

SEQ ID NO: 21527 - DNA, 335 bp, Glycine max
  Clone ID: LIB3106-050-Q1-K1-A2
cccacgcgtccgggcctcacaggtttgcaattctgcttccagagccgcgaggtcccttctgtcctctcgttttcactctcaaggacgtgcgcttggggctgctgcggctgtttcattgagcagcaaagtgcctcttttttacggaaagaacggttctggaaatggatccgcttcttcatcatcatcatcatcatggatttcaggagctcttgctcttcctgccgcagcttacatgttccaagatcaggaggtgcaggcagctgagctggagcgcactttcattgccattaagcctgatggaatgcagagaggcctgatttctgagattatatctc

SEQ ID NO: 21528 - DNA, 383 bp, Glycine max
  Clone ID: LIB3106-050-Q1-K1-C10
cccacgcgtccgctctccgcagcagccacacttcttcgccgtttcagctgaagagccatccgcaggtaagcaatggttaagcataataatgttatccccaatgggcacttccggaaacactggcaaaactatgtgaagacttggtttaatcaaccagcccgaaagaccagaagacggttggctcggcagaagaaggctgtcaagattttccccaggcctactgctggatctctcaggcctattgttcatggccagactctgaaatacaacatgaaagtcagagccgggagaggattttcactggaagaattgaaggctgcaggaattcccaagaaaactgctccaactattgggatttcttgtgatcaccgcagaaagaatcg

SEQ ID NO: 21529 - DNA, 446 bp, Glycine max
  Clone ID: LIB3106-050-Q1-K1-C11
cccacgcgtccggataactagaaacagtgctatgaaattgaaggtccttgaattcttcggggctacaattcaggtagcatggcaatgccatgcgtacgatatgttccctatacgaatgaacactggctatggtgcccgaactctggaggtgaaaggcgcaagttggaggcttgctgcggaagcacacaacatcatctggctttgagaccattcatgaagagtgcgtggaagcaacaaaggaatacattcatggcgaacaatatagatcagactgcatagcaggtaaccaacaagcttactttgatgccagagacctcgaagtagatgccaaggacacattggtgttcagcatagatggcagcccactctctaatattgcatactacaaaaaacatggatatagcgtggagaaatttaactcgaccttgaatgattaatgggtttac

SEQ ID NO: 21530 - DNA, 423 bp, Glycine max
  Clone ID: LIB3106-049-Q1-K1-G7
cccacgcgtccggtctcaagcaaccatggcaatggcaacccaagcctctctcttaacccgacccctctccggtctcaaagccagcgaccgcgcctccgtgccatggaagcaaaactccagcctctccttctccagcccgaagcccctcaagttctccagaacaatcagagcagcagccgccgggtatggtggaaggaaggaggagtctgaatatggatctgggtatggtgggagaaagcaagaatctgaatatggatccgggtatggtggaaggaaggaagagtctgaatatgggtcaagatatggaggaaggaaggaggaatcaaaatatggatcagggtatgatgggagaaaggaggagagtgaatatggatccgggtatggtggaaggaagcaagaatctgaatatggatccgggtatgg

SEQ ID NO: 21531 - DNA, 415 bp, Glycine max
  Clone ID: LIB3106-049-Q1-K1-G8
agaaacagtgtgatgaaaatgaaggtccttgttttctttcgtgctacaattttggtagcggggcaatgccatgcgtacgatatgttccctctccgaatgaacactggctatggtgcccgtactccggaggtgaaatgcgcaagttggaggcttgctgtggaagcacacaacatctttggctttgagaccattcctgaagagtgcgttgaagcaacaaaggaatacatccatggcgaacaatatagatcagactccaaaacagttaaccaacaagcttacttttatgccagagacctcgaagtccatcccaaggacacatttgtgttcagtatagatggcaccgtactctctaatattccatactacaaaaaacatggatatgggtggagaaattaactcgacttgtatgatgaat

SEQ ID NO: 21532 - DNA, 231 bp, Glycine max
  Clone ID: LIB3106-049-Q1-K1-G9
gattggtgcaagtgcatatgcttgcttattcaaacttagcaagaagatcattgggctgcgtgagcgttaatttttgttggttcatacttttttcaagaacaactgataagatttatcaagaatattttattttaatcaaaaggcagcaaaagaattgtgacgctgacggcaccaggttccttgtaacaggatctctatgtattttactgacattcaaaatattttactgac

SEQ ID NO: 21533 - DNA, 428 bp, Glycine max
  Clone ID: LIB3106-049-Q1-K1-H1
ccacgcgtccggttctaacatacatcaaagatattgctagatgttcaaactgttaagacacggggagtgtaactttcaatctctgtaattttcgaatttgttggacaggggatggttaggtctgagaaaacaaataattttttgatatttactgcaaaagtttataacttatgctgaaaggtcttcaaagattcagtgagattaatgatttcaggcgcgcatgcaagaaatgaaggaaaaagaactcaagtaccttgggaacggcgatgcaaattcccatgtttgtaaagtatgttttgaatctccaactgcagcaattctgcttccatgccgacatttttgtttgtgtaaatcttgttcacttgcttgttctgagtgtccaatatgccgcacaaatattacagataggatttttgcttttacataac

SEQ ID NO: 21534 - DNA, 362 bp, Glycine max
  Clone ID: LIB3106-049-Q1-K1-H10
gttcactgtcactttacccaatcctaacactttcttctctctgttttccttcttggtcgcgtcaatggagttggacggcgttctcctcggcatgtgcaaccctctcctcgacatctctgccgtcgtcgacgacgctttcttgcaaaaatacggtatcaagttgaacgatgcgattctcgccgaggataaacacaaacctatgtatgaagaattggctaacaatcctaatgtggagtacattgctggaggtgctactcagaattcaatcaaggttgctcagtggatgcttcaagcaccaggtgccacaagttatataggttgcataggaaaggacaaatttggagaggagatgaagaagaaat

SEQ ID NO: 21535 - DNA, 363 bp, Glycine max
  Clone ID: LIB3106-049-Q1-K1-H11
cggacgcgtgggcttcgctgcccccaacgttgtgccattggcacccacaaagagtgtctgccatattaccatctttcccaccaaattgaaagccccgcgctcctcacctcgttactctccgattagggttgcaaccgtggagcccgacacttcaactgtcgactacaactctgcgttctcagtgtttcctgcagaagcatgcgaaactgtaggaggggaagcctgcatggcggagatgtaccctgaaacgaagctacagccagaggctaagactccacgagtcgttacagagaacgttgagagagagtatcttgaatacgatgatcctaaaacggtatttcgaggagaggcttgtgatgatct

SEQ ID NO: 21536 - DNA, 413 bp, Glycine max
  unsure at all n locations
  Clone ID: LIB3106-049-Q1-K1-H3
cccacgcgtccgatgatatggagcttgatgatgcagtccacacagcaatattgactctgaaggaagggtttgagggacagatctcangaaaaaacattgaaattggcataattggagctgataaaaagttcagggtattgacaccagctgaaattgacgactatttggctgaagtagaataatctgcaatgaagaactcttgtgttcctgaagttgtttgtttcacagttgggtttaattggtagcttaattattgacattgtgatggcaatagtgaatttgcgagctactcgttgtgatgaccagcaagccttcagataaacccttttccaaagtcatcaacattttcaaacaaacctagtttgtttagacggtgcggaatgacttaatgactattgctaatttattatttt

SEQ ID NO: 21537 - DNA, 229 bp, Glycine max
  unsure at all n locations
  Clone ID: LIB3106-049-Q1-K1-H4
ctagatcttacggtccancgtgaacgtgatggattctggatgtaaagggaaattcatgagaaggtcactgtattggttgaattacagaaaattaaccctggtattgttgtatatgaggctgctgcatgccgcttgatatctgatactgaatattgatgcaggcacagtctattcgatttaatgggtagcatgctgatacgtacatataaatttttctacttattttttt

SEQ ID NO: 21538 - DNA, 385 bp, Glycine max
  Clone ID: LIB3106-049-Q1-K1-H5
attttggcttctgcctttccttttccagggagctcattgacaatggctgaaacaaagtgggtgaggaaggacaaaagatggtctctccatggaatgacagctctagtcacaggaggcacccgaggcatagggcatgccattgttgaagagttagctgagtttggagcaactgttcatatatgtgcacgtaatcaagatgatattgataaatgtttagaagagtggaaaaacaagggacttaatgtgactggttcagtatgtgatttactatgttctgaccaacgtaaaagattaatggaaattgttggctccatctttcatggaaagctcaatattctagtgaacaatgctgctacaaatataacaaagaagataacagattaca

SEQ ID NO: 21539 - DNA, 310 bp, Glycine max
  Clone ID: LIB3106-049-Q1-K1-H6
gacacagccattgtttgtttactttccattgattgagcgaaagctttgttttttctgcgagcattttccattgggtggaagaaagtctcaacctttagtcgaaagagcaaggatctgagtgagtgagcgatcatgtgtggtggtgcgattatctccgacttcattccagcgggtcccgccggcggggcgcatcgcgtgaccgccgacatcctgtggccgaatttgaggaagcggttctcgaagtcgctgctggacgatgatttcgaggcagggttcacagaattcgaggatgactcggaaatcgaggatg

SEQ ID NO: 21540 - DNA, 310 bp, Glycine max
  Clone ID: LIB3106-049-Q1-K1-H7
cccacgcgtccgtccacgcgtccgcccacgcgtccgtctaacgaaagagcgagaaagcggagacagccatggcgtcgtttcttcaatcgtttctggatccgaagaagaactggttcgccgctcagcacatgaaatccctctccaaacgcctccgcaaatatgggctccgatacgacgatttgtacgatccttactaccatctggatgtgaaggaggcgctgaatcggcttccgaaagaggtggtggacgctcgccacgcgcgtcttaaacgcgccatccatctttccatgaagcacgagtacctccctga

SEQ ID NO: 21541 - DNA, 349 bp, Glycine max
  Clone ID: LIB3106-049-Q1-K1-H8
cccacgcgtccgtccacgcgtccggtgttgagaggtgaccacaaggagaagatacgcgtgattctggagccaaagcctgatgaatcatgatcatatgcaattcattatccatgcatccatcctatactgcatgtatatacacctcatatgccaggaacgaatgcagctgtgtatgtgtattcttaggttgtatcttgcttcataaaaacaggtccaagtgtacatatgtactatgggactgccagctcatcatccttttaactttctcattattaaacttaatataatttgccacgtctattttgcccccatacaaattcatacaaggggttgaaaaaaaaaattttaa

SEQ ID NO: 21542 - DNA, 368 bp, Glycine max
  Clone ID: LIB3106-049-Q1-K1-H9
cccacgcgtccgcccacgcgtccgaaacaatgcaggaatttttggaacccctttcgtgcggtctgaagataacatcgaactacaatttgccacaaatcatatacgtcattttcttttaacaaatctgttattggatactatgaagaaaacaacacatgaaagtaagaaacaaggaagaattgttaatgtctcctcacagggtcatcaattcacctatcgggaaggaatcctttttgataaacttaatgatcaatcaagttatcaggcattccgtgcatatggacagtcaaagcttgctaacattttacatgccaatgaacttgctagacgtcttaaggaagatggggtaaatattactgctaattctc

SEQ ID NO: 21543 - DNA, 399 bp, Glycine max
  Clone ID: LIB3106-050-Q1-K1-A10
caaaggtctgcaactctctctcatgacttattactctgtgttgccatgacggaaccgacagagccgggcacgtcatcttcattggcgagggacccaaccaccgtggttcacccaaggcgcgagccattcgagcacggcctcttgccaatcccgcgcctcatcttcttcgacccgacgcataccctaatctcgttgaagcagaagcttctcgagttatcctctaaccagcgagtctactcggcggcaatctccgagtcactgcagatccccattgagcacgccaggctcgtccttgatacccttgcctcgattctgcactccgacttcgaacctctcgtcgtcggcaagctcgtaaaaatcgattccgtctgcgtctacgttcatgatctgggttttgtt

SEQ ID NO: 21544 - DNA, 267 bp, Glycine max
  Clone ID: LIB3106-050-Q1-K1-A11
ttcgacgccacgcgtccgcactcacaaaatccatgccttcccaaacgttacaccagagttaaaaacaactctgcaattaaacttgacatcttatgatcctcccaagggcaggccctttggtggcccaaaaccaacttttttaccatgtcaagcttcttaaccaggaacttcggcggcttcttcggcggattcggtggccaatttggcgtcggttaaagcccaaagtagtaatgatccacaagctccgaaagaacgccccaaaagccc

SEQ ID NO: 21545 - DNA, 318 bp, Glycine max
  unsure at all n locations
  Clone ID: LIB3106-049-Q1-K1-G4
cccacgcgtncggtctcaaaggcccacggttcctcactcctcttccatagcctgcggcctgtagtctcatctcctggtctccagtgagatgaaccctagctccaattggtccctttaatcaattacctcttaattagtaattacttaatctcaattagcctttcactctcccacacaacaacatcatgggcgtcaaaggttttgtcgaaggaggcatcgcttccatcattgcaggatgttccacacacccacttgatctcatcaaggtccgcatgcagcttcagggcgaaaacaatttgcccaaaccggttcaaaatc

SEQ ID NO: 21546 - DNA, 438 bp, Glycine max
  Clone ID: LIB3106-050-Q1-K1-A12
cccacgcgtacgcccacgcgtccgcatcgtttcccatcaccaacacccacacccaccaccagcatctgctcccaaaatattggcgcgctaccaatgaccaccattgtcatgcaaacataaaccgatcctttactcttgcattccatctgcaatttctttgatctcatggctccgaaacgacgttctaagaaaggcgagtcgcgaatggacgcagcactcgacgccatgaaaccctacggcttacccaacagactcgtccgaacaaccgttaacagtctcctcaaagtttaccgtggcaacggtggctggttcttcatcgaagaatccgagtactctctgctgatcgagacgcttcttgaaaaacaagccaattcttcacctcaagatcgtttgatagatgctaatccagatggtcccaatgaggcatcggacactgta

SEQ ID NO: 21547 - DNA, 253 bp, Glycine max
  Clone ID: LIB3106-049-Q1-K1-E8
aaaaaaatctcaaaataaaacaaccaaaccacacactttacaccctcttcaaaatcgctggcaaggtccaggacaagaagaaaccatgtcttggttcaatctaaaatggtggggtcctaaaaccttcctttccgaccctccaatttcttcggttgtctaacctttaagtcctacaaaccactcatcctctacgctctaacacaatagggctgaaacaaccatgtcggagaataaaacagttactggtacaggg

SEQ ID NO: 21548 - DNA, 107 bp, Glycine max
  Clone ID: LIB3106-049-Q1-K1-E9
ctaataaaaaagacacggctcccccaccttcatccaagcccgccaagtctggagaaaggaagcataagaccccacaccgcagcgaaggaaagcccaaggagaaggcg

SEQ ID NO: 21549 - DNA, 420 bp, Glycine max
  unsure at all n locations
  Clone ID: LIB3106-049-Q1-K1-F1
gccacgcgtncggaaataactaaaacagtgtgatgaaaatgaaggtccttgttttcttcggtgctacaattttggtagcatggcaatgccatgcgtacgatatgttccctctccgaatgaacactggctatggtgcccgtactccggaggtgaaatgcgcaagttggaggcttgctgtggaagcacacaacatctttggctttgagaccattcctgaagagtgcgttgaagcaacaaaagaatacatccatggcgaacaatatagatcagactccaaaacagttaaccaacaagcttacttttatgccagagacctcgaagtccatcccaaagacacatttgtgttcagtatagatggcaccgtactctctaatattccatactacaaaaaacatggatatggggtggagaaatttaact

SEQ ID NO: 21550 - DNA, 419 bp, Glycine max
  Clone ID: LIB3106-049-Q1-K1-F10
gaacaacgatcagttacatttcgctatattatcattgcttacatttatccacatgagcgcattcgctcaaatctgcaacatgttattatatcatggcattcatgtcactttcttgagaactgcatgcaacattctcagaatcagatcaactcttaatctcaatccaaccatgaatgttatctcactaaaatggctaaatggtataaccaacactactgaattgccacctcacttagctggaaatctcatacacgcccttgacctcactcaagatcaagtgaagtcccttttggtggaactcaaaccccactatgttttctttgactttgcacaacattggctcccaaaattagcttctgaagttggcatcaagtctgttcatttctcaggctactcttgcacttctgatgcttacatta

SEQ ID NO: 21551 - DNA, 279 bp, Glycine max
  Clone ID: LIB3106-049-Q1-K1-F11
gttcagtctttcttggaactttgttactctcacacatgtctcgctccgtgcctttggtggcaaccatttttgtcttgcttctgcttctggtggccactgagatgatggggccaacaatggtggcagaagcaagaacttgtgagtctcagagccaccgtttcaaggggccatgtttgagtgacaccaactgtggctctgtttgccgaaccgaacgtttcactggaggacactggccgggcttccgtcgcaaatgcttctgcaccaaacattggtaatttt

SEQ ID NO: 21552 - DNA, 440 bp, Glycine max
  Clone ID: LIB3106-049-Q1-K1-F2
tcagattccaaatatagcctcacatgaaagcaaagcatgaaacataatcaacatttactgggaggaatccttggatcatgaaacctcaacatttcctccacatcctcccatgaagcctccgacgaccgacccgaacttgtagggcatcgtgacgatgtatttggcttccggcagcgcggaggggaaccaacgacggcagcagtgctgttgctggggaagagaatgatgttcgcagacgccgcagtgttctgggtgctggttgctatagaccccaatactttttttctcgaatgccattgttcctagtttcattgaacataagtgaggattttgttgtgtgataacgattccaagagtttttaaggggtttttgttcttcttttgacatcctcaattcaaaccttttcctttctttatttggtattaaatattttttctga

SEQ ID NO: 21553 - DNA, 442 bp, Glycine max
  Clone ID: LIB3106-049-Q1-K1-F3
cccacgcgtccgctttatccttcatttgacaagggaagaagaatgaaaatagaataaaagaggagggaatgtagaaaaaataaacagaattcttcattgtcatttggtttgatttatctatgatattggtaactgtactattcactaaagaaatgaaatgcgcaacttaaaggattgctgtgagaaacacacaaactctttgacttttagacctttcctggagagtgcgttgaagcaacaccggactgcattcatggcgaacaatattgatcacacttcctatcagtttaccaagccgcttacttttatgccatagaccttaaattccattccaaggacacatttgcgttcagtataaatggcaccgtactctctaatattccatactacaaaaaacatggatatggcgtggataaatttaactcgaccttgtatgatgaat

SEQ ID NO: 21554 - DNA, 421 bp, Glycine max
  unsure at all n locations
  Clone ID: LIB3106-049-Q1-K1-F4
tcgcccacgcgtncgatttttatttatattattggttaacaaatgattgacccttgccttttacttgttacattcgcactaatttaacttggggaggacgaaaataagtttctaattgatgctggattttgcaggccttaatcttctgtttctgcagaccttacctgttctcactgaatgctgaagtagcctaatcatgaatgcaaagggacataaatttgtgagggttgaggactggaaatcaaagtcatcttttaatcccgagcaagaaaattctattaacaatgggaatcacaaaaaaagacctaatgtgggtgcgggtttgaagagtataagaagaaggctggagagtgtgtcaaagaagatgaagaacttgacaagagcttcagctgtccatcctgtaagtgatggaaagaaaaag

SEQ ID NO: 21555 - DNA, 443 bp, Glycine max
  Clone ID: LIB3106-049-Q1-K1-F5
gtttatcgtgaggagaatatgaagttgtttgttttctttgttgctgcagtagttttgggagcgtggccatgccatggcgcaggctaccaaaggttccctctccgaatgaaaactggctatggtgagcgttcttcggaggtaaaatgcgcaagttttaggcttgctgtggaagcacacaacatccgagcctttaaaaccattcctgaagagtgcgttgaaccaacaaaggactacattaatggcgaacaatttagatcagactctaaaacagttaaccaacaagctttcttttatgctagtgaacgcgaagtccatcacaacgacatatttatattcggcatagataacaccgtactctctaatatcccatactatgaaaaacatggatatggggtggaggaatttaatgaaaccttatatgatgaatggggtaacaagggcga

SEQ ID NO: 21556 - DNA, 450 bp, Glycine max
  unsure at all n locations
  Clone ID: LIB3106-049-Q1-K1-F6
caaacctgatgtcttcaagagtccaaattctgagacctatgtcatatttggtgaggcgagaatagaggacttgagctctcagttgcagacacaggctgctcaacagttcaggatgccagatatgggatctgtaacggcaaaacaagaagatgctgcagctgcagcagtgcaacctgaagaagaggaggaggttgatgaaactggtgtggagccccatgacattgatttggtgatgacgcangcaggagtgtcaagaagcaaggccgtcaaggctctcaagactcacaacggggacattgttggagccatcatgcaactcactacttaattgggggtttatgttctatttgtatgtttttttgggaatgatatttagaactagtgccgtttctatgttataaaccgaatcaacataaccgttttatgtttgggatttgggtttacccttta

SEQ ID NO: 21557 - DNA, 91 bp, Glycine max
  Clone ID: LIB3106-049-Q1-K1-F7
gttctagatcgcgagcggccgccctctgatataaaaaaataacaagcatttgcaagcttgcaatttatgattaataatagtcatttctagg

SEQ ID NO: 21558 - DNA, 335 bp, Glycine max
  Clone ID: LIB3106-049-Q1-K1-F8
gtagaaaatggcattcctacgtctacaccttcaagtgatggagatccaaatgttaatggggaaaatgttcaagcagcatctacgggcaatccagcaccagcaccagctccaccggaggcccccttatcaccagcaggggtttcagagactactgctccaagtccacctacagttcctatgagtgatccctttatatgattggtatacctaccacattgttgacataagcacttggaaaatgaattcatttataattcatgttttattacaggtgtaaagaaatcattttaagagatgaaagaaatctagtgtattagtttgtgacaaggttaaac

SEQ ID NO: 21559 - DNA, 271 bp, Glycine max
  Clone ID: LIB3106-049-Q1-K1-F9
gaagcattagcactaggagcagcaacaactagtctcagctgaaatggcctcttcagggggggcatctgtggccctcaaacctgcccctttcactgttgagaagtcctcaatgagaggccttccctctctctcaaggaactcttcttcattcaaagttgtggccagtggcaagaagatcaagactgacaaaccttattgaattaatggtggcatggctttgaaggatggaactgatgcatctggccaggaaggaaagggaaagggtgtttac

SEQ ID NO: 21560 - DNA, 437 bp, Glycine max
  Clone ID: LIB3106-049-Q1-K1-G1
cccacgcgtccgaacaaataaaagccatggccacctccaacttctctattgttctctccgtctccctagccttctttttggtgctacttaccaaggcacactcgaccgataccgtttctttcaccttcaacaagttcaacccagtccaaccaaacattatgctccaaaaagatgctagtatttcatcctctggggtgttacaactcaccaaagttggcagcaacggcgtgcccacctcgggatctctcggtcgtgccctttacgctgccccaatccagatttgggacagcgaaaccggcaaggtagccagctgggctacatcctttaaattcaacattttcgcacccaacaaatcaaactcagctgacgggcttgccttcttcttggcacccgtcgggtctcagccccaatccgacgatggatttcttggtcttttc

SEQ ID NO: 21561 - DNA, 381 bp, Glycine max
  Clone ID: LIB3106-049-Q1-K1-G10
cccacgcgtccgctggctttgtaattggtgggaagcaactatttgtgatattggtggcgcgcttatcatcctgcccacagtttggttggacaactttacaatgtcataaatatagaaactatattccactaaacagtgagcagaaaacgtgagtcttcatagtgctcgtatgaataaaacatgtctctgcaccaaatgattagccagccatccttctcaaaatcttcacaagctttttatctaccccagaattcaaggcggtgtattttgattatgttggggaaggtattatagttagtttttaattagttgaaaaatttatttgattattttataaataaactcttttaatagtttttagcatttctttaaaaaaaaaaa

SEQ ID NO: 21562 - DNA, 246 bp, Glycine max
  Clone ID: LIB3106-049-Q1-K1-G11
cccacgcgtccgcgagataactagaaacagtgtgatgaaaatgaaggtccttgtgtgtctgcgttgctacaattttggtagcatggcaatgccatgcgtacgatatgttccctctccgaatgaacactggctatggtgcccggactccggaagtgaaatgcgcaaggtggaagcttgctgtggaagcacacaacatctttggctttgaaaccattcctggaaaaggccgtggaaccaccaaaggat

SEQ ID NO: 21563 - DNA, 437 bp, Glycine max
  Clone ID: LIB3106-049-Q1-K1-G12
gctacttcctactccaaccgcacttctgttccgcaattatcatgggcaaggtcaagatcggaatcaacggatttggaagaattggccgtttggtagccagagtggctctgcagagagacgatgttgaactcgttgccgttaacgaccctttcatcaccaccgattacatgacatacatgtttaaatacgacagtgttcatggacactggaagcatcacgatgtcaccgttaaggacgagaagacccttctcttcggtgacaagccagtcactatttttggacacagaaaccctgaagagatcccatgggggtcaactggagctgacatcattgttgagtcccacggagtttttaccgataaggacaaggccgccgcacatttgaagggtggtgcatagaaggttattatttctgcccccagtaaggatgcccccatg

SEQ ID NO: 21564 - DNA, 409 bp, Glycine max
  Clone ID: LIB3106-049-Q1-K1-G2
cttccatttacttttttttaccccattttaaacagaccgtggtttcccccttattccccataatgggggggatcccaacccttgctttgagaaacctctcctctttttctgtgaaaacctggtccaccacaagatcattactcaccaccttattcaccacaaccctcttaccatttactttaacaaactcatctcttcccagaactcttaaactcaacacctctttcccacattctcaccttttactaccccacaagtgttttacttgtagaaaccaggctgagccatcttctgattcagcccaagtccaagaactgagtgtgtatgagatcaatgagagagatcgtggaagccctgcttatcttagattgagcccgaaaactgtcaattcccttgatgatctaatccc

SEQ ID NO: 21565 - DNA, 408 bp, Glycine max
  Clone ID: LIB3106-049-Q1-K1-E7
gacttttggtgttgctccttataatcctattcttggtgagacacatcatgtttcaaagggaaatcttaatgtgttattggagcagatttcacatcaccctccagtaacagctctccatgcaacagatgaaaaggaaaacattgaaatgttatggtgccagcgacctgatccaaagtttaatggcacatcagttgaagctaaagtgcatggtatacgccagttgaagctcctaaatcatggtgaaacatatgaaatgaattgtcctcaccttttacttaaaattcttccagttcctggggctgattgggctggcacaagtaatatacggtgcccagagacaggtctagtagctgaattattctacaaatcaagtttttttctaggaattagggggaatcatagagtgat

SEQ ID NO: 21566 - DNA, 216 bp, Glycine max
  Clone ID: LIB3106-049-Q1-K1-C9
cccacgcgtccgcccacgcgtccgcggacgcgtggggaagaagatgattctaaccgtctgcttcaatatcattttatctctcctctccctctaccacgccttcggggtggatttctgcgtagcagactacacaagccccaatggccccgcaaggtactcatgcaagagcccaacaaaggtcacgggggacgacttcgtctactccggccttggcac

SEQ ID NO: 21567 - DNA, 80 bp, Glycine max
  Clone ID: LIB3106-049-Q1-K1-D1
tgggtaagtcctaatttaaatggctggctttcatttttttatttttttcaggcttgcttgatcgttcaagcatgcaaatt

SEQ ID NO: 21568 - DNA, 290 bp, Glycine max
  unsure at all n locations
  Clone ID: LIB3106-049-Q1-K1-D10
cccacgcgtccgatatgtttactacaatcttataatgaaatgcacagtgaagagggaacgaactctttgcaaagcagcaaaccaaccancccctccacactctccaattgttgtgacaaagagaggcttgtccatcaacttcatcaccagcttcgtgctttcattggctagtaagaagaatgcaaatgcagcaatacttgaggctgatgatgatgaaaaactcttggagaaagtaaagcgtgacaaaaagaagagacttgagaagcaaggtgtgatcagttctttcaaac

SEQ ID NO: 21569 - DNA, 93 bp, Glycine max
  Clone ID: LIB3106-049-Q1-K1-D12
cccacgcgtccgggagttatcaactgattcttctcaacatgttcgctctgcactggcttgtggtataatgggtattggacccgtgttagggaa

SEQ ID NO: 21570 - DNA, 423 bp, Glycine max
  Clone ID: LIB3106-049-Q1-K1-D2
gaaaaaagattcaatttttatgcaaaagttttgttcctttaggatttcagcatcagtgggtcggcctgcatgcttcacggtgcaagcagccggcccgcaaccgcccgcaaatcctctggcctttccggaaccgtccgcattcccggcgacaagtcgatctcccaccggtccttcatgttcggcggtctcgcgagcggtgaaacgcgcatcaccggccttctggaaggcgaggacgtcatcaatacgggcaaggccatgcaggccatgggcgccaggatccgtaaggaaggcgacacctggatcatcgatggcgtcggcaatggcggcctcctggcgcctgaggcgccgctcgatttcggcaatgccgccacgggctgccgcctgaccatgggcctcgtcggggtctacgatatcgacagcacc

SEQ ID NO: 21571 - DNA, 433 bp, Glycine max
  Clone ID: LIB3106-049-Q1-K1-D4
gccgtcgtcgggatgctgcaacggagtgaagagcctcaatgccgccgccaagaccaccggcgggcgccagacggcgtgcaactgcctcaagtcggccgccagccaaatctccggcttcaacgccaacaacgccgcctcgctccccggcaaatgcggagtctccatcccctacaagatcagcacctccaccaactgcgctaccatcaaggtttgaagagaaagtcatggacgcaggaaaccggaaactactcactagtatatgagtagcattattaatattaagaataagatcgagggtgatgagggctccacttatatgcccctctcctcttgtatgagagatttgcattggatagctttaagttgtgttgcgttgttatttctctgtatgagttacacatagttatatctactttaatattgggttctccct

SEQ ID NO: 21572 - DNA, 445 bp, Glycine max
  unsure at all n locations
  Clone ID: LIB3106-049-Q1-K1-D5
gttctgtacgtgcagccncancaagtgatcgaagcgaaaagagagaaattcatcgtcggagtgatcatgggtaaggttcatggatcacttgcacgtgctggtaaggttagagggcaaaccccgaaggtggccaagcaggataagaagaagaagccacgtggccgcgcccacaagaggatgcagtacaatcgccgattcgtcaccgccgtggtgggattcggcaagaagaggggacccaactcgtctgagaagtgaggccgaggcttgaggaatatgttgctactctatttgatttatctttgttggtttttatttatttttaatttgtatgttttgattgtgttctgtgaacggtttttgttagctttatatcaaacttgaaattttgcatacaaaatctaactatctaagttcattgctcctttcaactgggaaaggatttggt

SEQ ID NO: 21573 - DNA, 449 bp, Glycine max
  Clone ID: LIB3106-049-Q1-K1-D6
cccacgcgtccggaagaaaaaaaatctcaaaataaaacaaccaaaccacacacttcacacgctggtcaacatcctcagcaagtacaagaacaagaagaaacaatgtcttgctccaatctcacaatgttggtgtcctcaaaaccttccctttccgatccctccaatctctccttccgctctgtcctcaacccttttcagctcccttcacaaaacccaacttcatgcactccttcacgctcctcaaccacccaaattcagtgtggtctgagagaactcagaacccgcattgattccgtgaagaacactcagaaaatcaccgaggctatgaagcttgtggctgcagccaaagtgagaagagctcaagaagctgttgtcaacggaagacccttctcagagaccctcgttgaagtcctctacaacatcaacgagcagctcctaactgaggacgt

SEQ ID NO: 21574 - DNA, 443 bp, Glycine max
  Clone ID: LIB3106-049-Q1-K1-D7
ttcaaatcttctgaaaggtgaacttcccacttgtttagaaccaaagaccagggttgttgggtatgctagaaactgcttatcaaacaagaaccaagatcagcacccttcagatttctgcagcaatgaggctttggcagtgacaatcataccccatcagcagaagcacaagagaacaactagtaaagcaattatcgtatcaagtatgggaggtcttgttggtggaatgttgattgtaggagtggttatcttggttgttagccgagttcataagaaacaagtagggaaaataccttcaaagtccactttggagcatgttatcagccaggagcacaatgaagatgaagtgaaaactactacaaggtccataatggagcatatcatcaaaagggttcctgacaaaggtgctgtggaaacactaacaagatccataaaggagtacgtca

SEQ ID NO: 21575 - DNA, 349 bp, Glycine max
  Clone ID: LIB3106-049-Q1-K1-D8
gccctcacttccttaaaagtgaaagtgaaagttaagtttttgtatgaaggtcatgcttgggtgtattgaacaattacatttggccttgagacatagtagcgtttagtttttgtggtactctgaatacagaacgagcattgttgaagagttcgttttgattgatgtaatctcttcaacaagttagtatttacctattaggtttctatttgacatcttaaatattatgggtctatgttcttattattaatctggtgtttctttgggaaccgaaaaatggagtaaccagcagccttcacattgaaaaagatgggatgccaatggaaatgataatataattattggttggttt

SEQ ID NO: 21576 - DNA, 214 bp, Glycine max
  Clone ID: LIB3106-049-Q1-K1-D9
gtttctgctaggcttaacaaacctctcataacaaaaaaaaaactcactctcacatactcgcgttttcaaaaaccctttacttctctattttctttctaattccttatccaatattatagtacccttttatcccaaattatttaaagttaaaacctttattactactcatatttgttttttgtttgttaaattttaaaaaatggaagcacattct

SEQ ID NO: 21577 - DNA, 470 bp, Glycine max
  unsure at all n locations
  Clone ID: LIB3106-049-Q1-K1-E1
attcccggtcgaccacgccgtccgccacgcgtccgccaagcgtccaaaattgagaaattcaaatggttcattgccaacttcgcaagttcggttgaatatgcaacgagtaatgcaaaccaatgctgctgtgttccgtacacaagaaacattagaagaaggttgtcaattaattgataaaacatgggagagcttccatgatgtccaggtgaaggaccgcagtttaatctggaactctgacttgattgagactattgaattggaaaatcttttgataaatgcatgcatcacaatgtactctgctgaagctaggaaagagagtagaggagctcatgcccgtgaagacttcaaggttagagatgatggaagctggatgaaacacactgtgggattctgggagaacgagaaagtnncgttggactacaagccagtgcatttgaatgtattggatgatgaggttgaatcattccctc

SEQ ID NO: 21578 - DNA, 373 bp, Glycine max
  unsure at all n locations
  Clone ID: LIB3106-049-Q1-K1-E10
cgcttctcctctttgtgttctggctatgcttcttggcaagagttagatcggacgaggagtgcgtgtacacggtgtacgttcggacggnttcgatcatcaagggaggcaccgattcagtaattggtctgaagctatacgacaagtccggctacggcatatacatcaccaacctcgaggcatggggcgggttaatggatccgggtcacaactactacgagcggggcaacctcgacatattcagtggtagaggcccttgcttggaagcacccgtttgccaggccaacctaacttatgacgggttggagcctcatcacggatgctacgttaattactttgaggaaaccattaaataaaaacaatgcgccttttttct

SEQ ID NO: 21579 - DNA, 240 bp, Glycine max
  Clone ID: LIB3106-049-Q1-K1-E11
cactaaactaagtggttggttttggtttagtttcatttttttgaagctcttaaacgtaaggcttaagccatggcatcctcatcctctctgcatctatctcaagcccttctggcacgtgctgggtaccttcatggctcttcttcttctgaccgggtctcactctccttcccatcattctctggcctcaagtcacattctacatgccaagcaacagcagccacctccttgcctaaaaagggt

SEQ ID NO: 21580 - DNA, 419 bp, Glycine max
  Clone ID: LIB3106-049-Q1-K1-E12
cgaaacgcacatttcactattcattctcgtttccctttcgactgtgattgtttgggaacggaacttttcgagcaaaatgtctggacgtggaaaggggggcaagggtttgggaaagggaggagcgaaacgacaccgtaaggtgttgcgcgataacattcagggaatcaccaagcctgcgattcggcgtttggctcgcaggggtggtgtgaagcgtatcagtggtctcatctacgaggagacacgtggcgtgctcaagatctttctggagaacgtgattcgtgacgccgttacctacactgagcacgctaggagaaagaccgttacggcaatggatgtggtttatgctctcaagagacaaggaagaaccctctacggatttggaaggctaagttgttttttttttttttttttaattttta

SEQ ID NO: 21581 - DNA, 450 bp, Glycine max
  Clone ID: LIB3106-049-Q1-K1-E2
tgccaactcaacttcgaactcaaatcaagcaatcaatttcaaatccaaaaatggggagcgccggaaccttctgtgccttcttcctcgtgtgtacgatcttgtccgtccacgtggcgcaatcctcatcctccaccctcgacctggacacctttttcctccctctcaaatccggctgccgcggatccgtcgccgagtgcagcctcctcgccggcgacgacgacaccgagtttctgatggagtcggagagcaaccggcgcattctagcaggaaggagctacataagctacggtgcgctgagaaggaacactgtcccttgctcccgacgtggcgcctcctactacaattgccgccctggcgctcaggccaacccctacagccgtggatgcagtgctatcacccgatgcaggcgttgaaaaagttattcttctcttttaatttcattttttttta

SEQ ID NO: 21582 - DNA, 451 bp, Glycine max
  Clone ID: LIB3106-049-Q1-K1-E3
tccgcatcgatgttgaacacagtggaagaaggaggggactcggcaatggcttagtcccatcccgcaggccttctctttgatgaagggggggaagacagaacaaggccatgcaaatgccaaagaaggagacagaagagggtacgctaaaaagagagagcaacacccgacccggggatacatgggcgtggagaaagaacggacagaaacccatcaagggtgccccttatcccagagggtactacaggtgtagcaagttcaagggctgtccggcacggaaacaagtggaaaggagctgcgtggaccccacaatgctagtcgtcacttactccttcgaccacaaccattcatggccaccttctagaaaccacgccaggcccaccaagaagcctgaaccggttacggacccggtccaacccgaaccggaggaaaagttcgcggacctgggcgggga

SEQ ID NO: 21583 - DNA, 448 bp, Glycine max
  Clone ID: LIB3106-049-Q1-K1-E4
caattctgaatttgcgggttttggatttggacttggtcgtcaacacagtctaattaatagctgtttgctccttcgcttatgaatcttcttcttcttcttcttcttgttcctgcaacgcactgaattcgatcaatcaatccatcttcaattgctttgtttcgatcggaggaaaatggccgatcagttatcgaagggagaggaattcgagaaaaaggctgagaagaagctcagcggttggggcttgtttggctccaagtatgaagatgccgccgatctcttcgataaagccgccaattgcttcaagctcgccaaatcatgggacaaggctggagcgacatacctgaagttggcaagttgtcatttgaagttggaaagcaagcatgaagctgcacaggcccatgtcgatgctgcacattgctacaaaaagactaatataaacgagtctgta

SEQ ID NO: 21584 - DNA, 184 bp, Glycine max
  Clone ID: LIB3106-049-Q1-K1-C8
ggttaccatatcaagtcttcctcgacaagcttctttaccatttcgctgccggtgaataggaaaaccgttctcttcaaatgattgaagcgacttactcatcgcgaatgtttcgcggtgttcgtttcgttctccgtggcttcaatcccgtcgccgaaaatcagatccggttcaagcttgtgaatgg

SEQ ID NO: 21585 - DNA, 448 bp, Glycine max
  Clone ID: LIB3106-049-Q1-K1-B4
agaaaaaccatggcaataacactcaacaatggcttcaagatgcctatcattggattgggcgtgtggcgcatggaaggaaacgaaatcagggacctaattctcaattccatcaaaattggttatcgccattttgattgtgctgctgactacaaaaacgaagcagaagttggagatgcgcttaaggaggcttttgatagtggccttgtgaagagagaggatctcttcattaccaccaagctttggaattctgatcaaggccacgttcttgaggcgtgtaaagacagtctcaagaagcttcagttaacgtatctagatttatatcttgttcactttcctgttgccgtaaggcatactggggttggtaatacttctagtcctttgggtgatgatggggtcctggacatagataccaccatatccctggaaaccgacctgcatgcaatggaag

SEQ ID NO: 21586 - DNA, 428 bp, Glycine max
  Clone ID: LIB3106-049-Q1-K1-B5
ccttgctcttgtttgttccttttattgtttctttcttgatcatgtcgcttgttggtaaaattagtactgaaattggggttcatgcaactgctgcaaagtggttcaacctctttgcaacgcagctccatcatgttcaaaaccttactgatagagtgcatgaaaccaagctgcatcatggtgatgactggcatcacaacgagtcgatcaaacactggacttgtacaatagatggtaagattacaacatgtctggagagtattgaatccgttgatgaaccgaacaaaacaatcacctacaagctcttcggaggagatattggtcataagtataaagtctttaagctcatttttcaagctattgacaccgatcatgggggtgttattatcaaatggacccgtgaatatgagaaagatgatgagaatgttgat

SEQ ID NO: 21587 - DNA, 438 bp, Glycine max
  Clone ID: LIB3106-049-Q1-K1-B6
gaaaatttgatggggaaaatgtatcaaatcctccttcacccgatgaggacaacaagctagtccggctcaatagtcccaatgctgtgaacccccttgtttggggaggttactacccacttcttaccattgatgtttgggagcatgcttactaccttgattttcagaaccggcgtcctgattatatatcagtgttcatggataagcttgtttcctgggatgcagtgagctctagacttgaacaagctaaggctttaattaccagtgcatgatgctgaattaaatgcagaataagtgatttatcctgatagtgatgatgaattggatggcgtcatgcggaatagtgaattatttttatctagaaagtgtaagcaggcacatcttttgtactttaaataaggggtgtgggattaaggctaaatctcagattattatgttcta

SEQ ID NO: 21588 - DNA, 55 bp, Glycine max
  Clone ID: LIB3106-049-Q1-K1-B7
cccacgcgttcgtccacgcgtccgaaaaccttatcatctccgaatttcattttca

SEQ ID NO: 21589 - DNA, 310 bp, Glycine max
  Clone ID: LIB3106-049-Q1-K1-B8
gccacacatacccaaacatatagcctgctcactgtttctcaccgagttactcagtgagcgcataattacatatacatttacttatacatccactcccagacacaaccctgttgaattccctatcaaattggaatataaaatggcaatttgaggatcaacgtacacttacccactctaattcctaatcttgaacccttgccttaaaaattaccctcaaaataaaaaatttctaacacaaaattcaactcattcttcaatccaatcttaaaaccttaaatacaacctcaaaaacttcaaaaccccccttaaa

SEQ ID NO: 21590 - DNA, 311 bp, Glycine max
  Clone ID: LIB3106-049-Q1-K1-B9
cccacgcgtccgctctattgttctctccgtctccctagccttctttttggtgctacttacgcaaggcacactcgaccgataccgtttctttcaccttcaacaagttcaacccagtccaaccaaacattatgctccaaaaagatgctagtatttcatcctctggggtgttacaactcaccaaagttggtagcaacggcgtgcccacctcgggatctctcggtcgggccctttacgctggcccaatccagatttgggacagcgaaaccggcaagggagccagctgggctacattctttaaaattaacattttc

SEQ ID NO: 21591 - DNA, 428 bp, Glycine max
  unsure at all n locations
  Clone ID: LIB3106-049-Q1-K1-C1
ggcggngataagattaaagattcaacaatggcctctgcttctgctactcttctcaagtcgtctgctgttcttgacaagtgcgagtgggtcaaaggccagacccttcgccaacctctcgtgagatgtaacccttcctcagcatcagctctcaccatcaaagctgcttcctatgctgacgagctcgtcaaaaccgccaaaacagtggcctcaccggggcgtggtattttggcgatggatgagtcaaatgcaacctgcgggaagcgtttggcatctattgggttagagaacacagaagctaatcggcaggcataccgtaccctacttgtgacagtacctggtcttggtgaatacatctctggtgccattctctttgaggaaactctctaccaatccactgtcgatggaaggaagatcgtcgacgtacttgt

SEQ ID NO: 21592 - DNA, 380 bp, Glycine max
  Clone ID: LIB3106-049-Q1-K1-C10
gcttaatgaactgagcagcacggttgtgtttgagaggccacatgatgaggaatttatacgcaagtggcagttagcatgcaaggggaatatcgcacatgtggtggtgatgccaaacatcactattgagaagcttgatgattttctgaacgagcttctggagaagcgtgctacctggtttcaagatggcaaggatcaaccctactgtatatcatcagacgtaagtgaaaagaattgcctttgggctttgcacaagtaattgcagcattccatctaatggttattggtggaggtggtttttggaggggttattcaaggtaccgcactaatgtctatcaagaccttgatgccattaataaccattaaaatcctctttgctggcc

SEQ ID NO: 21593 - DNA, 370 bp, Glycine max
  Clone ID: LIB3106-049-Q1-K1-C11
ggcaaactttggacaaaaaatggagtgctacacaaggccaaacaggagtgacatgcgccgctgagcagatgaagaagccaccatataggcaaagaccaaagagtactttgatggggtcgcaccacaacgccacacaaagccttaacgaagagactattcaactcaatatgtcgatgctttctacaatgcccatcactcttctttaactataccagaattaacacaattccaactcctgcagaaccatccccaagagaagaaattggtgtacaatggaagtcaagtaccggaagaatttgtggaaacagaatattaccaagatctcaacaacgtggacaaacaccaacatacgactggaacaagatttatc

SEQ ID NO: 21594 - DNA, 445 bp, Glycine max
  Clone ID: LIB3106-049-Q1-K1-C12
accatatccccttcgcctgcgtcatttccgcctctgtggcatcttcatatttcaaaactgttgcgaaatttctctcttcttcatcttgctcttacattctgggtaatgtttgaaacttgggggtagctaagctgtttgacaaaaatgaatattgcacaagttacagcatggcagcctgggatttgtgtgaaaaatatatctcagttacacaggcttcaatcaaaaccatgtgttttaccaaatagttttggtccttgcttacaaagcttaagagcaacacaatcggttagctcaaaatgttggcccagtttacaatctcggaaacctcttcatatttgcttagcccgtggaaaagggatgatgggaaatgatgatgagaattccccatggaaatttattgagaaagctataggaaaatttaagggagaatcatcactagaggatg

SEQ ID NO: 21595 - DNA, 449 bp, Glycine max
  unsure at all n locations
  Clone ID: LIB3106-049-Q1-K1-C2
cttgagcagcanaatcttcaggccaagccaggtaagcaagcacaacacaaccccgaaatggcggctgcttctgttcccatggctttctcgctgagctctgttatcaacaacaacaagccttcatccgaagccttcttcaggccactacccctacggcaaccaaagaggaccctcttcaccacaaaggcagtgtcaaactccaaggctcaaatcaatgcatctttgaaggagaaggcagttgcaggactcacagcagcttctgtgacagcatctatggtggttccggaggtggctcatgctgctggatatgagttctccccttccctcaagaactttctgctaagcatctttgctggtgggtttgttctagtagccatatttggagccgttattggggtttccaactttgatccggttaagagaacttaaagcccgcatgctccaatgct

SEQ ID NO: 21596 - DNA, 431 bp, Glycine max
  unsure at all n locations
  Clone ID: LIB3106-049-Q1-K1-C3
gtttgttgtgagctataagctagtttatcgtgaggagaatatgaagttgtttgttttcggtgtggctgcagtagttttggtagcatggccatgccatggcgcangctaccaaaggttccctctccgaatgaaaactggctatggtgagcgttcttcggaggtaaaatgcgcaagttttaggcttgctgtggaagcacacaacatccgagcctttaaaaccattcctgaagagtgcgttgaaccaacaaaggactacattaatggcgaacaatttagatcagactctaaaacagttaaccaacaagctttcttttatgctagtgaacgcgaagtccatcacaacgacatatttatattcggcatagataacaccgtactctctaatatcccatactatgaaaaacatggatatggggtggaggaatttaatg

SEQ ID NO: 21597 - DNA, 436 bp, Glycine max
  Clone ID: LIB3106-049-Q1-K1-C4
cctgatcttatcccatccttactgacactggctctaaatgatgctttgacttatgataaggcagcaaaatcgggtggtccaaatggctctatacggttcagctcagaaataggtagaccagaaaatacagggctttctgctgccatgaatttattagaggaagcaaaaaaggaaatagactcatattccaaaggtggacccatttcctatgcagatctgatccactttgcagcaaagtgctgccaaggctacatttttagctgctgccattcgaaaatgtggtggaaatgaggagaaagggaaaacactgtacaatgcatacggatcgaatgggcagtggggtttgttcgataggcaatttggtagggctgatactcaagacccagatccagagggaagagttccaatatgggagaaggcaagtgtacaagaaatg

SEQ ID NO: 21598 - DNA, 435 bp, Glycine max
  Clone ID: LIB3106-049-Q1-K1-C5
cccacgcgtacgcccactcgtccgcacagagagagaagagacaatgaagtttaacccaagggcgtcctcaagccgtcgaaagagccgcaaggctcacttcaccgctccgtcgagcgtgcgtcgcgtcctgatgagcgcgcctctctcgaccgatctccggtcgaagtacaacgtgcggtccattccggttcgcaaggaccactaggtgcatgtggtgaggggaacctacaagggccgcgagggcaaagtggtccaggtctatcgccgcaagtgggtcatccacatcgagcgcatcacccgcgagaaggttaacggctccaccgtcaacgttggcattcacccttccaaggttgtcgtcaccaagcttcgaatggacaaggaccgcaaatccttgctcgatcggaacgccaagggtcgcgccgccgccgacaagga

SEQ ID NO: 21599 - DNA, 453 bp, Glycine max
  Clone ID: LIB3106-049-Q1-K1-C6
cccacgcgtccggtggaattggcttctaaagccattgaggagctaaataataccgaattgatgggtaaaaaaattaaatgttcaaaatctcaagccaagcaccgtctttttattggcaatgttcctagaagctggggtgttgaagatctgaagaagattgtaactgagattggacctggagttactggtgtggaactagtcaaggatatgaagaacaccaacaataaccggggctttgcttttattgactattataaccatgcatgtgctgagtattcaaggcaaaagatgatgagcccaacatttaagctaggtgagaatgctccaacagtgagctgggctgatcctaaaaatgctgagtcctctgctgcatctcaagtgaaggcagtatatgtgaagaaccttccaaagaatgtaactcaagagcagttgaagaagctttttgaacgtcat

SEQ ID NO: 21600 - DNA, 444 bp, Glycine max
  unsure at all n locations
  Clone ID: LIB3106-049-Q1-K1-C7
cccacgcgtccgtggcttcaattttgcaaccctgagctaagcgggataatcaccaagtggttgaaaactgataagtgggtaaccaatcttgacttgttaacaggtctccgacagtttgctgacaatgaagatctgcaagcagaatggctgtctgcaaagatggctagtaagcagcgcttggcacggtatgttttgcaggtgacaggggagagcattgacccagatagtctgtttgacattcaagtcaaacgtatccacgaatacaagaggcagctacttaacattcttggtgtgatttatagatacaagaagctaaaggagatgagccctgaagaacggaaaaaaactactccgcgcacagtgatgattggaggaaaggcatntgcaacatacacaaatgctatcangatagtcaggctggtgaatgatgtncgtgccgtcgtc

SEQ ID NO: 21601 - DNA, 449 bp, Glycine max
  Clone ID: LIB3106-049-Q1-K1-B3
cccacgcgtccggtgaacgtcttatcctgttgaaaaatgatgcaaatgagttaagagatggcgggattcttctctatcattgtggattatatgaacagtcactggaatacctgacgaagtaccgagatctgaagaactcatctacgcaagaattatcatcatcaaactctcttagcagcctggaggaagatgccgtggataacctgatgatgcgcttgaatcttgtactgatggagcaagggtggagtcggccatcttatgccaagaattttcttggtaataattctgaaccatggtagttcctcttcttccatgtttattgagacaacatcacagaagatttgcatcaagccatattggaaatgaatgctgatggttcacggctgcggcaacttcatgaaaaggaaaaggagaatgagaaaaggagatggaaagatcaacatcataat

SEQ ID NO: 21602 - DNA, 341 bp, Glycine max
  Clone ID: LIB3106-049-Q1-K1-A10
cagaagtcccggacagtgcaaatctctgtggacatctttggtagtcaaatatgaggggagtaagaataaaaatgatagcaagaaaagttggccatacatagaagacatggaaaggataatgtctgataaagaagcccctgcaacaaaatgattggaaatatggtggacactggtcagtataataaatattttggagagccatctacattaaaattggtgataagtttgagcatggtggccaagaagataattcatgacttgcatgacattgaagattcataattttttgaaggctgagggatacacaaacattaagggggtggcttttatactgacaccgg

SEQ ID NO: 21603 - DNA, 348 bp, Glycine max
  Clone ID: LIB3106-049-Q1-K1-A11
cccacgcgtccgaaagaaaaaagcgatcatagtttcacttcggccttatccagtttaggggttcggttctctaccctatctttcacgtatcgaaaccttaaatttacgatcaggtctgagcaatctggttggtagaacctttggtcttagtgagtcaagttttatgtctgaattagacgatcaaattcctactgccttcgatccttttgctgatgcaaatgctgatgactcgggtgctgggtcaaaggagtatgtgcatattcgtgtacagcagcgaaatggtaggaaaagcctgacaaccgttcacggattgaaaaaggaattcagctattacaagatacttaaaga

SEQ ID NO: 21604 - DNA, 410 bp, Glycine max
  Clone ID: LIB3106-049-Q1-K1-A12
cccacgcgtccgcccacgcgtccgaaagttccaaattttttggtttggggatagagagagggatacgcgtcacattttcataataataaaaaaatggcagcggcggcggcagtgacggtgctactcccacctaggattccgaccaccaccaacgttacccgctgctctgctttgccttctctccctcctcgcgtctccaacaccaaaaccactttgttctcaccttccctcaacaacttttcagtgtcccgaaaatcttctctgcttcagaccagagcttcttcagaggaatcatcctcagtagatgccaatgaggtgttcacagatttgaaggaaaagtgggatgctcttgaaaacaagtccacagtacttctttatggtggaggggctatagttgctatttggctatc

SEQ ID NO: 21605 - DNA, 434 bp, Glycine max
  Clone ID: LIB3106-049-Q1-K1-A2
agtagttgagaactaagaaggagaagcaaatggcttcctcaatgatctcttccccagctggtagcactgtcaaccgtgccggtgccggcatggttgctccattcactggcctcaagtccatggctggcttccccaccaggaagaccaacaatgacattacctccattgctagcaacggtggaagagtgcaatgcatgcaggtgtggccaccagttggcaagaagaagtttgagactctttcctacctgccagaccttgatgatgcacaattggcaaaggaagtagaataccttcttaggaagggatggattccttgcttggaattcgagttggagcacggtttcgtgtaccgtgagcacaacaggtcaccaggatactacgatggacgctactggaccatgtggaagctgcctatgtttggttgcactgatgct

SEQ ID NO: 21606 - DNA, 391 bp, Glycine max
  Clone ID: LIB3106-049-Q1-K1-A3
gaaaaaggagcatgttgattatatagaaagtaaagggcaacaatcatttttgtttaccagggggtgggacaccatcgctgacataataacctatataagaaatgctgacatgaataaaaaaggaatggttcaaataccatttactaacataacagaaaacattgttaaaatacttttacgcgagggttttgttgaaaacgtcagaaaacatagagaaaacgacaaatattttttagttttaactctacggtatagaagaaatagaaaaggatcatataaaagttttttaaatttaaaacggatcagtacacccggtctacgaatatattctaattatcaacgaatccctcgaattttacggggcatggggaatgtaactctttcaacttct

SEQ ID NO: 21607 - DNA, 447 bp, Glycine max
  unsure at all n locations
  Clone ID: LIB3106-049-Q1-K1-A4
atcggatcgatcaagcatcanggagctttgagggttgattctctggtgtagtagcaatcgagggcgaatagaaaatgttttttgacagatatggatatcatgggacatcatttgagcagatatatcgatgctacccagcttcctttattgaaaagccccaaatcgaaagtggtgacaaaattatcatgcctccatcagcccttgaccgtctagcatctctgcatattgattacccaatgttgtttgaactccgtaatgatgctgccgagcgggtttctcattgtggggttctggagttcattgctgaggaaggcatgatatacatgccatactggatgatggagaacatgcttttacaagagggggacattgtcaaagtgaaaaatgtgacacttccaaaggggacatatgttaagttacagccccacacaaaagactttttggata

SEQ ID NO: 21608 - DNA, 450 bp, Glycine max
  unsure at all n locations
  Clone ID: LIB3106-049-Q1-K1-A5
cccacgcgtncggccacgcgtncgatcgagataactagaaacagtgtgatgaaaatgaaggtgcgtgttttcttcgttgctacaattttggtagcatggcaatgccatgcgtacgatatgttccctctccgaatgaacactggctatggtgcccgtactccggaggtgaaatgcgcaagttggaggcttgctgtggaagcacacaacatctttggctttgagaccattcctgaagagtgcgttgaagcaacaaaagaatacatccatggcgaacaatatagatcagactccaaaacagttaaccaacaagcttacttttatgccagagacctcgaagtccatcccaaggacacatttgtgttcagtatagatggcaccgcactctctaatattccatactacaaaaaacatggatatggggtggagaaatttaactcgaccttgtatgat

SEQ ID NO: 21609 - DNA, 447 bp, Glycine max
  Clone ID: LIB3106-049-Q1-K1-A6
gcgattcaggctttgggttgttgggtcgtgagtggaatcagcaactatgaatatgatggggaggttgaagagcattgcttatgggaggacttccatttcttcacatcctggaggggattctaactcagaaagggccacgtttgaaccagaaactgaacggaaggccgatgagaaaacaaataccattgaaacaatctgcacagatcaggaacaacctatagacacatcaaaagaaacttccaatgtaggcacatccgatgtatctacagtagctagaactgagaagtcaggtttcgatgagcttcctaaagaatttaatgaaatgaaaattagagatgagaaaagcaaaaacaacaatgaaaacgatatagaagctactgtagtgagtggtgatggaacagaaacaggaccaataattacaactgtcattggtggtcgagatggaca

SEQ ID NO: 21610 - DNA, 430 bp, Glycine max
  Clone ID: LIB3106-049-Q1-K1-A7
tcgaacaaacccactaagatggcttcctttgtatccttcctagtgctgcttcttgcaggcctgattctcatgcctcaagggcttgctacttactacaaaccaattaagaagccaccagtgtacaagcctccagtgtacaagccaccagtgtgcaaaccaccggtttataagccaaaaccaccgggttacaagccgaaaccaccggtttacaagccaccatataagaagccaccatacaagaaaccaccttatggaaagtaccctccagtagaagacaacacccatgcctaaagcaagcaatgagggctattatctacttaataaataagaggaactgctttgtgttttctagcattgtgatttacaacttcgtagcaatgcatattcttgactcttgcatgcacttcaatccttcgtagcattaatgatg

SEQ ID NO: 21611 - DNA, 371 bp, Glycine max
  Clone ID: LIB3106-049-Q1-K1-A8
cccacgcgtccgcgctgactgaaactcgcaaaaattagggttttgcagtgatggggctgtgcaaccgcgtccgatcgggaatctctctcttcaccaaatccacgttcctcacttccgagcgatccactctccaacgattactcgttgcccctttcatttccttggcctccacaaattacgccaacgtgccggggcaaaaggaacaccaagttaaaggccctctggctttgcttggaggttcaagaaactatgcctttgctttgtatattgcatctgagaaaactaatgccttggcaaagggtggatctgagcctctgcaatttggtggggctgtaaagaatagtcccatattctcacaatttataaaggac

SEQ ID NO: 21612 - DNA, 411 bp, Glycine max
  unsure at all n locations
  Clone ID: LIB3106-049-Q1-K1-A9
cccacgcgtccgggttatgttaaaaacatatgcagacacatctgaagtgtcacaaatgcgtgacttgaacagccaataccagagagacattgactcaagtgtgaaagaaatagatttaaatttcagttcaagcttttagggacaataaagatgtgtctggttatgttaaaaacatatgcaacaaaaatcattctcaaaagaaaatatgtttataaactatgtatatttttataatcagaaagaaaaaaaaagtcaagaatagttataatacaccttnnaaaaatgaaaaaaaaataaaatagaaaaggaaagaaatataaaacatccccctggaagaaaaaaaaatagcaagtgcctggtcagaacgggcttaccccccttcttgggtggtgttatacaaaaaaagggggg

SEQ ID NO: 21613 - DNA, 416 bp, Glycine max
  Clone ID: LIB3106-049-Q1-K1-B1
tgttattacctctttccaaagtccaaattttctagttccaccaaaccaaaccaaaccaagatggcggagcctcagcctcatccatgatatcaacaccagccttatctccaaccatccaaaagcaccatcatttgaagccatccaacgtgtgcttccaaggtcttagacccctcgcaaggttcaccaaagcctcatcaaccaaagtgagcaccaccaccaaaagggttattccaaagggtggtgttagagctgaactcaactcagcccttgtgataagcctcagcactggcctctccctcttcttgggaaggtttgtgttcttcaacttccaaagggagaacgtggcaaagcaagtgcctgagcagaacggcctcacacactttgaggctggtgatacacgtgccaaggagtatgtc

SEQ ID NO: 21614 - DNA, 353 bp, Glycine max
  unsure at all n locations
  Clone ID: LIB3106-049-Q1-K1-B10
gcagaactagctaatcctgacaaagcagaagcagctagtgctcancatgagtagatgatgtgaaagcacaaaatgcatgtgttggttatattcgcgtcaaattgaatgaattgaggtcagcatatgcatgatggctcactctgcatgtcaaggcaatttgtttattcattagttttcttatgtaagtcactcttgttcttgtattgggatttttgcatcgtgttcttctgatgatttcagcgtgtgtccgtatatatttcaagttttcctgtttgtagagaaatcaagttggtatttttgttctgatctaataaatgcaatatgcatttttttttatcatacagatatgtgat

SEQ ID NO: 21615 - DNA, 274 bp, Glycine max
  Clone ID: LIB3106-049-Q1-K1-B11
gtgaaaaacaggaattggacgggccattgataaccttgtgtagttcttgcggcggaagagaaagaagtttaaataaatgggtctagctttaatcgtcggactcctcggccttctgattctatttcacgccgcttattcaactattcagtataggggccttttgaagattacggaggaagagttttcagggcctccattccacgtggtgattgagctggttcttggattggtgctttggttttgggctggcctcactgcgccggggaaggttcta

SEQ ID NO: 21616 - DNA, 295 bp, Glycine max
  Clone ID: LIB3106-049-Q1-K1-B12
gcagaaagcaagctcatcctagagttttaaaaatggcagcagcctcctccatggctctcgcttccccatccttggctggcaaggccgtgaagctgggcccatcagcccccgaagtcgggagggtcagcatgaggaagaccgtcaccaagcaagcctcctccggaagcccatggtacggcccaaaccgcgtcaaggacttgggcccattctctggcgagcccccgtcctaacttactggccaggtcccaagtgactacggctgggacactgctgggctttccgccgacccaaaaac

SEQ ID NO: 21617 - DNA, 392 bp, Glycine max
  Clone ID: LIB3106-049-Q1-K1-B2
cccacgcgttcgtccacactttcttacactcatacatccactcgtccgcgcctttgattgtgagcatggttggtcttgctaccaaataatgattcacatattcatgctggatccctcttacccttcataagcaatatcgttttagtttgaaagccaccggtgaaactatccatgtgtgaactaaaacaacatgggtaattgacatcaaccgagcacgttactgggggtccctgccgtggcttccgtcgcagatgcttctgcaccaaacattgttaattttaagggcttcctttctagagcttccatacaaaatgacacatccatgctacttctactctcgtctataatgaaccactatgtaattgacaatacggggtacccaaactactata

SEQ ID NO: 21618 - DNA, 299 bp, Glycine max
  Clone ID: LIB3106-049-Q1-K1-A1
cccacgcatacgctttatgatacagaaaagggtatccttgattggcttcaaaaaaacaagggaggggttttcttacttgagggactttccacgtcttggagctcatatgacattgaatttgcttctgtacactgttgctttacctatggaactgtacattacagatgtacatacgtacctcctcgattgtgattcccatctccttgatatcctccgagtacaactatttcaagcgatcgagataatgcctttaatttgacattcgtattgagtggcatcacattctgtcatagtatatt

SEQ ID NO: 21619 - DNA, 180 bp, Glycine max
  Clone ID: LIB3106-048-Q1-K1-G1
cccacgcgtccgaataccattcgcccggaaaaccgtacgcccactcactgacttttgcagaaccggtttctgatcttacattcattctatggacctctttctctttctctcttctctttcctaagctctcttggaaattggaaaggagccagggttctttttcggccttaaagaacaagg

SEQ ID NO: 21620 - DNA, 430 bp, Glycine max
  unsure at all n locations
  Clone ID: LIB3106-048-Q1-K1-G10
attatcctacctggtgaaagggatggaaagatttggatgtggcataagtgcttgcggtgtccaagaatcaatggctttcctcctgctacacagagaatagtaatgtctgatgctgcttggggtttatcatttgggaaatttttggagctcagtttctcaaaccacgctgcagccagcagggtggcaagctgtggtcactctttacacagagattgccttcgtttttatggatttggaagaatggttgcttgttttcgatatgcatcaattgatgttcactcagtctaccttcccccccacacacttatatttgattatgggaatcaggactggatacaacaagaatctgatgaggtggtcatatcggcagagcttttattctctgaggtactcaatgggtctagtcaaaatngtgagaaaagatctaatg

SEQ ID NO: 21621 - DNA, 423 bp, Glycine max
  Clone ID: LIB3106-048-Q1-K1-G11
cccacgcgtccgcccactcgtccggaaactagaatggccactttagacgaacgcccttgtgcgaaaaggtggcttcctcttgaagctaaccctgaagtcatgaaccagttcctttggggtcttggccttccactggacgaggcagagtgctgtgatgtgtttggcttagatgaagagcttctggaaatggttccgaagcccgtcctcgccgtgctttttctttatccaattaccgcaaagtccgaagaagaaaggttgcaacaggaaaacgaaaaaaaggattatagcagcaaagtgtattttatgaagcaaaccgtgggtaatgcttgtggtacaataaggttgcttcatgcacttgggaacataaccttcgaagtcaaactttgtgaggggtcattccttgataaggtttttaaatctact

SEQ ID NO: 21622 - DNA, 410 bp, Glycine max
  Clone ID: LIB3106-048-Q1-K1-G12
aaagaaaagaacgtgggtaatgaataccctttattaacaacttattcataggcgaccttacaattacagtacaagaatacagacttcttctggactctcctaacaaaccaataaccttaccaactgtataaacttttttcaccttgaacccaatattcggcaagtgaaaaaagaaaaaatgcccctaaaaattgaagggtcatgcttccagcagcacaagttctatgacgcaaggcaaagagactttgatgctgctaggaacacaaacaatatcaggagtcgtctgttattgatgttagaaagaacaaaatccatcacttatgtaccttgccaaaataacaaatcacagaaccaaacattcatcgcatatcacttacttcttatgagatggtgcatagaaatatggcaac

SEQ ID NO: 21623 - DNA, 185 bp, Glycine max
  Clone ID: LIB3106-048-Q1-K1-G2
gccgaaccttcgtctaggctataccttgacagacaaatcatcgagtgggaacattaggattttgtgtatgctagagatgcctattacgagcttgctagaggtggatccactaaggatactgagatacttgatcggagccgtagctatgatgatcggagtattgttacccttcagttacatgatgt

SEQ ID NO: 21624 - DNA, 147 bp, Glycine max
  Clone ID: LIB3106-048-Q1-K1-G3
gaccattattggctacaagagacagagtgatgtaatgttctaattcgtttacatgcgtgaggacagtgatgccagtaaattcatgcgaatctctatatagctggtacttatggattgacttggatacttcgttaacgtctacgttat

SEQ ID NO: 21625 - DNA, 175 bp, Glycine max
  Clone ID: LIB3106-048-Q1-K1-G4
cccacgcgtccgggcaccaaccttgaatgtttttccttcttcttctctaagactaagacgcgaattgccctctcttcttcactcgaagctcaaacaagcacgctttccgtttccgtcgttctcgcttcaaaaccctacctttcgtcctgttatctgcagagccttcgagtcaccc

SEQ ID NO: 21626 - DNA, 183 bp, Glycine max
  Clone ID: LIB3106-048-Q1-K1-G5
gacagattgtctcgtccagcacaatcatctttacgccatatgaccacgcaagcttcagtatgctaccaagttatctgacctttttgagattctggcaacatctgaggatagagatggaaagactttcagatgcacagcacgtggtccgaaatctcccgtgactgggaacctatggcaaccaga

SEQ ID NO: 21627 - DNA, 181 bp, Glycine max
  Clone ID: LIB3106-048-Q1-K1-G6
tcgtccacgcgttcgggcaccaaccttgaatggttttccttcttcttctctaagactaagagtcgaattggcctctcttcttcactcgaagcttaaacaagcacgcttttcggtttcggcggtctcgctttaaaaccctacctttcggcctggtatctggagagccttcgagtcacccaac

SEQ ID NO: 21628 - DNA, 183 bp, Glycine max
  Clone ID: LIB3106-048-Q1-K1-G7
gacagattgtctcgttctgaacactgatctatatgccagatatacaatcacgctgcaaggtaagaccgcgttatctgactcttctgagattctggcaacatgtgatgatagagatggaaacactgtcgcatccacaacacgctgtacgaaatacagcatgactgtcaacttatgagctctaga

SEQ ID NO: 21629 - DNA, 185 bp, Glycine max
  Clone ID: LIB3106-048-Q1-K1-G8
gtttgttgtgagctataagctcgtttatcgtgaggagaatatgaagttgatgcgtttactttgttgctgcagtacttgtggtagcatggccatgccatggcgcatgctaccaaaggttccctctccgaatgaaaactggctatggtgagcgttcttcggaggtaaaatgcgcaagttttaggctt

SEQ ID NO: 21630 - DNA, 431 bp, Glycine max
  Clone ID: LIB3106-048-Q1-K1-G9
ctagaaacagtgtgatgaaaatgaaggtccttgttttcttcgttgctacaattttggtggcatggcaatgccatgcgtacgatatgttccctctccgaatgaacactgtctatggtgcccgtactccggaggtgaaatgcgcaagttggaggcttgctgtggaagcacacaacatctttggctttgagaccattcctgaagagtgcgttgaagcaacaaaggaatacatccatggcgaacaatatagatcagactccaaaacagttaaccaacaagcttacttttatgccagagacctcgaagtccatcccaaggacacatttgtgttcaatatagatggcaccgtactctctaatattccatactacaaaaaacatggatatggggtggagaaatttaactcgaacttgatgatgaatgggtttacaagg

SEQ ID NO: 21631 - DNA, 189 bp, Glycine max
  Clone ID: LIB3106-048-Q1-K1-H1
cccacgcgtccgtattgattaagaaagctattgtcattgatttgctagctccaacaatgggttctagcagattatcattcattttagtacttgtgcttgtaaccttttcatccatgatcattgactcaagggttgcagaggcacgtaccctgccaaaatcagccttattgccttccaaagttgatatac

SEQ ID NO: 21632 - DNA, 402 bp, Glycine max
  Clone ID: LIB3106-048-Q1-K1-H10
tcgcccacgcctgacagagtaattcccaatcaagtaaagatttagattagacaggaatgaagaggaatggagtatagtagtcatcaaccttgttagcagtctcagtcacactgtaaatttttggttacttatctctcaaaatctcaaatgcatatgcaattgcaaagcatttccgatcctgagggagagaacttttgtgacagctgtatccactccgattgttgattctttattttctttctcgcggcaagatctcactctgcacctagggttagggttttggcatggcgacttcttcttcttcttcttcgacttcgagctgtctcgacggcatgtgctccgactacatacagggactgcgtctcgctctctactgtagcatttttatcggtgtcagcttta

SEQ ID NO: 21633 - DNA, 382 bp, Glycine max
  Clone ID: LIB3106-048-Q1-K1-H11
cccacgcgtccggaaaggggggaaatggggtatgtgatgagagtgagattggcgtcgtgcttcaccggggctgcagtggcgtcgtttctggggctctacaccctccacaaggattacaaggtcgcgcaccaatcctttactcaacagatgaatgacctccacaaatcgctggaaggtcgaatttcttccttggaaaaaatgaaacaaacggaaacgtctgaacaggttgaagcaactgaataagagttcagaccgaagcatccattgtggggaaaaattgattcaatgtacttactatgaaaagtaactttttggtttggtttcctgatgaataagttcaatttgactcattttatggcacctcatctgactgaaccttttc

SEQ ID NO: 21634 - DNA, 428 bp, Glycine max
  Clone ID: LIB3106-048-Q1-K1-H12
ataaattcatagtctttcggtccttccttccttcctccgctctagtgtatgccactctggttaattatcatacccccttctaggcatagttcttctccctctgttctctattctacactgtgaaaccaagatgaaggtagcatttgtagctgttctacttatttgccttgtcctaagctcctccttgttcgaggtgtcaatggccggttctgctttctgctcctccaagtgcgcgaagaggtgttctagggctgggatgaaggacaggtgcacgaggttctgcgggatttgctgcagcaagtgtacgtgtgtgccatctgggacttatgggaacaagcacgagtgcccttgctacagagacatgaagaactccaagggcaagcccaaatgcccttgattggtatttcaccatgcatcaacttcaatct

SEQ ID NO: 21635 - DNA, 191 bp, Glycine max
  Clone ID: LIB3106-048-Q1-K1-H2
gaaggattggtgctccaaattccatgttgcagaagcggcagtagagaaagtcattgaagaacggttcaagaaaaactaccaccctgcttgggctgctgcttacattcttgaccctctttatttggttagggacacgagtggcaagtaccttccaccgtttaattacttgacgccggaacaggagaaagacg

SEQ ID NO: 21636 - DNA, 186 bp, Glycine max
  Clone ID: LIB3106-048-Q1-K1-H3
agcaagctcatcctagagttttaaaaatggcagcagcctcctccatggctctctcttcgccatccttggctggcaaggccgtgaagctgggcccatcagcccccgaagtcgggagggtcagcatgaggaagaccgtcaccaagcaggcctcctccggaagcccatggtacggcccagaccgcgtca

SEQ ID NO: 21637 - DNA, 182 bp, Glycine max
  Clone ID: LIB3106-048-Q1-K1-H5
ctcacattctcaaaatgctaaccttcaatctcaatgctatctcttcttcgttctcagttggtccatttcatgccaattatccactgtctactcaaacccaattgttaggtccttccaatcttagttactcctttgctacaacaggaaccagaaagttcaagtctttccagctcaaggctgga

SEQ ID NO: 21638 - DNA, 332 bp, Glycine max
  Clone ID: LIB3106-048-Q1-K1-F9
attccctcggcgagccgactcctacggctacaccttcaaatggtacattagtgttttttatgcacgcagcgtaacttctaacttcgtgggatactgccctgctgcagattctgtctccgagccctacattgttaactcaccacttaatacttgctcatggtgcatcagccaattgctccctgaacagatacgaagctcatcacaaaggacaaattgtatttaccatagctactttcctcgttgaaccaaaatctaatattgatgctaatcgcaatgcatcaacgctagctcttgactgtattgttggcttgattgcttatcccattacattt

SEQ ID NO: 21639 - DNA, 185 bp, Glycine max
  Clone ID: LIB3106-048-Q1-K1-H6
ctcacattctcaaaatgctaaccttcaatctcaatgctatctcttcttcgttctcagtggttccatttcatgccaattatccactgtctactcaaacccaattgttagttccttccaatcttagttactcctttgctacaacaggaaccagaaagttcaagtctttccagctcaaggctggattt

SEQ ID NO: 21640 - DNA, 183 bp, Glycine max
  Clone ID: LIB3106-048-Q1-K1-H7
ccaatggcggagaacggtgaaggcggcgaggagtacctgttcaagatagtgctgattggggactccgcggtggggaagtccaacctcctctcgcggttcgcgcggaacgagttcgatagcaactccaaggccaccattggggtcgagttccagacgcagctcgtcgagatcgacggcaaagag

SEQ ID NO: 21641 - DNA, 183 bp, Glycine max
  Clone ID: LIB3106-048-Q1-K1-H8
agcaagcgtaccgtgttgcctctctgcaatctacagctaaaatgcatataaagacgtacgtagagatcggaagggttgtccaaattaactacatgctggaatatagggggctcgccttgatcgtcgacgtcattgaccagaacagagctcttgacgatgcccctgatatggctaggtcccaag

SEQ ID NO: 21642 - DNA, 277 bp, Glycine max
  Clone ID: LIB3106-048-Q1-K1-H9
agcacacgtcccgtgttgcatctatgcaatgtagaactataatgcacataaagaggatcatggcgatcatatatcttgtccaagtgaactactttctgggatatggtgagataagagcaagagtggtcgacagagacgtgagcagaactcttgtcgagcccctgatgtgataagacaaagaaatgtaccaggatgtcagtaaggatatcagattgacattctgagggtcttaagaaaataacctgtctaaacatcgggatgacgaccgcagaccaag

SEQ ID NO: 21643 - DNA, 183 bp, Glycine max
  Clone ID: LIB3106-048-Q1-K1-C8
gtcctgccaggattttggatggacattgtacaaccgagggattatattgctggcctgaggctttacctggactcattgaggaagaagtcatcttctaagttggccagtggctctcaaattgtagggaatgtcattgtggatgagacagccaaaattggcgagggatgcctcattggacctgat

SEQ ID NO: 21644 - DNA, 372 bp, Glycine max
  Clone ID: LIB3106-048-Q1-K1-C9
cccactcgttcgaattactgttcccaaggattttgccatttcaaagctgggaaagaacagtggaagtactttcaagttcctttgtcaataagcaagatcaatacactgtggaaggagtgcagaatcttggagacaaagcagtgatgtgtcatgggctaaatttcagaactgcattattttactgccataaagtccgtgaaacaacagctttcatggttccattggtggctggtgatggaaccaaaactcatgcacttgctgtttgccactcagatacttctggaatgaatcatcacatgcttcatgaactcatgggagttgatcctggaactaaccctgtttgccatttccttggaagcatggcacatttat

SEQ ID NO: 21645 - DNA, 185 bp, Glycine max
  Clone ID: LIB3106-048-Q1-K1-D1
caaagagaagagatctgcctccttttttttatcaaatctatctcttcttcaagaatagttgaaaatggggctgtctttcaccaagttgttcagccgactgtttgccaagaaagagatgcgtatactgatggtgggtctcgatgctgcgggtaagaccaccattctgtacaagctcaagcttggag

SEQ ID NO: 21646 - DNA, 130 bp, Glycine max
  Clone ID: LIB3106-048-Q1-K1-D10
aacactcttccgcttggttttgcagcattatttgttctttgtatgaacaactgttattcggatgctatcaattgattccaggaaactgtaattcccatttatgaagcggatcctcttcttctgtttttca

SEQ ID NO: 21647 - DNA, 385 bp, Glycine max
  unsure at all n locations
  Clone ID: LIB3106-048-Q1-K1-D11
tcgtccacgcgttcgctttcgctttcaccgtaacacaaccctcgttgttccgtgttctggcgaagcgacaccgttttacacttcctcttctcggcacagagaacaggattgtgagctatggaggttgctgaccttttgtcactgtagagctttcattccatcacagccattttccaattcggagaatctagcaggttgttgaaaatatggccaagcatcatcctgatttgattatgtgccggaagcagccagggattgccattggacgactgtgcgagaaatgtgatggcaagtgtgtgatatgtgactcttatgtgcgtncttgtacacttgtccgagtttgtgatgaatgcaactacggatcatttcaaggtcgatgtgtcat

SEQ ID NO: 21648 - DNA, 406 bp, Glycine max
  Clone ID: LIB3106-048-Q1-K1-D12
tagccagttcggtccctcacttaagccactgtgtggaactaacaacaacacaaggccatcatcatggcagctgcttctcctatggcaagccaactcaagtccaccttcactaaaactcttgtagctcccaagggcctatctgcctcttcaccactccacctactgccttctaagaggcaatttatcttcactgttagggccatccaatcagaaaagccaacctatcaagtgattcaaccaatcaacggtgatcccttcattggaagccttgaaaccccagttacatccagccccttgattgcatagtacttatcgaaccttcccgcatacatgaccgcagtgagcccactactaagagggatcgaggtgggcctggcccatggctaccttctggtgggcccattcg

SEQ ID NO: 21649 - DNA, 185 bp, Glycine max
  Clone ID: LIB3106-048-Q1-K1-D3
gctaccaggagctccctatctacagtgtttgcctctctttctctctctctctctgcaaaagctacgaagctgcgttctgatccttcaaattaggtactctattgatctcttcctactttgccctcttgcaattcttcccttaccaacctgtgttctgtccataacccttcaagtttaactctttt

SEQ ID NO: 21650 - DNA, 91 bp, Glycine max
  Clone ID: LIB3106-048-Q1-K1-D4
gacacacggagctacatatctacagtgtttaactatctttctatctctctctctcgaggagctacgaagctgcgttctgatccttcaaatt

SEQ ID NO: 21651 - DNA, 176 bp, Glycine max
  Clone ID: LIB3106-048-Q1-K1-D5
ggtgagggctgccacttcctgcactatgttcccggcggttataatgcaggtgcccataggatcaatctaacacctgcagcaccagttccaccgactagaaaggttgcaactcttcctcatgtacctaatgggtatgctccatctgactataacactctcatctgccacaagcttaa

SEQ ID NO: 21652 - DNA, 81 bp, Glycine max
  Clone ID: LIB3106-048-Q1-K1-D6
cccacgcgtccgaccacacactagtacagagtgagcgtgaaagatgccttcggcgaggggatcaatgtcaccaaggctcga

SEQ ID NO: 21653 - DNA, 424 bp, Glycine max
  unsure at all n locations
  Clone ID: LIB3106-048-Q1-K1-E10
aaaaggccatataatttttttttatttgaaataatgtccgggatcatccacaagattgaggagaccctccatgtgggagggcacaagaaagaggagcacataggagaacaccatggtgagcacaaaggtgaacacaaaggagaacaccatggtgagcacaaaggtgaacacataggagaacaacaccatggggagcacaaggagggacttgtggataagatcaaggacaagatccatggtgatggccatgacaagggtgagaaaaagaagaagaaggacaagaagaagaaggagcatggacatgaccatcatggtcatagcagcagcagtgacagtgattagatcttatatgttaagcatgtgtacggtacgatggtagtgaggagccagaatccctcttncttgcttatgatataataaaaat

SEQ ID NO: 21654 - DNA, 64 bp, Glycine max
  Clone ID: LIB3106-048-Q1-K1-E11
tcctcctactgtttgttgttgtaactcgttcttcttctttcgccgttctgtgtatatgtttatt

SEQ ID NO: 21655 - DNA, 402 bp, Glycine max
  unsure at all n locations
  Clone ID: LIB3106-048-Q1-K1-E12
ctcttttattctattctaaatttcgcattggacatggctttcacacagcttatcccttgggcttcttcttcctccttaaaccctatcacactctccctaaaccctaaatccccaacctctccgccgcagcagcatttcaatctcgatattctccggcaccggcgccggaggcctaattccactcttcggtgctccgcctcctcgttctcggagaagcaccacacgaactcctcgaactccgacgacgtggtggagctccccctgttccctctccctctggtcctcttccctggcgccatcctccccttgcagatcttcgagttccgctaccgcatcatgatgcacacgctcctncacaccgacctacgcttcggcatcatctacaccgacgccgtctctgga

SEQ ID NO: 21656 - DNA, 163 bp, Glycine max
  Clone ID: LIB3106-048-Q1-K1-E3
gaaaaaaagaaaaaaagatgtaagcggtaccacaaaactactaacagagaaaactttcgatttctggttttctgaatttcggatggttgactctaattttaggagctggaaaaggtactaaatctaaagttggacgaaatgtgaatccagggattcagttttt

SEQ ID NO: 21657 - DNA, 98 bp, Glycine max
  Clone ID: LIB3106-048-Q1-K1-E4
atcattcgtatcgagcgtcgacgtacagattaacaatcccactagtataaggaacagaagagaaagggtgaagctattcttatcaccttgtttaggat

SEQ ID NO: 21658 - DNA, 180 bp, Glycine max
  Clone ID: LIB3106-048-Q1-K1-E5
gggaactgggaagtacaccatgggcaatgatttgtggtatggaccagacagagtgaaatacttgggacccttctcagctcagaccccttcatacttgaaaggagaattccctggggattatggatgggacactgctggcttatctgctgacccagaagcatttgccaagaacagggctct

SEQ ID NO: 21659 - DNA, 182 bp, Glycine max
  Clone ID: LIB3106-048-Q1-K1-E8
ctcacgcgtacacttacgcgtgggcagacgcgttggatgactcgaacattccgtgactggttcgtactgtcgacccagcttctcttttcaccattttcttggcaaccaaacaccctaatcaatcaataaattcattttttttaattcgcagtatgaattccttttctctgatcgggatctgg

SEQ ID NO: 21660 - DNA, 385 bp, Glycine max
  Clone ID: LIB3106-048-Q1-K1-E9
ttttgcttgaatggtgaatctgtttgttgattctttatgttctgaaatttgtatcggtgggcaatatgatcgcgtggctgattctgtattgggagtgctgagtggtgtattggtggtgtctgaatgtttcatgtgcatgaatttagagcactgccttgtattgctgtgctgagccattttttagggatttctccaagtcaactggttaaagcttgaatagtctatgaaataagactatgtactctgtccttacatatgtagtctacaacaagaataacgagccttatatttcactaggcgaggttaggtatatagactacatgatgtcattggactgcggcaaaaactgcattttcagggacattattccgtgagatccgttttt

SEQ ID NO: 21661 - DNA, 78 bp, Glycine max
  Clone ID: LIB3106-048-Q1-K1-C7
ccatccactacctcacacaagcatcaagtgagtctgctgtgatttgaatggagcgaagaggatattgcgactgcaatc

SEQ ID NO: 21662 - DNA, 87 bp, Glycine max
  Clone ID: LIB3106-048-Q1-K1-F1
gaccacacatggatcatacatggcgtgggtaatggcagcactctggctcatgacgcgcaggtcgatttcggaagtgcacacacggac

SEQ ID NO: 21663 - DNA, 437 bp, Glycine max
  Clone ID: LIB3106-048-Q1-K1-F10
tcggaaaattgtctctttggtgtgacccttctatggatccacatcaagaaaaggaaagtgagggatggatgatatctggagggagatctttgttggtccagggactgaagagagagcttgtaattgctcaaatatctagaaaggcagcatctgcgtcattaaggacggctcttcaaaaagctgcgcatctacggctaacagaaaaggagaagaacaaaagtccttgctatgctatgcgcatatctttgcaaattaacagaattgcttggagtatgcttgttgatggtaaatcctttgctgaagctgagattaatgacatgatatatgactttgaccgggattacaaggatgtcggcatcgctcgggttacaacaaaatattttgctgtcagaaactgcctgcctaatgtcaaatcagatatgcgtttgtcagcatgg

SEQ ID NO: 21664 - DNA, 421 bp, Glycine max
  Clone ID: LIB3106-048-Q1-K1-F12
gttgcagcattcagatggatgagaagatgctagtgtatgagtacatggaaaatagaaggctggatgccattttgtttgacaaaacaaaaagatcctcactggattggcaaaggcgattcaacattatatgtggaattgctagagggctcctttatttgcaccaagattccagatttaggatcatccatagggatctcaaggcaagcaacattctacttgacaaagagatgaacccaaagatatcagactttgggatggctagaatttttggcaccgatcagacagaatcaaataccatgagagttgttggaacatatggttacatgtcccctgaatacgctatggatgggatcttctcagtaaaatctgatgtttttagttctggggttcttgtgctggagatcatacgtggaaaaaagaa

SEQ ID NO: 21665 - DNA, 196 bp, Glycine max
  Clone ID: LIB3106-048-Q1-K1-F2
cctagccgttcccatctgagtgttgaacagagtagtaggcagatgccaatcatggattgcactttagtgtcatcttttattccgatgtcaactgctacacactccagctttcatgaaaaacttcgtaaccctcataagaagcctcaaaatgaggttcctactactacaactaggactcccacaacaacttcttttt

SEQ ID NO: 21666 - DNA, 99 bp, Glycine max
  Clone ID: LIB3106-048-Q1-K1-F3
gaattatcacttaacctgcaagttgatcccattagtatgacgaagtggcaggtgttccggcctatggaccagtcttttaagattcaccgtatttataga

SEQ ID NO: 21667 - DNA, 78 bp, Glycine max
  unsure at all n locations
  Clone ID: LIB3106-048-Q1-K1-F5
gcccccgaagntctcagggtcagcatgattaagacctgcaccattcatgcctgctccgggatcccattgtactgccca

SEQ ID NO: 21668 - DNA, 181 bp, Glycine max
  Clone ID: LIB3106-048-Q1-K1-F7
gacctactgcaagcgcgggcgcggcctcatcaagatcaacggctgccccatcgagctcgtcgagccggagatcctacgctataaggccttcgagcccatccttctgttgtgaaagagccgctttggcggcttcaacatgcgcatccgcgttaagggcggctgacacacctggcagatctac

SEQ ID NO: 21669 - DNA, 151 bp, Glycine max
  Clone ID: LIB3106-048-Q1-K1-F8
tcgaacgagcactatcatagtgcatacagccttaaccttcgctgcctccaacggggagccatgggcacccacaaagagtgtctcccatattaccatctttcttaccttatttaaagcctagtgcttctcacctcgttactctccgattagg

SEQ ID NO: 21670 - DNA, 268 bp, Glycine max
  Clone ID: LIB3106-048-Q1-K1-A12
agtgttgaaggatctgtgcgtgagttcttggtgaaacaaaggaatcgtagatccgtttggttgtgtagttttttttttttttgtcagagaagagaagcgatggggttgtgggaatcttttctcaattggcttcgcagcctctttttcaagcaggaaatggaattatctctgattggacttcagaatgctgggaagacttcacttgtaaatgttattgctactggcgggtatagcgaggacatgattcctacagtgggattcaatatga

SEQ ID NO: 21671 - DNA, 173 bp, Glycine max
  Clone ID: LIB3106-048-Q1-K1-A2
cccacgcgtccgcccacgcgtccgtccttttccttttcctcctctgtcttggagtgatgaccaggaagcttctcttttatcttttctaatatacctttcttctccttggcctctccttcatgatgcatacttaatttactttattattgtgtatttatctcttccatttacaa

SEQ ID NO: 21672 - DNA, 186 bp, Glycine max
  Clone ID: LIB3106-048-Q1-K1-A3
gtgcacaagaagtttagtcagcaatataaggctaccattggagctgattttgtcaccagagagcttcagattgacgacagacttgtcactctacaaatatgggacactgctgggcaagagcgattccagagtctcggggttgcattttatagaggcgcggattgctgtgttcttgtgtatgatgtg

SEQ ID NO: 21673 - DNA, 188 bp, Glycine max
  Clone ID: LIB3106-048-Q1-K1-A4
gtggtgttagatctgtacctgcctagccattgatttggaaaagtccaagcttcaaagatgagtaagcttcagagtgatgctcttagagaagctatctcaggaatcatgactgattccaaggaaaagaacaggaaatttgtggagaccattgaactccaaattgggctgaaaaactatgatccccagaa

SEQ ID NO: 21674 - DNA, 180 bp, Glycine max
  Clone ID: LIB3106-048-Q1-K1-A5
ctgagattatccctcttataacaatccacacccaaattctagggttccgaagtggacgctggcggaaagatcaagaagggcgccagaggtagaaagggctgctgcccaaagaagaagccggtttcaaggtccgtcaaagccggtctccaattcctcggctgaagaattggccgttatttg

SEQ ID NO: 21675 - DNA, 187 bp, Glycine max
  Clone ID: LIB3106-048-Q1-K1-A6
cggacgcgtccgcccacgcgtccgataatattttagttaaaacatgtccatggccatcattaacacttttggaaacgttgatgtctatattctattattatcatcatggtttctcgtatctgctgtgtgtgtttggggacgacccgccacttttctgcaagactttgaaatcacgtggtcaaagaac

SEQ ID NO: 21676 - DNA, 187 bp, Glycine max
  Clone ID: LIB3106-048-Q1-K1-A7
tcgccacgcgtccgtatacatacaagttctttaggcttacaggaaaagatggttggactaatcttggaagagtatttctgtgtgttacaagaactgatgctatgtttgcagaccttgggtactacagacaaacacctgttagggttgcatttttttgtatcatttacccatgtctagttctttcaaa

SEQ ID NO: 21677 - DNA, 163 bp, Glycine max
  Clone ID: LIB3106-048-Q1-K1-A8
gagacgcatgcgtatacggacaacaccgagcggcttacaggacaagatgatcggacggggccagaactaatctatgcgcatgcaacagggccgagatctacccaggaagaggcatcatacttcagagaggcaattgtgagggttgcatgtttgcagactcaaa

SEQ ID NO: 21678 - DNA, 284 bp, Glycine max
  Clone ID: LIB3106-048-Q1-K1-A9
tctcccactcattctgttcacttgatccttcttaagtcttcatcatcatcatcatcatcaccgcggattgaataatattcctatcataaacatctccatcgcaaggcctgaatagtctactcaccccgactctttctatgcttacttggcttagttcatatacacctttatcttccttttcgcctagtcaggttcaagcatcttctactacatactcacctactactgctccacaaatccctcctgcctcatctactcttctatcgcccattctttagccctct

SEQ ID NO: 21679 - DNA, 186 bp, Glycine max
  Clone ID: LIB3106-048-Q1-K1-B1
tggaacggactaagttagaaatgctaatgacgtcactacatggaaaggatcagctgctggttcttgtatttatgatttataactgtgtgtgaactgtactgaattttcaactccaacgatattcactattgcgaaaagacagctgactatgatgtcgaggtcaaaggggttgaaatatctgctgat

SEQ ID NO: 21680 - DNA, 300 bp, Glycine max
  Clone ID: LIB3106-048-Q1-K1-B10
tcggtctaattctacattaaaagaatggttacttatagccattcgattcgttttagttctatggattctatatgaataaatggattgtttatttcaacaaaaacaaaaaaatgaaaattttcatttttttgttttgttatagatagtctgtatctgtttgctttaaggaaaaaagaaaaaaatgaaagaaagagaaaagcccaacctagatcataataaaagactcccaagttttcagtcggaaagagaagataaaaaactaagatgaaaaaaaaaaaagaatcgaccattcgagtattc

SEQ ID NO: 21681 - DNA, 300 bp, Glycine max
  Clone ID: LIB3106-048-Q1-K1-B11
tcttggaggaagcatggcaacatggaaaggaatcaaaacttaagagttcatcagtgcatgcagaataatctaggaaatcaggatcagagaaagagaaaaaggggaagaagtcatggaaaagttctctgtcttcatggtggaaggcttacaagaaaagcatgcttagtgaaaaaaccttcaactattctaaattaaaggattctggtaataagcattctcattcttctggtccaatgtatagattctccttaagttctgtttgataacactttctctcatcatttggttctttttttagtc

SEQ ID NO: 21682 - DNA, 190 bp, Glycine max
  Clone ID: LIB3106-048-Q1-K1-B2
cccacgcgtccgcccacgcgtccgcccacgcgtccggtcattttgatgagaatatgatttcacggagcaatccataatgatgagacaccttgtttttagcattgaaatctagttgaggcttcgatcttaagttattttgttttgtttttttttttttgctcagcattaagttattttgtattacttattg

SEQ ID NO: 21683 - DNA, 176 bp, Glycine max
  Clone ID: LIB3106-048-Q1-K1-B3
cccacgcgtccgataaaaccaagttcttactttgaagagaaaattaacaacgtgaagatgtctgtatcaggaggcagaggaagccaggaggaggagaagaagccttctgatcaaggagcacatattaatctcaaagtcaagggccaggatggcaatgagggtttctttaggattaa

SEQ ID NO: 21684 - DNA, 190 bp, Glycine max
  Clone ID: LIB3106-048-Q1-K1-B4
gaacaagtagttgagaactaagaaggagaagcaaatggcttcctcaatgatctcttccgcagctgttaccactgtcaaccgtgccggtgccggcatggttgctccattcactggcctcaagtccatggctggcttccccaccaggaataccaacaatgacattacctgcattgctagcaacggtggaaga

SEQ ID NO: 21685 - DNA, 180 bp, Glycine max
  Clone ID: LIB3106-048-Q1-K1-B5
gccacgcgtgcggaatgggtcacgcacgtaggctcagtcgccaccattggtgtcactgaccatgcccaggaccatcttggagaggttgcgtatgtggagctgccagaaccaggtgtcacagtttccaagaagtctggcttcggagccgttgaaagtgttaaagcaacaagtgatataaac

SEQ ID NO: 21686 - DNA, 185 bp, Glycine max
  Clone ID: LIB3106-048-Q1-K1-B6
atcttccttagctacctagattattcacttcaattcctcacaagcaacaccgtttcttgctccaatggcagctttgtatctcccaataagcatgttggcactcattgttgttgtttctcttggtttgtggagtggtgttcaaggtgcaccacaagtgccatgctacttcatttttggttgattct

SEQ ID NO: 21687 - DNA, 178 bp, Glycine max
  Clone ID: LIB3106-048-Q1-K1-B7
accacgcgtacgatttcatcatcatccatcgccaatgaagcgaaagaaatgctcggaactggaagagcaaaccctcctctccaaatactcctagctcctccgttcaagaacccttgccaagcttaaaacgcgtgagaagaagttcaagccggtggcggagcacgtgaacgcggtgcat

SEQ ID NO: 21688 - DNA, 388 bp, Glycine max
  Clone ID: LIB3106-048-Q1-K1-A11
tgaagacatagagcacaatgttgccggaagtccagacgacaagctgcagcacaagtttggagtgccaaacaaacagtgattacttacgaaagccttctgagatttttcttttctacaagatggaataataagagatggctgctggagattcattgagcattgctggttcgtggttgcggccccatataaatttaggggggaaaataataaagaagcgatttaagggtacaaggatagtgcatagtagaaaattaggaatgttcataggctttgatatggaaaggctatttcttggttaattattgctgtgtggaatgaaaatgtacagtttggtaattaatgatttacgttatcgtttccaaaataaattccatacttcttaaaacat

SEQ ID NO: 21689 - DNA, 176 bp, Glycine max
  Clone ID: LIB3106-048-Q1-K1-B8
accacgcgtccgattgcataatcacacatcgcccatgaagcgagagagatgctcataactggaagagcaaaccctgctctccaaatactgctagctcctccgttcaagaactcttgccaagcttaaaacgcgtgagaagaagttcaagccgatggctgagcacgtgaacgcggtgc

SEQ ID NO: 21690 - DNA, 391 bp, Glycine max
  Clone ID: LIB3106-048-Q1-K1-B9
ctcctcccatccctccttccctctccctctcaacttcattttcctttcaaatagtaacacgtagagaacaaaagctctagctagaactgataatgtatatacaagccatcattcagaacaattagtgcatcctctttcatctgaagaacttgtttagtttgctcctaaaatatttgtctgaggatgtggtgcagaaatcctttacccttccttctttattaaagcttatagcatctgcaatcattaatttcttattccttcaaagtggcgatcacactatcattcagctgattttgaagattttgtggcaggcataaaacctgcaatgagatggctttcttcccagcaaatttcatgctccaaactcctcaccatgatgatcatcatcatc

SEQ ID NO: 21691 - DNA, 183 bp, Glycine max
  Clone ID: LIB3106-048-Q1-K1-C1
cccacgcgtccggctaccctaaccgtttatagcactgccttgcgattgatgcgttctgtactagcattaccacaccttaaatttggatatttaactacacctcctgtgtgagcatcaattgcatctcataatgactgtaaactatcagaactccttttggatcatgaatagcttcatcagata

SEQ ID NO: 21692 - DNA, 458 bp, Glycine max
  Clone ID: LIB3106-048-Q1-K1-C11
gaaaaaagagctcaaaaagtctaaggttatcaaaatagactctcaaaaatcatgggatcagcacatctctcatgccaccaataaaaagtacccagttgtggttcatttctctgctttctggtgtgtgccttctatagttatgaatcctttctttcaagaattagcctccacctatgaagatgttttgtttctgacgttggatgtggatgaggttaaggaaattgcctccaagatggaaatcaaagccatgcccacctttctgttactgagtggagggactcccatggacaaaattgtgggtgcaaatcctgatgaaataaggaaaaggattgatcattttgttaactcaactcattcctacaaatctgtgtaaaccatgcacatgatgaacaaggagttggccaaatcctagaactgttgttcattgtactatgaaccatttcatatatgttttatat

SEQ ID NO: 21693 - DNA, 381 bp, Glycine max
  Clone ID: LIB3106-048-Q1-K1-C12
gtggtctttggtaattataccacagggcatctaatatagaaaattcacgtcattcttcacggtgtaaaatatagaggccatatataattttcttaagttcaaattatcttgtgctctagaacactgcacatgcacttctcattttgtaatctagctgcagataattctttgtagttcaaaaacactttggatatatgataacgaattcttaccgtgtatgatatgaaaccatagcaatcattattattgctgagtaaaggtgtcaaacagcagtgtgttagcctgtacagaaccattggggagcaaattctgatgaaataaggaaaaggattgatcattttgttaacttaacctaattcctacatatctgtgtaaaccatg

SEQ ID NO: 21694 - DNA, 190 bp, Glycine max
  Clone ID: LIB3106-048-Q1-K1-C2
ctccaacaatggtgctcgaggcgactatgatctgtatagacaattcggaatggatgcgtaacggggattactctccttctcgatttcaagcccaagcagacgccgccaatctcatttgcggtgctaaaacccagtctaatccagaaaatacggtgggagttctcacgatggcggggaagggcgttcgtgt

SEQ ID NO: 21695 - DNA, 187 bp, Glycine max
  Clone ID: LIB3106-048-Q1-K1-C3
gggtagagagggtctgtggaaaccgagaaacaaagcagggataggaagaaggaaaaatggaaaagtatttcggaaacgcttatcgtggcgacccgggagtgccccattcggacccggatcgcttcgtcaacatatgggtcggatccgctgccttcgctgttctcacatatttcaatccctacatgtg

SEQ ID NO: 21696 - DNA, 144 bp, Glycine max
  Clone ID: LIB3106-048-Q1-K1-C4
tgccacgcgttcgtccacgccttcgcggacgccttggttcttaatttcaagttgaatttggccaaaattcccgattttcatacccttggtaatgattttctgaattagctttaaaaacctaaaatttaaagttcttaagccaca

SEQ ID NO: 21697 - DNA, 139 bp, Glycine max
  Clone ID: LIB3106-048-Q1-K1-C5
gtgtgcagtcgatccctcgaagaaaaagcgaaaatgccgtcgcacaagacagggagagggaagaagaagttggcgaagaagatgaggcagaacagtgcctatcctgtactggatccacatgaggaccgacatcactatc

SEQ ID NO: 21698 - DNA, 259 bp, Glycine max
  Clone ID: LIB3106-047-Q1-K1-G4
cccacgcgtccgctttcaaagaaaaaaggagagtgcttagagagagagcaaaacatattattttcagtttcagctttttttgagtatcaacaaatggcaaccactgtgatgaccactcttccccaattcagtggtcttagaccccaattcttaactggccctgtgaagaacttggttgctgtgcaacccatgaatcgcaaggggaaaggtgcattgggagctcgatgtgactaccttgggtcattcactaatctgaata

SEQ ID NO: 21699 - DNA, 305 bp, Glycine max
  unsure at all n locations
  Clone ID: LIB3106-047-Q1-K1-G5
atacaatcggttggatcattccactttctttcaatcattccaattccacaaccaacgaaaaatcagtatcaacacaacaaaacaatgtcaaaaacaacaacttcttcttccgaacaaactgcacgcaaccgtttggccaccctcgcagctcacttgcttcccttcgacgccgncttcgncaccgcgatcctncgcccccaccgnctcttcgnccccgccggatcctctccgccggtgaacctgaagggtactgtcaccgtcgtcgacgagaggaccggcaagaagtaccagatcgaagtcacccc

SEQ ID NO: 21700 - DNA, 381 bp, Glycine max
  unsure at all n locations
  Clone ID: LIB3106-047-Q1-K1-G6
attcaatttcctccctttcctcttcctcaacatcttcatccaaacaatttcagcccaagtagcacgggcaccagcgggacccaccaacatcacccaagtgcttgagaaagcaggacaattcacaaccttcatcaaactcctcaaagcctcacaaatagctgatagaatcaattcacagctaaacaactcaaaccaaggcctaaccgtgtttgcacccactgataatgcattctcaagcctcaaagcaggaacattaaactccataaactcacaagaccaaatgcagctgatacaattccacattcttcccactctctacaccatctcacagttccaaacagcaagtaaccccttgcacacgcaagctgganacagtgatga

SEQ ID NO: 21701 - DNA, 384 bp, Glycine max
  Clone ID: LIB3106-047-Q1-K1-G7
cacaaacgctggcaatgcccgtggcaccttcgctagctatcatctccaattctcgcctctccaagcgcactctccgttcccgttctgaacaaaccaaaggttcaagggtcaagcatcaagtgcgttcgtgttggcggtgtggagattccgaacaacaagcgaatcgagtactcgctgcagtacattcatggagttggaaggaccagagcgaaacagattctctgtgatatccaaatggataataaaatcacgaaggaactcactgaggaggagctaatcacactcagggacgaggtctccaaatacatgattgaaggcgacctgagacgggtcaatgcggttaatataaagagactgaaggatattcagtgctacagaggaata

SEQ ID NO: 21702 - DNA, 374 bp, Glycine max
  Clone ID: LIB3106-047-Q1-K1-G9
ctcttcttcttcttcttcttcttctttctcaaccagccatggttgacttgttgttcttctcggtcactagaaggagcccatgaatatgaaagttgttgttgtgagcatggagaacgagaagaagaagtgcggttgctgggctgtcctcaaacgcggcgttagaggtgcgtgcaaaccttcttcagcttccagagactctcctaacactatccctcgtactagtctcgtttatgatgcagcaaccgagacaagatacttgaatgctagcaatagagaactatgccctccaaatgaagctcgattatcttctgataatcctgatcccccatctcaggagaataaggttccttgccagctccttcaatttacatttc

SEQ ID NO: 21703 - DNA, 265 bp, Glycine max
  Clone ID: LIB3106-047-Q1-K1-H1
gacagaaagatagccttgtaggttcgcagagaacaggttgagttcttagttccaattatagaacagagagcgagagcattttaaaaccctgtgtcatatcacaccgtcacaacgttttcctacctagacacactttttgacctcaaagttgaagggaagaaatcagcaccctctgatgcataattggtgtctttatgctcagagtttcttaacggtggcacagacacaacagcaacatcggttgattggggcataccacagctca

SEQ ID NO: 21704 - DNA, 412 bp, Glycine max
  Clone ID: LIB3106-047-Q1-K1-H10
cccacgcgtccggagagagtaattcccaatcaagtaaagatttagattagcaggaatgaagaagaatggagtatagtagtcatcaaccttgttagcagtctcagtcacactgtaaatttttggttacttatctctcaaaatctcaaatgcatatgcaattgcaaagcatttccgatcctgagggagagaacttttgtgacagctgtatccactccgattgttgattttttattttctttctcgcggcaagatctcactctgcacctagggttagggttttggcatggcgacttcttcttcttcttcttcgacttcgagctggcgcgagggcatgtcctccgacaacatatagggactgtgtctcgctctctcctctagcttcttcatcggtgccagcttcattgtcaaaaag

SEQ ID NO: 21705 - DNA, 313 bp, Glycine max
  unsure at all n locations
  Clone ID: LIB3106-047-Q1-K1-H11
agaaggtctccgtcgtcgtcgacaacgaggagctcaccgtcgaggagaggaacctcctctgcgtcgcgtacaagaacgtgatcggagcgcgccgcgcctcgtggcgcatcatctcctcgatcgagcagaaggaggagagccgcggcaacgaggaccacgtcttcgtcattcgcgactaccgatccaagatcgagtccgagctcttcaacatctgcgacggtattctcaagctcctcgactctcgcctcattcccttcgctttctccggcgattccaaggtcttctacctcaagatgaanggagattaccacag

SEQ ID NO: 21706 - DNA, 290 bp, Glycine max
  Clone ID: LIB3106-047-Q1-K1-H2
cccacgcgtccggggagagacacatgaaaagactttcacaatctatacaaattctatcgaatttggcgccagagcttctatttaaatctaataattctgcaattctgttaccatcatcagcaaccttgccaatatggcaacccaccgttcatccttgttaatgattcggtgtgcaaagtcttgccgattgcattgaaagataggaatgattgtgaggaattggcctttacaactctggttagtggtaatttgaaggaattaaatgcatgtaacaccttcagtgaggaaag

SEQ ID NO: 21707 - DNA, 362 bp, Glycine max
  unsure at all n locations
  Clone ID: LIB3106-047-Q1-K1-H3
caaaatgtcttctttgatgcctttgaggcttcaatgattaagatgggtaacattggtgtgctcactgggagcaaaggagaaatcagaaaacattgtaactttgttaacaagaaatctgttgaacttgatattgctactgtggcctccgaagaatcatcatcagaggagggtatggttagctcaatctaattggattaggatgaatagtttacactttaaaaatggtgcgattagagaccaataaagaagctttaggcatattcatgccatgtgcccgcgccactacttngtgtgtactgtgtttgtgttacacttttcttattggaatttgaatcatgtaatggtcatatgcaatttccttt

SEQ ID NO: 21708 - DNA, 258 bp, Glycine max
  Clone ID: LIB3106-047-Q1-K1-H4
cccacgcgtccgcccacgcgtccggggttatggtggaacaagtttgaggcactgacaccgcttgagcaaaagcaggagataaacattaaacactgcaaaattcgtaggaaccgcacaattgagatagttgcaaccagcaagtcaccaccatggcacttgttgaagcctctgcttctctttcaatctcttctggtgttgctcgtcttttcactccaccaaaatgctctcccaccgctcactttcctcatcggaattttg

SEQ ID NO: 21709 - DNA, 329 bp, Glycine max
  Clone ID: LIB3106-047-Q1-K1-H5
gtctactcgtttggggtggtgctcttggaggtattgtctgggaggcagcccttgatccgcactggggagaagcaaaagatgtcactggttgattgggcaaagcatcgctacgcaaagggatctctgggtgagattgtggatcctgcactgaagggccagatagcaactgagtgtatacacaaatttggtgaggttgcgctgagttgtttgcttgaggatgggactcaaaggccctccatgaaggacgtcgttgggatgctggagtttgttctgcagcttcatgacagtgctgttaatggagtggtgctcagtggaggggattatgaaga

SEQ ID NO: 21710 - DNA, 412 bp, Glycine max
  unsure at all n locations
  Clone ID: LIB3106-047-Q1-K1-H6
cccacgcgtccgagcttattgaaacctttatgaactaccaggagaatattagacgctgtgtttgcgataatatatgatccatcaaggtctgatcaaggtgttctagctctgaaggccttgaagctttctgactcattcatggaactctatcgcagcaataattttactggagagaaattgagggagaagaacttatcatgggtggatatctttgaggaaataccgatcaaagtttcaaattctgcacttatcagtgcctttatgacagagctagaacctgatactccagtcacccagtgtgattatgatcgcttgcaattgtcaaccagttcattaatggagagngatacagaatttttgattgaatgcatggatgacttgtcactaggacaacaaaagttccaattctact

SEQ ID NO: 21711 - DNA, 253 bp, Glycine max
  Clone ID: LIB3106-047-Q1-K1-H7
cccacgcgtccgcccacgcgtccgcccacgcgttcgaaacgcgatctagaacttgccaaacggtggtggaatttgtgatctggtgaatcatgaatgctaggagagatggtcgtaacaacagagttgctctttttgatggtattgaggagggtggcatcagagcatcgtctctttactcctcaacttcttcccatgaaattgatgaacatgataatgaacaagcattggatggattgcaagatagatttaatct

SEQ ID NO: 21712 - DNA, 148 bp, Glycine max
  Clone ID: LIB3106-047-Q1-K1-H8
cccacgcgtccgcacgacgacaacaacactcgtcctcacaccgactgccaccgcgtccaaagaggattgatgatcagatcttggtttctttggccattttcttggcgtcttcatctttggactggtcattacctatcaatttggcatt

SEQ ID NO: 21713 - DNA, 319 bp, Glycine max
  Clone ID: LIB3106-047-Q1-K1-H9
gcgaacactctaacattagacttggcatcagattcagatcctccgtcgccatcagccctaacctgggggggctttctgtagcccatagactaacagcagcacctcaccttcagatctaaaaaaatgagcagcaacagtagcagaaccgaacccatagcccaaaacatcatcaaactcatcagcaatctctgcttcttcgtctttggcttctctgtcttaatcttcaccggcatagccataacctaccatgccccagacccatggctcgagtccaaccctggcctaaccaacctcttgaaccaatcacaaaatgccactt

SEQ ID NO: 21714 - DNA, 189 bp, Glycine max
  Clone ID: LIB3106-048-Q1-K1-A1
acccaatggatttgaattcctctccttccaacaacacaattgccgtgaatggaacaatgcccgtcgcttccacgttcgcaaccgccaccgcgccgtcggataaccctccgccggcggacagctccggcgaccggaaacccatcgccctgtggccggggatgtaccattctccggtgaccaccgccctat

SEQ ID NO: 21715 - DNA, 301 bp, Glycine max
  Clone ID: LIB3106-048-Q1-K1-A10
tcggatcgagataactagaaacagtgtgatgaaaatgaaggtccttgttttcttcgttgctacaattttggtagcatggcaatgccatgcgtacgatatgttccctctccgaatgaacactggctatggtgcccgtactccggaggtgaaatgcgcaagttggaggcttgctgtggaagcacacaacatctttggctttgagaccattcctgaagagtgcgttgaagcaacaaaggaatacatccatggcgaacaatatagatcagactccaaaacagttaaccaacaagcttacttttat

SEQ ID NO: 21716 - DNA, 336 bp, Glycine max
  Clone ID: LIB3106-047-Q1-K1-G2
gggtagggcagagagagagagagagagagagagagagagagagaatgggagggtgggctatcgcggtgcatggtggcgctggtgtcgaccctaatctcccactcgagcgccaagaagaagcgaaacaacttctcacgcgctgtctcaatcttggaatctctgctctaaattctaatcttcccgccatagatgtcgtcgaacttgtggtgagggaattggaaacggatccgctgttcaattcgggccgtggatctgccctgacagaaaaaggaacggtggagatggaggctagcatcatggatggtccaaaacgacgatgcggcgcccgtttcggtc

SEQ ID NO: 21717 - DNA, 265 bp, Glycine max
  Clone ID: LIB3106-047-Q1-K1-E3
aattgaaattttaaaaatgactgggataaacttaagaattcaattattgaaattgaataagtaaacaattgaattggattggtcgaatggtatcaaaaaaatggagtactaactcccatttcttatttattattgaattaaccgatcaacttgctttgttatcgaacatttctttttgatttcaaaaattttccggaaaaaatttgaatctatttttatatgcgaatcaatcctactacttctggtcctgaggtttctgcgcttg

SEQ ID NO: 21718 - DNA, 354 bp, Glycine max
  unsure at all n locations
  Clone ID: LIB3106-047-Q1-K1-E5
gccatgcgttcgcctaaattcccgactcctcccaacccattcggttcactccctgcaacatcgagcagtaaagaatgggagacaaaaagaagaaggctcagatgtttgtaaagctagtgtctgctgctgggactggatttttctatgttaagaggaagccaaggcagttcacagagaagcttgagttccgaaaatatgatcctagggttaatcgtcacgttctgtttacagaggctaaaatgaaatgatattgtacctttcatggctgcctttgcattgtaactggatcaatctngtatttctccctgagacaattatctcatttggtattagattttgaatcatgccaatctt

SEQ ID NO: 21719 - DNA, 405 bp, Glycine max
  Clone ID: LIB3106-047-Q1-K1-E6
ccacgctttctctttctctcccttttgaggttcaattagactatggtgggagtggtgcaccctcgacaattcatcaagttgaagctttttcagttctgattcatctgggtctcgcgattgctcggtgctgatttagtattttagggtttcaaatttagagaagccccatagaagctttgtactctgtctatgttctcttttgcaatgaaatgcttctgggtggccttgtaatttcttgtttcgtgtttttgtggtctaagttcactgctttgaacgtttcccccaaatagtgtacaatcgacaattatcatggcgttgctatagtggtcttttttttttttttcctttaattttttcctcttcttggactatcatcctggttttaattgaatttggtgggaaaaa

SEQ ID NO: 21720 - DNA, 356 bp, Glycine max
  Clone ID: LIB3106-047-Q1-K1-E7
aagtgagttttttatcacaaatttgcatataatccaataccttagtacatacaataaggggataagagtcaatttagataggataatctaatcacccatgcaatgctaagacaactacaatactataagggccggccctttaatagaacgttacttgactatctacaaaaaaaattgacattgagctttgcaatcttacatcaagcatttgcactgcccaatttctacaaactgcgtacttggaaaaaccccggctttgcccaccttaaccacctgacggacaaccccattttccaatgttacgctctctgtaacaaggcattcaccgatggacttgcccaacatacccccaccct

SEQ ID NO: 21721 - DNA, 359 bp, Glycine max
  Clone ID: LIB3106-047-Q1-K1-E9
tcgcccacgcgttcgcccacgcgtccgacacaatcgaagccaagtgtacggtccacagcttcaagagctacacgaagctcgatgctgtcggaaacgacgatttcttctgtcgttttgagtacaattcctccaccggcgccttcaatcctgatagagttgctgtgtattgtaaatgtgagatgccttacaaccctgatgacctaatggtccaatgtgagggctgcactgactggttccatcctgcatgtatagacatgactgtggaagaagccaaaagacttgaccacttcttttgtgaaaattgctctgctgaaggtcaaaaaaagttgcaaaactctcattctgcttctagacactca

SEQ ID NO: 21722 - DNA, 286 bp, Glycine max
  Clone ID: LIB3106-047-Q1-K1-F1
attttataagtgatttttttatcacaaatttgcatataatccaatacattgtacatccaatagaggagaagattcaatttgatgggataatctttcacccaaagcatgctttgctaatccgctactatgttcccagcacttttaataaaagttacttgactatctacaaaaaaaattgacattgagctttgcaatcttccagcaagcatttgaagtatataagtgcagcacttccaacttcttggttccattcattgaacacttgcaaattatcaattccaaaaat

SEQ ID NO: 21723 - DNA, 409 bp, Glycine max
  Clone ID: LIB3106-047-Q1-K1-F10
gaaacttgggtgcgattccttcactcacaacttcaacacatcactatggctcttctgagtcgagcctcttcacgcttccctcagctggtttcccctcaaagggtagtttcactccacacaacgctcccatctctgaacgcatccccatccacagccacgcctacaccatatgccccgccaccgcctccgtccgctttctctcccgccggcgtttcgaaagcggcggagttcgtgatctcgaaggtggacgatctgatgaactgggcccgccgcggctccatctggcccatgaccttcggcctcgcctgctgcgccgtcgaaatgatgcacaccggcgccgtccgctacgatctcgaccgcttcggcatcattttcaggcccagccctctgcagtctgattgcatgatcg

SEQ ID NO: 21724 - DNA, 358 bp, Glycine max
  Clone ID: LIB3106-047-Q1-K1-F11
atggctacagcgtgaatggctacagtggtggaaattttgcaccaggtagatgttctaactacgttggaaaatgccctgctggtgattcttccaccgagccctacattgttaaccaccacttaatacttgctcatggagcagcagtcaattgctacaagaacaaataccaggctcatcagaaaggacaaattggagtcaccatagtgactttcttctttgaaccaaaatctaatagtgatgctgatcgcaaggcagcaaggcgagctctggactttatgtttggctggtttgctaatcccattacatttggtgactatcctgagagtatgagatctttagttggttctagactccccac

SEQ ID NO: 21725 - DNA, 362 bp, Glycine max
  Clone ID: LIB3106-047-Q1-K1-F12
tcgtcaccacaataattaagaaaaaataatagtaataattgaagaaaaaacaagaaaaatgatccaaggtaggtatttgaattatttgtttttctttgtttcttgtaaaaacaaaaacaagggcatgtggtgtgaggataattaaggcttgggtacgtacgtaggtgattattcattgtcaaggtgatattccttttttagcctttgctggaagccgtaataaccgaggtaccacttgacgaactttctgagaccggtggcgagatcggtggtgggattgtaagagaaatccctgtaggccaagctgacattggcgtgtgtgaagggaacgtcgccgtttgatggcatcttaatgacgtgct

SEQ ID NO: 21726 - DNA, 318 bp, Glycine max
  Clone ID: LIB3106-047-Q1-K1-F2
gcgaattcaagcactttgtaattgttaagttcaaggaaggtgtggccgttgacgagctcacaaatgggatggaaaagttggtcacggagattggtgctgtcaagtcctttgaatgggtacaagacattgaaagcctagatgtgttgagacaaggtttcactcatgcattcttgatgacattcatcatgaaagaagactttgtcgcatttcagagccacccaaatcatgtcaagttctcgacatagtattcggcagctattgagaatattgtgctactggattacccatctactcttgtgaaggctccatcatgatcct

SEQ ID NO: 21727 - DNA, 339 bp, Glycine max
  Clone ID: LIB3106-047-Q1-K1-F3
gacaggttcttcttagtgtgcaaggggcaggagcggttccgcgtgaacgacgtcgtgcggacgaagccgtgcctggtggggcgggtgacgtggctggaagacaggccgtccgagattaatgtcggaggcgatgacgtggaggggctggcgcgtgaggtggaagggtacatgaaggacgtgataaggttgtcgaataggttgggagggaagaagggggagaataaggagattgggaacttgcgacggaatctttttccgacgccgttttcgttctttgtcggaagcacgttcgagggtgctccgagggagcaacaagcgcttttggagttggaggacact

SEQ ID NO: 21728 - DNA, 383 bp, Glycine max
  Clone ID: LIB3106-047-Q1-K1-F5
cccacgcgtccgcccacgcgtccgcccacgcgtccgagaaaagcaaaatcgaattatcatagaaggaagtgaattgaatttcattgacagagtcagagtgaagtgttgcgcaaatctgaggtgcgcattgcattgtggttgatttgtaagaatggcgccagtgtcggctctcgcaaagtacaagctggtgttcttgggtgatcagtccgttgggaaaaccagcatcatcactcgcttcatgtacgacaaattcgacaacacttatcatgctacaatcggtatcgattttctgtcaaatactatgtatcttgaagatcgaactgttcgactgcagttgtgggatacagctggacagggatggatttagaaatcttattccaagc

SEQ ID NO: 21729 - DNA, 284 bp, Glycine max
  Clone ID: LIB3106-047-Q1-K1-F8
aacacgcgtccgaccacgcgtacgggcataatattttgcagttcagcttgacaagagacatctcagaagaactcggcataggaaagtaaatacactacattcacacagaacaaataaaagtttgtgtttactcggtggagacaagttcctcatatattcactacatgtcatttgatcaagtcaatcattctttgggttgacattcgttatattcactcatttgcttaacaaagtaccttcctttgtctgagtaagtaagtatctgccgatgatgtactgtagtg

SEQ ID NO: 21730 - DNA, 206 bp, Glycine max
  Clone ID: LIB3106-047-Q1-K1-F9
ctttctaatagtcctgaacaatttggatatttccaccatattctccataaatgaattccttatgagcttgctttcagagaaaagaattgctgaaaatcaattgccttcaaaagctcctcatgatgaaactcttgagcattatgaaattgctgcaggatcatcaacaatctgttgctcaatgctgcaatgtctgagtatgttccaac

SEQ ID NO: 21731 - DNA, 335 bp, Glycine max
  Clone ID: LIB3106-047-Q1-K1-G1
gtttcttctctctctttcgctttcaccgcaacacaacccttgatgttccgtgttcaggtgaaacgacaccggtttacccttactcttctcgggacagcatctagcacgttgtagaaaatatggccaagcatcatcctgatttgattatgtgccggaagcagccagggattgccattggacgactgtgcgagaaatgtgactgcaagtgtgtgatctgtgactcttatgtgcgtccttgtacgcttgtgcgagtttgtgatgaatgcaactatggatcatcttacggtcgatgtgtcatatgcggaggagttggagtatctgatgcctactactgc

SEQ ID NO: 21732 - DNA, 376 bp, Glycine max
  Clone ID: LIB3106-047-Q1-K1-G11
gcgggtgaggtagaacccttccacggtggtgactgcgcgatgggtgcctacaagtatgtttgagagctatggcgcaagaagcagtctgatgtcatgcgcttcttgcagcgggtgaggtgctgggagtataggcagcaaccttccattgttcgcttgacaaggtcgacccgccctgacaaggctcgtcgcttgggcttcaaggctaagcagggctatgtgatataccgtgttcgtgttaggaggggtggccgaaagaggccagttcccaaaggtattgcttatgggaagcccacaaaccatggtgttacccaactgaaatttcagcgtagcaagaggtcagttgctgatgagcgagctggacggaagctgggtggac

SEQ ID NO: 21733 - DNA, 329 bp, Glycine max
  Clone ID: LIB3106-047-Q1-K1-E2
cggacgcgtgggcggacgcgtggggtgagctataagctagtttatcgtgaggagaatatgaagtggtttgtgttctttgttgctgcagtagttttggtagcatggccatgccatggcgcaggctaccaaaggttccctctccgaatgaaaactggctatggtgagcgttcttcggaggtaaaatgcgcaagttttaggcttgctgtggaagcacacaacatccgagcctttaaaaccattcctgaagagtgcgttgaaccaacaaaggactacattaatggcgaacaatttagatcagactctaaaacagttaaccaacaagctttctt

SEQ ID NO: 21734 - DNA, 249 bp, Glycine max
  Clone ID: LIB3106-047-Q1-K1-G12
tcggtcgtcacagttttccaatatttttacttttttaagttgataggttgtgtcttggttacacgagttttgttccaccagagagagagagagagagaggagggggggggggggggggggtatgatctgacttgtattttccagcgtatttagttgttaaattgtgtgagccgtaacttgaaaatcaatttcaactgtgttgcctcatgcagcgcatcatttaaattttgattgagacaataattagtt

SEQ ID NO: 21735 - DNA, 325 bp, Glycine max
  unsure at all n locations
  Clone ID: LIB3106-047-Q1-K1-C6
gtcccttccgctagttctccaccagcaccaggcacacccggacccgctcccggacccgcaggtggcgccgagccaccaccgtcaccctccgccgcattctccgccagcaaggccttcattgctggctccgcactctctggaatcttcgtagccatggtcttggcttaaaaactttcgagagaagcattgtctttgatgattcgtgcacgtggaggcttttccgnccttgatccttctttcccgcacacggacggacgagatccatttgatttgtttcatcctctggtcatatgttgagttagcggttttattttcttcgggtttt

SEQ ID NO: 21736 - DNA, 370 bp, Glycine max
  Clone ID: LIB3106-047-Q1-K1-C7
ttgagcttaaaccctagccgctcttctcttcattcttcactttggaaacaatcataatggcgttgtgtaataaggttggaaatgtcttgaggcagggtgctgctcgcagcacacatgcccctgttgcgtccatgcttaattacatccgctgcatgtcttcaagcaagcttttcattggaggcctttcatatggagttgatgaccagtctcttaaggatgcattttctggctttggagatgtggttgatgcaaaagttataactgatagagacagtggaagatcaagggaatttggatttgtcaacttctccaatgatgagtctgcaagttcggcactctctgcaatggacgggaaggatctaaatgggcg

SEQ ID NO: 21737 - DNA, 427 bp, Glycine max
  Clone ID: LIB3106-047-Q1-K1-C8
gccctttgtcaagttttagtcttcatttaccatatttttcatttttggttttattttctgaaaagagatgtattatagtaaatatgagactagatatcatctaataaaaacttaggccttaatttgtcatgttataaaattaaaaagaccaatctcttttgttatgtcaattacaccaaatttgctaaaatgcatggtatggttagtgatatgatcaatggtggattacgctacggttagcatgattgcatgaatcaacggtggagattccccaaatgaaaaagctagatggaacagcgtgctaacgtgactccaatatagaagaagagagccacactttcttttccaccattgacattctctctctcactctttccttaacatttggcaacatttgtcaactctcttcttcctttctctaactttt

SEQ ID NO: 21738 - DNA, 387 bp, Glycine max
  Clone ID: LIB3106-047-Q1-K1-D1
gcgccatgaactgagtttccttgcttacaaagattatggaatcggtagtgcttggatacatctggggtgattgggtctacctgatacctatgtgcttaagtctagcaagaaggagctagctacagacattgaatgactgaacaagataattactggaactgaatagagtggccgtggcaggtcttagagggcaagagcaaaaaaagaggatctttgtgtaaagtgaatggcttgccagattggccactgatggccattatagtagagcaaatggaatggcagagagatttgatcactgagaaaacagttttccatcttaatgatcaggcaattaaaaatggttactcttgggacataatggtcaccgtttgggggtgcttattcttt

SEQ ID NO: 21739 - DNA, 344 bp, Glycine max
  Clone ID: LIB3106-047-Q1-K1-D10
tcggagaatatcatagttgaaatttaagtgttcctttggtacttgattcgaacagttgttattcggaagctaagatttgatttaaaaaaaaaaaaaaaaaaaaaaaaaaaaaaaaaaaaaaaaaaaaaaaaaaaaaaaaaaaaaaaaaaaaaaaaaaaaaaaaaaaaaaaaaaaaaaaaaaaaaaaaaaaaaaaaaaaaaaaaaaaaaaaaaaaaaaaaaaaaaggggggcccttttaaaagaaccaaagtttaataaccgggaattgaaaattaaaaccttttaaaaaggggaccaaaaataaaataaaggggccgctttttaaaaaattgagaatgggaaaa

SEQ ID NO: 21740 - DNA, 403 bp, Glycine max
  Clone ID: LIB3106-047-Q1-K1-D11
tcgtccacgcgtccggggaaaagtagtagaagagaagatgtcgaccgtaccaggacagctcatcggggagatcgtgaagaagaacaactcctttttggtgaaagagttcggaaggggcactcagagcgtgcagttcagcagagagcccaacaatctctacaacctcaacactttcaagtactccggtttggcgaaccagaaaactgtcactgttcaacctgctggtaaagaccagtccgtgttgctcgcaacatccaagacaaagaagcaaaacaagcctgctgctttgcttcacaaatctgtcatgaaaaaggagttccgtaggatggcaaaggctgtgcaaaatcaggtagcagataactactacaggcctgatctcaaaagggcagctctggcaagattg

SEQ ID NO: 21741 - DNA, 349 bp, Glycine max
  Clone ID: LIB3106-047-Q1-K1-D12
gaactactttcttacatgaatgtgctttatgaaatttgtccatacttcaagtttggttacatgtcggcaaatggagcaattgctgaagctctgagggaggaaagtgaagtccacatagttgactttcagattggccagggaacccagtgggtgagcctgattcaagctcttgctcgccgccctgtaggccccccgaagatccgaatatcaggtgttgatgactcctattcggcctatgccaggagaggagggcttgatattgttgggaaaaggttatccgcacttgcacagtcatgtcatgtaccctttgagttcaatgctgtaagagtacctgttactgaggtgcaac

SEQ ID NO: 21742 - DNA, 156 bp, Glycine max
  Clone ID: LIB3106-047-Q1-K1-D2
aaaccaacaccttacaaaattcaaacatccttaatctttttttcccccaacgttgttcctctttcgctacggtgattttttcccatgtctccatgtcctctaccaacttgaatgcccctcactcttcatctctttactttactatcactttttcta

SEQ ID NO: 21743 - DNA, 226 bp, Glycine max
  Clone ID: LIB3106-047-Q1-K1-D3
cccacgcgtccgcccacgcgtccgcccacgcgtccggctgaattggagaagagaaaggaaaagtgtgatatcgttgttggagatttggcagacccacttgaagatgggccatgctatcaactctacaccaaatccttctatgagaagatcctgaagcccaagctcaatgataatggcatttttgtgacccaagtaggtagataatgaatatgagtaacaccctttt

SEQ ID NO: 21744 - DNA, 392 bp, Glycine max
  unsure at all n locations
  Clone ID: LIB3106-047-Q1-K1-D4
gttccttcgattcattccatttcttccaaaatggccaaagacccagttcgcgttctcgtcactggagccgcagggcaaattggatatgctcttgtccctatgattgctaggggagtgatgctgggtcctgaccagcccgtgatcctccacatgcttgacattcctccagcagcagagtcgttgaatggggttaaaatggaattggtggatgctgcattccctcttcttaaaggtgttgttgctacaaccgatgtggttgaggcatgcactggggtcaatattgcagtgatggttggtggattccctagaaaagaaggtatggagaggaaggatgtgatgactaagaacgtctncatttacaagtcccaggcttcttgcccttgaaagcatgc

SEQ ID NO: 21745 - DNA, 364 bp, Glycine max
  Clone ID: LIB3106-047-Q1-K1-D5
cccacgcgtccgctttgctattacctctttttccaaactctaaaaatttttagttccacaaaacgaaaccaaaatggcagcagcctcggcctcatccaccatgatatcaacaccagccttatctccaagcacaagcatccaaaagcaccatcatttgaagccatccaacgtgtgctttcaaggccttagacccctcacaaggttcacaaccaaagtgagcagcaccaccaaaagggttattccaaagggtggtgtcggtgttagagctgaactcaactcagcacttgtcataagcctcagcactgggctctccctcttcttggggaggtttgtgttcttcaacttccaaagggagaaccgtgca

SEQ ID NO: 21746 - DNA, 360 bp, Glycine max
  Clone ID: LIB3106-047-Q1-K1-D6
caggatgatttcttgccaagaactgctactccattggaagatatattcaaatcaatatggtgcgggccctgcttattgttcttggtttgcctgagagacaccttcatacctgagggtagaaagcttagagatccaaggaggctttatgcacctggaagaatgtaccatattgtggagagaaaattttgcagatgtgggagatttcctcctgaagtgaggactgctattcccgttgatggaagatttgagcatatagtcttgtcctgtaatgcaacatcagatcatggaattatttggattgaagggaacctgataaagctttacaattaatgaaagctcagagctctgaaactgtgacag

SEQ ID NO: 21747 - DNA, 139 bp, Glycine max
  Clone ID: LIB3106-047-Q1-K1-D7
tcgtccacgcgttcggagctgacttccataaactactaccccatgtgcgttcacccctttgattaccaggcacatcttagacttatgtctacgaaactcacattccgtcaagcttaacaccgtcttcaatatgcgagat

SEQ ID NO: 21748 - DNA, 364 bp, Glycine max
  Clone ID: LIB3106-047-Q1-K1-D8
agtgaaggcaacaacatttgaggaagcaaacaaagggtggtccccacctttaacatctgtgtttggtcaaaaatcttcctggtctggtctggtctacccggatctaatcccgttttgaatccacctgtgtttgtttttcttctgcttcacacttctgatctcatctatacgtgagaatatctctaatagaatatcaagatttataatctttaataatattttggtggatcctgtgatatcactgtaaagatttttctttttcttttcaatcaaaaatcaatgattttaaattacttcttgtagatctcataaggacttacttcctaatatttagagtgacccccatggagggttgggttaattt

SEQ ID NO: 21749 - DNA, 424 bp, Glycine max
  Clone ID: LIB3106-047-Q1-K1-D9
cggactcgtgggcacaagccaagtgaaagtgagaaaaaataaaaatcaaagagcataatgtgagggatcattcacaagattggggagacccttcatgtgggagggcacaagaaggaggaggagcataagggtgagcaccatgctggagaatacaaaggggagcaccatggtgaacacagtagtgagtacaaaggagagcatcatggtgaacacaaagctggagagtaccatggtgagcacaagccagagcacaaagaggggttcctagacaaagtcaaggacaagatccatggtgagggctgcgccgccgaaggcgagaagaagaagaaggagaagaagaagaaggagcatggccatgagcatggccatgacaagagcagcagcaatgacagtgattaaactgctgcatacctatatatttaaa

SEQ ID NO: 21750 - DNA, 334 bp, Glycine max
  Clone ID: LIB3106-047-Q1-K1-E10
gagaagtgtccttgtgtgctacatgcacttgcagtcttacatcctgacatcgaatattcagggatcaaccaacaaccacatctcattaagatatactatctgtggtagatatcttgatagaggatccattcatctacatatgatgagctctagaatagcagatctatcttgagacacatgtacatatccaactgtaccaatgtgcacttctatggcacgtgctgctgatgataactatgtattatgctatgatcacaacgcttgaacctgaccagcagatatagcttgtacaataagctaaacatctagtctataggaaccatctggcactatg

SEQ ID NO: 21751 - DNA, 264 bp, Glycine max
  Clone ID: LIB3106-047-Q1-K1-E11
tcggctgcttaaggggtttcagccagtgacatgtttatacgccaagagttggtaaagaattagaaggctaatcttcaatctcccatatatcacagctcaagaacttgactcattaatctcaacttaccctagtcaatgcatgagaaagaactcaagaagctttgcattgattcatgtatctctagagcttccaagcataaacctgtaattcggcatataaagcctttgaaaaatgaaaagtatggaaatgtttctcaagaacgc

SEQ ID NO: 21752 - DNA, 371 bp, Glycine max
  Clone ID: LIB3106-047-Q1-K1-E12
atcttcctctttttctcaaccaaaaggggttcaattctagctagttctattacatcgtccgcgaccatgaacatggcgatcgtgcttctgttcatggttttcgcagtttcatcagctttagacatgtcaataatatcacatgacaacgctcatgcggatagggccacgaggcgcaccgacgacgaggtgatgtcaatgttcgaggagtggctggtgaaacacgacaaggtgtacaacgcgctcggtgagaaggagaagaggtttcaaatcttcaagaacaatctgcgctttatcgatgaacgaaactctctgaaccgaacctacaagttgggactcaacgtgttcgctgatctcaccaatgcggagtacag

SEQ ID NO: 21753 - DNA, 424 bp, Glycine max
  Clone ID: LIB3106-047-Q1-K1-C5
cagaggctttctcactacctttccagagattttcattaatataggaattcttcttggtgatgtgtgcaaactattcattttcaggcttttcaccacacataaactggaggataatgcttgctgtggggattttgccctcagtcttcattggatttgctcttttcatcattcctgagtcaccaaggtggttggtaatgcagaaccgaatcgaagaagcaagatcagtgcttttgaaaacaaatgaaagtgatagggaagtggaggagaggctagctgaaatacaacaggctgctggtgtggccaattgtgaaaattatgaggagaaacctgtgtggtatgaacttttgtttcctttcgcctcgcttcgtcgaatgatgatcacaggaatagggattcagtggtttcaacagaattctggaattga

SEQ ID NO: 21754 - DNA, 375 bp, Glycine max
  Clone ID: LIB3106-047-Q1-K1-B1
cccacgcgtccgggcacattttggcaatgcaatggaaaagctatcggttcagggtcagaaggtgccgacaggtctctgcaagaacaatacaacaaggacctaactcttcaagaagctgagactattgctttatccattttgaagcaagttatggaagagaaggtcactcccaacaatgtcgacattgccaaggtggctccaacatatcatctttataccccctctgaggtggaagctgtgataagtcgtctatgattttcttttcgtgactttctctattcaacatttgtgtttcctatcattcctgcctgacgtctaattattgagtattatgcggaaaccttttttgtgggtgatgtttacatgtgctacact

SEQ ID NO: 21755 - DNA, 301 bp, Glycine max
  Clone ID: LIB3106-047-Q1-K1-B11
tctcccacgcgtccggtttgttgtgagctataatctagtttatcgtgaggagaatatgaagttcggctggttctatatcgctgcactagcactcttaacatatccatgcctatgctcattcataccaatggctacctttcatcaaaaaatactgctaccgtatcccttgatcaaatttttaaatctcaacgagaacacatatctacatttattttaaaacctgtacatggtgaagcctattctatatatgctccaaatcactatctgaaatctagcatagatatcctgtcccaatataatg

SEQ ID NO: 21756 - DNA, 331 bp, Glycine max
  Clone ID: LIB3106-047-Q1-K1-B12
cccacgcgtccgcaaacctagtgcatagcatattccagtgtttttcatttcatcgtgcattcggtggccaccacagcagctctatccggaaccatggtgagcacctccttcatgaggaggcaacctatgaccaccacaagcctaaagacattccccaacgttggtgaagctctttttggtctgaaaagtggacgaggtggtcgtgtcacttgcatggcctcgtacaaggtgaagctcataaccccagaaggagaagtggagtttgaatgcccagatgatgttttcattgttgacaaggcagaggacgaaggcattgaacttccctactcgt

SEQ ID NO: 21757 - DNA, 406 bp, Glycine max
  Clone ID: LIB3106-047-Q1-K1-B2
aatataactaatattctttagaataatcaaaaagaatattaaattcaaataaattttagatagaagaaagacttaaaaaggaggatttgaaatgcgagatctaaaaacatatctttccgtggcaccagtagtaagtactctatggttcggggctttggcgggtctcttgatagagatcaatcgtttttttccagatgcattgatattcccttttttttcattctagttattgacacggaaaggggtgaagaagattatagatccaattaagtattaaatatatgtaattaatatgtaattaatctcctcttctttaatttcggcttttatttcctcctttttttacaattggtattagaataagttagggaaaaaaaaaataaaaggccgccggcccttttttttt

SEQ ID NO: 21758 - DNA, 356 bp, Glycine max
  unsure at all n locations
  Clone ID: LIB3106-047-Q1-K1-B3
aagattcctattatttagtgtaacccaactgtacaaaacagacaagaagaggccttcactctgagccaaagaccatagtcttctctttgtctgagaaaatagttccccccaaaaataaaatgaacaagggtctctcctttgtgctgctgattcttctgatccactacaacaacgttgtcaacgccaacaacaaaaactgtgtcacagaggattgcctcatcggcaacaatgatttggaatcagaattctacttcggttcccatgtggccagaatgctctacgatgtgagccaatctgtgtctggccaaacaggcaattcanacaacaaagctgttaattgtcccacaagcaatggc

SEQ ID NO: 21759 - DNA, 380 bp, Glycine max
  unsure at all n locations
  Clone ID: LIB3106-047-Q1-K1-B5
ttttcattttcatctttttttgagtatcaacaaatggcaaccactgtgatgaccactctccccgagattcagtggtcttagaccccaattctcagctgcccctgtgaagaacttggttgctgtgcaacccatgagtcgcaaggggaagggtgcattgggagctcgatgtgactacattggttcatccactaatctgattatggtggcttctacaaccctgatgctgtttgctggaaggtttggattggctccatcagcaaacaggaaagccactgcagggctaaagctggaggtgagggactcaggcttgcagactggtgaccctgctggcttcacccttgctgacaccttggcctgtggatctgntggccacatcattg

SEQ ID NO: 21760 - DNA, 406 bp, Glycine max
  unsure at all n locations
  Clone ID: LIB3106-047-Q1-K1-B6
aactaaacacaaaccccaaaaaccaaaatcacaactcccaaagcaaaaacccaaatcccaaatgagagtagtaacatgagatgacagacgaccgcgtgcatccaatcccaaacctagctatgtctccggccaccgcccactggacctctgacgccatccacggcggacccctccgtcgtgtcgacctcgactccggcaccaacggctgggccttccctcccggtgacctcttcctcctccgctcccccaattatttcaccaaacgccagaaatcacccgccggcgactacctnctctccccctccggtatggactggctcaaatcccaatccaaactcgacaacgtcctctcccggcccgacaaccgcatggcccaggcccttcgncaggcccaggcccaaggcaa

SEQ ID NO: 21761 - DNA, 428 bp, Glycine max
  unsure at all n locations
  Clone ID: LIB3106-047-Q1-K1-B8
cccacgcgtccgcttttcttgtttccttttccattcttctttttctctctgtactcaaactcacgtccccacttatttatacaatgtcggcttacaaagaccaggatacccgtcttcatggcatcaaaactaagattcgtgtcgtccccaatttccccaaatccggtattatgttccaagacattactactctattgcttgatcccaaagcatttaaggacacaatagatttgttcgttgagcggtacaagggcaaaaacatttctgttgttgcaggaattgaagctcgaggttttatttttggtcctcccattgcgctggctataggagcaaagtttgtaccattgaggaaaccaaagaagttgcctggaaaagttatttctcaagaatatattctggaatatggaagggactgtnctgagatgcat

SEQ ID NO: 21762 - DNA, 432 bp, Glycine max
  Clone ID: LIB3106-047-Q1-K1-B9
gcctttcatagtgagatagccctagaaatgtttcgtgaatctttgtttgctctctttctacgttctgccttctcctcctcactcctacctttaaccactgctcaagattacgttctcgacacggacggtcacgcggttgaaaatcacggtacatactatttgttgccagcgaaatcaggaagcggcggtggtggaatagaggtagccgcaactggcaaagaaagttgcgctctcactgtagtgcaatctctgaacgaggactccatggggctaccattgaagctttcaagcccatccatcactacgtctcacttcaccgaatacacttcgttgagcatcgagttcacttcggcgccggcgccgtgttcgtccgcttcggagtggaccgttgtcaagggattacccgaaggacgcgccgtttaacttaacgat

SEQ ID NO: 21763 - DNA, 234 bp, Glycine max
  Clone ID: LIB3106-047-Q1-K1-C1
gctataccaatataatcatattactcacatagatccatctttcactgatacacctatactctgggccaaagagctacttctactcattgactgagaaaattacatccacccaaaattaattccaccatggacaattcttttatccaactatattatttaatcacttacacaacatctttaactcccacaaccgaaaccttttcacaaacgaattcctcaatcgtaacaattatt

SEQ ID NO: 21764 - DNA, 331 bp, Glycine max
  Clone ID: LIB3106-047-Q1-K1-C10
agcagaaggagcaaaagcaatggcgccgaagaagccgagaaccacgacaaggaaccctgatttggttagggggattggcaagtattcgaggtcgcagatgtaccacaagaggggcatctgggccatcaaggccaaaaacggtggcgttttgccccgccacgatcccaagcccaagcccgaggccccggcccagaagccgcccaagttctaccccgcggacgatgttaagaagcccctcgtcaacaagcacaagcccaaacccgcgaaactcatggctagcattactccagggactgtgttgatcctgcttgctgggaggttcaagggaaag

SEQ ID NO: 21765 - DNA, 374 bp, Glycine max
  Clone ID: LIB3106-047-Q1-K1-C11
gtaatggcaaccatgtcccttacatttgcatttgcacttccttcaatcccctctctcagccagtgccatggccgtgctctttacgtcaagcccctacactgcactcccattcaacaacgccacgttggtgcagaagcacgtattgtttgtgagccttgcaatggaacggggtggttagtttgtgacttttgtaatggccaaaagaccaacgtcaaagccgaaaacaataaacgtatctaccgtagatgtccctcctgcaaagccgttggatatgtcttgagttcaaagtgcaaggtcttcaaatgcgtcacttttcctaatttcaacgactctgagaactgaattcatcatcaactctcttttttcacattttc

SEQ ID NO: 21766 - DNA, 381 bp, Glycine max
  Clone ID: LIB3106-047-Q1-K1-C12
tcgtccacgcgttcggtgtgctaactcaggcaattatatccatcaaatcaattataaaattagaaccatccagttatgagaaggttataattcagttagtctgtagcttggataaaatcaaggttccagctgcccgtgcaatgattatttggatattgggggagtattgttctttgggtgacataattccaaggatgttgagtacagtacttaagtatcttgcccggtgttttacttcagaagcattagaagctaagcttcagtttcttaataccactgcaaaggtcttactgtgcattaaaggagaagatattttgaccgtgagaaaagtttggagttatgtaattgaattggccgagcgtgaccttaactatgatattc

SEQ ID NO: 21767 - DNA, 232 bp, Glycine max
  Clone ID: LIB3106-047-Q1-K1-C2
gtttgttgttgtaactcgttcttcttcttttgttgttctgtgtttgtgtttgttttttctctcagctgaaagtgtcttgctgcggtggtaactgtggttgctgaagctcctgcaagtgcttcatcggttgctgaggctgcttgatgtacccagacttgtgctacactgatttaaccattaccgagacctttgtcatgtgagtatcacctgtcaaggctcattttgagggttc

SEQ ID NO: 21768 - DNA, 281 bp, Glycine max
  Clone ID: LIB3106-047-Q1-K1-C3
cccacgcgtccggtttccgagtctgcgtttgtgtttgtttcagagagagagagagagagagagagagagtgttgatttgttttttttttttcttttttaaattaataaattaattcagaaagggttccttcccttccttttccactcttgtcttatgattcttcttcattcttccatttgccctagattagatctttctcttccaatctttaattatattagatttgattttccttaatccttcccctgctttttcattccggatttttctgcatcagtct

SEQ ID NO: 21769 - DNA, 108 bp, Glycine max
  Clone ID: LIB3106-047-Q1-K1-C4
cccacgcgtccgaaaaaaaaaaaaaaaaaaaaaaaaaaaattaaaaaaaaaaggcgcacactctcggggatagggcatcttacatacacgtacattcaacaaaataat

SEQ ID NO: 21770 - DNA, 393 bp, Glycine max
  Clone ID: LIB3106-047-Q1-K1-A9
aggggttcaattctagctagttctattacatcgtccgcgaccatgaacatggcgatcgtgcgtctgttcatggttttcgcagtttcatcagctttagacatgtcaataatatcacatgacaacgctcatgcggatagggccacgaggcgcaccgacgacgaggtgatgtcaatgttcgaggagtggctggtgaaacacgacaaggtgtacaacgcgctcggtgagaaggagaagaggtttcaaatcttcaagaacaatctgcgctttatcgatgaacgaaactctctgaaccgaacctacaagttgggactcaacgtgttcgctgatctcaccaatgcggagtacagagccatgtacctgcgaacctgggacgacggtccgaggttggacttg

SEQ ID NO: 21771 - DNA, 109 bp, Glycine max
  Clone ID: LIB3106-046-Q1-K1-H2
atctaatcctaaccacttcaattgttcattactcagtcaacttaaacaaagttatactctaaatcttcccatgcttcctgccctgtgcctacgttctcccaatactaca

SEQ ID NO: 21772 - DNA, 192 bp, Glycine max
  Clone ID: LIB3106-046-Q1-K1-H3
ggcctttaaatatgtccggaaagaatagtgctaaactttttatgttgcagaaggacgataaatttaaatgtttgcattctcttttttgtcttttttttccccttgttttgcaaatgttcatttgcttcagttggacaatgttcactggcgtgtactgaagggcgatattaattttattgttggttctcttgg

SEQ ID NO: 21773 - DNA, 423 bp, Glycine max
  Clone ID: LIB3106-046-Q1-K1-H4
cttgtggacttggatgctgctgtgtgcctctgcacaaccattagggctaagattcttaacatcaatatcatcatccccattgctcttcagcttctcattgactgtggcaagaccccaccagatggattcaagtgtgcagatagttagttaatatataattaattattatggaattgcataactcatgcatgaataaaaacaagttgagaagatcgatgtagtgaaggaatggtctttcgtttctctttcatcaagttgttgtataccaaaggccaaggacaacataattgtactatgactctatgaggggccaatattggtatacttgttcaaactacataattttctgatctgccttgtataccaagtcatgcaatattggcatagcatccttttaattaatttctctcgttttctttggct

SEQ ID NO: 21774 - DNA, 290 bp, Glycine max
  Clone ID: LIB3106-046-Q1-K1-H5
actaagatggcttcctttgtatccttcctagtgctgcttcttgcagcccttatcctcatgcctcaagggcttgctacttactacaaaccaattaagaagccaccagtgtacaagcctccagtgtacaagccaccagtgtacaaaccaccggtttataagccaaaaccaccggtttacaagccgaaaccaccggtttacaagccaccatataagaagccaccatacaagaaaccaccttatggaaagtaccctccagtagaggacaacacccatgcctaaagcaagcaatg

SEQ ID NO: 21775 - DNA, 289 bp, Glycine max
  Clone ID: LIB3106-046-Q1-K1-H6
ctttttccaaactctaaaaatttttagttccacaaaaccaaaccaaaatggcagcagcctcggcctcatccaccatgatatcaacaccagccttatctccaagcacaagcatccaaaagcaccatcatttgaagccatccaacgtgtgctttcaaggccttagacccctcacaaggttcacaaccaaagtgagcagcaccaccaaaagggttattccaaagggtggtgtcggtgttagagctgaactcaactcagcacttgtcataagcctcagcactgggctctccct

SEQ ID NO: 21776 - DNA, 400 bp, Glycine max
  Clone ID: LIB3106-046-Q1-K1-H7
cccacgcgtccgagccactctaaagaaaatggcggtgcctctactctcgaagaagatcgtgaagaagagggtgaagaagttcaagaggcctcagagtgacaggaaaatttctgtcaagacaaactggcgcagaccaaagggtatcgattcccgtgttaggagaaagttcaagggatgcactttgatgccaaacattggttatggttcagacaagaagacccgccactatctccctaatggttttaagaaatttgttgttcacaatgtgaaggacttggaactgctcatgatgcacaacaggacttactgtgctgagattgcccacaatatatccacaagaaagaggaaagatatcgttgagagagccgcgcagcttgatgttcgtgtgacaaacaaaaca

SEQ ID NO: 21777 - DNA, 377 bp, Glycine max
  unsure at all n locations
  Clone ID: LIB3106-046-Q1-K1-H8
aggaggtgcaggcagctgagctggagcgcactttcattgccattaagcctgatggagtgcagagaggcctgatttctgagattatatctcgttttgagcggaaagggtacaagcttgtgggaattaaagtagtgattcctaaaaaggaatttgcccaaaggcactatcacgacctgaaagaaagacccttcttcgatgggctgtgtgattttctaagctctggccctgttattgcaatggtgtgggaaggacagggagttatttcctatggccgaaagctaattggagccacagatccacagaaatcagaacctggaaccattaggggtgatcttgctgtntgttgtggaagaaacatcatncatgggagtgatggt

SEQ ID NO: 21778 - DNA, 298 bp, Glycine max
  Clone ID: LIB3106-046-Q1-K1-H9
gttttattcttctctccctccttcattttcatttacttctctggaggtatataactatgattctttttttttttttttaaacataaaaattgtttaaatcttttgccatgggaacccagattttgcggcctcagggctgtttcgtagaacgaatcatgtctcctcccgctgacttttcccggcggaggagttccggtaactactgtaattattattaccacagcaaccatgttgccactttcaggtcgtgccggaagccggttgcccgacccgataaaaagaaacgggttgttccggc

SEQ ID NO: 21779 - DNA, 250 bp, Glycine max
  Clone ID: LIB3106-047-Q1-K1-A1
gtgaatgagacacgctggctaacaaccctgcaacggaccatgggcagactcttagctgtatgagggacaggcatactgagctctacagacatggaagtctctgacaggaacagataaccatagtggtacacgtgacacacagaacgcggtgactactggtctgctgaagcctgcccattagagacagcctagaagcatcgttcgaagtctgctgagcatgcctagattgtcatactcagcaacactgatg

SEQ ID NO: 21780 - DNA, 383 bp, Glycine max
  Clone ID: LIB3106-047-Q1-K1-A10
cccacgcgtccgctttgttgttgttgctctgtgccaatgtctttgtagccaatgtggttgcggggaatgtggcaactgtgggaaatgatgaagaaaagaatgtagggtttgtcggatgagcaggaggcgggtttggtgcacgaggtggatttggcggtggtggaattggacaccactagagcgttgcgaacgttgcatgcatgacaaagttatattttaacgtcctttgtattatccatgataattggtttattgaaaaatattgcgcttgtaagacagatagaattaattattaatgttggcttaataatattaacgtactccgtttcttgtaataattaacgttgaatgaaataaccagagatatatgtactctttttgga

SEQ ID NO: 21781 - DNA, 409 bp, Glycine max
  Clone ID: LIB3106-047-Q1-K1-A11
aaaaagagtcaagcggcgagcaatggcgacatcgctggtgcgatcgggttttcttcgaagcgcgcctaagaggaagcgctcgtggctcccaggttccgaagcgaaactttgcttcctctggtcatcacgatgatgcatatgagacggccaaatgggagaagattacatatctaggcattgttagttgcactggtttagccgtttataatctatcaaagggccacccacacttcaaagaacctcctgcttacccatatttgcatatccgcaataaggaattcccctggggtcccgatggactatttgaaacgaagcaccatgaagagcattagtggtttaatgaaggtatttgtggcactggtgggcattcgttttgtcaatgttcaacgaatagtgataatgatgatta

SEQ ID NO: 21782 - DNA, 380 bp, Glycine max
  Clone ID: LIB3106-047-Q1-K1-A12
tcgcggcgagacgagccgtttctaattaatgataggtgtcaagtggaagtgcagtgatgtatgcggctgaggcatcctaacagaccggtagacttgagcaaacttgaaatggctgcattgtggagatattggcgacattttaatctagtggatgcggtcccaaacccatcaaaagagcagctagtagatgttgttcagaggcatttcatgtcgcagcaaatggacgaattgcaggtgattgtgggattcgtccaagctgcaaagaggcttaagactgtgtgcaaatgagaagaaatgatattttgataaatgaaattgtctatgctaacaaagatagtgtatgtaatatccactttccttagtattatggtaatatttat

SEQ ID NO: 21783 - DNA, 297 bp, Glycine max
  Clone ID: LIB3106-047-Q1-K1-A2
ggacaagtccaactcgtagtggggttaacgggacaacagaggcagagcaagagagtgttcggagaaaatgagacactgttctttcaccttcttcagcgtttcctacgttgtccaaaacctatgtttcttttggtcccttattttccagtttcgctgttccttcttcttcttcttcgcacattgaacttccccgcaaaaggggttctcaaaacactggacttcgctgcaactgtagcatctggccaggtggccctggctctggtgatagtgatagcagcaacagaagtatcctggatg

SEQ ID NO: 21784 - DNA, 210 bp, Glycine max
  Clone ID: LIB3106-047-Q1-K1-A3
aaaaaaaaaaaaataaaaaaaaaaaaaaaaaaatcaacaataaaaaaactaaaaaaaaaaacaaaaggttacgcttactattatataaactaattcatctataaaatacacctatcaaatatctatctcccattttaactccatattctccaacttctactaacccttcttcttcttaaactaacattctacttacatatcaaacacttt

SEQ ID NO: 21785 - DNA, 272 bp, Glycine max
  Clone ID: LIB3106-047-Q1-K1-A4
cccacgcgtccgggaagcaaacgcaagagcaagagctagagctaaagctgcagagaagatggaaggagaagagggttcttagcagtcacagttgttgctcgcggacaagctattccttctacggctacccgatgtgcaagacattgacaaggttcgctacacagaggatgtcttcactcatgtcaaggaaaacgatatgagccctctgtactaaaccctagtcggtgattgcgcgtcggacttggatcgtgccctgttgtactctatgcacg

SEQ ID NO: 21786 - DNA, 432 bp, Glycine max
  unsure at all n locations
  Clone ID: LIB3106-047-Q1-K1-A5
cccacgcgtccgcccacgcgtccggaaactctaacgaaagagcgagaaagcgaagacagccatggcgtcgtttcttcaatcgtttctggatccgaagaagaactggttcgccgctcagcacatgaaatccctctccaaacgcctccgcaaatatgggctccgatacgacgatttgtacgatccttactacgatctggatgtgaaggaggcgctgaatcggcttccgaaagaggtggtggacgctcgccacgcgcgtcttaaacgcgccatcgatctttccatgaagcacgagtacctncctgacaatctgcagtcaatgcaaacaccattcaggggctaccttcaggatatgctgactcttgtgaagagagagagagcagaacgtgaagcattgggaggtttggccctatatcaacgatccattccttgagt

SEQ ID NO: 21787 - DNA, 413 bp, Glycine max
  unsure at all n locations
  Clone ID: LIB3106-047-Q1-K1-A6
gtcgcgttgtgttgcgtcgtgtcgtgcgctgttcctctgtctgtcgtttttgttttcagaccaaggcctagctccgcatcgcaaccatgtcgaccaagcaaggtggaaaagctaagcctttgaagaaacccaagtctgataagaaggattacgacgaggttgacatggctaacattcagaagaaaaaggaagaggagaaggcgctaaaggagttgaaagccaaggcgcaacagaagggaagctttggaggttctgggctcaagaaaagtggaaagaaataagggctctttatcatgattggatacatccaatattgagccctgtagtttattaccatgataaactctgtcttattgtggccttttcttatgctctaatgttagtactgaactgangtatttcgtgatgtaagc

SEQ ID NO: 21788 - DNA, 181 bp, Glycine max
  Clone ID: LIB3106-047-Q1-K1-A7
cccacgcgtccgaccaactttgtatccgttgttaaatggcttgacaatttcaattttgtttgttgtttgcatctgaaaaaaaaaaaaaaaaaaaaaaaaaaaaaaaaaaaaaaaaaaaaaaaaaaaaaaaaaaaaaaaaaaaaataaaaaaaaaaaaaaaaaaaagaaataaaaaatgaaa

SEQ ID NO: 21789 - DNA, 462 bp, Glycine max
  unsure at all n locations
  Clone ID: LIB3106-047-Q1-K1-A8
gttttgttctttcctagcaattcggcgcaatcgtcttctgcttcaaggaaggagagcttgatatgctctatcaacaaggaaaatgtcaggtgaagaggttgttgttgcagctgagccagctgctgccatcccaggcgagcctatggatatcatgactgccttgcaacttgtgctcagaaaatctctggcttatggtggtcttgcacgaggccttcacgaaggggcaaaagtgattgagaagcatgctgcacaactctgtgttctagcataagactgtgaccagcctgactatgttaaactggttaaggccctntgtgcagagcacaatgttagcctgctgacagttccgagtgcaaagacccttggagaatggtctgccttgtgcaagattgattccgaaggaanagctcaggacgttactggttgctcctgtgtggttgtgaaagatcttggtgaggagca

SEQ ID NO: 21790 - DNA, 246 bp, Glycine max
  Clone ID: LIB3106-046-Q1-K1-H12
ctttttccaaactctaaaaattgttagttccacaaaaccaaaccaaaatggcagcagcctggggctcatccaccatgatatcaacaccagccttatcttgacgcacaagcattgataagcaccatcatacgaagccttgccacgtgcgctgttaaggccttagacccctcacaaggctcacacacaaagagagcagggctaccaaaagggttattccaaagggtggagtcggtgttagagctgaac

SEQ ID NO: 21791 - DNA, 395 bp, Glycine max
  Clone ID: LIB3106-046-Q1-K1-F6
cggatgccaaattctggggatctttacaacagaacatttgggatgtgaccttttgctagttatgttgtcattgtatggttggaaatggtaaaacctagctaaaatggacaaacaattttttgtgttgctgaggatgatggaactgattcttgctggcgtgtattgggctacctaatgatgaagctcccaagaagtgtaatttatggctacagttggtaattactaattagtaaacttcctctgttttcatgatttaattggcttatatgtcattgcccatcttgcatacacatgaaagtgtgtctttacctacctgtgccaaaacaaattttatataaaaaaaagttttctttattcattttgtactggatttcgtattttccatgtcaagaatg

SEQ ID NO: 21792 - DNA, 416 bp, Glycine max
  Clone ID: LIB3106-046-Q1-K1-F7
cccacgcgtccgaacaaagtctacaacatcacattctcagttggagatgccaaaaatgggtgccatggatcaatgatggttgaagcatttgccgccaaagataccttcaaagctcccttcaaatctgaagggaagggaacattcaagactgtaagcttcaagttcaaagcaattgcaccaagaactagactcactttctacagctccttctaccataccagaattgatgactatggttctctttgtggccctgttgttgatcaagttatagtgttccctgtggcctaaatatgagttccattccatctttactataatatgtagtaattgagatttttgcaaatcacttgagcttgtcttttttataattgcaagaagatgaaagatattctcaactattactgaatcttggtata

SEQ ID NO: 21793 - DNA, 400 bp, Glycine max
  Clone ID: LIB3106-046-Q1-K1-F8
ggtttgatgtgtgagtgatgagagggtgagttgggaagatggagggtgcacaggaggagctagaaagaagaagcaagtttctcaaaagcttgatacaaaagaagaaaaccatagagcaacaagagcagcatgatcacctacaacacaataacgttcgtgtcagagcttgtgacatgcctctccctcttcagaaccgtgcctttcgttgtgcacgtgatctcctggattctatgccatcaaagaagcttgatagtaaacgcctggctctcacacttaagaaggaatttgatacttcgtatggtccagcttggcactgcattgtgggtactagttttggttcctatgttactcattcctttggtggtttcgtgtatttttccattgacaaggtttatgtcct

SEQ ID NO: 21794 - DNA, 288 bp, Glycine max
  Clone ID: LIB3106-046-Q1-K1-F9
cccacgcgttcgcccacgcgttcgcccacgcgtccgaaaaaaaaaaaaaaaaaaaaaaaaaaaaaaaaaaaaaaaaaaaaaaaaaaaaaaaaaaaaaaaaaaaaaaataaaaaaaaaaaaaaaaaaaaaaaaaaaaaaataatataaaataaatgggggcctgttttaaagaataatattttacatacccttgaatacaaaataatatctttttttataataaactaaaattaaattatatttccgtttttttaaaaattgtaaattagaaaaaacttggacttacca

SEQ ID NO: 21795 - DNA, 417 bp, Glycine max
  Clone ID: LIB3106-046-Q1-K1-G1
cccacgcgttcggtttgttgttgtaactcgttcttcttcttttgttgttctgtgtttgtgtttgttttttctctcacctgaaaatgtcttgctacggtggtaactgtggttgcggaagctcctgcaagtgcggcaacggctgcggaggctgcaagatgtacccagacttgagctacactgagtcaaccaccaccgagaccttggtcatgggagtggcacctgttaaggctcaatttgagggtgctgaaatgggtgtgcccgctgagaacgatggctgcaaatgtggaccaaactgctcctgcaacccctgcacttgcaagtgaggtgttgggagagcaagcttcaagcagagatagcccttaattaggaataatgataaactattaatgtgtagctaaaaacttatgtattatgtct

SEQ ID NO: 21796 - DNA, 266 bp, Glycine max
  Clone ID: LIB3106-046-Q1-K1-G10
cccacacgtccgaccacacgttcaactacgcattcgatgacgcatcgggcgagggtttggaactgatttgtgctagtttgcaagggaagctcattgattgtaaactgttaacaggcatggcaagctctttgacaacattagccattacctattctcctgtcaacaatggttccaggggtttcagaaagtctgttaatgcttctaaaggaagatgttgcataaaagcaatgacgatagagaaatccttggaggaattttacaatgtg

SEQ ID NO: 21797 - DNA, 372 bp, Glycine max
  Clone ID: LIB3106-046-Q1-K1-G12
tgaaaacctacttgaaagaaatagagatgccctactccaacttggagagtaggaagaagctgcagaagggtgatgatgctgactgtgataatcttcctcattctgtacataggagggacaagggagctgtcactgaagttagagaccaaggaaaatgccaaagccattgggctttcagtgtcacgggggccatagaaggaataaacaaaatagttactgggaatcttgtttccctatctgtacaacaagtcgtggattgtgaccctgctagccatgcgtgtgctggaggcttttacttcaatgcgcttggttacgttatagaaaatggtggcattgacacagaagctcattatccttacacagcccaaaacg

SEQ ID NO: 21798 - DNA, 175 bp, Glycine max
  Clone ID: LIB3106-046-Q1-K1-G2
tggcagcggcggtactctcaaattgatcctctcagtctgaggaaggaagacggtgcgttcgtaaaaagtgaaaaagaaatggcagaactgagtttgggaattctaattgatattgttgatgaggaatggatgagagacactctccctgatgatgatcttccacttgccccaacac

SEQ ID NO: 21799 - DNA, 421 bp, Glycine max
  Clone ID: LIB3106-046-Q1-K1-G3
cccacgcgtccgcccacgcgtccgcccacgcgtccgagaaaagaaggcattaggttaagagtgaaggcagtgagcgaaagagagcatagtaatacttactgagtgcttacagttgctgcgtcgcaaggtaccggcggcgacggagaactatcttctcaattttcgatcactgcattggttctgttgtcaagggttttgttcttcctgacttgcatacttgatggcttcaaagttgcagaagttgcaggccacagcatctcaagcgtctcaatttgtatgcagtcgtggaactaactactacaagcaattgctggaacagaacaagcaacacattcaggagcctcctacagtagagaaatgcaacctgttggcaaagcaattgttttacactcgccttgctagtattccgagtcgtaatgag

SEQ ID NO: 21800 - DNA, 156 bp, Glycine max
  Clone ID: LIB3106-046-Q1-K1-G4
attccttttctagggattttgaagaaagtcttgatttttttaaccattttgtttgctaatgttgcacgaaaatatagatattgtcttttagcttaaatcttctggtgcattatctggctacttaaatggcacggaagttcaaatgaacaagtctcc

SEQ ID NO: 21801 - DNA, 338 bp, Glycine max
  Clone ID: LIB3106-046-Q1-K1-G5
cccacgcgtccggcccatctcatgtgctagatttccaaccaggagaggcctttgtggtcagaaatgttgccaacattgtcccaccatatgaccagtcaaaatacgctggaactggggctgcagttgagtatgctgttttgcatcttaaggtgtcggagattgtggtcattggacacagtgcttgtggtggtattaaggggcttctgtctttcccatatgatggaacctactctactgattttattgaggagtgggtcaaaattggcttgcctgcaaaggcaaaggtgaagacacagcatggggatgccccttttgctgagttgtgctcacactgtgag

SEQ ID NO: 21802 - DNA, 354 bp, Glycine max
  Clone ID: LIB3106-046-Q1-K1-G6
cccacgcgtccggcaacccaagcctctctcttaaccccacccctctccggtctcaaagccagcgaccgcgcctccgtgccatggaagcaaaactccagcctctccttctccagcccgaagcccctcaagttctccagaacaatcagagcagcagccgccgacgagaccacagaggcaccagcaaaagtagaggctgcaccggtcgggttcaccccaccagaacttgacccaaacaccccttccccgatcttcgggggcagcaccggcgggctcctgcgcaaggcacaggtggaggagttttatgtcattacgtgggactcacccaaagaacagatctttgaaatgcccactggc

SEQ ID NO: 21803 - DNA, 426 bp, Glycine max
  Clone ID: LIB3106-046-Q1-K1-G7
gcttccgaaggggaagttacctgtaccgacaagtggagagtccgagatccgaacccgaatttcccgggaacccggttcccgggtttgaggtccgataaggccggttctggtggcaaacgcaagcgatttgaagagctcgccaagcttcagacggcgacgacggatctcaatctccggctgacgccgagttttctgcagaacgcggctagctacggctgccggcaggaaattcgctggccagggtcgccgtcaatgaattccgaggagtccgggacgacgacggcgtgcttggagagcgggatcggagatcactacgctcacgacggagaccggaaagtgctgaaccttttcatttgagagttctctttcgctctccgagattcgtcgttgagggttctcgctgacgcgtccttttgcccttttttt

SEQ ID NO: 21804 - DNA, 387 bp, Glycine max
  Clone ID: LIB3106-046-Q1-K1-G8
cggacgcgtgggtgggacagccacattagcccaaagaattcaaaatggcttcaggagaaccttacagacatggatgccaaagtaaaagcaatgatcaagcttattgaagaggatgcagactcatttgcaagaagggcagagatgtactataagaagcggccagaactcatgaaattagttgaggaattctaccgagcatatcgtgcattagcagagagggacgatcatgcgacaggggagctccgcccagcccataaaaccatggcagaagcatttcccaacttgctgactgatgattcaccatgtaattcttcagacactggagctgagccaccgcacacaccagaaatgccacatggcccacatccaattcgtgcattattggac

SEQ ID NO: 21805 - DNA, 395 bp, Glycine max
  Clone ID: LIB3106-046-Q1-K1-G9
gtttaacggttgaaacgaagcgaaacttccaacttcatcttcaaccctgcgctgcttttgaactgatttgtgctagtttgcaagggaagctcattgattgtaaactgttaacaggcatggcaagctctttgacaacattagccattacctattctcctgtcaacaatggttccaggggtttcagaaagtctgttaatgcttctaaaggaagatgttgcataaaagcaatgaggatagagaaatccttggaggaattgtacaatgtgaaggtggaaagaaaagttcctcctgagagactagccgagcttggagtttcaaaatggtcggtgtggaagactgggaaaagcaggttgccttgggactggcaggtaaaccaactggtgtacataagaaga

SEQ ID NO: 21806 - DNA, 336 bp, Glycine max
  Clone ID: LIB3106-046-Q1-K1-H1
gatcgagataactagaaacagcgtgatgaaaatgaaggtccttgctttcttcgttgctacaattgtggtagcatagcaatgccatgcgtacgatatgttacctatacgaaagaacactggctatcgtgcccgtactcccgaggggaaatgcgcaagttggaggcttgctgtggaagcacacaacatctttggctttgagaccattcctgaagagtgcgttgaagcaacaaaagaatacatccatggcgaacaatatagatcagactccaaaacaggtaaccaacaagcttacttttatgccagagacctcgaagtccatcccaaagacacatttgt

SEQ ID NO: 21807 - DNA, 317 bp, Glycine max
  unsure at all n locations
  Clone ID: LIB3106-046-Q1-K1-H10
ggatatgggaaccacctgaatctaacggggtatttctgtcaaatcaccgacatgagcaagaactgcaagtggtgtcaggggattgtgctcctaaaaagcctgtgcaggataatgatgtaatgaataaagtgtacaaaacccatggagccattcaatctctagacaagcaagtttccatgcttcagatggagctggcagcagcaaggagtactcgagaacacaagatttcggatggttcagctaacaccttggcctcggnggtctccactgaaggccctcccaggaagaaagtgtttgtagtgattggcataaacact

SEQ ID NO: 21808 - DNA, 387 bp, Glycine max
  Clone ID: LIB3106-046-Q1-K1-F5
cccacgcgtccgcaaggcaagcgcttctcctctttgtgttctggctatgcttcttggcaagagttagatcggacgaggattgcgtgtacacggtgtacgttcggacgggttcgatcatcaagggaggcaccgattcagtaattggtctgaagctatacgacaagtccggctacggcatatacatcaccaacctcgaggcatggggcgggttaatggatccgggtcacaactactacgagcggggcaacctcgacatattcagtggtagaggcccttgcttggaagcacccgtttgcgaggccaacctaacttctgacgggtcggggccccatcacggctggtacgttaattacgtcgaggtcaccaccactggggtccacgcgcctt

SEQ ID NO: 21809 - DNA, 260 bp, Glycine max
  Clone ID: LIB3106-046-Q1-K1-H11
cccacgcgtccgcacgcctctccctccattctttaacagtcaccaacttctttctctctctctctctccctcgcacacaaatggccttagcttccttctccaatctctccacacaacacttgttctctcactacaaccacccctctctacaaacctgcaccatcacaatcccccatggaactctcatcttcttcccttccaagctcaaacattgcactttcatcacgtccaccgctcatttcttccccactacagtcaca

SEQ ID NO: 21810 - DNA, 381 bp, Glycine max
  unsure at all n locations
  Clone ID: LIB3106-046-Q1-K1-D9
cttgcattgacccacttctaagagagagaaagagaaggagagagagagagagagaggtaaacatatatcaaatgatgatcatggcttgagggtcatcatcaccccatctgatcttctatttctgaggaagtatttctcatcctttgttcctaggttggttttcatggtagctctatatatgttagcttattaagagaacaagtctgagataaaaaggagcttccacttactctaccaattaccaccgtcgccgttcagaagtagcctncaccgaccaccgcaggcgccacaaccattctactttgatccgcttncctcatacctaacaaattattccactcttcttctattacgcctttggattctcgtgcgggatgaaac

SEQ ID NO: 21811 - DNA, 287 bp, Glycine max
  Clone ID: LIB3106-046-Q1-K1-E1
aatttactttgcaattatgctactcttcaaaagtggtcaaacatctgcgcgtcttttcggtgctgctatcatcttaaacaaggaccttggttgggatgaacactgaatcttatgggtaggggccgttcattgtagaagatctaagcttactttcacatgcatgcgacaatcatggtcttttattgtgagacctaaatataaaataatgcccgtcatgctaaatcaagttgactgcaacaaccccggcgtaactcaagttaatggccgtggggtacattctcatttca

SEQ ID NO: 21812 - DNA, 76 bp, Glycine max
  Clone ID: LIB3106-046-Q1-K1-E10
gcaataatctgttgtggtatttgtctcctctttgttagatgtcatttaattatggcaatcttaatgcacttcctct

SEQ ID NO: 21813 - DNA, 76 bp, Glycine max
  Clone ID: LIB3106-046-Q1-K1-E11
gcaataatctgttgtggtatttgtctcctcttcgttagatgtcatttaattatggcaaggttaatgcacttcctct

SEQ ID NO: 21814 - DNA, 423 bp, Glycine max
  Clone ID: LIB3106-046-Q1-K1-E12
agctattgtcattgatttgctagctccaacaatgggttctagcagattatcattcattttagtacttgtgcttgtaaccttttcatccatgatcattgactcaagggttgcagaggcacgtaccctgccaaaatcagccttattgccttccaaagttgatatacctactgttgttcctcttccactggtggcaccactgccaaatttgcctgttactctccctccagtgcctgaactacctgcagtacctaaagtaccaattcctgaagtaatagttaataacgccaaaataatcccttgagtacctatgatctatccagtcactactacttattttgtcacttgctaaattaacttgttgttgccatcccagggtggttctggttctcgtggggtttaatttctgtcattcaattacatgct

SEQ ID NO: 21815 - DNA, 323 bp, Glycine max
  unsure at all n locations
  Clone ID: LIB3106-046-Q1-K1-E2
gcttcacttggcaaccatgcttatcaccggaactagtatcataccctgctcgtagtcttggtgctgctatcatcttcaacaaggaccttggttgggatgaacactggatcttttgggtgggaccattcatcggtgcagctcttgcagcactctaccaccaggtcgtaatcagggccattcccttcaagtccaagtgattcaatcaaacggttcatgcttaatcaagttgggaacaacaacaacaacaaaaatcaagccaatgtttgtggggtttggtttcatttcattaagatgatctgnntatctcttttcttctttttaaa

SEQ ID NO: 21816 - DNA, 411 bp, Glycine max
  Clone ID: LIB3106-046-Q1-K1-E3
gcccgtgccaagttaaagggaaaaccaggccaaaactgggaaacagcttcagatgaaaatcagaaggatgaagacatgtctcgtggttattcaattacagagattactaacgataaagaaaataaatctgaagctcaaattaaagatcacgggattgataaagttgagtccgctcacttagaccaaacaatgctcaatgaaagtgataatctggcacaggatgacagctcagatgaaggatggcaggaggctgttcccaaaggtcgttcactcactgggcgcaagtcatcttcatcaaggaggcccaccctagcaaaactgaatactaacttcatgaatgtttcccaatcatcaagatatcgaggcaagcctactaatttttcctctccaagaacaaatttaaatgagact

SEQ ID NO: 21817 - DNA, 423 bp, Glycine max
  Clone ID: LIB3106-046-Q1-K1-E4
attttgataattatttttctagttgataagccatggctactcgaggaaagcttgaggttgacgttgatctcaagtctaacgcagacaagtactggcaaacccttaggaactccactgaaatattccccaaggccttccccaatgattacaaaagcattgaggttcttgagggtgatggcaaatcacctggttctatccgccacataagttatggtgaaggttcaccacttgtgaagtcatcctttgagaagattgaggctgttgatgaagaaaagaaggtagtgtcgtacactatcattgatggagaactcctccagcactacaaaacattcaagggagacatttctgtgactccagttggcgatggatgcgaggtgaagtggagtgctgtgtacgaaaaagttagccatgatgtttctgatc

SEQ ID NO: 21818 - DNA, 417 bp, Glycine max
  Clone ID: LIB3106-046-Q1-K1-E5
caaactcacgccaaaacatgtctacatctgatgtaaaaactatcttttcatatatgccaataaatacatggactggtgtgtaatatgattttacaggtgaatcaattccaatcagattgttccttaatccctatgagctgaccccaacacatcgtaacattaataacaaattcagagtgaagtactttataaatcttgtgtaggttgatgaagaggacaggcgatatttcaagcagcaggaaatcacactgtataggctgcaggaagaaacttcatgattacttatcattcggggagtgagtattattatgtttggtaacaaataacaaaaagattgtgatggacattgaagacctcttaaatcagggaatattctcgtgaatcatgttctctaaagtgtaaaatggcttggtatag

SEQ ID NO: 21819 - DNA, 410 bp, Glycine max
  Clone ID: LIB3106-046-Q1-K1-E6
gaaaaaaacttggacggtgaaattggaaggttttccgggatcccaaggccgaatcttggttcaatttacgaaaagagaagagagaggaacaacaacacccgttgttgaatcttcaagctgaatcaaatcatatagagagagaaagagagagacccggataggaaaatagcgtttagagagagaaaggtgaagtgaggttgtttaaagtttgggtcttggtgggtgaaagggaaagatgacggatgtggtactgcatatatacgatgtgacgaatagtggatccgagaaaaccaacaacaccattgttcagatcaacaagatcttcaaggatgggattggtcttggtggcatattccacagcgccgtgcaggtttttggagatgatgaatggtcatttgggttctgtgagc

SEQ ID NO: 21820 - DNA, 282 bp, Glycine max
  Clone ID: LIB3106-046-Q1-K1-E8
cccacgcgtccgttttaagtcaaaaaaagcacactgcatattcatcaaagcatgatcaaagcacactgcctatcagactaacgttgttgtttaattagtccatgcatctgcatcttgggcaccataagattgtatataaaataaattatggcgtgttgtgtatgttgtgcaagacctggaacttcacctttctacgtacgtgtgctgttaggatgcagtgtgctttgatgatgctttgatgaatatgcagtgtgcttttttacgtctaaaaaggactcttta

SEQ ID NO: 21821 - DNA, 381 bp, Glycine max
  Clone ID: LIB3106-046-Q1-K1-E9
aataggcgtttgaaaagacacttgtgctgtctccttgctctccatcgtaagatgtaagaaggatgaagacatgtctcgtggttattcaattacagagattactaaccatcaataaaataaatgtgaatctcacattaaacatcaccgaagtgataacgctgattccggtcactaagaccaaaccgtgggggcgattcgcggcggagattcgagatccgtggaagaagcagcgcgtttggctggggaccttcgattccgccgaggatgccgcgcgggcctacgacaaggcatcaaggaggctcaccctacccaaggccaaaaccaatttcccccccttccccggcccggcagaggcggaccaccactcgcagattccgttct

SEQ ID NO: 21822 - DNA, 256 bp, Glycine max
  Clone ID: LIB3106-046-Q1-K1-F1
acgcgatcaaagcttggagaactcatccaggcctgtggaggcttgtttacatatcctgtaggcctgaaactttggtggcaaatgctattgagctttgtacgccatcccccgtaaaaattgagaaaggaaataaagacaacagaggatggagaaacatgagcagtgctggtttagcacggcacagggccaagtctatgcccatctcagaggcattctatccagtaaaggctatggctgttgatcttttccacatact

SEQ ID NO: 21823 - DNA, 156 bp, Glycine max
  Clone ID: LIB3106-046-Q1-K1-F10
gagaagcaaggacctaggttctttcgttgctccaagtttggtagcatggcaaggccgtgcgcaccatatatttcctgttcggatgaacactgtctatcgtgcacgtactcccgacgaggaatgcgcacgacggaagcttgctgtggaagaacacaa

SEQ ID NO: 21824 - DNA, 326 bp, Glycine max
  Clone ID: LIB3106-046-Q1-K1-F12
cccacgcgtgcgacctcagcgttcggcgatatattagtgcagtactctctcaaggtaaacaaagttatactctaaatcttcccatgcttcctgccctgtgcctacagttctcccaatactacaccagccccaggtattggtaaagaaagccatacaaagggcgaagcattttggagtcaattatgcgtttcacgtccctattgctaccaaatatcgctatgtcattaccaaggctgcaaaagacaaccaaagcacaaaccgaaacacataaccgaatcgtgtgatttgcgctgactgtgatggaaatggaactgttctatgctctc

SEQ ID NO: 21825 - DNA, 284 bp, Glycine max
  Clone ID: LIB3106-046-Q1-K1-F2
acagcatctctatccggaaccatggtgagcaccgttttcatgaggaggcaaactatgggcaccgctagcataaagacattggacaacgttggtgaagctctctttggtctgaaaagtggaccaggtgatcgtgtcacttgcatggcctcgtacaagagaagctcataaccccacaatgagaagtggagtttgaatgcccagatgatgtttttatcgttgacaaggcgggagacgcacgcattgaactttcctactcgtgcagggccggttcttgcgttttctgt

SEQ ID NO: 21826 - DNA, 274 bp, Glycine max
  Clone ID: LIB3106-046-Q1-K1-D8
cgatttggcacatctagtagcaagcaagtggccaggggcacctaaagcggggagtggagacccattggaggatttctgcgagacaaaccctgctgatgaggaatgcaaagtttatgaatagaggagagctccttttctaacgtatcatgtgaaaaagaaggaaattgttcagacagtctatctgaggagagattttcaaagtttatattatttgcagccaataataagttttggcgtgactgaatgaatatcacccatatattgattgatattg

SEQ ID NO: 21827 - DNA, 419 bp, Glycine max
  Clone ID: LIB3106-046-Q1-K1-F3
cggacgcgtgggcggacgcgtggggcaagtccattgcatgttctttgataaacaagaagattttgatgatcgagatgtgaggcagatgttgtcattggttcgaagggaagtcttaagcggatgtgtgatcattttcagccgtattgttcatggtgcaataccatctctgaggaagatggcagaacagatgggagctacttgtttgactgaaattgacccgtctgttacacacgtagttgctactgatgctggaaccgagaagtgccggtgggcagtgaaagaaaagaagttcgtggttcatcccctatggatagaggctgcaaattatttttggcaaaagcagcctgaggagaacttcattctcaaaaaaaagcaatagtcacttttcttatggtatcaaacagtgctgtgttcataat

SEQ ID NO: 21828 - DNA, 409 bp, Glycine max
  Clone ID: LIB3106-046-Q1-K1-F4
ggagcaaggaacagttacttccctacttgaagagaagggtgttattaaaggtgtgcactacaaaacgaaggatagtcaagaattatcagcttgtgcaccccttaccattgtttgtgatggctgtttctcaaacttgcgccgttctctttgtaatcctaaggtagatgttccctatcatttcgttggcttaatattggagaattgtgaacttccttgtgcaaatcatggccatgtcatattgggagatccttcgccagttctgttctatcggataagtagttcagaaatccgttgtctggttgatgtccctggtcagaaggtcccatctatttccaatggtgaaatgacaaattatttgaagacagtggtagctccatagattcctcccgagcttcatgacgcattcata

SEQ ID NO: 21829 - DNA, 361 bp, Glycine max
  Clone ID: LIB3106-046-Q1-K1-C2
tgatccgaaagagcctaaagcgtcagggcaaggaaatgtggagccagatgaagttctgcaagctcgttgcaaatctgggaagaagactgcattctgggtggatgaagcaccacaatctaaaaacaagcctttagaaagtgcacctgttgcctcagaaaacaagccttcataagctgcaactgttgcctcagctgagcctgaaaacaagccttcagaagctgcaattgttgattcagctgagcctgaaaacaagccttcagatactgttgttgaaactgttgcataaggcatatgtggatctattattctatgcggaagtaggtgctgttcatatagtatttcatgtgctttgtgcatgtca

SEQ ID NO: 21830 - DNA, 431 bp, Glycine max
  Clone ID: LIB3106-046-Q1-K1-C3
agaaaaagaaaaaagcgatcatagtttcacttcggccttatccagtttagggtttcggggctctaccctatctttcacgtatcgaaaccttaaatttacgatcaggtctgagcaatctggttggtagaacctttggtcttagtgagtcaagttttatgtctgaattagacgatcaaattcctactgccttcgatccttttgctgatgcaaatgctgatgactcgggtgctgggtcaaaggagtatgtgcatattcgtgtacagcagcgaaatggtaggaaaagcctgacaaccgttcatggattgaaaaaggaattcagctataacaagatacttaaagacgtcaagaaagagttctgttgcaatggaacagttgttcaggacccagaactaggacaggttattcaacttaaaggtgatcagaggaagatg

SEQ ID NO: 21831 - DNA, 379 bp, Glycine max
  Clone ID: LIB3106-046-Q1-K1-C4
cgcgcatcaccggccttctggaaggcgaggacgtcatcaatacgggcaaggccatgcaggccatgggcgccaggatccgtaaggaaggcgacacctggatcatcgatggcgtcggcaatggcggcctcctggcgcctgaggcgccgctcgatttcggcaatgccgccacgggctgccgcctgaccatgggcctcgtcggggtctacgatttcgacagcaccttcatcggcgacgcctcgctcacaaagcgcccgatgggccgcgtgttgaacccgctgcgcgaaatgggcgtgcaggtgaaatcggaagacggtgaccgtcttcccgttaccttgcgcgggccgaagacgccgacgccgatcacctaccgcgtgccgat

SEQ ID NO: 21832 - DNA, 389 bp, Glycine max
  Clone ID: LIB3106-046-Q1-K1-C5
caatataaaaaaaaaacatgactacataatgatgaaaaaactatattttaatatatacaaaataaagacattgactggtgtgtaaatatgattttacaggtgtatcacttccagtcagattgttcctcagtctctatgagctgaccccaacacatcttaacattaataacaaattcagtgtgaagaactttttaaatcttgcgttggttgatgaagaggacaggcgatatttcaagcatcaggaaatcacaatgtataggctgcaggaagaaacttcatgattacttatcattcggcgagtgagtattattaagtgtgctcacatataaaagaaacattgcgatcgacattgaagacctcttaaatcaaggaatagtctcgtgaatcat

SEQ ID NO: 21833 - DNA, 428 bp, Glycine max
  Clone ID: LIB3106-046-Q1-K1-C6
attgtttgttgttgtaactcgttcttcttcttttgttgttctgtgtttgtgtttgttttttctctcacctgaaaatgtcttgctgcggtggtaactgtggttgcggaagctcctgcaagtgcggcaacggctgcggaggctgcaagatgtacccagacttgagctacactgagtcaaccaccaccgagaccttggtcatgggagtggcacctgttaaggctcaatttgagggtgctgaaatgggtgtgcccgctgagaacgatggctgcaaatgtggaccaaactgctcctgcaacccctgcacttgcaagtgaggtgttgggagagcaagcttcaagcagagatagcccttaattaggaataatgataaactattaatgtgtagctaaaaacttatgtattatgtctgtgatggttttcgtgcactc

SEQ ID NO: 21834 - DNA, 419 bp, Glycine max
  unsure at all n locations
  Clone ID: LIB3106-046-Q1-K1-C7
cccacgcgtccgatgatgataggttggacaccggacatacttgaacttaaagactataaggccaaatatggcattgatgggtcagcttttcctgaataaaaccatagagtggtcagagtttcaggatgcagtggttgaaggtcaccaaaatagacaaggcgaaccaaggctgaggaagccaaaacaatcaatatatacatatccagctcctgattgcatgtgccaagcttagtgactagtagtatacttaaattattattgctcacgatgtagcctgtgtattttatagttcggtgtcttattatttaacattatatatatctagtgaaaataaaaagctacggngtttgttatgatgctcttgataagagtgcttgagagagttgggtattgtgtgggagatgtatttatcagatgat

SEQ ID NO: 21835 - DNA, 413 bp, Glycine max
  Clone ID: LIB3106-046-Q1-K1-C8
attgatttcgttcctggtagaagagattcaaaagtatctcctaatgaagggcggcttcctgatgctaaaaaaggtgttccacatctccgtgatatcttttatcgaatgggcttgactgaccgagatattgttgcactatctggaggacatacactggggagagcacatccagagagatcagggtttgatggcccttggacggaggaccctctgaagtttgataactcatactttgtggaacttttgaaagaagattctgctgggctgcttaaacttccaacagacaaggctttattggaggatgctgaatttcgctgttatgttgagctatatgcaaaggatgaggatgcattttttcgagattatgctgaatcacataagaaactttcagagctaggctttgtgccaagttc

SEQ ID NO: 21836 - DNA, 423 bp, Glycine max
  unsure at all n locations
  Clone ID: LIB3106-046-Q1-K1-C9
cccacgcgtccgcccacgcgtccggagcaaggtcccttctcaaggatggcgatgactgtgcacgtccttgctgggttggcttttatgttttcagctagcattttgcttcagattctggcatgtgcaatatataacaattggtggccaatgttatcagctctgatgtatgtgctggttcctatgccttgcttattctttggaggtggatccactcaatttctaatgagccgtgatggtggtggttggatagatgctgcaaaatttttgactggagcatcagctgttgggagcatagccattcctataatcctcaagcacgctcatatgattgagacaggcgcgatgctcattgaacttgtatcgntcttcatttntatatgtactgttttatgtttccaccaagcccgcccttgatgatgattg

SEQ ID NO: 21837 - DNA, 382 bp, Glycine max
  Clone ID: LIB3106-046-Q1-K1-D1
cttcgtcaaaagcatcatgagccgctacgacagccgctccggcgacccagcttcctatcgtgatcggaggagtgattctgggctaggtgcacctacagggtttggtggttctgtacaacactcttcatcaaacaggagggattatgatgatggtgggtcaccaaagaggaacctcagtttggatggtttacctcattttgagaaaaacttctacattgagtcaccagctgtaagggcaatgacagatgctgaagttaatgagtatcggcagcagagggaaataactgttgaagggcgagatatcccgaaacctgtcaagacctttcacgatgcttgttttccagaatacgtactgcaagaaattacaaaagctggctttact

SEQ ID NO: 21838 - DNA, 396 bp, Glycine max
  Clone ID: LIB3106-046-Q1-K1-D10
ttctgattcagaaactcttaggcattccacattctcaaccccgaaccctaagagcagagcgaaaatgacaaccaccttcgcgaccgtcgcaggactcggtggcgcattactgtcatccacctcatctcgtctcacctcagggtttgtgaaatccccagtgattgctaggaatcccttgaggcaagctgtggcaatgggaaatgggaggattacatgctttgagaggaattggctgcgggcagattacagtgtgattgggtttgggttgattggttggctagcaccctcaagcataccggctatcaacggtaaaagtctgactggcctcttctttgagagcattggtgctgagcttgctcactttcccagccctcctgcccttacttcgtccctttg

SEQ ID NO: 21839 - DNA, 377 bp, Glycine max
  Clone ID: LIB3106-046-Q1-K1-D11
cactcccccaccagccccactcagctctcctccccctgcctcccctcctccttcatctccaccacccgcatctcctcctcctgcttctcctcctcccttttcaccaccaccagcaactcctccaccagcaacgcctccacccgcattgacccctacacccctttcctctccaccagccacttctccagctccagctcctgccaaggtggttgctcctgcactctctccttccttggctaccggccccagcctctccaccatctctccctctggcgatgatagtggggctgaaaagttgtggtcctttcagaagatgattgggagcttagtattcggatgtgctttgctgtccttgctgttctagacatcatcgatct

SEQ ID NO: 21840 - DNA, 148 bp, Glycine max
  Clone ID: LIB3106-046-Q1-K1-D12
caatattttgtggttaggataaggtgggaggttgtagaaagcataggtgaacaagagctgtggtgtgctgaggaataattaattactaataaaccacatgatggattcctgtcgaccaaattaatggtaaattggggacccaaaaatg

SEQ ID NO: 21841 - DNA, 383 bp, Glycine max
  Clone ID: LIB3106-046-Q1-K1-D2
ggaaaaatggaaggtgttgagtcatttgacattgttctgaaggagcagaaggtgacagtgaaaggaaatgtggagccagatgaagttctgcaagccgtttccaaatctgggaagaagactgcattctgggtggatgaagcaccacaatctaaaaacaagcctttagaaagtgcacctgttgcctcagaaaacaagccttcagaagctgcatctgttgcctcagctgagcctgaaaacaagccttcagaagctgcaattgttgattcagctgagcctgtgaacaagccttcagatactgttgttgaaactgttgcttaaggcatttgtggttctatttttctatgtggaaataggtctgtttcatatagcattttatgtgcttt

SEQ ID NO: 21842 - DNA, 292 bp, Glycine max
  Clone ID: LIB3106-046-Q1-K1-D3
cccacgcgtccgctcccctttagtttcattcataaggggaagaagcaactcattttgactcttactttatcatctgctttaccatttgatttgctggcaccctcttcttcacgggagctgaaaaaaatgggagaaagtgctttgttctctgtgtagagtttggcagagaaagataacaacattttttagccctttataatgccagttccacttgccccatacccaacaccaccagctccatatacaccaccagctaatggtgtacagagtcaacttgtctgttctgggtgca

SEQ ID NO: 21843 - DNA, 136 bp, Glycine max
  Clone ID: LIB3106-046-Q1-K1-D4
aaaaaaaaaaaaaaaaaaaaaaaaaaaataaaaaaaaaaaaaaaaaaaaataaaaaaaagggaaaaataaaaaaaaaaaagggcgtacgatttggggggtcctgggttgcgttcccgtccttgccccgttttactt

SEQ ID NO: 21844 - DNA, 377 bp, Glycine max
  Clone ID: LIB3106-046-Q1-K1-D5
cggacgcgtgggcggacgcgtgggaaaaactcaatatcaaattctttgtcccacaaaagatggggttcactcccacaagtactgcaacatgctttctcataatagcacctctggttgtgctatggtgttggaagctactaaagtgggtgtggctgaggccaaagagattggagagagcattaagggcacagggccttcaggggaatccctacagcctcttgattggggacactaaggaaatgtacacagtgctcatgcaagctgccagatctcaacaatctacaagttcttttctctctaaggataaggatgcagcaccacatatcacaacctttaaccatcacattgtcaacaaattcggcaagaattcatttttt

SEQ ID NO: 21845 - DNA, 431 bp, Glycine max
  Clone ID: LIB3106-046-Q1-K1-D6
cccacgcgtccgcccacgcgtccgaaaagaaaatcctcaattttctgagcagccaaacactctctctctgtctctcgaaaattctcagtttgcagagaaaatctgaatcatgtcgtggcaagcgtatgtcgacgatcaccttctgtgtgacatcgaaggtaaccacctcactcacgctgctatcatcggccaagacggcagcgtttgggctcagagtaccgacttccctcagttcaaacctgaggagataactgccatcatgaatgactttaatgagcctggatcacttgctccaactggattgtatctcggtggcaccaaatatatggtcatccagggtggaacccgtgctgtcattcgagggaagaagggtcctggtggtgttactgtgaagaagaccggtgcggccttgatcattggcatttatgatg

SEQ ID NO: 21846 - DNA, 414 bp, Glycine max
  unsure at all n locations
  Clone ID: LIB3106-046-Q1-K1-C12
ggcgtcttcataaacgccgcccaaaacttctcatacccttttattcattccattcgtttctagggttttcttttctttgccgagaaaatgagagagtgcatttcgatccacattggccaggccggtatccaggttggaaacgcctgctgggaactctattgccttgaacacggcattcagcccgatggacagatgccgagtgacaagaccgttggcggaggagacgacgccttcaacacatttttcagcgagaccggcgccggaaagcacgtgccccgcgccgtcttcgtggatcttgaacccaccgtgatcgacgaagtccgaaccggtgcgtaccggcagctcttccacccggagcagctgatcagcggcatggaagacgccgncaacaacttcgcgcgtggccactacacc

SEQ ID NO: 21847 - DNA, 413 bp, Glycine max
  Clone ID: LIB3106-046-Q1-K1-A8
gactagaccttcttcgacggtatcttcttcttttgttgtttgtgtgggtgttttgtctctcacctgaaaatgtcttgctgcggtggtaactgtggttgcggaagcgcctgcaagtgcggcaacggctgcggaggctgcaagatgtacccagacttgagctacaccgagtcaaccaccaccgagaccttggtcatgggagtggcaccagttaaggctcaattcgagagtgctgaaatgggtgttcccgctgagaacgatggctgcaaatgtggagctaactgcacctgcaacccctgcacttgcaagtgaggtgttggagagctaaagcttcaagcagagatggcccttagaaataatgataaaaactatatgtagtttcaaaacttcaaaatatgtagtatgtattatgttgc

SEQ ID NO: 21848 - DNA, 416 bp, Glycine max
  Clone ID: LIB3106-046-Q1-K1-A9
agcccacgcggttcgaaataaagcagtactagaggcaacctagctgtggttagttaaaaaggggtgagctctgattagtgcgtgagctattggtacgcacgctaatgttgggagttatacgagctcgaacgtggttgcgatattcagagccccttcttcaaccatggaaggtagggttctcctctttgtccgccattgacggacgtaaacaccaccttctgaatctgcaggagatcgagacagttctgaccgacgttaaagctgacgacgttaaggtgataccagttgccaagcactgcgattgggctgatttcatggtactcgccactggcaggtccacctggcacgtcaagaacatcgctcaagccctaattacaaggctaagcataaacagagaggagttgaacgaatgatgc

SEQ ID NO: 21849 - DNA, 404 bp, Glycine max
  Clone ID: LIB3106-046-Q1-K1-B1
cccacgcgtccgaaaaaaaacagtaatggatatctccgtttctttctccaaaacccggcctcctccgttctctccctctctctgccgccaactttccctccgtccaaacgctccgcaactgctgcgattctcccgaaacaacggaacctttcgccggaagcctccgccgacgatttctcgcccaaacaagctcgctgtcacagccattcagatttcaaacctatccgagaatgaagacgattttgtcctcgaagacgttccacacctcaccgactttcttcccaatttgccgtcatatccaaacccattgcaaaagagccaaggctactcaattgtcaagaaaacttttgtgagccccgaagatgtggttgctgaaaatgttgttattcaaaagggaagtccta

SEQ ID NO: 21850 - DNA, 430 bp, Glycine max
  unsure at all n locations
  Clone ID: LIB3106-046-Q1-K1-B10
tgaaaacccaaagtgcttctctcctctgtctttttctctctcttgctatccttttggctagtggcactgctgcaagtgcaactccaagaagcgcagtgccaagccaccatgtttcaacattcaacagaagcctttttccttccacttttctctttggaattggttcttctgcttaccaggcagaaggagcagcaagtgtagatgggagaggaccaagcatatgggacacctacactagacagcatactgaaaagatttgggatcatagcaccggtgacatgggagctgatttttatcatcgatacaagggtgacataaaaatagcgaaagacattgggctggactctttcagattctctatctcatggtcaagaatattcccaaagggcaagggagcagttaacccncttggggttaattctacaacaat

SEQ ID NO: 21851 - DNA, 432 bp, Glycine max
  Clone ID: LIB3106-046-Q1-K1-B11
cccacgcgtccgtattgatattgcaaaagatagttaaatttcattccgaaacaatgatcaacaaagtagcagttctattagttgttttgcttttcatcattgctgctttggcttctgatcctgatccagtaatggacttttgcatagccaaatcaccagacaatagcttcagttgcaagaactcatctacagcaacagtggaagatttcacctattctggcataaagtctcctgggaacttcaagcaaactggattctcttctatggcagtgaattcgaatgtctttccgggtttgaacactcttggtgtgtcatttgtgcgagcagattttggtgttggcggcgtcaatgtgccacacttccatccaagagcaacagaggttgcttttgtgctggaaggaaaaatttattcaggatttgtggacaccaaca

SEQ ID NO: 21852 - DNA, 430 bp, Glycine max
  Clone ID: LIB3106-046-Q1-K1-B12
cccacgcgtccggtgaaaaccttctcttacccttctctcaagtttcaagagatttcatcatggctccaaagaaggacaaggctccaccaccttcctccaagcccgccaaatctggcggtggcaagcagaagaagaagaagtggagcaagggaaagcaaaaggagaaggtgaacaatatggtgctgtttgatcagggcacctatgacaagctcctttctgaagctcccaaatacaagctcatcactccttccattctctctgatcgtttgaggattaatggatcacttgcaaggaaggctataagagaattgatggcaagaggttctatcaggatggtgtctgcccatgcaagtcagcaaatttataccagggcaacaaacacctaggtggtgaactgatcttagttacggagtatgggtaggaatagtga

SEQ ID NO: 21853 - DNA, 409 bp, Glycine max
  Clone ID: LIB3106-046-Q1-K1-B2
atttcctacttcccaacccataaccattaattcttaattagtttcctcttgctttcttctccttctatattattactattactagtacaacttatcatacacatatacctctggttatagcagcaaactaggctatagcttgcactttgaagatatttatacacagaccaagtacaacaccaagctctagctagctagggacatgtctagccgaagatccagacaacattcagggtctacaaggatctccgatgaccaaatcatcgaacttgtttccaaattgcgccaacttgttcctgagattcgcaataggcgatctgataaggtttcagcgtcaaaggtcctacaagagacctgcaactacatcagaggcttgcacagagaggtgagtgacttgagcgagcgactg

SEQ ID NO: 21854 - DNA, 352 bp, Glycine max
  Clone ID: LIB3106-046-Q1-K1-B3
cccacgcgtccgctctctctctacaatggcctcagccgcagcccccacaactttctctctcctccactccaccaccccggcctcctcctcctccgccacctccgcctccccctcgcgcgtgcagctctcctcctccctccgctcgcgcccgctcgcgcgccgccttggcttcgccgcagcggacccgctgctcgcggcgaatgtcgcagcgcgcgtcgcaacggtgagaggaggaaagggcgcgaggggggtggtgtcgatggcgaagaatagcgtggaggagctgaacgcggcggacctgaaggggaagaaggtcttcgtcagggccgacctcaacgtcccgctcgacgac

SEQ ID NO: 21855 - DNA, 225 bp, Glycine max
  unsure at all n locations
  Clone ID: LIB3106-046-Q1-K1-B4
tncgccacgcgtncgcaagatactgcagcaccttctgtgaacacaggcttcctggagctcttcagacaacatgatttcaatattgacactgcaggtggcattaattcaaatggggatgtgcatggcttatgtttaagggtatcatctattatccttaatgatcatctagaagaatcatacttcactcctgaatcaaacagaataccctttactcttaactcaatc

SEQ ID NO: 21856 - DNA, 422 bp, Glycine max
  Clone ID: LIB3106-046-Q1-K1-B6
cccacgcgtccgcccacgcgtccgcccacgcgtccgaaagaatgactcacttgcaatcaatgaagcccgaaaggatggtattcgaattagataccatgatggccatctcaaatccctgcttcatgcgatcaaagatagagttaatgtgaagggctactatatatggtcattttcagatagctttgaatgggatgctggttacacagctcgatttggcatcatatatgtggattacaagaacaatttgagtagataccctaagtcctctgcgttttggctgaaaaaattccttctcaagtgatctaaatctattgttcctttggcatgcatgcccagtttttcttcttgtttgtttcctggatatcacagacatgcagtgtgtatcacttgctcttcgattcggatcaaatgtatcaagtcat

SEQ ID NO: 21857 - DNA, 362 bp, Glycine max
  Clone ID: LIB3106-046-Q1-K1-B7
atgaatctatcataactcttcctttccttttatcgtttcatccagaaaacatggatgcgatgacactgtcactcccgctccctccggttccggtctgtacagtgcccgcgtctgcatcaacctcgtcctctgtttctctcactcactcctggtcggccacggccaggcagaggctctcctctcacagaacaagacccattttccggaattattcctctgcggttccaaaacttacagtggtgacatgcggtgcggctgtgacggagatcaacgagacccaattcaaagacacggttctgaaggctaaccgtccggttcttgttgagttcgtcgctacttggtgcggtccttgccgtctcatc

SEQ ID NO: 21858 - DNA, 408 bp, Glycine max
  unsure at all n locations
  Clone ID: LIB3106-046-Q1-K1-B8
cccacgcgtccgctttgttccaaccacaatctcaattatccttgctggccgattcagtgatgaaccacatcctatagagaaattcaagaggataatgaggtcaatccaaggtgctcttattgttgcttcgactcttcaaatagtactgggcttcagtggtctctggcgtaatgttgcaaggttcttaagtccactttcgtcagttcctttggtatctcttgttggttttgggctgtatgagttagggttccctggggtagctaaatgtgtagagatcggattgcctcagcttatattgctagtatttgtttcacagtatgtgccccatgtgctacattcgggaaaacatatcttcgaccgttttgctgtgttatttacaaatgaatngtgtggatatatgctcatcta

SEQ ID NO: 21859 - DNA, 422 bp, Glycine max
  Clone ID: LIB3106-046-Q1-K1-B9
acaatcttgacacttcaagggagtattatccaaacatcatcacaacaaggacttatgatgagcgtcttcaaacccttgagtttgttcgtgatgcagggatcaatgtttgttctggaggaattatagggcttggagaagcagaggaggatcgtgtaggtttgttacatacattgtcaacacttcccacccatccagagagtgttcctattaatgcacttgttgctgtaaagggaacccctcttgaggatcagaagcctgttgaaatatgggagatgattcgcatgatagcaactgcacgtatcgtaatgccaaaagcaatggtcaggttatcagctggcagagttcgattctccatgcctgagcaggcattgtgctttcttgctggtgcaaattctatattcactggtgaaaagcttctcact

SEQ ID NO: 21860 - DNA, 237 bp, Glycine max
  Clone ID: LIB3106-046-Q1-K1-C1
cccacgcgtccgaaaaaaaaaaaaaaaaaaaaaaaaaaaaaaaaaaaaaaaaaaaaaaaagaaaaagggacaaatatggcgttggtgtgggaggatcatactgaataaaaccattgcgtgcgtcgacattcctaattttttttgggcggcgaggcccaattttttgtctggtgtctgtgccccttcacgtctgggaaagccctgtctttacccaccttaattttgttgtagccctgg

SEQ ID NO: 21861 - DNA, 430 bp, Glycine max
  Clone ID: LIB3106-046-Q1-K1-C10
ctccaattagggtttttgtgatctgcagctacgatgggtaagggaacggggagtttcggtaagaggaggaacaagacccacaccctctgtgtgaggtgtggccgccgcagcttccacctccagaagagtcgttgctctgcgtgcgcttaccccgctgcgcgcaccaggaaatataactggagcgtgaaggccattaggagaaagaccaccggaactggaaggatgaggtacttgcgtaacgtgcctcgcagattcaagagcggcttcagagagggtaccgaagctgcacccaggaagagaggagctgctgcctctgcctaagctttgaatgaatgacagcaatttttgctgggtcagtgaattataggagttaatgtttctgtgttggtgccaaactctttggaacacattttctttctgtcgttttaat

SEQ ID NO: 21862 - DNA, 388 bp, Glycine max
  Clone ID: LIB3106-046-Q1-K1-C11
ggaaatatctctcacgagtttgtataaggagagaagcggacatgaaaaagcaattagcatcaaggcgtttgctgatgtgggttatggtacatttgaacatttcaggagtgttgtccaagttcaaccacaccacaactaccacttctatggtgtgcgatggcttcgtagaagactgcctcaacgttcaccacttggactcacagcttgccaccatcttcagcacccactttcggaaaatccttggtggaaaaaaatgctgcaaaagttacacttaaactggaggtacaggggatcccaataatcccaacttctgttcgaccgcaaccggtatcgtacgtgtgggccgcaactgatcctggtcaacccaaccgatgtgctgatccaaatg

SEQ ID NO: 21863 - DNA, 141 bp, Glycine max
  Clone ID: LIB3106-046-Q1-K1-A7
tgagttccccttgcagttgcgcttgcgcttctactaattggagcgttgattatggttatggaggtggtggcgtgctttcaaattcaaaggtaagaagcaggaggtccaaagaaatatccatggcacattcagtttgggggt

SEQ ID NO: 21864 - DNA, 384 bp, Glycine max
  Clone ID: LIB3106-045-Q1-K1-H3
cccacgcgtccgtccacgcgtacggtccgtgacacacttatccacctactttcatttgagccactcttctcagtccaaaacagtttctcgctttctcatgtgaaaaatgaggagcatctttgtccttctcctcgttctgggttcgtttaagtatgcatttgctgaagaagggttgtgctctgctccttctgaatcgaaatcaaagcctctttattggaaagtggataaccccactctctcacctatgcaccttcaagatttgcctggattcacacgcagtgattataagagtaatcatgctttggcatcaccagaaagtcatgtatatggcccattgcctgattggatcgacacgtcatgcgcatatttaatttcaccagaaat

SEQ ID NO: 21865 - DNA, 437 bp, Glycine max
  Clone ID: LIB3106-045-Q1-K1-H4
ctagaaacagtgtgatgaaaatgaaggtccttgttttcttcgttgctacaattttggtagcatggcaatgccatgcgtacgatatgttccctctccgaatgaacactggctatggtgcccgtactccggaggtgaaatgcgcaagttggaggcttgctgtggaagcacacaacatctttggctttgagaccattcctgaagagtgcgttgaagcaacaaaggaatacatccatggcgaacaatatagatcagactccaaaacagttaaccaacaagcttacttttatgccagagacctcgaagtccatcccaaggacacatttgtgttcagtatagatggcaccgtactctctaatattccatactacaaaaaacatggatatggggtggagaaatttaactcgaccttgtatgatgaatggggtaacaagggcaat

SEQ ID NO: 21866 - DNA, 385 bp, Glycine max
  Clone ID: LIB3106-045-Q1-K1-H5
tgactgtaacactcgattatgggaaaatttgtcaacaagggagagagcaattaggaaatgtttaagatataaatacagaagtaaatcaggaaggcttatagtattttgttggtacaaatggcatttttgtaacgactccttcattgggttttccccgaataataatctttactttggtggctgccttgtgcaatccagatttcacatatcccatggctatgttcttctggaggcaaggactgaatccaccactggtgatttccccaatgttgttgcctccttcatcttgaatctcactgtggcttctgggaggtggaccagaagaaaagaaaccaacacgcctgattttaggaccttcttcaagctgtttcaggataacatcagc

SEQ ID NO: 21867 - DNA, 445 bp, Glycine max
  Clone ID: LIB3106-045-Q1-K1-H6
gagaatgatgatgcagtctggtatgtgtgcagtggtacgttgtagcactccttcttctggcggaggtggggcccatggctgaggctgtgacatgcaccccaacagagttgagtccgtgtcttccagcaatcacttccggtgctaaaccttccaatgcttgttgcacgaagctgaagcagcaaaaaccatgcttatgtggctacctcaaaaacgctagcttgaagcagtatgttaactctcctaatgcccgaaaaaccgatgcttcttgtgggattccctttccaacttgttaattaattaagccttcttataattaaagcgtgggatatatatatatatatatatatatatatatatatataaacagtttaatttatacacactttgatcctacaaagcatcttgacacaagcattcaataggatttcaccactttatcgcaaca

SEQ ID NO: 21868 - DNA, 424 bp, Glycine max
  Clone ID: LIB3106-045-Q1-K1-H7
gagacatcgatttcaaaggtgcgtttctgttgtgctagggtttctgcatcttccacctgcgtcgcgatgaaaccaggcttcatctgattccgatttcccttcgctccttctcctccttaaccttcatcttcttcgattcctctacaaattatgattattattatgatgaactcgatcttcgcctcgcataaccttcgcgtcttcggtcccggcttgaatcccttcgcaccttattgcatcgccaatcactcccttttcctttccctttcctctcgctaaattacaattcccttcctttttcctctccaacttctccttctccgtttctccgaacatgtaaattcggaggacaccgtctttgattcggtctatttttttgggggttactttacttcggttacgcgtcgtccgtttgcttttcttt

SEQ ID NO: 21869 - DNA, 280 bp, Glycine max
  Clone ID: LIB3106-045-Q1-K1-H8
gtagcaagtcataaatacaagctggttctctcatttctccccttctattgtttgttttatatgtatagaaaattttatttggggagagagggtatggctggggagattctagaggcatttggttgctgtggcgattgtgttacttttgtattttggatcccttgttgtttattgtagaattcatgtcttgtggcagcatttttatgtaaaataccaaatattaaagaaatgaaatcaacttgatggggtgacgtattactttacctttactctcgctaaa

SEQ ID NO: 21870 - DNA, 433 bp, Glycine max
  Clone ID: LIB3106-045-Q1-K1-H9
ctttcgattagtcccgatctcctcctgatacaaatcaatgatcccaacgttgaatctgatgagaccaaacaggactcccaacttaactataattaccggaacatgccattgccataacataaccctttctcactgttgtttttttctttttcttcccaataaataacaacaaacaatcactctcataacagaaaaacccttttttccccttcctctgaagcgaaacagattcgcaaaaaaaaattaaaaaatcccaattctcttcgcaaaaatcgaaatcaatgtcgaaaactccgaatgagaaggaaacggaggagcctctgccagaccacctccgctgcgggcgcacggacgggcggcaatggcgttgccggcggctagtgaaggaaaatctgaagctctgcgagattcactaccttcaaggtccgcaccg

SEQ ID NO: 21871 - DNA, 370 bp, Glycine max
  Clone ID: LIB3106-046-Q1-K1-A1
cccacgcgtccggaagaacttagctacaagctaaggaaggatcaaagagaatggctcaagcaatggcatcaatgactagcttacgtggttcctctcaggctgtgttggaaggtagccttggctccacacgcttgaatgtggggagtggaagcagggtggcctcagtcacacgtgcagggttcacagttagagcacagcaacaacaagtgaatggtggtgaggtacaaagtagccgtagggcagtgctttcacttgttgctgctggtttgaccactggctcttttgttcaagctgtgcttgctgatgccaaacctatcaaagttggaccacctcccccaccttctggcggattacctggaacattgaactc

SEQ ID NO: 21872 - DNA, 401 bp, Glycine max
  Clone ID: LIB3106-046-Q1-K1-A10
agaagattaggttgagagctgaagatgtgcaagggaagaatgttctgacaaatttctggggaatggatttcacaacagacaagctgaggtcattggtacgaaaatggcaaactcttattgaagcccatgtggatgtgaagacaactgataattacacattgaggatgttttgcattggatttaccaagagaagagctaaccaggtgaagagaacctgttatgcacaatcaagccagattagacagattcgtaggaagatgagggagatcatgaccaaccaggcaacagcatgtgatttgaaggagttggtccggaagtttattcctgagattattggaaaagagatcgagaaggcaacatttagtatttaccctctgcaaaatgtgtttgttcgtaaagtc

SEQ ID NO: 21873 - DNA, 391 bp, Glycine max
  Clone ID: LIB3106-046-Q1-K1-A11
cccacgcgtccgaaggaatgccgtctattgtaattaatcctttagaggaggaacgtgatgcagacgaacaaattatattgccatcagtaaatgcagaagttgatatggctgtattagctgccttaccacaatcaatgcaacttgatattcttgcacagcttaaaggaaagaaaaccgaaggactagtaaaggaagttgacaatcagaatcaacatgatgtcaattatcggggcaagggtaaggggattctgctcattgaagctgacatggtaggttgtagctccagacatgacaatgttacatcaaggagtgacaatcaacactcaattgatgaaatgttagctgcatctattgctatggaggaaaatgaagagttagtaaataatacatc

SEQ ID NO: 21874 - DNA, 263 bp, Glycine max
  unsure at all n locations
  Clone ID: LIB3106-046-Q1-K1-A12
ggatgtcttgtgcttatagggaagcgaccacatttacttcataaagggggtaaaaacagatagggattatcacttatactggactcataatatgcaacatcttttttcactgnnataactgtctttcccctaacatttcacctttattttcttgctcaacttaaaggaaatattatccttcgactattaaacgaacttaacactcttaatcaacatgatgtcacttatctgggctagggcaatgttattctgctcattgaaac

SEQ ID NO: 21875 - DNA, 264 bp, Glycine max
  Clone ID: LIB3106-046-Q1-K1-A2
acgtgagttacccttgcaggtgcgcttgcgcttctactaattgaaacgttgatgagggttgtggaccatccagaggcatccccaggaccccatgattctgattacgcgtttagggactttgcataactaatgattcatgagaaaaacaagaaatcccaaccccaaatatcaacagtgtatagtttgaatgcataatgcttgaagctgacactgcgaggaatagaaattagctaaaattttagtgtgattgtcaagtactgatcg

SEQ ID NO: 21876 - DNA, 289 bp, Glycine max
  Clone ID: LIB3106-046-Q1-K1-A3
agggtttatacaattttcgatggcttcttcagatgttgagtaccgttgcgttgtcggtgggctcgcttgggccactgacgaccaagctctcgagagagccttctctcagtacggcgaaatcgttgaaacgaagattatcaacgatcgtgagactggaagatccaggggttttggatttgtgaccttcgcctcggagcagtccatgaaagacgccatcgaagggatgaacggccaaaaccttgacggccgtaacatcactgttaacgaatctcactcccctggtggccgt

SEQ ID NO: 21877 - DNA, 353 bp, Glycine max
  Clone ID: LIB3106-046-Q1-K1-A4
gaacgttgtgcttgttcgcaaaaccatcaatggcgtcagcattatcttctctctcttccacgtcggcttcactgctgcagcacagtttcaccggtaactcgaaggctcctattactcaattccccaacaaaagtgcgcgcttttcgggcttcgctcaaaagaaggcaaagaaacttcggaagatacttttgaaggaagatgtgactgatgtaggaaagcaagggcaacttcttgatgtgagggctggctttttcagaacatacctgcttcccatgggaaaggcacaacttgttactccccagctactcaaggaaatgaagatagaagaggaaagaattgacgctgagaaaaga

SEQ ID NO: 21878 - DNA, 270 bp, Glycine max
  Clone ID: LIB3106-046-Q1-K1-A5
aagagttctttcaaaatgcaaacagccttaaccttcgctgcccccaacgttgtgccattggcacccacaaagagagtctcccatattaccatctttcccaccaaattgaaagccccgcgctcctcacctcgttactctccgattagggttgcaaccgtggagcccgacacttcaactgtcgactacaactctgcgttctcagtgtttcctgcagaagcatgcgaaactgtaggaggggaagcctgcatggcggagatgtaccctgaaacg

SEQ ID NO: 21879 - DNA, 391 bp, Glycine max
  Clone ID: LIB3106-046-Q1-K1-A6
agccaattcatcattttctctcttctctgcttcttcttgttcaaatcttaggagctgaggagaatcaatcgagagaaatatgtctggtatcgctcgtggacgccttgctgaggaacgaaagtcatggcgcaaaaaccatccacacggtttcgttgccaagcccgagactctacctgatggcaccgtaaatttgatggtctggcattgcactattcctggcaagaccgggactgattgggagggtggatatttcccactgacaatgcacttcagtgaagattaccctagcaagcctcccaagtgcaaattccctcaaggtttctttcaccctaatgtgtatccatctggaactgtttgcttgtctatacttaatgaagatagtgggtggaga

SEQ ID NO: 21880 - DNA, 382 bp, Glycine max
  Clone ID: LIB3106-045-Q1-K1-H12
caacaacgaaaaagggtttttggttttggactctgaaagaaactcaaagtgatgcgtggcatcgttctttcgcccaaaccctaacctcgtcctcgtgcattcattccccgcgatcaggtgtgtttttatccattgcaaacagcatgaattttgcagcatcattgtgcagaagattgaatatcaaggaacttgtgacatatgttcctgtgtatagaagcaccagtggtgtttctggagaaggcttgaatttggcgttcaggcgttgggcttccaaaaagactgctggttccacaaagaatggacgggattcaaaacccaagaaccttggagtgaagaaatttggtggggagagggtgataccttggaaatatcattgttcgac

SEQ ID NO: 21881 - DNA, 291 bp, Glycine max
  Clone ID: LIB3106-045-Q1-K1-F7
tgatgaagctataatttggatcagattcctttgaatttaaaaaaaaaaaaaaaaaaagggaaaaaaaaaaaaaaaaaaaaggacaaaaaatatagggggatcaagattaaaatacacatgcctgcggcgcctgtgcttccctattgtgttccctttcttgcgtccctgtgcctctgttttttggctgcgggaccggaatttccttggcgtggcctaacttattctccttggagtaaattcctgctttgccggctccctttttatgcgaagaggcaccgtcctattgccctt

SEQ ID NO: 21882 - DNA, 315 bp, Glycine max
  Clone ID: LIB3106-045-Q1-K1-F9
ctcaagttgacagggctacctacatgctgcttgtaacattagaagagtttgtgccgtataaatcccataggccaacgaccccggaaaggccagaatctggtccccctatgtactaggctaatgagcgatcctccccacccatgatgaacatgccgcactacacccacctcttatctctatcctacatcatgcaactgagccagagcctcatccgcactcacaggttacgcatgatttctaggacctgatagtcgatgcacctactgcacatgatcatagcaaataaattgcctttctcactctttgctgctgcac

SEQ ID NO: 21883 - DNA, 411 bp, Glycine max
  Clone ID: LIB3106-045-Q1-K1-G1
gttggaaccgagattgttatagactcttgttgtgcaacctttgcggaggtgcagaagagaggcgaggatttctgggctgaatttgaattgtacgctgctgatcttcttgttggagtggttgttgacattgctttggtgggtctgttggcaccatatgctcgaattggcaagccttctctgtcaaaaggtttgcttggacaaattcagcatgcttgtgctgctcttcctagcagtgtgtttgaagctgaaaggccgggatgtaaattctccacgatgcagcgcattgccacatacttctacaagggtgcattgtatggatcagttggctttggatgtggtattattggtcaaggaattgcaaatatgatcatgaatgccaaaaggagcattaagaaatctgaagatgacata

SEQ ID NO: 21884 - DNA, 404 bp, Glycine max
  Clone ID: LIB3106-045-Q1-K1-G10
aatagataagccttcctctctgcagagtgcagagctttctctccccgttgcttcattcattctcaacaacaaaccaatctttcttagaaaatgagggggggcttgtggcaacttgggcaatcgatcactcgccgtcttgcccatggagataagaaggctgttgctcgtcgatgttttgcctcagaagctgagctgaaaaagacagtgtttcatgacttccatgttgctcatggtgggaagatggttccatttgctgggtggagcatgccaatccaatacaaggactcaatcatggactctaccatcaactgtagggagaatggtagcctctttgatgtttcccatatgtgtgggctggagcctaaagggaatgacgctgccccattccttgaaagctggtcatt

SEQ ID NO: 21885 - DNA, 388 bp, Glycine max
  Clone ID: LIB3106-045-Q1-K1-G11
ccccgaagtcgggagggtcagcatgaggaagaccgtcaccaagcaggcctcctccggaagcccatggtacggcccagaccgcgtcaagtacttgggcccattctctggcgagcccccgtcctacctcactggcgagttcccaggtgactactgctgggacactgctgggctttcggccgacccagaaaccttcgccagaaaccgtgagctcgaagtgatccactccaggtgggccatgctcggggccttgggctgcgtcttccccgaactattgtcccgcaacggggtcaagtttggagaagctgtgtggttcaaggccgggtcccagatcttcagcgagggtgggctggactacttgggcaacccaagccttgtccacgcccagagc

SEQ ID NO: 21886 - DNA, 442 bp, Glycine max
  Clone ID: LIB3106-045-Q1-K1-G12
aaccggtgaacggctgatagaaattaacgcgagaaaaccgaaatccgcactttaccgcaccctgcgactccgcgtgggtttggcgaaaccttctagaattttcttccatggaggttatcagagttctaacggcggcgatcacggtggcggttctcgcggcggcgcttccggcggaagccggcgacgacaaccgagtattctcgccgtgttcggacacgcgagtgcagagatccgacggattcacgttcggaatcgcgttcgctccgaaggacaagttcttctacaacaacaacaacagcgttcagttgtcgccgtgcgatacgaggctctcgctctccaatgcgaattctcagatctccgtgttcagacccaaggtcgacgagatctcgctcctcaccgttaactcctcctcgttcgtggcggactcgtatggctatatggg

SEQ ID NO: 21887 - DNA, 413 bp, Glycine max
  unsure at all n locations
  Clone ID: LIB3106-045-Q1-K1-G2
cccacgcgtncggttcttagatatgaggacaattttgactcaaccagcaatgttgctgtcatggtcactgcaactgacaagaagtccatcactgactatggttcacctgaggagttcctatctcaggtggattacttgcttggaaaacaagccttctttggccaaactgatgctgagggtggttttgattccaatgctgtggcaactgcaaacatcttggagagttcaacgcctgtcattgatgggaaacagtactacagtttgactgtgttgacaaggacagctgatggagatgaaggtggcaagcaccagctgattgcagcaactgtgaaagatggcaaactatacatttgcaaggctcaagctggagacaagagatggtttaagggagcaagaagatttgtggagagcac

SEQ ID NO: 21888 - DNA, 431 bp, Glycine max
  Clone ID: LIB3106-045-Q1-K1-G3
cccacgcgtccgctgaaacttcataagcggcttgccgctagcgttctcaagtgtggtagaggcaaagcttggcttgaccctaatgaggtcaatgaaatctccatggctaattctcgacaaaacataaggaaattggttaaggatggtttcattatcaggaagccaactaagattcattcccgttcccgtgctcgcagaatgaaggaggccaagaggaagggacgtcactctggttatggtaagcgtaagggtacaagagaggctaagctccccaccaaaatcctttggatgaggaggatgcgtgtcctcaaacgattgctccgcaagtacagggaagcaaagaagattgacaagcatatgtaccatgatatgtacatgaaggttaaaggtaatgtcttcaagaacaagagagtcttgatggagagcataca

SEQ ID NO: 21889 - DNA, 443 bp, Glycine max
  Clone ID: LIB3106-045-Q1-K1-G4
cccacgcgtccgctcatcgttcttctcttcgccttcaccatcttcgccttcgttgtcaccaacaagggcgctggcgaagttgtgtctaatagagggtataaggagtataggcttggggattactcgaactggttgcagaagagggttaacaacactaagacgtggaacaggatcaggagttgcttgcaatctgggaaagtctgcactgagtttcaatccaagtttctaaacgacaccgttactgagttttactccgaaaacctgtccgcgcttcagtctggatgctgtaaacctgcagaagaatgccagtttagctatgtgaatccaacgacatggacgaagcccacaaatgtgactaatcagagcaacccagattgtgatgcttggaataacgatccaacagttctgtgcttcaattgccaatcatgcaaggctggcttact

SEQ ID NO: 21890 - DNA, 421 bp, Glycine max
  Clone ID: LIB3106-045-Q1-K1-G5
attttgattcctaatcatcattttcccttctttttattctctgcacaacaattcgagattccaaccatcgatctcaattttcaaccttaacctctaagaatgtcttacgcttatctcttcaaatacatcatcatcggtgacaccggagttggaaagtcttgtcttctacttcaattcacggacaagcgctttcagcccgtccatgacttaaccatcggtgttgaatttggtgccaggatgatcacaattgataacaagccaatcaagttgcaaatatgggatacggctggtcaagaatcattcagatctattacaaggtcttattacagaggggctgcaggtgcattgcttgtttatgatataaccaggagggagacatttaatcatttggctagctggttggaagatgcaagacagcatg

SEQ ID NO: 21891 - DNA, 404 bp, Glycine max
  Clone ID: LIB3106-045-Q1-K1-G7
caacaaacatatctcttcctcttctgtccctcaatggaaggatcaggatccggtgtggttacagtctacggcaacggcgccatcaccgagaccaagaagtcccccttctccgtcaaagtcggcctagcccagatgctccgcggcggcgtcatcatggacgtcgtcgacgccgagcaggcccgcatcgcggaggaggccggtgcctgcgcggtgatggccctggagcgtgtccccgccgacatccgggcccatggcggcgtggcccgcatgagcgatccgcagctcatcaaggatatcaagcgggccgtcacgatccccgtgatggccaaggcccgcatcggccacttcgtcgaagcccagatcctcgaagccatcggcatcgactacgtcgacgagagcgaggt

SEQ ID NO: 21892 - DNA, 422 bp, Glycine max
  Clone ID: LIB3106-045-Q1-K1-G8
cccacgcgtccgcccacgcgtccgcttctcttcccaaactctcttcttctattccaaagacccttttgaagtaatcgatggagtttcagtctctttccagattctaccttcttctttccttaaccattctcttccttgcaccctttcacgctcaagctaaaattaaagtcacttactgcgataagaaggcagactatcctgtgaaggtgtctggagttgaaatatcaccagaccctgtggagagtggcaagcctgctacctttaagatctcggctacttctagtaaagctatttatggtggagaagttgtaattggagtttcatacgttggggtgcctgtccatactgaaagaattgatctctgtcatgaagtatcctgtcctgttgccaatggcaattttctgatttctcacacccaaaca

SEQ ID NO: 21893 - DNA, 429 bp, Glycine max
  Clone ID: LIB3106-045-Q1-K1-G9
cccacgcgtccgcggacgcgtgggctgagaatctgattcaggctggggttgatgggttgagggttggaatggggtctgggtccatttgtactactcaggaggtttgtgctgtggggcgtggtcaggcaactgctgtttacaaggtctcgtccattgcttataaaagtggtgttcctgtgattgctgatggtggcatctcaaactctggtcatattgttaaggctttgtcattgggagcgtcaactgttatgatgggaagcttcttagctggtagtcttgaggctcctggggcttatgtgtatcagaatggtcaacgtgtgaaaaagtacagaggaatgggttccctagaagccatgactaaagggagcgatgcatggtacttgggtgatacagcatagctaaaaattgctcaaggggttgttggagctg

SEQ ID NO: 21894 - DNA, 200 bp, Glycine max
  Clone ID: LIB3106-045-Q1-K1-H1
cattgataaaaaatcagaccgctttagtaggtttatcggcttggataactcaaaatttgaagaggtacaacaaatcaatttgaagcggtctcttataaattttccttcttaatttcttattcagaattatgatttatttaaaaaaaaaacaaattaaaaatattattattaataaataaaaattttaatttgggcggccg

SEQ ID NO: 21895 - DNA, 128 bp, Glycine max
  Clone ID: LIB3106-045-Q1-K1-H10
ctgacgcgtggtcggacgcgtgggttaattttgtaactactaggaataggagtgacggggcaccccatccagccctccctccttaactacaatttccccttcactccatcaccttattaaaacccatc

SEQ ID NO: 21896 - DNA, 408 bp, Glycine max
  Clone ID: LIB3106-045-Q1-K1-H11
gcacctgcacagaagaagaagaagaagaagaagaagaagaagaacgatagtaatggaaatcaagcccggtttgtcagcactcgttaccggtggtgcctctggaatcggcaaaggtcttgcactagctcttgcagagaagggtgtatttatcacgatcgtggatttctctgaagaaaagggaagacaagctgcaatcctcgtcgagaaaattaactccaattttcattctaagttaggatttccgtctgccatatttgtgaaatgtgatgtgagtaatgcaagggatctagctgctgcatttgaaaagcattttttgacatatggaggactagacatttgtattaacagtgcggggattagtagttctgtaccattccgtgatgatcaaacggatggcacccgaacatg

SEQ ID NO: 21897 - DNA, 367 bp, Glycine max
  Clone ID: LIB3106-045-Q1-K1-E1
caaaaagaaagctagtattagatgctgctgttctcgagtccatggaggagattaatgaaggtgaattgcccgagaagaccatgggagagatattgtctgcaattttattgagttaaaatattgatctaagaaaaacagtttaatttatcatcacttcattcctatagttccaatcttgaattaatctgttgatttgggatagaagagaactggctgcctacaaattggcaagaatgcggtaccagtattgatgtacattataatcaataggagaattagtataaaaagtcatggcgaagattaacaaatttgttgaacattaattattcctgaagcactaatgaagccttaccctttccatatctaa

SEQ ID NO: 21898 - DNA, 422 bp, Glycine max
  Clone ID: LIB3106-045-Q1-K1-E10
cacaagccaagtgaaagtgagaaaaaataaaaatcaaagagcataatgtcagggatcattcacaagattggggagacccttcatgtgggagggcacaagaaggaggaggagcataagggtgagcaccatgctggagaatacaaaggggagcaccatggtgaacacagtagtgagtacaaaggagagcatcatggtgaacacaaagctggagagtaccatggtgagcacaagccagagcacaaagaggggttcctagacaaagtcaaggacaagatccatggtgagggcggcgccgccgagggcgagaagaagaagaaggagaagaagaagaaggagcatggccatgagcatggccatgacagcagcagcagcagtgacagtgattaaactgctgcatcacctatatatttaaaaggtttatg

SEQ ID NO: 21899 - DNA, 416 bp, Glycine max
  Clone ID: LIB3106-045-Q1-K1-E11
aggaaaaccaaccaaagttccaaattttttggtttggggatagatagagtgatacgcgtcacattttcataataataaaaaaatggcagcggcggctgcagtgacggtgctactcccacctaggattccgaccaccaccaacgttacccgctgctctgctttgccttctctccctcctcgcgtctccaacaccaaaaccactttgttctcaccttccctcaacaacttttcagtgtcccgaaaatcttctctgcttcagaccagagcttcttcagaggaatcatcctcagtagatgccaatgaggtgttcacagatttgaaggaaaagtgggatgctcttgaaaacaagtccacagtacttctttatggtggaggggctatagttgctatttggctatcgtcaattcttgtgagcg

SEQ ID NO: 21900 - DNA, 180 bp, Glycine max
  Clone ID: LIB3106-045-Q1-K1-E2
cccacgcgtccgctttatttataatttgtttctatttagtgtatttcatggttgtgttcttattaccaaattttaaaggtttggcgcattgctttctgtacatttaaatttaatttgtttgggttgctgagtaaaaactaaaatgaaagtagatacaaattgttttttttttctttgaac

SEQ ID NO: 21901 - DNA, 418 bp, Glycine max
  Clone ID: LIB3106-045-Q1-K1-E3
aaacaatgatggctggtgttagtggcagtagcactactcccttattgtgctctttgttctttagttcttccttactttttgcttcctgcacccatgcctcctcccaggcacctcctccaattgtggatggactttcatgggatttctataggacgagctgtcccatgcttgaagggatagtgagcaagcatctccagaaggtgttcaagaaggacaatggtcaagctcctgccttactcatgatcttcttccatgactgctttgttcagggttgcgatgggtcgatattgttggatggaagtccaaatgaaaaggatcaaccggcaaacatagggataaggccagaggctttgcagaccattgaaaatcttcgatctcttgttcacaagcagtgtggaagggtcgtctcttgcgctta

SEQ ID NO: 21902 - DNA, 377 bp, Glycine max
  unsure at all n locations
  Clone ID: LIB3106-045-Q1-K1-E4
ntccgccacgcgtncggcaagaagaagtttgagactctttcctacctgccagatcctgatgatgcacggttggcaaaggaagtagaataccttcttaggaagggctggattgcttgcttgcatattgatgtgcagcacgcgtttgaatacacatgagcgcaacaagtcaccaggatactacgatggacgctactggaccatgtggaagctgcctatgtttggttgcactgatgcttctcacgtgtcgaaagaacttcaagatgataatactgaatgacacaacccattgatacggctgatccgactagagcaagttcgccaagtgcagtgcatcatctttatcgcctacaagcccgcatgcttctaagtgtgaaaaa

SEQ ID NO: 21903 - DNA, 319 bp, Glycine max
  Clone ID: LIB3106-045-Q1-K1-E5
ctcatgtccaagtacaagatcaagtaccagttctacagggtcttccctaatggggaggttcagtatttgcaccctaaggatggtgtttaccctgagaaggtcaacgccggacgccaaggggtgggtcaaaacttcaggtctattggtaagaatgttagtcctattgaggtcaagttcactggcaagcagccctatgatttgtgagcacacaactctatcttcatcatcatcatcccccgtgcttcctttatatgctatatattctcatgtgatatcatgtacctattgtcaattttattatgccacaaatattgcttaa

SEQ ID NO: 21904 - DNA, 414 bp, Glycine max
  Clone ID: LIB3106-045-Q1-K1-E6
ggaagacgaaaagagagttgagagagagtgagagggagtgagagggagcagagggagcgaagagaagaaacaaagatggagactcctcctccccaacaaggcgtcgtgaagaagaaggagacaaggggccgaaaacccaaaccaaaggacgaacacgggaagggtttgaaggaaggtaggaaaacacaacaacaacaacaacatcatcatcagcagcagcaacagcaacaagatcaaccttcggtggacgagaaatacacgcagtggaagtcccttgttcctgtcctctacgactggctcgccaaccacaacctcgtctggccctctctctcttgcaggtggggcccccagcttgaacaagccacttacaagaatcgccagagactctacctttctgagcagactgatggtagt

SEQ ID NO: 21905 - DNA, 432 bp, Glycine max
  unsure at all n locations
  Clone ID: LIB3106-045-Q1-K1-E8
gacaaagtgaaagacttttttggagatgcaaaggaatcttttggaaagataacatcattgggcactactgaaacagaggagtcagaggaagacacaaaagaaaaagccaaggttaaaggatgaaactatagctggaaatgatttgcttgaattgttatgagtagcctgtggccctatgagatcagaaagctcaattatgtttatggattggttaatggggaaacttctgtgcacaacaatgctactccaggttttgttcttagatctgtaaccatcaaaattgttttatattctgcagagtgaacaccatctttacgatactgattgatcactcgtgtatgttgtaatccatgatgctttggaatggatagcatgtangatgacatgtaatggcaccgttatcagttcaagagattcctggaattgttgtgt

SEQ ID NO: 21906 - DNA, 418 bp, Glycine max
  Clone ID: LIB3106-045-Q1-K1-E9
accacacgtacgacttgatcggtggagtgcaactctcactaatgaggtgaacctttcggatcatacaaatacgaaattcatactaacttgctgtgcaacggatgattgatgatgctaattaacaaaatatgccaacatagaagcacaccttcgagaactcataactgtgcctaattaccctacgagcagcatgcttgtgataggagaacttaaatacttgatcgttatgatcgactcagtgtacatgaacaacacacatgagcttgtgctagactgaatgaaaaagattcacgtgtctgagcgccttacccgtaaaattctgaatgcaacaaaaaattcgattccacttgtgggagagtttgctatcttctcagatacacagcctagaaatcatccaaccataattaaggtaatatgg

SEQ ID NO: 21907 - DNA, 432 bp, Glycine max
  Clone ID: LIB3106-045-Q1-K1-F1
atcgagataactagaaacagtgtgatgaaaatgaaggtccttgttttcttcgttgctacaattggggtagcatggcaatgccatgcgtacgatatgttccctctccgaatgaacactggctatggtgcccgtactccggaggtgaaatgcgcaagttggaggcttgctgtggaagcacacaacatctttggctttgagaccattcctgaagagtgcgttgaagcaacaaaggaatacatccatggcgaacaatatagatcagactccaaaacagttaaccaacaagcttacttttatgccagagacctcgaagtccatcccaaggacacatttgtgttcagtatagatggcaccgtactctctaatattccatactacaaaaaacatggatatggggtggagaaatttaactcgaccttgtatgatgaatgg

SEQ ID NO: 21908 - DNA, 53 bp, Glycine max
  Clone ID: LIB3106-045-Q1-K1-F10
aaaaagaaaaaactgtaagttaaagtttctgtctcacatacattaattgctgg

SEQ ID NO: 21909 - DNA, 438 bp, Glycine max
  Clone ID: LIB3106-045-Q1-K1-F11
ccattgttggagctagcaaatcaatgacaataggttctagcagattatcattcattttagtacttgtgcttgtaaccttttcatccatgatcattgactcaagggttgcagaggcacgtaccctgccaaaatcagccttattgccttccaaagttgatatacctactgttgttcctcttccactggtggcaccactgccaaatttgcctgttactctccctccagtgcctgaactacctgcagtacctaaagtaccaattcctgaagtaatagttaataacgccaaaataatcccttgagtacctatgatctatccagtcactactacttattttgtcacttgctaaattaacttgttgttgccatcccagggtggttctggttctgttggggtttaatttctgtcattcaattacatgctatgttcagtttatatgt

SEQ ID NO: 21910 - DNA, 404 bp, Glycine max
  Clone ID: LIB3106-045-Q1-K1-F2
cccacgcgtccgatatatatatatatatatatatatatatatatatatatatatatatatatatacatatatatacttttttccctttacatattatctctttcttatgtgtaaaactataataaaaaattaagtaaaaatacaattagtctatgaaaaaatagtgacgaaggtttattaatcattgccttctaataccaagttaatagtgactatttggaatctcaattgactattgaaaatgattagtgagcttttttttttttgttaatttctatcatcgtatttttttttttttgaaaaaatgagattgatagtgagaactttaattttggttggaaggtatttttaagtgcacaagataaagtcatttactggtataaattgaatttaattagaatgta

SEQ ID NO: 21911 - DNA, 411 bp, Glycine max
  unsure at all n locations
  Clone ID: LIB3106-045-Q1-K1-F3
cccacgcgttcgcccacgcgttcgcccacgcgtncgcttgcaattccaattcctggggagttggttccattttccgacgaaccatctcaaatccaccgccacataatgtaactgtatgcgaatgcgaatgtgaacgcggtttcgatttagatccagattcatggggatttgctttagcattgaagaccaaaaccacctttccatctccgattccaacgcgaagcctaaacctgcaggtcatgaatctggcgctccattggcttccatgaacatcaaagatctccgcgaaggtgctggatacagcaatgtggatatttttacctacgaggagcttatgctcgcgacgaagcactttcggcccgatttcatcttgggagaaggaggcttcggagttgtatataaaggcgtcat

SEQ ID NO: 21912 - DNA, 334 bp, Glycine max
  Clone ID: LIB3106-045-Q1-K1-F4
tcaaacatacaaaacacataacaaacaaacaaacaataaaaataacaataaaatagaagggggggggccatattaagacgaaaccatattaaatccaccgccacataatgtaatctgtattctaatgcgaatgtgaacgcggtttcgatttacatccatatacatggggattcgctttaacattgaagaccaaaaccacctttccatctccgattacaacgcgaagcctaaacctgcaggtaatgaatatggccctccattggcttccatgaacatcatagatctcccctaatgttctggattcacccacgtttatatttttacctactcggag

SEQ ID NO: 21913 - DNA, 414 bp, Glycine max
  unsure at all n locations
  Clone ID: LIB3106-045-Q1-K1-F5
cccacgcgtccgctctttctcaaattaattaattccctttattatcaaaatggccctggctatggctgcttgcagtcttggacttcacttgagtgctgataacaccttgagaccttttgaaaaaaccaccgtcttgaaggccctctctatctcttatgttactaaaccatgttacatttctcacaaaacaagattatcatcaccttcatcttcaggaataacaatgatcgcacgagcaacagcagttactggtactgtggaggatggaaatcaaggagaggctgataccattccaactccggtagttataattgatcaagactctgacccagatgcaactgtggtcgagataacctttggtgatcngcctggggctcttcttgacactatgaatgcgttaagaaactttgggct

SEQ ID NO: 21914 - DNA, 422 bp, Glycine max
  Clone ID: LIB3106-045-Q1-K1-D8
cccacgcgtccgcccacgcgtccgtgcttgtggtaattatcccttcaacagagagcctcaatgtacaaaaggataaatactgcttgtggtaattttagtttacagttagtgactgtgagaggtttcttttggcctttggctatacaaaaagtgttatagagcactgagattcactatttttttagagcataagcatatttaagcagggatagatgagataactattttttgttttgtatccttggcaattctaagagagataaagttgagtccggatactcgttgggggtatcaaggttatttagatattgctttagcatttatttgcgtctattgtattttatgggaagtgttggaccaaaacaacagtaaagaaattattttgcaacttgtgactagtatatatgatattgtttcacccc

SEQ ID NO: 21915 - DNA, 379 bp, Glycine max
  Clone ID: LIB3106-045-Q1-K1-C4
ctcaaaccactttccccacactctttagtgtgtcatttttttttttgctctttccccacaaagaggtcttggacccttcttctgtgtagtgcaatggccatggctaaggttttctgtgttctgcttctggcactccttggcatttccatgatcacaactcaggttatggcaacagattctgcttatcacttggatggaaggaattatggacctgggagtctcaagagctcacagtgcccttctgaatgcacaagaagatgtagccagacacagtaccacaagccctgcatggtcttctgcaaacaatgctgcaaaaagtgcctttgtgttcctcctggctactatgggaacaagtctgtgtgcccctgctacaataact

SEQ ID NO: 21916 - DNA, 282 bp, Glycine max
  Clone ID: LIB3106-045-Q1-K1-C5
gtattctattattttcccaaaaaaaaaaaaaaaaaaaaaaaaaaaaaaaaaaaaaaaaggaaaggggaattaaacaaattatattgagtaatgcattggacaaaaaataatgttttatagtgttacgctaatggaactaaattggcctttatatgataacaatctaaatttattaaaacgggggggggccttttattaggatcgattgtattttccggccctttagactgattaacttttttttatgggtcccatacacaaattacatgggccccgatttaa

SEQ ID NO: 21917 - DNA, 389 bp, Glycine max
  unsure at all n locations
  Clone ID: LIB3106-045-Q1-K1-C6
cccacgcgtccgcccacgcgtccgcccacgcgtccgagatcttatatgttaagcaggtgtacggtacgatggtagtgaggagccagaatccctcttcctgctttatgatataataaaaataaaatagcgattccggaaatcatgtctgtagctgctctttttatttatgtgataaatgtaaaacgctttggtttggcttggccgttgtgcattaggttgaaaaaataaatgttataattactcnnaaaaaaaaaaaaaaaannaaaaaaaaaaaaaaaaaaaaaaaataaaaaaaaaaaaaaaataatttatttataaatataatttaatattttattttaataatttttataatttatttttttggggggggccgttttaaaggatca

SEQ ID NO: 21918 - DNA, 423 bp, Glycine max
  unsure at all n locations
  Clone ID: LIB3106-045-Q1-K1-C7
gctgaatgcaaaatttccgagcacacatctacaatgattccaacgttgatccctcttaccgaaagttcctgcagagcaagtgccccagaagtggaaatgataaaacactcgaaccccttgaccaccaaactccaatccattttgataatctatactttcagaatttggtgagtaagaaggcccttctccattccgatcaggagctgttcaatggcagttctactgacaatctggtaagaaaatatgctaccaatgctgctgcattctttgaagactttgccaagggcatgctcaaaatgagcaacatcaagcctcttacaggaagccagggccagatcagaatcaattgtgggaaagtcaattaaacgttagcaagtgatgatgtataatatgtttttaatataaattttatttccctcctnc

SEQ ID NO: 21919 - DNA, 425 bp, Glycine max
  Clone ID: LIB3106-045-Q1-K1-C8
gtcaccatcaccgcctctgaacgcacatctacaccgattccaacaatcatccctactgccgaaacttactgcacagcaagtgccccaaaagtggaaatgataaaacactctaaccccttgaccaccaaactccaatccattttgataatctatactttcagaatttggtgagtaagaaggcccttctccattccgatcatgaactgttcaatggcagttctactgacaatctggtaagaaaatatgctaccaatgctgctgcattctttgaagactttgccaatggcatgctcaaaatgagcaacatcaagccttttacatgtaaccagggccatatcaaaatcaattgtgggaaaatcaattaaacgtttagcaagtgatgatgtataataatgtttttaatataaattttatttccctccttc

SEQ ID NO: 21920 - DNA, 444 bp, Glycine max
  Clone ID: LIB3106-045-Q1-K1-D1
aattaaaaacaaagcacacgctccacattgtgttttccggtgaatattccggcaactgcatgcaccggtgaacgacgccggaaatggacgagtcacagagaattggcatcggcttaatgcgtagtttccctcgccggagatcggtcgaggaccggtcatcttcccggcggcgacgctccatcttctccggcgcgggcatttcggaatctgtggacgccgacgactttgccgacgtctttggtggcccaccgcgaactctccttgcgcacaaattctcgagctccgggtcgttttacgaggaagttttccggccgccggagtttacgtgtccggcgccgaagggtggccggagcttgccggtgttcaggattccggctaggaatgagggattttacagcgacatattcgggtcggacgatgaacggagatcgagagagcggtcga

SEQ ID NO: 21921 - DNA, 437 bp, Glycine max
  Clone ID: LIB3106-045-Q1-K1-D10
acttctgccacctatgaagtttctttaatttgtgcatattccatcactctctctctctgcttctctgccagtttatgtacactaactcaatacacaacactcattaacatttcttttcctcatggaacttgagatacgtgcttgtctcttgttgtttctctttagtctcttctcatgctctcaagcctacactttctatgttggtgggaaagatgggtgggttttgtacccttctgagaattacaatcattgggctgaaaggatgaggttccaagtcagtgatactcttgtttttaagtacaagaagggctcggatactgtgttggtggtgaacaaggatgattatgagaaatgtaacaagaagaacccgatcaagaagtttgaggatagtgaatcggagtttcagtttgatcgatcgggtccattttacttcatta

SEQ ID NO: 21922 - DNA, 425 bp, Glycine max
  Clone ID: LIB3106-045-Q1-K1-D11
ctagtgtggtctgcaactatgagcaaggattatctaatcatactttctctccttttttccacggtgcttgcaactgcaagttcttcttcttcttcttcctccctctatcttgggaagggcttctcccatcgcaaattgtctcccagttatcacattcacaaaaccattgacgaatcctatgcagttatcttcgatgctggtagcacgggaagccgtgtacatgtctatcgttttaaccaacaattagatctccttcgcattggccaagaccttgagttgtttgtcaagactatgccaggtttaagtgcttacgctgagaatccacaagatgctgcagaatctcttattccacttttggaggaagcagaagctgctgttcctcaagagtttcaccccaggacgccagttaaacttggagcaactgc

SEQ ID NO: 21923 - DNA, 311 bp, Glycine max
  unsure at all n locations
  Clone ID: LIB3106-045-Q1-K1-D12
gttattgtcaatcccaagggagaaatgaaaggttctgctatcactggtcccattggaaaagagtgtgctgatttgtggcctaggattgcaagtgcagctaacgccatcgtttgagtggaatttcttgttatgtttaagcttgtaggatttaagtgtgtctcagattttgtttaagcttgaaattggaatacaagtgatacagatttttaatcattcgtaacttataatcagcttgctttttgaagagacgatattaattattaattaagaattttgttttttgttaaaaaaaaaaaaaaaaaaanaaatta

SEQ ID NO: 21924 - DNA, 445 bp, Glycine max
  Clone ID: LIB3106-045-Q1-K1-D2
cccacgcgtccgcccacgcgttcgcccacgcgttcgcacaattaaacaaacagtactatggatgtttggtcatggatatgtgagctccccaactcggtggagtggacagagtccgactcgccacccatgaagttcgaactcgcgagtgagaagaaggagaactcaactcgttccattcacctgaaagccgagcgaacctccggctcagactcggaagctgcggtgaccttcaccgtatgcttgcaaggctttcacccacacaacgcccacaagcctctctgggtctccgaaaagtgccacctgtcatcagaaaagcccttcctccctctcctcctgcaacttctccaagaaatcatatcccactcccccacggcgcacgatagcacctgcccccgttcccagctccagaaactgaatcccgagcccatcgcatggatcatggact

SEQ ID NO: 21925 - DNA, 423 bp, Glycine max
  Clone ID: LIB3106-045-Q1-K1-D3
cccacgcgtccggagggtgacccggtgactgatttgctttttatcattagaggtagactggatggttctactacaaatggcggccgtagtggtttcttcaactcaatcatattgagacctggagatttttgtggggaggaacttctttcttgggctttactccccaaatccaccattaatttgccttcttcaactaggacagttaaagccctaagtgaggttgaagcttttgctcttcgggccgaagacctcaagtttgttgctaatcaatttaggcgccttcacagtaagaagctgcagcacacttttcgattttattcccaccattggaggacttgtgcagcttgctttatacaggctgcttggcgccgatattagaaggatgactatgaaagacctcattttgagggaaaccattccttt

SEQ ID NO: 21926 - DNA, 398 bp, Glycine max
  Clone ID: LIB3106-045-Q1-K1-D4
ctagcttgctaaattcccttataattattccttcttgtgttgagttgattcaaacataaacacggcaccctgggttcattaattgatttcattttgcagtaataacaagaacaaaaaataagcatgagttgcaacgggtgccgcgttcttcgaaagggatgcagcgagtcctgtattttgcgaccttgtttgcagtggatcgaaaccgccgaagcccaaggccacgccactgtcttcgtcgccaaattctttggccgcgccggcctcatgtccttcatttccaacgttccagaaaatcaaagacctgctctgtttcagtcgctgctcttcgaagcgtgtggcagaacggtgaaccctgtgaacggtgccgtggggcttctctggactgggaactggca

SEQ ID NO: 21927 - DNA, 404 bp, Glycine max
  Clone ID: LIB3106-045-Q1-K1-D5
aatctctctctctccaatggccaaagacctcgaaacggagattcaaagtgggttgcctcacaaggactaccacgacccaccccccgccccattctacgaccccgccgagctccgaaagtggtccttcttccgagccctcatcgccgagttcgtcgccaccctcctcttcctctacgtcaccatcctcaccgtcatcggctacaaccaccagacagccaccgccgccgagccctgcagcggcgtcggcgtcctcggcatcgcttgggcctttggaggcatgatttttgtcctcgtctattgcaccgccggcatatcatggggacacataaacccggcggtgacgttcgggttgtttttggcgaggaaggtgtcgctgacaagagctgttgggtacatggtggctc

SEQ ID NO: 21928 - DNA, 364 bp, Glycine max
  Clone ID: LIB3106-045-Q1-K1-D6
gttattgtcaatcccaagggagaaatgaaaggttctgctatcactggtcccattggaaaagagtgtgctgatttgtggcctaggattgcaagtgcagctaacgccatcgtttgagtggaatttcttgttatgtttaagcttgtaggatttaagtgtgtctcagattttgtttaagcttgaaattggaatacaagtgatacagatttttaatcattcgtaacttataatcagcttgctttttgaagagacgatattaattattaattaagaattttgttttttgttaaaaaaaaaaaaaaaaaaaaaaaaaaaaaaaaaaaaaaaaaaaaaaaataataaaaattttataataaataataataat

SEQ ID NO: 21929 - DNA, 341 bp, Glycine max
  Clone ID: LIB3106-045-Q1-K1-D7
gtcttacaaaccagaggagttgatgaaattggtgaaggaatttgaaggggaggtttcgggaaaatctttatatgtttattatattatataattttattggtcatttctttttttataattaattcttttttattatctttaactttaatttttttataattattttatttttatttattttaattatattttttttatttttttattataatataattattattttttttatttatccttatttttttcttttattttaattttttatattatattgtttttaattttttttttcatcttatttttttatatttttattataaattttttatttttttttt

SEQ ID NO: 21930 - DNA, 448 bp, Glycine max
  Clone ID: LIB3106-045-Q1-K1-C3
ttctgctctagaaaattcagtgctgaaacatggcttcggctactctctctgtagccaaaccagcgccttcaggcaaatgggaaaggcttctctgaattctctggcctccgaagctcatcaggcttccttcccttttctagaaaatcttcagaggatttccattctgtcattgccttccagacctatgcagttggaagcagtggaggatacaagaagggtgtgacagaagcaaaactgaaggttgccataaacgggtttggaaggattggaaggaacttcttgaggtgctggcacggtcgcaaagactcccctcttgatgtcattgccatcaacgacaccggcggcgtgaaacaagcctctcaccttctcaaatacgattccatcctcggaaccttcgatgctgatgtcaagcctgttggcagcaatgtcatctccgtggatggaaagg

SEQ ID NO: 21931 - DNA, 245 bp, Glycine max
  Clone ID: LIB3106-045-Q1-K1-A7
aaaaaaaaaaaaaaaaaaaaaatttttttttgttcctttccccttttttttggggcccggggttttttaaattattatatataataaccccacattataaaaaaaggggggcccgtttaaaagttccaaacttaactaacccgtccttgcaaattaaaatctttttatttgtgtacccaaaattaatttaatggcccgccgtttaaaaacttgggaccgggaaaacccctgcctttaccaaattt

SEQ ID NO: 21932 - DNA, 359 bp, Glycine max
  Clone ID: LIB3106-045-Q1-K1-A8
agccactctaaagaaaatggcggtgcctctactctcgaagaagatcgtgaagaagagggtgaagaagttcaagaggcctcagagtgacaggaaaatttctgtcaagacaaactggcgcataccaaagggtatcgattcccgtgttaggagaaagttcaagggatgcactttgatgccaaacattggttatggttcagacaagaagacccgccactatctccctaatggttttaagaaatttgttgttcacaatgtgaaggacttggaactgctcatgatgcacaacaggacttactgtgctgagattgcccacaatatatccacaagaaagaggaaagatatagttgagagagccgcgc

SEQ ID NO: 21933 - DNA, 437 bp, Glycine max
  Clone ID: LIB3106-045-Q1-K1-B10
catggcttctgtttgtggaggttgcttagcattgcaagatgctggggttcctattaagggttctattgctggaattgcaatgggtatggtactggacaccaaggaatttggtggagatggaactccgcttattctgtctgacataactggatctgaagatgcatctggagatatggatttcaaggttgctggaaatgaagatggcataactgcatttcaaatggacattaaggtgggtggaattactttgcccatcatgagaaaggcacttctacaagcaagagatggcaggaagcatatacttggagcaatgatgaattcctcacctcctccagcaaaaagactttcgaagtatgctcctctgattcatgttatgaaggtacgaccagatagaataaatcttataattggttctggtggaaaaaagtgaagagcat

SEQ ID NO: 21934 - DNA, 435 bp, Glycine max
  Clone ID: LIB3106-045-Q1-K1-B11
gctggttctcatagtctctgaaagcagaggagttaccgaccaatggccaccattgcttcttcctcatccactgtgctcttctctgcatcctcttccaacctcctcccattttcacacccttctacttcgcgcctttctttctcttcttcccttcactcctcatccttctctctatcaatttctccttcctttttgtcatactattcttcaagttctacacactttgccactcatgctgccttcagcatcagtgccagtgccgccgagaagaagaaggtgctcatcgtgaataccaacagcggcgggcatgccatcattggcttttactttgccaaagagcttcttggtgctggccactcagtcaccatactcactgttggtgaagaaggctccgacaagatgaagatacctcctttcaacagattctcagaaatt

SEQ ID NO: 21935 - DNA, 328 bp, Glycine max
  Clone ID: LIB3106-045-Q1-K1-B12
ggaaatttcagactgagatagaggctggacaggttggcatcaatgtccccattccagttcctttgcccttcttctcatttaccggcaacaaggcatcgtttgccggtgatctcaacttctatggcaaggcaggggttaacttctatacacagattaagacaataacacaacaatggaaggattcaactggtggtagcaagattaacttggcaatgccaacctctcaaaaataatgttgatagccagagcgtgtaataaggctgtttctgaagtctttgttctcttgaaaaaaatgtcaaaggtcacctgctatgctttgttttgaaaa

SEQ ID NO: 21936 - DNA, 321 bp, Glycine max
  Clone ID: LIB3106-045-Q1-K1-B2
attagagaatttgagggtggggggtttgtcacgctttttgtcttgacggtggtctgtggacgaggatgttggattttggttttgattctttgaggacacgacgagcagaagcaacaaggtggtgactacagatctcgttaatgtcttgctcttgcgtaatgctatcacggaggatgaacaccattacaaaaatactaattgtgatttaaccatggcttcaatgaatgacaaagaggaaaatgcggaatgcgaaacctaactaacagaagaaatggcggagaagttgggagcagcagaagagagctctaattcaaaggcttt

SEQ ID NO: 21937 - DNA, 332 bp, Glycine max
  Clone ID: LIB3106-045-Q1-K1-B3
accacacgttctgacactcgtacgcttctccatgcatgttgctcgaatgtacttatttggacgaggatatacaattttgtgcattgaaaagaagatgacaaaaagtggtaagggggagggcggctccccttgctaaaaaaaaaaaaaaaaatcttgcgtaatgctatttcggctgtttaacaccatcacaaatatactatttttgatttaaccattgcttctatgaatgacttagattataattcggatttctaaatctaactaacagatgatttgtcgtgtaatttggtatgctacattattaagctttattcaaaaactttttattttta

SEQ ID NO: 21938 - DNA, 212 bp, Glycine max
  Clone ID: LIB3106-045-Q1-K1-B4
ggaaaagaggtaatcaagtttttatttttaccaacttgtttcttgactcgcctaattttgttcgatcttattctattgtgctactgtcggacatactgccatctgattttcctgttaaatatctaccatttatcatataattttttgaaaaaaaccaaacaatttataaaaaaatattatttaaatttttatatgggggggccgcttttaaa

SEQ ID NO: 21939 - DNA, 431 bp, Glycine max
  Clone ID: LIB3106-045-Q1-K1-B5
accatgcccaggaccatcttggagaggttgtgtatgtggagctgccagaatcaggtggcacaggtacccagaagtctggcttcggagccgttgaaagtgttaaagcaacaagtgacataaactctccaatctcgggggagattgttgaggttaacaaaaagctcacagagacacctggcctggtcaactcaagcccatacgaagatggatggatgatcaaagtaaagccaagtgatccatctgaattagattccttgatgggtccaaaagagtacacaaaattttgtgaagaagaagatgctagtcattaaagtttgaattgaattggttcctgcagttatatgtgggactgactgttctttacatgtttatgattttattatcttctgaacaagtttttaatatgcaatataactggttctttccgtttt

SEQ ID NO: 21940 - DNA, 437 bp, Glycine max
  Clone ID: LIB3106-045-Q1-K1-B6
gataccacacaagaagagaaagaggagaaaagaaaagtaaaaaggaaaggaaaggaaggatctttggggaattgggaggcaaggaaagaaagatgcaggattaggtgtgtggatagggagggtccagcgtagcgtactacctgtcttctgttctttctacccacgacttttctctcataccatccacatcattcaactattgcactgccaaggtttggacagtgttacgtgcttcacgaaacatgacctctgctcacgaccttactgataatgaagatgatggacagcagcagtcagaatcacaaattcagtccccttctgcaaatggaatttctgatccagatattattacccagattgtcaatgtacagtttgcatcacctggccagcttggaactggtcatgcaatgtttccacctgtgtttccatatccagat

SEQ ID NO: 21941 - DNA, 411 bp, Glycine max
  Clone ID: LIB3106-045-Q1-K1-B7
ggctggtggtgtctgcattgccgatgaagttcaaactggttttggccgaacaggaagccattattggggatttgagacacagggtgtcattcctgatatagttaccatggcaaagggtattggcaatggtctgccattgggagctgtagttacaactccagaaattgcaagtgtgatggcccaaaagattcaatttaatacctttggtgggaaccctgtctgctctgctggtggacttgcagtgcttagggttcttgataaggagaagcgtcaagctcactgtgctgatgtcggatcttatttgcttgaacgtttgagatttctcatggaaagacatgacatcataggaaatgtcaggggaaggggactaatggtaggcttagagttggttactgaccgaaccaacaagac

SEQ ID NO: 21942 - DNA, 411 bp, Glycine max
  Clone ID: LIB3106-045-Q1-K1-B8
aaacaaaagagtagtggcctttaggtggtgaagaacaagagctcaaatcaaatcgaatcgaaaaaagaaagaaagatcatattcatggcgatggcaagcctggctcgacggaagggttacgccgtcgttttgtcgtcgaggtcgtcgttttgtctgacaagctggaggggattcgcgtccggatctgacgaaaacgacgtcgtcgtcatcggcggcggtcccggcggctacgtggccgccatcaaagccgcgcagctcggtctgaaaaccacttgcatcgaaaagcgtggcactctcggcggtacctgcctcaacgtcggatgcatcccttccaaggcacttctgcattcttcccacatgtatcatgaggctaaacatgcatttgccaaccatggggtcaagttttcatct

SEQ ID NO: 21943 - DNA, 127 bp, Glycine max
  Clone ID: LIB3106-045-Q1-K1-B9
gcagagggaagttctacacttttttgtttggattgatcgagtgtactttttcttttcgagattggcttggtgtgcagtggaaagagggtggaaaagagtggtaagggggagggcggcgccccttgct

SEQ ID NO: 21944 - DNA, 77 bp, Glycine max; identical to SEQ ID NO: 19937
  Clone ID: LIB3106-045-Q1-K1-C1

SEQ ID NO: 21945 - DNA, 405 bp, Glycine max
  Clone ID: LIB3106-045-Q1-K1-C11
attgacgtgagcggccatccatggtttcgcttcatccacatacactaacactagcgtgccctttgtccgtttcctcttcatcctcccgttttctcagatgctccgtaaattctgccccgaagcgaagaagaagcagcttcattactgcttcgtggcaagagctcgcgggagttttactattctccgcgattcctttcactgccgtgaaagctatagctaatagtccgctaggggagtcgcttcagaggaaaatggaggagagaaagacatttgctgtagaaaactcgtctacattcaaggccttagccggcatggcccgaaaggagagcttttggtatggagaagatcggcctcgttggcttggtcctatttcatatgaatacccatcatatcttactggggaac

SEQ ID NO: 21946 - DNA, 319 bp, Glycine max
  Clone ID: LIB3106-045-Q1-K1-C12
caaacaagttctctgcctataacaagtttgtggaagcacattcacttacactatcgtgcgctttttccttttcctcttcatcctccccttttctcaaatgctccttaaattcttccccgaagcgaaaaataatcagcttcattactgcttcgtggcaagaactctctggagttttactattctcctcgattcctttcacttgccttaaagctatatctaataatcccctaagggagtctctttataagaaaatggatgagagaaatacatttgctgtaaaaaactcttctacattcaatgccttaaccgtcaattccct

SEQ ID NO: 21947 - DNA, 259 bp, Glycine max
  Clone ID: LIB3106-045-Q1-K1-A6
cccacgcgtccgcccacgcgtccgaaaaaaaaaaaaaaaaaaaaaaaaaaaaaaaaaaaaaaaaaaaaaaaaaaaaaaaaaaaaaaaaaaaaaaaaaaaaaaaaaaaaaaaaaacaaaaagaaaaaaaaaaaaaaaaaggcaattatgggggaaggatttgaacgtaccataattacgttggcggggggggaaaactaaaaagattcgtaataaagaaaaaaaattgagatactctggttttcctttttaaaggaataa

SEQ ID NO: 21948 - DNA, 445 bp, Glycine max
  Clone ID: LIB3106-045-Q1-K1-C2
attcattcttcttcttcttctggtgctaagtgtctaagctcaaatggcgtcgtttttgtctttgctccctgccgtttccgctcgtcccattcccaccagcgccttctctcccaaaagacctctctttcaaactccacccaccttgcatttcaaaaatcaccggtttgcagttagttgcagttatgcagaagcaggtgtctatgctaattctagctctaacaccatagatgttgtggctgatgttagaagtgagcggattgtagtcttaggagggaatggctttgttggttcttccatatgcaaggcagcagtgtccaagggcatagaagtcataagcctaagcaggtcagggagacctacttactcaggtgcatgggtagatcaagttacttggatttcaggagatgttttttatgtaaactgggatgaagtaccttgtggagct

SEQ ID NO: 21949 - DNA, 331 bp, Glycine max
  Clone ID: LIB3106-043-Q1-K1-G5
tactcgttcatcccgacatggtttgcttttcttgtttgctgcccctctttctcgggccggtcttcaacatcctccgtctgtgtcttccattttatcatggggaaaatctatcggcttttcgcttggtagtacaggaaacctgatagggctcctcctgcatgtcctttcatgcctccagcctacatggctgatgcagattgttaaccatttccagcacatcctgttaagcctggaaatgcatatctcaagcaagatttattcttgcttacctatcgtataatacttgactttcacaggattaacaatgtatgataacattctgatgggctta

SEQ ID NO: 21950 - DNA, 59 bp, Glycine max
  Clone ID: LIB3106-043-Q1-K1-G6
gttttaattacgacccagacccacgctttctcccactcttactaattaaaatattaatt

SEQ ID NO: 21951 - DNA, 427 bp, Glycine max
  Clone ID: LIB3106-043-Q1-K1-G7
attatttcagaatcctacactgccaactccaaactcacgacaacacattcaccggtttctctatcttctctttttaaattccttccttttccttttgattctgcttttctaatcgtcgttccaatttcacagttttctatatctcccaaccaatccatcaatgcttcaagttattacaggaatatgtgccttcgccttagcacatggaactggaatgtgcttctgcttgacttgaaagagggaggtggaagaaaagaaaagtctatagataacttcctaaaagcctggaagagtttgaaacattgcagttttcgcctagaaattttctccattgtccatatggattattagaatttaatggataagaacttgggaccatgattgtgaatgagcattctggtggtactgaactggcaatgaattatgc

SEQ ID NO: 21952 - DNA, 404 bp, Glycine max
  Clone ID: LIB3106-043-Q1-K1-G9
cgtgcctggagaaggctcttaacatcaacgaaaaagggtttctggttctggactctgaaagagactggggagtgatgcgttgcatcgatgtttcgcccaaaccctaacctcgtcctcgtgcattcattccccgcgatcaggtgtggttttatccattgcaaacagcatgaattttgcagcatcattgtgcataagattgaatatcaaggaacttgtgacatatgttcctgcgtatagaagcaccagtggcgtttctggagaaggtttgaatttggcgttcatgcgttgggcttccaaaaagactgctggttccacagagaatggacaggattctaaacctaagaaccttggagtgaagaaatatcgtcgggagagggtgatacctgcaaatatcattgttcgac

SEQ ID NO: 21953 - DNA, 274 bp, Glycine max
  Clone ID: LIB3106-043-Q1-K1-H1
tcgcccactcttacttttgtctgcaactatgagcattttttatttaatcatactatctctccttcttgccacttttcttgcaactgcatcttctttttcttctttattcttcttttatcttgggaagtgctatttccatctcatattgtcttccaattatcacattcacatattcattgactaatcctaatcagttattttccattctctctatcacactaagccttcttcatttttatctttttaaccaacaattatatcttatttaaatttt

SEQ ID NO: 21954 - DNA, 204 bp, Glycine max
  Clone ID: LIB3106-043-Q1-K1-H10
tttcaagctcatcctagattttttaaaatggcatcagcctcctgggtgggtctctcttccacagtctaggggggcaaggccgttaagctggtcccatcatcccccttagacaggagggtcaacattaggattaccgttacctaacaagccttcttcttaagctccatactctgcccataccgcgacaataacttgctcccattc

SEQ ID NO: 21955 - DNA, 389 bp, Glycine max
  Clone ID: LIB3106-043-Q1-K1-H12
gcgcacgcgtacgcagaccccaccccaaaccctcgattccgattaggcgccgcaaaccacccacgccacccaagcccctttcctcctgcacctgggcttcaatcaggactccgggtgcttcgccgccgccaccgaccgcggcttccgcatctacaactgcgaccccttccgcgagatcttccgccgcgacttcggccccggcggcggcgtcggcctcgtccacatgctctttcgctgcaacatcctcgccttcgtcggcggcggctccttccccgacccccgctaccctcccaacaaggtcatgatctgggacgaccacctgtcccgctgcatcggcgagctctccttccgctcggaggtcaagggcgttcgcctacgccgcgaccgaa

SEQ ID NO: 21956 - DNA, 415 bp, Glycine max
  Clone ID: LIB3106-043-Q1-K1-H2
tggaaatgaataaggtctccaaccacggattaatcttcagggatatcttctatttaaccggataggtgcaataaatgagggggatgatcaaatcccatttgctcatgttatgggacttatttcttattaactatatacttcacttcatataaattgtaaaggatagtttgaaaatttatattccagaattgagttgtgtattattagatctaatcactattattagttccttttttgtaataatatctttctttattttgtaagtgtcatatttaaatcttcattccttcttttttatcattgttatctttattttgagtatttttatttgtattaataatttttaattttcttttccatatttacttttttttttatgtatttatcattcttatcataatattttttttttttt

SEQ ID NO: 21957 - DNA, 420 bp, Glycine max
  Clone ID: LIB3106-043-Q1-K1-H5
ctccatgaaagatatattcaatgttcaccgccttgatttacaggctgttgctgcttcattctgtttttctaacccaccgaaggtgaatctgaacatagatagcagtgcttcaaagcataggaagaaaatacgcaaagtagaaggaaagagaagatgataaaaggcattttctcacggccgtgcagtggtgtgatccccacattctcccacccacaccacaccaccccataaagttttggtaggcaccccaattttatataaagagatggatttgtaactttatcaaacaaccttggttattagaagcatcagaaaatttaaattagaatgtgttatgcgcatttttgaaccgtaatattccacatgacgaccggtgtcccatcccatgttcgaatttgtaagcttattcttttgttgttg

SEQ ID NO: 21958 - DNA, 279 bp, Glycine max
  Clone ID: LIB3106-043-Q1-K1-H6
cccactcgtcctcccactcgtcctgtttttaatcaggcctgattttttatacggaagggtattttattaaaggggggcggattttattctgcgttttgtccctagtaatctctgctatagtacacaccttaattatcaatgtcttgtcttccaaaagtacctattttaactttgtcttgccacagacacacattcttatcatcatagtttaaatttacctacactattatcctcaactttctctatagcttctatttaaataattaactttatgatatc

SEQ ID NO: 21959 - DNA, 189 bp, Glycine max
  unsure at all n locations
  Clone ID: LIB3106-043-Q1-K1-H7
gttctgaattccctgcccgacccactcatcctcccactcttccgtataaaaaaattaaattttctaaaaaacaaacatatactaaaagaaaagcccaatataaaaagatgaccagctcttacacacaccctatacaaactttaaccccaactaaaaacaaaaanaaaaacataataaaacctatttttt

SEQ ID NO: 21960 - DNA, 420 bp, Glycine max
  Clone ID: LIB3106-043-Q1-K1-H8
cccacgcgtccgcttctaatttgtgttactttggtgggtaagggggaaaagctgcaggggacctcattctctctttctgctgctccatatttcatttcatctctgattgcgctactgctaggctgtcttcaatatttaattgcttgatcaaaatagctaggcatgtatattattattcttttctcttggctcaattaaagatgcaattttcattgtgaacacagcataattattattcttattatttttgtatagcctgtatgcaagaatgacttgtccatccaatacaaccgtgattgtttaatataaaattttattattttattattttaattaataattttttataattatttttttaatattataattttaatatttatattttttttttttattttttatttgtttttgttatta

SEQ ID NO: 21961 - DNA, 242 bp, Glycine max
  Clone ID: LIB3106-043-Q1-K1-H9
cagagactcctggatatagtggttactgcaggtcccagtactctagaggaggcggtgcttccgatggaagaagctggaggaattaggattaggttttatagcgcgtgaaaaaatggggggaggttctgttggagtaatatcatccccttgatattaattgtggtaattttacgtttggaatatactttgaggtttgagcatatgttactgttatggtagcttggtttccgatgtacttctgt

SEQ ID NO: 21962 - DNA, 324 bp, Glycine max
  Clone ID: LIB3106-045-Q1-K1-A1
ctcttatgagtggggaaaagtgtcgggttggctacgagtagaatccaagtgtaccatatatctgcttagggaagagtacgaaattgttccaaaaccaaatgttgcagagcctgccaagtggggtgtacaagatgagcctcttttggtttctagttttctctgcacatcttgcactagcatcctctcttgttgaatttcaagataatgataatccaaggcaaaagcaagagggcatgcagctaaatttgtaccatgttaaaggtcttgactcctctcaaacttccacatcaccattttcattctctgacatgatcacaaaagatg

SEQ ID NO: 21963 - DNA, 261 bp, Glycine max
  Clone ID: LIB3106-045-Q1-K1-A11
aaggcattgcgtcgtacaattgtgaaagctgcactgcactctcatcaactcagagttgcatagaaatttgcctatattttcgttattaacactcctatttgtggacttttaccaactatattgatcccaacgtgcaagatgttcaaagtgagcgtgggactgttgctagtggggttggacgtctctgactagcatgatgtactgttgcagcccaagatggctatggaccattgcatacacgagagagcacgcctctaactc

SEQ ID NO: 21964 - DNA, 409 bp, Glycine max
  Clone ID: LIB3106-045-Q1-K1-A12
gcaagagtgaaaatggcataaagcttcattacaaaggaacaccatttcatcggataatatctggttttgtgattcagggtggagacattgttcatcatgatggtaaagggtctgaatctatttatggtggcacctttcctgatgataatttcaagattaaacattctcacgctggtgttgtttctatggcaaattcaggacctgattccaatggctcacagtttttctttaccacagtgaaggccagatggttggatggagagcatgttgtctttggcagggttgttcaaggcatggatattgtgtatgtaattgaagggggagccggaacctacagtggaaaacccagaaagaaggtagtgatagcagactctggggagataccaaagaaccactgggatgaggaaaa

SEQ ID NO: 21965 - DNA, 238 bp, Glycine max
  unsure at all n locations
  Clone ID: LIB3106-045-Q1-K1-A2
ccgaacgcacatttnactattcattctcgtttccctttcggtgatttccaattactaggtactaatttctccatgctttcttcatcttacgcttaatccttatggtttcgcttaattgttgttctaattgctgcttgttgcacactgtgattggttgttaactgaactttttcagcaaaatgtctggacgtggaaaggggggcaagggtttgggaaagggaggagcgaaacgacaccg

SEQ ID NO: 21966 - DNA, 358 bp, Glycine max
  Clone ID: LIB3106-045-Q1-K1-A3
cccacgcgtccgatttttcttcctataggaaaaattacagaccctcaccacagagacttagttggatgaacggttggccaccttccattatccttgaaggagattgttcaaggatacagactacctttgaggttgaaattgcggctgcatataatttgaattccagcattttctgcctctgaatatctctggaactttgtaagtcaacaaacatggctttacagaacattggtgctgcaaacagtgatgatgccttttacaggtataagatgcctaagatgattaccaaaattgagggcagaggtaatggcatcaaaactaatgttgtcaatatggttgacattgcaaaagcattggc

SEQ ID NO: 21967 - DNA, 433 bp, Glycine max
  Clone ID: LIB3106-045-Q1-K1-A4
gagctacattagctgctggaaggctggtggcagagaatgaaattcttaagtggacactaccggccaacggatgacactctagacagtttcttatcatatctcaaggaaaatggcgtcaagcttgatgaagttgagttgcacaaggcaaatgaggactctgatatatatgaggagagcaatgttattgaaaaacagcaacctctgaagtgtcaagcattggtaaaatgtggtcttcagagtccgagagctgtggtgcctaagactgcaatattgcaaagaatcaattccaagaaggcttcgaagtcctatcagttaggacaccaactttcgcttaaatggtcaacaggagctggacctagaattgggtgtgtggcagattaccctatagaactttagacacaagcctaccccttcttcatacatgcgaatgggc

SEQ ID NO: 21968 - DNA, 269 bp, Glycine max
  Clone ID: LIB3106-045-Q1-K1-A5
ataattcttttttatttgaaataatgtccgggatcatccacaagattgaggagaccctccatgtgggagggcacaagaaagaggagcacaaaggagaacaccatggtgagcacaaaggtgaacacaaaggagaacaccatggtgagcacaaaggtgaacacaaaggagaacaacaccatggggagcacaaggagggacttgtggataagatcaaggacaagatccatggtgatggccatgacaagggtgagaaaaagaagaagaaggac

SEQ ID NO: 21969 - DNA, 208 bp, Glycine max
  Clone ID: LIB3106-043-Q1-K1-G4
tggtggtctcatgtaagtattgaactgttgggcgtatgattctgctaattatttgtgagagtttgtacttccttatgctggctaactagctaatgcttaaactgtttgctatgcttattaaattaataaagttaattttggatttaaaaaaaaatatttaaaattaaatatttaaaaaaataaaaaaatgggcggccgttctttaaaa

SEQ ID NO: 21970 - DNA, 321 bp, Glycine max
  Clone ID: LIB3106-043-Q1-K1-E7
tcacgcacaccaaacagcatgaagcttcttgatagagatttgacacctccatatgtaggtgatttccttatggaggtgggtgcctttagagatgcctgacatggccttgttttgcttgctccaaatggaaatggaactcgccttgctcaggcacacagaatccgcttttgattttcacaaaggtccatcaaaatttaccttcataaggatggatgggaaaccttttaaccaacccttcccatttgacaatattccacttttggtggaaatttttttccatggccagtttaacatgctcgccactcatgattccaagtccaa

SEQ ID NO: 21971 - DNA, 439 bp, Glycine max
  Clone ID: LIB3106-043-Q1-K1-E9
actcgtcctgatcttattcttccaaggcaatggcagcatcaaaagtacccaatggaagtgttcaggtgagggctggcatgaaggagaaagttgtgacaggcctcacagcagctgcattcacagcctcaatgatggctcctgatgtggccgaggccgccgtttcgccttctctcaagaacttcttgctcagcatcgccgtcggtggtgttgttgttgctgccattatcggtgcggtggtcggcgtttccaatttcgatcccgtcaagcgaagctgatcgatatatcaagttctcaggcactactgtgttttttctttatttttttgttacctcttgtcataatatttgtaatgttcttcagaaatgaagtgaaccctctttcttgtgtgtactaatatgctactcttatgctacacttggagcataagcttttcagttct

SEQ ID NO: 21972 - DNA, 200 bp, Glycine max
  Clone ID: LIB3106-043-Q1-K1-F1
catggatatagcctgtgtccttctcgtgtaatcctgaatggatgaattttgagagtgattttggcatgattgttatgatccgcctatttttatttacatattaactactatggatatacatcgttatttatactgtccatcaatcattaattaagcatgatactttctaaaaaaaataaaaaaaattgcttccgttttat

SEQ ID NO: 21973 - DNA, 449 bp, Glycine max
  Clone ID: LIB3106-043-Q1-K1-F10
acgtctcacgcagcctcctcaaacatcagacctttaagaggagtcagacacataacgtagcaggaagaaagagaaaaaagaggggctcactcgcgctccggagttattgagttttctataacaaaacaggctgtagaggtagggattctgttagctgccactgccagattacttgcttctgagttttatgactctgttgggttttcattatgagtggtgcacctaagagatctcatgaagagtctgttcattcatcttcaaagcacccgaatgaagatttgggtacatattccaagttggtttcatcgtcagtttcaaatgagtaccatatgcctcatgatataactcaggactcccgggtggcaaaagtgcctcgaactgaatttcatgatgcagatagaagatctcctcttaatcctgtgtatcggatgtcgccaccgttgaatgat

SEQ ID NO: 21974 - DNA, 354 bp, Glycine max
  Clone ID: LIB3106-043-Q1-K1-F11
cccactcctccttttctagatctcaagcggtcgacacttgtcatacacatttcataataagaataattctaacattgagggggcattaaaagagaaatacatgatgcataacgatgtccatgttactggtatactccggtacagcgtaacatgccactcacttagaacctgatgattaattaaacaactattttgagtaaggaatccaaggacacaccttataagctgacacaaagtgtatttaatttaatattataatatgatgtcctacaatgtttgttaatgaacgatgtgaggcttatcgaaatcctctagactgttcgatctaaaccatgacttatcctacaactcatc

SEQ ID NO: 21975 - DNA, 446 bp, Glycine max
  Clone ID: LIB3106-043-Q1-K1-F12
ttttgtttcctttccctacctcagacaatgttcaccctcctacaggtgaacttacactgagcaggcacggaagtggggtgctgccatcagaacaaacaaatcatcccaaatctaatagatttgaagagcagtggttggggtatggtgattctcagggagatggtaattcatcgttacttcagagtgaaatttccaaagctagtggtttcaaggggcctcgtgatattcaccttccagaagaagatagcttgattacagctagtgatcctttgcaaaactttttatctgctggaaattttatttaaaccaaatttgtcccaaaacattacagttgacattactagaaaactggcagttttgaatcctgcattaaaagataaccaattcgttccaagaaatcagaatggttaacctttccttgtggtccatatgatatgagggaacct

SEQ ID NO: 21976 - DNA, 432 bp, Glycine max
  Clone ID: LIB3106-043-Q1-K1-F2
ttcttcttcactctacaaccactaaactaagtggttggttttggtttagtttcattttggggaagctcttaaacttaaggcttaagccatggcatcctcatcctctctgcatctatctcaggcccttctggcacgtgctgtgtaccttcatggctcttcttcttctgaccgtgtctcactctccttcccatcattctctggcctcaagtcacattctacatgctccaatatgctctccttcaccttgctggctatgacactgttcaggaacaagaccttaaggaattccgacaatggggaagcagaactcctggacatcctgagaactttgagacccttggagttgaagtgaccacacgtcctcttggtcagggcattgccaatgctgttggattagcactagctgagaagcacttggctgcacgatttaac

SEQ ID NO: 21977 - DNA, 372 bp, Glycine max
  Clone ID: LIB3106-043-Q1-K1-F3
ctcctttcttctccttctcgcactgcctttttttacccctgacccgaatcgtttccttgctccgcatcctttgcctcagggtcgcaggatccaatataaatggaaatggaagcttcaaaatttatggctacaacgaactgaatcctctatcagacttatcttgcccgggttagtggaagaatttggggtgaagtaaagtgaaaaattgccttacgttagaaacgtgatcaagttccatggaagaagagcatcaatgttctggaagtggtgaagaaccacatacacaggaaccaaatggagaagatcaacagctgcatcatcaattccaattaccttaagctgaatagaaatttgtattgcattttatggatt

SEQ ID NO: 21978 - DNA, 416 bp, Glycine max
  Clone ID: LIB3106-043-Q1-K1-F4
tcgacccagcgtccgctcatcactgggctctccctcttcttgttgaggtttgcgttcttcaacttccaaagggagaacggtgcaaagcaagtgcgtgagcagaactgactcacacactttgaggctggtgacacacgtgccaaggagtatgtcagcctcctcaaatccaatgaccctgtttgattcaacattgttgatgtcttggcttggggcttcattggccatgttgttgcttactatatcttggccaccactagcaatggctatgaccctgcattctttggctgattttcatcatgttccattgtctttctttgcttgctttttactatgttataatgtaatcaatgtcatcatttataagatctcttttacatccaacaagttcagcatattctaatttggtcactcttttc

SEQ ID NO: 21979 - DNA, 362 bp, Glycine max
  Clone ID: LIB3106-043-Q1-K1-F5
cccacgcgtccgatgtatccactctgatacactgtcagactttcatgaaatatgccgggatcttttcattggacggggagagaagtctattaaagttgaacagcccccttcctcatttctgcaagccatggaagagtatgtcaaacatgctccccatggaccaatacttcacaaggatctggctattgaaaacaaataaattttggcttactaattagaatttggaggatcctgttcctgctgctgcagaatttgaagagaagaatgcatttgctttaaccattgtccccgttgctgtttagcaacaacctcttgctgcttcaaatcaaacaaatggaactacatgatgggaattggcactt

SEQ ID NO: 21980 - DNA, 428 bp, Glycine max
  Clone ID: LIB3106-043-Q1-K1-F6
gataactagaaacagtgtgatgaaaatttaggtccttgttttcttcgttgctacgaattgtggtagcatggcaatgccatgcgtactatatgttccctctccgaatgaacactggctatggtgcccgtactccggaggtgaaatgcgcaagttggaggcttgctgtggaagcacacaacatctttggctttgagaccattcctgaagagtgcgttgaagcaacaaaggaatacatccatggcgaacaatatagatcagactccaaaacagttaaccaacaagcttacttttatgccatagacctcgaagtccatcccaaggacacatttgtgttcagtatagatggcaccgtactctctaatattccatactacaaaaaacatggatatggggtggagaaatttaactcgaccttgtatgatgaatgg

SEQ ID NO: 21981 - DNA, 175 bp, Glycine max
  Clone ID: LIB3106-043-Q1-K1-F7
agcattaccaatctagttattagttatggaacaatttgcacagttgcacttgatctatggttccataactaataaggaaagagcaactgtgcaaattgtgctttgcattctaatactgccctttggggcttcttttttttcctgccaaaaatatagtgattcagttcagaggatt

SEQ ID NO: 21982 - DNA, 386 bp, Glycine max
  Clone ID: LIB3106-043-Q1-K1-F8
attagttcattctctttgcgcagttccttacctctcctttcaagatgcacatcttcgtgaagaccctcaccggaaagacggatcacccttgaggtggaaagctctgacaccatcgacaacgtcaaggccaagatccaggacaaggaaggaattcccccggatcagcaacgtctcatcttcgccggaaagcagctcgaggacggccgtaccctctccgactacaacatccagaaggagtcaacccttcaccttgtccttcgtctccgtggtggcatgcacatcttcgtcaagactctcactggcaaaaccataaccctagaggtcgaaagctctgacaccattgacaacgtcaaggccaagatccaggacaaggagggaatcccccc

SEQ ID NO: 21983 - DNA, 395 bp, Glycine max
  Clone ID: LIB3106-043-Q1-K1-F9
ctcctatccactagtaacgggcggagtcgtgctggaattcgcccttcaatcagccctcctgctcagggccagctcaagagactccatgctaccgctacaattcctagcaaccagcctcctagactgaatatagccctaggcgacattgacaagcctctctcttacctggtacattcaccttactaatcatggtttattgaggctaacaccagatacacccgtaccttgactgtagataccacatccttattcagtaattcaaaatcaccttaaactctatctaatgccacacatgatgacctttatgacagactatatactcaacaagctgttaaccactttctagctgatacattacttatacatagcatatctcctgttacatccagacttga

SEQ ID NO: 21984 - DNA, 184 bp, Glycine max
  Clone ID: LIB3106-043-Q1-K1-G1
cccactcgttctacaaattctatcaaggtagccatatcttggtattcaaattcccaactgggatggtgtctttttccctgaggggagaagactgaaaaaatggatcacaatgccgattctcaacccactgaccttattaccattacccgttttctgcttaacgaaccatctaatcacccaaaat

SEQ ID NO: 21985 - DNA, 366 bp, Glycine max
  Clone ID: LIB3106-043-Q1-K1-G11
cccacgcgtccgagatggccaacaagaaaactatgaacagcagattaggagcctggaaacggatgtgcgtcagttgcgtaatcgaacaggaactttggagagtagcacaagtgagagtattagttggcaagaagctagtaatcaaggggggaattggcaggaacaaattgctgaagaagggggaggaaactggcaacggagtccatttgatcagacgagagatggaagggcagtcagtgattggccacaggaaccttccagaaacttaactggggaagatcctcatccccaggaagctcaaagaatttggcatgaatgataacacaggggaaactgttggtaattggtccgaaggactttttgaac

SEQ ID NO: 21986 - DNA, 155 bp, Glycine max
  Clone ID: LIB3106-043-Q1-K1-G12
actcccacacgaactatactgccagcaataaatctatgaacagcagatgaagatcatgggaacgaataaacttaaagatccggaagaaacacgaactttattacagttcacaatttttactactcaacatgaactaaacctaatgataaagaatg

SEQ ID NO: 21987 - DNA, 309 bp, Glycine max
  Clone ID: LIB3106-043-Q1-K1-G3
gcgtacgagactcattcattgttatataaaccgctttcccttcgtctacgatccactcccttctcttggtggggattttaccctggggtattcccgcttactcttcttttgcttcctttactcctatcttcttaactatctttgcctattcactttctcgtaaccttctctctatttcatgtattcattatcattaattccagcagctctctcagcactattgtacatctcatattaaacctctatacattgttgttggatctataaataatattttaattctctcttttacatcctaatattactatt

SEQ ID NO: 21988 - DNA, 456 bp, Glycine max
  Clone ID: LIB3106-043-Q1-K1-E6
ccggtcggattccgggtggacgcacgcgttcgtcaactaccaaaagagtttccggcctgtgattgtttctgtttctgctatctgggatgataactctcactgttacgactagcagcggaagaaagctagaagaagaaggcatcaaagggtcaggaactaccgccagagatcgcaggttgcttagaattcgccaagagaaacgacagcgggaatacgacctccttaacaactaccctgcttgggcaaaagtcctggaaaacgcttgcaaagacgatgctgaactccgtgccgttctcggagatagcattggcaaccccgaactcatgaggaaacgagtcgaagatagggtgagaaagaagggtagagactttcaaaagtctaaaacaggatccgtccttgctttcaaagtcaccttcagagacttcaatccacttgattcatatatctggcttgaat

SEQ ID NO: 21989 - DNA, 357 bp, Glycine max
  Clone ID: LIB3106-043-Q1-K1-C8
tttagtttttacacgtatcatattagttcatgcttggattaaagtttacagacgggaggttgcaaaagcaagccaggcctggccttttcataacatattttccaggctaaactctattgttcaaacgttctttttaaggctgaattgttagacccagctttgaatgggactctcaatgttcttaaatcgtgtgtaaactttccgactcttgaacgcgtttttttaacctcttctgttgcttcagttgcgtacaacggaaagcctctaactcccgatgtattatttgatgagacttggttttctgacccttgtttctgtatggaatcacatattttgtatacacttttcaaaaacttt

SEQ ID NO: 21990 - DNA, 190 bp, Glycine max
  Clone ID: LIB3106-043-Q1-K1-C9
atccactagtaacgggcggcagtcgtgctggaattcgtcctttctagcggacgaccggttagatactgggctgctcagtcgtcagcaacgattacaccgtaactacgcgcatgacatcactcgacctgtatacagacctagctggttaatcataaaccgatactcattacacatacttgctataccaact

SEQ ID NO: 21991 - DNA, 407 bp, Glycine max
  Clone ID: LIB3106-043-Q1-K1-D1
tcccactcgtccgcccacgcgtccggaaagtgttgtttttctttttttcatttgcattggaaaggaaaaaccttgcagattgcaatggcttccaacaaggttattgccaccatcttggttctttctctccttgcctactcaacatcattcaccaatgcatgtggcacatgccacccaaaacctactccttctccccctcctccatcagggaagtgccccaaggacacattgaagctaggggtgtgtgctgatgttctaggacttgttaatgttgttgttggttcccctgtctctagcaagtgttgtgcattgcttgaaggtttggctgattcggaggctgcacttttcctttgcactgctattaaggccaatgttcttggaatcaacttgaatgtgcctatcacact

SEQ ID NO: 21992 - DNA, 423 bp, Glycine max
  Clone ID: LIB3106-043-Q1-K1-D10
accaacgggacggacgcgtcctcccactcgtcctaaagggtagaggctcgaatttgaccggcgcgaatgcgaagacgaggggcgcgagcttcgcaatcgattgcgggacgcccctggaggatcagattatggacattgcttctctgtataagttccttcatgagaggattaacgtccgcggcaaggccggtgcactcggcgattccattaccgtcaccagtgacaagagcaagatcaccgtcaccttcgacagcaacttctctaaactgtatctgaaatatttgaccaataagtacttgaaaaagcacaatgtgagggattggcttaccgtgattgcatccaacaaggagcggaatgtctatgagttgagatacttcaacattgctgataacaatggtgaagaggaagactgaacatctaatt

SEQ ID NO: 21993 - DNA, 214 bp, Glycine max
  Clone ID: LIB3106-043-Q1-K1-D11
cataacatcactcatcatatcattctcaaatctaacatgaccaatgttaatcatctcttataacctccacattccacaaccaaatcttctatttttaaagcttatcttactcaatattcaatctttaattaatcccctaaacttttcacctattttactcatatatcaactcctcataaattcttacttcaataacacttatacaaaaattatc

SEQ ID NO: 21994 - DNA, 436 bp, Glycine max
  Clone ID: LIB3106-043-Q1-K1-D2
cccacgcgtccggaatttttgttaataaataattatatcagcaacaaccaatgggctatggtgtgtaagcaattcacaacttccgtccttcgttctaagcaacactctcaattcgtatataataaaacctctttctttatattctcttcacgaggaacaccgacacataattcctacataaaactaaaacctgtttctaagttctagtctttttttttccatgtatagctcaaagttcagaaacctgttttgttccgtgttgttttcatggctctgttttggaggtttggccatggcagctggtgggagtagaagcggttccagagacctcgaccagacaccaacatgggccgttgctgctgtctgcactgttttcatcttgatatccatagcactcgaaaagagccttcacaaaattgggacgtggcttgtacaa

SEQ ID NO: 21995 - DNA, 398 bp, Glycine max
  Clone ID: LIB3106-043-Q1-K1-D3
atggtcttgaactccctgtgtctgttgatgtttttagggagcgcgttgattttcttcagagtagtgggcttacgatggaagacggcaacaactatccgcttgttcttggctgcagtgtcaagaagaacatgattcctgtgcttgattaccttggaaaattgggagtgaggaaatcctcgatcactcaattcttgcagagatacccacaagtgctccatgctagtgtggttgtggatcttatgccggtggtcaattatcttaaggggatggatatcaagttcgatgattgtcctcgtgttcttgagaggtacccttaaattctcggattcaaacttgatggaactatgatcacatccgttgcttatttgatttgaattggagtatgaagaagaaaaatt

SEQ ID NO: 21996 - DNA, 415 bp, Glycine max
  Clone ID: LIB3106-043-Q1-K1-D5
caggttgagttggtgcgtaatttagaggtccgagatgatcaatacaagaaattattaggtgagaagcttcatatggcaggtgagagtggtttaattcaagtttatagtaaggagttcggcaacaggcttgctagctagtgcttcatccatttgaaacgaatgacagaacaaaacacactcaatttactccacttgtgatatgatcattaagctagagccacgcgtaagtgatgtaatttccatgtaaattaattaatgacagaaattccagagataaagaaatttgcaatatcttataaaaaaaaataagaattaatattcataataatatatatgtaaatttttctttattattctatttatttttaatattattttagttatttcattaaatttgcttttattattacttttt

SEQ ID NO: 21997 - DNA, 315 bp, Glycine max
  Clone ID: LIB3106-043-Q1-K1-D6
acaaactatctggctgcctttaattaaaaggctggatggacactttaaatattgttaaagtaaccatgactaccacacattcctacactggaaaccatatgcttttggattctttacacctttacttgataagatccatttcttctgcactgaacattgttccaaccatcactgtatcttccaatgctgtttctctagtcgttccacatcttaaggtcaagcttaatttaatatctctccttgtgcctacacccaatgtttcattttattacctttttttgaatcttgataataaagatcttactgcttaagatt

SEQ ID NO: 21998 - DNA, 346 bp, Glycine max
  Clone ID: LIB3106-043-Q1-K1-D7
gaataacggggcggacgcacgcatccggtgagtgatatcaaattattgtatttgtttcagttcgagttttgaatttaaccgtggcgtgaatactactaggatggctgcaaaaaaaaaaaaaaaaaaaaaaaaaaaaaaaaaaaaaaaaaaaaaaatataataaaaaaaaaaaaaaaaaaaaaaaaaaaatatataaaaacaaaaataataaaaaaaatttactctataatattttaaaataattataaaacatattttcattttaaaaaaaaatctaatttttaaaaaattatatctaaaataattcttaattttttttttctctatatttttaaagatataaata

SEQ ID NO: 21999 - DNA, 399 bp, Glycine max
  Clone ID: LIB3106-043-Q1-K1-E1
ggggatagatagagtgatactcgtcacattttcataataataaagagatggcagcggcggcggcagtgacggtgctactcccacctaggattccgaccaccaccaacgttacccgctgctctgctttgccttctctccctcctcgcgtctccaacaccaaaaccactttgttctcaccttccctcaacaacttttcagtgtcccgaaaatcttctctgcttcagaccagagcttcttcagaggaatcatcctcagtagatgccaatgaggtgttcacagatttgaaggaaaagtgggatgctcttgaaaacaagtccacagtacttctttatggtggaagggctatagttgctatttggctatcgtcaattcttgtgagcgccatcaactcagttccct

SEQ ID NO: 22000 - DNA, 418 bp, Glycine max
  Clone ID: LIB3106-043-Q1-K1-E10
cattaccgacgcgaccgacgcgtacgcttgttcacccttagcatgtaagccaggattcagcacattatattaattccactgcggctagtatcaattgaaaaacatgttggagcacattgatgtgtccgtatacatgatcattccataccactacgtacatgtgtatggtcatgcagactaaaatttacataatcaagatttttagttttagaaaaaatggtaataacacttgattatgtatcatgtgaagaatatttatgtatcataatgatcatgaataatataacagtttgtcgtcagtacgatttattgtatagtaattaataagctatgtttaaagttgttttctttggtgcatggatttatcattaatgagatcaatgttaattatgtttaataaaataataaaaaggtcttg

SEQ ID NO: 22001 - DNA, 444 bp, Glycine max
  Clone ID: LIB3106-043-Q1-K1-E11
cccacgcgtccgcccacgcgtccgcccactcgtccggttctagatcgcgacggccgccctgttttttttgttttttggggatggaacaagggcagaagaaaaataatgaatagacacaggtaggtgtcagagagagagtaatggctgaggaaagaggaagaataaaaaaaagagtggagttggaagtttaacacaaaggtgacactagggaatatctaaagggtggggttgttgggtttggtttcctcttgttaatgtaattggcgatttgtaatgttgttgaccagttccttgtgaaatgtaatgtgctatcctatctgtttttctttaataaaaaaaaatttaattttatttaattattatatatattttaaaaatatatttatgtttccttactttttgttttatttatctttcttactttatttattttttattattttt

SEQ ID NO: 22002 - DNA, 449 bp, Glycine max
  Clone ID: LIB3106-043-Q1-K1-E12
acgcccacgcgtccgcccacgcgtccgtctattcattcaagattcagcaagtgcgttttggaggcagagaccgaaatacttggagatggcccgtacaaagcaaactgctcgtaagtcaactggaggaaaagctcccaggaagcagcttgcaaccaaggctgcacgtaagtctgcaccaacaactggtggtgtgaagaagcctcatcgttatcgccctggaactgttgctcttcgtgagattaggaaataccagaagagcactgagctcctaatcaggaagcttcctttccagaggttggttcgtgaaattgcccaggatttcaagactgatctgcgtttccagagccatgctgtgcttgcattgcaagaggctgctgaggcataccttgttgggctctttgaggacactaacttgtgtgccattcacgccaagcgtgtgactattatgc

SEQ ID NO: 22003 - DNA, 287 bp, Glycine max
  Clone ID: LIB3106-043-Q1-K1-E3
gactccttatggctgtcagtctacgccttcattctcgtcttcgtcagcggaaaccttcggctcggcgtctaacagcggactctggggttcatccatattttccatttgataccaacacctcatggaagctattatgtgttgaatgacatattccgtttaaactatgcatgaagatgtcatatgaccggaaaggccatataagaagtttgcctatatcaagctgtttcagattgcacatttgaaattgaaattgggttctttttggttggtggtgttgaacgcttaat

SEQ ID NO: 22004 - DNA, 395 bp, Glycine max
  Clone ID: LIB3106-043-Q1-K1-C7
gatgaggataagccttttcctgagtttccctccttcatccccttccatggcagcacctgcactctcctccgctctcaacggctctctcctccccctccctctctctctccttctccacctcctcccgccgcttctctctcctccctccaccctcacaccaaccctccaaacccctcttcctcaccctcaaatccaaaccctccgacgacattgacacatcgttcttcgacaacatcaacccgcaagacgacatcacattcaatcccccggagcccccggaagggttcgtggcgcctccctcctttgacgacggccctctggagaccgaggacgaaatcgccgctgcctacgaggagctctacggccccggctacagcggtgtctcggtcctcggc

SEQ ID NO: 22005 - DNA, 279 bp, Glycine max
  Clone ID: LIB3106-043-Q1-K1-B1
tccacgcgtccgagacgatggataaagaggagttctcggaacagcgaaagcaagcgaggcttgcgattattgatctcgccaacatgataagcgttcccatggcgctaaacgccgtctttcgcctcaacgtcgccgacgccatctggcaaggcggcgccaacaaccccctctccgtcgctgagatcctcccccgcctccttcccgccggcggcggcgacgcccaaaacctccagcggctcctccggatgctggccagttactgcgtcttttactagcacc

SEQ ID NO: 22006 - DNA, 447 bp, Glycine max
  Clone ID: LIB3106-043-Q1-K1-B10
gacagagccacgggtgtggggttcacacgtgcgaggatgggagtcggtatgttggggagggtaagtggggggttaagcatggccatgggcattaccatttcagaaatggagatacatatgcgggtgaatactttgcagacaagatgcatggttttggcatatatcgttttgcgaattgccatcgttatgaaggagcctggcatgaaggcagaaggcaaggacttggaatgtatacatttagaaatggtgaaacccaatctggtcactggcaaaatggagtccttgacattctaagcacacagaacaccacttctccagtttctccagttggtgtctatcattccaaagtactcaatgcagtgcatgaagcaagacaagccgcagagaaagcctatgatatggccaaagtagatgaaggggtgaacagagctgtagcagcttctaata

SEQ ID NO: 22007 - DNA, 424 bp, Glycine max
  Clone ID: LIB3106-043-Q1-K1-B11
acgcccacacgtacgcaatattaagctttatgtccgccgtgtctttatcatggacaactgtgaggagttgattcctgagggtttgggctttgtcaagggtattgtggattccgaagatctaccactcaacattccaagagaaatgttgcaacagaacaagatcttgaaggtcatcagaaagaacttggttaagaagtgccttgagctcttctttgaaattgcagagaacaaggaggattacaacaagttctatgacgctttctccaagaacttgaagctaggtatccatgaggattcacagaacaagggaaagattgctgaattgctcaggtaccactccaccaagagtggtgatgaaatgacaagcctcaaggattatgtgaccaggatgaacgatagtcatagtgacatctactacatcaca

SEQ ID NO: 22008 - DNA, 169 bp, Glycine max
  Clone ID: LIB3106-043-Q1-K1-B12
aacaggcttcctggtgctggtgctttacattctagtagcgtgaagtacgtttcggtgcgctgcgttcacattcacgggtgtgttaatgctcttacgacctttaaactttaaggacactttcgtcttcttcactctcaacctcaaccacattgacgacgttcacatcagt

SEQ ID NO: 22009 - DNA, 396 bp, Glycine max
  Clone ID: LIB3106-043-Q1-K1-B2
cccacgcgtccgtccactcgtccgaaaacacttattccttctaaaatctcacttctcacgatccaggatctcttgccagcaaacgatggcatccattactactatgcttcataccatggttcccatgaatgcaccgaatctccctcctcgtgttggtgttttcaacaacactactaacatctcatttgctgtctcatgtagggtaccgttcacccggattcataagaacaggaatagatcttcttccattgtggttgctgcagttggagatgtttcatcttatggcaccacttaactttttgctgtgccatttcttttgctttcattgtaacatccttccccatcttcttttcccgcaaagacacatgccctttattttattgagcacgttttttt

SEQ ID NO: 22010 - DNA, 320 bp, Glycine max
  Clone ID: LIB3106-043-Q1-K1-B5
acggagtgtacacacatcacgcatggtagctttccttcgacgctggattccacgatggaaggggttatcttcaccaccctgacgggataccaaatctttcatgaaattgacaattgctgctgctaatagacaagcttccattgagatgggggagttcaccgggagtggtgagtatgtgactcacggtgaattaccttcctccaggccaaatcattcaaggaaagttacagttcttcctcttgtgtttctcatcttctatgaggcttcacgggggcctttcggggtggaagatactgtgcacgcaacacgtcctctgttaa

SEQ ID NO: 22011 - DNA, 273 bp, Glycine max
  Clone ID: LIB3106-043-Q1-K1-B6
tgcgagttaacggtcagtaaaccctttggcgcaggaagctgaataatctgtgaggacattttttagtcggggggactaattatgaatgcttttgttgattcatttggttagaattgaagttgtgtttgcctttcatttatgtgtattttagtgtattcatgttacattgcaactacttttaatttccatagttaattaaagctcaaaaaataaataaatttttataatttattaatattatttatatttttatttatatagaacatttaaatt

SEQ ID NO: 22012 - DNA, 363 bp, Glycine max
  Clone ID: LIB3106-043-Q1-K1-B7
aaaaagagagaaagaaaaatggtaggaacaaattgctactcaaacccggcaaccctgggtgcatcaagtggtgctggctatgttaccaacattgctggtgttaattcctatgtcactggttcccctctctccgtgctcgtctgttttatggtctccgatatttttgggatcaatgcaacactttttagggacttggcagacaaggttgcaagaaaaaacgggtgttattgtgtctgtcccgacttcttcaatggggacccttttgatcctgagaatgagaacaggcctttacctgtttggttaaaagatcatgaaccggaaaaaggtattgaaacatcaaaacctgttattgaaaccttaaaa

SEQ ID NO: 22013 - DNA, 413 bp, Glycine max
  Clone ID: LIB3106-043-Q1-K1-B8
acgaaggaatataatctgaaacaaataagtttcccaacatagcttcacactcattgaacaagggatggtactggatgcacgtgttgaacgcaatttcaaggagatggataagttctaccaagaagccattgatgaacacatgaattctaagaaaaaaactccagaggaagaggatttagttgatgtcttacttcaactgaaagagaacaacacgttttccatagatctcaccaatgataacatcaaagcagtgctcttgaacttacttgtatgagctacaggtacaactgaagtcacaacaatctgggccatgactgaactaataaaaaatccaagcattatgaagaaagtgcaagaagaaattataggcttaagtggtaagaaagatttcttggatgaagatgatattcaaa

SEQ ID NO: 22014 - DNA, 116 bp, Glycine max
  Clone ID: LIB3106-043-Q1-K1-C1
cttctcttccactaactcccttcacattccaaaatctccacaccctataccctagtcctagatctcgcaccttcatgctttcttttcaaccactttcttccgccttcgcacacacc

SEQ ID NO: 22015 - DNA, 442 bp, Glycine max
  Clone ID: LIB3106-043-Q1-K1-C10
tgatttctcaccggagagttcctacaatgtggtcgtcttaggcgaaggaagcgatggtgcgaacgactataaagtaggcaagtccaagattgcgtcgttggtggctgatgtcttctccaacacagaggtagcagaaaacaaggttgtgaaagtgtactcggatcctggtgcccccttgaagcgtgtagatgaacttttcagccctattcctgaggactgaagaaggaaagcctatgctgaaatgcaggaaaaagcaaaggctgaggaagaagcaagagtggcagctgaaaaggccaatgaagcttctgaatcagcaaagaagttggaagaagaggtgaagaagcttttgcagcaagaagcacgggctgcaagtctggctcaggaagcccaagagaaggcataggcagctggggctttcgtggaaaacctcttgaacaaggca

SEQ ID NO: 22016 - DNA, 394 bp, Glycine max
  Clone ID: LIB3106-043-Q1-K1-C11
acgcccacgcgtacgcccacgcgtccgttgagcaaagaaactaagaagattttgagcacaatcgcatccacacaatgcttggtgcgaccaccatgccctcaccactccaaccagagcttcatcacagcgcttagttgtgagcaccaaaccaaaccacattgtttgcaaggcacaaaagcaggttgtccaagagggtgaggacactactaacattgtctctcgcaggttggccctcactgttctcattggtgctgctgctgttggctctaaggttgcacctgctgatgctgcctatggagaagctgccaatgtgtttggaaagccaaagacaaacactgacttccttccatacaatggggatggattcaaactctcaattccctcaaagtggaac

SEQ ID NO: 22017 - DNA, 441 bp, Glycine max
  Clone ID: LIB3106-043-Q1-K1-C12
cccacgcgtccgataaggagctcttgtgacgtctatatttgtcttagaattgtcttcacggcttaaacttttgtttcgtcttctgaagcacgtaacaagagcatggaggtggatttcaagtctccttcccttgaaaagacagaagctgctgagactgaagtagaagaaaacatgcactttcacaagtctcttcaggagctaagagaattgcagtctcagttgcaccatgccgtatattattgtgaaacaactttcttgaaaagtgaagctaacatagatgtgttggaaaatacaaaagaatacatatgcagggtcatggtcactgtagttcatcatcttgggaacgtctcggctaatcttgatggccttatttctcaaacaaatgcattttctgaagctgagtctaaaatccagtgccttaaacaagttagtattattact

SEQ ID NO: 22018 - DNA, 416 bp, Glycine max
  Clone ID: LIB3106-043-Q1-K1-C3
cgacccagcgtctctcaaacaataagttatagtcgacttggtcttatcatccaacctttattcccgggcaaagtctatataagtccggagctttttaaactttttactaattacatacactttgcaattaattttcacatataatttcctttcatttatatatatctattaaatttatttaataactttacttcccttatattcttcattataaatatactattattatcttacatattatcatacttacattaattataatatacatctttcaattaagtttctttctcttatgttcctattttcttataatatttcctaccgtctttttttttatttacttttattatttatttttttcatttaattttttcaaattttttatttattttttttcaatttaaatatcatctttt

SEQ ID NO: 22019 - DNA, 353 bp, Glycine max
  unsure at all n locations
  Clone ID: LIB3106-043-Q1-K1-C4
tcctccctcaaatccttaaccatcaaaaacctttcttcacaaatgtgcttggctctttacagccctgaccctcccacgctattnatcctacaccctcctttcttaccctagcacctatccccaaaccctcctcctccaattcccctatcttcccacctgcctgcaccactcgccgaccccgttcgtcttctccacgtttaggctcctgagaaaatcaccaagctcgtcgactaaattgccagactcactctcgatgaggccaaaaaccttgtctactttctacatgacaagctcttcatcttcgcatccgctttcgccccttattcattcttcgtgtttgcctaccactcttt

SEQ ID NO: 22020 - DNA, 353 bp, Glycine max
  Clone ID: LIB3106-043-Q1-K1-C5
ctctatcaacactgttaccagatttctatattctctaatgctagctagagagtgatgaagtcaaaattgatgttcggaaggaaaaaaaaaaaaaaataaaaaaaaaaaaaaaaaaaaaaaaaaaaataaaaaaaaaaaaaaaaaaaaaaaaaaaaaaaaaaataaatataaaaataaaaaaaattatttataaataaatatatataaaattaataaaaaaaattatcattatattataaattatataatcaatttattatattctaaaattaaaattatttaaaataaattatatatatatttatttcttgtttattttataaaattaattatattataaatgttaattttat

SEQ ID NO: 22021 - DNA, 421 bp, Glycine max
  Clone ID: LIB3106-043-Q1-K1-C6
acaaaatataccactcttcaattcacattaaaacacacaaacctcttcagttcacaaacgacacaacctcttctaatgttcgttttctgatctacgcaaggttaaggttaatttgcttctatctacatggacattaacgagatcgatgttccttcattctttctctgccccatttcgttagaaatcatgaaggatccagtgacggtctcaacaggcatcacctacgaccgtgaaagcatcgaaacatggctgttctcgaagaaaaacacgacatgccccatgaccaaacagcccttgatagattacaccgatctcacaccaaaccacacccttcggagactcatccaagcgtggtgtaccatgaacacttctcacggcatcgaaaggatcccaacccccaaaccccccattaacaaaaatc

SEQ ID NO: 22022 - DNA, 410 bp, Glycine max
  Clone ID: LIB3106-043-Q1-K1-A8
cccacgcgtccgctcacattctccctttcctcctcctcaccctcctcgccgccaccgcgtgcgcccacaatatcagcgacattctcgccgccaaccccgactacagcgacttcaacggcttcctctcccaaaccggcctcgccggcgaaatcaacacccgccagaccatcaccgtcctcgtcctcaacaacgccgccctctccgccgtggccgcaaaacaccccctctccgtcgtcaaaaacctcctcagcctccacatcctcctcgactacttcgacaacacaaagctccaccagatccccaacggcaccacgctctccaccactctctaccaaaccaccggcaatgccaacggcaacgtctgctccgtcaacatcaccgacctcaaaggccgtaaggttggcttcggc

SEQ ID NO: 22023 - DNA, 410 bp, Glycine max
  Clone ID: LIB3106-042-Q1-K1-H11
gtgagacatcagaatagcgcgacgcccccgaatgcttccgcccctcctgccgtcatagcccccccagtacggtaacggtgcgtgcattacacgcctttctcttgaacgaatatcggtcacggcgtttgcatcttggaggcgaaacgtgtatgccggaggtccgtcgcggaagtatataatactcccggtcccgagattaccttcgaagagcgtgccgaagtaataaaggaacatacttacggtgaataacacatactagatcttaaaatagccaattaataagtccatctccacgttacagattcatgaacttactttaaggatatacccgcgcctagcacagacggtattgccatctctcaacaccttacatcataaaaaatacggacactgtgccggagaaacccaat

SEQ ID NO: 22024 - DNA, 221 bp, Glycine max
  Clone ID: LIB3106-042-Q1-K1-H12
tcaaccaccctacaacagcattcccctaatattaactcgatcatcatatacctattccccctctcactcctctcccccaaaccttccttccccttcccccacctcctctcctcaactactcccctaaccctatagcccctcacactctttaattaacttactaacctcctaacccaccatacaaacacgcattcctcttcccatatacccaatccaaaccc

SEQ ID NO: 22025 - DNA, 324 bp, Glycine max
  Clone ID: LIB3106-042-Q1-K1-H2
cttaccttttggaaaagctgactttttagtttacgatcttgttgtcaactttcctagcgtgagttataacattgcaatgccaggcgacctatatgttctcatcttctaatactcaactaactgctcacatatgctcatccatggtgaacttcactcagcttaaatctcactgagatacttcattacatacctccatcagaatagaaccctcacatgtaaatgttcgcttggcctcaatcatctatcctccgtgccattgtgacatcttgccaaatatttattcaaaaatgttaccaaaattacatacatgggattgcatctctc

SEQ ID NO: 22026 - DNA, 311 bp, Glycine max
  Clone ID: LIB3106-042-Q1-K1-H3
agaaaatccgagactctgattttgagtgtctagtgagtgagtgctgcttcctctgagtcggatcattcatcactctggctggttctgagtttctgacaccaaaatggtgaatcctcgaattccacgttcaaggatcccaactttcacacctttcacttctgctatctccatcgccctctgcattttctttgttctctctcttctcttcacttcccattctgattcatcccatcaataccaccacacaagttctgaaggtcgtgttgcacatggatttgaatcaataaggagaaccattctagctcttaaaa

SEQ ID NO: 22027 - DNA, 384 bp, Glycine max
  Clone ID: LIB3106-042-Q1-K1-H5
cgcggtttggtgcaaccccgcccgcgttggcgaaaaattcaaataagcagaacgaaggacgaataacatggatttggttgaagaccatcttcatcgccttcgctccaatctttcttctctgctccttcagattgacgaggttgtcgtgcaagccattgaagtgaattacaagaacaacaaaaccataagcaaagagggcaaaacgcaaatcgagtctttctcccgtgtcctttctgacatgctctcttctttgaagccatggcttcccaaaattcaaaatgcccttaaccctcaagacataatttctgacgattaaaccaaaatgccaccggtccaaaccccgagagaccaccttaaaattaatatcttcttcaacccttgtgt

SEQ ID NO: 22028 - DNA, 357 bp, Glycine max
  Clone ID: LIB3106-042-Q1-K1-H6
gggatgagaaaaagacaggtggcaactcagagtcaccaggaaagactgctactgaggctcatagcaaacctgcagtagagcctggcaaaactcagactaaaaaatggttttgctgcatgcaaaacccttctgccgaatcatagcatagcaatggttgctcctgtgaaaagcctgaacagaagaacaatgtttatgtgtaactagcgtcacagtattttctcaaagataagagctgtagagccataagcgaattctacggaatttatattttgtgatgtaaaagtgagctgcaatgggggaaagaaaagaagacagactattatttatgtgtgtgtatcaatgttggggtttattatt

SEQ ID NO: 22029 - DNA, 345 bp, Glycine max
  Clone ID: LIB3106-042-Q1-K1-H7
gtggtggcttagacacatcagtcattgttccatggctcagagaaaattatgggtgtgaagttgtttgcttcactgctgatgttggccaaggtataaaggaattggaaggtttagaacagaaagccaaagccagtggggcctgtcaattagtggtaaaagatttgaaggaggaatttgttaaagattatatatttccttgcctgcgtgctggtgcaatttatgagaggaagtatttgcttgggacctcaatggcccgccctgtaattgcgaaggccatggttgatgttgccaaagaagttggaactgatgcttgttcccatgggtgtacagggaaagggaatgatc

SEQ ID NO: 22030 - DNA, 367 bp, Glycine max
  Clone ID: LIB3106-042-Q1-K1-H8
cccacgcgtccgcttttttgtccaactaatttagtgcaggcttagtagagtcaggggtgaacatttggcgattcattgtcacaggaaagacattctgcatactcatgagcacaaacctcaaaatataattgagtgctatggggattcccatacgaagtggaaatataaaaagacaaaatgaagcaatgaggctcaccctagcaacctttgttggagttgtttttggcttctctctaggagtatcatttccaacactggcattgactaggatgaaccttccatccagccttttaccatctattgatctaacttatgttgatgacaattactcgaaaatttcaaccaagtctttgtgggatgcttgggc

SEQ ID NO: 22031 - DNA, 386 bp, Glycine max
  Clone ID: LIB3106-043-Q1-K1-A1
cttttgtcaattgcagggcatacaaaagatccttctgaaagtatccaagtgaaagtgtttgatcttcaaatggctacatggtcaactccaaagatttttgggaaagctccggtatcacgtggaggccaatcagtgaaccttgttgggaaaaccttagtaatttttggtgggcaagatgcaaaaaggactctcttgaatgatcttcatattcttgacttggaaaccatgacatgggacgaaattgatgctgttggggtgccgccttctccaaggtctgatcatactgctgctgtacatgtggagcgatacttacttatctttggtgggggttcgcatgcatcatgctacaatgatttacatgttcttgatttgcaactatggaatgg

SEQ ID NO: 22032 - DNA, 433 bp, Glycine max
  Clone ID: LIB3106-043-Q1-K1-A10
cccacgcgtccgagataacactaggcagctcatgagaatggcgctgctgtgtggtggaacgtccgtgactccattccgttcgcacaagaacgttggtttcacaacctcagcaaaatcttcctttgttggctttcaattgccgcttccaaagctcacattatcttcttccgttcgaacccttctgccggcaacattccgtgtccgttgccagcaagagtctactactgttacccctgtcgcagaagaagacccgcgctttgcgtgcgtcgaacccgaaccccgattcaaaggcccggacatttggaacatgagcttgtatccaaaagctgcagatcatgtgaatacagataaaacattggatgttgttgatgctacagacaaagttcttggaagactatcattgaccattgctattcacattctatggaaaaac

SEQ ID NO: 22033 - DNA, 444 bp, Glycine max
  Clone ID: LIB3106-043-Q1-K1-A11
cccacgcgtccgctctaaaccactagttctctctaaccattatctaaaacatgaaacgcagagacatgttctgtgcttctcaagcctcaacagccatatgtctgagcatggaacaagcctcatgctcctcttccaacagcattctactaggaggccgaaccatggaccgccacaaccccattatcaatgactcaagaaggagcacttccaaatccctcactgctccatgttcctcttctcagtcccccatcaaccccaagccttaccatgagctccacaaggccaagaaaaactcttcttcaaaaaatgcagcaaagggtcatgataatcatcatcagatgaaaagtacagcagaaaaactcactgaacatgtcaccaacacttctaaaccagttgatggcattgttcgtaggggttggcttaaaccacctgctaatttaatca

SEQ ID NO: 22034 - DNA, 432 bp, Glycine max
  Clone ID: LIB3106-043-Q1-K1-A12
cccacgcgtccgcaatggccaaatggatctcatttgctgctctttttgcaatactgttacgactcatctctcctgagcttgcaagtgctgcccaacctagtcttattcttcaactcggccgaaaacttttccaatgcggcagcgccgccgtccctgttcgtggaaataccccatccaatggccgctcgtagaggatataccccaccaccaaaacacccactctatggctgaatatttgagatgttagcatccttctttaattttgtgataaaaaaatacttttaaagatgtataattgtgtgtcattactataatatatgtcatgtatgcttaatttcactgaaccatgtgtactactgcttatcggtcacgtacatttagtggccacacctgtatccagcgaataaaattctcataatcagtttgtcctct

SEQ ID NO: 22035 - DNA, 233 bp, Glycine max
  Clone ID: LIB3106-043-Q1-K1-A2
acgcacgcgtacgcccactcttcctctttcgtgtaacattcttagatttctcaatgtcttaagtgcaaagaggggatgccaaatttgagaggaggttactatatttttcatattggactgtcttcctttataattttgagttaaagtgtccacttaaattgaatttggtgccttttccttttatataaatataataaaaactaatttaatttaataaaatatttattttattt

SEQ ID NO: 22036 - DNA, 375 bp, Glycine max
  Clone ID: LIB3106-043-Q1-K1-A3
cccacgcgtccgcgcttcaaccccaattgttcatagcccgatctagtatatacctaaaggattggatccttttcttggttaattctgaaaggctaaaactggtagaataagagtttaacggaaaattgggatttgggtcaacagctataaaccctaatcaactaactacaatttgcgttgctaaatggaacatcggaacacagaatcagaagctggagatgtttcttcatccacagcagttcttcttggagctttatctcctggtgttaattggcctacatggattactttaaagtccacttctttaatgctgggtctctgtcttactgttatgctggccttatcattctcttccagtgattcatggttgaattt

SEQ ID NO: 22037 - DNA, 79 bp, Glycine max
  Clone ID: LIB3106-043-Q1-K1-A4
tcgacccactcgtactcccactcgtccgaataaaaaaaaaaaattaatttttaaataaaaaaaaaaaaaaaaataataa

SEQ ID NO: 22038 - DNA, 257 bp, Glycine max
  Clone ID: LIB3106-043-Q1-K1-A5
actctccttgttacaatggtgaggtttagtttgtctaatgatgctcttaatatcatgatcagctcctataaactgtggaagcgccaattcatgattaggccttcctagaatgtcataataaaattcctcttggttatgcaaaatcatgggtacattgatgaattcgagtattttgatgaccacagggctggtaaaatcttggatgaattgaatgtcattcttaataattgatgttatataatccctttctttaatgt

SEQ ID NO: 22039 - DNA, 371 bp, Glycine max
  Clone ID: LIB3106-042-Q1-K1-H10
attatttttttttttttttttttttttttttttttttttttttttaatttttttatttttttttatttttttaaatttttttttttttaattttatttttttattttttattttttttttttattttttttttttattttattatttttttttttattttttttttttttttttttttttttatatttatattttttttttttaattttttatttttttttttattttttttattatttttttttttattttatattttttttatttttattttttatttttattattttttttttattttttattttttttttttttttttttttattttatatttttatttttttatttttattttattattttttttt

SEQ ID NO: 22040 - DNA, 427 bp, Glycine max
  Clone ID: LIB3106-043-Q1-K1-A6
ggaatacgggggggacgcacgcgtactcccactcgttcttcttccatcatccatcttggctcactcaaacacctgtacctgggcaagaatcatctcaggggcgggagtccctaagacttttttaatctgggcatgcttagcctcatgttgcttatccttaaccatctaaccggtataataccactttctgtctccaagatttaccggctttctgacttagacttatcctcaaaccggttattctgttcttttcctttttaactctgtacaattccggttctatccacacttaatttggatagaaactctttatagggcttaatttcttctagtttgttgatttatgggtgtattttcattttgaaccttattccaaactgttttgaaggctccataccctatttgttcatttcacacttgtatttca

SEQ ID NO: 22041 - DNA, 410 bp, Glycine max
  Clone ID: LIB3106-043-Q1-K1-A7
cacttaattaatggtttataggtatgcttcaaaatcagcttatgcggtcgtaggattggcattttttgacggggagcaggggattcaaatctaatcctcgaaacgccgtgctcatgcttaacttattgccacgccttagtgtctctggtgcattcccacacgaaacatcgcgatatctaatataacaggcatctatcctacatcagcgtgaacaccaaaaacctactgtatcttctcctaatactatccagatactatctcttttacaatcacctcttcttcctctaactgaattactcccttaccacactttttcaataacccttcttcatcaattaacgagggcctctttttaaaggcataaaatttttctatcaccacccaggaaacgtttattatcttcctttgcc

SEQ ID NO: 22042 - DNA, 370 bp, Glycine max
  Clone ID: LIB3106-042-Q1-K1-F2
cgcttcgctccctacccttgggctagttttttacttgtgcgtcttctccgaagcagctggggtttgtccgtgtggcagaatgggaaggtatcgaagccggagcaggagctatagcccccggcggcgaatcaggagcccaccggcaccgcgcggacggaaccgctatgtcgacgatcgctacggtgacagcacgtcttacagagaccgccgctcacctcttccttacggcttgcttgttcgcaatcttccccttgatgccaggcctgaagatcttaagatcccatttgagcgctatggtcctgtgaaggatgtttatctacctaaaaattactacactggtgaagccttcggcttttgatttgggaaatat

SEQ ID NO: 22043 - DNA, 361 bp, Glycine max
  Clone ID: LIB3106-042-Q1-K1-F3
cccacgcgtccgaaaccatttaggctttcttaaaacaaaggtccctcaaaccacttgcccgacactctttagtgtgtgatttttttttgctctttccccacaaagaggtcttggacccttcttctgtgtagtgcaatggccatggctaaggttttctgtgttctgcttctggcactccttggcatttccatgatcacaactcaggttatggcaacagattctgcttatcacttggatggaaggaattatggacctgggaatctcaagagctcacagtgcccttctgaatgcacaagaagattgtaccagacacagtaccacaagccctgcatggtcttctgcaaacaatgctgcaaaaagt

SEQ ID NO: 22044 - DNA, 336 bp, Glycine max
  Clone ID: LIB3106-042-Q1-K1-F4
ggaatgaggttggtgtgaagtgaaattgttaagccacatgtctgcacaagggctttgctagaggatggttcttgttgatcgattctcaaactctggaactcaaatggggatgtaaatttcagagacaagaataagacaccattttggaaaagttctaagagaagggtagagacagagtgaactccaactctcaatatttctcagacattggagatgttggatgtgatgtctttgagttaccccttccaaacattgttattaggttgttgtgtaactactcctagtcgtagatacttgaacaagacaaggcggtgcctatttcaagccacaccccca

SEQ ID NO: 22045 - DNA, 351 bp, Glycine max
  Clone ID: LIB3106-042-Q1-K1-F6
cccacgcgtccgtgcagttgctgcgtctcaaggtaccggcggcgacggagaggtatgttctcaatttccgatcactgcattggttctgttgacgagggttttgttctacttgacttgcatacttgatggcgtcaaagttgcagaagttgcagtccgcagcatgtcaagcatctcaatttgtatccagtcgtggaactaactactacaggcaattgctggaacagaacaagcaacacattcaggagcctcctacagtagagaaatgcaacctgctggcaaagcaattgttttacacccgccttgctagtattccgggtcgtaatgagtccttttggaaagaacttgattatg

SEQ ID NO: 22046 - DNA, 245 bp, Glycine max
  Clone ID: LIB3106-042-Q1-K1-F7
cgcacgcgtccgctctttttctcaacttaaaggggttcaattctagctagttctatggcggcgtccgcgaccatgaacatggcgatcgcgcttctgttcatggttttcgcagtttcatcagctttagacatgtcaataatatcacacgacaacgctcatgcggatagggccacgaggcgcaccgacgaggaggtgatgtcaatgttcgaggagtggctggtgaaacacgacaaggtgtacaacgc

SEQ ID NO: 22047 - DNA, 274 bp, Glycine max
  Clone ID: LIB3106-042-Q1-K1-F8
ccacgcgtgcgcgcattgcttcacatagactctttatctcaaacatgcctgtcatgaagaccagggagattggctccgtctctcacagcatactatgacgcctaatacggtcacctctccatcattctcgatgccatcgacccaaataggactcttatggacgctccctacatagagagactccactagaacctcaaaatgctctcactcacttccatcacaaatgatgttaagaatactcccacaaagaatgatctcattcacaccattgaac

SEQ ID NO: 22048 - DNA, 467 bp, Glycine max
  Clone ID: LIB3106-042-Q1-K1-F9
gctctggaactttgggctgattgtagtgcttgactgagacaatcagaaatagcgcgacgccacacgaagcttccgcccctcctgccgtcagaaccccggcagtacggtaacgttacgtgcatgacacgcctttctcttgaacgaatatcggtcacggcgtttgcatcttggaggcgaaacgtgtaagccggaggtccgtcgcggaagtatataatactcccggtcccgagattaccttcgaagagcgtgccgaagtaataaaggaacatacttacggtgaataacacatactagatcttaaaatagccaattaataagtccatccccacgttagagattctgaagcttactttaaggatatacccgcgcctagcacagacggtattgcatctctcaacaccttacatcataaaaaatacggacacggggcggagaaacccaatctgattccgcacgacgaacgggcc

SEQ ID NO: 22049 - DNA, 269 bp, Glycine max
  Clone ID: LIB3106-042-Q1-K1-G1
ttctgttcatggttttcgcagtttcatcagctttagacatgtcaataatatcacacgacaacgctcatgcggatagggccacgaggcgcaccgacgaggaggtgatgtcaatgttcgaggagtggctggtgaaacacgacaaggtgtacaacgcgctcggtgagaaggagaagaggtttcaaatcttcaagcacaatctgcgcattatcgatgaacgaaactctcttgaacccgaacctacagttgggactcaacgtgttcgctgatct

SEQ ID NO: 22050 - DNA, 388 bp, Glycine max
  Clone ID: LIB3106-042-Q1-K1-G12
gggcgggacccgaatatcccccaaaagaccgaagtcgtcggcaaaaagaggcaagacggtaatgtaccggcgaaaccgggtaaacacgtttgggtcctcaagagacatgaaaagggagccaaacctacagagcacgacattcttcctagcgaagaccgacaagaagtaagtcaaggcgccgaaggctctgcgcaactcgaataacgtagtgcgtaagtcgaagccgaaggatcataaggaggtatagaagtcccgtatcaaagcgccggaaaccgaaagtgggaacgccaaggttccgcataggagagtctacgttaatacttagtcggtcgacccagacgcggtcgactaagataccaagaaagtatccgagaccgacttcaacaat

SEQ ID NO: 22051 - DNA, 318 bp, Glycine max
  Clone ID: LIB3106-042-Q1-K1-G2
agcccttccatcgtactttccacatttttcctaccgaaaagtcaaaactacccactgaccgcattattcacaggcagggagggacgtaagatcctgcgaccatcattccccggaagccgtcatatcgccgtggaaattcgcggtgtcgcagcagtaccagcacatgctggacaaaacgacgccgcacgttctccggcggtgcatcgcgtgcctggtggttgccgccgtgtacgtgctccgcgtgtacttggtccaaggcttctacatcttctcctacgccctttgcatttacatcctcaaccttctcatcagctttct

SEQ ID NO: 22052 - DNA, 350 bp, Glycine max
  Clone ID: LIB3106-042-Q1-K1-G3
gttgatcccgcgaaacttagtccctttgctgaaattgctcctttctctctctctctgtctgtctctctctctctctggctcgctctctctcttgccgtctgtctgctcatgcctaaatgcgattttcttctggaattttttacccactctcttcagatacgcgattgtttctgtcgtttcagtaatggtttataatttgtgccttttcaggaagatttggtccattttgaattatccatctgcaaattgtgttttaaagtctgaatttgcagttctagacttctcatggcaaggtgacatgaactttcttgtgaggtctaaaaaccctggtcctgggtcaaaagggccca

SEQ ID NO: 22053 - DNA, 253 bp, Glycine max
  Clone ID: LIB3106-042-Q1-K1-G4
ttttgcaaccttgctatcacatgtcatcatcaacttggtttcaaaaaaacttgttcctttacagtagtttatctttgcaaagtcttacgtgtttgttttaccacttatatttttaagtgtccgccgatttcatgtatccgtaaccttcaaaactgggttcttgatctgccgtaacattttccttgctgcttgctcttgatgagtactgttttttttgtttttatcgttaaaagtcttaaattttcaaattcac

SEQ ID NO: 22054 - DNA, 342 bp, Glycine max
  Clone ID: LIB3106-042-Q1-K1-G5
agaagaacaagtagttgagaactaatatggagaagcaaatggcttcctcaatgatcgcttccccagctgttaccactgtcaaccgtgccggtgccggcatggttgctccattcactggcctcaagtccatggctggcttccccaccagaaagaccaacaatgacattacctccattgctagcaacggtggaagagtgcaatgcatgcatgtgtggccaccagttggcaagaagaagtttgagactctttcctacctgccagaccttgatgatgcacaattggcaaaagaagtagaataccctcttaggaaaggattgattccttgcttggaaatcgaattgg

SEQ ID NO: 22055 - DNA, 244 bp, Glycine max
  Clone ID: LIB3106-042-Q1-K1-G6
tttaaacacagtcagggatggacatacgatccttctaccatcattccccctaagccatcatatccccctataaacatcgacgttttctcctcacccatattcactttactaatacaatccaccaatttacataaccaataaatacaatgattatgcttattgtaatctcaataatatccctcaatgaatgacatttacactactacataattatatctcatcctttcttttacttgttatttaa

SEQ ID NO: 22056 - DNA, 402 bp, Glycine max
  Clone ID: LIB3106-042-Q1-K1-G7
ataactagaaacagtgtgatgaaaatgaaggtccttgttttcttcgttgctagaatgttggtagcatggcaatgccatgcgtacgatatgttccctctccgaatgaacactggctatggtgcccgtactccggaggtgaaatgcgcaagttggaggcttgctgtggaagcacacaacatctttggctttgagaccattcctgaagagtgcgttgaagcaacaaaggaatacatccatggcgaacaatatagatcagactccaaaacagttaaccaacaagcttacttttatgccagagacctcgaagtccatcccaaggacacatttgtggtcagtatagatggcaccgtactttctaatattccatactacaaaaaacattgatatggggtggagaaattt

SEQ ID NO: 22057 - DNA, 404 bp, Glycine max
  Clone ID: LIB3106-042-Q1-K1-G8
atgcaagttctataatcactgttggatttattatgagtgttgataagaaagaccccagcggggccaatgtcacaaaggctgccgccaacaataagtgattgcattttgtcaacactgctctcacatcccatcctcaccatgtgaaatgcgcaagttggaggcttgctgtggaagcacacaacatctttggctttgagaccattcctgaagagtgcgttgaagcaacaaaggaatacatccatggcgaacaatatacatcagactccaaaacagttaaccaacaagcttacttttatgccagagacctctaagtccatcccaaggacacatttgtgttcagtatagatggcaccgtactctctaatattccatactacaaaaaacatggatattgggttgaaaaa

SEQ ID NO: 22058 - DNA, 435 bp, Glycine max
  Clone ID: LIB3106-042-Q1-K1-G9
gggtccacggcggacattcaggtatttccccatgaggaagggtgcagcaagtgatgaaagctccccccaagccgaaaacaagtgcatacttggggacctttgacacaggctaattccctgaatcgtcgtcgaacttatggctaggtaagagataattcggcgaatcgaaatactccagcagttagaggaaaagaaagtaaaagtgacctttgcagcagtggtgagtgaaacgggagtagttcaaattgcgaaaatggggccgcgggagagtcacataagcgctgcgtcgtcaggtgaagtagtagagaacgtcgtatttcagacggtcagagcttagcagttgaaagtactatcagtccatgtctcgatttcagcagtacggggtatgcggaactttgcgcgaactagtaaggattattccgtaaagtcaaacat

SEQ ID NO: 22059 - DNA, 378 bp, Glycine max
  Clone ID: LIB3106-042-Q1-K1-H1
ctggccataccatcttacttttactttgttttcacaacatagccatggccatctccgtcagcgcttctccttttgatgtccatcatcttcgatttggacgacaccttgtacccgtcaagcaccggtattgacaagtgcgtcaagaaaaacatccaactctttctcatccagaaatgcggattctcagaatccgaagccttcaccctccgagttgatctcttcaaaacctacggaagcacccttgccggtttaagagcactatgccatgatatcaccgcagaggagtaccatggtttcgtgcacggaaggctaccttacgacttcatcaaccctgatcatcacttacggaaccttttctgcaccatcaaacagagaaaa

SEQ ID NO: 22060 - DNA, 392 bp, Glycine max
  Clone ID: LIB3106-042-Q1-K1-F11
tgtctcgtagttcttaacctcctcgttaccctcgtgactaccgacgaccattccgagaggggatagctcaataaggagaccgagcgataagaagaggccagtcatcatcggagtaaatcccgtaagagtacatattgcggaacctggcagccgtaagcctttcgagaatcctatcggccgttaagactccgttaaataaaagaaagcgttaccttccagcgatgacccggagtccgaacgtgaaggaaaggataaacataagcgtggcctcaacgcccctcggaaacggcgaaaggaggtaattccccacgtttaatcgtgaaccacctgtcccgtgacgcattcaatcgtccgaacacacattacaccccctcgtaccgtccctagccacc

SEQ ID NO: 22061 - DNA, 362 bp, Glycine max
  Clone ID: LIB3106-042-Q1-K1-D5
cgaagatgaagaccgaatcgcgttcgaaagaggaaacaaagacgtatcagggggggggtaatttggcagattcagatggagatggtcgaatctctgggaacgacgccacaaagttcttcgctctctccaacttgtcgcgctcgcaactgaagcaactctgggctctcgccgatgtcaaaaggcaagggtttttgggcttcacagagtttgttactgcaatgcaggtggtttcgctagcacaagcacggcaggaacttaaatcagatatcctcaaaacgcatagcatgtttgacaaggaaaatattaaaccttccgtattggaaggactcgatgctttaatagcacaaatgagtttaacaatt

SEQ ID NO: 22062 - DNA, 421 bp, Glycine max
  Clone ID: LIB3106-042-Q1-K1-D6
gtttagttatctactcttttctgcatgtttgttctctcaacgactcctccgcggaggagatattattcaatattttggttgggttgaatcccggggttgaagcgttgcagacatcacggctattctaagagtgtctcgctccctcattcatgtccgatctgtacgacggaggacgggtagttgcgtaactgccgttaacccttcgccgcacggtgggcgtggtgctttgccttctgaaggtggtagcccttcagacttgctcttcctcgctggtggtggtttcttctagtttcttcactcttttcattacttttagcctgcataagtttaaataagaaaaaaaaaaccgcgactttgtgactaggtaagatcaccggttcttcttcttcttcttcttcttcttcttctactactactacta

SEQ ID NO: 22063 - DNA, 313 bp, Glycine max
  Clone ID: LIB3106-042-Q1-K1-D7
gcgcccacgcgtccgcttccctattgtaatttctgccagcctcaaaaaatacttgggctggctctgccactttctgagtacaatacaacactgccatggctgcctcagtctccactattggagctgtcaacagagctccactgagcttgaacagctctgaagctggagattcggttcccagttcagccttctttggcacaagcttgaagaaggttactgcctcaagggtccctaacgtcaagatttcttctggaagtttcaaaatccgtgcggcggagaaagagattgatgagcaacaacagacaaacaaaga

SEQ ID NO: 22064 - DNA, 417 bp, Glycine max
  Clone ID: LIB3106-042-Q1-K1-D8
agagagaagggctacacaaacacattctttaatggcactcaggatgtgggcttcgtcgactgccaatgcactcaagctctcttctgtctccagacctcatctcttgcctcctttttctttctccagatgcttatcttccgtcttggatggacttaagtacgctgattcacatgaatgggtcaagcacgaaggctcagtcgccaccattggtatcactgaccatgcccaggaccatcttggagaggttgtgtatgtggagctgccagaaccaggtggcacagtttccaagaagtctggcttctgagccgttgaaagtgttaaagcaacaagtgatataaactcttcaatcttcggggacatccttgaagttaacaaaaagctcacagaaacccctggcctggtcaacttaaacccata

SEQ ID NO: 22065 - DNA, 354 bp, Glycine max
  Clone ID: LIB3106-042-Q1-K1-D9
ctccccaaaaaaaccggggttcatttaacccccccaacaaccgccacatctcaccttctaacaccaccttcattaacttcaccgcggcccagatccctccccaccacttcttctcccactaccccctccccaccgatacctcttacatccccgtctcccctgccaccaacaacacccacaacaactactttatcccccttaatccaattaacctcctcaccaacaacacaccacccgcctcctcacccaccctttaaccctccaacaatcctcacacctcctcccccaacctcctcccccccccactcaatccctccgccccccacactacactccccctcactacatctcccc

SEQ ID NO: 22066 - DNA, 313 bp, Glycine max
  Clone ID: LIB3106-042-Q1-K1-E1
aggaggtgtagacaaacacaatctcttttggcactcaggatgtgggcttcttccacgtccgatgcactcaaagtctggtctacctccagacctcatctcttgcatcctttttctttctccagatgcttgtcttccgtcttggatggacttaagtatgcagattcacacgaatgggtcaagcacgaaggctcagtcgccaccattggtatcactgaccatgcccaggaccatcttggagaggttgtgtatgtggagctgccagaatcaggtggcacagttacccagaagtctggcttcggagcccgtgaaagtg

SEQ ID NO: 22067 - DNA, 284 bp, Glycine max
  Clone ID: LIB3106-042-Q1-K1-E10
taacgtgttattcatcctcagtaattcgatgaggccgcaaatgaggcggagaagtcggaaggacgccggtgaaagtcggcgacggggaaggactcgggggcaaacgggacgccaacgggccggaaaaggaggcacctttaaaggagacgaccgagactccgaagaagaacaccgacagggagtaagtacctctcgaagttaaatcccggggagaaaatcggaaggaaaagacatgactcagttagtagaaactaaaccttaacgcaccaagactccttatacgc

SEQ ID NO: 22068 - DNA, 356 bp, Glycine max
  Clone ID: LIB3106-042-Q1-K1-E11
ttatgtgcttgtatatccgtccaccgtcgtcgtcgtccccctcgtcggggcggtgaccccaactaacaggttaccttcatcgtcttcgtggtcttcttcttctcctcctcctcctcccatttccctcccctctctatggctccccctactatcagtaaaatccgaatccggaacctgaaccgttctaaaaaggaaaatccgtactctagctacacgaggacattcctaatctctgcggaagcgtcctcggcatccgtaccgcctcgccgcagttcacggatagcgcggactactattatctcccgttaatagatgaatgacgaaccctgattctatagcgctactactattcaacc

SEQ ID NO: 22069 - DNA, 272 bp, Glycine max
  Clone ID: LIB3106-042-Q1-K1-E12
acgagaaggggaatacttcggcgcccgcttacctataagacaaacgcgacctctcacctaaagacccgacaaaatacggtcacttccgttccctatcttacggggtgaacgactagatcgattgggagctcattaccatcgaccccaagagtaacgctcgtaactccccgacagtaatgagtaccgtcgtcagaggctcacacgcgaaggagtcccactcggccgcgaatcccgacgctttgaattatcacgaagatcacgcctactgcgcc

SEQ ID NO: 22070 - DNA, 299 bp, Glycine max
  Clone ID: LIB3106-042-Q1-K1-E2
aggtagctgaaaagcagaggcagagttaaagggaacttgaagaaaaagagaaacacagtagagaagcattgttgggtagagctgctgctgaaccagctcctcctgcccgtccattggaatcggcatctgctgctcctgctgcagctgcagctgccgccgcagctccaacaccagggaaatatgtccctaagttcaggcgacagagaactgaaagcacaggagctgcgcctcctccagagacagaccgttggaacagtagcagcaagccacatggtggtgacaggtggcgtcgtgatcat

SEQ ID NO: 22071 - DNA, 411 bp, Glycine max
  Clone ID: LIB3106-042-Q1-K1-E4
cccacgcgtccgaaaaggttttagatcgtataaactaatcactacgaaaacaagagagatggaagatggctctgcccaaagctaaggagatcgtgtcgtccaattccgtcgtcgttttcagcaaaacctattgccctttctgcgtcgatgtgaagaagctcttcggtgacctcggtgccaattacaaggccatcgaactcgacactgaatccgatggaaaagagctccaagcagcattagttgagtggacggaccagcgaaccgtgcctaatgtgtttattggtggaaaccacattggtggctgtgactcaacaactgccctgcacactcaagggaagctgggtcctctgctgatatctgctggagctgttgccaaatcaactgcttaaaggatcttccatttctagggta

SEQ ID NO: 22072 - DNA, 321 bp, Glycine max
  Clone ID: LIB3106-042-Q1-K1-E5
ggttcgtttacgcggcggtggtttacccaatgccgaagatctcgggggtggggaagctcgacttgtcgaagggggaggagcggagggactgcacggtggggtgcaggatgtacggcgagggttgctacggcggagaaccgttcttcgtggcgagggaagaagggggcgaggaagatgatgggtacttggtgagttacgtgcacgatgagaggaagggggagtcgaggtttttggtgatggacgcgaagtcgcctgagctagatgttgtggcggcggtgaagcttccgcggctggtgccgtacgggttccatgggcttgttg

SEQ ID NO: 22073 - DNA, 433 bp, Glycine max
  Clone ID: LIB3106-042-Q1-K1-E6
cccacgcgtccggtgatgtcgcgaatgcagcgaaggtgttgttttggcaagcaggagagggcctctcatttgtgttaacctttgaatcagagagagaccgaaattcagccattatggttgccaggaaatatgctcttgattgcaatgtcgtgcttgccgggccagatgatctagtgtaggagcaaaaattaactgactgagcttttccaacaaacgtgagatttatcagattcttggtgtgagtatacgtgtgtgcttgttttgttaaagaaagatatgatttcatttgtgattgggtttttcactaattgagttgcattgttttaagcatggtttttttatttgcctaatcatgttgtaccaaacttaactttttttttataattattagttcatttggtcattggggctaatttgcatgtgctagttggtt

SEQ ID NO: 22074 - DNA, 419 bp, Glycine max
  Clone ID: LIB3106-042-Q1-K1-E7
gcgcttggaatgcaaaaaaccgatactggtagcaatttgtccagaaacaaactccgtccatatctcaaaatgtaaatcaagattctttgaatgatcagctcaaggctgaggccaaggccaagggtgagaagatcagcaccaagagacagcctcagggtcccaaacctggtttcatggtcgagggggcaacgttggagacagttacccctattccctatgatgtcgtcaatgacctcaagggaggttattagtttcattctcgttgttggtctgcgtagttttttgtttggggattattaagccttttttgtgttggaagagaaacaattcagactattaaaatatttttggtggtttatttgatggtctaaatacaatgatatgtttttggttcgctcggcataaatgggccttttctt

SEQ ID NO: 22075 - DNA, 412 bp, Glycine max
  Clone ID: LIB3106-042-Q1-K1-E8
cgcacgcgtccggtccgttactgctgttagtgttcactaagattgggagtcaccatgccatggaagactttgccgtcagaggcaaagagcccaaagacgaggttcagatttacacctggaaggacgctactctccgagaactcaccgatcttgtcaaagaagttgctccggctgcaaggagaagaaacgccaaactctccttcgcctttgtattccccgacaaaaacggccgtttcaaagttcaagaggtgggcaagacattatcttatggaaatggaagattagatgatggcaaggctttagccgaacttggttttgaaatcggtgactacttggatgtggctattctggaagttattatggatacttgcatgtggctggttatgtttgaaagccttgaaacacttatttt

SEQ ID NO: 22076 - DNA, 344 bp, Glycine max
  Clone ID: LIB3106-042-Q1-K1-D2
gtgcaccatccctcccattaatgttccttccgttgttcttccaccaatagtgaagccgccaggtattctccctccaattccaattattaacccaccaaccacaccagggaagggagggaacactccatgcccaccaccaaagtctcctgcgcaggctacgtgccccattgacacgctcaaacttggtgcctgtgtggatcttcttggagggttggttcacattggtttgggtgaccctgttgcgaaccagtgctgccccgtgcttcaagggcttgttgaagttgaagctgccgtgtgtctttgcaccactcttaaactgaagcttctcaacctcaacatttatg

SEQ ID NO: 22077 - DNA, 255 bp, Glycine max
  Clone ID: LIB3106-042-Q1-K1-E9
ggaactttgggctggttgtagtgcttgtaaatcttcattcccaatcgttatatatctctctctcttatttcttaatcgtaacggtgcctttccttactcttgtgtgcctccccctctctttcgtttaaaattatcatcgttactctctcctctctttatcatttcttcctatctctctactctgttgtttaagatacctcctccttaattctcctatattctcctgtctctttataatttttacccccgtactgg

SEQ ID NO: 22078 - DNA, 394 bp, Glycine max
  Clone ID: LIB3106-042-Q1-K1-F10
acctccctactccccccctctggcatgatgtccactccacaagactcccctaaaaccgacgacgaatacatatatccacacctccacacatcttattacaatcctctcctacctatcacccctatataagtaacacactcgatcccctacccaacttacccctacatcatcccccaataaccactctttaatataacacttcctacacaccgtataccctccataatactcactatcaccaacaccaccacccccactttactatacaccccttattcatattatcactcaaaattttccactcctattattattattacccctatcaacttaccccaaatacccacatttccctcctctccccccttcaacccccaactccccaccccccccc

SEQ ID NO: 22079 - DNA, 376 bp, Glycine max
  Clone ID: LIB3106-042-Q1-K1-B4
gctactactacaaaaaggttaaaaagttcacgcacaaggggttttaacattttgggatgcatccaaagacagatggctctaattcttacacttgatttccaattagattgtctcaattacgagtcttcgaattggtaccatgcagatcttgattatgagaccttcaaattacttcagcttgaaaaaggtgaaagcttcttttctttcgcaaaagatatgactcttaagtctacaaaggcagtattgcagccagcttcaattccggaagatcttgacccattgagatccaaacttttatgggcttcacgtgtacttcctatgccccttgttggccttcttatcattggaagtgtttgtacagatgtgggaagtcaag

SEQ ID NO: 22080 - DNA, 435 bp, Glycine max
  Clone ID: LIB3106-042-Q1-K1-B5
cccacgcgtccggaggaaccctagctagggtttggaagaagctgatccgagaggagggtgcagcgtctcacctaccgcaaacgccacagctatgctaccaaatccaaccagcacagagtcgtcaagactcccggtggcaagcttgtttatcagaccacgaagaagagggccagcggacccaagtgccctgtcactggaaagaggattcaagggattccacatttaaggccagcagagtataatagatcaaggttacacagaaaccgaaggactgtgaaccgtgcatatggtggtgtgatgtctggcagtgctgttagagaaagaatcattcgagctttcttggttgaagagcaaaagattgtgaaaaaggtcttgaagatccaaaagacataggaaaaacaagctttgaagggctgagttttgagaaagagtgat

SEQ ID NO: 22081 - DNA, 292 bp, Glycine max
  Clone ID: LIB3106-042-Q1-K1-B6
gttggtcattgcatttgttgttcctatggcacagtactatgcctatgtatccgaaaggtaagataatataaatagatctgtttttcaaattctcactgttcaaattcagatgtataatgtgcagttgtaaccatgctcatgttacaattgagtttgagaaagctgaagaagaataagatgacagtttttgcttgtaaatgctattccaaagtatatgtatttgaccatttttatatgctggttggcgatcttaagtcaggtagagcaagttctagttccttgcccctctttc

SEQ ID NO: 22082 - DNA, 145 bp, Glycine max
  Clone ID: LIB3106-042-Q1-K1-B7
aaaaaaaaaaaaaaaaaaaaaatttataacaaaaaaacaaaaaaaaaaaaaacagaaggaaacataaaaaatgacaataagtacaacataaaatacaaaaaaacttaaaaaattgaaaatgcttcctttaacgatgacaataact

SEQ ID NO: 22083 - DNA, 281 bp, Glycine max
  unsure at all n locations
  Clone ID: LIB3106-042-Q1-K1-B8
tttcttggtcnncttgactaaannaaatcagaccttctctttatcacggctgtcgctatcatctcgttgagaaatgcccagcctanttcttgcagacctaagcaaggggattacagtgtgattggatgccctgtcatcggtgccttttgagccaaagcatggtnntatgataaaccagcgaatcccaaaaagggtttattattcannatccacttaataagttcctgtacctgcttgaaagttcaaaggaagaaaaccaagttattgaagctttgtgtaca

SEQ ID NO: 22084 - DNA, 228 bp, Glycine max
  Clone ID: LIB3106-042-Q1-K1-C1
cgcacgcgtccggttagttggtttttctagcacaagatggcttctagggttcttcggctggcgcttcttggtgcccttggttgcaccattgatgcaaggaagcttgggagtgaaaagggttcgtttagggatgagaagaacttcttccatcgtccagggtttggaggaggtgtaggaggaggaggtggaggcggctttggtggtggcggaggaggaggcttaggtggt

SEQ ID NO: 22085 - DNA, 295 bp, Glycine max
  Clone ID: LIB3106-042-Q1-K1-C10
attgattagttccatcataagttcgcgactggaactcgatttattgcgtggcgttccgttgtctatcatttttggcgccccatacgtgtctcatgcaaaccttcgagctcagggtcagagccacctttccactcaaacgagtattcgacaattccaataagaagtctgacccggctaacggagcgtctcccacggcggcggtcagcctcggctacaccagactctccggaatacccccaagacatcccaagaaacacgacgtcggagataccctttatcaccgatctaatccagc

SEQ ID NO: 22086 - DNA, 447 bp, Glycine max
  unsure at all n locations
  Clone ID: LIB3106-042-Q1-K1-C12
tttgggctgactgtatgtgcttgtttgatctagactcgggcgtccctcgccccgatagtaccgcactaagagtcggacgaaagangaaacgaaaccgagaaccgggagcattagtggaaaaaagaagacgattcgtaaaaaagaacactcgaagcctatctaagtgcctactactccgagccgaccgagaaggtcaggactaaagcctagttatcgtacggatctgatactaaatgggtgactgtcggtatcctcctaagggtcgactccgacactttagaactcgccggctcgtttatcttactcgtggttaagacgctgaggccatgggaattcgaccttggtagatgcggcaagaggaaaactcagtcagttaaatacagaacctattccgcgcaatagctagccccagtcactagtcgcaaggcaccccctctatacgcatct

SEQ ID NO: 22087 - DNA, 326 bp, Glycine max
  Clone ID: LIB3106-042-Q1-K1-C2
cgcacgcgtccgatcacccaacatgatcctgttgaggacgcaaaagagaagaagccgtttgacttcatgctcaataggaggcaaaagggttcttcttcttcctccccagctccgtcaaatcctgatttgctggccatccccggtgtgggtcccagaaatttcagaaagctcgttcagaaaggcatcgctggtgttgcgcaactcaagcaactctacaaggataagttctttggaaaatctagtgacaagatggttgagtatctacagaattccgttggaataatccacaagaaccatgctgaaagtataactactttcattaaaaa

SEQ ID NO: 22088 - DNA, 299 bp, Glycine max
  Clone ID: LIB3106-042-Q1-K1-C3
cacgcatccgcggacgcttgtgcttactcgtgggattaatctgactcggacattgcagtttaatgggaccgttcataaaaattattagtgtttctacctcagctgctatgactccattaacattgaatacaaggttcatcagtcatcatcatgtgcataaacgacccataattttagcttttaaaggaaataaatcgaataaaaccacttttgtttcacctcaagataaaattcctctacccctataaacagctataaaacaccataaaagagtatgaaagactagtgagtcacttaat

SEQ ID NO: 22089 - DNA, 394 bp, Glycine max
  Clone ID: LIB3106-042-Q1-K1-C4
gcaaatttcagttctcaactacgcactgaacgaagaaagtgcgtattatcaccgttgcctagcaatggcggagacgaaccatcatatggacatcgacagcgacgaccacacttacaccgcgaggcccgacaaagctaaaagtgtcgtcgtcgccagcaaccctcccgccgccggcaaggccattccgtgggtcgaaaaatatcgccctctgtccctcgacgacgtcgccgctcatcgtgacattgtcgataccattgatcggctgaccactgagaacagattgccccatcttctgttgtatggccctcctggcacgggcaaaacatcaacgattcttgcttgggcacgcaaactatatggttcacaagtccaaaatatggatttggagcttaat

SEQ ID NO: 22090 - DNA, 351 bp, Glycine max
  Clone ID: LIB3106-042-Q1-K1-C5
gctgtctgtttggatggaacggtgcctggataccatttggatcgtggatttggatgtggtgcagatagttggcttattcatttggagggaggaggatggtgtaataccatcagaaactgtgtctatagaaaaaatactcgtcgtggatcctcaaaatacatggaaaatcaaataccattcacgggaatattgagcaacaaacctgaagaaaaccctgatttctttaactggaatagagttaaattacggtactgtgatggagcatctttcagtggagatagtgaagatgagtctgcacagctccagtttcgaggacaaaaaatatggctagcttcaatggaagaattaatg

SEQ ID NO: 22091 - DNA, 430 bp, Glycine max
  Clone ID: LIB3106-042-Q1-K1-C6
cggacgcgtgggcggacgcgtgggtttatatttaggttacgaggaaattatggtgggtccaattatttctgctgcttctgttattgctgctgggttggccgtagggcttgcttctattggacctggggttggtcaaggcactgctgcagggcaagctgtagaagggattgcacgacaaccggaggcagagggaaaaatacgaggtactttattgcttagtttggcttttatggaagctttaacaatttatggactggttgtagcattagcacttttatttgctaatccttttgtttaatcctaaaaaaatagaaatacatatccttttttccggggacttgctttacccgtcttgctttttcgaattctatttatattaatatttcactcctataattccttatccgttcggacaagaacacaagggaag

SEQ ID NO: 22092 - DNA, 183 bp, Glycine max
  Clone ID: LIB3106-042-Q1-K1-C7
atttaactgtttggcccttcgtgtatccaaaataaagatcaatatatataacagccaggtaaaaaaaaaacaaagcacaaaaaaaaaaaaaaaaaaaaaaaaaaaaaaaaaaaaacaaacagagagagaagaaaaagaatccatggttgccaaagaaagcatccttgagaaacgaacaaaaat

SEQ ID NO: 22093 - DNA, 376 bp, Glycine max
  Clone ID: LIB3106-042-Q1-K1-C8
tgctacttccctttgttctcaaaccttatcccttatcctcccaaaaccaaaccgttgctacctccgcagcttctctcgcactcccaaccctcactctccgaactcgacaacctctctgttctccccaatgcttctcctcgtccctctccctcacccctaactccaaacccatttccatttccgccgttttcctcaaaacaacgctgtcgtcgtcgtcgccgttgtcgctgtcgtctcgcttcgttccccgtgtctctgtgttggagcatgaagaggacaccttcggcgacggaaacggccccagcttctcccgcgaccttaagctctttgtccggaatcttcccttcagtgtcgacagtgcgcggcttgcggaact

SEQ ID NO: 22094 - DNA, 457 bp, Glycine max
  Clone ID: LIB3106-042-Q1-K1-C9
tttgggctgattgtagtgcttggacgaagggcgaacaaccagtagtccccctcagccttggcgctggcgcggtcgcccaggctcgcccaaggacgctaagggccttaactaattagggcgacgttaatggtcttaattttcctgtcctgcggggctaacctgcggaccccttctctttcttccttactcttggtcctccttttggtccggaacctggacctggacctgtactacttgcgaatatatgcgcggatcggagggagatctttagagtgtatgcgcggaagtcggcgtcctttggtcctcttaatgaggatgcgtcggccgagtcttaagatgagaaggcgtcttaagctagtgcggagagtggtaatcctgctatgaggcccaaggcttttgataatggcaattcagaataatctaaagttaatacgtgctatggggcctctgccgctat

SEQ ID NO: 22095 - DNA, 310 bp, Glycine max
  Clone ID: LIB3106-042-Q1-K1-D1
agcatcccccatttcctcgccaagatttacaattgtagttgccgtcatgccgtgcagacagataggaagctacttagcactgatagttataattaattaaatacaaataaaagaaacagacagagagagaagagaagaatcgttggttgccaaggaaagcatctttgagaaacgaacagaatgatgatcgactaaatgggaccttcacttccacttccactcgctgtgttcaaatggctttagcaacaacaacaatcaccaaccatgaacctctgcctcacgctcactctcggatctcagtcgcagatcc

SEQ ID NO: 22096 - DNA, 321 bp, Glycine max
  Clone ID: LIB3106-042-Q1-K1-B3
cgcacgcgtccgcccacgcgtccggtttcttaaacttgggtgcgattccttcactcagaagaacaacacatcactatggctcttctgagtcgagcctcttcacgcttccctcagctggtttcccctcaaagggtactttcactccacacaacgctcccatctctgaacgcatccccatccacagccacgcctacaccatatgccccgccaccgcctccgtccgcttcctctcccgccggcgtttcgaaggcggcggaattcgtgatctcgaaagtggacgatctgatgaactgggccccgccgggctccatctggcccatg

SEQ ID NO: 22097 - DNA, 419 bp, Glycine max
  Clone ID: LIB3106-042-Q1-K1-D12
gacctttgggctgattgatgtgcttggcctgcgttttggttagaatgatcctatccacctgaatagagagcgagcagcctccgtttgcgttaatttctgagacgagcgttagtatcggcacaaggatacgaagcccagtaacatcgcgaaggacgaagagggccctttcagccccgtttcggccaataaggtcatcggctaggtcactaagtaccttaccggaaagagttacttagcctgatccgccttacataacttagaccccgccgacgagctaacttcgcggctggagagtaaggatataggcgagggtcccaggcgtactaggacggcgaataatacatgtccgggtcccgacgtatcgtacggagacaaggattacggcggtgcgtgcgacggaatcatcgctgcatctcggg

SEQ ID NO: 22098 - DNA, 348 bp, Glycine max
  unsure at all n locations
  Clone ID: LIB3106-041-Q1-K1-H7
ccactcctccncccacccctccgggcactcttcctcccacgcgtccncttacaatttggtgtatactttaaggggtgagactgctccccncataangcaccctttattttttatacctttttcatatgctttaacacttctacttctgtttttgccctcaatcttattctctaatttttatttaatacacaataccttaaatttacagcttttttttctttcctattcttacaccccccactccatttttttgtatcctaacctcttttttttattcaatctttctccttctttctttatcaaaactttattcttcctcttttctaccctaataactttttttttttt

SEQ ID NO: 22099 - DNA, 332 bp, Glycine max
  unsure at all n locations
  Clone ID: LIB3106-041-Q1-K1-H9
cccacgcgtccgaattttcaacccggattcttcgatttcttctaaaatatatactgggcggtgttctccttgtgggatggtggtttanggattaaagtaccgttattggtagagatggcttgtagggggtgctgggagtgccttttgaagctgtttaacttcattctgaccctcactggtctggccattgtgggctacggaatctatctttttgttgaattctctaaagctttggatgatgacaacacgcctgcaatttcttccgtcagtgatgattctgctctgattcaactttgccgtccttttcttatggccttgtctttatccaacta

SEQ ID NO: 22100 - DNA, 338 bp, Glycine max
  Clone ID: LIB3106-042-Q1-K1-A1
aacagtttctgacaccgaaattgagccaaaaagttgaccctctttggatgaatgaggatatcatgttcctcacattaatacaacatggagattccaacaattgaaaactcctaaacacccttctcttccaaccccgtttcatgcttccttccaatcctttggtgtgatttcaatcgtttcataagaaaacagcactcagttcttcttcttcttcttgttctttcatcaatcatcatctttttcattcaatttctctgattgacaaaattgccacacagatcaatgattgacccaattgagaaaaaccttaaaagttccttttttatattttaattttg

SEQ ID NO: 22101 - DNA, 396 bp, Glycine max
  Clone ID: LIB3106-042-Q1-K1-A11
tttgggctgatttagtgcttggaaaagttccttacattctttaaacccccaagagtatcattccgcctgtctctccctgatcccgcgtttctatcctacggacattcattcctagttattgtcgacgcggcgtcggatacggacggcaacttctccggaaatggccggtaaaacgaacaccctacgccgttagccataagaggaagtggcggcggaacagtatcagtcgtaatcggaaacgaaagacgtttcgcaatcgctgcgtaactctataccgagtgtgccaaggggcacgtggtaatccccagagtcttaccttattctttccccactgtagaaagttccttcccgatgaccctacctgacaatcccgaagcgccattgtggcgcgctttt

SEQ ID NO: 22102 - DNA, 294 bp, Glycine max
  Clone ID: LIB3106-042-Q1-K1-A12
tccaagacctactactacctctacatccatttttagctccaaccgacaccccaaaagtatacgggttttatatccctactcttcgaatactacctatcgtctacgaaccgtttcactacactcgacacgctcccgcggcaaaaaaccgcccacgactccaaagatcgccacatctaaataaaaaccacaaaccctttctcacgcctcccccaaaccgccggacccccagaaagccaccgccctcagccacccgcacccgtaaaacccaatactatagcaaccaccaaccgcccc

SEQ ID NO: 22103 - DNA, 346 bp, Glycine max
  Clone ID: LIB3106-042-Q1-K1-A2
cgcacgcgtccggtgagtgaatagggatcatggatgtggaggctgaagatagcagagggaggaaatgatccatacatattcagcacaaacaatttcgttgggaggcagacatgggagtttgatcctgaagcaggcagtccagaggaacgggcccaggttgaagcagctcgtcagcatttctaccacaaccgcttcaaggtcaagccctgcgctgacctcctttggcgttttcaggttctcagagaaaataacttcaaacaaacaattcctcgtgtgactatagaagatggagaggaaatcacataccaaaaagtcacaagcgccgtcagaaagggcgcacaccaac

SEQ ID NO: 22104 - DNA, 352 bp, Glycine max
  Clone ID: LIB3106-042-Q1-K1-A3
agccatggcaatggcaacccaagcctttctcttaaccccacccctctccggtctcagagcgcagcgaccgcgcctccgtgccatggaagcaaaactccagcctctccttctccagcccgaagcccctcaagttctccagaacaatcagagcagcagccgccgacgagaccacagaggcaccagcaaaagtagaggctgcaccggtcgggttcaccccaccagaacttgacccaaacaccccttccccgatcttcgggggcagcaccggcgggctcctgcgcaaggcacatgtggaggagttttatgtcattacgtgggactcacccaaagaacagatctttgaaatgcccac

SEQ ID NO: 22105 - DNA, 417 bp, Glycine max
  Clone ID: LIB3106-042-Q1-K1-A4
ctctatgtaccatggtacatgaaaaaattaataacactagtttaagtagaaattaggtgtgaccattataatcccatagcacctaataatttcttattagtttacatgacaagaagaatatgttcttttgaatgatgtcttgtgtattcttttatgttcttttggatttgttttaatgtgcagggtttatggattggcctgatttgtgggttggcttgtcaaactgggactctctcatttttggcatggcgtgccaaatggactaaactgaatgtctccttggacagagattaaatccaaacaccatctgcttaacttgatgcttgctaatattggtcaatgaaaataatccacggagtctactatttttaaattcaattgcttgcaagaaaatggaaattgggtggacaaattttc

SEQ ID NO: 22106 - DNA, 234 bp, Glycine max
  Clone ID: LIB3106-042-Q1-K1-A5
cttacggaattcggcgggccacacatccgagccatgacgcttacattcacacgtgcaaccaacgtcccttaaaccactgtgacccgactgtttacagtgcaattacaaggctgcatactttgccacacacaataggtcacataaccctacatctgtgcatggcaatggacatgactaacggtctcatgttctgctatatagcactacgcaggcatctgacaacatcacaactca

SEQ ID NO: 22107 - DNA, 345 bp, Glycine max
  Clone ID: LIB3106-042-Q1-K1-A6
atctcccctcacttgtgcctagccttatgtcatagtattatcattcattctcagcggtctctcttctctctccacccaaaccctaactcccgaccctgttcccctctcgtatccgtcatgaaaggaggaaagtccaagaccgaatctaagagagccgatcccaaacttgctgtgaataagaagggagccgccaccaaggctaggaaacccgccggcaaggggaaggcagcgaaagaccctaacaagccaaagaggcctccaagtgctttcttcgttttcatggaagagttcaagaaggtattcaacaaagaacatcctgaaaaccaagccatgtctgctgtgggc

SEQ ID NO: 22108 - DNA, 361 bp, Glycine max
  Clone ID: LIB3106-042-Q1-K1-A7
gcgatcccttccaatccacagatcaacatttttttttttggtgggtagcagtgaggataaaaaatggctatggccacagctgtcgtgtgtcctcagaacatcaccggagccatcgtgagctcacctagcaagaccaagaagagagtggtacacgtgagaggcataaattcatttgggggactgaaggctagcaatggtgttgtctctttggggattcctatgagcactgagaagtgctttgctaaagttgtgagctcaatgaaagcagctacatcaaatgggaaaagaaaaagaagggctctttctttcacgtgcaacgcttctggtgagatattcacgaatgctgctatcatcaatggac

SEQ ID NO: 22109 - DNA, 355 bp, Glycine max
  Clone ID: LIB3106-042-Q1-K1-A8
gccaagtacgaggaagccgtgaggcgcatgcaagaccttccacctgatgatcctcggagtttcatgcaacaggccaatgtccaccgtgcctactgcgatggtcgcggctataatcaaaagggcttcgctgactacaagcttgacgttcacggctcctggatattctttccttggcaccgctggtatctctatttctatgagaaaatcttggggaagatgatcgatgaccccactttcgctcttccgttttggaactgggacaatcccgccggcatgagaatccctcccattttcacagacaaaagttcacctctctacgacgaacacaggaatagccgatcatgtaaatgctttc

SEQ ID NO: 22110 - DNA, 442 bp, Glycine max
  Clone ID: LIB3106-042-Q1-K1-A9
tttgggctgatttatgtgcttggaaagatacagataaccaagagaaagcggctgcgagtcagtcgccctccgggtctcagggtgtcgtcgttccgccggttagcctctctaccctcccgtagtaaaggtattacggacttacgcaccctaccttaccgggccctactccctgccgctcccgcccatgccgtccggcttcggttgttaatccacttccgacggtccaaaaagttcctccaaaaggatgttaaatacgaatattccagccggctctggggtcccactactacccatagctagcctacccgtcgttccgtcgttaaaaccgggccggaaggttcctcccgaggaattaaccacgtcaaccgtacccgctccgccaggaaggaactctgaatagagagtcaagaccaaagtagttagcgacacgataggatcctcc

SEQ ID NO: 22111 - DNA, 431 bp, Glycine max
  Clone ID: LIB3106-042-Q1-K1-B1
agggtatctccttatccgtgtttttttcaaaatttgagctcgtttgttgtcgtgtggcggataacgttggtgtttgtaaactcgtgtgcgctccgattcaaattccaactccgaatcaaaccctagtacaacaaaccaacgaaaccctcttcttcccaattctccgaccccatcatcctcaatggccaaccctgattcctctcttcctctctccatcaagaaggagaacatcactcccattacctctaaaatcgaagaacttaatgaatcgacatcggagcttctgggcagagttcaaagtttgaaacaagatttgcaaagttggaagtctaagttggatacacaagtcaaagtctatcgcgatgaactggcagaacttaagaaaacacttaatgttgaaatggaccaacttagaacagaatttcaagatc

SEQ ID NO: 22112 - DNA, 295 bp, Glycine max
  Clone ID: LIB3106-042-Q1-K1-B10
cctcacgggggtattcatacctaacctatcgtttgatgacccataattctacgatctggaaaatttcggtgccatttaatccaactgttccgtagtatactttttccctgttagtcggtgctacatttaacaggtttctattgactatttctcttaatactcgtttaactcgaacggtgaacgggatttctttcgcaatcgattaccaagtgtcccatactgctgcggtcatgtataattccgattgtcattatccgctagtgtttcagtgtttaccttccctgtctcacccttc

SEQ ID NO: 22113 - DNA, 394 bp, Glycine max
  Clone ID: LIB3106-042-Q1-K1-B11
ggacctttgggctgatttatgtgcttgtggaactagtgcgggatgcgcttcggcctcttccctttagtgagcactccgggcccaaggtgaacataggacttggaattgacaaccgacctgggtatggcgacaatttggcctgcggagtttgcccataatgtggcgagggaggagcctaggaagtaggcgggaggtatcatacctatgagtaccggagttcctgacatgcgccccgcgaaaattcatgaaatctcggtgttgttaaccatgtcgtatcctgaggggccggattcgaaatcgttgccggaaaatagtccgacttatagtagtgtgggcctgtcggtgcgctccgtaacggtggtcgtatttgataacgcgaatctggcgccgaatg

SEQ ID NO: 22114 - DNA, 372 bp, Glycine max
  unsure at all n locations
  Clone ID: LIB3106-041-Q1-K1-H6
ttgtattttccgggacatcattatggattggattantccttctcgggggggttcttaatgggtcgtgaggtcttgaaactctatttattctacatcaaaaaccaaatgacccctcccccataattctttcggattgtcgggcacattaaaaaatgaatggataacttcctaaaaataaagaaaactataacacattataaggaggggtcaaatattaattaagataaaagatatagaatatctatctgtatatatatatatatagatataatttattaataattagaactttcttttttcttaaaaaaaaaaaaaagtaaaataaaagatttgatagaaaccgaatttcaaattcattattttgattcatag

SEQ ID NO: 22115 - DNA, 315 bp, Glycine max
  Clone ID: LIB3106-042-Q1-K1-B2
ccggccgccctttttttttttttttgttacatgaaaaatccttaggctagtaactgggatggcatgacaagtatcaaaattacaaataaattggactcattccacttccacgatctcatccaaagcatagttgtttgttgatacattggcatagttgactttgttgaatcggaccacaacagggtagcgagtgttggggtcctgatcaacagcaaccactgaaccagtgcgcaatgaacaccttgatagcctgccaatgatctaaagcataacacccttccatttacctagacttgtacaatggtattcccacat

SEQ ID NO: 22116 - DNA, 262 bp, Glycine max
  unsure at all n locations
  Clone ID: LIB3106-041-Q1-K1-F7
aaaacccgggccgacgcacacatccgcccattcctacaatcacacttccatactcattcatttctttaaccatccttttctctgtggctctcacaggagagagccacgtccatccatcnctacctccattaacattatctcagaagctttttctcctaacactcccatacccactgcactgacataacttctaattcctctacctgcagatagatacatcgcataactccctaaccacattgatgatacacaatacccaaaa

SEQ ID NO: 22117 - DNA, 390 bp, Glycine max
  unsure at all n locations
  Clone ID: LIB3106-041-Q1-K1-F8
taactanaaacattntcaggaatatgaatgtccttgttttcttcattcctacggggtttttaacagggggatgccgtgcttaccatatcttccctctccnaatgaacactggctatcgtgcccgtactctctacgtgaaatgcgcaacttggaggctttttttgtaagcacacaacatctataactttgagaccattcctgaaaagtgcgtttaatcaacaaatgaatacatccatgtctaacaatatacatcatactccaaaacatttaaccaacaagcttacttttattccaaaaacctctaaaatccatcccaaaaacacatttttctttaatataaatggcaccctactttctaatatttccatactacaaaaaacatttattttt

SEQ ID NO: 22118 - DNA, 234 bp, Glycine max
  unsure at all n locations
  Clone ID: LIB3106-041-Q1-K1-F9
cttcattcatatttttgtcatcaagcgtactcttgcacgctaactaacnccatatatgtgttcttatcttgggggggcagactttctcntcatcattgaccttgctgtaatgaggtgtttaatctgaaatttgtttgaccaaattcatggcggaactgatattttctcgcttgtacagctgctctaattgtataaaccatgtctcactccatgatgatattatttccaaggctt

SEQ ID NO: 22119 - DNA, 348 bp, Glycine max
  Clone ID: LIB3106-041-Q1-K1-G1
atttcgcagtgtggaggaccgtgttcttcatcccacccacacagagttcagttcaggggggatatctatggggtaatggctaatagaccgcatccggatattgatgatgattttcgtgagctttataaggagtacactggccccctggggactgctactacaaacatgcaagagagggcaaaatcaaataagaggtctaatgcagggtctgacgaggaggaggaagcccgggaccctaatgctgttccaactgatttcaccagccgagaagctaaggtttgggaggctaagtcaaaggctacggaaaggaattggaagaaaaggaaagaggaggaaatgatctgcaag

SEQ ID NO: 22120 - DNA, 329 bp, Glycine max
  Clone ID: LIB3106-041-Q1-K1-G11
aaaaaacaataaacaaaaaaacaaagttgttctcacacatatataaaatacaaaccatgggggtcaactcaaaaaaggggaggcttctacttaatataacacaaaaaaataataaaatcacaaacaataataacaaaatcacccaacttataaatctaaaaaccaccaaattctattttccatatataaaataacaccaactttggctctctttttctaaacccaaccttttactttactacacttctcccgcctttcctcttatattctccttcaccaaacatttttaatcccttaaatataattaatatttctttgataaaacatta

SEQ ID NO: 22121 - DNA, 244 bp, Glycine max
  unsure at all n locations
  Clone ID: LIB3106-041-Q1-K1-G2
acggagaaagtttgttgcggacggagtgtgctttgccgaactgaacgaggttctgacacgtgggttgncttangacggttactccggcntcnaanttagggttacgccgatgcgcaccgagatcatcatcagagccaccagaacccaagccgttctaggtgagaagggaaggagaattanggaacttacctcagtggtgcagaaaaggttcaaattccccgaaaacaacgtcgagctttattct

SEQ ID NO: 22122 - DNA, 396 bp, Glycine max
  Clone ID: LIB3106-041-Q1-K1-G3
cgtccgcaattgggagcatatacgacacagttgccaactcattattatgcattagcaattcttccaataaattcaaacctgcatatttacttgctgacggaagattagagagggcagggagggctaaaaggccatctacttcaactggtggacaaattcctgcagagagcaatggcctgactagccaggattcatataaaaacagcatgctcacagcatcaatcattgctgtgggagatgagattctctcaggtttggcaatcttgaagatctgttgggaccttatttgtgtaggaaactgcattcaattggttggtctgtgttacaacattctgctgtgcacaacaatatagattcttgggccgaagaagttgagagacaaaaatctaaaagtga

SEQ ID NO: 22123 - DNA, 333 bp, Glycine max
  Clone ID: LIB3106-041-Q1-K1-G4
cgcccagggtaccctgggggtcctctgcgaaatcctcttggcgctagctaaagatattaatagcggtcatgactggaggcttggagagattaagaatgggcgactctcaatggtggcaatgcttggcatctttgtacaagcttcagtgactcatgttggaccaattgattatcttgtggagcatctttccaatccatggcataaaacaattattcagacccttgccaattctagctcttaattctagaaaatactgtatgaatatgtggcttgggctttagcttattcataaaatgaaattactttttatttttccacctccatcatactgtg

SEQ ID NO: 22124 - DNA, 158 bp, Glycine max
  Clone ID: LIB3106-041-Q1-K1-G5
aaacccggggggcgcaggcgtccgtatttccaaaactttgttgcatgccatacaattttatatgttgcttattgtctatttgctgttgctaaagtttgctaccggaattttgagtttaacttctgttctagttgaaggcaatgtgatgattgttaatt

SEQ ID NO: 22125 - DNA, 261 bp, Glycine max
  unsure at all n locations
  Clone ID: LIB3106-041-Q1-K1-G6
tttctttcaacttaccttgtgtctcaactgaacgattatctacaccgggagtgtctaaaacgggtactcctcntaaaacttattattacacctatacacaccaacatcatcatcacaaccaccataacccaatcccttctacattaaaaaataatttataattattgaacttacctcagtggtccataacacattcaaattccccgaaaacatcttctaactatatactaataaggtcaacaacatatgcctatataccat

SEQ ID NO: 22126 - DNA, 203 bp, Glycine max
  unsure at all n locations
  Clone ID: LIB3106-041-Q1-K1-G7
tataactggttttttttttatgaaaatgaacntccttctgtggttcttttatacagtgttggtagcatcacaatcccatccctactatatgttccctctcctaatgaacactggctatatttcccttactccttatgttaaattctttttttatatgcttgcttaaaaaacacacaacatctttttcttttataccattccta

SEQ ID NO: 22127 - DNA, 307 bp, Glycine max
  unsure at all n locations
  Clone ID: LIB3106-041-Q1-K1-G9
gcgtccgcccacgcgtccgctttgttcactcgtcttctcttgcggctaggcttttagcgcagctgcgtctatatttaggggggaggggtaatgaaaacgttcacatcantattgtggtcattggccatgtcgactctgggaaatccactaccactggtcacctgatttacaatcttggaggcattgacaagcgtgttattgagaggtttgagaacgaagctgctgatatgaacaagaggtctttcacgtatgcctgggtgctggacaaacttaaagctgagcgtgaaagaagaatcaccattcatat

SEQ ID NO: 22128 - DNA, 361 bp, Glycine max
  unsure at all n locations
  Clone ID: LIB3106-041-Q1-K1-H1
cgtccggtttgttgtgagctataagctactttagcgtgaggagaatatgaagttgtttgttttctgtgtggctgcaggagtggtgggagcatggccatgccatggcgcangctaccaaaggttccctctccgaatgaaaactggctatggtgagcgttcttcggaggtaaaatgcgcaagttttaggcttgctgtggaagcacacaacatccgagcctttaaaaccattcctgaagagtgcgttgaaccaacaaaggactacattaatggcgaacaatttacatcagactctaaaacagttaaccaacaagctttcttttatgctagtgaacgcgaagtccatcacaacgacatatttata

SEQ ID NO: 22129 - DNA, 284 bp, Glycine max
  Clone ID: LIB3106-041-Q1-K1-H10
ccaaacattctaacaaattttcaattttaaaacagcatttcttctctagcaacctttacttctcttcggccatctactatcaatggcctttctctaaattccctctcttaaactaaactctctttcaagccctctcgccacactttcaaatccaataacttcattagtaactccttcttaacaaattattgtcacaacactgtgtacttttatttttatcatcttggcaacactacatatccttcttacttatatacctcatatgcaccttcaccctacaaccc

SEQ ID NO: 22130 - DNA, 405 bp, Glycine max
  Clone ID: LIB3106-041-Q1-K1-H2
agtttcttttccctgaccaatggcagttactggaaaaggtgttacctcaaaagaggggcaatcatgtgtgagacatggagctttattattgtgaggagaccactttgcatgatgtcaactttaaggaggagatgagacgaaagcagcaacagcaatatcgctaggcatatgatgaagatgatgatgagccatctggtcaacgagtgcaatgtgctcaacagtagtgcaatttatggtaataaaagttctataatttctgcatggcttttatcttttgtttgcataattcacttataacttcgtgataaaattaccctttaagtttttgcttgtaaccgtatttagtcttggcaaatttctaaagtctgctttttggttgaatatatgaaaatttaaatttttttt

SEQ ID NO: 22131 - DNA, 405 bp, Glycine max
  Clone ID: LIB3106-041-Q1-K1-H3
gattgtttgttgttgtaactcgttcttgttgttttgttgttctgtgtttgtgtttgttttgtgtctcacctgagagtgtcttgctgcggtggtaactgtggttgcggaagctcctgcaagtgcggcaacggctgcggaggctgcaagatgtacccagacttgagctacactgagtcaaccaccaccgagaccttggtcatgggagtggcacctgttaaggctcaatttgagggtgctgaaatgggtgtgcccgctgagaacgatggctgcaaatgtggaccaaactgctcctgcaacccctgcacttgcaagtgaggtgttgggagagcaagcttcaagcagagatagcccttaattaggaataatgataaactattaatgtgtagctaaaaacttatgtattat

SEQ ID NO: 22132 - DNA, 387 bp, Glycine max
  unsure at all n locations
  Clone ID: LIB3106-041-Q1-K1-H4
ccggggggcggacgcgaccgatagaatggaatttcnatgctcantcggctgttttaccattctcttctctcttgctctggcaggaganagccggggggatgcatcnctacctgangaagattattgggaagctgtttggccaaacactcccattcccactgcactgcgagagcttctaaagcctctccctgcaggtgttgaaatcgatgaactccctaagcaaattgatgatacacagtacccaaaaacattcttctataaagaagaccttcatccaggcaaaacaatgaaagtacaattcaccaagcgtccctatgcacaaccttatggtgtatatacatggttaacggatattaaagacacctctaaagaaggatatagttttga

SEQ ID NO: 22133 - DNA, 390 bp, Glycine max
  unsure at all n locations
  Clone ID: LIB3106-041-Q1-K1-H5
gggcggacgcgtccgcttcgttcactcttcttctcttgcggggagggttttagcgcagcttcttctacatttagggaggattggtaaggaggggggtcacatcantattgtggttattggccatgttgactctgggaagtccactaccactggccacctcatctacaagcttggaggcattgacaagcgtgttattgagagatttgagaaggaagctgctgagatgaacaagaggtctttcaagtatgcctgggtgcttgataagcttaaggcttagcgtgaaagaggaatcacaattgatattgccttgtggaagtttgaaaccaccaagtactattgcacactcattgatgcccctggacacagggatttcatcaagaacatgatcac

SEQ ID NO: 22134 - DNA, 274 bp, Glycine max
  Clone ID: LIB3106-041-Q1-K1-E1
tctatataaataccctaaccttattccactcccttcgaaaactaacttatgggcctcttacaaaggcggcttccattaacaaccttcaatacctcatccacataaactacttctttttcataagcaatcctcctccgcctttgtatttctacactttcttctctttcgactattaaaacaactactcttcatacctcaaagagcttaaccatcttatacaaaaatttaactcctataattaatactccattctttaccctctccattaattcac

SEQ ID NO: 22135 - DNA, 180 bp, Glycine max
  Clone ID: LIB3106-041-Q1-K1-E10
tcactcctactctttttactactgtgtattcccacaatcatttaaactaatttactgtggcattaccaaagggctgtgtaccatttttcataataaaaatcccaaatttcccaatatttgattccacacacattaccacaaaattttttatattacattaaattatttattcttcataac

SEQ ID NO: 22136 - DNA, 376 bp, Glycine max
  unsure at all n locations
  Clone ID: LIB3106-041-Q1-K1-E12
gcgtccgggcacgtgatgcttaaacaagcagatggttcttatgcttgcatagcaaaaagtgcgggcggcttcatcctgggcgaggccaaanaagaattgttgagggtcttgggacttcaagaagaagagggaagttccctagaatttcttcgaagaggctacaaggcaagcacgtggtgggaagaagattttgattcagaagtatcttctgcatggcggagttgagtagtacactgttagaagagactgttttattgcatctgcatgtagtactcattgaatgggctcccgtatattcaagaaagacatttcctgcagaactgcccaatttttatttttatttgttaatatttcgtaaggtaatatttttccattc

SEQ ID NO: 22137 - DNA, 399 bp, Glycine max
  unsure at all n locations
  Clone ID: LIB3106-041-Q1-K1-E2
aagaaaatgcgatcagtcttgtagtgttttgaattgtaagcccaggaagaagcgtatgaggaggtttaagaggaggcgccgaaagatgatacatacatccaagtagtgcgttaaacctagtttgtttctgttgcttttacaattgcttatgttgtcgaatgggacacccagttgttagtggcactggtttctcctttttgatgtttgatacattttgttggattcaagtagtttatgttcgtcttatgttattagctcaaaacaatgttgttactgcttttgctaatcaacatgatctcctatttgcaaaanaaaaaaaaaaaaaaataaaaaaaaaattataaaatataantntattttaatttattatttttaatttttttttttttaatattattt

SEQ ID NO: 22138 - DNA, 386 bp, Glycine max
  Clone ID: LIB3106-041-Q1-K1-E3
cccacgcgtccgcccacgcgtccgcccgaaactaaaaaccgcaccctcatctttctctcggctcccttaaccaaggcgcaagacaatggccacccaaagaagccatcattcccctatcttattttcgtccctcatcttaacccttttcgttctctacttcccaagatgccaccacgccattcccaacaaccccatcaaaaccgtcgtcgttttggtaatggaaaatcgctccttcgaccacatgctgggctggatgaagagactaaacccggccatcgatggcgtgaccgggtcggagtccaatccgctgtccgtgtccgacccagactcgaagcggttcttcttcagggaccgggcccatttcgtggacccggaccctggtcact

SEQ ID NO: 22139 - DNA, 339 bp, Glycine max
  unsure at all n locations
  Clone ID: LIB3106-041-Q1-K1-E4
caaacactcttcttcatattcttcttgttgtttttcttgttctatctgatacnaacatggtggccttaagagcggggctattgttgactatgtgtgtacttcctgccatggttgtggccattcgcccagcaaagaaccctttttgcgtgaagggtcgcgtctactgttacccttgccgtgctggttttgagacctcagcaaccacctacattgccggtgctgagattatgttgcaatgcaagagcacggttagcaacgacgttgtgtacaccaagaaagggtacactgactcaactggagcatacacaatgtacgtgtactaagatcactcacatcaaa

SEQ ID NO: 22140 - DNA, 386 bp, Glycine max
  unsure at all n locations
  Clone ID: LIB3106-041-Q1-K1-E5
ccgtttttagctcttcacatttgccaatcgatttccagccggtgcagaaaaaccatgaacacggggtntcntcagagttgaatgcgcgcgtgcncacttgtcaaacgcgacgacagttttcttctccaattcaatactactactactactattactataacatagacttcttgttcttctttcaaaacccggttcatctttcttttttgttgctgccatattcctcccattttttttccttccttcaatctgctgcttcaatggaaggtttggcttctctcaaggttccctttcagaccacccaattccactctttcagacccagaacctctattcttccatcccaagccatttttttccacaaaagaagctccttttcattcttt

SEQ ID NO: 22141 - DNA, 306 bp, Glycine max
  Clone ID: LIB3106-041-Q1-K1-E6
cgtccgcgtgaatcatgttctctaaggtgtaaaatggcttggtatagcatgctttgaaattcatggcgttcggtcatgtggtgtcggcagatctctcattcatgtcttgacatacttctgtaatttttactccattgagggaagcatcttaagaaatgtgttgcatcgttgatacccatgagaaagtgggtgactgaatgtatacttgagtgtgatatctgtagtactttggtttttgttatcaactcttgcttggtttacctgatgaacataatgatatcctttttcaattctttttgacagaaa

SEQ ID NO: 22142 - DNA, 332 bp, Glycine max
  Clone ID: LIB3106-041-Q1-K1-E7
gcccacgcgtccggggtgatgccaagatgctatcaaaggtctaaagcttgtacaataaagcaatactttggggggattgactgttttggtttggcatcaagctttttacttagtatgagaatgttctaaaaggaatgatattgaatctagttgctaataagttttatccagctttatgtactatgactgcgtggtagggaatctaaattgagattctgttttggccttaaaaaaaaaaaaaaaaaaaaaaataattatataaaaattaaatatattatattttaatataattttaataatattataatttattatttattatttataaaata

SEQ ID NO: 22143 - DNA, 433 bp, Glycine max
  unsure at all n locations
  Clone ID: LIB3106-041-Q1-K1-E8
gataactagaaacagtgtgatgaagatgaatgtccttggtttcttcgttgctacaaggggggtagcatggcggggccatgcgtacgatatgttccctctccgaatgaacactggctatggtgcccgtactccggaggtgaaatgcgcaagttggaggcttgctgttgaagcacacaacatctttggctttgagaccattcctgaagagtgcgttgaagcaacaaaggaatacatccatggcgaacaatatacatcagactccaaaacagttaaccaacaagcttacttttatgccagagacctcgaagtccatcccaaggacacatttgtgttcagtatagatggcaccgtactctctaatattccatactacannaaacatggatatggggtggagaaatttaactcgaccttgtatgatgaatgggttaac

SEQ ID NO: 22144 - DNA, 403 bp, Glycine max
  Clone ID: LIB3106-041-Q1-K1-E9
accgataccatactactatggcattcaaccagctgtccatcagaaaggtgaagtaacactatgacatcggggcccatctttcaagggggtacagaaaactggtcgcattatagaggcttcgcaggccttacgaggtctgttccatccgcggtctccgatcctcaaaacttaacgtggaatcagaaagacttctttatatcgccgtaaaagaccactatatccgccaggctttacattccgaaaaccacttacccaccaacgcaaaagcttcctattttagtttacttccacggcggcgccttcataattggaacaccgttttctccgaactaccacaacctactcaacaactttgtttcaaaggctaatgtgataggcgtttccgtccactacaggagggcac

SEQ ID NO: 22145 - DNA, 392 bp, Glycine max
  unsure at all n locations
  Clone ID: LIB3106-041-Q1-K1-F1
cctttcttgttaaggcagctgctacgccccctgtcaagcaaggatcanacagaccttggtggtttgcatcagagcgggaggctttcctacttggatggcagccttccgggtgactatggatttgaccctctgggactttcggaccctgaaggaacaggagggttcattgagccgaaatggctagcatatggtgagataatcaatggtcgttatgcaatgttgggtgcagttggtgcaatagcacctgaaattctaggcaaggctggtctgatccctcaggagacagcactcccatggttcagaaccggtgtgttcccacctgcaggaacctacaactactgggcagactcctacacactggtcgtgtttgagatggcactgatgggatttgc

SEQ ID NO: 22146 - DNA, 343 bp, Glycine max
  unsure at all n locations
  Clone ID: LIB3106-041-Q1-K1-F10
gctgactctttattctttgaactttggtggttctcacacatgtttacctacctcccttggcgtntaaccatttggggcttgcttcttcttcttcatnccacttatatcattnntccaacaattgtttcaaaatcaataacttctaattctcagagccaccgttttatatttccatgtttgagtgacaccaactgtggctctctttgccgaaccaaacgtttcacttgaggacactttcttatcttacataccagatgcttcttcaccaaacatttttaattttaaaaaattaattaacagtgcttttatagaaaattatagatctatcatctttctactcctg

SEQ ID NO: 22147 - DNA, 307 bp, Glycine max
  unsure at all n locations
  Clone ID: LIB3106-041-Q1-K1-F11
ccactcctcccatttttgttgtggattttctaactagtcagaantattttttttggcggaaatcttgactggggtggtggttatatttttttcctnactgcatancattgttactcttttttttttctttaaatgttttaaacatgttttatgggcttctttttatccctttatttgtcataaaaatttctgctctgctgggtcgtatcatacatctaactattggttacttgatgctcttctaaccaaacctttataattcccaattgtcaaaagaaataaaataccttcttagcaaccgatctat

SEQ ID NO: 22148 - DNA, 421 bp, Glycine max
  Clone ID: LIB3106-041-Q1-K1-F12
cccacgcgtccgctagctcccaaggaggaagcaatatagtgctgtttaattgttgctgggggtctattgtgggaggggcgatttggaaagttcattatgaatataggggtagtggcaatggttctgggtttatggattcgggttggattgtgcacaacaagtaccttgctactttatttttggagactctttggtggataatgggaacaacaaccagcttaactcactggctaaggctaattatctcccttatgggattgacttcgctggtggcccaactggaacgttttccaatggaaaaaccactgttgatgtattcgctgagcttttgggattcaacggttacattcgtccatatgcaagggctataggccgagatatacttagtggagtcaattatgcttctgcaacttccggaatt

SEQ ID NO: 22149 - DNA, 353 bp, Glycine max
  unsure at all n locations
  Clone ID: LIB3106-041-Q1-K1-F2
gcccacgcgtccgcccacgcgtccgcatttacataggaattggatttggaggggttggaggtggtgtacgtgctgttggtggtgttggtggtntcattggtggtttcaagcatgttgaagccaacaagccttgaaaaatcaattgagttaattacgtacgtacgttcaataattccagatttgtgatgataattactaagattagtgtttcattttcacagttatggtttgctattgntaatttgctttctttctaatgtcgttttgtaccccacaaatttaaataagttcaagtatgtactaaatgcattcttcattttgcgttcatttgattgaaaagatatattccaaaa

SEQ ID NO: 22150 - DNA, 350 bp, Glycine max
  Clone ID: LIB3106-041-Q1-K1-F3
cgtccgggaagggaagcgaatcgacatgggttggttggtgacgacgctgatcttcgtagtgatcggaggcatcgcgtgcgctggcaccagaatttgctgcaacagaggaccttctaccaatctatttcaccttactttggtaattactgcaacaatttgctgctggatgatgtgggcgattgtatatctggcacaaatgaaaccactcattgtacctatactgaacgagggcgaataattctttaaacagatgtagctccttgtaagttagagaatatggttcgcagattggctgctggattgaatttgattttggctatcatgagttgttcagtattttttcagggtgg

SEQ ID NO: 22151 - DNA, 429 bp, Glycine max
  Clone ID: LIB3106-041-Q1-K1-F5
gtccgcccacgcgtccgcccacgcgtccggtgtgttgttgtaactcgttcttcttctttggtggggtgtgtttgggggtggttgttctctcacctgaaaatgtcttgctgcggtggtaactgtggttgcggaagctcctgcaagtgcggcaacggctgcggaggctgcaagatgtacccagacttgagctacactgagtcaaccaccaccgagaccttggtcatgggagtggcacctgttaaggctcaatttgagggtgctgaaatgggtgtgcccgctgagaacgatggctgcaaatgtggaccaaactgctcctgcaacccctgcacttgcaagtgaggtgttgggagagcaagcttcaagcagagatagcccttaattaggaataatgataaactattaatgtgtagctaaaaacttatgtattat

SEQ ID NO: 22152 - DNA, 250 bp, Glycine max
  Clone ID: LIB3106-041-Q1-K1-D9
ggaaaaccccggtcggccgcacacgtccgataactcttaaccttctttcaactgcttatacctacacacaaacaaacgaaaacaagggggtattttcaaaggggtgcggactcctacaaacaattaaacattaaaattagcccttcacagcatccacacacttcccaatctatatttcataatcaaaatccttttttttcaacatcacctaaaacctctcccatatctacacatcttctcacacatttta

SEQ ID NO: 22153 - DNA, 236 bp, Glycine max
  Clone ID: LIB3106-041-Q1-K1-B9
ccactcctacacccactcctccggctctttttttatcgcatttactattcttcatggggggataataatagggatagtgctacctcactttatacctctatatatatatctttttttttctcatcaaaaaaacccaaaaactctatcaaacaccaaacaacacattttttttaaaaactaaccataaaacacaaactcctcaccaacaacaatcacaaatccccttacatcatcac

SEQ ID NO: 22154 - DNA, 281 bp, Glycine max
  Clone ID: LIB3106-041-Q1-K1-C1
accctaatttctaaaaccccaattccaagtcctctgcttctccctcatggaaaacacagcggcattgcgggaacttgaagtgcttcattactacaacgccatcataccctaagccctcggagattccgtggcataaggagctctgcaactccgtcaacctcatcagcaatgtcacgacccccgtcgaaatcaaacacctcccctccggcaaggtcgtctcctggacccgcctctacgtcaagaaaagcgccacgcaatcatcctccataagcctcacattc

SEQ ID NO: 22155 - DNA, 383 bp, Glycine max
  unsure at all n locations
  Clone ID: LIB3106-041-Q1-K1-C10
aaatnaacntgctttttttcttcggtgctacaattttcntagcggggcaattccatgggtgcgagatgttccctctcccaatgaacactggctatggtgcccgtactccggaggtgaaatgcgcaagttggaggcttgctgtggaagcacataacatctttggctttgagaccattcctgaagagtgcgttgaagcaacaaaggaatacatccatggcgaacaatatacatcagactccaaaacagttaaccaacaagcttacttttatgccagagacctcgaagtccatcccaaggacacatttgtgttcagtatagatggcaccgtactctctaatattccatactacaaaaaacatggatatggggtggagaaatttaac

SEQ ID NO: 22156 - DNA, 316 bp, Glycine max
  unsure at all n locations
  Clone ID: LIB3106-041-Q1-K1-C11
gctgaacttgatagctaccctggccttatatccccatcatagcctcccncatttggcgggcattttaaaccggccaccggttccttaccaactttccgtggcccattttcatcatccgcatcctcattctcctcctttcccttgcccgttttgtccgtgcctattttaacaaacaaggtctcctcaccctctacctcttctgtattgctcttctcatcgccctcctcctcctccttctcgtcttcgcattcgtcgtcaccagacccgattgagcctattatgtcccctgaagaggctacaaagagtacaggcttca

SEQ ID NO: 22157 - DNA, 430 bp, Glycine max
  unsure at all n locations
  Clone ID: LIB3106-041-Q1-K1-C12
ccggggcgcggacgcgtccgcccacccctccngaaacagtgtgagggaaatgaanggcctggttttcttcnttnctgcggtttcttaacagggggaggccatncntacnatatgttccctctccnaatgaacactggctatggtgcccgtactccggaggtgaaatgcgcaagttggaggctttctgtggaagcacacaacatctttggctttgagaccattcctgaagagtgcgttgaagcaacaaaggaatacatccatggcgaacaatatacatcagactccaaaacagttaaccaacaagcttacttttatgccagagacctcgaagtccatcccaaggacacatttgtgttcagtatagatggcaccgtactctctaatattccatactacaaaaaacattgatatggggtgggagaaatttaac

SEQ ID NO: 22158 - DNA, 373 bp, Glycine max
  unsure at all n locations
  Clone ID: LIB3106-041-Q1-K1-C2
aaaacctgnattaattttctggaagatacttttgttcttcagcggtcaaatgcanaagtgaactacaagcaggggaatgatgatttttaaagacatnangactactttgtgaacttggccattcaacttcttactacttaccagaaagagctagggccttgtattatccatatcggaacatttatcgtgaacctcaagaatttaagtcagaggttagagatgacacccagtgcagatactgaggagtcagaagtattaagtccaaggagaaatcttgaggaggaatatttgacctatgaagccaagattattaccaccttcagtgtagtggataacataaaacagcaattttatgctcaacaggggagaattt

SEQ ID NO: 22159 - DNA, 295 bp, Glycine max
  unsure at all n locations
  Clone ID: LIB3106-041-Q1-K1-C4
ccaaaaaaaaaaaaaaaaaaagggttctcgattcgcgcttctctattaaaantgaagaccataattacgggcgggggagaatagctatttacaagtgagagaacatggggttgtcgttcaccaagctgtccatcagcttgtttgcgaagaaggaaatgaggtttctcatcgtaggtctcgatgctgctggtaagacaaccatcttgtacaagctcaagcttggagaaatcgtcaccactatccccaccatccgatttaatgttgaaactttttagtacaagaacatcagcttcac

SEQ ID NO: 22160 - DNA, 356 bp, Glycine max
  unsure at all n locations
  Clone ID: LIB3106-041-Q1-K1-C5
tcacatcagcgtttttttctaaaccaanaattcctcataaaggggaccatcaacaaggagttctgaaaacacacatcaccaatctcattgaatatatgctcttgcacaccataacctaccaaatatctcgtactgactactacacattttttacatagaaccaatgcactctgcctgataacatacatccctttaccacaattttctttccaacacctattcttatttatgtgagcacgatatacttgacaactactttcctaagcttcacaatatccatgccaatcatgattgccacaacatcctttcagaaaatcactcatccttaggcaaaatattcaacaacactagcttca

SEQ ID NO: 22161 - DNA, 248 bp, Glycine max
  Clone ID: LIB3106-041-Q1-K1-C6
attaacaataacctcactctcatcaacgtttttctctacactaataattcctctctatcgggtccatattaaaggtactcttgaaaacatatatcaaaaatctttatacatatattattctctagaccatttcccaataaatatcttcaacttactctaaaacctttttttaatgatccaaagccatcatactgatatcactcaaccctttactacacttatttttccaacacctcttatattctata

SEQ ID NO: 22162 - DNA, 192 bp, Glycine max
  unsure at all n locations
  Clone ID: LIB3106-041-Q1-K1-C9
ttccaacattttctccatttccctttattttttcatttttataattttccaattcggtgttttaattgagaagcggttttagactattcctatntctgcttccaccgtgtccatcacggccgcgaaccctgggactcttctgagacctgtcatcgcaacttataataaaacttccactaacctcgaactcct

SEQ ID NO: 22163 - DNA, 308 bp, Glycine max
  unsure at all n locations
  Clone ID: LIB3106-041-Q1-K1-D11
ccncccactcttccggattttctcnctttaacaacagaaagaaatccagggttttcttttcggtgggcgaaccaatcaaacatctcacaantccaccttcngcaatgctcctcttaatcatctcgccacaaaagccgctagaaagtcctctctttttaccttccgagtaaaaaagcctcacccttttacgcccggcaccgtttcccttaatgacatcctaaattaccataatagcacggaacttctcatccggaagctccctttccatcggctctttctctacatcgcacattatttcaaaacctatt

SEQ ID NO: 22164 - DNA, 366 bp, Glycine max
  unsure at all n locations
  Clone ID: LIB3106-041-Q1-K1-D12
gtattcaaattacattgcaaaaatggggttattcaccatgacagcttctatctttggggggccatctgtcgggggggcgggcggcattggctgctcanaggagattactcgtagtgagtgctgccaaagctgaaggggaaaaggtcagttatgacaacaatgatatctttggaaggaggaacttgatgttcgctgtggctgctgctgctgttttctctgttgctgggatggcagtggcagatgagcctaaaccaggaacctcagaagccaagaaaaagtatgccccggtttgtgtcaccaatcctacagctagcatttgtcgcaattgaggatctcctgtttcattttacctctgatgatcggaaa

SEQ ID NO: 22165 - DNA, 401 bp, Glycine max
  unsure at all n locations
  Clone ID: LIB3106-041-Q1-K1-D2
gcgtccgcccacgcgtccggcttcaacttgctcgctcataagcgaagaagaagccacananaaccaggcgcctactctctgtggccacaggaaaaatggcatctcacatcgttggatacccccgcatgggtcccaagagagagctcaagttcgctctcgagtctttctgggatggcaagagcagcgccgaggatttgcagaaggtggctgctgatctcaggtcatccatctggaagcagatggctggtgctggcatcaagtacatccccagcaacactttctcgttctatgaccagctgctcgacgccaccgccacccttcgtgccgtcccccccaggtacggctggaccggcggcgagattggattcgacacctacttctccatggccaaaggtaatgct

SEQ ID NO: 22166 - DNA, 191 bp, Glycine max
  Clone ID: LIB3106-041-Q1-K1-D3
cgtaaaaaattaaaatccatttttaaaaaagtatttaaatatataatttgctgattttaaaagagggtattttttaaaattttctttaaatgtatcttacgataatgtgcaggcgcgtttggatactacgaggttaaggagatgcgctacctgcattcttcgatttcggagacgatgacgttgtaccctcc

SEQ ID NO: 22167 - DNA, 368 bp, Glycine max
  unsure at all n locations
  Clone ID: LIB3106-041-Q1-K1-D4
cccacccctccaatatgcttcaatcaaggtcatagaaaccgggtctantactnatcatcggcggtgtctgactgattgggttctctattcattcatcacactcttcnagctcacatttgccaaagttcttgaagtgcttgccatatggccctatgccaagttgatacttacttgctggttggttctaccaaactttaatggggcagcacatgtttataggcactatgttagaccattctatatgaatccacaaatgcctcaaatgcctcaaatgcctcaaatcccangaacttctcaaatgtggtatgttcctagaaagaacatctttagtaagcaggatgatgtccttactgctgcttaaagataca

SEQ ID NO: 22168 - DNA, 451 bp, Glycine max
  Clone ID: LIB3106-041-Q1-K1-D5
cgtccgctaacaagaagctcgatttggtcaatggtgtgctcttcactggtgggtgggctgtttgtggtccatatttggagactctgggaaacatttttaagaaagctttagagaaaaatgatgctggagaccatttcccagtaattgccttcaacttaggtggaaacctcgtaataaggatcgtaagcgagcaaactgatattcttgaaccatttactgcgtcgagtttgccaagttctcttatattgtggaaggaagcaaatgctaaaggaagtctatttcaaagatttccttcagatttgttgacacagctgaagacagattgtctcgtcctgcacaatcatcgttatgccatatccccacgcaagcttcaatataataccaagttatctgacttttttgagattcttgcaacatctgaagatagaaatggaaaaactttccttttcac

SEQ ID NO: 22169 - DNA, 450 bp, Glycine max
  unsure at all n locations
  Clone ID: LIB3106-041-Q1-K1-D6
gtccgcccacgcgtccgctttgttcactcttgttttcttgcggctagggttttagcgcancttggggtacatttaagggggatgggtgaggaaaaggttcacatcagtattgtggtcattggccatgtcgactctgggaaatccactaccactggtcacctgatttacaagcttggaggcattgacaagcgtcttattgagaggtttgagaaggaagctgctgagatgaacaagaggtctttcaagtatgcctgggtgctggacaaacttaaggctgagcgtgaaagaggaatcaccattgatattgctttgtggaagcttgaaacaacaaagtattattgcacagttattgatgcgcctggacatagggatttcattaagaatatgattactgggacatcccaagctgactgtgctgttcttatcattgattcgaccactggtggtttt

SEQ ID NO: 22170 - DNA, 402 bp, Glycine max
  unsure at all n locations
  Clone ID: LIB3106-041-Q1-K1-D7
actcaaagatgtnattcttcntggcggcctttttagcggcgtgatcagcgtaatctcctctnntaaaanttaanggaaacgtggctcagtgcgtatgggctcctatccttgtggtaaaagtgaagattatgtctaaaaaatgtatgtcaaacacaccttgataattaaaagtgctacaatctttaaatgcacctttcttactagcatttcttgacctttcccaattatgaattccaattttcaaacattttatcttatggattttcttctttttattcattaacaatttataactctttaattattcaacttatttattcttattttgttaaaattgccattttaaaacacaaaaaaatttaaatcattgctttaattgctcgtcttttcatttttcttctt

SEQ ID NO: 22171 - DNA, 224 bp, Glycine max
  unsure at all n locations
  Clone ID: LIB3106-041-Q1-K1-D8
tcattcatatatacctncaaccatattcaaatattctttcttaatctttcttctcctttctttaatctattttttttatatcaaatactaacaaaaaaattaacaaaatcaattcttattccaaactttccttatttttcttcatactatcactcttcttcatcatcacaactactttcaccaccaatccttctttatattcaatcaaatttctcattttttcc

SEQ ID NO: 22172 - DNA, 349 bp, Glycine max
  unsure at all n locations
  Clone ID: LIB3106-041-Q1-K1-B7
caacaatggcgcacatattagcaggggtgatcccatccaaaatccttctctncccatcatcactccacaccttacctttcttccaacccccttctccatccttctcattnctttttttactctcttctcttcttaaaatctatncaacacttatcnccatccccatcccnaataccntcccaacataantncctcctaccttnatntttttcatttccatttatcaataattaattnacttcttcacttccttcttaacantattattttttattcttttccaattnccttcctcattacaacatctatcancttaataacaatccaaaattcattttcttaccacaac

SEQ ID NO: 22173 - DNA, 355 bp, Glycine max
  unsure at all n locations
  Clone ID: LIB3106-041-Q1-K1-A11
ccacccctccgctanattcaaccggagttggaaaaaaagaaaaaacttcttctaaatggggcgtactaaggagggcgggtcgtaagtccacangaggaaaggcacctangaagcagctcgcaaccaaggctgcacgtaagtctgcaccaactactggtggtgtgaataagccacatcgttatcgtcctggtaccgttgctcttcgtgagattaggaaataccagaagagtaccgagcttttcatcaggaagctccccttccagaggctggttcgtgaaattgctcaggacttcaagactgatctgcgtttccagagccatgctgtgcttgcattgcaagaagctgctgaggcata

SEQ ID NO: 22174 - DNA, 351 bp, Glycine max
  unsure at all n locations
  Clone ID: LIB3106-041-Q1-K1-A12
ccacccctcctaaaagcgaaagcggtcttccattgaacaacctnccccttttctccggcggtttctgacaggccgaccccttcantctttctcngctcttcattcaaacaaaccctctcactctctgcttcgcccctcttctaacaaaaacagaacctttttctctttcacttcgaatctgaggtgtgacatcaaaggctttgacttctatagccaccgttgttggaccatctagcgcgtctccgacatgagcaaagactccaccaattctcacaccaacccttcttctccgttgctctccctcttccctgtcacctcctcctcccaattccccaccaaaaatgccaaaaa

SEQ ID NO: 22175 - DNA, 276 bp, Glycine max
  Clone ID: LIB3106-041-Q1-K1-A2
cacaatctctttcacttttttgctttcttgttaggtatcttagctgtctttttttttttaaactttcttttgccatatttcatattcaaatttgcgtcggcaggtagtgttttcattgggctttaccgttgtccatcacaagtgaagtactttactttttgatttattgaaataccctctcctattactactacaactttttatagattttgagtcccatttgatattttactggatttaccaagtagtacattctcaataaattgaatgaggatt

SEQ ID NO: 22176 - DNA, 321 bp, Glycine max
  Clone ID: LIB3106-041-Q1-K1-A3
ttttagaatttcctaaaaataacataaattttaggggaaactaatttagatataaggtattctaaacatatacttgtaaagaaggaacgatgtaacgttctagtgaaatattttatactctaaagaaatagctatatataatactttgaatttaattagaatataaatgacattcaacatgattgatagataactgagcttttaaaatatcttgtagaagtatgcttccttttttcggttaagggaatatccttcgaaaaaaaaaaatatgaatttaattgtatgattattgattttttaaaatattttttttctaaacca

SEQ ID NO: 22177 - DNA, 369 bp, Glycine max
  unsure at all n locations
  Clone ID: LIB3106-041-Q1-K1-A4
cgtacgcccacgcgtccgctcgtgcatgtggatggttcatacggcatgaatgtttttgatttggtcgagtgnaataggcaggacatcagcgatgtgtaccacaaatggcaaaagatgaatcatgatagacaactatggaagttaggaacactgccgcctggtcttataacattctggaaacgcactttccaactgcaccgatcttggcatgtgttgggtcttggctataaccccaatatcaaccaaaaagaaattgaacgggctgctgttatacactacaatggaaacatgaaaccgtggctggagataagtattcccaagttccgaggttattggacaaagtatgttgactacaatcttgtgtattta

SEQ ID NO: 22178 - DNA, 396 bp, Glycine max
  unsure at all n locations
  Clone ID: LIB3106-041-Q1-K1-A5
caacctttgaagatggtaaccactgatatgacgaccttgagccaatttacttttgcaatggggtttgtaatcaggggccggttaacggtancagttctgtgtgttaattataactactgtcccacttcctgctcggcatggggagaagttgtatttctaatgttgatcccatagtactaggtgattgtggaaagtaactaggacggccaagaaacatcagaaactcaactaccactgttcggtttagttgtagaaagacttactgcgtttacattatatgcttatcttgggatcgaattgaaggaaaacaaaaagagaaaaaaaggttntaaaaaataataaatttaatattttttattatatataatttattattttttataataatttattttt

SEQ ID NO: 22179 - DNA, 195 bp, Glycine max
  Clone ID: LIB3106-041-Q1-K1-A6
tataccttaccctttctttcgcataacctatgcaacatataacaatcgcgccccattcaaagaacaatctccactccaaccaaccaaacgaatcaatatcaaactatttcttaactctctatctccacttccacttagcttcttttcatcctaacacaattactatccatcaactcatgacctcactctactcaa

SEQ ID NO: 22180 - DNA, 331 bp, Glycine max
  unsure at all n locations
  Clone ID: LIB3106-041-Q1-K1-A7
taccggcggctacncaaaactaggtgctcaatttccgaggagctggttgcttctcttgaccaggcttttcttctacttgacttgcatacttgatggcgtcaaacttgcagaagttgcagtccgcagcatgtcaagcatctcaatttgtatccagtcgtggaactaactactacaggcaattgctggaacagaacaagcaacacattcaggagcctcctacagtagagaaatgcaacctgctggcaaagcaattgttttacacccgccttgctagtattccgggtcgtaatgagtccttttggaaggaacttgattatgtcaagaatttatg

SEQ ID NO: 22181 - DNA, 385 bp, Glycine max
  unsure at all n locations
  Clone ID: LIB3106-041-Q1-K1-A8
ggtcatatacacctttcaaacactttggctcgaagatgcttgcctggaaattcgtaaaagggggcaacattgacgtgggtactattaacccancaatcgtgataggacctctcttgcaaccagtccttaacacaagtgctgcttcaattttaaacataattaatggttcataaacatttccaaatgcatcttatggttgggtcaatgtcaaagatgttgcaaatgcccatattctagcatatgagaatgcttcagctaatggaaggtattgtctggttgacagagtggcacactactcaaaaattgtgaaggttttacctgatttttacccgacattacaacttccaaaaaagtgttcaaaatataaaccatatgtgccaatata

SEQ ID NO: 22182 - DNA, 254 bp, Glycine max
  Clone ID: LIB3106-041-Q1-K1-A9
gagcaataccctgacaaaaccaactgccaaaaactctgctaggaacttcatctaagggggctatactcctgggggacctgggaacatacctccttttttctaaaaatcatcttcctcatctctaccaactaatgctccaaccatctctaaacataaaatatatattcccacaatctataagttcataaaatacctgtgccaaatgcatatacattacctatacccatataacaacctttcgaatcattcatact

SEQ ID NO: 22183 - DNA, 359 bp, Glycine max
  Clone ID: LIB3106-041-Q1-K1-B1
caagccaggtaagcacaaccaaagcaacattccaaatggcttcagcttctgttcccagggcgttgtcactgagcggctgttaccaacaacaacaagccttcatccgaagccttcttcaggccactacccctacgccaaccaaagaggaccctcttcaccacgaatgcattgtcaaactccaagcctcaaatcaatgcatctttgaaggagaaggcagttgccggactcacagcagcttctgtgacagcatctatggtggttccggaggtggctcatgctgctggatatgagttctccccttccctaaagaactttctactcagcatctttgcttgtggggttgttctaacaaccatatt

SEQ ID NO: 22184 - DNA, 213 bp, Glycine max
  Clone ID: LIB3106-041-Q1-K1-B10
agccatcgtactctcaagtggcaagcgttatctgcctgactatgtgttaggcataaggggtggataatcgggggggtgtatgtcattgtcgtatttctcatctgttcttatgttttactatgtgatgtgcgattatggatttcagaacattgcgcgttattttctttgaagacaaatatgaaaacacttcaatggacctcccaaagaaccaac

SEQ ID NO: 22185 - DNA, 269 bp, Glycine max
  Clone ID: LIB3106-041-Q1-K1-B11
ttccaacattttctccatttgcctttattttttcatttttataattttccactgcggtcttttaatggagaagcgcttttatactattcccatttcttcttccactttgtccatcactgctgcgaacccttgtactcttcctagacccgtcatctcattttataagaaaactgccactaacctctaactcctcgccaacgacgtcgtcttctccccttccttctccacttccttaaactgctccacctttctctacctcatccatcact

SEQ ID NO: 22186 - DNA, 402 bp, Glycine max
  unsure at all n locations
  Clone ID: LIB3106-041-Q1-K1-B12
ggttgtgagctataagctagtttatggtgaggagaatatgaagttgtttcttttcttgggtgctgcattagtggggggggcatgcccatgccatggcgcangctaccaaaggttccctctccgaatgaaaactggctatggtgagcggtcttcggaggtaaaattctcaagttttaggcttgctgtggaagcacacaacatccgagcctttaaaaccattcctgaagagtgcgttgaaccaacaaaggactacattaatggcgaacaatttacatcagactctaaaacagttaaccaacaagctttcttttatgctagtgaacgcgaagtccatcacaacgacatatttatattcggcataaataacaccgtactctctaatatcccatactatgaaaaaca

SEQ ID NO: 22187 - DNA, 355 bp, Glycine max
  unsure at all n locations
  Clone ID: LIB3106-041-Q1-K1-B2
cttacactgttntactgtttgaggttatttanaaagcccatcctnatntnttcagcatgattcttcagagcgtggaagatgtaaaactaacanacantaangncanaacantgtatttcaagaacacacttcttataattacatcaaatgttggaagcatttttatttagaaaggaggccacaaaattggatttcatctggattacgatgagaaggatagcacttataacataatcaagagcctggtaactgaggagctaaaacaatacttcaagccagaatttttgaatacattggattaaattattttcttcattcatctcacaaaacttgaagttaaggaaatttcttacat

SEQ ID NO: 22188 - DNA, 446 bp, Glycine max
  unsure at all n locations
  Clone ID: LIB3106-041-Q1-K1-B3
gttttcatcgaggaataaaggcaagctctatttttagccaagtgaaacatctatcttcctggcgtaanttctttgggtgaaagtctgaatgtgtcatctctatgctacaatgtttatgattcacatcaggttgattctatttgtttgatggccatcttgcacgtccttatcttattgtgttcaagtgacggacaaatccaaacaggaaagagagattgaaatgtaaatgccaagtaaatgtgaaaagtacagtccatttttagtcatctctttaatttatttgttcatagattaatatggtcgtgtatgattgcttttctatttattgtggcatttttgtgttgtaccctgttgttgtgtttgcaataattattagtaataaagcagcaaaatcaatttttgttcatgcatccnnnaacaaaaaaatttangaccatattatttta

SEQ ID NO: 22189 - DNA, 256 bp, Glycine max
  Clone ID: LIB3106-041-Q1-K1-B4
ccacacttccgcccacacctccgcccactctttctctgacgcttatacttaaaatcacggggtctttcataggatggattggactatcattttttaatacaaatctaacgtgttaacttcttttctgtcaattattgtgccccaaaggcttgcccttatcctctttttctcaatcttcctgcaaaaatatctttcaagtcacacacatttctaaataacatttaacatgcaccaatagctccaatattttcttaat

SEQ ID NO: 22190 - DNA, 286 bp, Glycine max
  unsure at all n locations
  Clone ID: LIB3106-041-Q1-K1-A10
tatatggaaaaaacccccaactttcgtgaacttaaaaagggcccacggtctattcaccatcccanttanacacaacctctcccattccccaccatctatatctgtttacataagcgcaaatcacttcatatctttctttctttacattttccaaattttaattttccttttcacttgttcctcttatattttccataaacataaattcaccttctttcttaattataatttcttgccttttatccttattacatatcttaatatcttctgtaatttcataatttta

SEQ ID NO: 22191 - DNA, 361 bp, Glycine max
  unsure at all n locations
  Clone ID: LIB3106-041-Q1-K1-B5
catcattccttttccctctttctttcggcttangccggtggcagcatantaccaagcgcggagcacaatcaaagagcagatctccactccaagcaaaccaaagcgaatcggagattcaaactcagttcttcaactctctcatctccacttccacttcagcttcttctccatggctaacgacgattgctgcaccacgcaactcatcgactgccactgcgagttcaacgtctccggcctcgacagcttcatcaggaccgtcaatctcgcctcctgcggcctctcctacgccgtcgtcgcaatcatgggacctcagagtagctggaagagcacgttaatgaatcatctcttccacacaagtttc

SEQ ID NO: 22192 - DNA, 399 bp, Glycine max
  unsure at all n locations
  Clone ID: LIB3106-041-Q1-K1-B6
ttcttccttcatttcatactcgctgacaaaacccgcgtcnacngtnaccaatcgctgcatcaaacatggacaagagcatgctannccatttagattcactccctgaggctgataaacaaagaatgactgtcatgatccatcagctccaaatccgtgacattctgagaatgtataattcactgcttgagagatgctttaatgattgtgttgacacatttaagcataaatccctgcaaaagcaagaggaaacctgtcttctaagatgtgcacagaaatttctcaagcattctatgctggttcgcattacgtttgccgagctcaaccaaggagcttctacacaacattcatttctgtttaacttcttccaatggaaaactttaatttattattcgtattatt

SEQ ID NO: 22193 - DNA, 412 bp, Glycine max
  Clone ID: LIB3106-040-Q1-K1-G12
cccacgcgtacgattaaaaccagtgatgatcgacgaatgctgataatcgatattagatgggaaaagcaaaacaaagatataaataaatagagacaaagaagacgcgattgataacaagaagggtctgatacacactctctctccgtcgaaaaggccgcttcttcttactcttccgacgagccttctcgctctgtattcctcggcgtcgacgtcggcaccggcagcgctcgtgcaggtctatttgacaaggaaggaaagcttcttggttcatctagcaacccaatacagatatggaaagatggtgcctgtgttgagcaatcctctacagatatatggcttgcagtttgtgcagctgtaaaagcagcatgttctaaagctaaagttgcataacagaagtaagggtatgggattt

SEQ ID NO: 22194 - DNA, 391 bp, Glycine max
  Clone ID: LIB3106-040-Q1-K1-G2
cccaagctgaggaagaaagaacctttcttcgctatagtcagtgataccgagccgtcacctgcattgattcatgccttcatggggaacactggcatggaatgctctttaatttatgactcgctcttagaacgttgctgctgattcttgattgctttctatctcaactttacgtctgaagtgtcttctgagcaaggtgatgggtctggaaaagaatcctcgtgtgtttttcgatgtctcaatcgacggagaccctgtggaaagaattgttattcagctctttgccagtatagctcctacgacagcggagaattttcgggcactttgtacaggtgagaagggcattggagaatcaacggtgaaacctttgcattataaagggacaagccttcat

SEQ ID NO: 22195 - DNA, 213 bp, Glycine max
  Clone ID: LIB3106-040-Q1-K1-G3
gccatacttatggagactagcaatttatatcccatagactccctgaatttctacaaaagtgcaatgatttatgcatgcatggggaacactgacttggaatgctactgaatttatgactcgatcttactacatggctattgcttactgagtgtctaagatatcaactctacgtctgactactgtattgagataggtaatgtgactggacaagaa

SEQ ID NO: 22196 - DNA, 306 bp, Glycine max
  Clone ID: LIB3106-040-Q1-K1-G4
gccacgcgtacgaaattaggtcattctctttgcacagttgcatacctctcctttcaagatgcagagctttgtcaagaccctggccggacagaccatcacccttgatgtggaaagctctgacaccatcgacaacgtcaaggccaacatccaggacaaggaaggaattccaccggatcagcaacgtctcatcttcgccggaaagcacctcgaggactgccgtaccctcgacgactacatcatccagacggagtcaacccttcaccttgtacttcgtatccgtggtggcatgcagatcttcgtcaagac

SEQ ID NO: 22197 - DNA, 356 bp, Glycine max
  Clone ID: LIB3106-040-Q1-K1-G5
gccacgcgtccgcaaaagtaatatgcccttatgcttgtatgaaggaggctttggatgaatgggtcagaagacaaactcgactgcactccaaaaaggatggggatatgagtaggttgtaaatttgtaatagcgtgtttggttccacatcacagatttgttttttcacgcttagtcagaaactaatgcttacagctctttcacataccaaacgtgatttctcacttctcaaaaaaattccaaacatgcacttagtgtcttgctcttggactctacatagccggagagcagatgcactcataagctgattgtagggcaagagacattaagtctagtcatttagaggagggaaagtgcag

SEQ ID NO: 22198 - DNA, 188 bp, Glycine max
  Clone ID: LIB3106-040-Q1-K1-G6
attaggcctgcatacttgtaaagagactatagtagcatatgaaattgaataccgatgtgctcttgaggaaggagcatggcctgtagtcagtgccatataagccatatcttcattgcccaaatttaataaatggatgtattttatatgacacttaaagagaagtacgcttcctttaattactaaataaa

SEQ ID NO: 22199 - DNA, 260 bp, Glycine max
  Clone ID: LIB3106-040-Q1-K1-G7
cccacgcgtccgaaagaaccaaacttcatctcccaaaccttcatcgggcacaagctggttggctcatgctcaacagggcctagcagctttggctatctccttggcactcaactttagcccagttttgtttaatggcaatgcattggcatctgagtttgatgtgcttaatgagggtccacccaaagattcttatgcgtttgatgatgcaagagtgcttagtaaggtgaccaggtctgatttaaagcaatttgtgtctgatt

SEQ ID NO: 22200 - DNA, 284 bp, Glycine max
  unsure at all n locations
  Clone ID: LIB3106-040-Q1-K1-G8
cttattcagccactccgcacctcgcagcctctgtgccctcaacaaccatggctganatcgaaactaccgttccagatgccacccaaatcgacgtctaactcttcaatcgctggagcttcgaggatgttgaggttaatgatatgtctctggctgattacattggagtgtccccatcaaagcatgctacatatgttccttacaatgctggtaggtactcaatgaagaggttcaggaaagcgcagtgccccattgttgagaggctcaccaactctctgatgatgcac

SEQ ID NO: 22201 - DNA, 232 bp, Glycine max
  unsure at all n locations
  Clone ID: LIB3106-040-Q1-K1-G9
gccacaatcaagataagacacttgtggagaactcgtgctatagtgttccatatgtgtgaggtgcagccacaagagaagatatatattattatcattacatagacacactntattcttcaaagttcaccaaaatattgtccaccccattatttgtcttctcattctcatcactaacacacaagtgtgtgttgtagatttctcagcttgcaacatggcttccatcatcatgtca

SEQ ID NO: 22202 - DNA, 292 bp, Glycine max
  Clone ID: LIB3106-040-Q1-K1-H1
aataaagtaagccttgccggattacatgattaaggtaaagcagcaattttggagattgaaacaaagagctacgagaaagaatctggtgatttattgtgcatgaacaggacaactgtctttctacggggttctggtggcttctcaaagtcatctaagccattttcttatacaaactaccctgtgaatcagaatccagctgtgaaaattcctgaaagtaaacctttttcggtgtttgaggatcgaacccaaccatctcaggcattgctctataggctatctggtgattacaatc

SEQ ID NO: 22203 - DNA, 334 bp, Glycine max
  Clone ID: LIB3106-040-Q1-K1-H10
aaaatacacacaattaactacttttactttctatggctatcaacaaacttcaggacaaggtttatgagctttgagtgcactataacccaacaataaataatgccatttgcccaccatcaaatgcttctcaaaagcccacaccaccaactgcaataccaacagttcatcataccaattgaccacaccagccactcgaaagacgacacgacctactcttcagcacactcaacccacaccaaatcccacactcacctactccaaaacctacgtttccatctcctatgctttcttcatcatcatcaaacaaagcctcatgcccaacagacacattaaa

SEQ ID NO: 22204 - DNA, 295 bp, Glycine max
  Clone ID: LIB3106-040-Q1-K1-H11
actacaaaaaacatggatatggggtggagaaatttaactcgaccttgtatgatgaatggggtaacaagggcaatgcaccggcactgcccgagactcttaataattacaacaagctggtgtctcttggcttcaagattatattcttgtcaggaagaacactggacaaacaggccgtaacagaagcaaacttaaagaaggctggctaccacacatgggaaaaattaattctcaaggatccacaagatcctttcactccaaatgcagtttcatacaaaacagcagcgagagagaaact

SEQ ID NO: 22205 - DNA, 308 bp, Glycine max
  Clone ID: LIB3106-040-Q1-K1-H12
gccacgcgtacgattaaattatgggacatttatcaatggttagtgcaaaacaggaaagaggaaagctggtgcacggttactgatgaatctagaaagacactacgctaaacctgatttggtaatgtacactacaagcatttattgcttatgcaaaaataaacttctaggagatgccacgagatttgtactcttagatgattgataatggaaattccccgaatgttctcacctacactactctgatacatggatatggcatcatgggttatttgaaagaagcattttcctagttgaatgaaatgaacctg

SEQ ID NO: 22206 - DNA, 236 bp, Glycine max
  Clone ID: LIB3106-040-Q1-K1-H2
aacaaacgttggagtacagagtcacatgttaaaaaaaaaggagtaactttggcgatagatgcaaagagctacgcattcatagggggtgctttattggactggaaccggaccaactgccttcttccaaggtcttggcggttgctcaaatgaatctaatgcaattaattatcaaactaccatgtgaattataatccgtgtgtgaaaattcctggaagtcaacctctttaagcgattta

SEQ ID NO: 22207 - DNA, 264 bp, Glycine max
  Clone ID: LIB3106-040-Q1-K1-H3
gccaaacgcacggactcagatcagctgtatcatagaatgaaacttcatataacgcaagatgcgaagagctaaacatgcatagataccgctttttctatcgataacagatctaatggatatatgcagcatcataaggatccattaacgcggttttgaaccgatacaataaaaactgcttacttatctcatgatagctaagtcacgaatccactaatgcaataacgtagagccatcgatcatttgagcagagctgtagtatcaaat

SEQ ID NO: 22208 - DNA, 428 bp, Glycine max
  unsure at all n locations
  Clone ID: LIB3106-040-Q1-K1-H4
gaagaagctatctagccatggcctctaagtgtgaaagttggatgactttgggttcgttgattgctatttcgttctcaagcatgcatatggacatggcattcgcagcatggaatctcctgcagacagaattgatacctgagctgcagccagtagtgccacctgccatacagcctagagagatagacatctatgacttgccgacactgctaccagtaccatcaccaccaattacccttcccatgccctaagcacttggatttggattcataaataatcactcatgtccactctccattttcattcagttccctggtgttattgctgctttcaataagtgatcttttttcacatatgncttgatcaatttcttctgttacacatgctntgagacttttcaatcttcctttgcactttttcatgtacctgga

SEQ ID NO: 22209 - DNA, 377 bp, Glycine max
  Clone ID: LIB3106-040-Q1-K1-H5
gtactactacaagggaagaaaaacttagctactaaggaaggatcaaagagaatggctcaagcaatggcatcaatggctggcttgcgtggttcctctcaggctgtgttggaaggtagccttcaggtgagtggctccacacgcttgaatgtggggagtggaagcagggtggcctcagtcacacgtgcagggttcacagttagagcacaacaacaacaagtgagtggtgaggtacaaagcaaccgtagggcagtgctttcacttgttgctgctggtttggccactggctcttttgttcaagctgtgcttgctgatgccaaatctaataaagttggaccaccttccccaccttctggtggattgcctggaacgttgaactc

SEQ ID NO: 22210 - DNA, 220 bp, Glycine max
  Clone ID: LIB3106-040-Q1-K1-H6
gttgcgtgctggaaggcttgatcgtaagattgagttgcctttgcctgatagacgtcaaaagaggctcgtatttcaggtttgcacagtcaagattaacttgagtgatgaggtagacctggaggattatgtttctcgtaccgacaaaatcagtgctgctgaaatatcagctatttgtcaagaagcttgaatgcatgctgttcgcaagaatagatatgtcata

SEQ ID NO: 22211 - DNA, 416 bp, Glycine max
  Clone ID: LIB3106-040-Q1-K1-G11
agcagaacaaggatcagtggcttgctcattaaattacaggaccttgtacccagtatggaggagcaaacaagctatgcggacatgctcgatttggccgttcaacacattaaaggtcttcaaactcatgttcagaagcttcacaaagaaatggagaattgcacttgcggatgcaaacaaagcaaataacttcttttttttacgagattctatagcaacgtgcatagaagtcaaggttttgatggcaaagattgaaaactgattttgtaccgatctacttaaatgaataatgaaggaactgaaactttgtaggttgtcaatgctacaattgtacagtgtatgttgtaatatggcagtctagaaaaatttcttcgttttcttcaagaattggctacaaagtccatgctgattttactatt

SEQ ID NO: 22212 - DNA, 59 bp, Glycine max
  Clone ID: LIB3106-040-Q1-K1-H7
gttacgcgttcgaacgagtgatatttaaattgtaaagcctgaatctggtttacggtgaa

SEQ ID NO: 22213 - DNA, 53 bp, Glycine max
  Clone ID: LIB3106-040-Q1-K1-H8
ggatcccggtcgaccacgcgtccgccacgcgtccgaaaaattgatatttaatt

SEQ ID NO: 22214 - DNA, 308 bp, Glycine max
  Clone ID: LIB3106-040-Q1-K1-H9
gtggtttcagtgagtgatcggtgttcacttgatccttcataagtcgtcatcatgatcatgatcatcaccgttgattgaagaaaatgccgatcagaaacatcgccatcggaaggcctgaagaggctactcaccccgacacgttgaaggcggggttggctgagttcatctccaccttgatcttcgtgttcgccggttcaggttccggcatcgcctacaacaagctcaccgacaacggcgccggcactcccggcggcctcatcttcgcttccatcgcccatgctttcgccctcttcgtcgccgtctccgtc

SEQ ID NO: 22215 - DNA, 337 bp, Glycine max
  Clone ID: LIB3106-041-Q1-K1-A1
ccgcggtgaaagttaaagaaagagaaaaaggcttttttcttcttttttttttcttttttgttggttgctcttgttctgttgtggagggtactgaggaagaaagaccaagactttatccgtgtgcttcacttagctcaagagcgtacaattcaggcaaaggcccttgagtcggagtgtgttaaaggtttcttaggagttgctgctgtcctgactgaagaaatggaggtatatggcaaatctatggttgcaggtcctgcaaatgttatttttctgtcaagtattttgggccaaggaagttccgattcctggtcacaaatgcgactggaaatgtcaaaat

SEQ ID NO: 22216 - DNA, 438 bp, Glycine max
  Clone ID: LIB3106-040-Q1-K1-E10
cattcgttcacctcctcaacctctgcagcgccttcgatccagaaaacatgactaagagaacaaagaaggctggcattgttggaaaatacggtacccgttatggtgccagtctgcgtaagcagattaagaagatggaagttagtcaacacagcaagtttttctgtgaattttgtggaaagtatgctgtgaagaggaaagctgtgggaatatggggatgcaaggactgtggtaaagtgaaagctggcggtgcttacactttgaataccgcaagtgccgtgactgtacggagcaccatcaggaggttgagggagcaaactgagagttaagcttttttgttgatgctatcaattactattagacttttgatgaagtgcctagtttgtattcactgaactgcattggttgtattcaaagtaaactccttaagtttaattttga

SEQ ID NO: 22217 - DNA, 149 bp, Glycine max
  Clone ID: LIB3106-040-Q1-K1-E11
gtttgttgggagctataagctagtttatcgtgaggagaatatgaagttgtttgttttctttagtgctgcaaaaagtttggtagcatggccatgccatggcgcaggctaccaaaggtttcctcttcgaatgaaaactggctatggtgagc

SEQ ID NO: 22218 - DNA, 334 bp, Glycine max
  Clone ID: LIB3106-040-Q1-K1-E2
cccacgcgtccgaccacgcgttcgatgattttgaaacgtggtcttagtggttcctcaggggacaagttccgcacatggatgggtattacagtggctgatactgacaactgcgctgtcaccactgaagctaataacctctacttcattaaggtgaatgggatcaaaggccgcttgaaccaccttccgtctatctgcgatggcgacatggtgatggtcaccgcgaataaagcaaaacccgatctgaggaagaaagtcttagcaagtgtcatccttcgccaaagcaagccattgcgccgaaaggacagcgtctacatgtactgtcaagataatgctg

SEQ ID NO: 22219 - DNA, 200 bp, Glycine max
  Clone ID: LIB3106-040-Q1-K1-E3
cccacgcgtacgaccacacattccttcactatacactacgggctgactcattccttatggggcaacttgtgaacatggatggccactactgtgatcattgctgacactagctctgtacctactaaagctcatgaccttgtcttatatcagtatcacaggtacccaccctgaccttaaccaccggccgcctacacgccaat

SEQ ID NO: 22220 - DNA, 379 bp, Glycine max
  Clone ID: LIB3106-040-Q1-K1-E4
gtcacgcgaccgtgcgatcgtgatccggacatggaggaacaggcacctgccatcgacaggtcatgatgaatgaaaggaaacacaagcctgtggcaggtattcttgacctaaattcatgcatgaacgaggatgacaatatgccaattgatattgatggacaagcacctgtaagtccagaaaacaaggagtgttctacacccacaggagaatctgacgaagaccagcttgagatgctcttgcaattggcaggtcaggagcacgagcaggaacaggaacaggagcaggatctggaagaacaagacgaccaaaccggaattgcagctgatgcttcggttaccatatcacaaactgtggcctatgatgaccttcatatgacaac

SEQ ID NO: 22221 - DNA, 460 bp, Glycine max
  Clone ID: LIB3106-040-Q1-K1-E5
acgggaaggcctgcacttgcaccaatcaagataatcgcttttggctggcatgctcgggttttacaacacgagtgtgatcacttggatggaactctgtatgttgataagatgctacctagatctttcaaaactgttgacaacatggaactgcctgtagcccaagggtgccctaaacttgctcctcgctaaaagtacactgcagctagttatgataacgcattacatggcggtatctaatgcattttagcgaaccattgacatttggagatcctaaaatggaaggcagattctttacattctagaaataatcttaacttaagaaaaaatgaatcttccttaattttcaatggcactatttcgtccaaaattggcattgcactacttctgaataattcaattcatttaagcttcaatggtcgaacttatactcgaaaaaaggaatcagaagtgtggactattg

SEQ ID NO: 22222 - DNA, 218 bp, Glycine max
  Clone ID: LIB3106-040-Q1-K1-E6
gccacgcgttcgctcgtgcctctagggttatcatatcttcatttccattttctggctctgggtttccaagaatcttaagctatgggaaagtcttacccaaccgggagcgctgattaccacaagggcggtgagaacgccatgaagaagctcagaggctttatcggtgctaagagatgcgcttctctaatgctccgtttggcatgggactctgctggaac

SEQ ID NO: 22223 - DNA, 405 bp, Glycine max
  Clone ID: LIB3106-040-Q1-K1-E7
ccggttccaattcgaggacgcctacgcgtacggactcaaaaatggaatggatcattttataatgatagcattggtatgcctaatccgcaaaggaccaaaattcggtaaccacttttaggaagaatgaaggaatatccctataagggataatattgccttcgaagatatgctataaacacttgacccacttggataacatctagacaaataaaaccggtacggcgggcaatgtcacgaaatgttcgccgaggtggacaaatatgggtacgcatatttccagacaaaccggtacagtaagacctactgaaacacgtaatggtttcaggaaaaaggttctcccgaatattgggtagctgtcgttaaacctgggaaaatactttatgaaatgggtggggtaccagaaaa

SEQ ID NO: 22224 - DNA, 333 bp, Glycine max
  Clone ID: LIB3106-040-Q1-K1-E8
aaacaaccatggtgcacgtctccttttacaggaactatgggaagacattcaagaagccgggtcgtccgtacgagaaggagcgtctcgacgcggagttgaagctggttggtgagtacgggcttcggtgcaagagagagctgtggagggtgcagtacgcgctcagccgcatccgcaacaacgcgcggaaccttctcaccctcgacgagaagaacccgcgccggatcttcgagggagaggcgctgctccgaaggatgttccgttacggtctcctcgatgagacacagaacaagcttgattacgtcctcgccctcaccgtcgagaactttctcgagc

SEQ ID NO: 22225 - DNA, 87 bp, Glycine max
  Clone ID: LIB3106-040-Q1-K1-E9
ttcatttccattttgtctggatttcaatcttttatttgtaatgaggaaatatgagttcggatttttatattattgattttaatgcgt

SEQ ID NO: 22226 - DNA, 124 bp, Glycine max
  Clone ID: LIB3106-040-Q1-K1-F1
gtacgctttcgaccacacatgccatggttattaaaaacggactaagccatttcataggtgccatgatctacgcatgcataggcattactattattcatggtgattctatctatgtcccgtttga

SEQ ID NO: 22227 - DNA, 259 bp, Glycine max
  Clone ID: LIB3106-040-Q1-K1-F11
ggctaacactggataccccaacggcttcattcgtatcatcggattcgacaacggtcgccgagtgcagtgcatcagcttcatcggctacaagcccccaggcttctaagtgtgaaaaatttgccaagcatttgtagccgtcaccccactttgtttgtttgtacttaaactaccttcccatttgcttttgctttttgagatttcatcatcctgtatttttggtttatggtttcggacttcaatggaaactaatggatgagaa

SEQ ID NO: 22228 - DNA, 365 bp, Glycine max
  Clone ID: LIB3106-040-Q1-K1-F12
ggaaaacctagactaactttacctgcaatgtcgagttcgaattctgaagttgggacattggagagaattttacccaaccaccacccccgaccaaaggattaatctcggtcatatacaaaaacaaaaagaaaatgacttgtgcatcaattgtacgtgtgtcatattaatattttgtaagaattgcaggtggcactatagtggcagctgtgagcctcttaaaggaacgtggaggtggcaacaagcagattaaagtgatatctgctgtctctgcccctccagctctttaaaagctgatcgaacagttccctgggcttcatgtgtatactggaataattgaccccgaagttaatgaaaaaaggttcata

SEQ ID NO: 22229 - DNA, 328 bp, Glycine max
  Clone ID: LIB3106-040-Q1-K1-F2
cccacgcgtacgaccacgcgtacgatgtttatactatacgtcttgaccaatacctactgtgcgagcctaaaagcatgcatgggcactactgaactgcatggtgactatatttatgtacctgatcaacagcttaaccattactccatgatagtaccgcatcagggtaaactttaacaagggcaagcagattggtaacgggacgtggtcaagcatcaaggctttcgtcagagtagaaactccagcatgctcgttaacagcgacatgtaacacatcaatttgatcaagtcgaggattcaactggggaaaggatcagttgacaaggacactt

SEQ ID NO: 22230 - DNA, 211 bp, Glycine max
  Clone ID: LIB3106-040-Q1-K1-F3
tcacgcgtacgcctttacacatccttcgacacgtctgagcttccttatcgtaccctcttacatgcgttggctctgctgattcccacgatgaccatatttttctaccgagtcaactccatgacgatgactcaatgagttgcactgataccgacccaaaccttaactacaagccggtgatcggaatcctgacccaccccggcgacggtgcctc

SEQ ID NO: 22231 - DNA, 214 bp, Glycine max
  Clone ID: LIB3106-040-Q1-K1-F4
cccacgcgtacgacaatgcacgctttgttttacaatatcgtactgattatggtgctagagggagggatcagatcatgcagaggcactactgacaatatagctgattctattgagatatctcttgaacgtcttcaccatagactaaagctatgggaagatacggatgcaaacattgcagacaagtctgagcttgcttgtcctacactttgaatac

SEQ ID NO: 22232 - DNA, 76 bp, Glycine max
  Clone ID: LIB3106-040-Q1-K1-F6
gtttgctgttgtaactcgttcttcttcttttgttgttctgtgtttgtgtttgcggtttcgctcacctgaaaatgtc

SEQ ID NO: 22233 - DNA, 427 bp, Glycine max
  Clone ID: LIB3106-040-Q1-K1-F7
gccacgcgttcgctttaatggtatttggcattggcactcttattctcgattgccgggaagatttcttgccattggttgagaatctttactgttgggacctttaagctctatgtcttacccgcctaccgatgtcttcgttagcaaaaacttcttacaccggggatggcaacaactttgattgattattatatcaacgtcgagctttgagcggctggattgctacaaggaatcaaacttaatcagctcaattctgcggattgttctgcttgtctgccttggaagcatcactacatctgcctatattgctgtgcactttctgaagctgtcatatcaagaatctttacaggatcctatgtattatgctctattgcggaatccacatgggaacgggacagcacctcaaagaaagcattcatctatcgtgact

SEQ ID NO: 22234 - DNA, 428 bp, Glycine max
  Clone ID: LIB3106-040-Q1-K1-D9
gacaagccaacgtaaatcagctccatatgttctctgtcaacaccctttcctgggagttgggtccgccatccccatgccggcgccattgccgtctcaccgtcgtctgctcctccttccgccgtcgcagtctaagccgtatacgtcacaacaaattatctcttgccaccaccacctccacactcttcatttgaaccgaagctcgaagccgttatcgacctcactcccctaaccgctttccaatctgaacttcgacggttcctatcttccggcaaagacgcttaccgagatttgcaaaccttggtcactctcgaccacaaccggaggcttgtcgtttcgtgtcgcccttccaccttgcattatcctggaacttcggcggctatgacctttctcacctttttgttttcacggttatggctcaattgatttct

SEQ ID NO: 22235 - DNA, 168 bp, Glycine max
  Clone ID: LIB3106-040-Q1-K1-F9
gtaggtgctataagtggtgtttgtggtgtcattggtggcttcaagcatgttgaagccaaaaagccttgaaaaatcaatcaactaaggagttaattacgtacgttcaataattccagatttgtgatgatcatagtaatcattaatgtttcatttttacagctatggttt

SEQ ID NO: 22236 - DNA, 264 bp, Glycine max
  unsure at all n locations
  Clone ID: LIB3106-040-Q1-K1-C11
cccacgcgtncgggcctggagattctggcatttccatgtaatcaatttggtgagcaagagccagaaagcaatgattaaattgtggattttgtctgcagtcgcttcaaatctgaattccccatctttgataaagtagttcaacatataactgatcttggaaagtttacctgaactaccatttttaagcactccgacttgtcaaaattgtgatatgatactactaaaaaaaaagtcagatttttgtattttccggtttgctattct

SEQ ID NO: 22237 - DNA, 382 bp, Glycine max
  Clone ID: LIB3106-040-Q1-K1-C12
cgagataactagaaacagtgtgatgaaaatgaaggtccttgttttcttcgttgctacaatcttggtagcatggcaatgccatgcgtacgatatgttccctctccgaatgaacactggctattgtgcccgtactccggaggtgaaatgcgcaagttggaggcttgctgtggaagcacacaacatatttggctttaagaccattcctgaagagtgcgttgaagcaacaaaggaatacatccatggcgaacaatatatatcagactccaaaacagtttaccaacaagcttacttttatgccagagacctaggagtccatcccaaggacacatttgtgttcagtatacatgggaccgtactctctaaattttccatactacaaaaa

SEQ ID NO: 22238 - DNA, 240 bp, Glycine max
  unsure at all n locations
  Clone ID: LIB3106-040-Q1-K1-C2
cccacgcgttcgtatattccagggacaaagatggtgtgtaccggtcttaataaaccttaggaacgtgcatatcgtattgcatatgttatagaattcactgcataaagattaaatggtcatacatgcagttatgcactttactgtcataggtgtggagatttaattctcagacattttatactgnggtgcaatgaatactggatcaacatattgagtagactggattgacttgcaacgcta

SEQ ID NO: 22239 - DNA, 280 bp, Glycine max
  Clone ID: LIB3106-040-Q1-K1-C3
ttcactcttacgtcttttcccaaactctaaaaaattttagctccacataaccaaaccagggtggcggcagcctcagtcgcatgcaccatgatatcaacagcagccttatcttcaagcacaagcatccaaaagcaccatcatttgaagccatccaacgtgtgctttcaaggccttagacccctgacaaggttcacaaccaaagtgagcagcaccaccaagagggtatttccaaagggtggtgtcgatgttagagctgaactcatctcagcacttgtcataa

SEQ ID NO: 22240 - DNA, 221 bp, Glycine max
  Clone ID: LIB3106-040-Q1-K1-C4
gtcacgcttgcgagtactccaacaatgaacctacctatgctagatcttaacgagacatgggccattagctgctgctcatgcagaatatcttaaattcaaagggccagagacgtactgacttgcatccgtcatgccaatgacatgaaactcttccactgtcaacgacgcagccataatctacatgacagctaacacttacgacctcaatgaatgacctagta

SEQ ID NO: 22241 - DNA, 216 bp, Glycine max
  Clone ID: LIB3106-040-Q1-K1-C5
ctcacgcgtacggttacagtttgggaaaatcatgtagcacttgaaaggttagtcgcaacggttccaagagtagtcaggtgaagaaatcctggatccctttgccagcaaaaactcgatcagaaagatcggccaaaacggcattgacgcttgaaccaataataacgctgaggacatcgcccgcggtacccgaacaacatagtcgataggagataaagg

SEQ ID NO: 22242 - DNA, 288 bp, Glycine max
  Clone ID: LIB3106-040-Q1-K1-C6
ttttctcttcttcgttcgtttcgttgaaaagcgactttttctctctgcaactctgccttttcttccttcgtagatcgaaagggaatcttcttccatggccttcaagcggattctgaaggagcttaaggacctacagaaagaccctccaacctcttgcagcgccggtcctgtagcggaagatatgtttcattggcaagcgactattatgggtccccctgatagcccttatgctgggggtgtttttctagttactattcattttactccggattatccattcaagccacc

SEQ ID NO: 22243 - DNA, 205 bp, Glycine max
  Clone ID: LIB3106-040-Q1-K1-C7
cccacgcgtccgcccacgcgtccgcttcttcctgctctaaccttacatttagccgttctggcttttctatgttctctgtatctctcattctcatctcactttcttttctttttcttttcttttcccgaatctgaatttttccctacaaaatccactcactggcctcaaagacagatccgaaaggggatgccaaatctatcacccc

SEQ ID NO: 22244 - DNA, 314 bp, Glycine max
  Clone ID: LIB3106-040-Q1-K1-C8
cacgaattctaaaggagctcaacaaatgttgcccactatatgtcatagacctctatcctgatctggttccttagaacgtagagatgttgaggaatctcgctcatacatgagctcttctcctaatctagggtttgctgtcaagcagctgacacctactgatttgaggagttcattgctatctggaagaaatgaaacaggaagcaatcctgttgagtctcctgttcaggtgaaaaggaaccttggtagtcatcgcaattcacgaatttgtcatagttacttccctgaaggacacatatttgaaagaataacatact

SEQ ID NO: 22245 - DNA, 376 bp, Glycine max
  Clone ID: LIB3106-040-Q1-K1-C9
cggacgcgtgggcggacgcgtggggaaaaaaggcaaggtgcatggatgaatgaagtctgggctcgtagtcgtgtattatcgcgtgatggcacctcagcaagattgcctgttgctcacatggtgtgcaatcaaactcctccagtaggaaacaagccaagtctaatgacattccgtgaggttgagactgttttccatgaatttggtcatgctcttcaacatatgcttactaagcaagatgagggtctggttgctggtattagagggatagagtgggatgctgttgagttaccttctcagttcatggaaaactggtgttaccatagagaaacctttatgggcattgcacagcattttgaaaccggtgagagtctccctg

SEQ ID NO: 22246 - DNA, 185 bp, Glycine max
  Clone ID: LIB3106-040-Q1-K1-D1
cccacgcgtacgaccacgcgttcgttcactcttaagtctacgcttccagatacgtcatcggtcatggttttaacaatcatggggagtactgtaattaatgctataaactgcaatggctccattgacagataataacctcttcttatttagatgatacatgaatccattctcgtcattaccacctt

SEQ ID NO: 22247 - DNA, 374 bp, Glycine max
  Clone ID: LIB3106-040-Q1-K1-D10
cccacgcgtccgtttcttacaacttattcaccactcgttcccgttactccccagcaaccataattattttttttgacaagcagctcaagaaaaatctgcaaagaataaaacaagaggaggaaatgcaacttacttgttgatataaacttcagacagagcgagttgttgtaaagctagccttgttgcagccatggccacccacgcggctctagcttctacaaggatccccactaacaccaagttcccatccaaggcttcacactctttcccaacccaatgcgcctcaaagagacttgaggtgacagaattctctgggctaagatccacttcatgtgtgacatatgctaacgatgcttgaaaatctttcctttttg

SEQ ID NO: 22248 - DNA, 204 bp, Glycine max
  Clone ID: LIB3106-040-Q1-K1-D11
cccaagcgtacattccaaacgtggtcatttgcagttactccctaattataggggacctggcaaattccatttgaggccggcggaaatatcgcgatcgacactttttccgttaagattatcttgtgctcatgatacgttgacgcgcacgaagatcttatccggaatgggatacctattcacgattatgactgccgatattgatga

SEQ ID NO: 22249 - DNA, 285 bp, Glycine max
  Clone ID: LIB3106-040-Q1-K1-D12
gttctagatcgcgagcggcgccctttttttttttttttgctttcttctccatgatcatgcatcaccatgcatgatggcctattaatacactaccctatgcaccaacaccccaaagatctcttcctcttcaaactacatggaaccccgctcgacctccctcagacgaagatacagcacttcctgcacgagctggtaaattgactattgtggcattcctagaggcccccgaggatgccgatgttcggcacctgacggtgacgatggccaaggaagcctcatatgact

SEQ ID NO: 22250 - DNA, 450 bp, Glycine max
  Clone ID: LIB3106-040-Q1-K1-D2
ctcacgcgttcgaactcgcatcagttcctaatcatgggtagctcttcaggtttcacatgggacatggttttaagactagtgagggcactagcaattagcggtttcaactgcaaaggcgcagatgcagcacatgccttctttgtgattggcgatactggtatcgacaatggcaacaacaactacttatccaccacagctagagcatacgcttcaccatatggcattgattatccaactcgcatacccactgtgcgcttctctgatggactcaatattcctgactgtatcagtcatgaacttgcgtcagagtccacgtcgtcatacttaagtcctgagctcaacggggaaagattgctcgtgggtaccaactttgcttctgctgtcattggaatcctcaatgacactggagatcaacttgtaaacatcattagaatcacgcgacagctggaa

SEQ ID NO: 22251 - DNA, 295 bp, Glycine max
  Clone ID: LIB3106-040-Q1-K1-D3
cccacgcgttcgggttgaccttcatctggtacaagttgtccagagtttaaaagcacaggcgtcgagtgatgaggactcgttggaggccctaaattccctggaagaagggcttaaggatcatatcaagagactaacttcttttgatatgtacaagcaagaagttctccttggccatctggattggtctcccatgcacaaagatcccatattctggcgagaaagtatgaacaactttgaagacaatgatttccagatcctaagggtcctaataacaatttttgacacgtacaatgat

SEQ ID NO: 22252 - DNA, 373 bp, Glycine max
  Clone ID: LIB3106-040-Q1-K1-D4
cccacgcgtccgagcaagggtagaaagaaactacagaatagaaatggctttcacttatggggtttcgatggctatgccggtaacttatgctatccagaatagggtggtgcctaatctctgatgcattcgttaagccactgactctactggcttccaaggcagtgacagcttgaaaactcaatggaaggtttcaagttaaggcctccatgaaagagaaagatgcgacggggctcaccgcagctgcattgacagcttaaatgatggatcctgatgtggctcaggctgacgttacaccttatctcaagaacttcttgctcaacatcgcagcaagtggagttgtcgttggtgccactattggtgctgtgatcggcgt

SEQ ID NO: 22253 - DNA, 270 bp, Glycine max
  Clone ID: LIB3106-040-Q1-K1-D5
atcgagataactagaaacagtgtgatgaaaatgaaggtccttgttttcttcgttgctacggttttggtagcatggcaatgccatgcgtacgatatgttccctctccgaatgaacactggctatggtgcccgtactccggaggtgaaatgcgcaagttggaggcttgctgtggaagcacacaacatctttggctctgagaccattcctgaagagtgcgttgaagcaacaaaggaatacattcatggcgaaccatatagatcagactccaaa

SEQ ID NO: 22254 - DNA, 260 bp, Glycine max
  Clone ID: LIB3106-040-Q1-K1-D6
cccacgcgtccgctttatcattcctctgagatagagctacagcaccattatcatgcatcgacattactttcctattagatcctcgatccctatcccacatataagattcatcaccccaaaaccgaatctttttaataatacaactgcaattattgctatattctcagtaaaaaaagcccatacagagaaatgagttcgaatcatttgtgaaacactcttgcatgcccgattcgatcacattctgctccagcgctctttcc

SEQ ID NO: 22255 - DNA, 456 bp, Glycine max
  unsure at all n locations
  Clone ID: LIB3106-040-Q1-K1-D7
gaggataaaacatggctatggccacagctgtcgtgtgtcctcagaacatcaccggagccgtcgttagctcacctagcaagaccaagaagagagtggtacacgtgagaagcataaattcatttgggggactgaaagctagcaatggtgttgtctctttggggattcctatgagcactgagaagtgctttgctaaggttgtgagctcagtgaaagcagctacatcaaatgggaaaagaaaggatgggctcttttttccacgtgcaaacgctgctggtgagatattcacgatcgctgctatcatcaatggactnngtcttgtcggagttgctgttggcattgtgctcttgcgagttgaagcatgggtcgaggagtccgaggcatagtgaaaatccaatcagattagcaagcaattaattaaatatccagaatatgtgtatgttcctatattgatgatgt

SEQ ID NO: 22256 - DNA, 181 bp, Glycine max
  Clone ID: LIB3106-040-Q1-K1-D8
gacacgcgtacgtggatatgtactttgaattcaaatgtactattaacataaccggctccggtattagtttactgagcaagaccaacaacagagtggtacactatacacgcatacactgactagggggactgaaagctatacatcacgaagactctttacatattccgatgagcactgacaa

SEQ ID NO: 22257 - DNA, 74 bp, Glycine max
  Clone ID: LIB3106-040-Q1-K1-A1
aacaatatgacggatgcgagtcaaccgctagaactactacttgaacacagtcagtatatggagcttaagaattc

SEQ ID NO: 22258 - DNA, 119 bp, Glycine max
  Clone ID: LIB3106-040-Q1-K1-A10
gccactcttacacccacgggttcctcctctcctccgatatcaatttaaaacacatccctggtatcatatggaaggacccggagaaagagactctttttgaccatacaaccaccacttct

SEQ ID NO: 22259 - DNA, 124 bp, Glycine max
  Clone ID: LIB3106-040-Q1-K1-A11
ggtatttgtacacactctacctgtgaacagtttcgcgacccgaaagcccttattgtgaaagtacttcaattaaatggctcttgtacatataaaattaccctttccttctacttgataagccctc

SEQ ID NO: 22260 - DNA, 419 bp, Glycine max
  unsure at all n locations
  Clone ID: LIB3106-040-Q1-K1-A12
cccacgcgtncgccatcctagctactttctcactcttcaacactcatgggcgtaacgcgccgccgcagacatcaccatcacttacattggttgcaaatcttcaccaccttcacttttctcttcttctcttgcacttcagccattaccactctcaccccacataccagtggtggggcagcgaagcagcttaaccgggaagagaaacaaaatgggtcaacggtggtgccagtgaacagaatggtggtggaagagaagaggttcggcgggccggagtcgtcgccgccgtcgtgcagatccaagtgcggctggtgcagtccttgttttacggttcacgttccggtccaaccgggtttgattattcgcctcgagtactacccaaaagcgtggcgtgcagtgcggaacaagctattatgcatgac

SEQ ID NO: 22261 - DNA, 281 bp, Glycine max
  Clone ID: LIB3106-040-Q1-K1-A2
accaaaaccatagctcgcgttctgctttcgtcttttacatcaggatggagtctcaggtgagagcacgcacttgttgtcaaaggtatgggtcgtactggatccagaggacaagtaacccacgttagagtgaaatctctggatgatcagaaccgtcacatcatgaggaatgtgaaaggacctgtgcgagaaggagacattctcaccctactcgagtctgaaagggaagcacgaagattgcgctagatggtttcttttggctagcctgcaaattcgaacaaaac

SEQ ID NO: 22262 - DNA, 105 bp, Glycine max
  Clone ID: LIB3106-040-Q1-K1-A3
gttcggccacgcgttcgggcactcgtgcgcttaaaacctctgtcactgtcttctaaaagctatctgtgtccggtggtactaagtcttcaacaagcaaagtacatg

SEQ ID NO: 22263 - DNA, 263 bp, Glycine max
  Clone ID: LIB3106-040-Q1-K1-A4
gacagcatactggtggcaccgtacttgaaggtagtgacactgaaagctatctgagcaacggcgcgaaccttcagagagtgggttcaggtcgagtaggcttagcgagacggccaggaattagggtgccacgatgctgaagtcgaactttgtcaacgtacttcaaggttatacatcatccagtttgaacaacgcccgcttaaggggtctagtatgacacatggtgcacgcgatgactcaatgcctagggtctatcggtggacatg

SEQ ID NO: 22264 - DNA, 127 bp, Glycine max
  Clone ID: LIB3106-040-Q1-K1-A5
tcggccacgcgtccggccaaacgtacgctttaaacctctgtcactgtcttctaaaaggtatctgtgtccggtggtacgtagccttcacccagcaaagtacatggttgacttggaaattcaggtcccc

SEQ ID NO: 22265 - DNA, 141 bp, Glycine max
  Clone ID: LIB3106-040-Q1-K1-A6
tgaattcgttctcagaaccagactttgaagattgcgatacatgatatatagaaggatgcaatggatgacttatggactatgcctttgagttcattatcaacaatggccgcattgatatgcgagaggattacccttaccgtg

SEQ ID NO: 22266 - DNA, 302 bp, Glycine max
  Clone ID: LIB3106-040-Q1-K1-A7
tcggttacacgtgctcaaaatcggacccaagcctcttggttcatagatatttacaaggtaccaggagctcaaggagcgatatggcatgaatatttcagctggtggtttgagcgataatgacactactttacatcttgcagtttatactttaccatttggtggaggtggtgaaagcgcaatcggtgcataccattggaaattcttatttgaagctttcagccactaaagaactagtctctatcgccaatttaatggtgatgctccagttaggtacctaccattcacaattgctgacgtttata

SEQ ID NO: 22267 - DNA, 320 bp, Glycine max
  Clone ID: LIB3106-040-Q1-K1-A8
gtgaatcgtaaacccatgggaggttcatggcctaaggtaacgatattcgagtcattgttagtatggaatggaccgattgagataaaaagagtgttaatgaggattcaacgggtattactagatgtataactaagcagaatcgacagaatactcctagtcgattggaaatgagaaaatactgaccctcgcgttagcaaacatacaattgacgcagaaagccagaaatggatcaaattgaacgcttgcgtgataccctatgaaccaaagaacttcacatgattcacgatctatcttacttatctatatagatcgatctatct

SEQ ID NO: 22268 - DNA, 338 bp, Glycine max
  Clone ID: LIB3106-040-Q1-K1-A9
gctaattattgttcaactgcctgtccctccgatcccataatcctatgaaatgacaccctggactcacaatctcaacctcggtcataacgttgtttttcaattaacaaagcacaacatcgttgctcgccacaaccactacaatgtcgtgttcgttgccgcacttgaactgccacctcgacactttcaggactcatccctatgctcttcctacccatccatcaaaaacaagactaaatttgtgtttccagccgcaatgtgtgttgtctgccacatcttcttcaacgctgcttagtttggaaaagaagatggcattacatgctccttttgatccaaacacg

SEQ ID NO: 22269 - DNA, 265 bp, Glycine max
  Clone ID: LIB3106-040-Q1-K1-B10
cccacgcgtacgaccacgcgttcgtgcacgcgtgcgaaatgaaagaaagagacatctttgatccaatatcgaaggatcgggaccaagatttccagggggataggatagggtattcgtatatctgactcatgactcaaatatatcagcttatcttccaaaaagggaaaaatggaatgaatcgatcgcatattattataagattttacgatttcgaattcccttaatgaagatatacacaattgcgggggaaatagaatctgcacga

SEQ ID NO: 22270 - DNA, 377 bp, Glycine max
  Clone ID: LIB3106-040-Q1-K1-B11
ggactcttgaatatgataagatcaaagagaatattgatccttcacatggctacatgggctactttgacaaatgcactaaagagatggatgcttatcttgtcaaggcatagctcctaaaattatcaagaaaataacaacaaaggagtaatggatttggctttgaggatatatatatatatatatatatatatatatataagcgttttatctatatagtcattgtgatgctagaaacgtagaataaaattataatatgcgtgtttgcttctgtccatccttcgtttctgtcgaataaatgcaggttggtggattgaactatatgtaaaattatgtgaaccggccgggttatgtattgcaaaataagctaaatactttat

SEQ ID NO: 22271 - DNA, 238 bp, Glycine max
  Clone ID: LIB3106-040-Q1-K1-B12
caccacgacactattctcttctcttcgctccttcacttcaacttcaacgccggcttttgagtctcttcccgcccatcatggcgacggtgctatcaccggcaccgtcgttcaccgtgcgcgccttctcgtgccgccggcatagcaagaagaagcatcagcagaagcgagcattgggagacttcatcctcttcgcacaagtggttcgcaaggacgtggaattcctcaagagaggaatcga

SEQ ID NO: 22272 - DNA, 319 bp, Glycine max
  Clone ID: LIB3106-040-Q1-K1-B2
aatggtcggagggttgagctttctcacaactctagaggtggaggtggtggtcgtggtggtggctctggtggttctgagttgaaatgttacgagtgaggtgaacctggtcattttgctcgtgaatgtcgcatgcgctgtggttcaagaagactccgtatccgtagtccagccagattccgctggagcccaagttatggtcgaacgagttacagtcctcacgggcgggcccctaggcgccgtagtttgtcacctcgtggacgtagctacaggatgtcacctacttatcgagggcgtgaggaggtaccatatgctaatggaa

SEQ ID NO: 22273 - DNA, 304 bp, Glycine max
  Clone ID: LIB3106-040-Q1-K1-B3
actgtgagtaccctcaactcaagaatggatgccaacgactcaggcaccgagattgatactgacaagctttcgaattgttggggaaatgctcaaatgccctatgcactccccactcgtcctatcttcaccacatgaacacctgcacacatcattcaccactgccgctgacaatcatttcacatttctacactccctagcttctcataactctctcctcaacagaactctctctctcccgtccgaatttcacaccctttgcgcgcagattgagaagcacaggaacgtgacgatggcttctggacat

SEQ ID NO: 22274 - DNA, 467 bp, Glycine max
  unsure at all n locations
  Clone ID: LIB3106-040-Q1-K1-B4
catagaaagagaaattgaagaagtcttagggaagcgcatctgccaagaaaagggtccgagggttctccgtcctatatccgacctacgacgcccctgcaatgaaacacgctgtcaagaaagatgtgttccaggtgttagctgataacgttagagaccatatagagatggcttcaagatgggctgttctacatgagacgcgtgttgagtattttagagggaaggatttcgtgagcattctaaaaagccatccggagctcacagatgttctagaattagataggattttggaaacagtagagatngccaacattcttacttgaaaaatatcttttaatgcgcctggaccgggtcgtaaaaactggtcgcctgggaagaaaaaactgtctagcctggcctgcacatttagaaattttccctgaacaagtatctactgaaaatgatgctctttttgcatggacgtttgtaaa

SEQ ID NO: 22275 - DNA, 411 bp, Glycine max
  Clone ID: LIB3106-039-Q1-K1-H9
cccacgcgtccggagatttctgctttttctcaccttcctcgtcggtgctttcaggcgggtgtcgatccaaacttcggcttcttcttcttacccagtttgaaaatggattttatcgttttgtgcctgatattgctggtgagtgcgcaactgttctaccacttctacagacttatcaacattttagtcacgcgtttcgatcgcaatccttctaccaccaccgccaccgctaccgccaccaagtcctccgatcaagacgcgccttcctaaaaggactcttgaacaataattcaattccaccagatccgaaccgtcaagaagaccctctgatgtagacgcaaaaaactacggatccaatccaacaatggttattgtttgatgtatgatgttttacgttactacctacccattact

SEQ ID NO: 22276 - DNA, 288 bp, Glycine max
  Clone ID: LIB3106-040-Q1-K1-B5
cccacgcgtccggagcatcatggcctcaagagcagtgttattgatggctatgtgtgtgcttccggcgatggttgtggccattcgcccagcaaagaaccctttttgcgtgaagggtcgtgtctactgtgacccttgccgtgctggttttgagacctcagctaccacctacattgctggtgctgagattatgttgcaatgcaagagcagggttagcaacgaggttgcgtacacgaagaaggcgtacaccgactcaaccggagcatacacgatgtacgtggatgaggatca

SEQ ID NO: 22277 - DNA, 298 bp, Glycine max
  Clone ID: LIB3106-040-Q1-K1-B6
gcaatattcacaaccctcggaacctgcgacgccgcattcgctgttcaacaaatagccgacatagcagaaggcgacaaccgcggactggcactgttgctgcccataatcccagcaatagggtgggttctgctcaacattctgcagccggcgctgaaccagctgaaccgaatgcgcagcaccaaaggcgtgatcattggcttggggcttggcggcttggctgggttggcagctgcgccgcatgcctgggcggcggcttctgaagctgccgctgctgccagcgacaacaggggacagcttc

SEQ ID NO: 22278 - DNA, 240 bp, Glycine max
  Clone ID: LIB3106-040-Q1-K1-B7
cccacgcgtccgcccacgcgtccgctcacgcgtccgatatgaaagaaagagacatctttgatccaatatcgaaggatttgaaccaagatttccaggtggataggatagggtattcgtatatctgacctaagatttaaatatatcagcttatcttcgaaaaagggaaaaatggaatgaattgatcgcaaattattataagattttacgaattcgaattcccttaacgaagatattacaaat

SEQ ID NO: 22279 - DNA, 293 bp, Glycine max
  unsure at all n locations
  Clone ID: LIB3106-040-Q1-K1-B8
tgctcgtactcggtctcggacattcccgggntcgactccacgtcgtctcgtccccttctctccaaggaatggcgttatgttgccacatcggaaatgcaagatttcaacctctttattcgctaaaatnttgcaatgttctcaatgtgggtatgttctatctttgcctcttcttgcgacccgggacctgatatatcttgtacaagtctttcaatcagagcgaaccactcaattcgcctagtgtttaacatggaaaagcggaattttgtctctatcagaaaaagcgatttatattg

SEQ ID NO: 22280 - DNA, 423 bp, Glycine max
  Clone ID: LIB3106-040-Q1-K1-B9
gcaatattcacaaccctcggaacctgcgacgccgcattcgctgttcaacaaatagccgagatagcagaaggcgacaaccgcggactggcactgttgctgcccataatcccagcaatagggtgggttctgttcaacattctgcagccggcgctgaaccagctgaaccgaatgcgcagcaccaaaggcgtgatcattggcttggggcttggcggcttggctgggttggcggctgcaccgcatgcgtgggcggcggcttctgaagctgcggctgctgcgagcgacaacaggggacagcttctgctgtttgtggttacgccggctattgcttgggtgctttacaacatcttgcagcctgctcttaaccagctcaacaggatgagatcacagtgatttgagctttgtgaaattaaaatatggaggggc

SEQ ID NO: 22281 - DNA, 353 bp, Glycine max
  Clone ID: LIB3106-039-Q1-K1-G11
cccacacatacagagagacttccttttcttgaccccaatcgaaatgtcttagggggggggagcagacttgacatggagagctaaactcgctttactgttgaaaaacacaacaaaaaacagaatgcccttttatagtttgaaaaggtagtacatgcaaaacagcaagagacttatggtaccttgtacaccatcactttataagcaaactatggcaggcaaaagaaagtttatgaatccaaagtttgcgaaaaggcatgtttaaacttgaaagacgtcctagagttcaagcttgttggaaaagcacctaaataatctaatgcttaattaagttgcacaaaaataaatagtgagac

SEQ ID NO: 22282 - DNA, 287 bp, Glycine max
  Clone ID: LIB3106-039-Q1-K1-G12
agcaccggcaccttgagatcaattttttgctccccgtgaaacacaataaatggcggggtttgatgcactggctgctgcacacatccatgtaacatatgctgctgaaatgtgctcattcacaataatgagtttattacaatctatttacttgccatacactatattgagtgtctgttaactcgtacaggtttatacatcactctcatgcatacatggacatgcaaaagtgcactttattgctattgatattgacaattgaaaaaagcttgaagatattgttccatcat

SEQ ID NO: 22283 - DNA, 288 bp, Glycine max
  Clone ID: LIB3106-039-Q1-K1-G2
gaaagagttcaggaggggcactcagagcgtgcagatcagcagagagcccaacaatctctacaacctcaacactttcaagtactccggtttggcgaacaagaaaactgtcactgttcaacctgcgggtaaagaccagtctgtgttgctggcaacaaccaagacaaagaagcaaaacaagcctgctgctttgcttcacaaatctgtcatgaaaaaggagttccggaggatggcaaaagcagtgcaaaatcacgtagcagataactactacaggcctgatctcaaaaaggc

SEQ ID NO: 22284 - DNA, 242 bp, Glycine max
  unsure at all n locations
  Clone ID: LIB3106-039-Q1-K1-G3
gtagaagagattccaaacatggggaattccagtgttgtgaccaaagatgctagaggttcacagctgacaatcttctatggtggccaagttcttgtcttcgatgatattcaagctaaaaaagccaaggacatcttgtcttttgccggcaagggaatgtctcaaaaccagaacgattatgctaacactntccctgctacaacttctgctaataccactagaccatttacttttcttatgaatat

SEQ ID NO: 22285 - DNA, 417 bp, Glycine max
  Clone ID: LIB3106-039-Q1-K1-G4
ccgcccacccttccgaaaagctttaaggattttaaatccattccttggacctgaaaggaggagggaggactccagtaaggcatgtttatccaacccttctgttgataatgctgatgaaaatattgaagaatggcaaaagaaaaagaacagttcctccttgatttctccagctgttaatggaaatcaggctgtgactgctaattccagtgcagaggttgtaaatgcagaagtagaatatattgaatctgagaacttgaatgatgtagacgatgctgatacttgtctcaagactctcttggctggacttgactcaaaggattgagtcctggtttgtgacacactgaataacgtacgtcgattgtctatatttcataaggaagcaatgcttgatgtgctgggggatgtgatcacatctat

SEQ ID NO: 22286 - DNA, 401 bp, Glycine max
  unsure at all n locations
  Clone ID: LIB3106-039-Q1-K1-G5
cccacgcgtncgggtgcatctaaggtgaacatctcattggttgtaaatgacagtgaagcggagcagtgtgtgagggctctccacttagccttctttgagagtgagctctcagagttagagatggattacaaaaatggtaatggctctgttcatgaattatctttaggggacacttgagtgtttcaattcttttcattaagatatgtatcccaattttatatgctaatgtcaagcaagcatttttgagttcctcctagtcttgtgtcactgtgatgtaccagaacaatgtattttacctgaagatagatgctggttgggaggaatggcaaagcattagtgtataactagtcttggtagttggtattactagtgagtaaacctttgtattcttttgtagctgc

SEQ ID NO: 22287 - DNA, 277 bp, Glycine max
  Clone ID: LIB3106-039-Q1-K1-G6
cttctttgagctgagctctcacattagagatggattacaaaaatgctaatggctctgatcatgaatgatacttacgtgacacttgagtgttgcaattcttttcattaagatatgtatcccaattctatatgctaatgtcaagcaagcattcttgagctcctcatagtcttgcgtcactgtgatgtaccacaacaaagtattttacctgaagatatatactggttgggaggaatgacaaagcattactgtataactagtcttggtacttcatattact

SEQ ID NO: 22288 - DNA, 421 bp, Glycine max
  Clone ID: LIB3106-039-Q1-K1-G7
cccacgcgtccggaggaatagcagcagtagcaagctatggcggaagaacagagaggggcaccaccttccaatcctacgttgtcgtttgatcctagtcgaacggttggtattatcaagaggaaggccttgatcaaagacttagctgcggtataccatgccgaatgccttgcatactgtcaagagcttttggaacttcaaactaaatgggaagaggttttcaggtggttgatgcataactcatttagagagcaaaatatgcaccgtcagaggataccttttgcttgctgctggtgtagctgatagtatcagagcacacatttaatgtagtattgatgtacttttcaaatgctactgagacgtcatgtttgagatttcatccatcggcctgcagttgtggaaacatttccccctactcgataaa

SEQ ID NO: 22289 - DNA, 407 bp, Glycine max
  Clone ID: LIB3106-039-Q1-K1-G8
cccacgcgtccggaaagctcttagggatctcaagacatttctggagactgaaaggaagaatgaggactccagtatggcatgtttatccaagccttctgatcataatgctgatgaaaatattgaggaatggccaaagacaaagaacaggtcctccttgccttatgcagctgttaatggaaataacgctgtgactgctaattccagtgcagagagtgtaaatgcagaagtatactatattgaatctgagaacttgaatgacgtcgacgatgctgatacttggctcaagactctcttggctggacttgactcaaaagactgggtcctggtttgtgacacactgaataacggacactgatagtctatatttcataaggaatcaatgcttgatgtgcttggggatgtgatca

SEQ ID NO: 22290 - DNA, 406 bp, Glycine max
  unsure at all n locations
  Clone ID: LIB3106-039-Q1-K1-G9
acgaaccgaacatggcgcaaacgctggtaatgcccgtggcaccttcgctcgctggcgggttcaattctcgcctctgcaagacactctccgttcccgttctcaacaacccaaagtttcaagggttaagcatcaagtgcgttcgagttggaggtgtggagattccgaacaacatgcgaatcgagtactcgctgcagtacattcatggagttggcaggaccagagcaaaacagattctgtgtgatatccaaacggataacaaaatcacgaaggaactcactgaggaggagctcatcactctcagggacgaagtctccaaatatatgattgaaggcgacctgagacagttcaatgcggntaatataaagagactgaaggacattcagtgctacataggaataaagcacat

SEQ ID NO: 22291 - DNA, 398 bp, Glycine max
  Clone ID: LIB3106-039-Q1-K1-H10
cccacgcgtccgcccacgcgtccggtgtgttggggaactgaatttgaatgtggagaggtgaagatgatggagcgaagacagaatcgaactccacaagaccaaatagctaggattctggttgaatttttggaggtggctattactgctgttgtttttctcaaaggagtttatccttctggtgcctttgagcggagaaggtatatgaatgtggtggttcaaacggctagccatcctcagcttagatattacatacatgccactgtttcagggcttctaccctttatacaaaagggaatggtggagagagtagctgttattttcttcaatgctgacaatgttccactggagaaatttgtattcaagcttgcaatgaaccaaacttatagttcagaggtgga

SEQ ID NO: 22292 - DNA, 107 bp, Glycine max
  Clone ID: LIB3106-039-Q1-K1-H11
cgaaaacgtcttgtgatacaactttgtcggattttatatagaacttgaatttgagtgtgaggactacattatggttgaacatgttatgattattagtggtggttgcc

SEQ ID NO: 22293 - DNA, 419 bp, Glycine max
  Clone ID: LIB3106-039-Q1-K1-H12
ctcagatggaagagggattggaagagttaagactccatgttaaggaattacagaagcggtctaagaaactggaggatgcagtgatcaatgcaaagaaaaactcttcatatcgtcagatgcagttgatgaagctgcataaaggttttctgcaagtgaaagattgcacagaaaaactaaaaactagtgaaaaagaacttcaggctctaattgatacagcaatgtcagagattgactgtgatggattaaaggatggacaactaacaaatggaagtcttgatggtagattgtaatatatctttcggaggttcagattgtgtcattgatgcttaaaatgtgtttagcacagaataccctaatgttatatggagaagaaaaaaaggctggataattattctcttttattattccgctccagtctc

SEQ ID NO: 22294 - DNA, 288 bp, Glycine max
  Clone ID: LIB3106-039-Q1-K1-H2
tcttcgccacaaccacacatgagcatcaatctgttcaagggtttcaccaacgtcgtcttgccatcgaccattctctctgagatcgacgacaaaactttttttgcagctgcgatactgactatgcaacacccaagacgcctagtcttatcaggtagcttatcggctttgattgtgatgaccattctctctcttcttgctggctggactgctccaaatctgatctctcgtacatggactcatcacattacaacatttttattcttgggatatagactttggtccttaaaa

SEQ ID NO: 22295 - DNA, 280 bp, Glycine max
  Clone ID: LIB3106-039-Q1-K1-H4
cctttaaacattcaatgttgcgtggaagagagattctatccatgcagttatcaaaaggagctggagtccctataaatcacatgttgcattctcaacgccaaccacagcctgtaaaagacacctctgatttttaacgcacatcactgtctgaaaaagacacccgtgaggcatttttgattgttgcaccgttgttgatgacagtgtcatttgcacctggtattactgtaccgggaggtctatatagctctgatgacccaaaccctaaaattagaggtactgc

SEQ ID NO: 22296 - DNA, 374 bp, Glycine max
  unsure at all n locations
  Clone ID: LIB3106-039-Q1-K1-H5
gcggatccanatcaagaaaatcgacatcatctgttccaggcacgtgactttctccaagagggggaaagggcttttgaagaaggctcacgaattgtcaaccctttgcgatgcagacataactctcattgttttttctgcaactagcacgctctttgagtatgccatttcaagtatgcatcaagtaattgaaaggcgcgatagccattcatcaatgaatagactgcatcgcccctcaattgagctgcagattgagaatgactccaatgaaatcctgcgcaagagagtagaatataagacccgtgagctgaggcacattaatggggaagatctgcaaggattgacattacaagaactgcatagactataggaacacc

SEQ ID NO: 22297 - DNA, 178 bp, Glycine max
  Clone ID: LIB3106-039-Q1-K1-H6
taccggaacggaaggcccggaccgacccatccgtccactcatatgccaacccttccgatttatttggtctcgttccaaaccccccaatagggggtgttttactcgcaggcaattcacttcaagatattataatgtcagcagcacaagcgctaaacagataacagtacgtgtaccttgc

SEQ ID NO: 22298 - DNA, 312 bp, Glycine max
  Clone ID: LIB3106-039-Q1-K1-G10
cccacgcgtccgcccacgcgtccgtttccgtacccccgttgaaccctactaaaggggggaagtggaaaaaacctggagatccacactagtttgagcattgagatttgcgtgcgcggtttttggtgtgatatataaggttgatagttggaacattagtcttggtatgataaagaccttgccaataatttgagttctgatttacagagctaggacagttatgtcttaagactttgaaaggtgtttaatgatatttagctttaatacttgaagcctacttacagtttatttccttactaatagaaacgaattatc

SEQ ID NO: 22299 - DNA, 418 bp, Glycine max
  Clone ID: LIB3106-039-Q1-K1-H8
cccacgcgtccgcccacgcgtccgcagtttttgatgcgcatgctcaccggcgacgcggccgccgacaactccttccgagtcgttccgcagtccatcgccgccttcggctccaccgtcatcgtcgagggctgcgactccgcccgcaacattgcctgggtccacgcctggaccgtcactgatgggatgatcactcaaatcagagagtacttcaacactcgcctcaccgtcactcgcatccacgattccggcgagattgttccggccagatccggcgccggccgtttgccctgcgtctgggagagcagcgtctccggtcgggtcgggaaatccggacccggtttggttctcgcaatataaaatatataaatcagtaattagggaaggacgaggtcacgtgttgccggtgctataataatta

SEQ ID NO: 22300 - DNA, 388 bp, Glycine max
  unsure at all n locations
  Clone ID: LIB3106-039-Q1-K1-E4
gtccgccaacccgtcccttccaagtnaaaccgacccaaactccaaacctttggcaaacttcggaggcatggttgaacctgtgacggccccggctacggctacggtggatcccgagccaccgctagctgaggctccgccgctcgagaagaaagcggtggcggtgccaccacctgttccggctgcggcagaggaaaccaaagctctcgttgttgtggagaacgagaatgagaagataccagaacctgtaaaaaagaacgcctcaggtggatcccttgatagagacattgctcttgcagaaatagagaaagagaaacgattgtctaatgtgaaggcttgggaagaaagtgaaaaatccaaagcagagaataaagcccaaaagcagctctct

SEQ ID NO: 22301 - DNA, 421 bp, Glycine max
  unsure at all n locations
  Clone ID: LIB3106-039-Q1-K1-E5
gagncgtggctggggagtggaaccacacctctggtcaatggaatggagacgctaaggacaaaggtattcaaaccagcgaggattacagattctatgctatttcagctgagtaccctgaattcagcaacaagggtaagacactagtctttcaattttgtgttaagcacgaacagaagcttgactgtggtggtggctacatgaagttgctcagtggggatgttgatcaaaagaaatttggcggggatactccttacagtattatgtttggcccagatatctgcggttacagtaccaagaaaggtcacgctattcttacctacgataacacaaaccacttgataaagaaggatgttccttgtgagactgaccaacttactcatgtttacacatttatgctacgtccggatgcaacctacagcat

SEQ ID NO: 22302 - DNA, 197 bp, Glycine max
  Clone ID: LIB3106-039-Q1-K1-E6
aaatcttctccttccctacaatcttttaccgattatctatggggttggcagacatgcttgtgataacagagcttcacgacccatatgctcggaacgtaacatccgtatttaatgcacaatcttcattgcgcagactggacccttgggcaccatttgtcccatcttatagggtcacatatccatctagatgctgttgc

SEQ ID NO: 22303 - DNA, 244 bp, Glycine max
  Clone ID: LIB3106-039-Q1-K1-E7
cccacgcgtccgcttaactttttatcacagaccttagttataacatgatcagtgggggtatttttttacgatggggggccattaccttagatgaactccatttaatggcaaacaaattgacacgtccatttccgactattgtcaatattatcacaaccctcagaaactataatatcgaaggaaatcaattatttggcaacattccatcggacattgggataatgactcaatttataaaaacata

SEQ ID NO: 22304 - DNA, 418 bp, Glycine max
  Clone ID: LIB3106-039-Q1-K1-E8
cccacgcgtccgcccacgcgtccgattacagtcgctggttatccagaggcacatgcggatgttatagaaagtgatgggttggctacatcagagggttatcaaaatgatcttgcttacttgaagagcaaggttgatgctggagcagatctgattgtcactcagttattttatgatacggatatattcctcaaatttgtgaacgactgtcgccaaattggaataacgtgccctattgtacctggaattatgcccattaataattacaagggctttatccgcatgactgggttttgcaaaacaaagataccagctgacattatggctgctttagagcctatcaaggacaacgaagaagctgtcaaggcttatggaattcacctgggaactgaaatgtgcaaaaagattttagctcatggaa

SEQ ID NO: 22305 - DNA, 377 bp, Glycine max
  Clone ID: LIB3106-039-Q1-K1-E9
gcctaccttccgactcgcgtcgcactacaaaccctgactctccaaacccgacggcgggtatgttctaacgagtgcgtctgcttacacctctccctcacacccaacatcaaactcacttccatagctgctgtttttctcaaaccaacaactctgtcgactcatcacttcattacccacgtcgaggcgtcaactgatttgacgcatgaggaggacaccttctgagacgcacacaggcacagcttcttatgcgacacttaagctctctgtcgcgaatattccgtgcaacgtcgacagcgcgcagatagacgagctctatgagagtgctcgtaatgagcatgtggatgacagcgatttatgataagactactgagaggagc

SEQ ID NO: 22306 - DNA, 289 bp, Glycine max
  Clone ID: LIB3106-039-Q1-K1-F1
tgtgctcatcgaccctccaatcacacatcaatggattcttacttcacaaaacctatctatcccatactccttacctcactttctccaggaggaaaatttcaaccacagtgaacgctacatctcgagtcgacaagttttcaaaaagcgatatcattgtctctccgtccattctttctgcaaacttttcaaaattgggagagcaggtgaaagcagtataataggctgcatgtgattggattcacgcagatgtaatggatggtcgctttgatccaaatattacaattggacc

SEQ ID NO: 22307 - DNA, 421 bp, Glycine max
  Clone ID: LIB3106-039-Q1-K1-F10
cccacgcgtccggagtgatggctgtttttctgtgggaaaccctgaaggaagccgggggggcctacactggcttgtctgcttccaccttcttcacggtgctggcgcttctttttgccgtttactacgtcgtcacgggtctctttggctcctccgacgatcaccatcaccgccaccgccacgtcgaggaggacgaggaggaggagatgccgcctctgcgccctccggttcagctcggcgagatcacagcggaggagctcaaggcctacgacggcaccgatcccgagaagcccttgctcatggccatcaaggcccagatctatgatgtctcccagagcaggatgctatatggacctggtggaccttatgccctatttgctggcaaggatgctagcagagccttagcaaagatgtctttttgaga

SEQ ID NO: 22308 - DNA, 411 bp, Glycine max
  Clone ID: LIB3106-039-Q1-K1-F11
cccacgcgtccgattgagccaaagctttgtattttctgcgataattttccattggggggaagaaagtctcaacctttattcgaaagagcaaggatctgagttgagttgagtgatcatgtgtggtggtgcgattatctccgacttcataccggcaggtcccgccagcggggcgcggcgcgtgaccgccgacatcctgtggccgagtttgaggaagcgcttctcgaagccgctgctggacgatgatttcgaggctgggttcagagaattcaaggatgattcggaaatcgaggatgttgatgacgaggacgatgaagacgaggaggagttgaagaagaagccctttgggttctctcgctccagcaacaaggctgcttctaagcctctctctcgtggatcagcaactgtggaatc

SEQ ID NO: 22309 - DNA, 351 bp, Glycine max
  Clone ID: LIB3106-039-Q1-K1-F12
cccacgcgtccgattacgcgtaattttacgctttcggcgagatacattacatggaggggtatcactaagcagctcaggataatggcgctgctgagtggatcaactttctgtactacattcctttctcacaagaactttgggtttacatactcagcaaaatcttcctttgttggctgtaaattgccgcttacaaagctgacattatcttcttgccatcgaactctaatgccggcatcatccattattcgctggctgcaagagtatactactggtacccttgtcacataaaaagacctgagcttcacgtgcatcgaaaccaaaccgcgattcaaacgcatggacatttgtaac

SEQ ID NO: 22310 - DNA, 297 bp, Glycine max
  unsure at all n locations
  Clone ID: LIB3106-039-Q1-K1-F3
catatagaattgactattattatcgncatcttttttatcttacatctgcaatcaaagatggtgcaaatgtaaaaggatattttgtctggtcgttgttggacaattttgaatgggctaatggttatacagtacgctttggaatgaactttgtggactacaaaaatggcttaaagagataccagaaactatcagcaaaatggttcaagaattttctcaagaaatattagaatttaggtaacttatgattccatgaataatgtaatggaatgtatttgccatgtttaactntaaataact

SEQ ID NO: 22311 - DNA, 280 bp, Glycine max
  Clone ID: LIB3106-039-Q1-K1-F4
ttccaaggttaaggcctgcaaggatgggtcattttaattctaagcccctcattcattccttatctgctatttatgaaaccgctaagaggaggaagagagtggtgttctcttcttcttcttcagaacttaaccctgtgatgtcgccagaggtatcatattgtgttgcgacttgcctcattccacatccaaaaaaggttaacacacgtggggaagatgctttctttgtgagcaactataatgggggagttattgctgttgccgatggcgtctatggttaggc

SEQ ID NO: 22312 - DNA, 421 bp, Glycine max
  Clone ID: LIB3106-039-Q1-K1-F7
cccacgcgtccgttcagcttcagaatgtcttctggaagtcatgaaccttgccatggacgtcccttcagttggcaccatcaatgaaggattcaaggacgagctgcttcatcagtacgagatagagaagaacgaaggtgcaaagtcaatattaaaaaagtgtgtcaacattcttcaagactggaaatagtaaattgtacgagctatagctgtaaccctcatttatcaaattttgggtagatgaagcatttaatatgtatagctcgtgcttggtgtagtaggtccacatatagcgatgacaagaaaactactagtacccttaggtgaaatccgttacggattgaatttttaacacgatgagggtggatagcaaggtatctatattttatgaatattcataatttgaaattacttaaatgtcttt

SEQ ID NO: 22313 - DNA, 406 bp, Glycine max
  Clone ID: LIB3106-039-Q1-K1-F8
cccacgcgtccgcccacgcgtccggtcagggatgggtccctgtatctgctcctggcatgctcatcgtctcccctatgcagcaaatctaaaccctaattcttctattctccggcgacgcgcacaattcatcagcttcgcctcgaattcttctccacctcaagacgaggaggccactgccaagaaatcgtttgccgtggcgaccggcgagctgtttctagggctggcgacgcgcctgattaagagccgaaacaagggaagcagcagcctcgcagaagattcgggttcggtgggcatgtttgagaataattctgacgagagaatcggagcggtggtggaggacgagattgatcccgacgtggtttgggagcaaagagtgaaagacgtggaggcggagcgcaataggtat

SEQ ID NO: 22314 - DNA, 419 bp, Glycine max
  Clone ID: LIB3106-039-Q1-K1-F9
gctagccccacattcacctgaggcttttaaagcaatggctttccttgcagcatgcagtgctgctgcttcccttggcgtgtcagaaatgcttggaaaccccatcaacttcagtggtgccacaaggccagctccatctgcttctagtcctgcctccttcaagactgaggctcttttctccaaaaagaaggctacaccaacacctccaaaaaaagctgctgctgctgctcctgccaatgatgagcttgccaagtggtatggtcctgacagaaggatcttcttgcctgacggtctcttggaccgatccgaaatcccagagtacttgaccggagaagtccctggagactatggatatgacccatttggtcttagcaagaagccagacgactttgccagatatcaagcatttgagttgattcatg

SEQ ID NO: 22315 - DNA, 341 bp, Glycine max
  Clone ID: LIB3106-039-Q1-K1-G1
ctctgtcgatccatccctcattcctaatcctccaatccaaccacctgagcctcacactcacatatacacatatctgaacgcgtatcgcccctcctatggcttcaaagcgcatcctcaaggagctcaaggacttgcagaaagacccaccaacttcttgcagcgctagtccagtagctgaggacatgttccattggcaagcaacaataatgggtcctgctgatagtccttatgctcgaggtgtattcctagtcactattcacttccctccggattatcctttcaagcctcctaaagttgcctttatgactaacgtgattcacccgaacatcaatagcaatggt

SEQ ID NO: 22316 - DNA, 371 bp, Glycine max
  unsure at all n locations
  Clone ID: LIB3106-039-Q1-K1-E2
nncggtgncattctcattcttttctatctctctctaccatagccatggatccctacaagcggcggccatccagcgccttcagttctcccttctggactacaaattctggtgctcctatttggaacaacaactcctctttaaccgttggagctagaggtacaattctgctggaggattatcatcttgcggagaagcttgcacattttgatagggaacgtatcccagaacgtgttgtccatgccacgggcgctagtgcataaggtttctttgaagtcacccatgacatttctcacctgacatgtgcagatttccttcaagcccctggagttcagacgcctgtaattgttcgtttctcaactgtcattcatgag

SEQ ID NO: 22317 - DNA, 347 bp, Glycine max
  Clone ID: LIB3106-039-Q1-K1-C8
cccacgcgtccgcttcaaaccccaaatcccctccacctccactttgtctcctccccggtgaaagtcacagaggagtgttgccgccgcatggagcctacactcttcgccctaagtcacacccaattcaaacaaccccaaaatcccaattcgcaagaacgactttgacggcagatttggggatgaaggctaatttctagcaaggatcacgatgattcgagaaaggagaatgcgctgccagtgcggcaacggtcttctatttatctgttattatcatgattttgcttgggttctcttttagatcttaagcaagcattgatttgggagagggcgttcctgtgttgggtcgt

SEQ ID NO: 22318 - DNA, 386 bp, Glycine max
  Clone ID: LIB3106-039-Q1-K1-D11
cccacgcgtccggttactcatcattctccattctacgcatacacactaccggcggtggtctctcaaacatcggtgtcgcccttcgctccgattcgacgccgttattcccgccgccttcgatctcgacggcacgaaacctgagacgaacaactccatttctcagttatttgcttatattttgagaggagcacatggaaccgttttgtactaaagagaaagtgagagggggagatgaaataagttcttacagaagatggcgtcgaggcaaatggaagagattccgaagaaattggctgacctaaattacccgagagcgaatgcgcctgcacagtccctcctatatgctggcatggagcgctatgcccttctagagtggcttttctttc

SEQ ID NO: 22319 - DNA, 394 bp, Glycine max
  Clone ID: LIB3106-039-Q1-K1-D12
cccacgcgtccggttacatgggttgttttagtaccaacccataccctaacaaggggggaatgtgacacggaccggcttgagttaatttcattcagtgtagcagccagcagccataatcaacgtagcaattgcattaccaggttctgattcgttacatcagacaaaggaaggggtttgggtgagacctgacacaaaaacgttgcggaagcttctatattatcacctaaaaacgctaaccttctctttcacagacgacgacaccgccactaacggatctgattccgccttcaacagattcaccactctatctcgctgctgactctacttctcaacccaatctgacgatgctactgcaatcaaaaacaaggttgaagacataatgccaatcgctact

SEQ ID NO: 22320 - DNA, 416 bp, Glycine max
  Clone ID: LIB3106-039-Q1-K1-D3
gtcccaattccatatatacccacccatcaaaccttcgtctttccgattcactaactgggaggcttccttctctttgatgctattctaaatttcgcattggacatggctttcacacagcttatcccttcaccttcttcttcctccttaaaccctatcacactctccctaaaccctaaatccccaacctctccgccgcagcagcatttcaatctcgatattctccggcaccggcgccggaggcctaattccactcttcggtgctccgcctcctcgttctcggagaagcaccacacgaactcctcgaactccgacgacgtggtggagctccccctgttccctctccctctggtcctcttccctggcgccatcctccccttgcagatcttcgagttccgctaccgcatcatgatgcacac

SEQ ID NO: 22321 - DNA, 405 bp, Glycine max
  Clone ID: LIB3106-039-Q1-K1-D4
acccttccggtcaagcctcgttttttccaccctcaccattgcctttttcttccaacccataacccggcgttccaaactctcctctttccgactccccacccgccgccaccccaagccactcagattctcctcctccaccatcaccgccaccatctccgtcggcgacaagctcccggaggccaccttctcctacctggactcgtccggcgaggtgcagacgacgacggtgtcggaactgacgaaggggaagaaggcggtgctgttcgcggtccccggcgctttcacccccacgtgctcgcagaagcacgtgccgggcttcgtggagaaatcgggggagctgagggcgatagggatcgacacaatcgcatgcatttcggtcaacgacgccttcgtcatgaaggcatg

SEQ ID NO: 22322 - DNA, 403 bp, Glycine max
  Clone ID: LIB3106-039-Q1-K1-D6
caaacaatgaagccattgttttagacatgatgatggaaatattgatggctggtgctgaagcattgtccaaaatgagcaaccttacgttgctcatattccgtgatgtgaagtttatgggaatacttaattcagttaattgtctctccaataaactacaatttcttgagtggtataactatcctttctcctatttgccatcaagttttcagccgaacctgctggttgaattgatcttgcaacatagcaacatcaaacaattatggaaaggcataaagcatctgccaaatttaagagctttggatctcacttactccaagaatcttattgaggctccagactttggaggggtccttaatcttgagtggataattcttgaaggatgcacaaatcttgcacggatcca

SEQ ID NO: 22323 - DNA, 420 bp, Glycine max
  Clone ID: LIB3106-039-Q1-K1-D7
cccacgcgtccggtgagtttgttgatcgagataactagaaacagtgtgatgaagatgaaggtccttgttttcttcgttgctacaattttggtagcatggcaatgccatgcgtacgatatgttccctctccgaatgaacactggctatggtgcccgtactccggaggtgaaatgcgcaagttggaggcttgctgtggaagcacacaacatctttggctttgagaccattcctgaagagtgcgttgaagcaacaaaggaatacatccatggcgaacaatatagatcagactccaaaacagttaaccaacaagcttacttttatgccagagacctcgaagtccatcccaaggacacatttgtgttcagtatagatggcaccgtactctctaatattccatactacaaaaaacatggatatggg

SEQ ID NO: 22324 - DNA, 322 bp, Glycine max
  Clone ID: LIB3106-039-Q1-K1-D8
ccagcgtacgtgcacacgtctgattacagtcactggttattcagacgcacaggcggatgtaatagaaagcgatggtgtgtctacataagacggttatcaaaaacatcttgcttacttgaacagcaacggagatgctggagcagatatgatcgtcactcatttattctatgatacggatatattcctgaactatgcgaacgactgtccccaaattcgcaataaccagccctatcgtacctggtaacatgcccatttattactacaaaggctttatccgcatgactgctttttgcataacaaatataccagctgacattattgc

SEQ ID NO: 22325 - DNA, 396 bp, Glycine max
  Clone ID: LIB3106-039-Q1-K1-D9
ggaaaagaagatgaagaatgacccttcatttacatatgaggagacggttcagactgggatttctgccctgcaatcagttcttcaggaggattttaaggccactgagattgaggttggagtggtgcggaaggataatccagaattcagagttttaaccaccgacgaaattgatgagcacttgactgcaataagtgagcgtgactgagttcttgataaggatgtagttgttcaaactttctgatggtagagattatattatgtacttgtttctggaatcatcgaattgatttccttgtgatatttgagtggtgagttactcaagaatgatgttgaagatggtatttgatttcctattacaagcttacttgtgtaaaaaaaactgtaactggtacatat

SEQ ID NO: 22326 - DNA, 409 bp, Glycine max
  unsure at all n locations
  Clone ID: LIB3106-039-Q1-K1-E1
ccggttttccaaaatctcttctttcctaacccaacaaaaatcatttggggagcgtggntcgtggagttaggcagtggtggtggtcaaagttccttgggttatctctttggcagtggagaggcccctgccgcataaccggcaacaaacaatgccccagcccaacctgaagtgcaggctgtaaataatgcgcctccttcaaaagcatctcctcctactaaaacaatagaccctaacaaggctgctggtataaacagtcattctactgatggccagaacaccggcaacttcatcacggaccgaccctcaaccaaggtccatgctgcccctggtggtggttcttctctgagttatctctttggtggacctggagaggggaaatgataccttgcttgcaaagcttttgctcgat

SEQ ID NO: 22327 - DNA, 419 bp, Glycine max
  Clone ID: LIB3106-039-Q1-K1-E10
caagtgtgaagcttcatgaggcactttggtgtttgagctgaaggaacaaccttggtggcatgaaaggctacaaggcttggacctcaaccttcaacagcagcaccaccaccaccttcatccctttcaataataatctctccccaaattacccgttaacccctccatcctatactgcttcaaactgcttcccatccttccaaagccaaagaccaaaacttatagctcagaatttcaaaccccacattcttctatgcacctctctgcccagtccacaggcaagcagtgcttccacagctcaagctgaggagcatgaggttgaaattgcaaagggttacactatgacacaattttgtgacaaaatgatagatttctttttgaatgaaaaaacgaaatcaaaagaatggaggaagtacctgata

SEQ ID NO: 22328 - DNA, 394 bp, Glycine max
  Clone ID: LIB3106-039-Q1-K1-E11
cccacgcgtccggtttcatgctctgagagatcaaagagaaggttttctttctcggacgtggtggatttggtcatggagaaaagcaagtcattccctgaatactcctgctcttacactgaatttgggttcagtgaaagatccaactcatacaatttcaatgggccaaaccagaagggaaatgggttttctgcatcaagtgatccagaactcaagagaaagaagagaatcaaggcctataatgtgttgacagtggagggaaagcttaaaacaagtgtcagaaacagcttcaagtggatcaagaacaagttcagtgacattcgctatggtgtgtgaactatatgaccaaacataagagttgcttgccatggggctagcatgtgttcagtaatatcaa

SEQ ID NO: 22329 - DNA, 193 bp, Glycine max
  Clone ID: LIB3106-039-Q1-K1-E12
cccacgcgtccgctcgcagggtattgttggatgtgtacccaaaacatttcaagaacggtgatgtataatgggtcggtgataatcaccctagtaaataaattcgctttgtgttaaactcaattgtgtcccattaataatagcactctaatctcccacctacgtccgttctgaaaaggaaatgagcattctgcgt

SEQ ID NO: 22330 - DNA, 416 bp, Glycine max
  Clone ID: LIB3106-039-Q1-K1-C7
cccacgcgtccgcccacgcgtccgatttttatttctatgaacagagtgatgagggtggaggtacttgttttctgggttgctacaattttggtagcatggcaatgccatgcgtacgatatgttccctctccgaatgaacactggctatggtgcccgtactccggacgtgaaatgcgcaagttggaggcttgctgtggaagcacacaacatctttggctttgagaccattcctgaagagtgcgttgaagcaacaaacgaatacatccatggcgaacaatatagatcagactccaaaacagttaaccaacaagcttacttttatgccagagacctcgaagtccatcccaaggacacatttgtgttcagtatagatggcaccgtactctctaatattccatactacaaaaaacatggata

SEQ ID NO: 22331 - DNA, 196 bp, Glycine max
  Clone ID: LIB3106-039-Q1-K1-A4
cccgtgaaggtggttataaccgcaacggtggtggatgatgatatggtggcggtcgcggccgatatggatgtgatggaggttatactggcagtgggagagaccgtgaatatagctgtgatggtgggtcccactactctagaggaggcggtggttcgcatggacgaagctctaggaattaacattacgcgaattttta

SEQ ID NO: 22332 - DNA, 411 bp, Glycine max
  Clone ID: LIB3106-039-Q1-K1-A5
aaaaaacatacgatgtatacctacacatttctttcaaaaaacgttactatattcttgtgggggggattcttaacaagaaccctcttgacctaaaaccgtccttgttttcaccccaacaccagcaagggcccactgtaactactccacgaacagcttctttcaaatgtacggtcaagctcaagggtcattctactttgcgggtacagactctgttactgcattttaccccagctctagcggctgtatctacccttctagcgtcagctctgaaggcactgctacaactcctgtgactactacaccaacaatgtgcactacttttacaactgaaactccatcaactagcaccgtctccggcactgtcaccggcaccaccactggtactacttcatacagcacaacacctggagt

SEQ ID NO: 22333 - DNA, 350 bp, Glycine max
  Clone ID: LIB3106-039-Q1-K1-A7
cacattcatacaaattcaagatttatcattccacataacaaattaaagttagggagacgtacccttattatggccaaagaaggtcttggacttgaaatcactgagctaaggttgggtctacctgatgcggagcatcaagtaagtgtggtcaataagaaaaatgagaagaagagggcattctcggaaattgatgatggtgttggagatgaaaatagctcctacggcggaggcgaccggaaaatggagacgaataagagtcaagtggtggagtggcctccggtgtgctcttaccggaagaagaacagcatgaacgaatgtgcttcaaagatgtacgtgaaggttagcatgga

SEQ ID NO: 22334 - DNA, 373 bp, Glycine max
  Clone ID: LIB3106-039-Q1-K1-A8
cccacgcgtccgaatgcctccacagaaagagaggatccttcagagttcatcacgcagggagctaaagattttctctctagcataaaggatatagagcataggttcattcgagcttctgaatctggtacggaggtcttgaggttgttagaggctaacaaaatcaaggtgggatattctgaggcaaaagggaagtcgtctaccactgctttgttgtctgctgtccagcctgtttgttgcggtagaaaggcttcacctgttttccaggaacctgcccaaaaaattattagttggaaaaggacagcatcttctcgatcatcctcgtccaggaatgctttggctacaaaaacaaaggaagatattgatgatcgtggaa

SEQ ID NO: 22335 - DNA, 356 bp, Glycine max
  Clone ID: LIB3106-039-Q1-K1-A9
cccacgcgtacgcattcaccgccggactggccctctcctccattgtactctaggccggtctccgcggcggcgccgacatctcgacgctcaccccatgcaaggagtcgaagcagttaccgaatcgtgagaagcagtcaataaagaatctggagtcgccgctgaaactctacgaggcgggcagcgccctcgcactggccattaacgcaagcgttgagaacacaaataggaggttcgacaactacgcaaagcaagggttgctgtgcggcggctatgggttgccgcacctgatcgtgagcggagaccagaagcactgtggtgagttcaacacactccggatactatacctggacatctcg

SEQ ID NO: 22336 - DNA, 121 bp, Glycine max
  Clone ID: LIB3106-039-Q1-K1-B1
ccgaaaaaaaaaaaaaataaataaaaaattttcattttaaaacataaaaaaaaaaaaaaacgcccggtttttaaaaaaaacacccccccctaaaaataattctaaaaatataatcctaaac

SEQ ID NO: 22337 - DNA, 62 bp, Glycine max
  unsure at all n locations
  Clone ID: LIB3106-039-Q1-K1-B10
ttatttttaaaaaaaaaaaaaaatnntaaaaaaattaaatatataataaaaaatataataat

SEQ ID NO: 22338 - DNA, 383 bp, Glycine max
  unsure at all n locations
  Clone ID: LIB3106-039-Q1-K1-B11
cccacgcgtccgcccacgcgtcctctcaaccgaaacagattccatctctctcacgcggtgacaacaatatcaaattgctcccttctcttactcttcctcttcctctccaccctgcacataacttccaccctctcaacccccaccaacttcatcaagtcctcctgcagcaccacccattacccagccctctgcatccagtccctctccgactacgcctccaccatccatcaagacccccacgagctcgtgcagacagtcctgtccctctccctcaaccacaccgaggccaccaaaaccttcgtcgcaaaatgcaacatattcagaggcctcaaaccgagagaatacgctaccttgaangactgcgctgaataaatgagtgacag

SEQ ID NO: 22339 - DNA, 401 bp, Glycine max
  Clone ID: LIB3106-039-Q1-K1-B12
cccacgcgtccgcactatcttaatagtttagctctaaaccactgccaagtatgggaggttcttcatgctctttgagctggatttcaccttgcttatcccataagctaaacttgccacatacaaattgtttgcctcgcaacattgcaacttcatcttccaacactgtcttttgtgaattggacacaacccccatcggagaaagtcattgccggagaagaccgctactgctaggcattggagcattaactgaaaatttacaaccaacaaatttggtctttgctcaagaaaaaccacacagataccgagcttttgtggactatgaagatgggtattcttacgtatatcccattgattggaacgaatttgactacagggctcatgattctgcattcaaagacaga

SEQ ID NO: 22340 - DNA, 154 bp, Glycine max
  Clone ID: LIB3106-039-Q1-K1-B2
ttaataatttaaaaaaaaatttatttttccacacacaccaaaaaaaaaaacacgaccgttttttaaaaaaacgtagccccccctaattttattttttttttttacaacttacctatcttcccacccttctttttttctattctcttatcttcct

SEQ ID NO: 22341 - DNA, 393 bp, Glycine max
  unsure at all n locations
  Clone ID: LIB3106-039-Q1-K1-C1
attttgggcaggaaataacctcttctgcatacccttncacccagcgaaaagaggcgggaggctgtattgtacagtagaagttaccttgaaaatcagatggctgttgccctgggtggaagggttgccgaagaggttatttttggccaggaaaatgtcaccaccggagcatcaaacgacttcatgcaagtttcacgagtggcaaggcacatggttgagagatttggattcagcaaaaaaattggacaagttgccattggtggacctggtggaaatccattcttgggtcaacagatgtcatcgcaaaaggattactccatggcaactgcggatgtagtggatgcggaagtgagggaactggtagagagagcatattctaaggcaacacatattatc

SEQ ID NO: 22342 - DNA, 422 bp, Glycine max
  Clone ID: LIB3106-039-Q1-K1-C10
cccacgcgtccgggagaaatttaactcgaccttgtatgatgaatgggttaacaaggggaatgcaccggcactgcccgagactcttaagaattacaacaagctggtgtctcttggcttcaagattatattcttgtcacgaagaacactggacaaacaggccgtaacagaagcaaacttaaagaaggctggctaccacacatgggaaaaattaattctcaaggatccacaagatccttccactccaaatgcagcttcatacaaaacagcatcgagagagaaactgataaggcagggatacaacattgttgggatcattggagaccaatggagcgatctcctctgaggccacagaggcgaaagcaggacctttaagcttcctaatcccctgtactacattcagtagttccttcacctctcaacaa

SEQ ID NO: 22343 - DNA, 421 bp, Glycine max
  Clone ID: LIB3106-039-Q1-K1-C11
caaccacttgccatggcagcagcagctttaatgtgtatgagcttcaacctggcggcagcattcaacggtctctctttttcttcttcctcatcgctcttcgctggaagtggtagttattctcttcgcgcgggtcccacctcggtggtgtcgctgacccggcgctgcccgctgaccatagagaacgcccacatgaagggggcgggcagcaccaagaacggccgcgactcgcagggcaagcgtctcggagtcaagatatacggcgaccaggtcgccaagccccgctccatcatcgtccgccagcgcggaaccaattttcatgcacgaaagaatgtggggcttggcaaagattataccattttctccttgattgatggagttgtaaactttgagatatatggacctgacacgaaaaatgtgagtg

SEQ ID NO: 22344 - DNA, 63 bp, Glycine max
  Clone ID: LIB3106-039-Q1-K1-C12
gataatcgtcatctgatgaatcattttttgaattccaaacctcctactcattcaggggatttg

SEQ ID NO: 22345 - DNA, 419 bp, Glycine max
  Clone ID: LIB3106-039-Q1-K1-C2
accacgcgtccgaaaaataaaaaatttttatttttaaaaaaaaaaaaaaaaaaaaacagaaggtataaattaaaaagaaggaaattatattaaaaaaaaaataaatattataaataaaaaaaaaaaaaaaaataatataaaattataatatttttatatcctaatatctataaaaaaaattaatctcacactaatttaatgatttgcatctcttcccctttttagatttatatatatttgcaaagatttataatcattcatttttttaaaagctcactttttttaaaatcttaagtttgatcatatatgaattttaacattaaattcacttctttattatttttatcacatttttaattttatttcttattgcccttttactatataatctaataattctccctcctttttttttttat

SEQ ID NO: 22346 - DNA, 416 bp, Glycine max
  unsure at all n locations
  Clone ID: LIB3106-039-Q1-K1-C3
cccacccgtccgaatagttggaattattactgccttcaagtatcacaaagaaagtgggatggccaatctctacagcttgcattcatggcttggaattggggttattgtcctttatggcattcagtggatatatgggtttgtgatctttttcttccctggtgggactcccgacattaggcgcgcctcacttccatggcatgcgctattacggctgtttgtatttgtcttggctgtgggcactgctgctcttgggtttctggagaagctcactttccttgagaactcangattggacaaatatggttctgaggctttgcttgtcaacttcactgctattatcacagtcttattcggtgcctttgttgtgttatctgctctagctgatgctcccccagcccctgccgcagatgactatg

SEQ ID NO: 22347 - DNA, 425 bp, Glycine max
  Clone ID: LIB3106-039-Q1-K1-C5
cccacgcgtccgcccacgcgtccggccatttacaaaaatggtaaccattaaagcatggtacacagtccttccaaatgaaccaactccggagggccttttatggctatctgatattgatcaagtggcacgtctacgccacacacccaccatctacattttccatgcaaaacacaaccatgatacattaattgagaggatgagaaactctcttagcaagattttggttcactactatccaatagccggtcgattgagaaggatagaaggtagtggtcgattggaattggattgcaatgcaaaaggggtggtgttgcttgaagctgaatccacaaaaacattggatgattatggagactttttacgtgagtccatcaaggacttggttccaacggttgattacacaagccctatagaggaacttccct

SEQ ID NO: 22348 - DNA, 397 bp, Glycine max
  Clone ID: LIB3106-039-Q1-K1-C6
gttctagatcgagtgctagagaacttttttttgtttacttcttttttgcttttttcaggggttacttccatgagtggacgtgggcttctcaacatcatacattgactctatcaggttcattcctgaatcaattagtttcttcactttcactctctaactgggaggatcaaagcgcgtgtctttgtcctcttggcgatgaatcttcttcttcttcaagtgtgcttcataaagcagtaggctttggaagcaacaaaagagttgcaaagtgggtagtgatcatggcagctgtaaagcctgaggagataagccctccaccaatggaccaacttcaaggcttagaggattggatttatttttcactgtgagtgatatatatacgttgaactgatatcagctg

SEQ ID NO: 22349 - DNA, 339 bp, Glycine max
  Clone ID: LIB3106-038-Q1-K1-G3
accacgcttacgaaagacaccgttttattttgttaaaaatattcaataaaccgtggtagggctcttaacttgcgggttgcgtgaagaattgaaaattttcgaaccctgttctttcttatcttttaaaaaatgtgactgttatagtgagcttaacaaccttcggaactatatcgtctaaaaaaaccaaaaaaaaaagctttgaaaatggctcaagaatcactcttagaaacctccgatatatcgcccacttcgtctactgtacaatcgcaaccagatccatatctttcaatgaacgtttcttttaggcggctcaacgcacaagctccagaatttgtgccc

SEQ ID NO: 22350 - DNA, 423 bp, Glycine max
  unsure at all n locations
  Clone ID: LIB3106-038-Q1-K1-G4
gccatttcgaaccgctgcttcaaccattcctccttgctgaaccggactctctccgtaagccctggtggaaccgctcctccacgcgccatggccaagcccagtttctcaactgcccaagacctaatggcttctcctggcgattttgaatttgcgcagcctctgaaaattgtggagtatcccgacccgagattgatggccaggaataagcgcataggtgccttcgatgatagtctgaagaagcttgtccacgaaatgtttgatgtaatgtacaaaactgatggtattggtctctcagcaccccaattaggaattaatgttcaacttatggtgttcaatccagtangtgagcgtggtgaaagagaggaaattgttcttgtaaacccaagagttagccaatactcaaagaaactgacactatttaat

SEQ ID NO: 22351 - DNA, 308 bp, Glycine max
  unsure at all n locations
  Clone ID: LIB3106-038-Q1-K1-G5
gttagatctggcccaaagtcttctgctgttgatcttcatcagttgcctcacgaaaaaggggtgagtggaacagttggtcggagcgtttttgaattggattataccccactttatggattcatatctatgtgtggaagaagacctgagatggaagatgcaggtgcaactgtacctcagtttctgaaaattcctattcacatgctaattggtgatcgggttattgatggaataaacaagtgttttaatcagcagatgacccatttgtttggagtctatgatggtcatggtggctctcangttgcaaacta

SEQ ID NO: 22352 - DNA, 138 bp, Glycine max
  Clone ID: LIB3106-038-Q1-K1-G6
gcaagctacgaaaacattgttttggtgaaaaaatatctattataacgggatggttgaattagttgtagactggaaatagaattggctaatctgttaactgaacactacctattcgtttataatagtgtgactgtatta

SEQ ID NO: 22353 - DNA, 137 bp, Glycine max
  Clone ID: LIB3106-038-Q1-K1-G7
gccactcaaacgactaccattctcatcttggtgagcttaatacaccaatcggggttagggctacaaattacggaaaggtacactcatttgattctatggcgactatcacaatttacattgaccatggcctctttgat

SEQ ID NO: 22354 - DNA, 299 bp, Glycine max
  Clone ID: LIB3106-038-Q1-K1-G9
accactcgtccgactacttctactttcctttgctctcaaaccttatcccttatcctcccgggaccaaaccatgtctacctacgcagcttctctcgcactcccaaccctcactctccgaactcgacaacctctctgttctccccaatgcttcttctcgtacctctccctcacccctaactccaaacccatttacatttccgacgatatcctcagaacaacgctgtcgtcgacgtcaccgttgtcgctagcgtctcgcttcgttccccatgtcactgtgatgcagcaagacgaggacacct

SEQ ID NO: 22355 - DNA, 380 bp, Glycine max
  Clone ID: LIB3106-038-Q1-K1-H1
caaacacagaggttgttcataggagttataatgtcataattcgaaaaaatgcgggtagggtcgataatgattgcagtcggactcaacactatacaagtggatgccgacatttacaagagcttgcacatcactcggcgtgttcaatacgcgtcaattctgggcgaatacctacatcgagtgttggataaaacctaaggatcagctgctcaatcaatgagatcattcttatgtggaagcattgaaatgctaatcaagctcggacctggtgattctgacggaactagtacagtctactatttatactgtgcatgaagccaacatgacgagatacatgttgagttcttaggcaacagttcaagacagtcatacactgttcacac

SEQ ID NO: 22356 - DNA, 344 bp, Glycine max
  Clone ID: LIB3106-038-Q1-K1-H10
agcacgtctacaagtaccccaacctcgcattcttcaactaccattgtccacatgcacacgtgaatccaataaaatgagatcagattatctgaatgattgctccatctcttgctctctactactcttctaaccttcatattatatgctctcgttgcttattttctcaattattattattctaatggtaatcatatactttcacttgatattctaattgacctctatgtctcatgctattgcttggacactaactatgtaactctaactgcctccactgctcaataattacttatattgacgttccataaactataccattccttagtattcattcactgttcatc

SEQ ID NO: 22357 - DNA, 255 bp, Glycine max
  Clone ID: LIB3106-038-Q1-K1-H11
agcatacacacttacacaccaacattgagacattcttatattgcagtggccacgtccttgggtcctgaatgggatttattacttacataccctttcattcaaaaagttgcagcattggatacaacgtatgtactacaaccatacgagaatggttgagtccttgatgatgatttttatggtaaaccaactgcacactattatgattctgaattatcactaatctcaagtggtattaaaattgcaaattacatatat

SEQ ID NO: 22358 - DNA, 244 bp, Glycine max
  Clone ID: LIB3106-038-Q1-K1-H12
atatgctggcgaacacaggaacgtggagactttcaaatacatttgtagcatatggccatgagattcaaagctgattaataacaatcttactggacgattcgaaatcttgcattcttgatttcaggataccatctacttatatacgataatggtatttgacatgacagtgacaattcagaactattatacgcacattacaatgattgtctactatgacttaactagggatgctgttctaatgaca

SEQ ID NO: 22359 - DNA, 269 bp, Glycine max
  Clone ID: LIB3106-038-Q1-K1-H2
actctctccaaaacccttgttgaacctgtactacacgcgccattgccaatcccaatttctcaacttaccaaaacctaatggcttctcctagcaatatttaatttgcccaacctctgaaaaatgtggactataccgacccgaaattgatggccaagaataagcgcatagctgccttcgatgataatcttaataagcttgttcaccaaatgtttgatgtaatgtacaaaactgatggtattggtctctcaccaccccaattaggaattaat

SEQ ID NO: 22360 - DNA, 355 bp, Glycine max
  Clone ID: LIB3106-038-Q1-K1-H4
gccacgcgtacgcaaactggtactggtgctcatttgtttgaccaaggactcaacattggggttggctgtcatttgagaaaactagctgctgcatttaagcatactgaggaaaaagtatgctgatttattgctagtagagaagatttaatctcttgggcgcaatcaaatgctactgcagctgctacataaatgatggtcaaaaatgctcacgtgacattcactctggtacgttatggataatgatactcgacaagatatttatgacttgaaatgtcaagatgtgagagtgttgaaaccacatatgggatgaataaacgtacctcggagtgagcacattctgaaatgtaatattttt

SEQ ID NO: 22361 - DNA, 88 bp, Glycine max
  Clone ID: LIB3106-038-Q1-K1-H5
gccacacgtacgacaacgcgtactgctattcgtgtggataacgtgattctcaatgatggggctttaagcatctgtaggtggctcttta

SEQ ID NO: 22362 - DNA, 326 bp, Glycine max
  Clone ID: LIB3106-038-Q1-K1-H6
accatacttcaaccatttttactttcttaaccggactctctccaaagggcctcgtggaaccgctcctccacgcgccattgccaatcccaatttctcaactgcccaagacctaatggcttctcctggcgattttgaatttgcgcaacctctgaaaattgtggagtatcccgacccgaaattgatggccaagaataagcgcataggtgccttcgatgatagtctgaagaagcttgtccacgaaatgtttgatgtaatgtacaaaactgatggtattggtctctcagcaccccaattaggaattaatgttcaacttatggtgctcaatc

SEQ ID NO: 22363 - DNA, 336 bp, Glycine max
  Clone ID: LIB3106-038-Q1-K1-H7
gccatttcgaaccgctgcttcaaccattcctccttgctgaaccggactctctgcgtaagccctcctcgaaccgctcctgcacgcgccatggccaagcccagtttctcaactgcccaagacctagtggcttctcctggcgattttgaatttgcgcagcctctgaaaattgtggagtatcccgacccgagattgagggccaggaataagcgcatagctgccttcgatgatagtctgaagaagcttgtccacgaaatgtttgatgtaatgtacaaaactgatggtattggtctctcagcaccccaaataggaattaatgttcaacttatggtgttcaat

SEQ ID NO: 22364 - DNA, 92 bp, Glycine max
  Clone ID: LIB3106-038-Q1-K1-H8
accaaatcgaagaaaagggtgtatcattttggggaactaaatcaaaatctatacgcgggggttgttgacttcgacaagggacacacctttgc

SEQ ID NO: 22365 - DNA, 379 bp, Glycine max
  Clone ID: LIB3106-038-Q1-K1-G2
ggcccttgagcttttctttctttctctgctctcttttcttttaggtttccactctcacgacactcgccctcttctctttctctgcaataatctctcttctcttcttcactctctcaactcctgccaaacccccatttccgcagttcttaaatttggagtctgatgtctccgccattgctggttaccgaagatgaaaggcagtgccatgcctcgatggtagcatctgcatcttcaccatccctgaactgtttctccctaaatgaggccggatttaaagaatgcaattacctgggattgtcagattgctcttcggtggacacttctactgtcccgaatttgtctgatgagaaaaaggagaatctgaatttgaaggctactg

SEQ ID NO: 22366 - DNA, 152 bp, Glycine max
  Clone ID: LIB3106-038-Q1-K1-H9
acacgcgtacgagtacaggttcattgattatttcacgcacgctatgtcttatgggaagagtggtagatattctcaagggatgaatttgttgacggcttagagcaactagatatgctgacacttcaatttgtctgaataggctaagatttgga

SEQ ID NO: 22367 - DNA, 403 bp, Glycine max
  Clone ID: LIB3106-039-Q1-K1-A1
ggaagtcatgccttttgagagtttgaggaaagaagcacaggatcattataaccagatgcaaggggtctctgtatataaaatggatggcaataagttggatgatctagtctgtgtgagacattccttaaaatccgaggtgtaaatggcgtctttgctttctattgttattctcttatcacaccctacagtcttctaaatggaatctgggatgaagttacttttcgaggttttcatggctcctcatctgtcattctgtctcatcacttattgcagctacagagcacaacacgaatctcaactccaaggaaactgaggaagtcaatatgcataatttcatcaatccagatgattcatattttaaggcgattcatggtaaggggtctagaaatcttaatacaggaat

SEQ ID NO: 22368 - DNA, 355 bp, Glycine max
  Clone ID: LIB3106-039-Q1-K1-A10
cccacgcgtccgaccacgcctcctctcacgcttccgaccacgcgtccgcactgaccggtcttggtagagatgtcaagtttaaaccttcaaattaatcaaaccattttaatttgcctttagattctgactcactgctgctatggcgctacgcgtacttcttgtgttggggatgttgctgatgacgctccttgttaaggtttcatctgatccaaagatagaagaagcaatactggcatcagaagaagaactagaatttcccgataacgagccacttatcgcgagagactccaacagcaggctaatgcaagatattgattgcggtggattgtgcacgactaggtgctaggcacattcg

SEQ ID NO: 22369 - DNA, 326 bp, Glycine max
  Clone ID: LIB3106-039-Q1-K1-A11
gcacaacggacgaaaatgtcacctttggtgattgatatttgctagaagcacaagacggcttacaggagtttgacatttgtttaacccaatctttggactataaagaccatcaggactgttgctctttaggccagaaatctaactgaccctgcttttcagaatttgttgtgggatgatattaacactcatggatgattttagggaaaagattgaggatcatgaatctagtttgtctctgttttttcccacactattgacaagctgttaatctacatgttagttgataatttgttacatgtgacattgcttaattgggcatggaagat

SEQ ID NO: 22370 - DNA, 359 bp, Glycine max
  unsure at all n locations
  Clone ID: LIB3106-039-Q1-K1-A2
acgaacaaagttcatttcttgtgctttgctttattcctcaaaaccaaacatgtcggacagatgcggcaactgtgactgcgctgacaagactaactgcaccaagggaaacagctatggtgttatagtagagactgagaagagctacatcgagactgttgacatggatgttccagcagctgagcatgatgggaagtgcaagtgtggcactaactgcacttgcacggactgcacttgtggccattaaggaatatgtatgaaaatgtaattgccatgtgtttggcaatacaaatctccaaataatgtaatcttcgtatgaataaatgtgtgctgttatcctacttcaaannananaaatttta

SEQ ID NO: 22371 - DNA, 400 bp, Glycine max
  Clone ID: LIB3106-038-Q1-K1-E6
aaaaatattattaagatgatcaacattattggagcacttgttctactctttgcgtttctcttcctcagttgtgtgtatgcacaagacacaacaacccttgtgcctgcaatcataacttttggtgattctgctgtggatgtagggaacaatgactatcttcccacccttttcaaggctgattaccctccttatgggagggactttgttaaccaccaacctactgggaggttttgcaatggcaaattagctactgatttcactgctgacacattgggtttcaagacctatgctccagcatatcttagcccacatgcatcacggaaaaacctccttattggagcaaactttgcttcagctgcatctggttatgatgaaaatgctgctacttttgatcacgcga

SEQ ID NO: 22372 - DNA, 297 bp, Glycine max
  Clone ID: LIB3106-038-Q1-K1-E7
gagataactagaaacagggtgatgaaaatgaaggtccttgttttattcgttgcgacaaggttggtagcatggcaatgccatgcgtacgatatgttccctgtgcgaatgaacactggctatggtgcccgtactccggaggtgaaatgcgcaagctggaggcttgctgtggaagcacacaacatctttggctatgagaccattcctgaagagtgcgttgaagcaacaaaggaatacattgatggcgaacaatatagatcagactgcaaaacagtgaaccaacaagcttactgttatgcc

SEQ ID NO: 22373 - DNA, 303 bp, Glycine max
  Clone ID: LIB3106-038-Q1-K1-E8
gagaatggttccaaaggggttaacctttttggctgtcttaatatgctcttcgggactgtcactgaatcctgctgatgcggggcaagcgcaacataatggcctcgatatgaacttgtacaaggaatcatgccttcaggctgaagacatcatcacagaacacgtgcagcttgtctacaagcgccacaagaacactggtttctactggctgacgaacatcatgcatgactgggctgtacagagtggtgatgctttactgttgctggactccacaagaaggaacttgtctgataaggaaacagatac

SEQ ID NO: 22374 - DNA, 305 bp, Glycine max
  Clone ID: LIB3106-038-Q1-K1-E9
ggaattacgataagtgtactagcaattgtatggttagaaagggaaatatccacagctatagaacaacgtattggacctgaatacacaggtccttttggagttcttcaagctctagcagacggaacaaaattacttttcaaagagaatcttattccatctagaggagatattcgtacattcagtataggaccatctatatcagtcatatcgattataataagctatctagtaattccttatggctataactttgctgtatctgatctgaatattggtgatcttgtatggattgctatctctagtat

SEQ ID NO: 22375 - DNA, 284 bp, Glycine max
  Clone ID: LIB3106-038-Q1-K1-F1
gccacacgtgctctacaatgactaggtttatccatataacggtgaatagtatgcacgcggggtatttggatgtaatgacttaccttaccctcgcagaagaagaaccggaatatgaaaaactatataacatcccaacagtgagaagcccagtgattgtgtttaccttacgagagatgtaacattaagacacttgaagtgatcagattttctagcttatggaataaaatctgtggaccaagatcactatcctgggttgactgatgcattggatggaaatctattga

SEQ ID NO: 22376 - DNA, 155 bp, Glycine max
  Clone ID: LIB3106-038-Q1-K1-F10
gatacttctactactatacgatcctttgattactcactccaataagtacttacatctatgggacttcaccaaaggcctaaatacatcggttcttattcagttctttcattaatattcaactgtactcatttacttttcaactgatacttattcta

SEQ ID NO: 22377 - DNA, 400 bp, Glycine max
  Clone ID: LIB3106-038-Q1-K1-F12
gccattcatgggctcacacgctcctcatatcttccacacgctcctgcatcttcgccctttgaaatctcgaccccatcagaagctaccatatctgagactcctagatggtcgtcctttggtaatgagcctgaagccaagcccgacacgtgtagtcagcaagctttgtctattacccttcttgagaataagatgcgtagagatgattctgcaccttcaaaggaaagattaaaggcattctataacaccccttactccacgtatgaaaccattgatcagggacgagggccttgcttcacggtgataagaactgcttttgaggatatttatctatcaagccctggatccttgtcagataaatatggaaaggactactttatctgcacttgcccttgttcaatac

SEQ ID NO: 22378 - DNA, 309 bp, Glycine max
  Clone ID: LIB3106-038-Q1-K1-F2
ctaaaagatggctatatgtttgagtgtacaacaggcttctcagttctcccacatgtccggtacttgatgctttaaggaagaaactgtactttgagatagcagatggcttaaatggacgtgtttgggtcgatgcatcatctgcacacacaactattgttgtagctaatgcgattatgaactctgagacattgagtggtgctcagcagagaataatggttgaaaagctgctgcagacgatccagtgatccttgcatttttgattggccatgcatataagcccttgtgatttcaatttcatagcaaaaatac

SEQ ID NO: 22379 - DNA, 167 bp, Glycine max
  Clone ID: LIB3106-038-Q1-K1-F3
tcggatatgcgtcttacaaacatatctcttttattactcacaacgggacactactgtgtgggggtgacattgaaggatgatcgagcacgaggtgttcatctctcgttatgattaaatttaaaattcgtaattaacatcttttttgtatgatatgacaagagtacttt

SEQ ID NO: 22380 - DNA, 405 bp, Glycine max
  unsure at all n locations
  Clone ID: LIB3106-038-Q1-K1-F4
ctttgctcattcagctggtggtcgaatgattgggaaaaaggttgctgaaaagttactggacaacaaggcgttggagttctacaaatgggatgatgacctttcacgattggtgcagaatgtgagagacaagttgaataaagttgctgaaccttggagtcgggaagaaaaggaccactgtctggaaaaaacagaaaaatcattcaagctctctggagagattctgcgtttgattttatcatgataatagatgccctgctatctgaggaattatgggtattaaagtgcatggcggaagccaacaacattaccatatgtgaattattttatttccaatacgcacaggaataatagaactgatgttgattaacttgcttgtctcaggcanngatgatactgggcctcgca

SEQ ID NO: 22381 - DNA, 336 bp, Glycine max
  Clone ID: LIB3106-038-Q1-K1-F5
attttctgatttctcacacccaaacattttctgcaattactccaccgggaccctactgggtgaagatgacattgaaggatgatcgggaggaggtgttaacttgcgttaagtttaattttaaaattgtttttggatcttttgtgtctgatatgtaaagtgtcctttgcatgcctgatctggggaacttttttgctttggtgtgaagtgttttattgtattatgcactgtatatcacctttcaattcaagagtcgtatcgcataaggccaatattctctaatgtcagagtcattagactcacgatgttgtataaggtccatgactgaatttctctttc

SEQ ID NO: 22382 - DNA, 420 bp, Glycine max
  Clone ID: LIB3106-038-Q1-K1-F6
aaaagaaaaaagagaaacaaatggcagcactgggtggctttaccgacatcagcggagcacagaacagcatcgatatcgaaaatctcgctcgctttgctgttgatgaacacaacaaaaaagagaatgcagttctggagtttgtgagggtgattagtgcaaagaaacaagtggtttctggcaccttgtactatatcactttggaggcaaatgatggtgtgacgaaaaaggtttatgaaactaaggtgttggagaaaccacggttgaacatcaaggaggttcacgaattcaagcccatcactgttgctgttaatcctctttcggtgacggtctagcacatagctaggttatggaagtgactagcttggccgcaagagtaataatatgtatgaactgaataaatgtacctattaactctacaaa

SEQ ID NO: 22383 - DNA, 323 bp, Glycine max
  Clone ID: LIB3106-038-Q1-K1-F7
gcgcgtgtatgtactcctttgtttagtaaccgaccgcgagagacacagagagagaggaggctatattcgcgcctcgctctctttatttctgcgccaacgacaccaccgcatctttctctacgatctgcattttccattctcttacgatgccgctactctacaattcctcgccctgctgcaccgccgccgcattggttaactcctcggaccggaagccccgattcgtgtctacttcatggaggaactgcaaggtcacatgttcaattcttcggctgtctcagaatgacaaattcaatgtgtctcgggtagctcttaaccactct

SEQ ID NO: 22384 - DNA, 380 bp, Glycine max
  unsure at all n locations
  Clone ID: LIB3106-038-Q1-K1-F8
gcaacagaaacaaatgtggtagtattaggtggcatgaccgaaatgacaggagcggccagcagcgttgagatcaacaatctcgctagctttgctgtanaggaacaaaacaaaagatagaattcagctctggactttgtgatggtgattagcgcacagcatcaaatggcttctggtgtgaattactacataacattggaagcaaaagatggtgggatgaaaaatgactattatgcgaaagggtgggacagggaataccaatagttgatagaattcatgcctacatttggcacatgaagcgagatcgaccatctcgctagctaagctgggagggccctatacataagatagaatgcagatattgagtttgtggggctgaatag

SEQ ID NO: 22385 - DNA, 304 bp, Glycine max
  Clone ID: LIB3106-038-Q1-K1-F9
gatacttgtgttactatatgattcttttattactcacgccaataggtacgttcatcttctggcctttcaccaaaggcgaagagcgatcggtttctattcggttctgtcgttagttttcgtgtgttttcttttgctttggatctgatgcatcgtgtttttgtgtgcaggttatcaacgaccgagagactggaatgtgcagaggattcggatttgtgaccttcgtctcagagcagtcaatgaaagatgcgatcgcatgaatgaacggtcaagaccttgaccgtcgtaacatcacttgtcacgaagc

SEQ ID NO: 22386 - DNA, 177 bp, Glycine max
  Clone ID: LIB3106-038-Q1-K1-G1
gcgacaaaagcaatacactcaaagatctagaataatttaacgatgcctcactataacgataaatgcggcaatacccgcctctctgtactgcacttatctataacgactcgttccaaatctctggaacgtgccttcagcagatatggaagagatcggggtgacgatataaaacaatga

SEQ ID NO: 22387 - DNA, 323 bp, Glycine max
  Clone ID: LIB3106-038-Q1-K1-G10
gatatgtcagcatttaaggcagcaaatccagatgctatctttgaagattttattcggtgggattcacctggggattgggaagaggatgatggccctgagggaagtaaatcatcatcatccagtgctcatgacattaagaagtcaaaagatagttggcctccacaagggcggctttctaagagaatgtctgaacatggaaatctatggagaaagctttggaataatgcacctgctcttcctgcttctgaacagaagcctcttcttgatccaaatagggaaggaggaaaagttcttcattatcttgaaactctaccaccacatga

SEQ ID NO: 22388 - DNA, 154 bp, Glycine max
  Clone ID: LIB3106-038-Q1-K1-G11
aacacgcgttcgtctacgcgttcgtatacacattctatcacgcgtgctaatattcacaggagttacaattaagattgagaagggagttataagactgatggaaatatgagcattattatacaatgctcatgaattttttatattaaatgatagt

SEQ ID NO: 22389 - DNA, 393 bp, Glycine max
  Clone ID: LIB3106-038-Q1-K1-E5
cccacgcgtccgaaagattctaaagaaatataactaatattctttagaataatcaaagggaatattaaattcaaataaattttagatagaaaaaagacttaaaaaggaggatttgaaatgcgagatctaaaaacatatctttccgtggcaccagtagtaagtactctatggttcggggctttggcgggtctcttgatagagatcaatcgtttttttccagatgcattgatattcccttttttttcattctagttattgacacggaaaggggtgaagaagattatagatccaattaagtattaaatatatgtaattaatatgtaattaatctcctcttctttatttcgactgttatttcttcttttttttacaattgtaatagaataagttagg

SEQ ID NO: 22390 - DNA, 431 bp, Glycine max
  Clone ID: LIB3106-038-Q1-K1-G12
gaggggcagtagccgagattacctgagttgcataaatgaacacgattgtttagacccagagcatcaacatcccagacggcgtgagcatcaaagttcatgccaaggtcatcgaacttgagggccccctctgaaaattggtgctagacttcaagcatttgaatctagattttcagctcattactgacgaaaacggtttaagaaagctgaaaatcgacacgtggtttggttctcggaaaacatgcgacggcattcgcaccgacttgagccacgtggagaatcttatcaccggcgtcaccaatggctaccgctacaaaatgaggatcgtttatgcccatgttcccatcaacgcaagcatcggcaacagcaacaagtctattgagatccgaaatttccttggcgagaaaaacgtgaggaaagtctacatgcttgat

SEQ ID NO: 22391 - DNA, 438 bp, Glycine max
  unsure at all n locations
  Clone ID: LIB3106-038-Q1-K1-C9
gagatggcagctgcaacatctagtgctgtgttaaacgggtttggatctcacttcttgtgtggaggaaagaggagccatgcccttcttgctgctagcattggagggaaagttggtgcttctgttagtcctaaaagagttattgtggcagttgctgctgcaccaaagaagtcatggatccccgctgtaaaaggtggtgggagtttcatagacccagaatggcttgatggctcgctaccaggtgactatggttttgacccactaggactaggaaaggacccggcattcctgaaatggtatagagaagctgaactcattcatgggaggtgggcaatggctgcagttgtaggcatcttcattgngcatgcatggagtggagttccatggtttgaggctggagcagatcctaatgcaattgctcctttctatttggctctctct

SEQ ID NO: 22392 - DNA, 172 bp, Glycine max
  Clone ID: LIB3106-038-Q1-K1-D1
gcgacatatataactgcttctaatcatttaaaactcactcggaacatatctccgaatcgggccatacaaaaaacaaaaacatggctgtcttcatcggtaacaaacccggtcctttatatcgcttatatcgagccgtcgctaccctcaacttttactgtatggactcagcgta

SEQ ID NO: 22393 - DNA, 280 bp, Glycine max
  Clone ID: LIB3106-038-Q1-K1-D10
taaaaatacaataaatatactaacaaaaaaaataattaaaaaaaataaataaacaaaaatatagaacaacaaataaagacctaaatacacaaaatacttttaaaaatattcaaacatctaacagacttaacaaaattacttttcaaacataatcttatttcatatagaaaatatattctaatattcactataatacaatctatatcactcatatctattataataagctatctaaaaatttctttttactataactatgctctatctgatcttaacattt

SEQ ID NO: 22394 - DNA, 321 bp, Glycine max
  unsure at all n locations
  Clone ID: LIB3106-038-Q1-K1-D11
ctcctcagtatttttatgtcattaaagggagcaatggaaatcttaagacttccttttgcggtgatcaatcaaggtcttctcaggcaaatgatgttcgcaagcaaatcgttggcagcgctgttccagtacttaaagatgaaaagttttccttgcggatactggtggaccattctattgttgaaagctttgctcaaggtggaaggacggttgtgacatctcgggtttatccaacaaaggcaatctatggagctgctaggttgttcttgttcaacaatgctactgatgccactgtgacagcctnactcaatgtttggcaaatga

SEQ ID NO: 22395 - DNA, 282 bp, Glycine max
  unsure at all n locations
  Clone ID: LIB3106-038-Q1-K1-D12
cccacgcgtccggtatcttgaatacgatgatcctaaaacggtatttcgaggagaggcttgggatgatcttggaggaactttgtgtgaaaccgagtatcaaaaaggtgtctactagagaaatgtgaaaaccctttttattgccatgactactgcgttttcaatgtcaaccagtaataattgtaatgttgaatgtacataggtataaagctatggatctcagtttatattgaatttcagtatcgctataaaactntacaataattatacactaaatttcataaa

SEQ ID NO: 22396 - DNA, 383 bp, Glycine max
  Clone ID: LIB3106-038-Q1-K1-D2
actagctgttaaactcactgggtttaaaaatacagtgcccggtgtgtttacattgaagggagttggcgccgatgaaattatcggctacaacatcttgatctgtcctcttgataataacccatgtgggtatgttgcggttcatttcgaccaattccgaaacaggcgtttggtggtgtctgaggttcacgacgatgggttatgggttatgtttcagaaactttcatatgcatcaggattaactctttcatctgcatgaagcacccgttgccctcaaaagtcatatatgtactttcacgtagtgagagacatgagtgagactaaataaatgcttcatgctgcattcaattatggcaagtctacataaaataatcgaagtttatgtc

SEQ ID NO: 22397 - DNA, 295 bp, Glycine max
  Clone ID: LIB3106-038-Q1-K1-D3
atcacacgtcccagaagacacctccaggtttggacgaatgcgtacagattttgagccgctgcaactaccttgtctctgacgatatgtacgacaatgccatgtgctgcatgtcttaggaagttgcttgtggctgtactgagatcctcatgcgataccaggagttggacattgagattgatttacgtaattaatttctatatatgcttaatctactcgctaatgacttttgatgttgcatgttatctatacatttggatatgatcatgtgatatatggagatggaacgaccctgctt

SEQ ID NO: 22398 - DNA, 446 bp, Glycine max
  unsure at all n locations
  Clone ID: LIB3106-038-Q1-K1-D5
gggacatatatcaaggcacatgtgcccctgcgttttgcaagaatgcttacacccatgaggcaactgtgcgtatcgcaaccttaactttctttaatatatctaattttgcagcataacatgtacatatgtatgtgtaattattgaaatcatgttcgacacggtgggatggcagtgcaaattggtttgtagctacagttagtagccatgcatatccaatccgatttcgatttggattctttcatgttattgataaacatgacagggttatggtgaaagagaaagataaatggatcttataagttattaccaatcacagtgaatcctggtttgataagaaatgaacgtactcctatctgtctttaacgtgatcataatcatatcatgttaccaacatgagggaattcanatgcatcttactctgtgtttcaatggtagatattatttag

SEQ ID NO: 22399 - DNA, 420 bp, Glycine max
  unsure at all n locations
  Clone ID: LIB3106-038-Q1-K1-D6
ctctctctctctctgtctctctctctctagacttagattttgtgaatggctgaagtggaagagggacaggtcatcggcgtccacaccgttgatgagtggaagctgcaactccagaatgcaaaagactccaaaaaactgattgtggtggattttactgcttcctggtgtggtccatgccgttttatggccccagttcttgcagagattgcaaagaaaactcctgaattgatcttcctcaaagtggatgtggatgaagtgaggcctgttgctgangaatattccattgaggccatgccaaccttcctcttcttgaaagatggcgagatcgtggacaaagtggttggtgctagtaaggatgaccttcaagccaccatagccaagcatgcatctgctgntgctgctgcttctttctcttgaagt

SEQ ID NO: 22400 - DNA, 341 bp, Glycine max
  Clone ID: LIB3106-038-Q1-K1-D7
cccacgcgtccgattgcagcatatggaatgattcttatacttacatgacgcatgcatttggtatgttcacttccagttgtatcttgtatgtttagataaactcttgctatttgacaaagaaaaaatgaaataaatttaaccacttgtggatacttatctggaacagggagccttgttcttttattgttttcctttggctaaaatgtaacttttgatcctctatttttgcaaatgtgtaatggtagtcctattgttgattgagacatttgtctccacttttaaaaatcctactttaggtcctatttttaatgaacatttgtcccacttttatatctggatta

SEQ ID NO: 22401 - DNA, 367 bp, Glycine max
  Clone ID: LIB3106-038-Q1-K1-D8
accagagctgattttggcggctgttaccactcatcggagattatatgcaaaatggttggccgatgacgataaaaactggtaaagtcagtaacgttaccttgggagcatctgaacaagacattaaggagttcttttcattttatggtgatattgaatatgtggaactacagagccatgatgaacgagctcaaattgcttttattaccttcaaggattcacagggagctgagactgcagtactgctttcgggagcaacaatagtcgctatgccagttacaatatctctggatccagattaccagcttccacctgctgacttagcatcacctgtaagagacactcgaactactggtggcggtgctgactc

SEQ ID NO: 22402 - DNA, 255 bp, Glycine max
  Clone ID: LIB3106-038-Q1-K1-D9
taaaaatactaataataatataaaaaaaagattaataaaaaaattatatactacatcaatatagaataacaactaaagacttaaatacacaatatacttttacaaatcatcaaattctcctaaaattaacaaaatcactacacttactgaatcttattacatacataaaatatatactaatattcacctatctacaatttattttattaacttaaaatattctcagatatctaatactttcatacttctaatact

SEQ ID NO: 22403 - DNA, 316 bp, Glycine max
  Clone ID: LIB3106-038-Q1-K1-E1
gagacattggttataacttcagtaaagatagagctgggtctggcattcaaggggaaccggaggatggtggttgaagcacttgacgcaatggctgagaaagaagctttggatatgaaagctgctctggagtcaaaaggggaggtggagcttcaagtgtgtacacttgggaaaaatgtgactattaagaagagtatgctgaccattcaaaaggagataaagaaagagcaccagcgagtttttacaccatctgtgattgaaccatcatttggaattggacgtataatctattgcctctttgagcacacattctacacga

SEQ ID NO: 22404 - DNA, 233 bp, Glycine max
  Clone ID: LIB3106-038-Q1-K1-E10
aaaaatacacagtgagctctagcttctagccctatggcgctgctaccgattttatctatgcggattgagtgaattgcgaaatgcactggaaagcttctgagaaactcattaggcactgaaaagtcgtcagaactgatcatgttatgactaataggatcaaagataaaggctagactggcactattaagcgagtcatatgctctcataatcgtgtcattggcgtaggtaaaaat

SEQ ID NO: 22405 - DNA, 291 bp, Glycine max
  Clone ID: LIB3106-038-Q1-K1-E11
accacgcgtccgcccacgcgttcgtgttgatcgagataactagaaacagtgtgatgaaaaggaatgtccttgatttcttcggtgctacaattgtggtagcatggcaatgccatgcgtacgatatgttccctatccgaatgaacactggctatggtgcccgtactccggaggtgaaatgcgcaagttggaggcttgctgtggaagcacacaacatctttggctttgagaccattcctgaagagtgcgttgtagcaacaaaggaatacattcatggcgaacaatatacatcag

SEQ ID NO: 22406 - DNA, 245 bp, Glycine max
  Clone ID: LIB3106-038-Q1-K1-E12
cccacgcgtccgcccacgcgtccgtgttgatcgagataactagaaacagtgtgatgaaagggaacgtccttggtttcttcggtgctacaattttggtagcatggcaatgccatgcgtacgatatgttccctatccgaatgaacactggctatggtgcccgtactccggaagtgaaaatgcgcaagttggaagcttgctgtggaagcccacaacatctttggctttgagaccattcctgaagagtg

SEQ ID NO: 22407 - DNA, 384 bp, Glycine max
  Clone ID: LIB3106-038-Q1-K1-E2
ctaagattgctgcttcttccgccactcatcacttcgctccctctgtgcttcaccaacggtggccgaaatcgaagctaccgttccagatccctctcaaatcgacgtcaaacttttcaaccgctggagcttcgacgacgttgaggttactgatatgtctctggctgattacattggagtgtccccgtcaaagcatgctacatatgttcctcacactgctggtaggtactcagtgaagaggttcaagaaggcgcagtgccccattgttgagagactcaccaactctctcatgatgcacggaaggaacaatggaaagaagctcatggctgtcaggattatcaagcatgcaatggaaattattcacttgctcactgacctgaacccaat

SEQ ID NO: 22408 - DNA, 362 bp, Glycine max
  Clone ID: LIB3106-038-Q1-K1-E3
gtaattacgattagtgtactatcaattgtatggttagaaagggaaatatccgggggggtgcaacaacgtattggacctgaatacacaggtccttttggagttcttcaagctatagcagacggaacaacattacttttcaaagagaatcttatacgatctatatgagatattgctttattcagtatatgaccatatatataactcatatctactataacaagctatttagcaattcctttaggctataacttggcactatatgatctgaatattggtgttcattcatggattgctatatagagtatagctaccattggactacttatgtcacgatatggcgcaaataataaatattccttttt

SEQ ID NO: 22409 - DNA, 318 bp, Glycine max
  Clone ID: LIB3106-038-Q1-K1-C8
ggaatgttctagttacatgccactttcttgatttcatggagttgtatctggtggcttggttgacgtcaagcaaattataccacatcaagagctttctttcattaatataaaaacaaagtggtagccatctatcactgtattgctttccattgctattaccttatggacgctataagctacagcatatttttcaaccattaaattttgcacggatatcatctggatttatcttaaaatcctgccaatggaacccggaacttaaccttaaagggacccgaattaagaatgtgccttattcacattttttacacaattttt

SEQ ID NO: 22410 - DNA, 296 bp, Glycine max
  Clone ID: LIB3106-038-Q1-K1-E4
gtgccgcctcttccgtaagcagcagcaatggcctcaaatcccaaaactttgacctttggggaggtagctaagcacaacaacaaaaaggattgctggattattatcaatggaaaggtgtatgatatcacaccatttttggatgagcatccacgaggtgatgaagttttgctgacgtcaacaggggaaagatgccaccattgattttgaagatgtgggccacagtgattctgctatagaaatgatggaaaaatacttcattgggaaggttgacacttgcacttttccacccaaagtta

SEQ ID NO: 22411 - DNA, 301 bp, Glycine max
  Clone ID: LIB3106-038-Q1-K1-B11
tccacgtttcatgtaagagctagttacgtttttcgttatcatgcctatgcatatgaactgggttcatgaatgtagtatcactgccacatggttggctgcgctgttagtgaagatgcagatgatcagacatatatctaacttcagaggctcatgctcaaaaaccatgtacacacttagtgcgagtgacctaatataatcaggtaacataaagcaatctattcctgcaagttcgagagtctaagacttgactagatacttcacaagagatcaacaataatcaataactatattatattgaagc

SEQ ID NO: 22412 - DNA, 421 bp, Glycine max
  unsure at all n locations
  Clone ID: LIB3106-038-Q1-K1-B2
cccacgcgtccgctaaaaccaactattttctgtgctgttccccgtgtgcttgatagagggtactgaggtttgacgcagaagatttcttctgggggcttcttgaagaagacattattcaactttgcttattcatataagcttaataacatgaagaaagggcttagacatggagaagcatctccacttcttgataaaattgtgtttgacaaggtaaagcaaggtttaaggggtagagtacgtcttattttgtctggagcagcacctttatctgcacatgtggaaggttacttacgggtggtgacttgtgctcatgtcctacnaggatatggtctgactgaaacctgtgcgggaacctttgtctcattaccaaatgaaatagaaatgcttggaacagggggcccttctgtaccaaatgtggatg

SEQ ID NO: 22413 - DNA, 332 bp, Glycine max
  Clone ID: LIB3106-038-Q1-K1-B3
ttcgacgcacgacccacgcgtacgattgagcttgctgtagtgaggtgttcgaatctgaaattaacttaaccaaattcatggcgggacatatacgtcctcgcttgttcacttactctaattgcaggaaccatgtatcactccatgatgatataatttacaaggcttctaatggaagatacggccaaacctttatgctttgccatgcaatgaatattgtcacagggccaaaataagacagacatctgttgactggcctgcacactaatactgatgatcattgcggggattgccgtgaacagttgcgaagtgagtctgaaagatcttacgaagca

SEQ ID NO: 22414 - DNA, 321 bp, Glycine max
  Clone ID: LIB3106-038-Q1-K1-B4
gcgggcttggattcgtgaccatgtctttcgaggaggaagctgaagcggctgctaagcgggacaggggctatgaacttgatggaagatcattgagagtgaattctggaccaccttctgctcacgaatgagagtgctcctcggtttagaggtggttcttctttcagatccagaggtggtggtacttcaaatagtgaaaaccgagttcatgtacgtaatcttgctcggcgtgatgacgatgtatcacttgaatctctggtccgtgaacaatgcaagaatgtcttggaagctagggtaatctatgacaggtgaagtggacgatct

SEQ ID NO: 22415 - DNA, 447 bp, Glycine max
  Clone ID: LIB3106-038-Q1-K1-B5
caacactgtgttcctgtttttgttcttcgatggcggcaacctcaacatcactggcttcggaactctacattggcctgcgccgcccctgcctcaagctcgattctttcaattctcaatctttctctctcttcgaccctaatcttcgcctatccctctctccacccaaaccctcacgcgccgtcatcgccatggccggcaccgggaagttctttgttggtggcaactggaagtgtaacggaacaaaagactcaatcagcaagcttgttgctgacttgaacaatgcaaaattggagcctgatgttgatgttgtcgttgcacctcccttcctctacatcgatcaagtgaaaaactcactcactgagcggattgaaatatctgcccagaattcttgggttggaaaaggtggtgcttttactggagaaatcagcgcggaacaactaaaagatc

SEQ ID NO: 22416 - DNA, 393 bp, Glycine max
  Clone ID: LIB3106-038-Q1-K1-B6
acgcgacccgtcctctaaaaccaactattttctgggctgatccccatgtgcttgatagagggtactggggtatgacgcagaggatttcttctggaggcttcttgaagaagacattattcaactttgcttattcatataagcttaataacatgaagaaagggcttagacatggagaagcatctccacttattgataaaattgtgtttgacaaggtaaagcaaggtttagggggtagagtacgtcttattttgtctggagcaccacctttatctgcacatgtggaagaggacttactggtcgagacttgtgctgatgtacgacatagatattgtgtgactgatacttgtgctagaaccgatgactcattaccaaatgaaataaaaatgcttggaa

SEQ ID NO: 22417 - DNA, 433 bp, Glycine max
  unsure at all n locations
  Clone ID: LIB3106-038-Q1-K1-B7
gagcaacgaaactaagaagattttgagcacaatggcatccacacaatgcttcgtgcaccgccatgccctcaccactccaaccagagcttcatcacagcgcttacttgtgagcaccaaaccaaaccacattgtttgcaaggcacaaaagcaggttgtccaagagggtgaggacactactaacattgtctctcgcaggttggccctcactgttctcattggtgctgctgctggtggctctaaggttgcacctgctgatgctgcctatggagaagctgccaatgtgtttggaaagccaaagacaaacactgacttgcttgcatacaatggggatggattcaaactctcaattccctcanagtggaacccaagcaaagacgttgagtacccacgtcaggttcttagatatgaggacaattgtgactcaaccagcaat

SEQ ID NO: 22418 - DNA, 144 bp, Glycine max
  Clone ID: LIB3106-038-Q1-K1-B8
attcgacccacgccccacgcgtccggccacgcgtccctatcatactttcaaggcagaacgacaaacattttcaagtgtcggactgtgtagagaacaaaatctcttgatgccatttctgaaatacatcatctatttatatttaca

SEQ ID NO: 22419 - DNA, 396 bp, Glycine max
  Clone ID: LIB3106-038-Q1-K1-B9
cccacgcgtccggttgagaactaagaaggagaagcaaatggcttcctcaatgatctctgcgccagctgttaccactgtcaaccgtgccggtgccggcatggttgctacattcactggcctcaagtccatggctggcttacccaccaggaagaccaacaatgacattacctccattgctagcaacggtggaagagtgcaatgcatgcaagtgtggccaccacttgacaagaagaagcttgagactctttcctacctgccagaccttgatgatgcacaattggcaaaggaagtataataccttcttacgaagggattgattcctagcttggaattcgacttggagcacggcatcgtgtaccgtgagcacaacaggtcaccatgatactacgatggacg

SEQ ID NO: 22420 - DNA, 390 bp, Glycine max
  Clone ID: LIB3106-038-Q1-K1-C1
cttacgcgtacacctactaataaggattttaagccagcaaactgatattctcgaaccgggtactgcgtcaagtatgccaagttctcttatattgtggaacgaaccaaatgcttaaagaagtctatttcaaacatttccttcagattacttgacacagctgaacacagattgtctcgtcctgcacaatcatggatatgccatattcccacgcaagcttcaatataataccaaggtatctgacttttttgagattctggcaacatctgaggatagagatggaaagactttcgtttccacagcacgtggtatgaaatatcacgtgactgtctacctatggcaacctagaaaaaatgcttttgaatgtgctacatccttgaaaacccctcacac

SEQ ID NO: 22421 - DNA, 306 bp, Glycine max
  Clone ID: LIB3106-038-Q1-K1-C11
attattttcattttcatctttttttgagtatcaacaaatggcaaccactgtgatgaccacggtcccccaattcagtggtcttagaccccaattctcagctgcccctgtgaagaacttggttgctgtgcaacccatgagtcgcaaggggaagggtgcattgggagctcgatgtgactacattggttcatccactaatctgattatggtggcttctacaaccctgatgctgtttgctggaaggtttggattggctccatcagcaaacaggaaagccactgcagggctaaagcttgaggtgagggactc

SEQ ID NO: 22422 - DNA, 297 bp, Glycine max
  Clone ID: LIB3106-038-Q1-K1-C12
gttgggatgaacactggatcttctgggtggtaccattcatgggtgcagctcttgcaccagtgtaccaccaggtcgtaatcagggccattcactttaagttcaagtgattcaatcaaacgtttcatgcttaatcaagttgggaacaacaacatctacatagatcaagccaatgtttgtacggttttggattcatttcattaagatgatctgcttatatctattcttctgcttaaaatttaaagtctttgtatgtcgtatgtaaagatgtagaattatgattattaggtggtgcatgtg

SEQ ID NO: 22423 - DNA, 297 bp, Glycine max
  Clone ID: LIB3106-038-Q1-K1-C2
gccacgcgtccggtttctttccttctctctctctggagctagcgcgagtgaccggagcggcgaagatagagtcagatcggaagcggaagaaggcgtcaacctcggcggcggagaatgagaaccggaataagcataagacgtcgaagatgtcgtcgtcgtcgtcgaatggtggtggcggtattgacgttagggcttcgcacatattgataaagcacgaatgttctagaaggaaggcctcgtggaatgatcctgaacgtcgcatcatcaagagcacaaccagagaaaacgcggtttctc

SEQ ID NO: 22424 - DNA, 325 bp, Glycine max
  Clone ID: LIB3106-038-Q1-K1-C3
gggctgctaccctccggctcgtgtcggatgcgtgccaagaatggggttttttacacgtggcgaaccatgtagtgagccatgagttgatgaaaacgccaaggctggtgtggagggacttctttcaccagccactggatgtgaactaagtgtatgctaatacaccgctgacttatgaagggtatggaagcacgttgagagtgaaaaactggaccattttcatattggagtgaatacttctttctgcattacatgcctaggtccgtaagggaccaatccacatggactgcccttccaacatgctttaggagcatcagctatgaatatg

SEQ ID NO: 22425 - DNA, 371 bp, Glycine max
  Clone ID: LIB3106-038-Q1-K1-C4
gctcattatcttcataattatagatagataacttaaatgtataggttgagtttgcatgtgaacagacaagttcaaggttgatgacaaacaaaacgcacgtttgaactatgaattcaatttttttttgcactaagctaactatatttattaaccaaatgttaattatcacgattgttgcatgggtaagaagatgaaatggacagcactttatgattcgcttttgtgcttacaggttaatattggtgcacatcacagactcttggacggagcaaccgttgcaagattttgcgacgagtggaagcaattaattgaaaatcccgagcttcttacgctgcatttgaaatgaaatcttcattacatgaatgaagaat

SEQ ID NO: 22426 - DNA, 441 bp, Glycine max
  Clone ID: LIB3106-038-Q1-K1-C5
gctgcatttggtactactggacgtattgtcatttcaatagtattgtacgtggaattatatgcttgttgcattgaatatataattttggagggtgacaatttgtcttctttatttccaagtgcacacttgaatttgggtggaattgaactgaattcacgtactttgtttgctgtgattactaccttggctgatcttactactgtttggctccgggacctaagcattctcagttacatatccggtaagagcttatttttggtgcacgtagtgatcagttatacattaaagcttggtcccatttgcctttggacttaaggacatattgctgaaataaggttttattatacttcatgggatatccttttctgtattgggataagctttgatggtgttgttaaaggaaactataataacgtatcatgttaccaactatatataaca

SEQ ID NO: 22427 - DNA, 370 bp, Glycine max
  unsure at all n locations
  Clone ID: LIB3106-038-Q1-K1-C6
atctttctctcttctctctccacccaaaccctaactaccgaccctgttcccctctcgtgtccgtcatgaaaggaggaacgtccaagaccgaatctaagagagccgatcccaaacttgctgtgaataagaagggagccgccaccaaggctaggaaacccgccggcaaggggaaggcagcgaaagaccctaacaagccaaagaggcctccaagtgctttcttcgttttcatggaggagttcangaatgtattcaacaaagaacatcctgaaaacanagcagtgtctgctgtgggcaaagctgctggagcacaatggaagaccatgtctgatgctgaaaaaacaccttatgtggcacagtctgagaaaaggaa

SEQ ID NO: 22428 - DNA, 233 bp, Glycine max
  Clone ID: LIB3106-038-Q1-K1-B10
cccacgcgtcctgcaagagagagggagattctatgcttgctaccttctctctgaaaaatgggtacgttcaagtttcaccagtaccatttcgtttgcagggctcttcccactgaagcagatcatcaccccaagatctacctaatgaagctctgggccaccaaccaggttctcgccaagtccaagttctggtattttctgaggaaacttaaaaaggtgaagaatagccatgtcca

SEQ ID NO: 22429 - DNA, 396 bp, Glycine max
  Clone ID: LIB3106-038-Q1-K1-C7
cccacgcgtccgtttcaactttcaagtctaaaggacaaagattttcaagtgtcgaactggtgagagaacaaaatctcttgatgccatttctgaaatagatcatttatctatatttacaaacggtgaagctggtcattcctctgaagttgctggatttagagtacgggaactctcacttcctaatggagaatcatattctgggtcccttcttggtaacattccagagggtcaaggtaagtatgtatggccagatggttgtgtatacgatggtgagtggagacgagggatgagaaatggatatgggaaaatacaatggccttgtggagtaatgtatgatggtgagttctcacgtggctatatacatggtacaggaacatatatcggccctgataatct

SEQ ID NO: 22430 - DNA, 251 bp, Glycine max
  Clone ID: LIB3106-037-Q1-K1-H12
cttttgtcattctcttctacttactctgcctaacggaaagctgtataacgcctctgcctggccggaaaacttaaaattcgacgcctcgacggaaaagcggctgctaaactgcgcgaccacccaattttcttagcaaatcagatccagaaacagctatgtcgggcatatgaaatggcagtgtacacatgcgcaatgtgtgagagagggacacacacaggctcgtgtgagatattaaatctcgcgcgaaaaga

SEQ ID NO: 22431 - DNA, 354 bp, Glycine max
  Clone ID: LIB3106-037-Q1-K1-H2
agcgtgcatcatagtatccaggtgacctgttgtgctgcactgatgcttctcaggtgttgggggagcggcaagaggctaagactgcataccccaatggcttcatccgtatcattggatttgacaacgttcgccaagtgcagtgcatcagcttcatcgactacaagcccccaggcttctaagtcattgaaaaatttgcaaagcatatgtagccaccccactttgtttgttgtacttaaactacattcccatttgttattgctttatgagatttcatcatcctgtatttttggtttctgttttcggacttcaatggaaattaatggatgagaactaatgaataagctattgtgtttg

SEQ ID NO: 22432 - DNA, 451 bp, Glycine max
  Clone ID: LIB3106-037-Q1-K1-H3
gccaggcttgccgccagatgaacggtctctcgaagggtgtcaatgctactgctaagtcaggggctgggtgaatccctataggaatagtgataaaggcagcaacatcgggtcatctaccgaattatggaatagtattagtgagtctgggaagcactgatgttcatacttgttacattcagagcattattctatactattcttgcacttgacaatactaagaagagcgatgactatcgtcgcagcagtccctttgaactctgtgagctgctaacatcattagtacgcgcgtggtagcaatgagttgcatgtatcaaggcaccataatgtgtatgcatgtaaacatcactttacatcgctagtctacttgtactatctgctcgtatgaaaaaagtaagagtagatgtttactgcagccgaatcatattcaactgaatgtggatactattattac

SEQ ID NO: 22433 - DNA, 308 bp, Glycine max
  unsure at all n locations
  Clone ID: LIB3106-037-Q1-K1-H4
cttactgcaagagctaaactgctaggaaccttaaaatgcatgagctgatttggtgggtggggaggatgtgatagaacagataaaagcaggattcatggagtttgataaactaattgcttctccagatatgatgcctaaggttgctagcctagggaagattctgggaccaagaggactgatgccaaacccaaaagctggcactgtaacacccaatattccccaggctatagcagaattcaagcatggaaaagttgaatacagggcagacataactggaatcgtgcacttaccttntggaaaagctgact

SEQ ID NO: 22434 - DNA, 400 bp, Glycine max
  Clone ID: LIB3106-037-Q1-K1-H5
cccacgcttccgtccacacgtccgtccacgcattctccgtcatacaaaagcatgggtatagtttactcacatagctcactgatgaaagctacctgagatgccttccggatggaaatctcttgcaaaccaagatccacaatattggggcaacgcttgttggtgttgataaatttggtaacaagtattatgacaagctcggagacacacagtatggaaggcacaggtggattgaatattcagagaagactagatataatgcctcacaagttccagctgaatggcatggcttgcttcacttcataaccgatcacacaggacatgagcttcttttacttgaaccttaaatgtatcgtgttgaacacaaataacatttttcttgggaaggttaacagtatatcta

SEQ ID NO: 22435 - DNA, 339 bp, Glycine max
  unsure at all n locations
  Clone ID: LIB3106-037-Q1-K1-H6
aattctcggntcgccggntggacgcacgcgtccgaaaggctatcactaaatctcattcttcatctgcagctatttggattgctgatggttgtgggctgatattgatgcttttctttgataaagtgtgtacactttttggataagagaaaacaagagaggtgacattggaagctaactcagagagaggcaaagatgttgggaattttcaagcagaagttggttaatgcacccaaggagctgaacagtccagcttctttgaattcatgcattaagcctaagctaagtcatgaaatcctgaaggatttcatgtactgcaattgctgcaatgctttctcaatg

SEQ ID NO: 22436 - DNA, 413 bp, Glycine max
  Clone ID: LIB3106-037-Q1-K1-H7
gcgtaatatcttatctgcaatgagtcgtcttcctgatgaagcaatagcattggctggtgcatggcacatcgagagggaactgcagattactccttggaacttgagttgcaattttgttgcctgtacaagccagggtaaggaaaatattgaacgaatggaaattactggtgttggtgatccttctggtcgtggcatgggttttagctatgctcgggcacctccaaaggcaccagtgtctagtgcaatggtgaaaaagaaagcagctgctaaccgtggaggttctactgttaccggtacagatgctgatctacgtagattaagcatggatgctgcactagaagttcttcttaagttcaatggtcctgaggaagtcattggaaaacaaactatgtggcatcgcattgctatgatac

SEQ ID NO: 22437 - DNA, 316 bp, Glycine max
  unsure at all n locations
  Clone ID: LIB3106-037-Q1-K1-H8
caagaactcaacgctgctgatgactctgaacaaccatcaacctccgaagcaccggccggggtggttcccgtttccccatcagatactctcaccatgttctttcaggcagagggaacagtgagtgaaacagctattccagctttgaccaaagctttagaggagacagaaggtgttacagatttgaaggttcagcttgctgaaggacttgcaattttagagttgaagaagcagacaacagtccaagctacaggagtggcttctagtcttgtagaaaccatacaaggttcanggcttaaatacagacattaaatctgag

SEQ ID NO: 22438 - DNA, 380 bp, Glycine max
  Clone ID: LIB3106-037-Q1-K1-H9
ttctcatttctcacattattattcacatctccatctagatctctctctctcggtctcccgagaaattcatcaacagacttgtgattaatttgcaattgttcaagtgatctatcaagaaattgataattcaatgggaaagtacgaaaaagagcttaatctcgaggctacagagttgagattggggttgcctggaagcgatgagcctgggaaacgttctattgttagaagcaataagagatcttcaacagaagcaagcgaggaagagtgcataagcaagggcaacatgaattctaatggttctgatatcacaagtgatgaccaagacaaccttgtgccacctgcaaaagcacaagtagtgggatggcccacccggtcgatca

SEQ ID NO: 22439 - DNA, 333 bp, Glycine max
  Clone ID: LIB3106-038-Q1-K1-A1
gggggtctggctttgcaaccacgtgattcgctgacgaagctgaatcggctgctaagcggttcaatggctatgaacttgatggaagatcattgagagtgaatactggaccacctcctgctcggaatgagagtgctcctcggtttagacgtggctcttctttcaggtccagaggtggtggctcttcagatagagaaaaccgtgttcatgtaggtaatcttgcttggagtgttgacgatgtagcacttgagtctttgatacgcgaacataggaagaacgtcttggaagctcgggtaatctatgacagggaaagtggacgatctagatgctgttgat

SEQ ID NO: 22440 - DNA, 196 bp, Glycine max
  Clone ID: LIB3106-038-Q1-K1-A10
gttacgattaacactggatcttctgagtgggaccattcatcggcgcatctcttgcaacacgctaccaccaggtcgtaatcagggccattcccttcaagtccaagtgattcaatcaaacatttcatgcttaatcaatttgggaacaacatcaacaccaaaaatcaagccaatgcttgtggctattggtttcatttca

SEQ ID NO: 22441 - DNA, 118 bp, Glycine max
  Clone ID: LIB3106-038-Q1-K1-A12
cacacgcttccccttacaatttgttccactttggcgcctcatgcctaacacgctgcccaagcctcattctttctgtattctggtccatatatgacttcatctgctattgcactactac

SEQ ID NO: 22442 - DNA, 401 bp, Glycine max
  Clone ID: LIB3106-038-Q1-K1-A2
cggaatctaccttctcaatctcttgattggctttctctcccctttggttgatccagagcgccgatgagttcaaacccttcattcgccgcctccctgagttcaagttctggtattctttcactaacgctctctgcatagcgtttgagatgacctttttttccatgtttgatggtcctgtcttttggcctatattactctgttactgagttgttctctttgtccttacaatgaggcgtcaagttgcacacatgatgaaatacaaatatatccccttcaacttggggaagcagaagtatagtgctaagaaatcttctgcacgtagcagtggctctcgtgcaaactgaaacttggctcttatgatttgaacatctactaagttaggttttgtgaacattcacgct

SEQ ID NO: 22443 - DNA, 231 bp, Glycine max
  Clone ID: LIB3106-038-Q1-K1-A4
cccacgcgtccttctatatcaagtatagtgttgactatacctaaccaattgttcagatggtgcatggcattatactgtacgtctatatctagattctaatttctgtcaactcataccttttttaatcgatacgtccattctctatacaattaaatcatctctcccattcggaaatggcgcttctttagatatatcacacatgcacgatgctctcattcgtgctaatccagc

SEQ ID NO: 22444 - DNA, 297 bp, Glycine max
  Clone ID: LIB3106-038-Q1-K1-A5
cccacgcgtccgcacacacaccttgttttcctttctatacagacacacagagagagcgggaaacaccctttaaagcctaccactaccactaaaggttacattgattactattctatgtacggacatgttgagaagctagctgaagagattaaaaaaggagctgcttctgatgaaggagtcgaatcaaatatatgacacgtacctgaaacactgcctcaagaggttcttgtgaaaatgggagcacctcccatgagtgatgtaccaattattacacccaatgagctacctgaggctgat

SEQ ID NO: 22445 - DNA, 293 bp, Glycine max
  Clone ID: LIB3106-038-Q1-K1-A7
gccgagcgtccctagaaagaatccctacccaaaatgccggatgctcacggtttgacatggcgaaccagagattacttctctcagaccttcatgaaaaagggtaccatcgagcatcacacatacctaaaaacctaccacggcagaaattctggcaacttcaaaggtagcggccccattcaacatggaatgcctcacaaggtctaccattgcccgaacctgtcgcgtatggaatgtgaccaaacgtgctgcctgggtcggattcatcacgcaggtctgccacagaattataaggg

SEQ ID NO: 22446 - DNA, 285 bp, Glycine max
  Clone ID: LIB3106-038-Q1-K1-A8
cccacgcgtccggataacatttcttattcatcattcgtggaatttgatcaaggggctggtggagatataaatagatgtaatgcttctttagctgtgtctgatgtatatataatgacagcggctgacattactcacaatgtcggagcacatatatattcatatttaaaggcaacaagttactaaagagcaactatatttaagatcaatgaaggcaaacatccatgagcctcatatattgattcattcgcaggtagaggtccaaacaaaagcactccaaatattata

SEQ ID NO: 22447 - DNA, 292 bp, Glycine max
  Clone ID: LIB3106-038-Q1-K1-A9
gccacgcttaacactgaatcttctgagtggttccacttcatctttcagctcttgcatcacggtaccaccacgtcgtattcagggccattagcttcaagtcattgatatacaatcacacctgttatgcttaatcaagttgtcaacaaccacagctactaacatcaagacactgtaagttactaatgatctcatatcattaagatcatctacttatatcatctctgatttataaaatttacagtcttatgattatgtatgctaagcactaaaattacgattattaagaggtgca

SEQ ID NO: 22448 - DNA, 469 bp, Glycine max
  unsure at all n locations
  Clone ID: LIB3106-037-Q1-K1-H11
gcattgcatccctcttgatttgtagtttgttttttgctttagataaaagttctgccaaaggaagaggggttttaagatcatagtgtgtgttttgcaacaatggctaagttctttgctgctatgatcttggcactctttgccatttccatacttcaaacagtggtaatggctgctaatgaacaaggaggccacttgtatgacaacaagagcaaatatggaagtggaagtgtcaagagttaccaatgcccatcacaatgctcgaggagatgtagccagacccaataccacaagccctgcatgtttttctgtcagaagtgctgcaagaaatgcctgtgtgtgcccncggngtattatggtaataaagctgtgtgcccttgctacaacaactggaagaccaaggaaggaggacccaagtgcccttgagcttcaacttgttcaacttcaattgtcgctttcctacatttttatt

SEQ ID NO: 22449 - DNA, 284 bp, Glycine max
  Clone ID: LIB3106-038-Q1-K1-B1
cccacgtgtacggtttagatcgtgagttacgcccttttttttatatttttttaggggtattttttttgtattaatgttatttaaattattataaaaaaataaactattaatgatagaaattttatatatttatatttaaaatttgataattctcatgaaaataggtaagcgactttatattattatataatctatttttttattataaaaaaaatttaatgctatggtatttgactttttttatatttagacaaaatattatgttaaaaattataagactattt

SEQ ID NO: 22450 - DNA, 431 bp, Glycine max
  Clone ID: LIB3106-037-Q1-K1-F3
cccacgcgtccgacaaggcagaaagcaagctcatcctagagttttaaaaatggcagcagccgcctcgatggctctctcttccccatccttggctggcaaggccgtgaagctgggcccatcagcccccgaagtcgggagggtcagcatgaggaagaccgtcaccaagcaggcctcctccggaagcccatggtacggcccagaccgcgtcaagtacttggggcccattctctggcgagcccccgtcctacctcactggcgagttcccaggtgactacggctgggacactgctgggctttcggccgacccagaaaccttcgccagaaaccgtgagctcgaagtgatccactccaggtgggccatgctcggggccttgggctgcgtcttccccgaactattgtcccgcaacggggtcaagtttggagaagctgtg

SEQ ID NO: 22451 - DNA, 333 bp, Glycine max
  Clone ID: LIB3106-037-Q1-K1-F4
ggcttctgcagaagtagagttccgatgctttgctggtgggcttgcttgagccaccgaccgcgatgctctcgagaaagccttctctcaatttggcgaaatcgtcgaatcgaaggtcatcaacgatccgtaaactggaacatccagagggtttggatctgtgaccttcgccacagagcatgcgatgagagacgcacttgaaggaatgaacggacataacctcgacagtcgtgatataaccgtgaacgaggctcaatcccgtggaaaaggtggctgcggccgcagttgcagctactgaagacgtggtggtggttactgtggcgacggaggttacag

SEQ ID NO: 22452 - DNA, 263 bp, Glycine max
  unsure at all n locations
  Clone ID: LIB3106-037-Q1-K1-F5
cttatgcctcccacactcccatctcacacacccctagcatccaacaatgtcactgaccatgggcctccaacatatcgaagcccgactccctccgccccaaactaagcccaaagctaaagaccgtcgccacaaccaccatcgactgcagcaccaccaacaacaacaacaacaacaacgcgtcctccgacctgaaggcgttctccgacgcgctggccctcttctccatcctactctccgnccctctccacgtcggcgccgacatc

SEQ ID NO: 22453 - DNA, 133 bp, Glycine max
  Clone ID: LIB3106-037-Q1-K1-F6
ctcactcttacgaccttaacacattcttaatactaactctcatccattatcatggaaagggtttactaccatatgaccttgcacttagtatgctactttccattacacaatatattatactgctcgactaaac

SEQ ID NO: 22454 - DNA, 417 bp, Glycine max
  Clone ID: LIB3106-037-Q1-K1-F7
cccacgcgtccggcataatctaggttttgttcgttgtccgcaacaatggccatggggagggtctacaacgagatcgaggtgaagagggtgagcgaggttccggagcacgtgatgcctatgctgtcgctgaactacatcaagaaggcgattcagcgaggcttcgataattaccatgccaagtacattgaaaccagctcccccgatcccatcttgcatgtctgctacggcagcatgatcttctcctacctcgttgctctcacccacgagctccgtcacacttcagcacgcccagtagcacgcccagcagcaccactcatccatcccctttagcttgatcctggttgaattggacgtggttggcttgcttgatctttgttttaaaatctgaaatatcaacgcacaaagatactgacagct

SEQ ID NO: 22455 - DNA, 451 bp, Glycine max
  unsure at all n locations
  Clone ID: LIB3106-037-Q1-K1-F8
cccacgcgtccgcttctcacttgcccacaataagaattcctctcaaatttcaatggttgagttgaaaataataaggccctaaaagaggggttgcaagcaaaatgagaagctcgaagatgtggatggttttcatgtgtctgacggtgagcttcttcgctcgcattgaatcgctatccgtgacggtgaacgacgtcgagtgcgtctacgagtacgtactttacgagggcgacaccgtttcggggaactttgttgtcgtcgaccatgacattttctggagctctgatcaccccggcattgatttcacggtgacaactgctgcagggaatactggccacattttcaagggaacctctggtgacaagttcagttntaaagccccatcacatggaatgtataaatttgttttcataacccttactcaacacctgagacttgttctttctacattcat

SEQ ID NO: 22456 - DNA, 442 bp, Glycine max
  Clone ID: LIB3106-037-Q1-K1-F9
gtgacaagagaatccctgacatgaccataataaacaggcagcttggatggaagcccaagacttcactttgggacgtgcttgagtccactctgacatatcagcacaggacatatgctgaagccgttaagaaagtcattgcaaaacccgttgcaagttaagctttttacagtgatggtgatgtgctacctttgagaagggtgttcttgtcttgcccaagtgttctgccatattatactggttgattttatataaaatcgtaaattttcctcctattgggttcgttagcctgtaggcaatatagcccccacatggagaagtaagaatttatacaagggcaatctgtgctctatgtaattttaatgtacagaccatgcgctgctaaacatgttgagacactttatatattacctaaggaagacttttttctgggtttttaaggatc

SEQ ID NO: 22457 - DNA, 233 bp, Glycine max
  Clone ID: LIB3106-037-Q1-K1-G1
accacgcgtacggccatgcataagagacgtttcatctaccagaacatgcacaattatatgggctgtggtcaataacatttaagcctccgtctatgtctatcatgagattgatgactcttaccagatccattgtcaataccttaaaagctgagattatacaccactgacgactcattcaactacataatgatgaaggctcatgtcactgctaagactatacaccatatgacatg

SEQ ID NO: 22458 - DNA, 311 bp, Glycine max
  Clone ID: LIB3106-037-Q1-K1-G11
cccacgcgtccgaatatagcacacagtcacaggactcttaaaccctaaaccttggcttggggcgtgggaggttgcacacatggatgaagcaagagttctgaagaatttcccggtgaagccaaagctgaaatcgctagccagaacccctaagcatacccctgaatccaagtactggtcctacttcaagacccaacatattcccaatctcatctacgttccttccatcacgttctctacgacacccattcactctttagccgtcggacattgcgcctcactcactctcttacaatggactgatctatgctagc

SEQ ID NO: 22459 - DNA, 326 bp, Glycine max
  Clone ID: LIB3106-037-Q1-K1-G12
cccacgcgtccgaccacgcgtccgtcaggaaagaccttgtgctttggcctgatgacctgggaactttctatgaggacactcaactagacaaacatcggcaagctctggacagagttccagaggttcaaccatacttacctgcttcccttaacatccgaacggtttcctttcctacagccataagggtcgcaatctgaccgaaaatggccgaatggaacacattgaggagatcatcaaggaccatttttgcaccatatttcagagcaagtgttggagatctggttagaacattgcgcttgtgccaagccacaatttagagacgcaga

SEQ ID NO: 22460 - DNA, 334 bp, Glycine max
  Clone ID: LIB3106-037-Q1-K1-G2
gacacgcgtaaccttcgttactggtctactcttcatactaccagcaacctcatcttccgggtatttggggaacaaccttctgactcatcgcaagatattcctaaaaaaagacaacattattacctcgtacgctgtcatctttgacggcggtagcacaggaacccgtgtgcatgtcttccattttgaccagaatttgcgatctccttcccattggtgatagtcatgagcttaataaaaagatcacacccggtttaagtgcttacaaggatgatcccgatcaagctgcagaatctctgattccacttttggaagaagcagaaagtgtagttactga

SEQ ID NO: 22461 - DNA, 200 bp, Glycine max
  Clone ID: LIB3106-037-Q1-K1-G3
cccacgcgtacgaaaaaaaaaacaatcatattaaaaaaaatcaaacaatatcatcaataagggaatctaaaaaaaactataaagcataaaaataaaaaaaacctaaaaataaaaaaacaccaatcactaaaaaaactaaaactattagcaccctttcctcaataacacatttcacatctccatgctataacacaacaact

SEQ ID NO: 22462 - DNA, 320 bp, Glycine max
  Clone ID: LIB3106-037-Q1-K1-G4
gaaaaacttagctactaaggaaggatcaaagagaatggctcaagcaatggcatcaatgggtggcttgcgtggttcctctcaggctgtgttggaaggtagccttcaggtgagtggctccacacgcttgaatgtggggagtggaagcagggtggcctcagtcacacgtgcagggttcacagttagagcacaacaacaacaagtgagtggtgaggtacaaagcagccgtagggcagtgctttcacttgttgctgctggtttggccactggctcttttgttcaagctgtgcttgctgatgccaaatctatcaaagttggaccac

SEQ ID NO: 22463 - DNA, 301 bp, Glycine max
  Clone ID: LIB3106-037-Q1-K1-G5
gaaaaacttacctactaaggaaggatcaaatagaatggctcaagcaatggcatgaatggcgggcttgcgtagatcctctcaggctgtgttggaaggtatccttcaggtgagtggctccacacgcttgaatgtggcgagtggaagcagagtggcctcagtcacacgtgcatggttcacagttagagcacaacaacaacaagtgagtcgtgaggtacaaagcagtcgtaaggcagcgctttcacttgatgctgctggtttggccactggctcttttgatcaagctgtgcttgctgatgccaaa

SEQ ID NO: 22464 - DNA, 329 bp, Glycine max
  Clone ID: LIB3106-037-Q1-K1-G6
cacacacattcattccttctaaaatctcactaatcacatccaacctatggcaggagcaggcgtcacatccataacgactatgcttcagaccatggttcccaagaatgcaccgaatctcacctcctcgtgtaggtgtttccaacagcactactaagatctcatttgctggctcaagtaccgtaccatgcacccggattcagaggaacaggaatacatcttcttccattgtggcagctgcatctggagatgattcatctgatggcaccacttaccttgatgctcggaccattgctgaagctctcattggtacagctcttcccatcttctac

SEQ ID NO: 22465 - DNA, 311 bp, Glycine max
  Clone ID: LIB3106-037-Q1-K1-G8
atcatcttatggtggggggatgtatggtaacagtatgtacaggggaggatatggtggcaggtatgggtcatccgggatgtacggtggtggaatgtataacagtggcttatggggtccaatgggtggttatggcatgggtggtggtccttatggagaacaagaccccaacaatccgtatggtgcccctccatccccacctggattttggatttctgccctacgtgtgatgcaaggtgtggttaacttttttggtcgaatatcaatactcatagaccagaacacacaggctttccatttggtcatgactgcac

SEQ ID NO: 22466 - DNA, 395 bp, Glycine max
  unsure at all n locations
  Clone ID: LIB3106-037-Q1-K1-G9
gaacatcatcacattacattagattggtggtaatggcagcgtcactacaagcagcagctggtttcatgcaacccaccaagttgagcaggagcaacactttgcagcaaaagtctactcagtccatttccaaggcttttggtttggaacctgttggagctaaaaaggtcacatgctcccttcaggctgatcttaaggacttggctcacaagtgtgttgatgctaccaaaattgcaggattcgcccttgccacctctgccctcgttgtctctggggcaagtgctgaaggtgttccaaagaggctaaccttcgacgaaatccagagcaagacctactttgaagtgaaggggacaggaacagcaaaccagtgcccaacaatngatggtggattggactca

SEQ ID NO: 22467 - DNA, 461 bp, Glycine max
  Clone ID: LIB3106-037-Q1-K1-H1
cccacgcgtccgcccacgcgtccggtaacatcataagatggcagtgttgtctcatgtttggagttgcatctcacactccactgtcttcacttcaactgcaccttcttcatctctatctgtttcaccaaccactttccttcaattgtcttcgttctccaccgagtcaacgtggaacaacattcgtagaacaaacctttgttccaacgttaattctcttcgatattctgggaagacccttttgcggcataggcataaatattacaacccttgttcttcaatggcttcatcgttggatgatagtggtaaacgatccaagagagtttggatatggaccatcaacaagcatgtcatgactgcagcagtagagagaggatggaacactatcgttttcccatcacaccatcgacaacttgctcatgattggtcttccattgcggtaatatgccctctttttgttaatg

SEQ ID NO: 22468 - DNA, 108 bp, Glycine max
  Clone ID: LIB3106-037-Q1-K1-H10
cccacacgtccgaccacacttccgaccactccttctatataaatctatatctttcccccagaacattcattttcaaactttggattaaccaacacttctacacattat

SEQ ID NO: 22469 - DNA, 307 bp, Glycine max
  Clone ID: LIB3106-037-Q1-K1-F2
ctcatgcgttcgactgtaaacacggcaggtttaaggtaactgactcattgtgcattgatgcatcacgcaagacatgtgctaaaacgacctgaatgggcctcattatggaccgaacgggtattgcctgaaacggcgcaaggcgtatagagtgaggagctacatctatgaaaagccatcaagctattcaaacctaaggatggtagcacacttgctagcagttggacatgtcgaaccatgtcaagcccagcaggcatgtctataggagacgagagactcaacactgacagaacagggcttacctctgggc

SEQ ID NO: 22470 - DNA, 378 bp, Glycine max
  Clone ID: LIB3106-037-Q1-K1-D7
ctcactctcttttcaactcattgaaacattcatcaaacaccttctcaaaatgggcaaagggggaaagctaacaaagctcaagtcagccatcaagagattgccctcattgaccaagctcagccgcaacagcagcagtgtctcttccaacaaaagggtctctggaggaacatcctcttcatccaaggaacacgaacaagaacaacaacttcatgcggtttatgtcggcaagtctaagaggcggtacctcgtgaactccgaagtgatcgaccaccccgtgtttcaagaactagtggacaagtcttgctctacttcttctcatgatgatgaacatggggtggttgtggtgtcgtgcgacgtggtgctgttcgagcacttgct

SEQ ID NO: 22471 - DNA, 274 bp, Glycine max
  Clone ID: LIB3106-037-Q1-K1-D8
agagggagtagcggcattaaaaatgcagatcttcgtgaaaactctgacagggaagactaggaccctcgaggtcgagagcagcgacaccatcgacaatgtcaaggccaagattcaagacaaggaaggcattcctccggatcagcagcgtttgattttcgccggaaagcagcttgaagatggaaggaccctggccgattacaacatccagaaggaatcaacccttcatctcgtcctcaggcttcgaggtggcatcattgagccttccctcatggct

SEQ ID NO: 22472 - DNA, 393 bp, Glycine max
  Clone ID: LIB3106-037-Q1-K1-D9
cccacgcgtacgttctttgtagcataaatcagtgcggcgtgttgtagcagcgattataaggaaggaggacagatgaacacagacatcactgcatcgacgaagccagagtacccagtcattgatcgcaaccctactttcaccaaagacgtcggaaacttcaacaccctctactatctgctattcgccacaaccaccggcgtttccgtcaccgacggctacctatccgggatcaagcctggaattatgggtcctttgatggtgacagatggttagatcgtagtagatctagggttcatgtatgcttaccagaactccgctgggagactcatgggttgctaccacaacgatgatgacgtagctcgctacaacatacaataattccttggtctgagc

SEQ ID NO: 22473 - DNA, 394 bp, Glycine max
  Clone ID: LIB3106-037-Q1-K1-E10
agcatgaatatgaacttcatgatgaatagatactgtgggaatgccctgattgtgagcaggggactcttgtccttgtacgtgaacataagacgttatgtatatgccttcaataacaataatggaagaattatcattgtatttagaatcaggtaccaagctgatctgattgaatgagaatccaatgttaacctcagacgaccatgtgtacttaacacatatattgtacatggatctatgactaactggtatcaatataagctacgtatctccgtacattcttatgacagctacaacatcaacatcgacattgccatctaaacggtcttacttgcatacatctactgcatgtgatggccgaaaatgttgacgatcatggacgacaagtctatcactc

SEQ ID NO: 22474 - DNA, 366 bp, Glycine max
  Clone ID: LIB3106-037-Q1-K1-E11
gaaatacgtacgtacttcctatgacatatacatattgcgacccttttggctggtagcagggaaagcacacctgcatacgtgaagtcaagccattatgctgcacccttcaatacgagtgttattgcttctgggtttctatttggaataggctatgcagcttacctgatataatgagcatcagatattaatcgcagaggaccaagtatatgggacacctatactaaacaggcaccatagatgatttacgatcataatgatggaagtatatgagtcgaatcttatgaccagtacaagatcgacataaacatggtgaaagaagttgagttggattcatacagattgtccatgtgatggtacacaatattg

SEQ ID NO: 22475 - DNA, 390 bp, Glycine max
  Clone ID: LIB3106-037-Q1-K1-E12
gaaatacgtgcgaactaactatgagaggtatatggcttgatcattgatctcgttaccaggggacaccactgtgaatcctgccggtgcagacatgatagttccatttacagacctcaagttcatggctggcttactcaccagggagaccaataatgacattacctgcattgctagcaaaggtgatatgagtgcaatgcatgccaagtgtgaccacacatcatatactaaacaagcacgatactacttacctacctgcacaaaccttggtgatgcacgattggcatatgatgatcgagtaccttatcaagatcggaatgatgcctgacttggaattcgattcgtaccactgtttcatgtaccgtgagcacatcatgtcaccagcatactacg

SEQ ID NO: 22476 - DNA, 359 bp, Glycine max
  Clone ID: LIB3106-037-Q1-K1-E3
gcgcacatacacaacacacctacctaataccttgtttatgagagctataagtcaccacctttcgctgctgaattggagaatctcggcctcacgatctcttttttctctgagaaatactcgtaccaataccatgtctcaatctgataattcctctccttttaccacacccagattggttctcaagaacgttttggccaaatctcaacatgaaagggatggagctgttgtcagaagaggcattgtaaggagcgagttgaagaacttgcatcccttgctaatgttggatcacttctcagtatctcccccagcaggatttaccgatcatccacaccgatgcttttaaaccgtcacctacatgc

SEQ ID NO: 22477 - DNA, 389 bp, Glycine max
  Clone ID: LIB3106-037-Q1-K1-E4
cccacgcgtccgcttcacaccctcttcaacatcctcagcaagtacaagaacaagaagaagcaatgtgttgctccaatctcacaatgttggtgtcctcaaaaccttccctttccgatccctccaatctctccttccgctctgtcctcaacccttttcagctcccttcacaaaacccaacttcatgcactccttcacgctcctcaaccacccaaattcagtgtggtctgagagaactcagaacccgcattgattccgtgaagaacactcagaaaatcaccgaggctatgaagcttgtggctgcagccaaagtgagaagagctcaagaagctgttgtcaacggaagacccttctcagagaccctcgttgaggtcctctacaacatcaacgag

SEQ ID NO: 22478 - DNA, 221 bp, Glycine max
  Clone ID: LIB3106-037-Q1-K1-E5
ccacatctaactaataactaccaaatataatcttatggctgattgattaatctggacatgcgctattaacactgcataccgaacccatttctgcatgcttacttcattcactcacctaaaaatcttagttctcttgactacccattaaaccaccaattacttaacttgcactattatcaactctattcaacagcaattcatacaggtgcagccaccagttg

SEQ ID NO: 22479 - DNA, 255 bp, Glycine max
  Clone ID: LIB3106-037-Q1-K1-E6
cccacgcgtccgatgatagtgtttgcatgatagtagcacagatgcttcctttgggacaggaggtacaaaaaatacaggggactatggtggttatacataataatgtgttagatatcaacagcatcaccagcgttaaactgatcgttgaccaacgcttacgcttcatacgactatcagtcgatgcacttactttcgcagccaccaaaatcttcattcagctgattagtgctaccaaggctgatcttggtaaatgaa

SEQ ID NO: 22480 - DNA, 467 bp, Glycine max
  Clone ID: LIB3106-037-Q1-K1-E7
cgtacatcgaaagggaatcttcttccatggcctccaagcggattctgaaggagcttaaggggctccagaaagaccgtgcaacctcttgcagcgccggtcctgtagcggaagatatgtttcattggcaagcgactataatgggtccccctgatagcccttatgctgggggtgtttttctagttactattcattttcctccggattatccattcaagccacccaaggttgcatttaggactaaagttttccacccaaatatcaacagcaatggtagtatttgtcttgatatcttaaaggagcagtggagccccgccttgacaatatctaaggttttgctctccatttgctccctattgacggatccaaacccagatgatcccttggtgcctgaaattgctcatatgtacaagacagacaggtccaagtatgagacaactgctaagagctggactcagaagtatgcaatg

SEQ ID NO: 22481 - DNA, 398 bp, Glycine max
  Clone ID: LIB3106-037-Q1-K1-E8
cacaatcttaaatcatacaaagaaaagaattatggtgacattaccaaggaaaagttacgtctacgttataagaatgacgaggaggtaaaggaaatgaatcaggaatttgaccaaacgtgttactggatcaagaaaagattgatagataaagatgcaagtgtgcaaatttcaaaccggcttatctcttcaccttgagtcctggtgtctggaaactttagttggtctgcatacatggaaaggctgatgaatgcacaatctatgggtgatgcattcatattggaattcatgaggagcagaaaggtgtctgagatcaatctttaccattctactatcatgaacttagatgatgcatttcatacagatcccgatgatcaagatgccctatgagctaatgatct

SEQ ID NO: 22482 - DNA, 469 bp, Glycine max
  Clone ID: LIB3106-037-Q1-K1-E9
caaaatcttaaatcatacaaggaaaagaattttggtgacattagcaaggaagacttgggggtaggtgataagaatgaggaagaggaaaaggaaatgaagcaggaatttggccaaacgtgtgactggatcaagaaaagattgggagataaagttgcaagtgtgcaaatttcaaaccggcttagctcttcaccttgtgtcctggtgtctggaaaatttggttggtctgcaaacatggaaaggctgatgaaggcacaatctatgggtgatgcatccagtttggaattcatgaggagcagaagggtgtttgagatcaaccctgaccattctattatcaggaacttggatgatgcatttaaaacaaatcccgatgatgaagatgccctaagagctattgatcttttgtatgatgctgctttggtttccagtggttctacgcctgataatccagcacaacttggagggaagatat

SEQ ID NO: 22483 - DNA, 316 bp, Glycine max
  Clone ID: LIB3106-037-Q1-K1-F1
cccacgcgtccgcttattagaatcagtagcaaaggctcttcgacccggaggagtgttctgggctacggcagacagcctgtggcataagaactttgtggttgcagacaccatagcaaattgcaagaagatattcaaaggctccgttaactatgcttggaccacggttcctacatatgcaagtggggtgattggattcatgctttgctctacggagggtccaccagtgaacttcaaacatccaataaataaattgaatccagagaaaaatggggtggcaaagggacctactaagttttataacccagagatccatgct

SEQ ID NO: 22484 - DNA, 469 bp, Glycine max
  Clone ID: LIB3106-037-Q1-K1-F10
cggtgacaagagaatccctgacatgaccatattaaacaggcagcttggatggagtcccaatgcttcactttgaaacgtgcttgagtccactctgacatatcagcacaggacatatgctgaagccgttaagaaagtcattgcaaaacccgttgcaagttaagctttttacagtgatggtgatgtgctacctttgataatggtgttcttgtcttgcccaagtgttctgccatattatactgcttgattttatataaaatcgtaaattttcctcctattggtttcgttagcctgtatgcaatatagcccccacatggataagtaagaatttatacaatggcaatctgtgctctatgtaattttaatgtacagaccatgcgctgctaaacatgttgagacactttatatattacctacggaagacttctttctgggtttttaagcatctttcgattcattgcttggtaacttt

SEQ ID NO: 22485 - DNA, 218 bp, Glycine max
  Clone ID: LIB3106-037-Q1-K1-F11
ggcttgcatacgaacttattgctatggaaagatctcaccaaagcataaatctatgatcgggtgctcatgtgtttgacgtgtagatccagtatgcgcattgatgattgcaacgagctcattatgaccattattaataccggatcatcaaacatccggactaattaacctatggctaagggattttaaccactggttggcaaattcaatttacattaaat

SEQ ID NO: 22486 - DNA, 336 bp, Glycine max
  unsure at all n locations
  Clone ID: LIB3106-037-Q1-K1-F12
gtaatgattttgtattgattattaaagctatattaatcatcaacataaatctataaccggggactcatatgttggacgcgtagatccagtaataacatttatctttgcaacgagctcattatggacaatatttcataccagatcatctaatcgatccgttctatacatctatctgcaactagtatattacctactgttggctaagtctaatgtacaaaacttccatacagctatgaactacattcatatcactctacaagcagatangtacatgcttatactttagtagaaatgtacggacttatctatgctatcgagatgaaaattgagttatat

SEQ ID NO: 22487 - DNA, 451 bp, Glycine max
  Clone ID: LIB3106-037-Q1-K1-D6
cggacgcgtgggtggttccacaatagaatgcaccctcgcgtgtgcttcttcctgtctaccgttatatataaagccacgcacgcacgacactttcatcaattaaccgctcattcatccaaatttctcaaactcaagctagcctttgggggatatgatagagaagaagacacagtgtgagaaaaaggaaaaaatggaaggtgaagaaactgagatgaaacaacaatccaggttcaaaaggatttgtgtgttctgtggcagcagccctgggaacaagagtagctataaggacgctgctattgagcttgggaaagagttggtgtcaagaaatattgatctggtttatggaggaggaagcattggtttgatggggttggtttcccaggctgtttatgaaggaggtcgccatgtaattggagttattcccaagacactgatgccaagagagattact

SEQ ID NO: 22488 - DNA, 303 bp, Glycine max
  Clone ID: LIB3106-037-Q1-K1-C2
gcgcccacgcgttcgctcaaccaaaaggggttcaattctagctagttctattacatcgtccgcgaccatgaacatggcgatcgtgcttctgttcatggttttcgcagtttcatcagctttagacatgtcaataatatcacatgacaacgctcatgcggatagggccacgaggcgcaccgacgacgaggtgatgtcaatgttcgaggagtggctggtgaaacacgacaaggtgtacaacgcgctcggtgagaaggagaagaggtttcaaatcttcaagaacaatctgcgctttatcgatgaacg

SEQ ID NO: 22489 - DNA, 355 bp, Glycine max
  Clone ID: LIB3106-037-Q1-K1-C3
gcgcagaaacactccaaactgaaaaattccatctttctctttcaacgttcctcaaatcaatagcgcattgtaagcttcgcgagcaataatgtcgattgctttcccaacatgaccgcttacaacaagaaaaaccacaaagagaaaccaattcgccgcaaggaagaaaaaccggaagaaccggaagtgccgaaatacagagatcgagctaaagagcgtagagaggatcagaatcctgattatgaacaaactgagcttggatttcatgcagttgctccacctggtactgtggatattcggtcatctgatgcgcacaagttatctattgagaagagcaaataccttgggaggtgatgtg

SEQ ID NO: 22490 - DNA, 466 bp, Glycine max
  Clone ID: LIB3106-037-Q1-K1-C5
ctcagcaagaataaatgagatatatgaggttggagagttgtttgatttaagcatgcaactgatatacttgatattgctattgggtttgctagggagtgggactttctttgtgattcgccaagttcttgtccgcagagaactcgacctatctgccaaagagttgcaggagcaagtaagaagtggtgaatgctggtgcaactgagctttttgaacttggtgcagtgatgctgcgcaggaaattttaccctgctgctaccaagttcttgcttcaagcaattgagaaatgggatggggataatccggatcttgcccaggtttacaacgctcttggtgtgagctatgtccgcgatgggaaagttgacaaaggaattgctcaatttgagacagctgtcaagcttcaaccaggctatgtcacagcttggaacaatctcggtgatgcctttgagagtaaaaaagactacaagtc

SEQ ID NO: 22491 - DNA, 313 bp, Glycine max
  Clone ID: LIB3106-037-Q1-K1-C6
atgcactgcacttggcgaacgttgtcaaatccaatgatacggatgaagccattggggtatgcatcagcttcatcggctacaagcccccatgcttctaagtcattgaaaaatttgcaaagcatctgtaaccaccccactttgtttgctgtacttaaactacattcccatttgcttttgctttatgagatttcatcatcctgtatttttggttcctgttttcggacttcaatggaaattaatggatgagaactaatgaataagctattgtgttgcgttgctttgatttcaaataacttcaagaacccattgccct

SEQ ID NO: 22492 - DNA, 466 bp, Glycine max
  Clone ID: LIB3106-037-Q1-K1-C7
ctcagcaagaataaatgagatatatgaggttggagagttgtttgatttaagcatgcaacggatatacttgatattgctattgggtttgctagggagtgggactttctttgtgattcgccaagttcttgtccgcagagaactcgacctatctgccaaagagttgcaggagcaagtaagaagtggtgatgctggtgcaactgagctttttgaacttggtgcagtgatgctgcgcaggaaattttaccctgctgctaccaagttcttgcttcaagcaattgagaaatgggatggggataatccggatcttgcccaggtttacaacgctcttggtgtgagctatgtccgcgatgggaaagttgacaaaaggaattgctcaatttgagacagctgtcaaacttcaaccaggctatgtcacagcttggaacaatctcggtgatgccttttagaagtaaaaagacttccagtc

SEQ ID NO: 22493 - DNA, 302 bp, Glycine max
  Clone ID: LIB3106-037-Q1-K1-C8
aacgcggcagagcgaagagaaggggcaaaagagaaagaagcgcttatcgaactcggacgggagcactgagttgactcggagggagtggaaagtgttgttgcgtaatgtctggtggtatcgctcgtggacgcctcaccgaggagcgcaagtcgtggcggaagaaccatccccatggttttgttgcgaagccggagacgctgtccgatggaaccgtgaatttgatggtgtggcattgcactattcccgggaagactgggactgattgggagggtggctactttccacttacgctgcactttagt

SEQ ID NO: 22494 - DNA, 471 bp, Glycine max
  Clone ID: LIB3106-037-Q1-K1-C9
cccacgcgtccgcccacgcgtccgcccacgcgtccggagtgcttgtgacgcggttgtccggttgccacgcttaagatcacccaagagagaacctaagacacacaacacaacacacagagagagtttgaggaagaaatcatcatggcttcagcagcatctgggtttgtgctgtctcttaatgttgcagcttccaccacaaactcaagggtggtcttgttcaacacaaagaaccacgcttctaggcttcttgtgagggcttcagacgagcctgcagcggcggcacccgcaaccaccacccctccagctgaagctgaagcaaagccaaaaccaccacctattggccccaagagaggtgctaaggtgaagattcttaggaaggaatcctactggtacaaaggcactggttcagtggttgctgttgatcaggaccccaacactcgctacccttgtgtggttcgattcaacaaagtc

SEQ ID NO: 22495 - DNA, 355 bp, Glycine max
  Clone ID: LIB3106-037-Q1-K1-D1
cccacgcgtccgggcagctgcttctcctatggcaagccaactcaagtccaccttcactaagactctggtagctcccaagggcctctctgcctcttcaccactccaccttctgccttctaagaggcaatttagcttcactgttagggccatccaatcagaaaagccaacctatcaagtgattcaaccaatcaacggtgatcccttcattggaagccttgaaaccccagttacatccagccccttgattgcatggtacttatcgaaccttcccgcatacaggaccgcagtgagcccactactaagagggatcgaggtgggcctggcccatggctaccttctggtgggcccattcgtg

SEQ ID NO: 22496 - DNA, 456 bp, Glycine max
  Clone ID: LIB3106-037-Q1-K1-D10
cccacgcgtccgcgctgagaagcgtagatttttggatcttgttcgtgtcgtgtttgtgtggggttgggacgggtttggcagtgatgaacaatatgggtcaaatcgggttggcgctcggatacccagatatctcgctctttctgtctttgacaagtattttcgggtttttcggacggataatctcgggtaccgtttcggagttcaccatcaaagctgcaacacctaggcctctttggaatgcagcatctcagcttctaatggcggtaggttacatactcctggccatggctatgccaggttccctatacattgggtctattttagttggcatgtgttatggagtgaggcttgccattacagtcccaacagcctcagagttatttggactcaaatattatggtctcatctataacattctcatccttaaccttcctctcggttcttttcttttctctg

SEQ ID NO: 22497 - DNA, 470 bp, Glycine max
  Clone ID: LIB3106-037-Q1-K1-D11
gaaaaacagacttactttgcatcggcgacacacatggagatctccggcaccggtctccgggaggtcagatacgtctgcggctatggaacccacacgcggtcccgcggcctgactcctggttttggggcgaggatggggatgggttctggctactgagacgaggggcattagcgggattaccagaacaccagaaagggtctaaccccaaagaagaccttgacgctgctcacgggattgtacagattacggcttgcatcggatcccgatagactcgacatgtactatgatctccagcacaacatcacctatgatgctggacatgtattactgacagacatagaagccatgtgagtcgacgagaaggaagtgaagaacaaacggacacatgacatgaggccgaactcaaagctgccaagatgaattgtgaatcttcttcatcatcatcgaacgaatcaagtgacagtgattga

SEQ ID NO: 22498 - DNA, 307 bp, Glycine max
  Clone ID: LIB3106-037-Q1-K1-D12
gaaaaccgtacgtcctattgacttgaggtatacactacgacatgatttttcggaaggtgggagagcagatctgtttgccaatgatcaaaacataagatggaaaccatcaagcttggaggaagttgatccaagagaattgtaagccgtctttaaacctttaagaccagatgttggtgagttgagattgttattctggaaggaaaatgtactattatcattactttaaatgcattatacaattgcttacactgcatataataaatagatagagttgtcattgactatgacttccagatcaagatcatcg

SEQ ID NO: 22499 - DNA, 361 bp, Glycine max
  Clone ID: LIB3106-037-Q1-K1-D2
cccacgcgttcggatagctagaatggcatttcgatgctcagtcatctcttctaccattgggttctgggtcgctcttacaggagacagccatgttcatgcatcgctacctgaggaagattattgggaagctgtttggccaaacactcccattcccactgcactgcgagagcttctaaagcctctccctgcaggtgttgaaatcgatgaacttcctaagcacattgatgatacacactacccaaaaacattcttctataaataagaccttcatgcaagcaaaacattgatagtacaattcaccaagcgtccctatgcacaaccttatgatgtatatacattgttaaccgatattaaagacacc

SEQ ID NO: 22500 - DNA, 437 bp, Glycine max
  Clone ID: LIB3106-037-Q1-K1-D3
tttctctcttccgtacacagcttgaacccaccgcgtttcggagagagagacgtcgcaatggggaggaggcctgcaaggtgttaccggcagataaaaaacaagccataccccaaatcacgtttctgccgtggtgttcctgatcctaagatcagaatttatgatgttggtatgaagaagaaaggtgttgatgagtttcccttctgcgttcatctggttagctgggaaaaagaaaatgtttcaagtgaagcattggaagctgctagaattgcatgcaacaaatatatggcgaaatttgctggaaaggatgctttccacttgagagtcagagtacatccattccatggttctaggatcaacaaaatgctttcatgtgctggagctgataggctttagactggaatgaaaggtgcaattggaaagccacaaggaacatgtgc

SEQ ID NO: 22501 - DNA, 362 bp, Glycine max
  Clone ID: LIB3106-037-Q1-K1-D4
atcattctaagcgaaaaaaataggatcacattacctattagctgaacttcacacatgtacgagtcagttaatattaaactgggagtggcgttgactcgagtctcttcagtcttgtcgaacgtacttagatgtacgcatgctacatacttattgctagactattgactatccaacaattacagtgatactaatttgatatagcttatactgatttcaagctgtctggaaatactcatttcataacggcacttaaaatattttcagtaggatggaaaggctacttgtgtgttactgatttcatatggcttatactcaattggatggtatggctacttagcatgtactgtttgtatactatactc

SEQ ID NO: 22502 - DNA, 264 bp, Glycine max
  Clone ID: LIB3106-037-Q1-K1-D5
cccacgcgtccgcccacgcgtccgcaaacagatgcctctaatttgtgcttaaacatgttggattgcttgtatataagttttttaatgtcgtcgaaactagtgagtttgttcttgtggagcaattatgagaagtctatatacacatatagccaaacagatgcctctaatttgtgcttaaacatgttgcatagtttgtcttataaactaaagaaatattcaaaaaaaaaaaaaaaagggcggccgcccttttgttcctttttttct

SEQ ID NO: 22503 - DNA, 412 bp, Glycine max
  Clone ID: LIB3106-037-Q1-K1-C12
gtcacgcgtacgcataggctctttgccggacacaagggaaactataaagcaggatcgtggcgaacacctacatacggacactcatcatatacgtgagcatcctcttactaatactcgacctcctacttatttacactctttccagccatcatcaccacctgaagatcttctacaactgggagaatcaggtccgacagtccgccctgagtcgtctgaccatcggtatgtaggtgcttgtcaccggctgccgagtgcttaagagattcccactgattcctcattttcaataagcgcgagaaccgcgtcctcattctcgacaactttagtccatactactacctctcgctaaaactcgcactacagcacgtcgtgacgaaacaacgaatccgtatcatcgaagccgacctgaacg

SEQ ID NO: 22504 - DNA, 454 bp, Glycine max
  unsure at all n locations
  Clone ID: LIB3106-037-Q1-K1-A7
gcgatttgccacgaaggtgaaagagagcaacggggcaggtaatgattcggcggcgctatggactttgattccattcgcattcgcaggtctactgtagaatcagcacgcagccatggcggaccgttctcggagcttcatgaaggacgtgaagcgcgtggtcatcaaggtcggcaccgccgtggtgactcgcgaagagggaaggttagcggtcggaagattaggcgctctctgcgagcagattaagcaactcaactctctcggatacgacattattcttgtctcctccggcgccgtcggcatcggccgacaacgactccgctaccgcaaattgatcaacagtagcttcgccgaccttcaaaaaccccaactcgaactcgacggcaaggcatgcgccgncgtcgggcagaacagtctcatggctctctatgatattctcttcactcagctcgatgtg

SEQ ID NO: 22505 - DNA, 265 bp, Glycine max
  Clone ID: LIB3106-037-Q1-K1-A8
gtcaagcattcgcatacttgtgctgatcgttatctgtctctacacctcttcctcggattgggagatcggaaaaacttgcggggcatacaacaaatgcgacactggacttaactgtcaaacatgtactgccaatgggaatacccgaaccagacgctcgcggatacaatcatggagcccaaggtgtaaggtgaaaggcttaccgagaaaccgctattcatggatgacgacttacaactcatatgctctgggcgaagccagatgctgc

SEQ ID NO: 22506 - DNA, 364 bp, Glycine max
  Clone ID: LIB3106-037-Q1-K1-A9
aatcactcttctaatattcattccaatgtcaaatcctcaaacaaacaataaccgccgccggcccagccgcctgcagcggcgagccccctcctccctgcaaataaaccgcgccgtcgagtggaacgtcgccatccccctcctctcgccgctggcatcatctccgacgccgatcgagctaaaaccgccgcacgagccgccgcagagggagccggagaaggtcaccttgtcgttcaagaagcggcagcatcctgcggctgcctactgttacgagcccgatccaatggtgcacgccttttgttctgcgtagatgaacgaacgacagagtcctaggatgctatctaatgggtcatatttacagagaatg

SEQ ID NO: 22507 - DNA, 420 bp, Glycine max
  Clone ID: LIB3106-037-Q1-K1-B1
atttcaaaaccaaagcttctgctttgtgatggaactagagagctgagaggcctaaacctgtgtttggggtctctccttttttggtgcagatcttgaacttgagctgcattgtcatagaaaatctgcaccaagaaatgaaacataccatgttacctgccattggatctgttgtccctcgtggtgcctttgcagcagtcttgctcctgttactgttttctttctccactttctcttctacagaagcctatgatccgcttgatccaaccggaaatataacaatcaaatgggatgtcattagctggaccccagatggctatgttgctgttgtgacaatggacaactttcaacaatatcgtcacattcaggcccccggatggtcattaaggtggacatgggctaaaaaggaagtgatttggagca

SEQ ID NO: 22508 - DNA, 465 bp, Glycine max
  Clone ID: LIB3106-037-Q1-K1-B10
cttatcttatatcttctcctcctccatctttgagattctcaaagaaacttctgaagatgggtggcatagcattcggaagcttcaatgattctgtcagttttgcctccatcaaggcctacattgctgagttcatctcaacccttctctttgtttttgccggtgttggttcagccatagcctatgctaagttgacatcagatgcagctcttgatccaactgggttggtagccgttgctatttgccatggttttgctctcttcgttgctgcttctgttggagccaacatttctggtggccatgtgaaccctgctgtgacctttgggttggctcttgggggccacatcaccatcctcactggtctcttctactggattgcacagcttctcggctccatagtggcatccttactcctcaagtttgtcactggctatgatacttctatccacagtgttgcttgcggaattg

SEQ ID NO: 22509 - DNA, 453 bp, Glycine max
  Clone ID: LIB3106-037-Q1-K1-B11
cactatagcaatagaaacatttgcttttgaaaaacccctcactcttcatcactacactagctagccacatacaatgtcgaccaaatttaaggtgtttcgtgaattcacaagcgatgactcattcctaaaccaagttatccctgaaaacatcaccgaattccaagtgactctgtccctcgctagagactacgatggcaacaactcaaccaacggaaagttcattccttactgggacactgaaaaggtcactcccgaagtgataaaaaaattcatgaaaaaatacgaacccaccgcactgagggttaacgttcttgtcagcattggaaacaaaaacaaacaatttcctttcaccattggctcggactcgaacagcgaatcatgggtctccgaggtcactgcttcgctgaagagcatcattaatacctacaaccttgatggcatcgatgtcagcta

SEQ ID NO: 22510 - DNA, 456 bp, Glycine max
  Clone ID: LIB3106-037-Q1-K1-B12
ctcacgcgtactcccaccctttcgtttggatgaacgggacactctaaatcactacgctaggtgcccacatacattgtatagccaatcccacgagtgccgcgacttcacattggatgacctattcctaattcaaggtatacatggaaacatcaccgacttgcacttgacgtatctgcgtcgctatgatacatacgtggcgacaacatgagcactcggacagatcattccttactgggacactgaaaatgtcactctcgaagtgatgtcaaaattcatgataaaatacgaacccagcgcactgagggttaaggttcttgtcagcattggaaacaactactaacaattgcctttcatcattggctcgcactcgaacagcgaagcatgggtctgcgaggtcactgctgacctgaatagcatcatgaagacctacaacctctatggcatcgatgtcagcta

SEQ ID NO: 22511 - DNA, 407 bp, Glycine max
  Clone ID: LIB3106-037-Q1-K1-B2
gtttcgttcgtcaccatgactttcaagcgcaggaatggaggtcgcaacaaacacggccggggccacgtcaagttcattcgatgctccaactgcggcaaatgctgccctaaggacaaggctatcaagaggtttctggtgaggaacattgttgaacaggctgcagtcagagatgtgcaggaggcttgtgtctacgaacaatacacgcttccgaagctgtatgtgaagatgcagtattgtgtttcctgtgctatccactctcatgttgtgagggttcgatcccgcactgataggagaaagcgtgagccttcacagcgattcatcaggcgcagggatgatgcaccaaagcctggtcagcctggtcaagccccacgtcctgctggagtaagagctcctgcccgagcttaaag

SEQ ID NO: 22512 - DNA, 356 bp, Glycine max
  unsure at all n locations
  Clone ID: LIB3106-037-Q1-K1-B3
ggctgcctcactacaagctgcagctaccttcatgcaacccaccaaggttggcatagcctcgcgcaagctcaaatctacacaatgcatttctaaggcttttggcttggaacctgctgcagctaaactcacttgctcccttcagcctgatctcaaagaatttgctcaaaaatgtgtcgacgctaccaaaattgcaggattcgcccttgccacctctgctctcgttgtttctggagcaagtgcagaaggtgttccaaaaaggctaaccttcgacgaaatccagagcaagacatacttggaagtgaagggaactggaactgctaaccagtgcccaaccatttgatngtgagtggactcat

SEQ ID NO: 22513 - DNA, 469 bp, Glycine max
  Clone ID: LIB3106-037-Q1-K1-B5
tttctgttgatattgtggtaaaagttgcagcaattgcatccatgtgtgtgcaacgcagaaggctcccaacgtcctttcatgggagaagttgttcaggccttgaagctagtatgcagtgactttgaggaaacagactttataagatcaaaaagttctcaagagggtcttctaactgatgtggaaggaaagtattctgaagcttcagttgaaagagtagaattttcagagtatcaaaaaactctttctggctatcaatctggtgaagaaaaggtaagattatcagcaacagagttgctcagtacttcaggtcaggaatttgagtcattcaggaggtattctcgttcagggcctctaactattgggaagaaaaggcagttctggcagaagttgagaagtttgtctagaggtagctccagtgaacatggatcccattaagcttttcataatcttgcgttttgcataccgaatt

SEQ ID NO: 22514 - DNA, 471 bp, Glycine max
  Clone ID: LIB3106-037-Q1-K1-B6
cccacgcgtccgcgaaaccctcttcatcttgttctatctgtgacgagcatcatggcctcgggagcagtgttattgttggctatgtgtgtgcttccggcgatggttgtggccattcgcccagcaaagaaccctttttgcgtgaagggtcgtgtctactgtgacccttgccgtgctggttttgagacctcagctaccacctacattgctggtgctgagattatgttgcaatgcaagagcagggttagcaacgaggttgtgtacacgaagaaggggtacaccgactcaaccggagcatacacaatgtacgtggatgaggatcacgcagatcagatctgcagtgccaagcttgtaagcagccctcaccctcaatgcaaggaagtcaccccaggccgcgacgaagccgtcgtgattctcacccgctacaacggcattgcctccgacgataggttcgccaatgccatgggcttcatg

SEQ ID NO: 22515 - DNA, 358 bp, Glycine max
  Clone ID: LIB3106-037-Q1-K1-B7
cccacgcgtccgagcagtttcagacacagagagaggggtttgggattggagggattgacgctgcgtctcttcctcttctctttcgatccatccctcattcctaatcctccaatccaaccacctcagcctcacactcacatatacacatatctgaacgcgtatcgtccctcctatggcttcaaagcgcatcctcaaggagctcaaggacttgcataaagacccaccaacttcttgcagcgctggtccagtagctgaagacatgttccattggcaagcaacaataatgggtcctgctgatagtccttatgctggaggtgtattcctagtcactattcactttccttcggattatcctttc

SEQ ID NO: 22516 - DNA, 293 bp, Glycine max
  unsure at all n locations
  Clone ID: LIB3106-037-Q1-K1-B8
gtagttgagaactaagaaggagaagcaaatggcttcctcaatgatctcttccccagctggtgccactgtcaaccgtgccggtgccggcatggttgctccattcactggcctcaagtccatggctggcttccccaccagaaagaccaacaatgacattaccttcattgctagcaacggtggaagagtgcaatgcatgcaggtgtggccaccagttggcaagaagaagtttgagactctttcctacctgccagaccttgatgatgcacaattggcanaggaagtagaataccttc

SEQ ID NO: 22517 - DNA, 308 bp, Glycine max
  Clone ID: LIB3106-037-Q1-K1-B9
ctcaactcatatttccaacacgcagaacctacaatgtcgctcctattcaggcgctctcggggcacgtacgacgacaactacgacgtgcgacccgccgtttacgcctgctacggcttacaccttcgacaactgctcatcaatcttctacggtgtacatcagccagaagctcacgtggtccatgactccaactacaggtgctactccggtttctgagctccatcatgttcacataaccactaccatgactgcgttactaaccgaagctgctgccccgatcaccacacacgtcacaaccacccacggcgaa

SEQ ID NO: 22518 - DNA, 422 bp, Glycine max
  Clone ID: LIB3106-037-Q1-K1-C1
atggctgacgcgggcttactacaaggtaatggctcccttaatgatctcctccccagctgctaccaccgggaaccgggcccttgcctacgtgggtgctccattcaccgacctcaaatacatggctggcttacgcacgaggaataccaacactgacattacctccattgctagcaacggtggaagagtacaatgcatgcaagcgtggccaccaattggcaagaagaagttcgagactctttcctacttgccagacctggatgatgcccaattgaccaaggaagtcgcataccttctaaggaacggatggataccttgcttggcattcgagttgtagcacgggttccttgtaccgtgagcacatcacgtcacctggatactatgatagacgctactggacatgtcgaagctgtctatgtttggct

SEQ ID NO: 22519 - DNA, 245 bp, Glycine max
  Clone ID: LIB3106-037-Q1-K1-C10
cttagatcatacacttagttgcttcccaattagatggttctgctagaaaaactttgggagggaggtgggggttggccttaaccttaacctggccttggcaagcttaaaaaacttaacaaccttaaaactattgatgaaagataaagttaccagctgcagaagaccttgtcgatgccggcgacaccaacaaccccgatgacttcgacgacttcaacgacaccgggatcggcccgtaaagctgacaa

SEQ ID NO: 22520 - DNA, 56 bp, Glycine max
  Clone ID: LIB3106-037-Q1-K1-C11
cccacgcgtccgcctttgttctgtgtttggttaaattgaagcacggtttcatggtc

SEQ ID NO: 22521 - DNA, 328 bp, Glycine max
  Clone ID: LIB3106-037-Q1-K1-A6
cccacgcgtccggtaatccataagtcatcgcttgtgtgggaaaactgccttctattcatgtgcatcatcctgtattaaatatataacgtgttcgtttcattttcttgatgttaggggtggaaattttttatttttcatgtgctatttcatgtacagtattggtgtattgggatgcgaattataatagtactaattgttattaaaaaccctaaacataataaaatgggctaaatagccaattgtttcagtagtcatggattttgtactaattttatttgttttcaactcagtttaaagtggttgtgttattggtcacatggacaaaatc

SEQ ID NO: 22522 - DNA, 436 bp, Glycine max
  Clone ID: LIB3106-036-Q1-K1-H12
aatttttgttcgtgctagaactaagttactcacaccgttccaaggtataagttagttctaaaaatggaacagaatgaggagaaggctaacttccatttttgggatgcaacatgtatcaaaatttttggcaaaacgatcgatcaatgtcgccaagagtagattgcaagtggcgatgagatcaaggttttccctccctattttgatgaattattgggaaagacttgggctgtcagattttagtaccatgcacgatgctcaaaaaggcctacaatgtgttgctgaaccttggtaccaatatttgagagacaatgccttcagtgttggagatgagatatgtttctactttaggccttataaaaaagtatgagagtttataataaaaaaataagtggctgggatgatagtgactcaattaagatggagtttagagcctatt

SEQ ID NO: 22523 - DNA, 325 bp, Glycine max
  unsure at all n locations
  Clone ID: LIB3106-036-Q1-K1-H2
tcgcccacgcgtccggcattgcattggcgagaccaccgcggtggagcgagcgagcgagcaagcgacgacggaaattgaattgctcgtgcgcgtgcgtgcgtgatcgtttgattgtttggatcttgtggtcgatcgaggacgatgtcggagatggcgagcccagatcccgagggactcgacggagtccggatgacgtggaacgtgtggccgcggacgaaggtggaatcaagcaagtgcgtgatccctctggcggcgacggtggctctgatccgtgcccaccctgacattcaccgncttccgtacgcccctctacgttgtaagacct

SEQ ID NO: 22524 - DNA, 316 bp, Glycine max
  Clone ID: LIB3106-036-Q1-K1-H3
attgtaaatccaggcatttaggacattcatttcacgttacatgatttatgttcattgagaacgcacgatacgtgatgatgaatatgtcacataggggtctgaaaacatgagccagcgctctattgagggatcaagacacaccgagattgcaatgggtgcctaccaacctcatcatacgtggccatgaacgcagtattatcctcgtggtcagagtgcttcgtacaaccacatagccttgaatgcctgtgttgcgttacaagcgtaacgtgaagtattacatcgagtagaagcggaaagtgtgtacaccatataagtg

SEQ ID NO: 22525 - DNA, 263 bp, Glycine max
  Clone ID: LIB3106-036-Q1-K1-H4
cgacccacgcgtacgaaaaaaaataaaacttatgaaaaacttttatattacatcataaactagcataaaaacagagcgcggacaaaaaaagtgaagaaaagaaaaaaatcaaataacaaaaaaaaaaaaaagggcgaccaatttaaaggttcaaaacttacgaacccttgcttgcaacactatacctattataaagggtgactaaaatcaaattaactgtccaactttttaaaacttgtgaactggaaaaaccgtgtctttac

SEQ ID NO: 22526 - DNA, 398 bp, Glycine max
  Clone ID: LIB3106-036-Q1-K1-H5
tgctcgtactcggttccggacattcccgtggtcgactccacgtcgtctcgatgcgccactcgtcactttctgcagtccgttgtctattccactcatctcactaggcactcagaggcagagcgcaggtcaaagtgcagtgcgcgcagttgaaagtctcagcatcctcaagccacaagcgttgggcatcaatggcttcgctgaaagacgttggagtcgatgttgtggccactgccgcgagtgcagcgctggctagcaacgccatggccattgaagtgttgctgggtggtgatgacgggtctctggctttcgatcccaacaatttctccgtagcctctgtggagaagatcgagttcaagaacaacgcaagtttcccccacaacgttgtgttcgacgaggac

SEQ ID NO: 22527 - DNA, 333 bp, Glycine max
  Clone ID: LIB3106-036-Q1-K1-H6
accacgcgtacgattgcgaaaacccttaatttgggactgtccgcattatagaggctagagctgatgtgttcgcactggacggtgattctacatcaaactacgactcatactataaaggtccaatggacgtaccttgaaatgcatgcatagaccaacttgctgatgaagagccttgccatagtagaatgatataatggctgaaatacgcaaagacaaccgtacgaccgggcttgcattgaagatcgtaacctatcgggctaaatgttactggaaattacctaatacagaacagacacgctgcctaattcgattgatcaagttacgcgagactta

SEQ ID NO: 22528 - DNA, 388 bp, Glycine max
  Clone ID: LIB3106-036-Q1-K1-H7
cccacgcgtccgcgtcgtcaaagcctaagtttgggacatactggattaaagatgggagagttgttggggtctttctggaaggtggaactcctgaagagaaccaggctattgctaaagttgctaaggtccagcctccggttgcagatgtagatcaacttgctaaggaaggcctttcctttgctagtaaaatataatggttttaatagggaaggataaaaatgcttggtggtttgcatagaagattgtatctgatctggctatattttactctgaattatgcattacagaagctttattttgtgttattcgtttgatgtggttgcacgggatatatatatatatatatattgccgtatctatttcaaaaaaaaaaaaaaaaagggcgggc

SEQ ID NO: 22529 - DNA, 419 bp, Glycine max
  Clone ID: LIB3106-036-Q1-K1-H8
ctcacgcgtacgatcggagtggtggttgaatggactcagtgactactcggggttccggaaacgtagttggagtagcggattccaaacatggcgtggagtggtgtgggcactttcagatgccactggactatccaaggtacacccaagctgactatgaggcaatgccagagtggaggcttgactgcttgctcaaagagtatggattaccaatctttggggatgttgagagcaagagaaagcttgccatgggtgccttcctatggatcaagtgagcttccaatgttcttaggcatgttcttgccatgaccctcttggaattttgcacttgttatatttgatataagtgtgggagtttttaataatgattagtattagttagttaatactagtatgttgtggtataattaacacataattat

SEQ ID NO: 22530 - DNA, 295 bp, Glycine max
  Clone ID: LIB3106-036-Q1-K1-H9
ctcactcccaaattcttacgcctaatatttactacactctgataactaacggtcttaagggagttgggtaataaattaatgcgacttctcaaacacaacatttattttgctatcatctacttagagccgttcctattattgcgacagaagatctaatgagaggaatagaacttattcacacacgatctgacctaaatgtttcattaggaggagcaactctaggacgaatcttcaacgtacttcgagagaccattgataatctacttccagtagattctctcacaacatatcccat

SEQ ID NO: 22531 - DNA, 312 bp, Glycine max
  Clone ID: LIB3106-037-Q1-K1-A1
tccttcgtctgcaaccctagctttccgttgtttgcaaatctatggctggtgaatctgatggacccgagaacaccctctcttgtgctaactgtggcaaacctgcgaatcttcagtgtccaaaatgtatggaattgaagcttcctcgagaaggtgctgccttctgctctcaggattgtttcaagtcttcatggagctcgcacaaatcagtgcatctgaaggcaaaactatccccacctggcacacaaaattcagactcacttgatgaaggttggttatattgtttgaagagagggcaggctcgaacgccaaagc

SEQ ID NO: 22532 - DNA, 330 bp, Glycine max
  Clone ID: LIB3106-037-Q1-K1-A10
ctcacgcgttcgcccacgcgtccgcccactcgtccgtgataactagaatcagggtgatggagatcatagtacttggtatcttcgatgctacaattctggtagcatggcaatgccatgcatacgatatgttccctgtacgaatgaacactggctatggtgcccatactccagaggtgaaatgcgcaagttggaggcttgatgcggaatcacacaacatctgaggctttgataccattccttaaaagtgcgttaaatctacaaatgaatacatccatggcgaacaatatacatcatactccagagcaggttaccaacacccttacttttatg

SEQ ID NO: 22533 - DNA, 424 bp, Glycine max
  Clone ID: LIB3106-037-Q1-K1-A11
gcgttcaaaatcctcactctctctcttccactcttttgctgttcccctttcccaatccacacgtcattcatgagcccctttccgtgattgatacactactcattgacttgatagcatacacccgtagcaacatgagggcatggcattagttaagctagataaactataaaatgctgtcaactactgccgctgctcagcttccaagttgctgatagccgaattcccctcagaaacttctatggcctaagtcttcctcaaacccataattgcagcaaagggaaagaaagcaataacagggctagatacaattccaatttaaatcagaaccacagacatttattatttctacagttcttccctgacagtgacacagaagacagcaataatcaaaatccaagaaccagaaaccactgtcaacatcaag

SEQ ID NO: 22534 - DNA, 396 bp, Glycine max
  Clone ID: LIB3106-037-Q1-K1-A12
gccaatcactcgaagagactttcttttgctcaaacccaaccctttatcttaggagtctagggcattctgtacagcgtggcaacaatacgattagagctgctgcgactataagaattcaaccagacaggttctgtcatggtacgctaaccatcaataatgaactgccacaaaatgctgattattctcgacaggttccagaaaagagactaaacctagttcagatcccattgtagaactgtgaccagcagttagggagaggatgaagaacatgaaagatgagccaagaaaaccaatgtcaggacctaagaatgggttgctgttgaagagccttataccgactgcatatcatgtgtataatgctaggatcactatgatcaacaatctgaagaagctgtt

SEQ ID NO: 22535 - DNA, 441 bp, Glycine max
  Clone ID: LIB3106-037-Q1-K1-A2
cccacgcgtccgcaaattcacacaggcgtgccagcaacccctcaatggacagagtggactggtaagagctgaatgcttgaaaggagataacagcccaagttcctttccaaaggttctggtggatggtccatatggggcgccagcgcaagactacagggagtatgaggtggtgttgctagtggggcttggaattggggctaccccaatgataagtatactaaaggacatggtgaacaattttaaggccattgatgatgaggagggaataggtggtgctaaatcaccaacgaggttgagtgacttcaagacaagtagggcatacttctattgggtgactagagagcagggttcatttgactggttcaaaggggtcatgaacgaagtggcctaagaggaccgaaggaaagtgattgaactccacagctactgcaccagcgtcta

SEQ ID NO: 22536 - DNA, 411 bp, Glycine max
  Clone ID: LIB3106-037-Q1-K1-A3
gcgatcactcgaaacagtgtgatgaaaatgaaggtccttgttttcttcggtgctacaattctgggagcatggcaatgccatgcgtacgatatgttccctcttcgaatgaacactggctatggtgcccgtactccggaggtgaaatgcgcaagttggaggcttgctgtggaagcacacaacatctttggctttgacaccattcctgaagagtgcgttgaagcaacaaaggaatacatccatggcgaacaatatagatcagacttcaaaacaggtaaccaacaagcttacttttatgccagagacctcgaagtccatcccaaggacacatttgtgttcaatataaatggcaccgtactctctaatattccatactacaaaaaacatggatatggagtggagacatttaactcg

SEQ ID NO: 22537 - DNA, 409 bp, Glycine max
  Clone ID: LIB3106-037-Q1-K1-A4
gtcaatctccatataaataacactggggccttagcattggaaggtgagctatgtttgaagtgtgctcggcttatcaattgtagctttgtcattcacatatgttgacgttcccatcagagttaatcctaggagggaagagactcgcaggtcattaactgataaattcaagaaaaacgttgacattctagagacacagagtcttattgtttgcggaaagatcactactacatgaattatatttcatgacacatgattgaagatggttgtctaaaaccgttgtgatgaaaaatgcagtgacattttgattaatagatataactgtttaaaaaacacttatttttgacacatccgatcaaagatgattttcataagagctgtcatgatttacgcttgtcatgatttttgtcac

SEQ ID NO: 22538 - DNA, 410 bp, Glycine max
  Clone ID: LIB3106-037-Q1-K1-A5
ttcaatcttactctcaactatactcctcttcaatcaggtgcatactctttgctattccaggggccactgctgaagttgagttatccaatgttgccctcacagaggacacataagaggcatcattgaaagatgactaatatacgaacacatgataagttgttgagactccaacaccagaaactgtaaacacttgacaaaccatggaagcaagtactgaagccccacgacctgcagcttcagaagacaagccctacgttgaagttcacactaaagaagtggcagacgaagttgtgtctgagaccgtcacacatagaccaacagttgaaaaacaagaaactgcttacggaacataagaatatgcccatcctgctgagattaacacaccagaaattgtacaaaatgttaatgtt

SEQ ID NO: 22539 - DNA, 390 bp, Glycine max
  Clone ID: LIB3106-036-Q1-K1-H11
ctctctttcaattccttcacactctcccctctccattcaccattactcccctcttcttccacttttgctcttcccaccacctctgcttcaagagcaaacgtgattctgcccccgaagcccttgaatggagttcgaatctcgacacccaaaaggaggactgagtcggtgattgtctccgccgccgcggaggacgcgagttcggctgtggagggtgggtcgccgccgcctcctccggcggagagcgagaaagagagcggcgcctccgtggagaagcttccgttggagtcgaaggtgaaggagagagaggagcaaaagctgaggatgaagctggcgaagaagataaggttgaggcggaaaaggcttcttcgggaacgcaagttgagaaagagg

SEQ ID NO: 22540 - DNA, 386 bp, Glycine max
  unsure at all n locations
  Clone ID: LIB3106-036-Q1-K1-F6
ccctgttggattcaacattgttgatgtcttggcttggggctccattggccatgttgttgcttactacatcttggccaccactagcaatggctatgaccctgcattctttggctgatttaatttcatcatcatgttgttccaactgtgtttcttgcttactttttagtatgtaatgtaatcaatgtcatgatgtataggttctctctaaagatccaacaagttcagcatatgctaatttgatcactattttcggttgcaatttggtttgctattatgattaatggaaaatgggacttctctaaaaaaaaaaagannnaanaaaacatactaaaacatacaactaaanaaatcttaaaaaaaaacaatctaatttcactgtacttgac

SEQ ID NO: 22541 - DNA, 177 bp, Glycine max
  Clone ID: LIB3106-036-Q1-K1-F7
ctcacacgtccgcccacgcgtttagttactgcctcaattggacatagtatggggtggggtcacatcctaaatagccaagcgtccatgcttagatcgtagtcgaactgtacgtttcctatcgtccgatgatgcattatcatcaaatcgtaacctttctagagagagtcgacgtttgac

SEQ ID NO: 22542 - DNA, 431 bp, Glycine max
  unsure at all n locations
  Clone ID: LIB3106-036-Q1-K1-F8
tgtaaattgtaatcaattttctgatccttctttagtttgttcctctgctggcttccaaagaagagaacacaaatagtagcagcagcaacaccaaaagaacagatagctccaacacctgtcaaactccacttccacaagttgaaaccactgttgttctcttcctcccaagtggtctcctcttctttgtcacacacatccttctcaataaccttccttctgggagaggtgatgatctccatggcctcacctttgtcctcaaatttcaaggcaccggcatccattggaggcaagatcccccttttcatgtccacatactcacttttctccttgatcttgaagaaaaccttcactctatcagcttccacagcctcaaactccttggttntctctgatggggccataacagccacttccataggactactcttgat

SEQ ID NO: 22543 - DNA, 373 bp, Glycine max
  Clone ID: LIB3106-036-Q1-K1-F9
ctctgagaccattcctgaagagtgcgttgtagcaacataggaatacatccatggcgaacaatatagatcagactccaaaacagttaaccaacaagcttacttttatgccagagacctcgaagtccatcccaaggacacatttgtgttcagtatagatggcaccgtactctctaatattccatactacaaaaaacatggatatggggtggagaaatttaactcgaccttgtatgatgaatgggttaacaagggcaatgcaccggcactgtccgagactcttaagaattacaacaagctggcgtctcttggcttcaagattatattcttgtcaggaagaacactggacaaacaggccgtaacagaaggaaactta

SEQ ID NO: 22544 - DNA, 434 bp, Glycine max
  Clone ID: LIB3106-036-Q1-K1-G1
aagattttatccaattgaaattttaaatatgactgggataaacttaagaattcaattggtgaaattgaataagtaaacaatttaattggattggtcgaatggtatcaaaaaaatggagtactaactcccatttcttatttattattgaattaaccgatcaacttgctttgttatcgaacatttctttttgatttcaaaaattttccggaaaaaatttgaatctatttttatatgcgaatcaatcctactacttctggtcctgaggtttctgcgcttaaaaaaaaaaatctgggacgtatcgcccaaataattggtccggtactagatgtagcttttcccccatgtaagatgcctaatatttacaacgctctgatagttaagggtcgagatactgttggtcaacaaattaatgtgacttgtgaagtacagcaatt

SEQ ID NO: 22545 - DNA, 443 bp, Glycine max
  Clone ID: LIB3106-036-Q1-K1-G10
ctttcttcttattgttcatgtaatagtaataatttcatggctattccatctcctaaaagtttcctgctcttaacattcttcttctcacattctatagctgtgaagtcctccaatgtttccacaaccccaacattgcatgcaaccttcccatttcctgaagttagcagcttcaattcatctaagctttcaatctcaataaacataaatccaaacatcatcaacacccttcttcagtccctccaagcagcaatatctgaagccacaaaactatctgatctattaaacaacgctggacataacatcatagagaacaaaataggagcagtccaagactgtagagaacttcaacaatccaccttagcttcctttaaaagatcactatcaggaatccgttccaagactccagaaactagttgatgcaagaacctacctcagtgcagcac

SEQ ID NO: 22546 - DNA, 391 bp, Glycine max
  Clone ID: LIB3106-036-Q1-K1-G11
ctcaaagtctccacattatattatagagcaataataataataataatatgggtaacagcggaaggtgttgtttggcttgcattcttccgtgtggagccctagacttgatccgcatagtgcacttgaacgggtacgtggaagaaatcacgcgtccaatcacggctggggaggttctgaaggcaaatccaaaccatgtcttgagcaaacctagctcccaaggcgtggttcgccggattctgatcctcgcaccggagaccgagctcaagagaggaggcatatacttcttgatcccggcggcatcgttaccggcggagaaaaagaaaagacacatgaaacatgtgaaacacgtgagtggtaaccacggtgggtagtgatagtagtaataagaatg

SEQ ID NO: 22547 - DNA, 438 bp, Glycine max
  Clone ID: LIB3106-036-Q1-K1-G12
atttccttgaagtgaagcaattgataaatttattgcgattgagaatcggagaagagaagcaaaataaaagggatgcgagtggcgcgagaagaagcaatgggtggtggaaagcggaacacggtggagacattcttcttagccactctaattctctggttcgcttccctttgtttccagattttgttgaacaagcgctgggagcttctctctgtcatcgcgggttctatcttctaccagacatctaactgcctcatccgattcttctccccacataatgacaaagacgctctcttcgttaacacctgcgtctctcttcttcactctctcctcacctgctcctcagtgatcttcatcttgttcagagagttgttaagtaatgggccaagtggaatgtctgaccactcacagttggtcgaagatgcttggtcatgggcattt

SEQ ID NO: 22548 - DNA, 319 bp, Glycine max
  Clone ID: LIB3106-036-Q1-K1-G2
gttctagatcgcgagcggtcgccctttttatttttttttaagagtatcattttagggggaaggcatgaaacatgatgatgcctatcgcacaatgtggtctctatacaaataccagcgctctattgtgcgaacaatatacacctaaaatgcacagggtgcctgcctgccatatcatacctgcgcatcatcgcattaagaaccttgcgtgaagagtgcttttaacaaccacagagcctcatacgaccggatcggtttacatgagacacgtgaagacttacataatgtacaaacgtatatgctggacaccttataagcgatg

SEQ ID NO: 22549 - DNA, 434 bp, Glycine max
  Clone ID: LIB3106-036-Q1-K1-G3
atcgagataactagaaacagtgtgatgaaaatgaaggtccttgttttcttcgttgctacaattttggtagcatggcaatgccatgcgtacgatatgttccctctccgaatgaacactggctatggtgcccgtactccggaggtgaaatgcgcaagttggaggcttgctgtggaagcacacaacatctttggctttgagaccattcctgaagagtgcgttgaagcaacaaaggaatacatccatggcgaacaatatagatcagactccaaaacagttaaccaacaagcttacttttatgccagagacctcgaagtccatcccaaggacacatttgtgttcagtatagatggcaccgtactctctaatattccatactacaaaaaacatggatatggggtggagaaatttaactcgaccttgtatgatgaatgggt

SEQ ID NO: 22550 - DNA, 372 bp, Glycine max
  Clone ID: LIB3106-036-Q1-K1-G4
ctctagggtttttagctcctccaaattcttcgcccaacatgggtcttcaaaatgatggtgatgtgctaaatcccccggctgagcttgagaagaggaaacacaagctcaagcgtcttgttcagtcaccaaactctttcttcatggatgttaagtgccagggttgcttcaacataaccactgtctttagccactctcagactgttgttgtatgcggaaattgccagaccgtcttgtgccagccgacaggcggccggtcaaggctaaccgagggatgctcctttaggaagaagggagactgagtggtgtgccatctttttttgcctgtgattggagagtttcagtaatgcactcttttgttttggttatgggcaa

SEQ ID NO: 22551 - DNA, 318 bp, Glycine max
  unsure at all n locations
  Clone ID: LIB3106-036-Q1-K1-G5
gaaagttgtcagctaaatctaagctagaaactcttgcaagtccctttggtcaaatctgttttgataggaaaaatgattggttcttcctcttcattctcaggccttttttgtaatcacaatctgtccatctttttctatcgtcttcaaattgtagtctgatcttcattttacagagaattctagggttttgtataattggtcaaattgtagtctgaccaattatagatagggaaataattgtccctcaaccatgtatgcacgataaaatatacatgtatttttcaaatatctattcacagttttacagantaaaaacaa

SEQ ID NO: 22552 - DNA, 397 bp, Glycine max
  Clone ID: LIB3106-036-Q1-K1-G6
caaacacaaacagttgtgattgcattgcatcaatgggtgtctccttcctctcaactggcccttatctgcttccactcgacgctcatgattcaccaccctacgacagataccaacctcgttcagtgtccatttgttgtaataaaaccataaacgatgttagtgatggagagccattccattggagaatgatagatggtctcaaatgcgccggggcaaccgttggcctggaattaattggaagctccggatctcttgcagaaatggctaatgctgatgacctgatacagcgcatacagcattctgaactccaatctcagatttacgaaacactctttacagccatcatgggaaatgcagatcttattccatccttactgacactggctctaaatgatgc

SEQ ID NO: 22553 - DNA, 105 bp, Glycine max
  Clone ID: LIB3106-036-Q1-K1-G7
ataactcgtccacccatacaatctttttatgtcagcattgtccatcggttcaggatagataaattaatatctatggtgacacacatacttataaccctaaactat

SEQ ID NO: 22554 - DNA, 328 bp, Glycine max
  Clone ID: LIB3106-036-Q1-K1-G8
attactcgaaaggccttgctttctcattatattactattctttaagtgccagttatggctgaaagtataactatggtgtctcacttacttatactctaacaaatgggttctatccctatattggattccttactatacatagtcttcgatatcaaacttagtcaaaataccttgatgacaggcctgttcacatataaatattattatgcttaacatacctacaatatgcgatattagtactatgatatagcatatgcatcgactctgaactatactcttttacaggacatcgcattgatgaccattactagtcatatattttaaactt

SEQ ID NO: 22555 - DNA, 365 bp, Glycine max
  Clone ID: LIB3106-036-Q1-K1-G9
gtaaaactcaaaatctagtttcatactttttttcttcttcttgaaatggctctccaggcggcttctgttgttcctgcttctttctcggttcttaaagagggaaagagtggcgtgtctctcaaggactccaccttgttcggtctttcattttcagaacctatcaaagctaacttcagctcttctgcattgaggtgcaagagggaattcgaacaaaagctctgtgctgtgagggccgaaacagtggctacagcctctccagcatttaccaagtctacaccataaggcaagaaaacattgatgaagggcagcgttgtgataactggggcttcatctggactaagcctggccactgctaatgctttggc

SEQ ID NO: 22556 - DNA, 301 bp, Glycine max
  Clone ID: LIB3106-036-Q1-K1-H10
ctctctctcaattccttatgactaatatttacaactttatgataactaacggtctcaagacagttgggtaataaaataacgtgtcttcgaaaagacaacattattttggccataatgcccttatatccgtttctattattgacacccaaggtgtaatctgaggaatggattttattcacacacgagctggcctcaagtttcgattaggtggatcaactgtcggacgattcttcaacgtacttcgagaacccatggatcacctacgtcctgaagatactgtcacagcatatcccattcgtaa

SEQ ID NO: 22557 - DNA, 406 bp, Glycine max
  Clone ID: LIB3106-036-Q1-K1-F5
ctccaaaaatgggaagatcaccatgctgtgacaaggtgggtttaaagaagggaccgtggacgccagaggaagatcagaagctcttggcttatattgaagaacatggccatggaagctggcgtgctttgccagcaaaagctggacttcagaggtgtggcaaaagttgcaggttgagatggactaattatctaaggcctgatattaagaggggaaagttcagcatgcaagaggagcaaaccatcattcaactccatgcactattagggaacaggtggtcttcaatagctacacatttgccaaagagaacagataatgagatcaagaactactggaacactcatcttaagaaaaggttagacaaaatgggcattgaccctgtgacccacaagcccaagaacgatgccct

SEQ ID NO: 22558 - DNA, 365 bp, Glycine max
  Clone ID: LIB3106-036-Q1-K1-E12
cacacaagaaaatccatggttttacaccattacccatgaaaatgtgaattcgggagccatgtacgagccttctttgaaaaaatggcatcatccaactatatcaacaccgcccacaaaattgattgttttacctgtggcttcttctggcggcttagtttgctttcttgacattggtcatcgaaacttctttgtttgtaacccactgactcaatccttcaaggagttgccagctcgatcagtcaaggtctggtctcgtgttgctgtagggatgatggcaaatggaaactttgctggttcaagctacaagatcgtatgggtaggttgtgatggagaatatgaagtatacgactcagtcagaaattctt

SEQ ID NO: 22559 - DNA, 490 bp, Glycine max
  unsure at all n locations
  Clone ID: LIB3106-036-Q1-K1-E2
ttcccgggntcgactccacgtcgtctcgcaccaaagagtaagccattagcaccctaggagtcagcaacaaccctagtctcagnnctgaaatgggccgtgcttcgagtgatggcgatctgtggcgcctcaaaccctgcnnccctttcatctgggttgagacagtcctcnnagtgagaggccccttccctctcttcttcaaggaaccctcttcttcattcagagtctgtggcccagtggcaagtaagatccaagactgacaaactcttatggaattaatggtggcatggctttgagggatggaactgatgcatctggcaggaaaggaaagggaaagggtgtttaccagtttgtagacaaatacggtgctaatgtcgatggttacagtcctatctacgacaccaaggactggtctncaaccggtgatgtctacgctggcggtacgactggcttngctatctgngctgtgactctacttggtcttttagctggt

SEQ ID NO: 22560 - DNA, 374 bp, Glycine max
  Clone ID: LIB3106-036-Q1-K1-E3
atcgcgagcggcgccctttttttttttttttttttttttttttttttttttttttttgttttgttttttttttttttttttttttttttttttttttttttttttataatatattatttatatttttttattttatttttatttttattttttattaaaaaatttataaatttttaataatattaatatttataaattttattaaaaaaaaaaaaaataaataaaaaagatggaaattattttttaaaaaaaaaaaaaaaaaaaaataaaattaccattttataaacaaatattttaaaaaaatatataattacataaattttttattaaaagaacaattaaaaaataatatgttaaaaaaaaatatataaaaa

SEQ ID NO: 22561 - DNA, 141 bp, Glycine max
  Clone ID: LIB3106-036-Q1-K1-E4
cacaaacatgcgggttctcacaatgctcatagatactgatttagtagaaaggacatgggatgcgagataaatattgcagtcctataatgatcactcgctgataatgcacatgctaattactggacactgtcagcttaagct

SEQ ID NO: 22562 - DNA, 416 bp, Glycine max
  Clone ID: LIB3106-036-Q1-K1-E5
gacgaaaatgaaggtgcttgttttgttccatgatacattcttggtagcatgggaatgggatgcgtgcgatatattccatctccgaatgaacactggctatgagtgccgtactacggaggtgaaatgcgcaaggtgaaggctagctgtggaagcacacaacatctttggctctgagaccattcctgatcagtgcgttgaagcaacatatgaatacatacatgactaacaatatacatcagacttcaaaacagctgaccaactagcttactttcatgccagagacctagaagttcattccaaggacacatttgtgtgtagtatacatggtcccgtactctataatattccatactacagaaaacatggatatggcctgtagaaacttaactcgaccttgtatgatgaatgggttaaca

SEQ ID NO: 22563 - DNA, 425 bp, Glycine max
  unsure at all n locations
  Clone ID: LIB3106-036-Q1-K1-E6
cacgttcttctctccatctcgaaacaccatctctgcctcagtcccaacccatcaccagtctcatggctgctctagctctagcacttcttcttctggctttcaccggcacttcaagtgctacatggtgcgtttgcaaggatggaagcgacgcgatcctgcagaagacgttagactatgcttgtggagctggtgctgactgtaaccctcttcacctaaacgggccttgttttcagcccaacaccgtcagggcccactgtaactacgccgtgaacagctacttccaaaagaagggtcaagctcaagggtcatgcgagtttgcgggaacagccactgttactgcatctgaccccagctctagcggctgtgtctacccttctagcgtcagcgctgcangcacttgtacaactnctgtgactactacacca

SEQ ID NO: 22564 - DNA, 329 bp, Glycine max
  Clone ID: LIB3106-036-Q1-K1-E7
tcggaagctctaccgttcacgtgtaaagttttaagatacatgagagcaaacttgagatggggtttatcgctgtcttgacaatcactcttagagagatgattgacaaagatgaaaagacaactatacggtcctttgaccatgatctaagcttgaacttcatagagactgagattcacctcaactggcctgatcttgactatcgcatggaaactaacacgatcagtagatacaatgagttctataacaccagagagctgaggctcaacgttgagatcaaggaatatctaaataagaatcttactaatggatcaatctagaatactataact

SEQ ID NO: 22565 - DNA, 255 bp, Glycine max
  Clone ID: LIB3106-036-Q1-K1-E8
ataaccagctagacccacgcgtccgcacgaacgtcctcacactccttttggtttatgatctattataaatcacataggatgcgacatttatattgccggaccctaattctcactcactgataatccacatcttatttactcaatactctaagcttaagctagactcacaaaacgcacatcatacttacctgactgaccatctacttaaatatcgattcatctatatatgataacatacatgactcactatatata

SEQ ID NO: 22566 - DNA, 387 bp, Glycine max
  Clone ID: LIB3106-036-Q1-K1-E9
gaaacctctcagcccctctccgatcaaatggccaccgtaatcgacggcaaatccgttgcgcaaacgatccgatctgaaatcgccgacgaggtgcgccagctctctcaaaaatacggcaaggttccgggattagcggtggtgatagtagggaacagaaaagattcacagagctatgttggaatgaagagaaaggcatgcgctgaattgggaatcaaatccttcgatgtggaccttcccgaacaagtctcccaagctgaactaatcaaacaagttcaccagttgaatgctaaccctgacgtacatggtatattggttcagctcccgttgcctaagcacataaatgaagaagaagttctgactgaaaatcagccttgagaggatgtagat

SEQ ID NO: 22567 - DNA, 420 bp, Glycine max
  Clone ID: LIB3106-036-Q1-K1-F1
tttggccttgctggatctgagttatggttatggagaagaggaagaacaagagggtcgtgagagaggaagaagagagtgaaagagtgaagaacaagagactaaagggtgtagaagaagaagatggtagtgatggtggtgttcccacggaggaggacgtggaagagttctttgccatactaagaaggatgagggtggcggtgaagtactttgatgacaaagggagtggtggcaaggagtggcggaaggccctcgagacggcagagctcacggtggaccaccgtcacgacgtcgttgctgccgaagaggattactagccaaggaaaaagggtggtgaggtaattattaatgagggctttgactcgaacgccgtcgcgccggaagccgcacatggcgcgtgcgcgtagagttaattgattggcg

SEQ ID NO: 22568 - DNA, 384 bp, Glycine max
  unsure at all n locations
  Clone ID: LIB3106-036-Q1-K1-F10
cccacgcgtccgcccacgcgtncgatcgagataactagaaacagtgtgatgaaaatgaaggtccttgttttcttcgttgctacaattttggtagcatggctatgccatgcgtacgatatgttccctctccgaatgaacactggctatggtgcccgtactccggaggtgaaatgcgcaagttggaggcttgctgtggaatcacacaacatctttggctttgagaccattcctgaagagtgcgttgaagcaacaaaggaatacatccatggcgaacaatatatatcagactccataacagttaaccaacaagcttacttttatgccagagacctcgaagtccatcccaaggacacatttgtgttcagtatttatggcaccgtactc

SEQ ID NO: 22569 - DNA, 357 bp, Glycine max
  Clone ID: LIB3106-036-Q1-K1-F11
ctcacgcgtccgaccgtctgaaacaaaaggataggatgaagcattctaaggatcccttcgaagcagggttcgaggaatagccgcctgaatccccaacggctacagttacagagacagaggatgaggacaacatggacgtggagcttgccaagctcactttcaccggcgaacctcacaaaatggccaagatgcaggccattttgtcgcaattcaccgaatagcagatgattcgatacgagtgcttctcggaggctggctctcagaaagccgacatgaaaaggttattgtctagcatgactgtgacccacagcatttctgtgcccatgacgactgttgtatcgggcattgcaaaaatgt

SEQ ID NO: 22570 - DNA, 425 bp, Glycine max
  Clone ID: LIB3106-036-Q1-K1-F12
cccacgcgtccgaactttttgtcaattcatttcttgttgttagactctgcttctttctgcaacttcacacacaaaaaaacatggcaaaggatagaacaattggtgtggctctagatttctccaaaagcagcaagaatgctctgaaatgggcatttgagaacttagccgataaaggtgacaccatttatgtcattcacatcaacccaaactctctagacgagtcccgcaacaagctatgggcaaaatctggttctcctcttattcctttggtagagttcagagagcctgagattatgaaaaagtatgatgttgaaattgatattgaggttcttgatatgcttgacactgcttcaagacaaaaagagatccccattgtacaaaaatatattggggggatgcaagagagaagcttttggatgctattg

SEQ ID NO: 22571 - DNA, 353 bp, Glycine max
  Clone ID: LIB3106-036-Q1-K1-F2
tgtccattttattccgaaagatactagaaagttttacataatatatataatatagtacgaaagatgatacactgtttatgtacaagcacactcacaagagcagcaaatcacataattttgcttcatgctggtccacgacatggcagttgatccattgagtgtaggaaacttgggacttcagatggctcgtactatggaaaaatttgaggcactagaaggttttgtaaaccaggcagatcaccttaggcaacatactctgctgcacatgtcacgcatcctgtcaattcaccaagctggtcgcggcttgctggctctcgaagaatactttcatcgtcttcgtaccctttgctctc

SEQ ID NO: 22572 - DNA, 431 bp, Glycine max
  Clone ID: LIB3106-036-Q1-K1-F3
cgccggatctgctaaaatacgcttgatccatatgggcctcctcgaccacttgtgggacgacaccgtcgccggcccaaggccggaaaacggtctcggcaagctccggaaacaccacaccttcactttccgacctagctccggcaaggaagcggagggcgggagcgtgagatcgtacggtgacgaatcgtcggaggaagcgactagagtgacgcgtagtatcatgatcgtgaaaccgccagggtaccagagtggatcgcctccggtttctcctgccggttctactcctccgatttctccgttttccggaggaaaagattcgcttcggtttcgaagaaggtcgggatctgatgcgtacgagaagagagggcagaacagatcaggcccttcttctcctttcgatgtgtgacgcattttctcgtacctgaaagctg

SEQ ID NO: 22573 - DNA, 377 bp, Glycine max
  Clone ID: LIB3106-036-Q1-K1-F4
tccacgcgttcgggattcagaggttttaatgactaccctccatttttgaacctctctgtttcgctctctccgagtctgagcctcgttcttcagactcgctttctctgctcactcagagactgagacacttatcttttctgtcattggctctctgtgtttgcttccaaaagctctacacgataagccaaagattgaaagaccctctctagcctattctctgttttttttccctgtcccagttgctcagatctactaccacccctttctgcattcccgtttttgtttcaatcttttggtccattgcgttgtaagaccatgagtaaagaagagtttttgaagatacagaaatgtgttctcaaagtgaacatacactgtga

SEQ ID NO: 22574 - DNA, 380 bp, Glycine max
  Clone ID: LIB3106-036-Q1-K1-E11
cccacgcgtccgcaaggagaggctgatactattccaactccggtagttattattgatcaagactctgatccagatgcaactgtggtcgagataacctttggtgatcgccttggggctcttcttgacactatgaatgcgttaaaaaacttggggctgaatgttgttaaggcaaatgtctttctagattcttctggcaagcacaacaagttttccatcacaaaagctgattctggaagaaaagtggaagatccggagttgttagaggcaatccgcttgacaatattgaataatatgattcagtatcacccggaatcaatcgcccaattagctctgggagcagcttttggacttgtgcctccaaaatagcacgttgacgtgga

SEQ ID NO: 22575 - DNA, 429 bp, Glycine max
  unsure at all n locations
  Clone ID: LIB3106-036-Q1-K1-C4
ctttagttcttcagtaatttattgtgggattctattctaagattttgagaatgtctagctgtgggtgtggaagcagctgcaactgtggcagcaactgcggttgcaacaagtactcttttgacttgagttacgttgagaagacaaccacagatactctagttttgggtgttgggcctgtgaaggcccaattggagggtgctgaaatgggtgttgcatctgagaacggtggctgcaactgtggatcaagctgcacctgtgacccatgcaactgcaagtaaggtcaagatgtataaccttgaagcagagatagctgtaatatatgtatcaacaaataatangaagtagaagttgcgtatggagctttagaataaagtgtatgctatgtgtcttggtggtcctttataaatatgtaacttgaatcatcaatct

SEQ ID NO: 22576 - DNA, 166 bp, Glycine max
  Clone ID: LIB3106-036-Q1-K1-C5
caaacacctccgacgacctaatctgtttaagcaaacatactacacgacatgtgaatggtaagctcactcattacagcatcaaactctggaagactcgtgttaatacttgacgaacatcccaagcactgatcgactgggctaacaactatcatttgtcaaggactat

SEQ ID NO: 22577 - DNA, 346 bp, Glycine max
  Clone ID: LIB3106-036-Q1-K1-C6
gaaacgcatcagttgacccaatcagttaatggaatcataataactgacttgtggttcgtaagcttcctggatcaaaccttgctgatcaaaatactgcattgagatcgaaagtgcgtagtgcacagtactttgacatattctacatacttacacttattacacagatctgcctatagaaactgggacttcaatcagctgcgtacgaactctgaaactgagagtgctaaccatttagtgggtggactaaatgagatctgcaatctattaaactgcaaactatagacatttaacgatctctctatctcatcacagtataatacacatacatgaggcttaatttatatgc

SEQ ID NO: 22578 - DNA, 253 bp, Glycine max
  Clone ID: LIB3106-036-Q1-K1-C7
cacacacctccgtcgacccattcagttaaagcatacattatacatgacttggggttggtaatatccctgtctaataactcacactttaaattactcgttatactacttaaagatcttctcacacacagctcaacagtatcaacaactatcacttgataaggactatattctaacaacattgaggacttcttcaactgcgtacgtactatcacatcaagagtgataaccagtaagtacgagcgactaaacaaga

SEQ ID NO: 22579 - DNA, 407 bp, Glycine max
  Clone ID: LIB3106-036-Q1-K1-C8
ctcactcttacattaattaattccctttattattaaaatggccctggctatggctgcgtgcagtcttggactttacttgagtgctgataacaccttgagaccttttgaaaaaaccaccgtcttgaaggccctctctatctcttatgttactaaaccatgttacatttctcacaaaacaagattatcatcaccttcatcttcaggaatatcaatgatcgcacgagcatcagcagttactggtactgaggatgatggaaatcaaggagaggctgataccattccaactacggtagttatcattgatcaagactctgacccagatgcaactgtggtcgagataacctttggtgatcgccttggggctcttcttgacactatgaatgctttaagaaacttagggctgaatg

SEQ ID NO: 22580 - DNA, 189 bp, Glycine max
  Clone ID: LIB3106-036-Q1-K1-C9
cccactcgtccgaaaaaagattaatgccattgctttattagacttctaaacagactaaggtgctgccgttttcccaaatctccatgacaattaccattcacattgagaaattacatccatgactagccgacggacgttgtttccccaacataaactcttcccccgtaggtggaccgtcagaagggctat

SEQ ID NO: 22581 - DNA, 316 bp, Glycine max
  Clone ID: LIB3106-036-Q1-K1-D10
gcaatatcatgttttatggttttggttgatttaaaagtagttctgaactgaatcatgtactggattaatgcaagtcttagaataaaatgatcttttatggcccaaataaaaaaaaaaaaaaaataaaacatactaataaaaaaaaaaaaaaaaaaaaaaaattaatataaaaaaaaaaaaaaatataacattaaaaacaaaaaaaatataaatttggggggccctttaaaagaaacaaaatttccatccacttttttgcaattttttaccattttaatggggcaccttaattttattttagtgaccgtttttttaa

SEQ ID NO: 22582 - DNA, 431 bp, Glycine max
  Clone ID: LIB3106-036-Q1-K1-D11
aacaaacccaaataggttcccaataagatttaagagtcatcacaaggaaaaaggggaaagaaaagatgccttgcctttacatctccaccaacataaacttagatggagttaacatcgatccaatcttttctcaagccaccactgcagtttccacaatcatcggcaaaccagagaagtttgtgatggtcatattgaaagggtcagtgccaatatcttttgagggtaacaaagaaccagctgcatatgctgagatagtttcaatgggtggtataaatccagaagtgaagaggaagctaattaataccattggcaccatattgcagtccaacctatctataccaagaacaagattttttctcaaagtccttgacacaacactatttcgtactaaatccaaaatgtaataatatgcttgatctgattatgacatg

SEQ ID NO: 22583 - DNA, 337 bp, Glycine max
  Clone ID: LIB3106-036-Q1-K1-D12
cccacgcgttcgcccactcgtccgcccactcgtccgtaaaaaaaaaaaaaaaaaaaaaaggaaaaaaaaaaaaaaaaaaaaaaaaaaaaaaaaaaaaaaaaaaaaaaaaaaaaaaaaaaaaaaaaaaaaaaaaaaaaaaaaaaaaaaaaaaaaaaaaaaaaaaaaaaaaaaaaaaaaaaaaaaaaataaaaaaatataaaaaaaaaaaaaaaaaaaaataattatattgggggggggggccctttaaaaaaataaatgttatatcacaggtgtggtaaaatataatatttttttaaatgtgaaaaaaaaaaaaaatatgcggggcgtttttttttat

SEQ ID NO: 22584 - DNA, 428 bp, Glycine max
  Clone ID: LIB3106-036-Q1-K1-D2
ctctactatactgcttcaccttctgctctagaaaattcagtgctgaaacatggcttcggctactctctctgtagccaaaccagcccttcaggcaaatgggaaaggcttctctgaattctctggcctccgaagctcatcaggcttccttcccttttctagaaaatcttcagaggatttccattctgtcattgccttccagacctatgcagttggaagcagtggaggatacaagaagggtgtgacagaagcaaaactgaaggttgccataaacgggtttggaaggattggaaggaacttcttgaggtgctggcacggtcgcaaagactcccctcttgatgtcattgccatcaacgacaccggcggcgtgaaacaagcctctcaccttctcaaatacgattccatcctcggaaccttcgatgctgatgtca

SEQ ID NO: 22585 - DNA, 427 bp, Glycine max
  Clone ID: LIB3106-036-Q1-K1-D3
cccacgcgtccgaaaacaataataaattaatatcctaatatcatattcatattcctgagaaagtgtttgtttctctctatctatatggcagccttcatcctcatctccaagtccaagcttcaatccacagtacttgttcttgtcctaaacctatctttcttcttcctcttctgtctccttctaaaggcttattatctccaccctcctaactcaaattctcaatctaatggccccctcaaaaccttcaaccatgaaagattgttcagagatgttagtgttgaaggctgcactgacctccacaagtactcagattatgagtccaaatgtttgtatgtgaagagccatcttgactgcaggtcaaaagggtacataaactatctccaaatcttctattgcagctttgggaaatccaaattttgggacaaac

SEQ ID NO: 22586 - DNA, 431 bp, Glycine max
  Clone ID: LIB3106-036-Q1-K1-D4
cccacgcgtccgacttatcatgaccactttcaaaacggtgggacggttaactttgatgtgtggggatggaaccaatgatgttggagctttgaaacaggcccatgtaggaattgctcttctgaatgcattgccttcaactcaaagtggaaactcctcttcagattcatctaaggaagaaggttcaaaatctggcaagcaaaagaaatctaagcctgctagtgaaggcacttcaaaagccaaagttgcttcaaaatcagattccactagtcactcatctggtaaccgtcatcaggcagctgttgagatgcaacggcagaagcttaaaaagatgatggacgagcttaatgaggagggagatggtcatgcacccattgtcaagcttggggatgcctcaatgcatctccattcactgctaagcatgcatctgttgc

SEQ ID NO: 22587 - DNA, 398 bp, Glycine max
  Clone ID: LIB3106-036-Q1-K1-D5
cagggattcagtggaactttaacagaaccagttgagaaaacaggtgatcaaattaaagaaatggaactgaaggttcatccaaaattgagacaacctttgacagcactatgcagtgatccaaataccacagttgttgtgctcagtggaagcggtagacaagtcctagatgataacttcaaagaatacgacatgtggttggcagctgagaatggaatgtttttacatccttcaaagggtgagtggatgactacaatgccagagcatctgaatatggaatgggttgatagtgtgaagcatgtttttgagtacttcacagaaagaacacctcggtcacattttgtttttgaagaaagggaaacttcacttgtatggaattacaaatattcagatgttgagtt

SEQ ID NO: 22588 - DNA, 408 bp, Glycine max
  Clone ID: LIB3106-036-Q1-K1-D6
gaaaaaacaacaccggtttaacatgtggaagcattcatacttgaagacttgtgctggcattgatcgctaactagagcagaatcgcaagatagattcattttacagtggaacaactgtcttgtcaattgttagacagggtgaactcattatcattgcaaacgtcggtgactctcgtgctgtgttagctacaacatcagatgatggaagtttggtaccagatcagctgacagtagatttcaagcccaatttacctcaggaagcagagagaatacttgagtccaatggacgagttttctgcttagacgacgagcccggagtgcacagggtgtggttgccggatgaggagtttccaggacttgccatgtcaatggcttttggagactactgcgtcaaaaagtatggccttat

SEQ ID NO: 22589 - DNA, 244 bp, Glycine max
  Clone ID: LIB3106-036-Q1-K1-D7
gacacgcgtccgtccacgcgttctggtacaccctacgctacagttgacctgtggtgtgttctacttctatctctacaaaagtacatgcaatttatcttgactcagctgcatttcatactcctacaccgcttgacaatgccaacaactcttacacgaaacacacatgcttctttttaagttcttcatatctaaacctatggattgaatctgcaccatgaaccaataaccacaaactcgtacttgt

SEQ ID NO: 22590 - DNA, 336 bp, Glycine max
  Clone ID: LIB3106-036-Q1-K1-D8
gccactcctcctatggcacgctaactcaaggccacctttactaatgctctcggatcggctaacggcctctctgcctctgcaccactccacctactgccttctaagaggcaatacagcctgactgatagggccatccaatcagaaaagccaacctatcaagtgattcaaccaatcaacggtgatcaccttcattggaagcctagaaaccccagttacatacagccccttgatcgcatgggacttatcgaacctgccagcatacaggaccgcagtgagcccattactaatacagatcgacgtgagcctggcccatggctaccttatgatggtcccatt

SEQ ID NO: 22591 - DNA, 403 bp, Glycine max
  Clone ID: LIB3106-036-Q1-K1-D9
cccacgcgtccggtgagtttgttgatcgttataactagaaacagtgtgatgaaaatgaaggtccttgttttcttcgttgctacaattttggtagcatggcaatgccatgcgtacgatatgttccctctccgaatgaacactgtctatggtgcccgtactcctgaggtgaaatgcgcaagttggaggcttgctgtggaagcacacaacatctttggctttgagaccattcctgaagagtgcgttgaagcaacataggaatacattcatggcgaacaatatagatcagactccaaaacagtttaccaacaagcttacttttatgccagagacctcgaagtccatcccaaggacacattttgtgttcaatatagatggcaccgtactctctaatattccatactac

SEQ ID NO: 22592 - DNA, 359 bp, Glycine max
  Clone ID: LIB3106-036-Q1-K1-E10
gttataatcgcgagcggacagccttatttttttccatcttcggttgttatgaatgagaaggacacggacacttacgcaattattttattaatagcctttatgcatagcgacattggtatagttaagctctgattactgaaaggaacaagctgctagttgaatttgagggcccacttgatagccaaatttgtgacgttcgcggcggaggaaccatgtcgagcgatagccttagccgaaacctgcttgatatcctttatttagaaacaaagctttttaccttgttgacctttcatgatgaacttgactaggcttgatatgtcctgtttgttctccaagcaactctttgaatcgttggtcct

SEQ ID NO: 22593 - DNA, 282 bp, Glycine max
  Clone ID: LIB3106-036-Q1-K1-C3
acaaagcgtccgagagccaggcatgctttaggaaccagaagatcgatcagattactggtaagagcatacatactaggtggcaactgtgaaaacgatacaggaggaactgattcaaatcgcttgacgagacaagccggactaagacactttcactggcctgaaaggcaagcatatgcactaagggaggcaaaattcgaatatcacgatctgatgatattggagaactgagtgtccactctaggagatgatacgtatcttacatgtagaagctgcactgatgaa

SEQ ID NO: 22594 - DNA, 271 bp, Glycine max
  Clone ID: LIB3106-036-Q1-K1-A7
cccacgcgtccgttcaatagtttgaaattctcaatctgatcagttttttccggactggtgaccattgtagtaaactttcttacagaaaatactacattctcgtaggctatggcagctatgttaatgtacacgatcttatattatacagtaaccagtattgtacgacaatattcacaacgaatgaaccgagattatcgctgagacctacaatatctacatgaccagtgacatgctgaaagtgctcgttgacattattatctagatcatagac

SEQ ID NO: 22595 - DNA, 334 bp, Glycine max
  Clone ID: LIB3106-036-Q1-K1-A8
gacaaccttcctatcacgcattatcgtcggcgatccctctcatcgtcgccggtagtagcaatctgcgtcctcatggaaccgtaattccccaaaacggcaaaaaagtctcttcatgttcccgtcgattacgtgctcccactgtcgttttcgcgttccgttgaattccacccacccttctcggaaaaatcaaacaaattgcgaaagcgctattattccattccaatggcgatgaaaaaggcgaccatggatcacgtgctgctagcgtcacatgatacgaatgaaacacgtcaggtgcggattcagagacttttagaatttatacacagacagaatc

SEQ ID NO: 22596 - DNA, 159 bp, Glycine max
  Clone ID: LIB3106-036-Q1-K1-A9
cccacgcgtccgatcactagtgaacaacctagttcccttagtcattttcgattaataaggcaatggcacttaccaatcagaccactcgtaattccatcgatcgattggatttaaagtaatgattgtgctccgaagcagatagaaaatcattcccgttta

SEQ ID NO: 22597 - DNA, 145 bp, Glycine max
  Clone ID: LIB3106-036-Q1-K1-B1
cccgaagcccctgaaggcttacagagcaatctgcgctgcagccttcgactagaccacagatgcaccaccagatactcaggctgaacctttcggagtcaccgcaccagaactcgacctaaacagcccttccccgatcttagggggc

SEQ ID NO: 22598 - DNA, 430 bp, Glycine max
  Clone ID: LIB3106-036-Q1-K1-B10
gtcactcataactaaaaaggagaagcaaatggcttcctcaatgatctcttccccagctggtaccactgtcaaccgtgccggtgccggcatggttgctccattcactggccttaagttcatggctggcttccccaccagaaagaccaacaatgacattacctccattgctagcaacggtggaagagtgcaatgcatgcaggtgtggccaccagttggcaagaagaactttgagactctttcctacctgccagaccttgatgatgcacaattggcaaaggaagtagaataccttcttatgaagggatggattccttgcttggaattcgagttggagcacggtttcgtgttccgtgagcacaacaggtcacccggatactacgatggacgctactggaccatgtggagctgcctatgttggttgcactgatgc

SEQ ID NO: 22599 - DNA, 341 bp, Glycine max
  Clone ID: LIB3106-036-Q1-K1-B11
cccacgcgtccggtcggtttctgttggtgtgactaataaactcatagcttcaagtgttgctggtgcccatgttggttccaatagaaagactgtataacgtaaggaatcacgaattgtgaagcaacctattcctgtgccatccaatgtcacggtcaaattggtaggacaggatatacaagtgaaaggtcctttgtgagaacttgcattaacttatcctcgagaagtgttggttgagagggaagagtcagggactctaagggttaaaaaggcagttgaaaccagaatggccaatctaatgcatgggctttttaggacacttacagacaacctggtgattggag

SEQ ID NO: 22600 - DNA, 338 bp, Glycine max
  unsure at all n locations
  Clone ID: LIB3106-036-Q1-K1-B12
cccacgcgtncggaacataccaatctacattaaacgatgattctcattatctccctcagggtttcgggtctatctttctcccatgcttatgtcctatatttctgcgttgcagattatgcaggtcctattggacctgccagatatttctgcaagatgccttcaaaggtcacagcagatgattgtgcttacagtggccttggcattgctggttacacctcaaacattatcaaagctgcagtgacccctgcatttgatgctcagtttgctggtctcaacggtcttggcatttccgcaacacgtttggacttaacagcacgtggagttataccacttcacac

SEQ ID NO: 22601 - DNA, 369 bp, Glycine max
  Clone ID: LIB3106-036-Q1-K1-B2
cgcaatcatgtgcgcgagcgggatggctacaatgccgggtttcggggaccagtactagaacgagaagctgataacggaggtgcacggattcaacgtggaggtgttggcggtggactggagcatttcgccgcacgaggtgaagaagaaggtggcgagtggagagaggatagagagttccatgaagaggctgatggatgatggagagaaagggaagagaatgagaagcatggtcaaagagatgcacgagaacgcttggtaagctgttcaagaaggtggttcttcttacgacagtctcacagctatgattcatcatttcaagactctcgtgcctaatcatgtgaatgtgaatgggaatattgatcactgaat

SEQ ID NO: 22602 - DNA, 161 bp, Glycine max
  Clone ID: LIB3106-036-Q1-K1-B3
ccaaagcgtccgataaccaggactgctttattaatcacatgaacgctcagatcactgagtcgagcatacatactatctagcagctctgaaaccgaatccggatattgaggttcaaaaccgtgatctgcatcgacgagaacacgagagtatccttggactgt

SEQ ID NO: 22603 - DNA, 415 bp, Glycine max
  Clone ID: LIB3106-036-Q1-K1-B4
tcgccacgcgtccgatagccatggctacttcatcaaccacattattgcactcatcactcgatacctgcagcatcccatcattcaactctggatccattcagtttttttgcttcaaaaccgttctttgaatcgacccaagaagagagtttccttcgttgttcaagcagccaagccccctattggtgtggaaattccaaaggtgcagcctcaatttaagcctccagttcttgggttcactaagactgcagaagtatggaactctagagcttgcatgattggaatcattggagttggtatcgtagagattataataaacaagggcatacttcaagtgattggggttgacgttggcaaaagccttaatattgctctctgaacattatttttggctgtgctcgtgaatgttggcatatat

SEQ ID NO: 22604 - DNA, 123 bp, Glycine max
  Clone ID: LIB3106-036-Q1-K1-B5
tcccgcgtccgataactcgttcgatttgatgaatcaaataaaataacatctgactggtgaccgaagtcgtgcactttgatatggctggcactcataggtccttactttacgcagtttcttaat

SEQ ID NO: 22605 - DNA, 358 bp, Glycine max
  Clone ID: LIB3106-036-Q1-K1-B7
cggacgcgtgggcggacgcgtgtgcgaactgtaggttggcgtgaccctggttggatggacacaagtttcttaaaagaactgtggccaaattttacgtacacttacatgttggggcatatgctgtctaacggttcttatgtatggagtaagatgtattcattcaaggcatacccatatcctggacagaactctttgcaacgggttatcatatttggtgacatgggaaaggctgagcgtgatggttcaaatgaatatgctgattatcaaccggattctctaaacaccacaggaccaactcgttaatgatttagaaaaatatgacattgttttgcacatacgatacatgccttatgcaaat

SEQ ID NO: 22606 - DNA, 382 bp, Glycine max
  Clone ID: LIB3106-036-Q1-K1-B8
agccaatcttcctgccacagcgtcacactttcaaccccatcagatgcaccaagactgataataataacaatagtagtagtagcagcagcagcaacacaaccaatgatgatgcaaactcggttcaagttcaagcaccaaccacgacaccaactactcccgtagaaataagcttccggagaaggtcgagaaggcaagccaaacgactgcgagagaacgagaacagcggcatgcaaaaggcgagggtggagactccccccaagaagtgggaggacatgtctctgagtgagaaagcagtagagctgtatgtgggagagaagggtgctctcttctggctcaacaagtttgcatatgcttcaatcttcatcatgattgggggatggat

SEQ ID NO: 22607 - DNA, 141 bp, Glycine max
  Clone ID: LIB3106-036-Q1-K1-B9
cccactcgtacaaaaaacgtgaaaccaattcatccattagtcatctttcattaatcaggcactcgggctttccattatggagagacgatatcccttccattaattgtctttaaaaacatgcctatcttccgcaccagatag

SEQ ID NO: 22608 - DNA, 412 bp, Glycine max
  Clone ID: LIB3106-036-Q1-K1-C1
gcactttcacttttgctttgagatggctaagtcgaagaatcacacagcacacaatcagtcctacaaggcccacaaaaacggcatcaagaaacccaagaggcatcgccacacttccaccaaagggatggatcccaagtttctgaggaatcagaggtacgcgaggaagcacaacatgaagagtggtgaaacagccaccgaggaagagtgaaatggcactttctaacggaaccattacggtttttttatgctcatttttttggttaaactttgcttgaaatcaacgttcagcagtataattaatttgtttacagagaatgcagtacttttatagcaattttactggtttctactgaaaacccttcaattacttattatcatcaatggaatgctaatgcgttacgtgttttttagt

SEQ ID NO: 22609 - DNA, 367 bp, Glycine max
  Clone ID: LIB3106-036-Q1-K1-C10
tgacctgccccccaatcccattcatcctctgactcttcttctcttcaaaacaaacaaaggaatatccgtttttccaaaactccattaccattaccattcacaatgagttattacaaccagcagcaaccgccggtcggagttgcgccgccgcaaggttatccgccggaggggtacggaaaggagggatatccaccgccgggatacccgccagcgggatacccgccagcgggatacccaccgccgggatatccgccacaacaaggctatcctccgccgtcctacccggcgcatgggtatgctccgacctacgctcctcaatacgctcagactgcgccccgtcaacaaaattcaactggccctggttgtt

SEQ ID NO: 22610 - DNA, 340 bp, Glycine max
  Clone ID: LIB3106-036-Q1-K1-A6
accacacgtacgctaaatccttctactttctcaatccgaaaaacttgcaacagacttggattcaatcacgtacactttcatattcaaacaacccatctctcataacacaaagcatctccttaattctaaccgatattatctgtactttttcacggattgtaaaaccatatacacagcgaatgctacgacagatgctgacgatacgccacaatctgttcctcgagcactgaaactacagatcaagctgctgctagagagtccatcgagtccataaattgcaggatctcgagacgtcactccaattcgtaatgacagacttgtgtaggacgaatacgatgtc

SEQ ID NO: 22611 - DNA, 317 bp, Glycine max
  unsure at all n locations
  Clone ID: LIB3106-036-Q1-K1-C11
cggaannncccgggtcggacccacgcccgtccgccgcattggctagaataggaactttcgatggctcatttcattctacttttatccatatctcattctctggtgtgctcgtgtgcaggagtagagaccgatgctccatgcccatctctatcctgatggaatgattatttggtgaagacttgtttggccataacatctcaccatttcccaactgcatctgactagagccttctaatagcctcctccctgcagggtgttgataatcgatgaagctccctaagcaaatgtgatgatacacatgtacccaaaaacattct

SEQ ID NO: 22612 - DNA, 362 bp, Glycine max
  Clone ID: LIB3106-036-Q1-K1-C12
ctattgcaaagaatctgtctgacctcagttgtaaggtggtgaccacaattattggaggaggagattctgttgcagctgtggagaaagtaagagttgctagtgtcatgagccacatatctactggtggtggtgccagtttggagttattggaaggcaaagagcttccaggagtccttgctcttgatgaatccgtcccagtcgctgcgtaagacacttttcatcttggaaaattttcccatcctcacgtgtcagtgctgtcaatcttgtaaaagagcatatgttctaggacccttcgtagtctgttagagtaaattttatcttgcttgagttattattggcttcacacataaattgcgcgtaac

SEQ ID NO: 22613 - DNA, 420 bp, Glycine max
  Clone ID: LIB3106-036-Q1-K1-C2
ccgattgctagaatggaatttcgatgctcagtcatctcttttaccattctcttctctgttgctcttgcaggagagagccatgtccatgcatcgctacctgaggaagattattgggaagctgtttggccaaacactcccattcccactgcactgcgagagcttctaaagcctctccctgcaggtgttgaaatcgatgaactccctaagcaaattgatgatacacagtacccaaaaacattcttctataaagaagaccttcatccaggcaaaacaatgaaagtacaattcaccaagcgtccctatgcacaaccttatggtgtatatacatggttaacggatattaaagacacctctaaagaaggatatacgcttgaagagatatgcatcaagaaagaagcgtttgagggagaagagaagttt

SEQ ID NO: 22614 - DNA, 394 bp, Glycine max
  unsure at all n locations
  Clone ID: LIB3106-035-Q1-K1-H10
cccacgcgtncgcacaagccaagtgaaagtgagaaaaaataaaaatcaaagagcataatgcgagggatcatccacacgattggggagacccttcatgtgggagggcacaagaaggaggaggagcataatggtgagcaccatgctggagaatacaaaggggagcaccatggtgaacacagtagtgagtacaaaggagagcatcatggtgaacacaaagctggagagtaccatggtgagcacaagccagagcacatagaggggttcctagacaaagtcaaggacaagatccatggtgagggcggcgccgccgagggcgagaagaagaagaaggagaagaagaagaatgagcatggccatgagcatggccatgacagcagcagcagcaatgacagtg

SEQ ID NO: 22615 - DNA, 190 bp, Glycine max
  Clone ID: LIB3106-035-Q1-K1-H11
tgcacacgccgaggacactgaatttgtatgatattcttgatgcggataagcttgtgctcacgcagggtgctgtggattacttgaatcagacgtatgggggtgattatcaagggagtgatgatgaagatgaagaagaagaagaagagggatattaaaagggtgaagaagaaagtgtaatggatggtgaaaa

SEQ ID NO: 22616 - DNA, 291 bp, Glycine max
  Clone ID: LIB3106-035-Q1-K1-H12
cgaatgaacactggctatggcgcccgtactccggaagtgaaatgcgcaacgtggaggcttgctgtggaagcacacaacatcttttgctttgggaccattcctgaagagtgcgttgaagcaacaaaagaatacatgcatggcgaacaatatagatcagactccaaaacagttaaccaacaagcttacttttatgccagagacctcgaagtccatgccaaagacacatttgtgttcaatatagatggcaccgtactctctaatattccatactacaaaaaacatggatatggg

SEQ ID NO: 22617 - DNA, 285 bp, Glycine max
  Clone ID: LIB3106-035-Q1-K1-H2
agggaaacgcgcaagttggaagcttgctgaagaatcacacaacatctttggctttgagaccattactgaaaaagtgcgttgcagcgacaaaggaatacatccatggcgaacaatatagatcagactgcaaaacaggttaccaacacgcttacttttatgccagagacctcgaagtccatcccaaggacacatttgtgttcaatatagatggcaccggactctctaatattccatactacccaggacacatttgtgttcagtatagatggcaccggactctctaat

SEQ ID NO: 22618 - DNA, 293 bp, Glycine max
  Clone ID: LIB3106-035-Q1-K1-H3
gttcgcgatgagagccaagtggaagaagaagcgtgtgaggaggttgtagaggaagcgccgaaagatgagacagagatccaagtagtgcgttaaacctagtttgtttctgttgcttttacaattgcttatgttgtcgaatgggacacccagttgttagtggcactggtttctcctttttgatgtttgatacattttcgtggattcaagtagtttatgttcgtcttatgttattagctcaaaacaatgttgttactgcttttgctaatcaacatgatctcctatttgcatctctg

SEQ ID NO: 22619 - DNA, 452 bp, Glycine max
  unsure at all n locations
  Clone ID: LIB3106-035-Q1-K1-H4
gacgcccacgcgtncggtgaagatggggtcagaggtgtctaaacagatggagcgaagaaagacagtccagacggagaagaagagtctgtccgatctgaaaagcagcggagaagactaccctggctccgactaccgtccccaagacagaaaaaactggatgtcccatctcgaccctcagaaactccgcatcaaccaaatcgtctggcccggcacccacgactccgcaaccaacaaaattggcattcctctcctcactcgccccttcgcccagtgccaatccctctccatctaccgccagctcttcctcggcacccgcgtcctcgacatccgcgtncaagaacaccgccgcgtctgccacggtatcctcctcacctacggcgttgacctcgtcctcaacgacgtcaagaagttcctttccgacacgcagtccgaaatcataatcctggagatta

SEQ ID NO: 22620 - DNA, 369 bp, Glycine max
  unsure at all n locations
  Clone ID: LIB3106-035-Q1-K1-H5
accaccgtcgccaccgtncgccacctncgaaaatctctttcgttcagattaggttaccgggcagtgaggcatggcaaaaccaaagcgaatctctctgcgtatctttgcgctgctcctcttgatttccacctcttcgtttcagcttctccgcgcttccgatgacgccgatgatgatgcgatcttctatgattcgttcgacgaggattttgaagaccgttgggttgtgtctcagaaagatgagtacagtggtgtctggaaacatgccaagagtgagggacatgatgattatgggcttcttgtcagtgagaaagcaaggaaatatgctatagtaaaagaacttgatgaggccgtgagtctcaaggatgaaac

SEQ ID NO: 22621 - DNA, 315 bp, Glycine max
  unsure at all n locations
  Clone ID: LIB3106-035-Q1-K1-H6
tcgtagaagacagtttgaccacnatctaagagagataattattcaaaagtgcagattggaatcgaggaaggaggcatcccatgtgcctcaaatggaaaagccaagagaattcaacaacattctgctaaatttcttacaggagcattcttgagtaattttttaaaagcattgttatatacattaggagcataatctgtctacatgtgaacgagaagtgctacaacaagcgaatacgaaaaccaaaactcgcatgctattgttagagngacctctaatattttatatatttctgcaattatactattgctttaactt

SEQ ID NO: 22622 - DNA, 158 bp, Glycine max
  Clone ID: LIB3106-035-Q1-K1-H7
cccacgcgtccgatcaaatttaataagatttatttttttattggattaaatacgacaggggtgtaaattagttatgaggttggtttatccagagatatctgacacaatttgtgtgtatatttaccacatgatgatttaaagggatgatggcgttcatc

SEQ ID NO: 22623 - DNA, 423 bp, Glycine max
  Clone ID: LIB3106-035-Q1-K1-H8
acacaacaaaaaaagacaacacagagagaagcgtcttaataaacgctcttctctgaaaaacgtgatttcttctcttcttctcttctctttcgtttcgatcttcgatctctgaaaatgagagagtgcatttcaatccacatcggtcaggccggtattcaggtcggaaacgcctgctgggagctctactgcctcgaacacggcattcagcctgatgggcagatgccaagtgataagactgttggtggaggtgatgatgctttcaacaccttcttcagtgaaactggggctggaaagcacgtgcctcgtgcgatttttgtagatctcgagcctactgtgattgatgaagttaggactgggacataccgccaactatttcatcctgagcagctcattagcggaaaggaggatgctgcaaacaacttt

SEQ ID NO: 22624 - DNA, 432 bp, Glycine max
  Clone ID: LIB3106-035-Q1-K1-H9
cggacgcgtgggttctgctacccactctcttcttccaagtccaaccacgcttttctctacagtcatgggcaaggtcaagatcggaatcaacggatttggaagaattggccgtttggttgccagagtcgctctgcaaagagacgatgtggagctcgttgccgttaacgaccctttcattaccaccgattacatgacatacatgtttaaatacgacagtgttcacggacactggaagcatcacgatgtcaccgttaaggacgagaagacccttctcttcggtgacaagccagtcactgtttttggacacaggaaccctgaagagatcccatgggggtcaactggagctgatatcattgttgagtccaccggagttttcaccgataaggacaaggccgccgcacatttgaagggtggtgcgaagaagttattatt

SEQ ID NO: 22625 - DNA, 426 bp, Glycine max
  Clone ID: LIB3106-036-Q1-K1-A1
cccacgcgtccgagctgcttctcctatggcaagccaactcaagtccaccttcactaagactcttgtagctcccaagggcctctctgcctcttcaccactccacctcctgccttctaagaggcaatttagcttcactgttagggccatccaatcagaaaagccaacctatcaagtgattcaaccaatcaacggtgatcccttcattggaagccttgaaaccccagttacatccagccccttgattgcatggtacttatcgaacctccccgcatacaggaccgcagtgagcccactactaagagggatcgaggtgggcctggcccatggctaccttctggtgggcccattcgtgaaggccgggcctctgaggaacaccgagatcgccgggcaagcgggctctctcgccgctggtgggcttgtggtgat

SEQ ID NO: 22626 - DNA, 366 bp, Glycine max
  Clone ID: LIB3106-036-Q1-K1-A10
cccacgcgtccgtccacacgtgcgcccactcgttcgattaggaacttccgttcaaacagaggacccggttctggcattctgaaaggctttgtatggttgatcacttggatattcactactgtctgtttcgctctcttgaccgaccatcctggctccttcctcattatgctgtctgtcattcacttcgcagttcgcctcagcggggtgtttttcctccgggagatacttgacgacgcctccgccgacgccgacgccgatgaggtaaagtatttcggcgtattcaacgtcgttgctatggcaatggcgcttcttctgttggcgtatgggttcattcacagccccaggatgttggagtccagagtgttc

SEQ ID NO: 22627 - DNA, 433 bp, Glycine max
  unsure at all n locations
  Clone ID: LIB3106-036-Q1-K1-A11
atacagttcctcactatggcagaggaatctaagcctaaatgggaaggtaaatccgtgactgagctaccaggcacggatgcagaacaagtatggactgcgttagaggatttctgcaacctacacaagtggtggcccatagaaacatgttaccaactagagggtgtaccaggtcaacctggtctaatccgctactgtgcttccaccgttgaagaagctgttgttggtgctcagaagacaacaacaaccatcaagtggaccaaagagaagctactcgcgatcgatcccgtccaacgttgtttgtcctatgaaattgtggaaaacaacatgggatttaagtcctatgtggcaacactcaaagtgctgcccctgaatggagatgggtgcaagatagattggnggtttgtctgtgatcctgttgaaggtggagtttcca

SEQ ID NO: 22628 - DNA, 419 bp, Glycine max
  Clone ID: LIB3106-036-Q1-K1-A12
gaaagatgatgaggttaaggtggagtttagtcgtaacggtcacgttcgctgttttgctgttttggagtggatcgctgcaagttcaagcctctaattctgtttccgccttcgttcaaaacgccatctactccaacagaatcgccgttttctccaaatcctattgcccctactgtttgcgcgccaaacgcttgcttgctgagctcaatgagaaaccgtttgtggtggagctcgatttgcgagatgatgggtatcaaattcagagtgttcttctggatttgataggtagaaggacagtcccgcaagtatttgtgaatggcaaacatattggtggatcagatgatctcagtgctgccgtccaaagtggtgaaatgcagaaacttctcagtgcaagtgatggtgtactagagattacgagcact

SEQ ID NO: 22629 - DNA, 218 bp, Glycine max
  Clone ID: LIB3106-036-Q1-K1-A2
cccacgcgtccgcacacgcgtacgaccacgcgtgcgcatacgcgttcggcatacatggcatgattcaccatgacagctagcatccttggcagaccagccgtcaccaaccgctcggctgttgaacccataggagatcactcgtacagaatgctggcaaagctggcgaagcagactacgtcagatatgcctatgacatggatggtagcacatggatggag

SEQ ID NO: 22630 - DNA, 289 bp, Glycine max
  Clone ID: LIB3106-036-Q1-K1-A3
cccacgcgtccgcagactcggacgactcagagtgttcatacaatgtacgcatcattggagcgagttgccatcatatctagcagcatagggcagagaaccagtagaggaaaacgcgactcttggaccagataggagagatggcgaacatgtctcttggcctggctggcatatctgcctactttagtgataccttcattcatgtcactgacctgtctgagaggacaacgctttctctcatcactgatggtatgaatgttaatgatgacagatatgaatgatctacttatgc

SEQ ID NO: 22631 - DNA, 432 bp, Glycine max
  Clone ID: LIB3106-035-Q1-K1-G9
caagggtttggcggatttggaagctgcactttgcctatgcaccgcaattaagagcaatgtgcttggaatcaacttgaacgtacctgtgacgctcagcgtgatccttagtgcttgtcaaaagactgtccctcctggtttccaatgtccctcctgagataatcaaattaggttcatgagatatctctcgtcatcagagaaatgtttagatatgcacttaacatgaaattgattgactgcctatgtaagcatttctttggcaatttgcagagtgttatatatgtttttttttatgtattactgtagttgctgtttttttgttgggggtttatatcgttgttaatgctagtgcacgtacatgttctaaataatgttgtattgttttgcttcgttaaattatgaattgggcaagcttgtttgccttaatttgtcaaa

SEQ ID NO: 22632 - DNA, 320 bp, Glycine max
  Clone ID: LIB3106-036-Q1-K1-A5
gctacgcctgcgatatcctatacgagttcaacacatgtacaacttcactcgggctagggaaactctcaagggccattctgcctcttaaccactccaccttctgacttctaagaggcaacttaacttcactgctaaggccatgcaatcagaaaagccaacctatcaagtgattcaaccaaataacggtgataccttcattggaagcctctgaaccccagatacatacaggcccttgattgcatggcacttatcgaacctcaccgcatacatgaccgccctgaactcactactacaaagcatcgacgagggccttgcccatg

SEQ ID NO: 22633 - DNA, 424 bp, Glycine max
  Clone ID: LIB3106-035-Q1-K1-F4
caactagcaagggaagaaagaaactacagaaaagaaatggcttccacttctgcagtttcaatggctatgccagtaacttatgctagccagaagagggtggtgcctagctcggatgcattcttcaagccactgcctctacggtcttccaaggcagtgacagcatcaaaactcaatggaaggtttcaagtgagggcctccatgaaggagaaagttgtgacggggctcaccgcagctgcattgacagcttcaatgatggttcctgatgtggctgaggctgccgttacaccttctctcaagaacttcttgctcagcatcgcggcaagtggagttgttgttgttgccattattggtgctgtgatcggtgtttccaatttcgatcccgtcaagcgtagctgatggagttctgaggcactgcgttttattt

SEQ ID NO: 22634 - DNA, 413 bp, Glycine max
  unsure at all n locations
  Clone ID: LIB3106-035-Q1-K1-F5
cccacgcgtncgaccgaatctaaaagagccgatgccaaacttgctgtgaataagaagggcgcggccacgaagactaggaaacccgccggaaaggggaaggcagcgaaagatcctaacaagccaaagaggcctccaagtgctttcttcgttttcatggaggaattcaggaaggtgttcaacaaggaacatcccgacaacaaagcagtgtctgctgtgggcaaagctgctggagcaaaatggaagacgatgtctgatgctgaaaaagcaccttatgtggcaaagtctgagaaaaggaaagtggagtacgagaagaacatgagagcttataacaagaaacaggcggaaggtcctactggtggggatgaagaagaatctgagaagtctgtatctgaggtgaatgatgaggatgatga

SEQ ID NO: 22635 - DNA, 373 bp, Glycine max
  Clone ID: LIB3106-035-Q1-K1-F6
cccacgcgtccgaccacacgtacgaaagtcgttgagaacttagatggagaagcaaatggcggcctcagcgatcttttgcccagctgctaccactgtcaaccgtgccggggcccgcatgggtgctccattcactggcctgaagtccatggctggcttgcccaccacgaagaccaacaatgacattacctccattgctaccaaccgtggaagagtgcaatgcatgcaggtgtggccaccaggtggcaagaagaagatggagactctttcctacctgccagaccttgatgatgcacaattggcgaaggcaagaagataccttcttatgaagggatggattccttgcttggaatactagttggagcacggattcatg

SEQ ID NO: 22636 - DNA, 413 bp, Glycine max
  Clone ID: LIB3106-035-Q1-K1-F7
ccatacatagccacttcacactcactcactcttgttgccttcatggccaagccagtgtccagtgaggtatggaacccaagtggcaaatacagagttgtcagcaccaaaccaatgcctggaactcgttggatcaatcttctcattcaaaatgatgttcgccttgaaatatgtaccgagaagaaaacgattttgtcagttgaagacatcattgctttgattggtgataagtgcgatggagttattggacagttgactgaagactggggagaagagttgttctctgctttgagcaaagcgggaggcaaagctttcagtaacatggctgttggttataacaacgtggatgttgatgctgcaaacaagtatggtgttgctgttggaaatactcctggagtgctcactgagacaacagc

SEQ ID NO: 22637 - DNA, 429 bp, Glycine max
  Clone ID: LIB3106-035-Q1-K1-F8
ggagggggagcttgggattaaggtgctgagggtgcataatgctcatgacatggggccacaggcgccggggttgattttcaacgaggattcgccgcagtggttgctgaagctggtggaggggtggtttccgtggtgttacttgcacgttggagaggagttgcagttggaccataagaaatccccgtttctcaaccctgacggggatgcttcctgcgcccataacttggaggctcacttgcacttgctagatggataccatgggaagaatcgtggatttgagcgaacaagtgagagggaccttgctctggtgaacaaggactgtgacttcttgaaagatgagcattcggtgccaccacggtggaggcaagacttgaacaaaaacatggtcaggactgaagatggacgctgggtgctcgctgatcgtccact

SEQ ID NO: 22638 - DNA, 424 bp, Glycine max
  Clone ID: LIB3106-035-Q1-K1-F9
cttcggccgccctttttttttttttttgaatttccataatgctccttacatggagccaccggcgccgtgcttgatcttcaacgaatattcaccgtagtggttgctgaaactggtggaggggtggtttccgtggtgttacttgcacgttggagaggagttgcagttggaccataagaaatccccgtttctcaaccctgacggagatgcttcctgcgcccataacttggaggctcacttgcacttgctagatggataccatgggaagaatcgtggatttgagcgaacaagtgagaaggaccttgctctggtgaacaaagactgtgacttcttgaaagatgagcattccgtgccaccacggtggaggcaagacttgaacaaaaacatggtcaggactgaagatggacacttcgtgctcgctgatcgt

SEQ ID NO: 22639 - DNA, 430 bp, Glycine max
  Clone ID: LIB3106-035-Q1-K1-G1
gcaaaagagcgtcgtagtcgcaaccctaatcagaagaagcgcagcttcaagcgagtgacagccaccagcgatgggtcgtatgcacagccgcggtaagggtatatcctcttctgctttgccctacaaaaggacacctcctagctggctcaagatctcttcgcaagatgtcgaagaaaatatctgcaagtttgcgaagaaaggtttgaccccgtctcagattggtgtcattctcagagattctcacggtattgctcaggtcaatagcgtcactggcagcaaaatccttcgcatcctcaaagctcacggacttgcgcctgaaattccagaggacctgtaccatttgattaagaaggcagtttcaattaggaagcatcttgagaggaacaggaaggacaaggactccaagttcaggttgattcttgttgagagc

SEQ ID NO: 22640 - DNA, 193 bp, Glycine max
  Clone ID: LIB3106-035-Q1-K1-G11
cccacgcgtccgcccacgcgttcgtgatacacaaacaggatggttcgagtttgcaactggggcgcataattctaaatatacgaaccatgatgcaaattcaattacacatctttgcaagggattgaaatagggggacccaaagggggaaagggaatgagaggaagaatacaatatgactagttctagatcgcga

SEQ ID NO: 22641 - DNA, 372 bp, Glycine max
  Clone ID: LIB3106-035-Q1-K1-G12
cggacgcgtgggcggacgcgtgggcggacgcgtgggtttttattaacagcttttcaaatggcaccctaaccttaacctatgttttcaattggaacactgttgtctgttccaaattagacatcttttgttattattctttttatttctgaaaaaaaattcaatctttgtggattgatttatgtataattaaattattattacatacaatttgtgttgactcgtgagttcgtgttgttgcagaagcttctactaagggagatggtggagtagtggaatttggtggtgatcaaacagagcttatatttttggggactggaaccagtgaaggggttccacgtgtcagctgcttgactaatcctttacacaaatgtg

SEQ ID NO: 22642 - DNA, 405 bp, Glycine max
  Clone ID: LIB3106-035-Q1-K1-G2
cttttggacttttacttattggttcttaacggataaaacttaatggccgctcgtgaaggggctgtatcatatcattcttaaagatgttcaataaagaagttctcttttatcattttttcccccgcttctaatcttgcttggtatgaatgttaaccgaccattattttgagtgacaaggatgttacgccactttttgtcattccgcatgaaaaagaaagggaaaatgtggaggaaatattttcagaagatgcctttgttgtcttcatcaccacccctggacagctggctgctcttattaatgactcagctggagtgatagctacaaatacagctgctgttcagcttgcaaatgcacgccaaaaaccttgtattgcactattttgctctgaagagaaaggaaacaag

SEQ ID NO: 22643 - DNA, 436 bp, Glycine max
  Clone ID: LIB3106-035-Q1-K1-G3
gtccgccctttctccaggattggctatgttccacttggaaatgcaaatttcaactctttattccgaaaatgtgcaatttctcatgtgggtatttcttctttgcccttcttgcacccgggactgaaatcttgtacagtcttcaacagaggaacactcattcgccagtgtttaaatggaaagcggaatttttctctatcagaaaagcgatttaattgcaagttttcaaagaaagacagattctttatccctagaagtagtagttcttctaactctagtggaagtacggatgaaccctctaatgagacagagaagacaccatttggatatacaaggaaagatgtcctattaattggacttggagttactttacttggcattggcttaaaaagtggactggagtttgttggagttgactcactgcaagcaggaaatgtag

SEQ ID NO: 22644 - DNA, 444 bp, Glycine max
  unsure at all n locations
  Clone ID: LIB3106-035-Q1-K1-G4
gcgcccacgcgtncgnccacgcgtncgnccacgcgtncgggcccccctctctctcaccctcctgttcacacggtttctgtgcgctctaacaaacattctcgttcacactttcagattgtgtgaagatgggggcgggtggccgaactgatgttcctcctgccaacaggaagtcagaggttgaccctttgaagcgggtgccatttgaaaaacctccatttagtctcagccaaatcaagaaggtcattccacctcactgtttccagcgttctgttttccgctcattctcctatgttgtttacgacctcaccatagccttctgcctctattatgttgccacccattacttccacctccttcccagccctctctctttcttggcatggccaatctactgggctgtccaaggttgcatccttactggagtttgcgtcattgcccatgagt

SEQ ID NO: 22645 - DNA, 396 bp, Glycine max
  Clone ID: LIB3106-035-Q1-K1-G5
cggacgcgtgggaccacacatgggaaaaattaattctcaaggatccacaagatccttccacgccaaatggagtttcatacaaaacagcagcgagagagaaactgataaggcagggatacaacattgttgggatcattggagaccaatggagcgatctcctcggaggccacagaggcgaaagcaggacctttaagcttcctaatcccctgtactacattcagtagttccttcacctctcaacaatctagcttgctcctatctatctatatgtaataagatgcgttcaaataggggcactagcttcactttatgttgtttcagctgtgtgtcaacaagtcatgtaagagacttcactatgttgttttctctttcgtggctttaataaattatgcgccc

SEQ ID NO: 22646 - DNA, 428 bp, Glycine max
  Clone ID: LIB3106-035-Q1-K1-G6
gcggcttaggttatttgactatattcaaggtaagaataactacaagcagaagattgagatgacggcacctgtgatcagtgaagtattacccagtgatggacccttctgtgagtcctcatttgttgtgagcttctatgtgccaaaagagaaccaagcaaacccgcctcctgcgaagggccttcaagttcaaagatggaagaccgtgtttgtggcagttagacagttcggtggatttgtcaaagattctagtgttggggaggaagctgctgccttgaaggctagcattgctggaaccaactgggctgatgcatttgagaaaagccagaagagagctggccatgcttctgtttacacagttgcgcagtacaatgccccttttgaatatgacaatagggtcaatgagatatggttcttgtttgatattgaaa

SEQ ID NO: 22647 - DNA, 322 bp, Glycine max
  Clone ID: LIB3106-035-Q1-K1-G7
atattggaggctaatatggtaaaggtttcctgaatttatgcctgggtttggcccttggaatctctgctttaagtcccaccttaattatcaaggacttggctttccaaaagtcctatggtaactttggtttggcacaaacacacatgtttatcagcatagtttagatttattcacactatttcctgcaacttcttctatgctgctagtaaattagttaactttaggagagctgtcctagacatcaaagaagagtcctttatcaattttgaaaaattcatataaaatgatatctccctttctaatttcataagcatgttacatg

SEQ ID NO: 22648 - DNA, 425 bp, Glycine max
  unsure at all n locations
  Clone ID: LIB3106-035-Q1-K1-G8
cccacgcgtccggtcagttgcaggaaaaatggtttcgctgaaactgcagaagcggctcgcggccagcgtcctcaagtgtggcacangaaaggtttggcttgaccccaatgaagtcaacgaaatctccatggctaattctcgccaaaacataaggaagctggttaaggatgggtttattatcaggaagcccaccaagattcactctcgctcacgtgcccgccgaatgaaggaagccaagaggaaaggacgtcactctggatatggtaagcgtaagggtacaagggaggcaaggcttcccactaaaatcctttggatgaggagaatgcgtgtgcttagacgcttgcttcgcaaatacagggaatctaagaagattgacaagcacatgtatcatgacatgtacatgaaggtcaagggtaacgttttca

SEQ ID NO: 22649 - DNA, 403 bp, Glycine max
  unsure at all n locations
  Clone ID: LIB3106-035-Q1-K1-F2
ccacgcgtntcgccacgcgtncgggctcttgaacctctcacgtttagaagctcagctgagcacaatagagagtttaattaggccattaacatatcatatgggtgtgactaagcctcatgtgcttatgctgttgatcatcatggttgtctcaattgcagagaaaaccatcagtaatagaaggaagggctctttccttgatatctggtcaagggtactcaaagatttttgcaacgcttggacttgtatgcaagtgttgtgatggggttggaggtgcctgcactagtacatggacagaatcttgcaataacttgcagtgtttaccttggaaatcacactagttaattattttctgtatctttccttgtattccattagctgtatattgagttttgaaatattatac

SEQ ID NO: 22650 - DNA, 443 bp, Glycine max
  Clone ID: LIB3106-035-Q1-K1-D9
aacctctggatctctctctctctgcgatggagtttcgcgtttccgtcatttggagccttctcctcattgtctctttcttctctcctcaaatcaagggtgaggcttctggttccgtcttcttcgtcgatagctccagtaatcaattcattcgcgccagatcatccaactatgagcaaccttcactgttgctagaagaagctggtgctgttgtgtcagtcttgcttggttttgctcctccttccacccttccagctgccagctcatccaagttgaatgatgttctgattcctaacccattcaagaggcctcgtgctgtgtttttgctggaagtgaatggaatcaatggtcttggaaatattgtccaggataatccaatgttcagcaattcattttggagtacaaattcagataaagttgacattcaacttccagatgaaaatgat

SEQ ID NO: 22651 - DNA, 424 bp, Glycine max
  unsure at all n locations
  Clone ID: LIB3106-035-Q1-K1-E1
gccacgcgtncggccacgcgttcgggatgagtttcaaggtagaaagtggcgatgcgagggagcttcagagaaccgtcctgcacacggggagttggtacaagatgggttccaggcagtccaacatcatgggatcctccactcatgtcatccgcgacggcgccgtctccgtcctcttctgcgtcctcatcgtcgcattgggtcccatccaattcggcttcacgtgtgggtattcttctccaacccaaggggctatagttcgtgatctaaacctctctatttcggagttttctttctttggatcattgtctaacgtgggagcgatggtaggagctatagctagtggtcagatagctgaatacatcgggcgcaaagggtcattgatgattgctgcgattcccaatataatagggtggcttgctatttc

SEQ ID NO: 22652 - DNA, 429 bp, Glycine max
  unsure at all n locations
  Clone ID: LIB3106-035-Q1-K1-E10
attgtccaccccattatttgtcttctcattctcatcactaacacacaagtgtgtgttgtggatttctcagcttgcaacatggcttccatcatcatgtcatttgctccagcaactggtagagtctttgcagccacagcggcaaagggtgctggtggaagcaaagaagagaagggtcttcttgattggatccttggagggttgcagaaggaagaccagctgctagagactgatccaatcctcaagaaggtggaggagaagaatggaggcaccaccagcaacactggccgcaacaagaactctgtggcagtgccacaaaagaagaaaggtggctttggaggcctctttgcgaagaactgaaggagcagngatttattaccttatatttgttttacctgttttttttttctcaaatgcatgcgttgttgtctt

SEQ ID NO: 22653 - DNA, 406 bp, Glycine max
  Clone ID: LIB3106-035-Q1-K1-E11
ggaagacaaaacacaagacagagtcattcagcaaggcttgaaacgagaagcgaggatgccgatcagatgtattctgcattggcaaccgaaccaaggaagcgttgtgaacagccaagtcctgaatgagatctcgcagtgcgtcgaaagccttaacggcgtcaaagaaggaagatgcaaagccttcctcactttctacagacccaatttacgagaccaatcggtgaccatcgattttcctcgcgattttctggggatatcgatgctggagcagccgaacaaatactacttaatcattcgcggccagaagattgttctcgaggccgattcttctatcttgcttatcatggagaaactccagtcctacaagtccaaagtcgcccttcatttcgagggagtgctgtataaa

SEQ ID NO: 22654 - DNA, 382 bp, Glycine max
  Clone ID: LIB3106-035-Q1-K1-E12
gacaaaatccgagttactcacaaccgagctcaaggtaatatcactaaccttcactactttggtggttcatatttaagaccttttcttcaatttgaatttcaaccgaaagctatctaaccaataagcttggtcgctttaaccccatcaacatgttgaatacccttctgtgcaaatgcatcactttcgcagcaacatcacgttaccctattttacaccactacccattaccattttctctgcgtttctacaccacaaccacttcaaattcacgctcctttgcggtatcctacctcatccacaattttgggttctcccctgaatctgctttcaaagtttctgaaaaccacaaaatttatttccgtaccccggaaaagcctgagtc

SEQ ID NO: 22655 - DNA, 392 bp, Glycine max
  unsure at all n locations
  Clone ID: LIB3106-035-Q1-K1-E2
cccacgcgtncgcagtttcggatctctcccttctctcaccaatttccaggatttgaaaaatggcagattgcaaaccaggattgaggaagccagtgttcaccaaggtcgatcagcttcgtccaaggaccagcgggcacactttaactgtgaaagtggtcgatgctaagatggtgatgcagaaaggtcgttctgatggtcctcaatcccgccaaatgcgaattgctgaatgtttggttggtgatgagactggaatgatcatattcactgccagaaatgatcaagtggatatgatgaaagagggtgctactgtgaccctgcgcaatgccaaaattgacatgttcaaaagatcaatgaggcttgctgcggacaagtggggccgtgtggaagtcaca

SEQ ID NO: 22656 - DNA, 361 bp, Glycine max
  unsure at all n locations
  Clone ID: LIB3106-035-Q1-K1-E3
gaggctgaaaagggagcgccgaaagattgagacagagatccaagtagtgcgttaaacctagtgtgtttgcgttgcttttacaagtgcttatgttgtcaaataagacacccagttgttagtggcactggtctctcctttttgatgttttgatacattttgttggattttatttcgtcttatgttcttagctgaaaacaatgctgttactgcgtttgcgaatcaacaggatatcttgtttgcataanactgaaatgatcatattcactgccagaaatgatcaagtggatattaatgaaagagggtgctactgtgaccctgcgcaatgtcgaaactgtcatgttcaaacgatctttcaggcttg

SEQ ID NO: 22657 - DNA, 414 bp, Glycine max
  unsure at all n locations
  Clone ID: LIB3106-035-Q1-K1-E5
gntctagatcgctgcaaaggcaatgttgttcatcaacttactgncgaagtgctgaatcggtcaaatgagaataccgtgaagctgctgagcaacataaacaacagggtgtaagctctttggtgggagatgttgagtctagtcaaggtgctttccagtattttggactgaaagaagaacaagtacctctaattatcattcaacacaatgacgggaaaaagttttttaaacccaatttggaagctgatcacattccaacttggttgaaggcgtacaaggatggtaatgttgcaccatttgtgaagtctgaacccattcctgaagctaacgatgaacctgttaaagtggtagttgggaacagtcttgaggacattgttttcaaatctgggaagaatgttctgctggagttttatgctc

SEQ ID NO: 22658 - DNA, 446 bp, Glycine max
  Clone ID: LIB3106-035-Q1-K1-E6
gcgcccacgcatccgatggaacctactctactgattttattgatgagtgggtcaaaattggcttgcctgcagaggcaaacgtgaagacacagcatggggataccccttttgctgaggtgtgctcacactgtgagaaggaatctgtgaatgttttccttggaaacctgctaacttacccatttgttagagatggcttggagaacaaaacattgtcactgaaaggaggatactatgactttgttaaaggatcttttgagctctggggccttcactttggccttgcatcctctttctccgtatgaacatcaaccattatcaatgacctcatcttggttacctaagtattctcctatctaaaacgaactctgtgactaattgctcttgttataaagcatgcatgtgctgaatttcctaataataaaagtggatatggagatttctccaca

SEQ ID NO: 22659 - DNA, 374 bp, Glycine max
  Clone ID: LIB3106-035-Q1-K1-E7
tcaactcaagacctgagttattaacggtgttacatatgtggctatacaaatgggatctgagagtggatcggcaaagattgggtttgatattgtcctttgcggacatcttaggaaacgtcttaaggcctgtattgaatcctgtggagagcaagaatggaacttaaatatgtaacttcataattccattgacgattgcttactagaaagcgtccttggagttatcgatgcccaaacacttgctgactcgctggctatctacctagaaaatattctacccagtgttgttggtagagcaaccattggatctatgatcatacttgctcgcacacttactttagcattaactctcttacattcacagttaggatttcctg

SEQ ID NO: 22660 - DNA, 368 bp, Glycine max
  Clone ID: LIB3106-035-Q1-K1-E8
atggcttctttatttctttatgttcaaaaaaacaagattttttagatacagaagacaaaggagaaattctggggggttttattccccaattattatactaaatactatacttggagagtaatgagtataatctttggctcagacgatgacactggtatattatatggcggagggtctaaaaacaagcaatttattttgggccgttatgactttggtaggttcattggagctattgttcgttggagattccaggtatgttggcatggatatgatctttatttctgataaaattagagatttttcttttattccgaacattatttattttccatttattccacaaggggccacgatagctttttatggaa

SEQ ID NO: 22661 - DNA, 433 bp, Glycine max
  Clone ID: LIB3106-035-Q1-K1-E9
cccacgcgtccggtcgattttaaattgaaaagtgacactaacctctttgaaattgcaaagggcaagacttctgtttcggctattgaggttagtccacatggtaagcaattttccattacatcacctgatcggagaatacgtgtgttttggttcagtacaggtaaactaaggcgagtttatgatgaatccctggaggttgctcaagatctccaaagaagtgatgctccattataccggttggaagccattgattttggtcgaagaatggctgtcgagaaggaaatagagaagacagaaagtgcactacttccaaatgcagtttttgacgaaagttccaattttcttatatatgcaaccttgcttgggattaaaattgttaatctgcacaccaataaagttgctcgaatacttggaaaggtggagaataatgata

SEQ ID NO: 22662 - DNA, 343 bp, Glycine max
  Clone ID: LIB3106-035-Q1-K1-F1
tcttcttgaaacgtctcccctcctcatgatgctatgaagtacttggacttgatcagcaagtgtagggacaaagaaaaaaaggaatctatgctccagaagatagttaagtgagagatctagttaatgggttcaatcatagtgcgcacatggatgaactgtcaggcttgctttgtcaatagatgtaaaattgttttttttttttttttttttgtgccagttcttctaaagcatatgtgtagggtttcttcatagttctgcttttgtgatctgggacattcttgttgaacatgtgtctgcctggtcttttgattaaggaagcaaaaagcatggataggatttggaa

SEQ ID NO: 22663 - DNA, 425 bp, Glycine max
  unsure at all n locations
  Clone ID: LIB3106-035-Q1-K1-F10
ctttggaaactcacacaccaccaccaccgttttcatcaatttcttatctttggtcattccgttctcttcttcctcaacacacacaaaatatctcttccaatttcaatttctcgtcgtccctcatcatggctcgtctcgcgatcgctgtcgccgccgtgctcctcgtggccctctccgcctccaccgcgacggcgcgtccctgcaggaccttcataatctcctcctactcgttccgcaaccctaactccaacaccttcgccaccatcaccgagatccgatccttcacccctctctacatcaccgacaaacccaccggcaaaccctcctcctcctacgacctcttcttcccccacgcgactcacctncctgagcccgagcgcgtgaacccacgcgctcccctagggttcgcctncgcgtacgatttc

SEQ ID NO: 22664 - DNA, 422 bp, Glycine max
  Clone ID: LIB3106-035-Q1-K1-F11
gtggaaaggaggttactattaaggaattggtcgagttgatgaaggaagtggtgggatttgagggtgatcttgtttgggattctacgaaaccagatgggactccaaggaagctgatggatagctccaaacttgcaagtctgggttggacaccaaaagtctcactcaaggatgggcttgctgatacctacaaatggtacttggagaacgtcaatctatgattcggttaaacagaatatgtggtgtcaaattctataagtacttgttatttcacaacgaagaattttttgttaaaaaaaaaattatccagagaacagtacttgaccaatttttctgtaccaattatgtgcaatgaaaatttcagtttttttttccgtgttttctagagatcatgagattaagaacccgtgttaaaaactatgaac

SEQ ID NO: 22665 - DNA, 406 bp, Glycine max
  Clone ID: LIB3106-035-Q1-K1-D8
cccacgcgtccgcccacgcgtccgatgcccatgccatgtgttatttcgtctgcggtgcgccgaacttcactcttctttctcacccacccccatttcatttcttcgtaagagaaaaaaaaaaaaaagaaaggagatggaaggcatcaccgccagcgtgtgcaggggcgtgaaggagtattggaggaggaaggggtacaagaggctaaacgggtcgggccggaggagaaggaaccgggtggagcttgggagcacccgaaccgggaagggtcggttctggaggtggaggatcagactcgcacccaagatccgaatcaggaaaatcccatcgccgaagaagatggtgctgtgggttcgggacgcgtacgtgaggatgatgctgggcctggccaactcgcggatcatgact

SEQ ID NO: 22666 - DNA, 424 bp, Glycine max
  Clone ID: LIB3106-035-Q1-K1-C2
attccaattccgctctcgattttcgatttcgaagtttgatagcaacgttggaaggaaaggtgagagcggaatcgttggaagaatctggtttttgtgtctgcggtgttcgtttcgcgatcaaaacgatgtcttcgccggacattgtctcgatattggagaactcggacgagttccatcgggtgaggaaagaacaagaggatattctgtctgagatcaacaaacttcacaagaagcttcaagctactcctgaagtagttgagaagcctggggataactcattggctaggctgaaatttttgtacactcaagcaaaagatctttcaaaaagtgaaacaagtatttccaacttactgataaaccaaattgatgccctactgcctacgggtccacaagggcaaacacgaagaagaatagaggtaatgag

SEQ ID NO: 22667 - DNA, 138 bp, Glycine max
  Clone ID: LIB3106-035-Q1-K1-C3
cgcccgtgtacggtgtacaccattggcattggatctggtgaaagattgatgagcgctcatctgatctaagcagctggtgatgctaggaagaaactgctgccaagatccggatgaaacgatgtgtgcacctggtttctt

SEQ ID NO: 22668 - DNA, 430 bp, Glycine max
  unsure at all n locations
  Clone ID: LIB3106-035-Q1-K1-C4
cccacgcgtncgagaagaacaagtagttgagaactaagaatgagaagcaaatggcttcctgagtgatcggttccccagctgttaccactgtcaaccgtgccggtgccggcatggttgctccattcactggcctcaagtccatggctggcttccccaccagaaagaccaacaatgacattacctccattgctagcaacggtggaagagtgcaatgcatgcaggtgtggccaccagttggcaagaagaagtttgagactctttcctacctgccagaccttgatgatgcacaattggcaaaggaagtagaataccttcttaggaagggatggattccttgcttggaattcgagttggagcacggtttcgtgtaccgtgagcacaacaggtcaccaggatactacgatggacgctactggaccatgtggaagct

SEQ ID NO: 22669 - DNA, 410 bp, Glycine max
  unsure at all n locations
  Clone ID: LIB3106-035-Q1-K1-C5
gctctntagattttatttggtggtcttcttctttatgagccctaacttggggacccatcggcgtcgtcgtctttagccatgtcgctgaggaaggtctttcgctcccgcaagttcttcagatcgttcaaggaagtgctgccggcggagggcgccgcaattgtcggcggcgaagacggggtcgccggcgccggtgaggagtcgtcgaatgggaataatggttggtccaacatgctttcagagatcctcggcgagatcgtgcggcgcgtggatgccgccgaggaacagtggccgaaccgccagaacgtcgtcgcatgcgcgtgcgtctgcaagcgttggcgtgacatcacgcgcgaggtcgtgcgcgtgcccttccacaccgggaaaataaccttccctgcgtgccttaagca

SEQ ID NO: 22670 - DNA, 428 bp, Glycine max
  Clone ID: LIB3106-035-Q1-K1-C7
aaaacagcatcgaacccgtcgtagcagaaatacttgtcaccatggtttcttccgacaaggagccacgagaggatgtccttcaagcctggtacatggatgatagtgatgaagatcaaagactcccccaccacaaagaacccaaggagtttgtctcgttggaccaacttgctgaacttggagtccttagctggaaactagatgctgataaccatgaaaatgatccagagctgaagaagattcgtgaagagcgtggttacacctacatggatgtttgtgaggtctgcccagaaaagttgccaaattatgaacagaaaatcaaaagcttctttgaagagcatcttcacactgatgaggagatccgcttttgtgctgctggaagtggctattttgatgttagggatcgcaatgaagcttggattcgtgtgtgg

SEQ ID NO: 22671 - DNA, 368 bp, Glycine max
  Clone ID: LIB3106-035-Q1-K1-C8
cttgtggaccgtgagcaggtaagccaggaatcagcagattatattaattccactcttctgggatcaattgaaaaacattttaaagcagattgatgtgtccgtatacatgatcattccataccactacgtacatgtgtatggtcatgcagactaaaatttacataatcaagatttttagttttagaaaaaatggtaataacacttgattatgtatcatgtgaagaatagttatgtatcataatgatcatgaataatataacagtttgtcgtcagtacgagttattgtatagtaattaataagctaggtttaaagttgtttcctttggtgcatggatttatcattaatgagatcaatgtgaagtttgttt

SEQ ID NO: 22672 - DNA, 385 bp, Glycine max
  Clone ID: LIB3106-035-Q1-K1-C9
attgttgctgctctcttcctgaaacagtttgttgatgaaaaggttcaatggatgcacattgacatggctggtcctgtgtggaatgacaagaagcgctcaccaacaggatttggcattgctactttagtggaatgggttttgaaaaatgcttcaaatgccaactgaaatttcaaatcttgttacatcgtatgtgaaacacaagatgagataagctcatcttgtgatgtttgtgctttaatggggtttgggtatatgaaataagttatttaaagggatggaaaatgtggtaaaatgaagcattttttagtgtattcaaacttttttctagatacaaaaaacaacctttttggtttttcacatttaccaataattcaatttgcctttc

SEQ ID NO: 22673 - DNA, 355 bp, Glycine max
  Clone ID: LIB3106-035-Q1-K1-D1
tgtactacgcgtgaagaatcatctatccatcggatatcaatgctttgctttggtttaatttggttccaagttctttgcctatatatatataagtccaacactgtcggtgtgcatgtgcgttaccgctgaatcctcgctttatcttcccttcccttcatctccgcttcaaaataatatcctcctctctatctctgttcgaaacaagtccaacaccagcaacacactgcttcaatctcaatcgggcacattgagaaatggttttgagtaatgggaaaactgaggcaccattgccaagtagtaatgggggaggtgctgagattgataacaatgagaagaagcccttcaagatcttcgt

SEQ ID NO: 22674 - DNA, 427 bp, Glycine max
  Clone ID: LIB3106-035-Q1-K1-D10
ctgagaacttgggcaagcttacgtctctaaataagttgattctgagtggaaaccttatctgcggtgtgatcccggggacgctggggctgtgtaaggctttgcagttgctggatataagtaacaataggatcactggttctattcctgatgagatcggttatttgcaagaattagatatcctcttgaacttgagttggaattctcttactggccccattccagagaccttctcaaatctctcaaaactatccatcttggatctctctcacaacaagctcacaggtacactcacagttctggttagtcttgacaatctagtgtctctaaatgtctcctacaatagcttttctggttctcttcctgatacaaagttcttccgggatctacccactgctgcgtttgctggtaaccctgacctttgcattag

SEQ ID NO: 22675 - DNA, 118 bp, Glycine max
  Clone ID: LIB3106-035-Q1-K1-D11
gagagggggttggggaatttgattaaacaaattgaatttcttcaattaactggtgaaaaaggaaaagaatgaaatggagttttttgaaacatcggaaaaagtagtcgtttatatgaat

SEQ ID NO: 22676 - DNA, 434 bp, Glycine max
  Clone ID: LIB3106-035-Q1-K1-D12
gttgatcgagataactagaaacagtgtgatgaaaatgaaggtccttgttttcttcgttgggacaattttggtagcatggcaatgccatgcgtacgatatgttccctctccgaatgaacactggctatggtgcccgtactccggaggtgaaatgcgcaagttggaggcttgctgtggaagcacacaacatctttggctttgagaccattcctgaagagtgcgttgaagcaacaaaggaatacatccatggcgaacaatatagatcagactccaaaacagttaaccaacaagcttacttttatgccagagacctcgaagtccatcccaaggacacatttgtgttcagtatagatggcaccgtactctctaatattccatactacaaaaaacatggatatggcgtggagaaatttaactcgaccttgtatgatgaat

SEQ ID NO: 22677 - DNA, 425 bp, Glycine max
  Clone ID: LIB3106-035-Q1-K1-D2
aacaggaggggttactaaatacctggagccatctggtgctgggtttcttttgcaaaaagaacttgattgccttgttggggcggtatcaagccccaaaaggccatttgctgccattgttggtggttccaaagtctcatctaaaattggagtgattgagtcacttttggaaaaagttgacattcttcttcttggtggaagaatgatcttcacattttacaaggcacaaggtctttcagtgggttcatcccttgtagaagaagataagttggatcttgctacatcactacttgcaaaagccaaggaaaaaggggtgtctctcttgttaccaagtgatgtggtgattgcagacaaatttgcccccgatgcaaacagcaaggtcgggccagcatctgccatccctgatggctggatgggattggatattg

SEQ ID NO: 22678 - DNA, 369 bp, Glycine max
  Clone ID: LIB3106-035-Q1-K1-D3
attttatactatacccacattttgataattatttttctagttgataagccatggctactcgaggaaagcgtgaggttgacgttgatctcaagtctaacgcagacaagtactggcaacccttaggaactccactgaaatattccccaaggccttccccaatgattacaaaagcattgaggttcttgagggtgatggcaaatcacctggttctatccgccacataagttatggtgaaagttcaccacttgtgaagtcatcctttgagaagattgaggctgttgatgaaaaaaagaaggtagtgtcgtacactatcattgatggagaactcctccagcactacaaaacattcaagggagacatttctgtgac

SEQ ID NO: 22679 - DNA, 163 bp, Glycine max
  Clone ID: LIB3106-035-Q1-K1-D4
attacacccaacgagctacctgaagctgatggcttattgcttggtttccccacaagatttggactgatggctgatcacattaaagctttcatggatgcaactggaggcctgtggcgcacacacgcactagctggaaagcctgcacgaatcttttacagcactg

SEQ ID NO: 22680 - DNA, 442 bp, Glycine max
  Clone ID: LIB3106-035-Q1-K1-D5
cccacgcgtccgcccacgcgtccgtccagattcaggtggagaatgtggagtccctgcagagaccatgtattattttcctgctgagaatagagccaaattctggtataaagcagattatggcctgtttcgtttctgcatagcagatagtgaacatgactggagagaaggatcagaacaatacaaattcattgagcattgtcttgcaacagtagatagaaagcatcaaccatggctaatcttttcagctcatcgtccccttggctactcctctaatctttggtatggcatggagggttcatttgaagagcccatgggaagggaaagtttgcagaagctttggcaaaagtacaaagtagacattggattttatggtcatgtccataactatgaaagagtatgccccatttatcagaatcaatgtgtgaatgaagaaaagcatcac

SEQ ID NO: 22681 - DNA, 443 bp, Glycine max
  unsure at all n locations
  Clone ID: LIB3106-035-Q1-K1-D6
cccacgcgtncggggagctcttgttcccaccgagtccgaatcgctctcaacctcaaagggggtaaatacgaatacaagcccgtcaatctgctcaagggagaacaatctcgccctgagtttctccagctcaatcctgttggttgtgtccccgttctagtggatgaccacgttgttctctatgactctttcgccattattatgtatttggaagataagtatcctcacaatcctttgctccctcatgatatttacaagagagcaatcaatttccaggctgctagtgttgtttcctcaacaatacaacctcttcataacttgagtttactgaactacattggggagaaagttggccctgatgaaaaacttccttgggcccaaagtataattagaagaggctntaaagcactggaaaagctattgaaagaccacacaggaagatatgc

SEQ ID NO: 22682 - DNA, 431 bp, Glycine max
  Clone ID: LIB3106-035-Q1-K1-D7
gcagactccatggcattgtggagtgtggtgatcgacataagcacatttatcaaagaacagtgctacttgtggagcaagttaaagtgagtaaaggaagcccacttgtcacttgtctccttgaaggttcccgtggaagtggtaaaactgcactttcagctactgttggtattgacagtgacttcccatatgtcaagatagtttcagctgaatcaatgattggtctacatgagagcaccaaatgtgcacagattattaaggtttttgaggatgcatacaaatcaccattgagtgtcatcattcttgatgacattgagagattattggagtatgtgcccattggttctcgattttcaaactttatttctcagacactactggttctgcttaaacggcttcctccaaaggggaaaaaactcatggttattggcaca

SEQ ID NO: 22683 - DNA, 435 bp, Glycine max
  Clone ID: LIB3106-035-Q1-K1-C12
cccacgcgtccggttccttaccctacctttgacgtatcgaaaccttaaatttgggattaggtctgagcaatctgggtagaacctttggtcttagagagtcaagttttatgtctggattagacgatcaaattcctactgccttcgatccttttgctgatgcaaatgctgatgactcgggtgctgggtcaaaggagtatgtgcatattcgcgttcagcagcgaaatggtaggaaaagcctgacaaccgttcagggattgaaaaaagaattcagctataacaagatacttaaagacgttaagaaagagttctgttgcaatggaacagttgttcaggacccataactaggacaggttattcaacttcaaggtgatcagaggaagaatgtttctactttcctagtacaggctggtatcgtgaagaaggatcatatcaaga

SEQ ID NO: 22684 - DNA, 430 bp, Glycine max
  Clone ID: LIB3106-035-Q1-K1-A9
aataagtgcagtgcttctatcggtatactttatagcaaattttgtcgtgccagggttctttggcaactctttcggatatgataagtcatcaaacgaagagcagaaggttgacgatgtaaatgcaatagaagatgaatagatagtcaaggaaggtcacgaaggaagaaacaggactacgtaaacgtgagaactgagctcatgatggttgaagcgctactgcatgggtcttttgtatctttagttcgcatttagattataataaaaacatccaagtgtcatttctgatgctcattactattacgtattctagacttggtagcgattacaatctcatgaaaccaaattgttcctgcccttgactcaagtggggttactactaccccaaaaaaaaatgttagttaacctcttgtgagtatagtctttatttaac

SEQ ID NO: 22685 - DNA, 408 bp, Glycine max
  unsure at all n locations
  Clone ID: LIB3106-035-Q1-K1-B10
gtggtttcagtgagtgatcggtgttcacttgatccttcataagtcgtcatcaggatcatgagcatcaccgttgattgaagaagatgccgatcagaaacatcgccatcggaaggcctgaagaggctactcaccccgacacgttgaaggcggggttggctgagttcatctccaccttgatcttcgtgttcgccggttcaggttccggcatcgcctacaacaagctcaccgacaacggcgccgccactcccgccggcctcatctccgcttccatcgcccatgctttcgccctcttcgtcgccgtctccgtcggcgccaacatctncggcggccacgtcaaccccgccgtcaccttcggcgccttcgtgggcggcaacatcaccttactccgcggcatcgtctacgtcatcg

SEQ ID NO: 22686 - DNA, 401 bp, Glycine max
  Clone ID: LIB3106-035-Q1-K1-B11
agataatcggaatttagtagttagttcggtttttagttacttaaccgcttaacgatataaggaaataaataaaaagaagcgcgacgatgttagatcttaatctcaatgcggagtggaccgattcgtttagtaacggtgagtcgccgttaccgttagagaagtttccagacggtttgaggaaccaaatggccgagtcagggacttcgaattcctccgtggtgaatgcggacgggtccagtaacggcggcggcgacgaggactcggactccacacgagctgctgatgacgtgtacaccactttcaatttcgatatccttaaagtcgaaagcccgaacggcttcgtaacgaaggagctctttccggtgatgagtgaaggagctaaaggacacgctacgtcgtcg

SEQ ID NO: 22687 - DNA, 427 bp, Glycine max
  Clone ID: LIB3106-035-Q1-K1-B12
gatgcatcagattcgtggggtttgtctgtgagctttctcagcataatcttgctaccaatagttggaaatgcagctgaacatgcaggagcaatcatatttgctttcaagaacaagctggacatttcattgggtgttgcattgggttcagcaactcagattgccatgtttgtggtcccattatgtgtaatcgttgcttggataatgggtatcgatatggacctgaacttcaacctcctagagacaggttcccttgcgttggcaataatagtcacaggcttcactttacaggatgggacttctcactacatgaaaggccttgttctcctgctgtgctacattgttattggggcatgcttcttcgtacaaagaacaccctttaataatcaagctgatgttactaacatcacacttaaaccaaccactaatg

SEQ ID NO: 22688 - DNA, 438 bp, Glycine max
  Clone ID: LIB3106-035-Q1-K1-B2
gcgcagagcagcaaccaccgaccagaccacagaggcaccggttgggttcaccccaccggaactggacccaaacaccccttccccgatcttcggaggcagcaccggcgggctcctgcgcaaggcccaagtggaggagttttatgtcatcacatgggactccccgaaagaacagatctttgaaatgcccactggcggcgctgccatcatgagggagggtcccaaccttctcaagttggcgaggaaggagcagtgcttggctcttgggactaggctcaggtcaaagtacaagatcaagtaccagttttacagggtcttccccaatggggaggttcagtatttgcaccccaaggatggtgtgtaccctgagaaggtcaacgccggacgccaaggggttggtcagaacttcaggtctattggtaagaatgttagtcctattga

SEQ ID NO: 22689 - DNA, 280 bp, Glycine max
  unsure at all n locations
  Clone ID: LIB3106-035-Q1-K1-B3
nncgccacgcgtnncgccacgcgtncgctagttctagatcgcagcgacctcttgcccctctaggagtactgggaaagtcaccttcaaaaagcaacaagagaaagatatctttgttcgttttttatttgccctacatatttattattaatcgatggttgtcactttgatgttgtgttctgtgtttgtatgtgtatactatctagtaatgcgtttgaactgccaaggacaagagtacttttattgataataaagaaacgaaaacgtttcaattgcgttggct

SEQ ID NO: 22690 - DNA, 412 bp, Glycine max
  Clone ID: LIB3106-035-Q1-K1-B4
gcgggagtctttaatcttcatctacatcaggtctagctataccgttccttctgctactactcagctgcaaaggatggtgctgcccaagttctctctgtgcttctggcttctcctttcttcacttgtgattctcttaataaattgtccagttaaatgtgacgatgatgaggaagacaatctttatcaaggtatcaacaagtatcgagcatcgttaaacttgaaagctctaacaaggaatgataatgcaaattgccttgccgaaaaactagctaaccaattcaagaaacaaccctgcacaaataccacaggtgctaacactgtacctggcacagaacctcagttttccaactatccagaccttttatccaagtgtgacttggctatttccaacacaagggatggaaatgtaatg

SEQ ID NO: 22691 - DNA, 414 bp, Glycine max
  unsure at all n locations
  Clone ID: LIB3106-035-Q1-K1-B5
cggacgcgtggngttgaaccggtctggaagtcacgattcgacgctgagccaccagtcggaggcggcgagtgcggtggaaagtgagagcattttgtctgctgagacttcgatcctcttccgagatgaaccggaatccaacccgaagcgcttggaccggaccgatgatgttggtttagagcttacgctagggttcgagccggtatcaggtgcgcagcacgtggttccggtgaagaagagaaggattgatttgaaggattttagtggctcgtcgtgcaagatggagctggggcttgaatgctcggcttgaggactagtggctcggctcacttttgactcatcggctttctgtgtttgatataagagaacagaagtacagaaccgttttagcgttggtggtggtcgtgcttttttttt

SEQ ID NO: 22692 - DNA, 408 bp, Glycine max
  unsure at all n locations
  Clone ID: LIB3106-035-Q1-K1-B6
gcgcccacgcgtncgacgagatggagttcaccgatgcagagagtaatatgaatgatttggtaggagagtacgagcagtaccaggatgcaacagcagaggaggatgaatacgaggatgacggtgatgagcagcagtatgatgaccagtagctggatcaatcttagggcaatgctctgatggtaattaccaatggcgtgatgataacttctggcaccgatctacttttactgctattcgtgtatctacagccatatgaactctatttcattcccatttatctcttcttttaaattctgctaatttcatttatatgttctgcttttgaattgtttggaatgtgcccggtgagacaatagttgattattctatacttccaattgccaagcatagcacgtgtatgaacaagtt

SEQ ID NO: 22693 - DNA, 420 bp, Glycine max
  Clone ID: LIB3106-035-Q1-K1-B7
gtgaacactatactcttcttctgcatttatgcaggaaaaaaatggttcatcttggcttctgccttctggggtgtctctccatgatctcatatgctaatggttatgtcagcaatgggggttggaccaatgcccatgctacattctatggtggaagtgatgcttctgggacaatgggtggggcttgtggttatggaaacttgtatagtcaaggatatgggactaacacagcagcacttagcactgccttgttcaacaatggcttgagttgtggctcatgctaccaaatcaaatgtgcaaatgacccacaatggtgcctccgtggcaccattgtagtcactgccactaatttctgcccccctggtggatggtgtgaccctcccaatcaccattttgatctttctcaacctgtgtttcagcaaa

SEQ ID NO: 22694 - DNA, 427 bp, Glycine max
  unsure at all n locations
  Clone ID: LIB3106-035-Q1-K1-B8
ttttcttcctcagaaacacattctaatggcagagcgcggaggtggcgatcgtggcggcgggcgtggcggtttcggacgtggattcngcgggcgaggacgcggaggtgacaggggccgaggccggcgccgaggcccccgccgcgaggaagaggagaagtgggtcccagtgaccaaactgggccgcctggtgaaggagggaagaatccgaagccttgaacagatctacctccactcgctcccgatcaaggagcaccagatcatcgacacgctcgtgggtcccaccctcaaggacgaggtgatgaagatcacgccggtccagaagcagacccgggccgggcagaggacccggttcaaggccttcgtcgtcgtcggagacaacaacggccacgtcgggctgggcgtgaagtgcaagcaggaagtggcgaca

SEQ ID NO: 22695 - DNA, 428 bp, Glycine max
  Clone ID: LIB3106-035-Q1-K1-B9
cccacgcgtccggtgagctagttcagaaatatgtcggtgagggggctaggatggttcgtgagctatttcagatggctcgttcaaagaaggcatgcattgtgttttttgatgaagttgatgcaattggaggtgcacgatttgatgatggtgttggtggtgataatgaggttcagcgcaccatgcttgaaattgtgaatcagcttgatgggtttgatgctcggggaaacatcaaagttttgatggcaactaacaggcctgacactctagatcctgcactactacggcctgggcggttggaccgtaaagttgaattcggccttcctgacttagagagtaggactcagatattcaagatacacacaagaaccatgaactgcgaaagggatatccgatttgaacttctggctcggctttgcccaaattccact

SEQ ID NO: 22696 - DNA, 308 bp, Glycine max
  Clone ID: LIB3106-035-Q1-K1-C1
accacgcgtccggcttctatttctcacgcaaccgtatgctttcatcaatggctacactcgacctatctgcgttgcaagctctaacctgccatcgcttatcctttgcttttccccaaagcggatgaaccacacagagaaactctaacccaaacttggaaaacttggatggaagaatacataataaggagtgaacaagttccacctggcactgaatccggaaatgccacttgggtcatgcagccacctacacagaagcctgatcttcgattaacgcccgatcaccacatgctattgaccgtgcctcttga

SEQ ID NO: 22697 - DNA, 428 bp, Glycine max
  unsure at all n locations
  Clone ID: LIB3106-035-Q1-K1-C10
cccacgcgtccgcttaatccaaatatcatcatctgaaacgatggctgccatgggaaccacgaccctctcttcaaacccgaaactctcatttttccacggaaagcccgttacatattcttcccgcgtcgcacccaccaccaagttattctcatccaaacaaggcacaatctccatgtccctaacccaacccccatacgacctccaatccttcaaattccaacccatcaaagaatccatcgtctcacgcgaaatgacgcgccgctacatgaccgacatgataacctacgccgacaccgacgtcgtaatcgtcggagccggctcggcggggctctcctgtgcgtacgagatcagcaagaaccccgccgtgagcgtcgccataatcgagcagtccgtgagcccncgcggcggcgcgtggctcggcggacaac

SEQ ID NO: 22698 - DNA, 435 bp, Glycine max
  Clone ID: LIB3106-035-Q1-K1-A8
aacaaaaaataaagcgttccatagcctcccataaaaatgaagaatactatcttctgggctctcggtctactttgtgccttcaccacctcatacctaccttcaaccaccgcggtggtcgataccaacggtgatattcttcagaatcctggcacatactttatcttgtccgtttttcgacccggcggcggagtagaattcgccgccactggaaacgaaacttgccctctcactgttgtgcagactctcttcgggaggggatttccagtaatcttatcgtcccagttacgaatccctatcatcggcgaaggacaactcttcagcatcctgttccgtattgtgccatggtgcgccaccactccttctaagtggaccattgtggagggtttaccagaatcacccgcggttaaactcactgcgtacgacaacacagtgcct

SEQ ID NO: 22699 - DNA, 244 bp, Glycine max
  Clone ID: LIB3106-034-Q1-K1-H3
cttcaggccaagccaggtaagcaagcacaacacaaccccgaaatggcttctggttctggtccgatgggttttttggctgagctctgttatcaacaacaacaagccttcatccgaagcctttttaaggccattacccttacggcaaccaaagaggacccttttaacaacaaaggcagggtcaaactccaaggctaaaataaatgcatctttgaaggaaaaggcagttgcaggactaacagcagct

SEQ ID NO: 22700 - DNA, 430 bp, Glycine max
  unsure at all n locations
  Clone ID: LIB3106-034-Q1-K1-H4
atcgagataactagaaacagtgtgatgaaaatgaaggtccttgttttcttcgttgctacaatgttggtagcatggcaatgccatgcgtacgatatgttccctctccgaatgaacactggctatggtgcccgtactccggaggtgaaatgcgcacgttggaggcttgctgtggaagcacacaacatctttggctttgagaccattcctgaagagtgcgttgaagcaacaaaggaatacatccatggcgaacaatatagatcagactccaaaacagttaaccaacaagcttacttttatgccagagacctcgaagtccatcccaaggacacatttgtgttcagtatagatggcaccgtactctctaatattccatactacanaaaacatgggatatggggtggagaaatttaactcgaccttgtatgatgaa

SEQ ID NO: 22701 - DNA, 411 bp, Glycine max
  Clone ID: LIB3106-034-Q1-K1-H6
gcaaaacgtggagatgcagatcgagcacaagcaatgtcgccgatcaagccttaaaccaccacggggaaccctgatttggttagggggattggcacgtattcgaggtcgcatatgtaccacatgaggggcatctgggccatcaaggccaaaaacggcggcgttttgtcccgccacgatcccatgcccattcccgatgccccggcccaaaagccgaccaagttataccccgcggtcgatgttaataagccactcttcatcaagcacaagcccaaacccgcgaaactcaagtctagcattactccagggactgtgttgatcctgcttgctggtacgttcaagggaaagatggttcgcttcctgaagcatctcccatctggattgcttcttgtaactggtccctttaacatcaat

SEQ ID NO: 22702 - DNA, 132 bp, Glycine max
  Clone ID: LIB3106-034-Q1-K1-H7
cccacgcgttcagatacacatcgtataactcctgtgtctcagatacaaccttacgggaccacttggaacactgatttggttatttatattgccacctattttcagtttcatttgcaccactctaaaagcatc

SEQ ID NO: 22703 - DNA, 285 bp, Glycine max
  Clone ID: LIB3106-034-Q1-K1-H8
cagaagctggaggaaaatggatacaacatcattggaaacattggagaccaatggagcgatatgttaggaaccaacacaggccttaggacctttaagttgcctgatcccatgtactacattagttgaggtctctaggctcttatgaatgaaatgagatatgtagtaattaataatggagagacttaacctaggggcactcgttattgctatgtttcatatgtatgtgactttgtgtgagacagtagttacgtgagactgcacaagcacaacttaacgttgttttat

SEQ ID NO: 22704 - DNA, 452 bp, Glycine max
  unsure at all n locations
  Clone ID: LIB3106-034-Q1-K1-H9
caaaaatagtctaattaacgagggaagttattgggtggaaaaggcgtgaaaaaaaggacaaaagattttatttcaaacatgccttgctttctataagaagataaaatggaccatttcatgttagttgtaaaacacaacaccatatactagttatgttaatcaaacaagttgtccacaggggattaagaaataaatatatggacaaacagattaaggtacgataatcatttttcaattttcacttgcttaactctactaatttgtttacatgacccttgacaggtacgtgtatatacaccaaagagggtgtttcaagagctagaagttgcaaaggacgaatacattcgagctaacttaagcgtacgcaaggaccaaaaaatactcttaccaaagcttngtgagtcattcaacaaggactcaagtttgtgccccattggtgtcaatgatatgat

SEQ ID NO: 22705 - DNA, 361 bp, Glycine max
  Clone ID: LIB3106-035-Q1-K1-A1
gggccgacccacgcgtacgcccacgcgtccggatccaaactcttttttcatttgcagcatcaaaatgagtggtagcaacgatggtagcggcagctggagctctacgtttttgaaggtggctagtgcagatgccgctacagccgtcgttgccggccgtttatatgccattctttcatcctcaacctctgctagctctgagatggaagtgccgtttggcagcgcacggcgtgagagcaaagaacgtgacgatggtggctccgggtcttattctagcgagggtgccaccacggacagtcggtggaagaaacctgagattggttgggtgaagctgaacgtgcatggttcacgcgacccatacaaa

SEQ ID NO: 22706 - DNA, 426 bp, Glycine max
  Clone ID: LIB3106-035-Q1-K1-A10
cccacgcgtccgcccacgcgtccggttccagatcgcaatgctggcatcccttcaactagtggggttgattctgatttaacttctgaagatgaagttgtccgtttgttgaactgctctgatcattatgcagcactgggattcacgcggtatcaaaatatagatgtttcaatactaaagcgggaatataggaaaaaggcaatgttggtacatcctgataaaaatatgggtaatgagaaggctgcagaagcctttaagaaacttcaaaatgcatatgagattctaatggattcgttgaagcgaaaagcttatgatgatgagctaaggagagaggagattttgagtgtatttcgtagatttcatgatgcttctcgtaagaatggtaggcatggattctttccttcaggatttgcacgatctgatgcagat

SEQ ID NO: 22707 - DNA, 448 bp, Glycine max
  Clone ID: LIB3106-035-Q1-K1-A11
ccgggccgaccgacgcgtccgcccacgcgtacgcccacacattctgttccatatcgcaatgctggcatcccttgagctatcggcgttctttctgacgttaacttgttaatatcaacctttccccttcttgaactgctctgatcattatgcaacactggaattcacgcggcatcaaaatatatatgtctcaatactaaaccgggactataggaaaaaggccatgttcgtacatcctgataaacatatggctaatgagaaggctgtataagcctttaaaaaacttcaaaatgcatatgacattctactggattctatgaagcgaaaagctcatgatgatgagctaatgagagaggagatttcgagtgtctttcctacatttcatgatgcttctcgtaagaatggtaggcatggattctttccttcatgatctgcacgatctgatgcacat

SEQ ID NO: 22708 - DNA, 407 bp, Glycine max
  unsure at all n locations
  Clone ID: LIB3106-035-Q1-K1-A12
cccacgcgtncggatagttcaaaattcacggttggtcatttgacacatctcatgacaatatgatatcgttgttcaggcaatttgcctcattttttcttttctttccttttatctttatatatacagcttttctttactgattgcaactacaaagatgaagatttgccatgtgctactagagcataatatacgttgtagtgtcactggttgatgtcagtggaaaaatggatttggcatctgttcttttgctattgactagcttatgctcttcttctgcactgcatgagcttgattcacaagaagatgcattgtatgctttgaaggtatcattgaatgtttctgccaaccagcttacaaactggaataaaaatctagtaaacccttgtacttggtccaatgttgaatgt

SEQ ID NO: 22709 - DNA, 299 bp, Glycine max
  Clone ID: LIB3106-035-Q1-K1-A2
tgtgcctgtgctgtccatgcacaccgtgcattcaccactttccctcatcctgctcattaagaagctcatgctttgatgttgaacacacttcgaggatgtgccctttcaagggctcagagaagtgaaaaagtgaaatccctccctggtagatatatgcctgcaaatagagagacttcaactttgtgtcttaaactcggtttgttttaatccccgaattgtgaaagctcgagacattttggatgctaaaactggcttgtacctagtaagctatttgagtttatggaaagacatggacttct

SEQ ID NO: 22710 - DNA, 407 bp, Glycine max
  Clone ID: LIB3106-035-Q1-K1-A3
cccggaaacaagtttttaggtttgggcagtttgagtgctcagtgaaggagaaaatggcgagggagttgtggactcttgataatggcacaacctgcacatcatggaactattctggcaccaggctcgctgcgggttccgccgatggcactctttcaatcttcgattcccgcgagccgccttcttcttcctccctccgttctactttcaaatctagggttctagaaggaaacatcttgaagattgtttggattccgccagaatatggtgatgcagttgcgtgcatttctgccgatggaattgtgtcattgtgggaggaggtcgcagaagattcccagtctcttcagtggaagatgtgtaaaagctttggaaacagttcaagcaaagtccttgatgttcaatttggaatc

SEQ ID NO: 22711 - DNA, 462 bp, Glycine max
  unsure at all n locations
  Clone ID: LIB3106-035-Q1-K1-A4
cggacgacccacgcgtncgaccacgcgtnncgccacgcgtncggaaacagtgtgatgaaaatgaaggtccttgttttctgcgttgctgcaattttggtagcatggcaatgccatgcgtacgatatgttccctctccgaatgaacactggctatggtgcccgtactccggaggtgaaatgcgcaagttggaggcttgctgtggaagcacacaacatctttggctttgagaccattcctgaagagtgcgttgaagcaacaaaggaatacatccatggcgaacaatatagatcagactccaaaacagttaaccaacaagcttacttttatgccagagacctcgaagtccatcccaaggacacatttgtgttcagtatagatggcaccgtactctctaatattccatactacaaaaaacatggatatggggtggagaaatttaactcgaccttgtatgatgaatgg

SEQ ID NO: 22712 - DNA, 417 bp, Glycine max
  unsure at all n locations
  Clone ID: LIB3106-035-Q1-K1-A5
cccacgcgtncgtgctttaccaaattccaatttccaattcaaaaccctaactccgttcgaagcaccaaagcgtgatggcaccaaaggcagagaaaaagccagcagagaagaagcccgcggaggagaagaaaatcgacggtgggagacaaggctccggcggagaagaagccaaaggccggaaagaagcttccgaaagagggaggcgccggcggagaagggaagaagaagaagagaaacaagaagagcgtggagacatacaagatctacatcttcaagggtctgaagcaggttcaccctgacattggtatctcaagcaaggccatgggaatcatgaacagcttcatcaacgacatcttcgagaagcttgcccaggaatcttctagacttgtccgctacaacaagaaacccaccatcact

SEQ ID NO: 22713 - DNA, 340 bp, Glycine max
  Clone ID: LIB3106-035-Q1-K1-A6
gcgctgatcatcaaaatgggattcgaagcagactcaatttccctctgcagctgttagagaaaaaggacattgaggacgtcacggaacaaccttgttccaccaccagcgtggtaactgctactactactgctattactactactactacttcagataacaacgacctccacttggcggagcagtccaagaagcctccgccgaaacggagttccaccaaggaccgccacacgaaggtcgatgggcgaggccgccggatccgcatgccggcggcctgcgctgccagagtgttccagctcacgcgtgagctgggacataagtctgacggcgagaccatcgagtg

SEQ ID NO: 22714 - DNA, 429 bp, Glycine max
  Clone ID: LIB3106-035-Q1-K1-A7
gcgattactactttctctctctttgtaactcgtaagcatggagtcctcaaacatcgaggcttacgtcttactttgcatgctcttcctctactccgccactcccattctcggatgtggctactgtggcaaaccctccaaaaagcacatgcctggtaaaacaccaaagacacccacagtacccgttgttaagccaccagtcacaatccctcccattgttaattcaccagacacaatcccttccattgttaatccaccagtgacagctccacccgttgtgcttccaccaatagcgaagcccccgggttttctccctccaattcttaacccaccaagtacaccaacaccgtcgccggggaagggagggaacactccatgtccaccaccaaagtctcctgcacaggctacatgccccattgacacgctcaaact

SEQ ID NO: 22715 - DNA, 365 bp, Glycine max
  Clone ID: LIB3106-034-Q1-K1-H2
cgcaaacgttcgtacacactagtacttctacctctgtctctatgtatcagcaagcagctttagtaatttacagtaacatatccaatggtcgcacgttcacgaaccaatcaacgtatcacaagaaaacgtgctcatcttcagccttcaaatttccaggaggggagtgatgttctctttaagagaggtcagtgcagagcaaaagggctggcacaccggattcaaaggatcctgtcttgcatcgtgcaggaggaaataggcaataccatcctttgctgatgaaaatcaacccattgagtacagaccgtcagctttatgatggcgacaacacatctggtgtgacagcatgatggtagacacatggacac

SEQ ID NO: 22716 - DNA, 453 bp, Glycine max
  Clone ID: LIB3106-034-Q1-K1-F7
ctagtttatcgtgaggagaatatgaagttgtttgctttctttgttgctgcagtagttttggtagcatggccatgccatggcgcaggctaccaaaggttccctctccgaatgaaaactggctatggtgagcgttcttcggaggtaaaatgcgcaagttttaggcttgctgtggaagcacacaacatccgagcctttaaaaccattcctgaagagtgctttgaaccaacaaaggactacattaatggcgaacaatttagatcagactctaaaacagttaaccaacaagctttcttttatgctagtgaacgcgaagtccatcacaacgacatatttatattcggcatagataacaccgtactctctaatatcccatactatgaaaaacatggatatggggtggaggaatttaatgaaaccttatatgatgaatgggttaacaagggcgacgcaccg

SEQ ID NO: 22717 - DNA, 241 bp, Glycine max
  Clone ID: LIB3106-034-Q1-K1-F8
cccaagcatccggaggaagagcatgcacatgcttgagttctaaaaatgggaaaaggctactgcagggctgtctctgccgcatccttggctggcaacgagcttattctgggtgcatcaccccccatagtcagcagggtcagcatgaagaataccgttgcctagcgggccttctacaaaagcccatcgtgcgaaccattccgagtaccgtacttgagcgcattgtctgacgagcccccttcct

SEQ ID NO: 22718 - DNA, 417 bp, Glycine max
  Clone ID: LIB3106-034-Q1-K1-F9
ctcaaaataaaacaaccaaaccacacacttcacaccctcttcaacatcctcagcaagtacaagaacaagaagaaacaatgtcttgctccaatctcacaatgttggtgtcctcaaaaccttccctttccgatccctccaatctctccttccgctctgtcctcaacccttttcagctcccttcacaaaacccaacttcatgcactccttcacgctcctcaaccacccaaattcagtgtggtctgagagaactcagaacccgcattgattccgtgaagaacactcagaaaatcaccgaggctatgaagcttgtggctgcagccaaagtgagaagagctcaagaagctgttgtcaacggaagacccttctcagagaaccctcgtgaagtcctctacaacatcaacgagcagctcctaactg

SEQ ID NO: 22719 - DNA, 197 bp, Glycine max
  Clone ID: LIB3106-034-Q1-K1-G10
gagagctccaactctctaaatcattcatcttcatgtttttctccgatcttacttaatgtacaatacatatcactgagatattaaggcatttggctttgttccttggaactcaattcttgaatttcttccgatttttctgtgtctaattaaataaaatcataccacaaagcactaaatggacacaaattcttagtttc

SEQ ID NO: 22720 - DNA, 456 bp, Glycine max
  unsure at all n locations
  Clone ID: LIB3106-034-Q1-K1-G12
ttttgttccctctgtaggtgatggcgagtacaaacacatagtggggactctgttgaaagcaacggggacaccgaacttggtggattattttccagtgttgagggtgtttgatccacaagggatcaggaggcacaccaccaactacattgacaagttgttcgatgtgttcgatcccatgattgatgaacgcatgaggaggaggggagagaagggttatgccactagccatgacatgttggatatcttgctggatatttctgaccagagtagcgagaagattcataggaagcagatcaagcatttgttccttgacctattcgttgcggngacggatacaacagcctacggcttagagagaacaatgacggaactaatgcacaatccagaagccatgagaaaagcgaagaaggagatagcagaaacaataggagtaggaaaactcgtggaggaatccga

SEQ ID NO: 22721 - DNA, 448 bp, Glycine max
  Clone ID: LIB3106-034-Q1-K1-G2
cccacgcgtccgcggacgcgtgggttgttgttgtaactcgttcttcttcttttgttgttctgtgtttgtgtttgttttttctctcacctgaaaatgtcttgctgcggtggtaactgtggttgcggaagctcctgaaagtgcggcaacggctgcggaggctgcaagatgtacccagacttgagctacactgagtcaaccaccaccgagaccttggtcatgggagtggcacctgttaaggctcaatttgagggtgctgaaatgggtgtgcccgctgagaacgatggctgcaaatgtggaccaaactgctcctgcaacccctgcacttgcaagtgaggtgttgggagagcaagcttcaagcatagatagcccttaattaggaataatgatcaactattaatgtgtagctaaaaacttatgtattatgtctgtgatggttttcgtgcactct

SEQ ID NO: 22722 - DNA, 291 bp, Glycine max
  Clone ID: LIB3106-034-Q1-K1-G4
cagaagctggaggaaaatggatacaacatcattggaaacattggagaccaatggagcgttttattatgaaccaacacaggccttaggacctttaagttgcctgatcccatgtactacattagttgaggtctctaggctcttatgaatgaaatgagatatgtagtaattaataatggagagacttaacctaggggcactcgttattgctatgtttcatatgtatgtgactttgtgtgagacagtagttacgtgagactgcacaagcacaacttaacgttgttttatcgaaaa

SEQ ID NO: 22723 - DNA, 452 bp, Glycine max
  Clone ID: LIB3106-034-Q1-K1-G5
tgttgatcgagataactagaaacagtgtgatgaaaatgaaggtccttgttttcttcgttgctacaattttggtagcatggcaatgccatgcgtacgatatgttccctctccgaatgaacactggctatggtgcccgtactccggaggtgaaatgcgcaagttggaggcttgctgtggaagcacacaacatctttggctttgagaccattcctgaagagtgcgttgaagcaacaaaggaatacatccatggcgaacaatatagatcagactccaaaacagttaaccaacaagcttacttttatgccagagacctcgaagtccatcccaaggacacatttgtgttcagtatagatggcaccgtactctctaatattccatactacaaaaaacatggatatggggtggagaaatttaactcgaccttgtatgatgaatgggttaacaagggcaat

SEQ ID NO: 22724 - DNA, 337 bp, Glycine max
  unsure at all n locations
  Clone ID: LIB3106-034-Q1-K1-G7
ctgctttggtctagtctagcagctttacaatttaattttacaaacattcttcttgaaagcctggaaacttatgtgcgtttcaatgccatacntaccatattttacactctccataaaacaattactattatgcccctactaagaaccttatttcgcaaaatgtatgctttatcttcaagtacacaataaatgcatctttgaaacaatacacaatgactgcactcaaacaacctatgaatacatcctcttcggacattatagatgtgactcatgctcattgatacaacattcttacttttatcataaactcctcgctatgcatccttactactcattt

SEQ ID NO: 22725 - DNA, 383 bp, Glycine max
  Clone ID: LIB3106-034-Q1-K1-G8
cagaagctggaggaaaatggatacaacatcattggaaacattggagaccaatggagcgatatattaggaaccaacacaggccttaggacctttaagttgcctgatcccatgtactacattagttgaggtctctaggctcttatgaatgaaatgagatatgtagtaattaataatggagagacttaacctaggggcactcgttattgctatgtttcatatgtatgtgactttgtgtgagacagtagttacgtgagactgcacaagcacaacttaacgttgttttatcaaaaaaaaaaaataaaaacaaaaaaataaaaaaccatacaaaggacacataaacactcagaatatattgaacaaaaccaacgaaaactccatactat

SEQ ID NO: 22726 - DNA, 399 bp, Glycine max
  Clone ID: LIB3106-034-Q1-K1-G9
cccacgcgtccgcccacgcgtccgcccacgcgtccgcccacgcgtgcgctgttttgcaagattttgttggctggctttattttagatgacgctagaaaatataacttattgattattcttgctttggatatgtattcagcattcttacaaaataatcatattcaggaatcgtttgttaatgctttcctcatatgttaggttatttattgtgaatgacaacatcaaattcatagcaagtggggagagaatataaatatagcaagttcttaggttcatttgtgttataggtatgttttttgtgaagaacttgagtatagatattataacactactacacttagggcaattcttttatcttctcatgaccatcccttctatccttctaatgttttccctggt

SEQ ID NO: 22727 - DNA, 422 bp, Glycine max
  Clone ID: LIB3106-034-Q1-K1-H1
cgtaaaccctagctccggaaagatcgtcaacctctgcctctaaggatcgcaagctcttcgccggcatcgcggaacccgtggttcggtcggagcgtcacgaacagatcatgggatcaatggaaaaggtgctgaatctcagacgcttaactgtcggtggcggcgcgggactcactttctgtggggtcaaggaagccaatagcgctcgcacatcgttctagaggctcctgtcttccattgagcgtaacgaaaaagcaaaaacgaactattgcgagtgcgaatcatgctaaggcgtacatactgctggcttcattggagcgacacaacatctggaatgatggtacttgagtgagtcttgtgcacactattcactctgttgtagctgtggaaaacactgtcttgtcctatgtgaccctaggggcgtg

SEQ ID NO: 22728 - DNA, 410 bp, Glycine max
  unsure at all n locations
  Clone ID: LIB3106-034-Q1-K1-H10
cgagataactagaaacagtgtgatgaaaatgaaggtccttgttttcttcgttgctacaattgtggtagcatggcaatgccatgcgtacgatatgttccctctccgaatgaacactggctatggtgcccgtactccggaggtgaaatgcgcaagttggaggcttgctgtggaagcacacaacatctttggctttgagaccattcctgaagagtgcgttgaagcaacaaaggaatacatccatggcgaacaatatagatcagactccaaaacagttaaccaacaagcttacttttatgccagagacctcgaagtccatcccaaggacacannttgtgtcagtatagatggcaccgtactctctaatattccatactacnaaaaacatgaattatgggtggaagaaatttaac

SEQ ID NO: 22729 - DNA, 349 bp, Glycine max
  Clone ID: LIB3106-034-Q1-K1-H11
cgcggcgttgttaacttcccttcactcaaaacaccttccatctccaaacatgggtcggaaacgcgacgccgttttggtcagcgaaccagtcgccgaagaagttccctacagccccgagctcgattccgagaagaagaagaagaagaagaaaaagaagaacaagaacaaagacaagcaccaaaccgatagcagcaccaaacgaaagctcgacgaacaactagaccctcaaaacggcatcgaatcgaataagaagaaaaagaagcaccacgagtccaaacagaacgccgaggaaaccaacggcaacaacaacagtgacaacggtgctaatcgcgacgaaacggtggcggac

SEQ ID NO: 22730 - DNA, 426 bp, Glycine max
  Clone ID: LIB3106-034-Q1-K1-F6
gaattgtatacaaacgaatatgttaacattcttgccttcaaaaattatgtaacggtaggcttatcgtgaaaataaaaaaaaaaaagaatacaaaaaaaaaaatataaaaataaaaaaaaaaaaaaaaaaagagaaaatagaaaaaaaaaaaaaacaaggtttacgcttgttgaggaaacacacaacatgcgagcctttaaaaccattcatgaatagtgctttgaaccaaaaaaggactacattaatggacgaataatatagatcagactgtaaaacagttaacctacaatcatttcttttatgctagagaacacgaagccaatcacaacgacatatttatattagagatagataacaccggactctctaatatccaatactacgaaaaacatgaatatggcgcgcaggaatttaatgaaacactat

SEQ ID NO: 22731 - DNA, 468 bp, Glycine max
  unsure at all n locations
  Clone ID: LIB3106-034-Q1-K1-E10
gtcttccatttccaattctctgtgtagaagccatgtctaagggtcctggtctctactctgacattggcaagaaagccagagatctcctgttcaaggactaccacagtgaccagaagtttaccatcactacctactcacccactggagttgctataacatcctcggggaccaagaaaggtgacctttttgtggcggatgttaacacccagttgaagaacaagaacatcaccactgatatcaaagtggacaccggttccaatcttttcacaactatcactgtcaatgagcctgctcctggtctcaagactatttttagctntagagttcctgatcaaaggtctggaaaggtggaagtccagtacttgcatgactatgctggaataagcaccagtgtgggtttaacagcanacccaattgtcaacttctccggcgttgtaggaactaatgtactngcccttggtactgatg

SEQ ID NO: 22732 - DNA, 307 bp, Glycine max
  Clone ID: LIB3106-034-Q1-K1-E11
caaagcttgcttcagatgctctcactgcaaaggaacattaaagctgagcaactattcctcagtggaaggtgttctttactgtaagcctcactatgagcagctcttcaaggagagtggctccttcagcaagaacttccagtcacctgcaaagctagctgataagacaactcctgagctgacaaggtctcctagtaaagctgcgagcatgttttctggcacacaagaaaagtgtgccacatgtggcaaaactgcttatccattagagaaggtaacagtggaaaggcaggcctatcacaaatcatggttc

SEQ ID NO: 22733 - DNA, 387 bp, Glycine max
  Clone ID: LIB3106-034-Q1-K1-E12
aaaagaacgcagaaactgaaataaaaaatggcagaacccaaggttaaatacgatcgtcaactgagaatatggggtgaacaaggacaggcagcccttgagaagtctagtatttgcttacttaactgtggtcctactggttctgaaacacttaagaatcttgttcttggtggggttggaagcatcactgtagttgatggatctaaagttgaagcgggagacctcggaaacaattttttggtggatgaagcaagtcttgggaaggtaaagggcaaatgtgtatgctcatttcttcaagagcttgatgatgcagttaaagcaaaatttgtagaagagtcttcagaaacattgattgagacaaatccatcattcttttctcaatttactttg

SEQ ID NO: 22734 - DNA, 407 bp, Glycine max
  Clone ID: LIB3106-034-Q1-K1-E2
attcctcttaagcttgctactgagtttccacactgcataccttatgtcttccgaattcgaagttaatttgcaagatggctaaggaaaaggctcagatcaacattgtggtggttggtcatgtggaccctgaggaggcaaccaccattaacgagctgaagaagcctgttgtggagaaagaagctccagggcatgccatatgagggcatgcacgtacggcctcggaggggaaccagaaaattatgttaacaaaataatctggaaccctaatgtatcagtgtcatcatcagtgtgtagtttaagctagctttgctatggttacgttctttgagatgagagtcttgatgaacagtaccattctgatgtattgctttccttgaaagttaatgcatgcttcttatcttctgtct

SEQ ID NO: 22735 - DNA, 452 bp, Glycine max
  Clone ID: LIB3106-034-Q1-K1-E3
cccacgcgtccgcccacgcgtccgagatttcctgccatacaatggagatggattcaaactatctattccctcaaagtggaacccaagcaaagaagttgagtacacgggtcaggttgttagatatgaggataactttgactcaaccaccaacgtggttgtcaccatcactccaactgataagaagtccatcactgactatggttcacccgaagagttcctctctaaggtggattatttactaggaaaacaggccttcttcggcgaaacacaagctgagggtggttttgatccaaatgcagtggccacggctaacatcttagagactgcaacacctgtgattgacgggaagccatactattttttgtctgtgttgacaagaactgctgatggagatgaaggtggcaagcaccacataattagagcaactgtaaaagatggaaaactggtcattt

SEQ ID NO: 22736 - DNA, 402 bp, Glycine max
  Clone ID: LIB3106-034-Q1-K1-E4
cccacgcgtacgggggcgcttaagaaccaacgcttcttttctgcggaagtcatcattaccaggccttccggttggtggctagacggaacgctctgatgtacgcttgcgcgacgtgtcacaatgtcacgatatgtgacactcaccctctagggtgtgtagaatccttatgcgtactaataagctggagcatcactacacatgactccatccacgtactccctagcaaggtgacctcaaaagcaccgcaacatcatactcccggaccctcacatatctcagcccgcatctgtttctaatgcacgctagatggactacgcgtaccttacttcatatcatgtactcgacgaccagcaccactataatgtgcttcttgcgttgatagctaatgcttgattcttaggt

SEQ ID NO: 22737 - DNA, 450 bp, Glycine max
  Clone ID: LIB3106-034-Q1-K1-E5
gcaccatgaggctctcacagaggctcttccaggtgacaatgttggctttaatgtgaagaatgttgcagtcaaggatctcaagcgtggttttgttgcatccaactccaaggatgaccctgccaaggaagctgccaacttcacatctcaagtcattatcatgaaccaccctggccagattggaaatggatacgcaccggtgcttgattgccacacttctcacattgctgtcaagttttctgaaatcttgaccaagattgacaggcgatctggtaaggagcttgagaaggagcccaaatttttgaagaatggtgatgcatgtatggttaagatgattccaaccaagcccatggtggttgaaactttctctgagtatcctccccttggtcgttttgctgtgagggacatgcgtcaaactgtggctgtcggagtcatcaagagtgttgagaagaa

SEQ ID NO: 22738 - DNA, 52 bp, Glycine max
  Clone ID: LIB3106-034-Q1-K1-E6
acttgcattcgacatgatatctctcatgatatcgtagctaacttcatattag

SEQ ID NO: 22739 - DNA, 87 bp, Glycine max
  Clone ID: LIB3106-034-Q1-K1-E7
gctgagcttgccacacataatttctatgtctttactgactacaagctcaaacctgaagcccgggatacttatttatatatcgcgtat

SEQ ID NO: 22740 - DNA, 422 bp, Glycine max
  unsure at all n locations
  Clone ID: LIB3106-034-Q1-K1-E8
cccacgcgtccggcagaaagcaagctcatcctagagttataaaaatggcagcagcctactccatggctctctcttccccatccttggctggcaaggccgtgaagctgggcccatcagcccccgaagtcgggagggtcagcatgaggaagaccgtcaccaagcaggcctcctccggaagcccatggtacggcccacaccgcgtcaagtacttgggcccattctctggcgagcccccgtcctacctcactggcgagttcccaggtgactacggctgggacactgctgggctttcggccgacccagaaaccttcgccagaaaccgtgagctcgaagtgatccactccaggtgggccatgctcggggccttgggctgcgtcttccccgaactattgtcccgcaacggngtcaagtttggagaagct

SEQ ID NO: 22741 - DNA, 403 bp, Glycine max
  Clone ID: LIB3106-034-Q1-K1-F1
cccacgcgtccgcctttgactgcgaatggcgtcgttcgatcaggcacctaccggcgatgtataatccggggacaaaatctttaggaccaagtgtgctcattgttacaccgtccaataaggtgccggtcacaagcagggacccaatctgaatggttcgttcggaaggcattcaggcactactcccggttattcttactcttcagctaacaagaacatggctgctacttgggaagaaatgacactatacgattacttgcttaaccccaaaaagtatattccagggaccaagatggtattgcctggtcttaagaagcctcaggaacgtgctgatcttattgcatatctgagagaatgcactgcacagtgattatacattttcatacattcaatttttgcagagtgc

SEQ ID NO: 22742 - DNA, 465 bp, Glycine max
  unsure at all n locations
  Clone ID: LIB3106-034-Q1-K1-F10
cccacgcgtccgcttcccttctccaacatgccaaacgacagcgttgtgagtcttttcttctgcgttaccctcttcacatgccttctctctgctacttcccacgatgaccatattttcctaccgagtcaactccatgacgatgactcagtgagttgcactgcaaccgacccaagccttaactacaagccggtgatcggaatcctgacccaccccggcgacggtgcctctggccggctcagcaacgccaccggggtttcttacatcgccgcctcctacgttaaattcgtggagtccggtggtgctagagttattccccttatctacaatgagtcacctgagaaccttaacaagaagctcgatttggtcaatggagtgctcttcactggtgggtgggctgtttctggtccatatttggatactcttggaaacatttttaagaaagctttagaganaaatgatgctgga

SEQ ID NO: 22743 - DNA, 414 bp, Glycine max
  unsure at all n locations
  Clone ID: LIB3106-034-Q1-K1-F11
cagcagctcatgatcttaacttttggttcactagctaactcaaccccatacctaggagggggccttctggtgattgttcttgtctggttatcagcggccaagtcgcttgatacccagtttactgcattgcgccgagaagaagaacttgagaaagagatggaaagagcagcagctgttaagataccagtggtggccaaggatgaggatgaaaatggttctcttaaaagtgttccactgttaaatccaacagctggtgactcctcaagtatattgaattgaactcaactcacagtatntaaagcttanactacattgactngcaaggcaggaggagtaagccanactcatgagatttggtagctcaaactannttgtgtagggtcatatctcatctgagtttgattgtcacttttt

SEQ ID NO: 22744 - DNA, 424 bp, Glycine max
  Clone ID: LIB3106-034-Q1-K1-F12
cagaagaaggttttgtgtgaagaattgcttagcaaaacttcttggcgggccagttcagcttgatgtctcaagggaaaaccaggtatcccaaattattaagggcaaagagcaaaacagctacaccatctccactccccttagtttcaggacatcatgccccctaaacacaaaatgcaaggctgggaaaaaggttggttcatccaaaactgtggatctccctctgcctccagagtggggattggcaccaagtagctattatgttcctttcttccccatcattggaataccttgatcatgtgctcaagacttcacaagtgatttgtaatcacttgagtaataatacttgtggggggaaatagactgttatatggtcttgtatgttacatatgattatagatgtgtcatgtgtagtagtgtgaaagaa

SEQ ID NO: 22745 - DNA, 410 bp, Glycine max
  unsure at all n locations
  Clone ID: LIB3106-034-Q1-K1-F2
cccacgcgtccgcccacgcgttcgaccacgcgtccgcccacgcgtacgtccacgcgtccggccatatctctttctcacacagacacactctcttcttcttgctattccttcctcgtcatggagtcgcgagtgctgtcacgcgccggaaccttgttctccctccctcacctccgcaagctgccgcgggaggtcggcgccggcccctccctcgtcgccgtgaaggccgtgggctccgtggcggacggcgggaacctgatttgggggaggcaactgcgcccagagctctgctcgccggcgctgaagaaggaggccgtcctcctncggccatgcctcgccgccgccttctcgacggccgagggcagtgattccgccggagaagcaaaggttgctccggcggggtttttcgagaa

SEQ ID NO: 22746 - DNA, 425 bp, Glycine max
  Clone ID: LIB3106-034-Q1-K1-E1
tgaagtaccagagaatcttgagaggttcaaagagtcagaactcattcactgcagatgggccatgcttgctgttccagggattttggttccagaagcattgggcttaggcaactgggtataggctcacgaatgggcagcacatcctgggggccaagcaacctacctaggcaatgcaggtacatggagcaccctacccaccattctggccattgaattccttgctatttcctttgtggagcaccaaaagagcatggtgaaggacccaaagaaagaagaaatacccttggggtgcttgtgatcctttgggatactctaaggaccctataacattccatgaatacgaagtccaagaacttaagaatggacgtcttgctttgatggcttttgcgggattctgtgttcaacaatcagcttatcccggcact

SEQ ID NO: 22747 - DNA, 363 bp, Glycine max
  Clone ID: LIB3106-034-Q1-K1-F5
ctcacgcgtccggaggagatcttgaaggtgtgtgcgtagtatgcatctgaagatgtggactcggcctgaagcgttgaatttggctgaatgcatatctgtatatgtagttgtgagatcgactgacataaagaggtctccgtaggcttattgaagctgccgaacgctcattgatgtaacgcacaagttgcgagccctttagagagccagtgatgagtggtaaaacctcgagagaggctgagctaattgacgagcttgctactgcatactttgacattaaatgtggtacatcgtgtgctagtactggctaacactcacgcattcacaacgccacgtgtatataagaggttgctagctagccaagct

SEQ ID NO: 22748 - DNA, 440 bp, Glycine max
  Clone ID: LIB3106-034-Q1-K1-C5
cccacgcgtccgctctttcaagaagcatctgagtatttactattttgtactatatatatatatatatagtcactcaagcttctaggatttgtgccagctacatgaaaatgggaagcaacttcaggtttttgagtctttgcctcttggcattgattgcatcaactcatgctcaacttcagcttggtttttatgccaagagttgcccaaacgctgagcaaatcgttttgaaatttgtccatgaccatatccacaatgctccatcactagcagctgcattgataagaatgcacttccatgactgttttgtaaggggatgtgatgcatcagtccttctgaactcaacaaccaatcaagctgaaaagaatgctcctccaaatctcacagtaagaggctttgacttcattgacagaataaagagccttgttgaggcagaatgccct

SEQ ID NO: 22749 - DNA, 450 bp, Glycine max
  Clone ID: LIB3106-034-Q1-K1-C6
gacactcagaaatgatggatgaagcagcagcttgaggtactattccatgctaaaaattgatgactaaaagcgctcatacttgacattttggttcctttgaacattgaagattaggcaacgaaatgttcaggctataagtaatgttggcatgaatgaatgtatctcgttctctttagtgaagtggtgaatatgccatgaattgtaaaaacacggtaaggaaaactttacggatgtgtgcactcatgattctgccattaacttatgttgccgtgcgttctgatcgacgccatgtcaggaataatggtgtgagactcgaaaatcatgattgcaggtatagaatacgaccttacgtgctaataataatgctattcggatgctcactgtctgaggctttgacttcattgacagaataaagagccttgttgaggcagaatgccctggtgtggtctc

SEQ ID NO: 22750 - DNA, 236 bp, Glycine max
  Clone ID: LIB3106-034-Q1-K1-C7
cccacgcgtccggtcatcgttgatatcaaattttataaaatataaaatactataggtataatagggtaaaaaaaataaagcttgtcggcttggttccatataaatttgatgggtgcggcatcgtgatgtttttgcgttctttcatgttggtataatttgctgcatctcgtgctcttctgcaaattgttgtttattgcatgagttttccaaacgctgtgctgataattttgcagttt

SEQ ID NO: 22751 - DNA, 420 bp, Glycine max
  Clone ID: LIB3106-034-Q1-K1-C8
cccacgcgtccatacacgcttaataatggcctcaaatggctccagggcggttctcgtaaccaggtaagattccgaccagcacctacgtctacccgttgatcatgcttagactgctattgctcctcaggcatccaccgccaccaccgcttacatctcaccttccatcaacacctccacatcggccaccacatatcatacgatctacaccagaaccttttcataggaatcatcctcaacaggatgccagcaaacatgttcacagcaacagactgaaacgtggtacgctcttgaaaacacattcacacatcttgtttaaggagcaggggctatagttgctatctcactatcacaaatgcttgcgagcgccataaactaaccatcattgcttccacagaatatggaggtgaatatgcctgtata

SEQ ID NO: 22752 - DNA, 182 bp, Glycine max
  Clone ID: LIB3106-034-Q1-K1-C9
gcaagacgcatatgcaccttcagaagctagttcgacctactcgacggcgaaaacgtcacacgggcggtagaaacatatagctgcgcctcctcaatcctgaacgtcatcgctatgatcgacttggacaaatcattaccttacgatgaatacacatagagaagatgaacgctgtctatagacca

SEQ ID NO: 22753 - DNA, 215 bp, Glycine max
  Clone ID: LIB3106-034-Q1-K1-D1
tgcttgccacgtggtgacatgagaaattctgggagttgtgtattgaagtgagcaagctgctggtgctggagtttaagggtgatggtttattggcagggttacatgagtttgtgatggtgcgttactgtgtttctttaggtttgaataaatgatatttacttttttcaaaaaaaaaaaaatttatcaagctagaaaggggaaaaataatacatttt

SEQ ID NO: 22754 - DNA, 448 bp, Glycine max
  unsure at all n locations
  Clone ID: LIB3106-034-Q1-K1-D10
aaaagaacgcagaaactgaaataaaaaatggcagaacccaaggttgaatacgatcgtcaactcagaatatggggtgaacaaggacaggcagcccttgagaagtctagtatttgcttacttaactgtggtcctactggttctgaaacacttaagaatcttgttcttggtggggttggaagcatcactgtagttgatggatctaaagttgaagcgggagacctcggaaacaattttttggtggatgaagcaagtcttgggaagtcaaaggcaaaatgtgtatgctcatttcttcaagagctgaatgatgcagttaaagcaaaaattgtagaagagtcttcaaaaccattgattgagacaaatncatcattcttttctcaatttactttgggtgttgcactcagctcatggaaaattcaatgataaagcttgaccaaatctgcagggaggt

SEQ ID NO: 22755 - DNA, 317 bp, Glycine max
  Clone ID: LIB3106-034-Q1-K1-D11
caagtttgccaggataccactttgcgggatgatatctcaatataaccaggcttggacagaaagagaaggcgtcaggaatcttttgaatttggtgggcaaggaagtaagaatggaagggtttttgctgaaaacacatttcaatcgttttggagactttgcaaaagagattgagggccacataaaagaagggaggcttaagcccaagactaaaataaacttcggaattgagagctttttggatagcttgaaactcctgttttctagctctaatattggaaaagtagttattcaagtaataaggcttaagtatgcttgat

SEQ ID NO: 22756 - DNA, 352 bp, Glycine max
  unsure at all n locations
  Clone ID: LIB3106-034-Q1-K1-D12
ctctccaatggccaaagacctcgaaacggagattcaaagtgggttgcctcacaaggactaccacgacccaccccccgccccattctacgaccccgccgagctccgaaagtggtccttcttccgagccctcatcgccgagttcgtcgccaccctcctcttcctctacgtcaccatcctcaccgtcatcggctacaaccaccagacagccaccgccgncgagccctgcagcggcgtcggcgtcctcggcatcgcttgggcctttggaggcatgatttttgtcctcgtctattgcaccgncggcatatcagggggacacataaacccggcggtgacgttcgggttgtttttggcg

SEQ ID NO: 22757 - DNA, 429 bp, Glycine max
  Clone ID: LIB3106-034-Q1-K1-D2
cccacgcgtccgcgcttggataatggaggcatgaagttattccaaagcaaaaattaagtcagtgcctaaagtgcctgaccggacgcgtgggtggactttccccaacttacaatgacattacctgatggtcgtgaagaatctgtcatgaagcgcacaacactagtggctaacacttcaaacatgccagtggctgctcgtgaagcttcaatttatacaggaatcacattagctgagtattttagagatatgggttataatgtcagcatgatggcagattctacatctagatgggcagaagcattgcgtgaaatctctggacggctggcagaaatgcctgcagatagtggatatcctgcataccttgctgcacgtttagcctctatctatgaacgtgctgggaagggtaaatgtctaggaggccctgaacgt

SEQ ID NO: 22758 - DNA, 439 bp, Glycine max
  Clone ID: LIB3106-034-Q1-K1-D3
ttgcctctcagagaagtctccttgaggtcatggctgaatttccatcagccaaacctccaattggtgtcttttttgcagcagttgctcctcgcctgcagcctagattttattcgatctcctcatctccaagaatggtgccaaacagaattcatgttacctgtgcattagtacatgagaaaatgcccaccggaaggattcacaaaggagtgtgttcaacatggatgaagaattctgtaccattggagaaaagccaggactgcagttgggctcctatttttgttaggacctccaactttagactcccttctgataataaagtgcctataatcatgattggtcctggcactggattggctcctttcagaggtttcttgcaagaaagattagctctgaaagaaggaggagctgaactcggcccctcagttttattctttggatg

SEQ ID NO: 22759 - DNA, 459 bp, Glycine max
  Clone ID: LIB3106-034-Q1-K1-D4
cttgttgagttttgaattacgctacacacttcgtactccaacctcaaatccattacctacactgactctgagctttgaaccctgaactccatcgccgtcaaccgccgttttccgccgcttcaaccttctccgtccacttcaggtaattatgaagaattgaagatcatggtttaacaaagtggggtgtgaagagtgtgaagtgtgagctgtttctgtgggaaagttggagggcagaacgtgagaataccttccagagaagtagcaaagcagcaatgaatgaaccaaccctaatattggaggctctaacaactttgaaattaattacatagtgataagccacccatgatcttggctttacaaactcgctttagcataagcagaaatcaacgaattgagtttcttttcttcaaatatggatgagaacatgaaacagttccaaaagaaataacagaactggaa

SEQ ID NO: 22760 - DNA, 432 bp, Glycine max
  Clone ID: LIB3106-034-Q1-K1-D5
gttcacccagagaagcagcagatggaaaaagttactgcagagaggtatcgaaaaaagtaactcggaaatagtttcactctgatcaaaatcaaactgaggtagtgttcaatttctctctcatcgctataatagatcatcgaattacagatctttgaagattccatttagtgtcgaataacaacggaatcaaatcaaatcaaatcaaatcaatctcgattggaattttaggaatcgaggaaggaattagggttagggtaaggattgagaaggcatataggagaagaagtagtagaagaagaagtcaattcaaaatgccggaagaggatttggtggacatcaaatttaggttgtacgatggatctgatatcggacccttcaggtactcctccgctggcaccgtcgatatgcctaagcaaaggattgtctccgatt

SEQ ID NO: 22761 - DNA, 451 bp, Glycine max
  Clone ID: LIB3106-034-Q1-K1-D6
cccacgcgtccgctctttcaagaagcatctgagtatttactattttgtactatatatatatatatatagtcactcaagcttctaggatttgtgccagctacatgaaaatgggaagcaacttcaggtttttgagtctttgcctcttggcattgattgcatcaactcatgctcaacttcagcttggtttttatgccaagagttgcccaaacgctgagcaaatcgttttgaaatttgtccatgaccatatccacaatgctccatcactagcagctgcattgataagaatgcacttccatgactgttttgtaaggggatgtgatgcatcagtccttctgaactcaacaaccaatcaagctgaaaagaatgctcctccaaatctcacagtaagaggctttgacttcattgacagaataaagagccttgttgaggcagaatgccctggtgtggtctc

SEQ ID NO: 22762 - DNA, 418 bp, Glycine max
  Clone ID: LIB3106-034-Q1-K1-D8
cccacgcgtccgagggtttgcagtcactgctctgtttcaccgagtttgggcgtttagatcagaaccaaatcgtgttctcttccattggcaaacatggcaactcaaatgagcaagaagagaaagtttgttgcggacggagtgttctttgccgaactgaacgaggttctgacacgtgaattggcggaggacggttactccggcgtcgaagttagggttacgccgatgcgcaccgagatcatcatcagagccaccagaacccaagccgttctaggtgagaagggaaggagaattagggaacttacctcagtggtgcagaagaggttcaaattccccgaaaacagcgtcgagctttatgctgagaaggtcaacaacagatgcctgtgtgccattgctcatgccgagtcgcttcgctacaagc

SEQ ID NO: 22763 - DNA, 278 bp, Glycine max
  Clone ID: LIB3106-034-Q1-K1-D9
cccacgcgtccggataactagaaacagtgtgatgaaaatgaaggtccttgttttcttcgttgctacaattttggtagcatggcaatgccatgcgtacgatatgttccctctccgaatgaacactggctatggtgcccgtactccggaggtgaaatgcgcaagttggaggcttgctgtggaagcacacaacatctttggctttgagaccattcctgaagagtgcgttgaagcaacaaaggaatacatccatggcgaacaatatagatcagactccaaaa

SEQ ID NO: 22764 - DNA, 358 bp, Glycine max
  Clone ID: LIB3106-034-Q1-K1-C4
ttccaaccttgttagatgcaatgggtatatattgccgctaatggttctctgaaaatggaacgggctaactgtttcactcttatcaggttccaacttcatgtagcgttcaacatctgtctcatggctattgtatagcatccaattactgagcgccgaagatcctacctagtgtctcatatcacctgtgtcaccactaaataccgatctgtccatttaagatcgtagactttatgaatcgaggagcagccaaagagcttgggtaaggaccgagaaagcatataataccctgggggtgcttttaataacttcgtacactataacggccgatgatcattccgtcattacatttacgaagtac

SEQ ID NO: 22765 - DNA, 346 bp, Glycine max
  Clone ID: LIB3106-034-Q1-K1-B11
cccacgcgtccgttcagagatgtgaaaatgcatctctccattatggtggattaggtgtaggggattcatttgctagcgattcagcttcaaccagaaatactacaacctttgtgagtgacgtttcacttccaatgtccatttctgttcctgttttatagtggtaatactcattctcatgtttgttgtgttcccgatttttgttgtaactctattgattctttcattgaaatttaaagtcatcaagtataggaataccagatatgtattctaagacttagagaatgatgcgttgttgagcagttagcttcaacccaattgtaatggagtattgccagaaagaatttaa

SEQ ID NO: 22766 - DNA, 250 bp, Glycine max
  Clone ID: LIB3106-034-Q1-K1-B12
cccacgcgtccggaagaacttgtccattgtgtacaatagggagcgccaggctaagatcactggtgaaattctggaaattgtggctggtgccaatgccttgcaatagtgcaatttgtaggtattgtttacttattataatgatgggtggtggttgcccttttcattttctaatgtggttatctaagacacttgtgcaatttttacgcttctgttgaaacttgaatgaaatgcgcaggctttgtgcaatagg

SEQ ID NO: 22767 - DNA, 444 bp, Glycine max
  Clone ID: LIB3106-034-Q1-K1-B2
caaaaatggcacctgcaacactgtctctgtctctcctcctcctgttctcactcagcatcgccgtaaccgtgagatcgagcgactacgactacgattgtgtgtacactgcatacgttagaaccggttcggtgttgaagggcggaacggactctaagatcgggctgaagctgtacgacaagtacggctactacatctacattaaaaacctcgaagcatggggcggcttgatgggcaagggctacgactacttcgagcgcggcaacctcgacatcttcagcggaaggggaccctgtcttgacggacccgtctgtgccgttaacgttacttctgacggatcgggttctcaccacggctggtaccttaactacgtccaggtcacctacactgggccccacctttcctgcgctcaggatcagtacgaggtggagcagtggttcgctctcg

SEQ ID NO: 22768 - DNA, 454 bp, Glycine max
  Clone ID: LIB3106-034-Q1-K1-B3
cccacgcgtccgctgaaattttcagtaacccaaaggtccaagcagaagttccatggtatggaatagaacaagagtacaccttacttcaaacaaatgtgaaatggccattaggttggcccgttggtggctatcctggtcctcagggtccttattattgcagcgctggggcagacaagtcatttggacgtgacatatctgatgctcattacaaggcttgcttatatgctggaattaacatcagtggtaccaatggggaggttatgcctgggcagtgggagtaccaagttggtcctagtgtaggtattgaggctggtgatcatatctgggcttcaaggtacatcctcgagagaattaccgagcaagctggtgttgtgctctctcttgatccaaaaccaataaagggtgactggaatggagcaggatgccacaccaattacagtacaaagagcatgag

SEQ ID NO: 22769 - DNA, 274 bp, Glycine max
  Clone ID: LIB3106-034-Q1-K1-B4
cggacgcgtgggctgacgcgtgggcagacgcttggggtgctcctgggtatgggtatggtccagctagtagtggcattgcttatggtgcatatggaagatatggacgtgccactgctgggtatggtggacctgctgctgctacatatgggaatcctaatgtgcctaatgctgcttatgctggtggtccaccaggtggcccaaggagtacatggcctgctcaagctccgtctggatatggatctataggctatgggaacacttccgcttggtgtgc

SEQ ID NO: 22770 - DNA, 417 bp, Glycine max
  unsure at all n locations
  Clone ID: LIB3106-034-Q1-K1-B5
cgaagagtgaagaaagatgcttccctcatttctaagcctggtgtcagtgtacagcctctacctccgacgctgcttcacgggcgcggggctctcatcgcagacgcttagagtggacgacgaatccacgctccacttctgggccccgacaaacccaacggcccagaagccttccctggttctgatccacgggtttgggccggagtccatatggcagtggcgcaaacaggtccaattcttagcccctcacttcaacgtgtacgttccggacctaatattcttcggaggatcgagcaccaagtccagcgaaaggagcgaaacgtttcaggcagcgtcggtggggaagcttttggacaagtgggaggttgagaagttncacgtggtggggacgagttatgggggcatggtggcttacaattt

SEQ ID NO: 22771 - DNA, 455 bp, Glycine max
  Clone ID: LIB3106-034-Q1-K1-B6
caaagcttgcttcagatgctctcactgcaaaggaacattaaagctgagcaactattcctcaatggaaggcgttctttactgcacgcctcactatgagcagctcttcaaggagagcggctccttcagcaagaacttccagtcacctgcaaagctagctgataagacaactcctgagctgacaaggtctcctagtaaagctgcgagcatgttttctggcacacaagaaaagtgtgccacatgtggcaaaactgcttatccattagagaacgtaacagtggaagggcaggcctatcacaaatcatgtttcaagtgttcacatggtggatgtcccataacgccatcaaattatgcaccccttgaaggcattttgtattgcaagcaccacttctcccagctttttaaggagaaagggagctataatcatcttactaagtctgcatcagtcaaacgggcag

SEQ ID NO: 22772 - DNA, 221 bp, Glycine max
  Clone ID: LIB3106-034-Q1-K1-B7
gatagagcgatgaattccttgtcactcatctttgcgaacaacagtatgcagctaactgtgagtggaaggggaaatgatctatacggctcaataacttcaaacatttaacgatggagtgtacttaacccataacttgttgacgcctgctgagactgatgatcagacaactacacatgcttaaggaggcactaattaatcaggaatcatttcctctggctgac

SEQ ID NO: 22773 - DNA, 442 bp, Glycine max
  Clone ID: LIB3106-034-Q1-K1-B8
gtcacattcacataataataaaaaaatggcatcggcggcggctgtgacggtgctactcccacctaggattccgaccaccaccaacgttacccgctgctctgctttgccttctctacctcctcgcgtctacaacaccaaaaccactttgttctcacctttcctcaacaacttttcagtgtccggaaaatcttctatgcttcagaccagatcttcttcagaggaatcatcctcatgtgatgccaatgaggcgttcacagattcgaaggaaaagtgggatgctcttgaaaacaagtacacagtacttctttatggtggagaggctatagttgctattgggctatcgccaattctcgagagcgccgtcaactcagttccctttggtgcaaagatcatggaagtggaagggcttggatacactgtatggctagtctaccgatacctt

SEQ ID NO: 22774 - DNA, 323 bp, Glycine max
  Clone ID: LIB3106-034-Q1-K1-B9
agtagttgagaactaagaagaaggaaatggcttcctcaatgatctcctccccagctgttaccaccgtcaaccgtgccggtgccggcatggttgctccattcaccggcctcaaatccatggctggcttccccacgaggaagaccaacaatgacattacctccattgctagcaacggtggaagagtacaatgcatgcaggtgtggccaccaattggcaagaagaagttcgagactctttcctacttgccagacctcgatgatgcccaattggcaaaggaagtcgaataccttctagggaaaggatggattccttgcttggaattc

SEQ ID NO: 22775 - DNA, 458 bp, Glycine max
  Clone ID: LIB3106-034-Q1-K1-C1
attctctatcactcttcaccttcctctgcgcaatttgtgcgcactccgtcgccgtcacctccgcggcatatccttccatccccggcacggaaaccggagagtgctccctccgcggcgtcggcgtcggcgacggtgttctggtccctccgcggcgagaagtgtacgaggaggggcgaatcttcgacatcacccacaggtatgtccccgagatgccggtgtgggactcgacggaggggctcgggcagcacttcctgtggctcgaaaagagcatgaagaatggctcgcgcgctaacaactccaacatgaagctcggtgttcacaccggcacccatgtcgacgcgcccggtcacttttacgacaattactacgacgccggcttcgatgttgactcactcgacctaacactcctcaatggccttgcacttttggttgatgttccacgggataaaaacattact

SEQ ID NO: 22776 - DNA, 469 bp, Glycine max
  Clone ID: LIB3106-034-Q1-K1-C10
tgccttcatggccaagccagtgtccattgaggtatggaacccaagtggcaaatacagagttgttagcaccaaaccaatgcctggaactcgttggatcaatcttctcgttcaaaatgatgttcgccttgaaatatgtaccgagaagaaaacgattctgtcagttgaagacatcattgctttgattggtgataagtgtgatggagttattggacagctgactgaagactggggagaacagttgttctctactttgagcaaagccggaggcaaagctttcagtaacatggctgttggttataacaacgtggatgttgatgctgcaaacaagtatggtgttgctgttggaaatactcctggagtgctcactgagacaacagctgagttggcagcttcattgtctttggcagctgctagaaggatagttgaggcagatgagttcatgagggcaggattatatgatggatggcta

SEQ ID NO: 22777 - DNA, 462 bp, Glycine max
  unsure at all n locations
  Clone ID: LIB3106-034-Q1-K1-C11
gttgttggctgtgcgatcactcatctcacctcttctcatcaacgctgcgaaagacaatggagctgacaccccagcagctgagccaatacaacggcacggacccatcgaagccgatctacgtggcggtgaagggccgcgtctacgacgtcaccaccggaaaatccttttacggccccggcggcccctacgccatgttcgccggcaaagacgccagcagagccctggcgaagatgagcaagaacgacgacgacatctnccnctccctcgacggcctctccgacaaggagatcggcgttctcaacgactgggagaacaaattccaagctaagtaccctgtcgttgctcgggttctcaattaatcatatgataacctaagtggattttgtacctcatcatgtgagtggcatgatctctttctgtaaccgaactcaatcaccctttaatccctaataatattaataa

SEQ ID NO: 22778 - DNA, 308 bp, Glycine max
  Clone ID: LIB3106-034-Q1-K1-C12
gagaaaaaagaaaagaatacaaactctatacaaaaaaggaggaaatggggttgatcaaagcagcaattggagatggagttttaacatcaatgtgggttttcatgatctcaacattgaggattgtcacaactgaggtggcacttttccttggcctccaacctctttcacttgcaggcctcataatcagcaccatcctaaacagtttctatgtcctcaccataagcttcattggaagaatcttaggtggtgcaaacttcaacccttcaacaagtctttcattctacactgcagggttgaggcctgactca

SEQ ID NO: 22779 - DNA, 237 bp, Glycine max
  Clone ID: LIB3106-034-Q1-K1-C2
attacctcgcataacattttctgctttattttacatttaaattttcttttgtaaatgacatgggagagggtttgatgtttaatcccttgtcatatgtacagtaagcatgaatgattccttttttgatattttccaccctttcattgacgggaactgtactgtaattataaaacatgtttattctcttttaagttttactattttcttcctaaaaaaaaaaaaactaaaaaaaagagc

SEQ ID NO: 22780 - DNA, 424 bp, Glycine max
  Clone ID: LIB3106-034-Q1-K1-C3
tgaagtaccagagaatcttgagaggttcaaagagtcagaactcattcactgcagatgggccatgcttgctgttccagggattttggttccagaggcatcgggcttaagcaactgggtaaaggctcatgaatgggcagcagttcctgggggccaagctacctacctaggcaatccagttccatggggcaccctacccaccattctggccattgaattccttgctatttcctttgtggagcaccaaaggagcatggagaaggacccagagaagaagaaataccctggtggtgcttttgatcctttgggatactctaaggaccctaaaacattccatgaatacaaagtcaaagaacttaagaatggacgtcttgctctgttggcttttgtgggattctgtgttcaacaatcagcttatcccggcact

SEQ ID NO: 22781 - DNA, 439 bp, Glycine max
  unsure at all n locations
  Clone ID: LIB3106-034-Q1-K1-B10
aggaaacaaaaccaacccttttgagcttgcacaactctgatggtagttgcacaactacttcagactctctctctctgagtgcctcaccacacagattctgtgatataccaatggaggccctcaatgctgctggcttgacccctctatctgtgctctctgatagaacaaaaacaagaactaaacacccttctgtttctgcatgcaaagtctcaaacttttccacctccaccaacaagaaacaagcattgctgcaaagttgcatatcaaaaactttgcatggngggctgattcttgcagcttcggctgttaatggtggagctgccacagccttaacgtacgatgaggcactgggacaactcttgagcctccctggtactggggaccttgatgtgaatggcttttgtgagagtgtcgctggctttgcagctgagaaccctgc

SEQ ID NO: 22782 - DNA, 274 bp, Glycine max
  Clone ID: LIB3106-033-Q1-K1-H7
cccacgcgtccgctcaatgtgaatttgggccgaacacccgtctctctccgggacagttctggtgtgcagagtacactactcttctccatcaacaaccaccaccagattctcgtttaggtcattcttctctctcccttcgcactcaacaatgtcattcttctctctttccataccctaaaaccgaaaagtgttccacttttctcctctcacacacattcccccaattccccctttcttccaccgttatgtcgggccggaaccgcggacaacccct

SEQ ID NO: 22783 - DNA, 346 bp, Glycine max
  Clone ID: LIB3106-033-Q1-K1-H8
caattttctagggtttatacaattttcgatggcttcttcagatgttgagtaccgttgctttgtcggtgggctcgcttgggccactgacgaccaagctctcgagagagccttctctcagtacggcgaaatcgttgaaacgaagattatcaacgatcgtgagactggaagatccaggggttttggatttgtgaccttcgcctcggagcagtccatgaaagacgccatcgaagggatgaacggccaaaaccttgacggccgtaacatcactgttaacgaagctcagtcccgtggtggcggtggcggcggaggctgtggacgtggtggatattggtcgggtcgcggtggt

SEQ ID NO: 22784 - DNA, 448 bp, Glycine max
  unsure at all n locations
  Clone ID: LIB3106-033-Q1-K1-H9
ggcatcgcttcgaagcctcttcacgtctacgccaaacccacctacgagtgcgcgtggttctgactcgccggaaacaacaaaaaagtttcctccaccgtcggttacaagatcctccccgactggggctacggccacgtctacaccgtcgtcatcgtgaactgcacctttccgggacccttaaacgccgacaactccggcgggaagctcgtcctcttcgcctccacctncggtggcggcgacgccagcttcaacaccactgatagaatcgaagctctcacggaacaacctcgcaccgctcgacacaacctttgttcttcttcgaaagccccaaatacgattaccttgtactttggggtctttcgctctacggggaaccttgaacccgcaaccgcgttgaaggaagtgcgatcggcgtaaccacgtgaaacgttcttcgggacccaaaatc

SEQ ID NO: 22785 - DNA, 385 bp, Glycine max
  Clone ID: LIB3106-034-Q1-K1-A1
atccgtatcatcggatgaagccggtggcgtcttcattcttagcctctcgaagctccttcaacgcctgagaagcaaatggcttcgtcaatgatctctgccccagctggtaccactgtcaaccgtgccggtgccggcatggttgctacattcactggcctcaagttcatggctggttttcgcaccaggaagaccaacagtgtcattacctgcattgctagcaacggcggaagagtgcaatgcatgcaggcgtggccaccagttggcacgaagaagactgagactctttcctacctgccagaccttgatgatgcacaattggcataggaagtataataccttcttaggaagggatggattccttgcttgtaattcgagctggagcacg

SEQ ID NO: 22786 - DNA, 367 bp, Glycine max
  Clone ID: LIB3106-034-Q1-K1-A10
aggagctcaaactgcgtttagaggctttggagcaggaagcacagcttagagaagatctcaatgaggcattgaaggaagaactgcagcgccttagggcacaaagtactcgtttgggtgctattggtggtaacccttcttttggtgggatattcaaccagttggcttcccaattagccatgcaacagttgtctaattctgcaccccatcagcagacacaacaccagccacaggttggcatgcctcctcctccctctggacagaaccaccctaacttcatggacttcaatcagcagaagtaactcataatagcagtagcagtaaatgattgattacatgaatgtataactggtgagacttgtgaaggtat

SEQ ID NO: 22787 - DNA, 333 bp, Glycine max
  Clone ID: LIB3106-034-Q1-K1-A11
ccaaaacgcatacacactctcaaaaactctttctccttcttctataaactgtaactgttttggtctctcccagatcttcggcgcagaaaaaggttctcgaatttcatcgcttcctcctttcgcgatgatgctatagtagaagaagaagacaaagagagaaaaaaaaatggacgatagaggtagctcattcatcactgttaggagaattccccacggagaaacctgccattcaaattctgctgaggttgtggtagggtcagccgcatggcttgggcgaggtctgtcttgtgtctgtgtacaaagaagagatagtgatgcttctaacactttcga

SEQ ID NO: 22788 - DNA, 386 bp, Glycine max
  Clone ID: LIB3106-034-Q1-K1-A12
gaaggtcttctcttggcctccacagcatagcttctactcctcggatacgaatccgtcacacccttttcagagtcatagggcttatcctcctcaatcctcgccatcccaacactgctagacttgggcaaattattacctttcgatgagttcgcatgttgttgttgttgttgtttgaggaccaaatccatgtcgattcgattcgccaaggttctcgcggacgcggccctgagaagctccgcataatcctcgctgacaacctcggacctcgtcgacgtggccacgctgtggctcctcgagaaccttcccgcgccttctgtggggtcgccgccgtagtagctcacgtgctggccgcagttcgttatgctccgcacgtacatgtcacgtgc

SEQ ID NO: 22789 - DNA, 414 bp, Glycine max
  Clone ID: LIB3106-034-Q1-K1-A2
gttttcttcagaaaatttgccatcgttgagggaagcgcgagagccttcgttgttcaagatgagagctaagtggaagaagaagcgcatgaggaggttgaagaggaagcgccgaaagatgagacaaagatctaagtaggtgcttgaacaaggagtggagatgatgtgcttttccatctgctaccagcttcatgacattttatgctgtcatggctcttatgatgatcttgaggtctagtggcgaggggagcttccatcttgactttagtttagctttactggtctaaagattgctgttttagtgtgggttaagttatgatattgagagttttgtgttatctaattatgtactggtacgttttgtatactttttggtttatcttaatagcttaaatattagtattttgagacgtgcat

SEQ ID NO: 22790 - DNA, 451 bp, Glycine max
  Clone ID: LIB3106-034-Q1-K1-A3
atttcttccttgccactgccagtgtgtcaccaccatggccaccgtcacaacccaagcctccggcgcgattttccggccatgtgcctcgaaatcgaggtttctgaccggctcttccggtaaactcaaccgggaagtgactatgaggccaatggggtgccctccttctgcctctttcaaggttgaagccaagaagggagagtggttacctggcttggcctccccaacttacctcaatggcactcttcctggtgacaatggatttgaccctctgggactagctgaggacccagagaacttgaggtggtacgttcaagccgagcttgtgaatggacgttgggccatgttgggtgttgcaggaatgctacttcctgaggttttcaccaagattggaatcatcaatgcccctcaatggtatgatgcttggaaatcggagtactttgcttcatcgtcg

SEQ ID NO: 22791 - DNA, 191 bp, Glycine max
  Clone ID: LIB3106-034-Q1-K1-A4
agcagatctttcaagaatggcacaaattaacaacatggctcaagggatacaaacccttaatcccaattccaatttccataaaccccgatgttcctaatctgttgtttaattgtgcatatgttgtatgtacttgaagtacacttgacaacaagaaagtccaataaatatgatatatgttcgtcctttcttcc

SEQ ID NO: 22792 - DNA, 393 bp, Glycine max
  Clone ID: LIB3106-034-Q1-K1-A5
atgatgcgagcgccgcccttgcaacttctgatttgttctctctctgtccctagccttctttgtagtgctactgaccaaggcaaactcaaccaacaccggttctttcaccgtcagcaagacttccccacgccaacaaaaccttatcttccaaggagatgctgctatctcaccctccggggtgttacgactcaccaaggttgacagcatcgacgtgccaacgacgggatccctatgacgtgccctttatgctaccccaatccagatttgggacagtgaaacaagcaaggtagctagctggactacatcggttaaattcaaagttttctcgcccaacaagacggccgacgggctttgcttcttccttgcgccccgtcgggtccaagccccaatcca

SEQ ID NO: 22793 - DNA, 454 bp, Glycine max
  Clone ID: LIB3106-034-Q1-K1-A6
cgaagagtgaagaaagatgcttccctcatttctaagcctggtgtcagtgtacagcctctacctgcgacgctgcttcacgggcgcggggctctcatcgcagacgcttagagtggacgacgaatccacgctccacttctgggccccgacaaacccaacggcccagaagccttccctggttctgatccacgggtttgggccggagtccatatggcagtggcgcaaacaggtccaattcttagcccctcacttcaacgtgtacgttccggacctaatattcttcggaggatcgagcaccaagtccagcgaaaggagcgaaacgtttcaggcagcgtcggtggggaagcttttggacaagttggaggttgagaagttccacgtggtggggacgagttatgggggcatggtggcttacaatttggccaagatgttgggtgaagacagggtgcaaaaagtg

SEQ ID NO: 22794 - DNA, 415 bp, Glycine max
  Clone ID: LIB3106-034-Q1-K1-A7
gtgacttgagaatggccttgccagtggtcgtcgacgcagagtacctcaaagaggtcgacaaggctcgccgcgatctccgcgcactcatcgctaacaggaactgcgctcctctcatgcttcgattggcctggcacgatgccggaacttacgatgctaagaccaagactggtggacctaacggttcgatccgtaacgaggaagagtattctcacggcgccaacaatggcttgaagaaggctattgatttctgtgaggaagtgaaggaaaaacatcctaaaattacatatgcagatctctaccagcttgcgggtgttgttgcagttgaggttaccgggggtcccacaattgatttcgctcctggtagaagggattcaaaaatatctcctaatgaaagggcggctcctgatgctaaaaa

SEQ ID NO: 22795 - DNA, 455 bp, Glycine max
  Clone ID: LIB3106-034-Q1-K1-A8
ctcacgcgtacgtccacccgtgcggacggcttccaccagcgctgattaattgatcttgcgattgcctgcaggactttcgctcgactttaactcttagcatcagacctcaacacataccgtggcccacagacgctgctgacgcaggtttgcgtcgagacctccttcggtctgacccgtgcatggatgtgcatggatggggaacgaatgacatacgagttttattgacacgggttgcggctaatgtgtgcctatgcttcctcattcatgagcttggattactgggtcaagctaatgaatagggtgtgcatgggcgaaagagctttgataagctgcagacaacgacctgatttgctcaagactcagatgaaggggtgaagacggctgtgcagaacctgtgaggagagttggtgaaacactatggggctctaaacgtgatgtaaagcatgctgatgatg

SEQ ID NO: 22796 - DNA, 415 bp, Glycine max
  unsure at all n locations
  Clone ID: LIB3106-034-Q1-K1-B1
agaaaagcttacaagaaagctttcaaaaaggaggagattgggaatgtgatgactcttctaattggatcagctgctggtgcaatttcgagtagtgcaacatttccacttgaggtggctcgtaagcatatgcaagctggggctctaaatggaagacaatatgggaacatgcttcatgcacttgtgagtatacttgaaaaggaaggagttggtggcttgtatagaggtttgggaccaagttgcttaaaattggttcctgctgctgggatttctttcatgtgctacgaagcttgcaagaggatacttgttgaaaatgaacaagattaattacaagtggatcactgcatattctttccatgggatatatnggcattgntttgtgtttatgaagagggaaataatttgtcgagctaatttt

SEQ ID NO: 22797 - DNA, 338 bp, Glycine max
  Clone ID: LIB3106-033-Q1-K1-H6
aaaaaaaaaaaaaaaaaaaacaaagcatttttttttttgccgcaatcaatcaataactgtcggcgacatatccgaatcaccgttgcagtctcacgtttcctctaactgtttttctcgggctccgagctcgccggagctaacattcacggcggcgcaccgtccatttcttcaccctcactcaaaatgcagtgccaccgcgtctccgccgtgctttttctaagcttatgctttagaattgcgctagtatacgcgcaaggagagcctcatctcactgctctggaccaacattggttcccgggaaccgccacgtggtacggcgacccccgaaagtgacggta

SEQ ID NO: 22798 - DNA, 403 bp, Glycine max
  Clone ID: LIB3106-033-Q1-K1-G10
gaatattttgggatggaactttcaaacattgatttattgtctccaaattttgctccctgcgggggagagacgaagacgttgttgggttgacttgggtctggattggatttctaatctaatctataccttgcttttgactatgctatgaacgcacaaatacttgtcccttctctcttctttcttcttcttctcctgacccttattattattccttgcccttacccttcaggcaaaggaaggaagaaagaatctctatattattatctttattgtaatctatctttgtattataatcatgactataagtattgtggatattataacttaaatatggatttctcgagtctctccaacgattcggttgttggatttaaagacaaggagaccatggttgaaccctttt

SEQ ID NO: 22799 - DNA, 148 bp, Glycine max
  Clone ID: LIB3106-033-Q1-K1-G11
gaaacatattggattgcacaccctatgatagctatatcatcagccctatgtgggcaatgagggccagcaacaaccatgtttgtgaattcacctcttgcataagaggaaaccttagcgactatgcacctaacatttgactatgacatgt

SEQ ID NO: 22800 - DNA, 454 bp, Glycine max
  Clone ID: LIB3106-033-Q1-K1-G12
agccactctaaagaaaatggcggtgcctctactctcgaagaagatcgtgaagaagagggtgaagaagttcaagaggcctcagagtgacaggaaaatttctgtcaagacaaactggcgcagaccaaagggtatcgattcccgtgttaggagaaagttcaagggatgcactttgatgccaaacattggttatggttcagacaagaagacccgccactatctccctaatggttttaagaaatttgttgttcacaatgtgaaggacttggaactgctcatgatgcacaacaggacttactgtgctgagattgcccacaatatatccacaagaaagaggaaagatatagttgagagagccgcgcagcttgatgttgttgtgacaaacaaaacagccagattacgcagccaggaggatgaatagtctaaatgactaaaaaagtcacttatctgtagtgat

SEQ ID NO: 22801 - DNA, 270 bp, Glycine max
  Clone ID: LIB3106-033-Q1-K1-G2
cgccattttacactcttttgttctgtggctaagccgtctctctcactcaactttgcttctgcatatatttctatgagtcatgagttatgagttattcttcagccactcgtggcttggttcattgtgtgtctctctcagttgaatccaatgagaattccccatgctcccttcctttccttcatattctgctactgcttcttgatacaccacagtgcttactacaccggggtaaaagcccaaattgatcaggatcaacgacgatcattgctc

SEQ ID NO: 22802 - DNA, 281 bp, Glycine max
  Clone ID: LIB3106-033-Q1-K1-G3
ctctctctctctctctcattcacacgaatcacactctccacagtgcgattcattcaccaatggatcgcaacggtgatctctctcttgcattcatctgcattgtagtcgccggcgtcggaggccagtctcccgccgcagcgccctcgaacactccggcaacccccgccgacgccactcccgcccaatcaccttccacaccgaattcaccagccccagttgcttctcccaaatcatctccaccagcttcgactcctaagcccgcaaccgcaacccctgcttcg

SEQ ID NO: 22803 - DNA, 371 bp, Glycine max
  Clone ID: LIB3106-033-Q1-K1-G4
ctgacgcgtgggcatttttcacaccaccaagccaacagaagatgtttctccacattgttggggtccgttcccttctctcatccactgcccatgccactgtccaagacttctgtgtggcagaccttaagggtgcagacaccccttcaggctacccctgcaagccacctgcagatgtaacttcagatgactttgtgtacacaggcttagctgaagctgctgatgtcacaaacataatcaatgctgctgtgaccccagcttttgatgctcaattcccaggtctcaatggccttgacctctctgcagcaagattagaccttggtgctggtggtgttatcccactgcacactcacactggtgccaatgaactactc

SEQ ID NO: 22804 - DNA, 320 bp, Glycine max
  Clone ID: LIB3106-033-Q1-K1-G5
accacgcgttcgctcattggttccctttgttccaggggaatgctcgattcagctcttgaatggaagaaccagttgctgaaagaaaactgcaagcccaccgtcgttacttacactattttaatagaagcatctcttttgcagggtgggattgatgaagcaatgaagctcttggatgagatgttggaaattaatcttgaacctgatatgttcacttacaactgcatcataaggcgtatgtgcagagaaggatacgtggatcgtgcgtatcataatattagcagcataagtggcagggctatccccggatgtcatacttaata

SEQ ID NO: 22805 - DNA, 424 bp, Glycine max
  Clone ID: LIB3106-033-Q1-K1-G6
caacaaaggagtatcgctctgttgttttcaaagaacctcgtgctgttgaatattggggatgtgcagctcctgagttggagtatggaataatgaacattggcagtcgctcataatagcgaaagccaagcgtctgaattgaatcactacatgctattacttggatacttgcatggacacatacgaggtttcatttgccagcgtggcttggtcacgtaccactacttaagcatgtacttgagaaagatccgatgaatgtacagatgctttaggacatgtacaagcaatggactctcttcatggtcaccctgaacttggacgtaatggcgtttgcttaaggagacctcggaatttgagtcctatttgactaactactaatatcagaatagcttcgttcaaatggggtaaatttaatagctttttacgt

SEQ ID NO: 22806 - DNA, 271 bp, Glycine max
  Clone ID: LIB3106-033-Q1-K1-G7
cccacgcgtccgggtgtacaacgcgctcggtgagaaggagaagaggtttcaaatcttcaagcgcaatctgcgcattatcgatgaacgaaactctctgaaccgaacctacaagttgggactcaacgtgttcgctgatctcaccaatgcggagtacagagccatgtacctgcgaaccttggacgagggtccgaggttgggcttggatacgccgtcaagaaaccactacgtgccacgtgttggagataacataccctgatcccgtgattggagg

SEQ ID NO: 22807 - DNA, 379 bp, Glycine max
  Clone ID: LIB3106-033-Q1-K1-G8
gtaacttgagccacattccgtccctggtggactcaagaagagtctatcataggacagttgggattatagcttgcaaaaagggttcactagctaacattgcaatggcctcaacctcttatgctctcactatatactcttcttccacccttcttgatggcaaggctccaagacagtcaccagctgctttccctcaatgtgtgagccttcccccttcccctttgcactctcagaaccgttcatggaagaccactgcttattgtcgcaaggttgctcgaaaagttatggcaatggccacaagagaggcaccagctgaagctaccccaactgaggtgccagagattgtcaagactcttcaagaaacttgggacaaaggtgatga

SEQ ID NO: 22808 - DNA, 443 bp, Glycine max
  Clone ID: LIB3106-033-Q1-K1-G9
accttgctttacttggaaagctgtgtcctcggattcagcatgttgaattgagtggacttcagggagtaacagatgcagggtttcttccactgctggagagctctgaggctggtctggttaaagttaatctaagtggttgtgtaaatctgacggacagagtagttttgtccatggttaactcacatggatggactctcgaggtgctaagccttgatggttgtaaaagagtcagtgatgctagcttgatggctattgcaagtaagtgcccagtgctcgctgatctcgatgtttccaagtgtgcaatcactgatactggtatcgcagcccttgcccgaagaaaacaagtcaacctggaggtactttctttggcaagttgcgcattggtttcagacaagagcgtgcctgcattgaaaaaattgggcccgtcccttgctggattaaat

SEQ ID NO: 22809 - DNA, 285 bp, Glycine max
  Clone ID: LIB3106-033-Q1-K1-H1
cacacgcgtacgcaaatcttctccccactttcaatgcctacactcttaccctttctttcagcgtaggcttacactaactctcacacgtgccttcttcaacccccacacgcttcagtcgctatgtgtacgccgctgacaccaccgttcatgccgcccctaccactcaccatcctgagaagctaggagctgatgatgagccgtcggtacaaccgagacttgcgatgaagctcatatggatggagatgaacattggaaatgcgcttgaccagatggtaccgggcacat

SEQ ID NO: 22810 - DNA, 458 bp, Glycine max
  Clone ID: LIB3106-033-Q1-K1-H11
cccacgcgtccgagacaccgacagacccctttggtatccgggcgccaaagcgcccgaataccgcgatgggagtcttgtcggagactacgggttcgatccgtttgggctagggaagcccgcggagtacctgcagttcgagctggactcgctggaccagaaccttgcgaagaacgtggctggggacatcattggaaccaggaccgagctcgcggacgtgaagtccacgccgtttcagccctacagcgaggtgtttgggctccagaagttccgtgagtgcgaactcatccatggaaggtgggccatgctcgccactctcggagctctcactggtgagtggctcactggtgttacatggcaagacgccggaaaggtggagctagtagaagggtcatcataccttgggcaaccacttgcattctcaatcaccacactgatctggatcgaggtactcgtaattg

SEQ ID NO: 22811 - DNA, 427 bp, Glycine max
  Clone ID: LIB3106-033-Q1-K1-H12
cggacgcgtgggcggacgcgtgggcggacgcgtgggcggacgcgtgggcggacgcgtgggcggacgcgtgggtttggaagcttcacttctttcttgtattacttgatgcccttttcccttctctccctccctcttctcttattctcattgtttagttacctaccgtggatcaaagtcaattccctatctcgcttctttttgtagttgatttcttttgggtttcgcagtctccccaaaagggttgtttttattttgttctaaaattttgtaatttttgcttggacttgtgataaaaaaaatttgattttttagatcgattcgttgatgggtcatgctggggtgttgttaattggtggaatggctaattgaaattctgttggtgatttgttgggaaaaaatgggggatcaaggtggtttacgtggtaat

SEQ ID NO: 22812 - DNA, 336 bp, Glycine max
  Clone ID: LIB3106-033-Q1-K1-H2
cccacgcgtacgctctgctcgtgcctctagggttatcatatctccatttccatttcctctgtctcaggttccaagaatcttaagctatgggaaagtcttacccaaccgtgagcgctgattaccagaaggccgttgagaaggcgaagaagaagctcataggcttcatcgctgagaagagatgcgctcctctaatgctccgtttggcgtacgctctgctttccatttaactttagatcactgttatgtacgactctgaggatgttgactgtcggtttgacacgttttggtacgtttcgtgagcagatggcactctgctggaacttacgacgtgagctc

SEQ ID NO: 22813 - DNA, 60 bp, Glycine max
  Clone ID: LIB3106-033-Q1-K1-H3
cccacgcgtacgctaaggttttacctagaacattaggatctatgcatctgcatctatact

SEQ ID NO: 22814 - DNA, 267 bp, Glycine max
  Clone ID: LIB3106-033-Q1-K1-H4
cccacgcgtccgcaaagcctacacctataaccctaggtgatatgattctccatatagactgcgtcgggtcccacgtatcatccactgcacacagccactgaccaacactactgcgcaccagaccataaggctgcatacaccccataaggatacctctgcgagccacactgctaagaaacatacattacgtctatgacccagacttatctgaacctgctgatcttacacactgaatcaatgctgctatgaacacagattttgttgatc

SEQ ID NO: 22815 - DNA, 432 bp, Glycine max
  unsure at all n locations
  Clone ID: LIB3106-033-Q1-K1-F9
gattcagtgattcctctgttcagagtgatatcaaattgtggcctttcaaggtcattcctggtgctgctgacaagccaatgatcgtggttaactacaagggtgaagagaagcaatttgccgcagaagaaatctcttccatggtgctcatcaagatgcgtgagattgctgaggcttacctaggctccacagtgaagaatgctgttgtcaccgtccctgcttacttcaatgattctcagcgtcaagctaccaaagacgctggtgtcattgctggtctaaatgtgatgcgaattatcaatgagcctactgcagctgccattgcatatggtcttgataagaaagccacgagtgttggtgagaagaatgtgttgatttttgaccttggtggtgggacatttgatgtgtctttactcaccattgangaaggtatctttg

SEQ ID NO: 22816 - DNA, 222 bp, Glycine max
  Clone ID: LIB3106-033-Q1-K1-H5
gcgctttctgcaaaccgaacatttcatctccaaagggatcaacaggtcgaaggagaaatggggctgacattcacgaagcttttcagccggcttttcgcgaagaaggaaatgcgaattctgatggttggtcttgatgctgctggtaagaccactatcctctacaagctcaagctcggagagatcgttactacaattcctaccattgggttcaatgttgagact

SEQ ID NO: 22817 - DNA, 293 bp, Glycine max
  Clone ID: LIB3106-033-Q1-K1-E3
gatgaaaaggtatctgctgaagatcttgatgctgatttggagaagtatcatgctgaggctatgcaattaaactgaaggaaacaacgatgttctgttttattgctattacatttgcggttgttagggccatgttgatggaacaccgccgaattatgtatctttatcacagtcgtgcttttcggaaaggaaaaggataacttagagtgaaaacttttacagttgatatatgtagtttgggattctgttatgaaatatttgttttcgttgggtatgactatgaaatgtggctgaag

SEQ ID NO: 22818 - DNA, 387 bp, Glycine max
  unsure at all n locations
  Clone ID: LIB3106-033-Q1-K1-E4
attgactcaaagaattttgcatcacctttgaaccaggtgcatagcagaatatggctgatgcattggagtctgttcatcttttttaatcatgacaatgggagaacacaaataattgatctgttcaatcaggacaagtatctaaatgctatccaaactagtgctacacaccttttgcgatacttggccacagcattcattgttaacaagaggaggaggcctcaattcaaagattttattaaagttattcaacaggagcagcattcctataaggaccccatcactgagtttttggctagagtttatgttaactatgactttgatggggcacataagatgatgagggaatgtgaagaagtcatacttaatgatcccttncttgtaaaagag

SEQ ID NO: 22819 - DNA, 274 bp, Glycine max
  Clone ID: LIB3106-033-Q1-K1-E5
ttccttactacaaacttgccactaatgtctccataatcgccatgatctccaaatcggggggggagagcagtcactaggtagacagtgatcggcgatctgcttctactgttactgcatatgctccgacgacgacgatactactttgcatcaggctcaatgtcatgagccataatatgctaccaaaacttaattgggtcccttacacattggtcgatacagacccttgacacataatactgcccatcatgctcgtatgagacaggattagctacga

SEQ ID NO: 22820 - DNA, 286 bp, Glycine max
  Clone ID: LIB3106-033-Q1-K1-E6
tgcgaactaacaagaaggaaatggcttactcaatgatctcctcctcagttgataccaccggaaaccgttccggtgccgtcatggttgctccattcaccggcctcaaatacatggctggcttgcccacgaggaagaccatctatgacattaccttcattgctagcaacggtggaagagtacaatgcatgcaggtgtggccaccaattggcaagaagaagttcgagactctctcctacttgacagatctcgatgatgcccaattggcaaaggaagtcgaataccttct

SEQ ID NO: 22821 - DNA, 399 bp, Glycine max
  Clone ID: LIB3106-033-Q1-K1-E7
gaatccacacaaactcagggtagggcagagagagagagagagagagagagagagagagagaatgggagggtgggctatcgcggtgcatggtggcgctggtgtcgaccctaatctcccactcgagcgccaagaagaagcgaaacaacttctcacgcgctgtctcaatcttggaatctctgctctaaattctaatcttcccgccatagatgtcgtcgaacttgtggtgagggaattggaaacggatccgctgttcaattcaggccgtggatctgccctgacagaaaaaggaacggtggggatgggggcttcatcatggatgtcaaacgacatctgcgcgttcggtctacacgtaaaaccactccttgtgttgtatgcaatccgatctactgcttcggcgaa

SEQ ID NO: 22822 - DNA, 380 bp, Glycine max
  unsure at all n locations
  Clone ID: LIB3106-033-Q1-K1-E8
agcaaatccgtagtgctttaagaataattgctgaattgtgtcaccgtttaagtcacatagtattgtgctgtgcttgagccttaaggtcctgtgttgtatgtatttgcttttatctgcctttatgacgcgttcatgtgaaagtacgatgtaataactgctcacctgagtactgtatgtggtgttttggggtatgatgtatcataatgcttgacttgactctgagaaataattaattcagttatctggttgtcccttgtagtagttcttaagggatgaaatcttcacttgctgnatttctgggttccctttgtaataaatgtttggatattaataaatgtnttatggtatgggttataagaatttggccagaatctttattg

SEQ ID NO: 22823 - DNA, 465 bp, Glycine max
  Clone ID: LIB3106-033-Q1-K1-E9
aaaaaaaaaaaaaaaaaaaaaggaaaaaaaatgaaaaaaaaaaaaaaaaaaattaccaaaaaaggaaaaaaaaaaaaaaaaaaaaaaaaaaaaaaaaaaaaaaaaaaaaaaaaaaaaaaaaaaaaaaaagggcaagtatagggggtgttcgttttttaggttttactttttagaacgtgatctttttttttttttattttttttttattaaattctaatttcattttattgcccgtcattttaaaaaatcttgattggaaaaaccttgttgttttcaaattaattcccttttttgcaatttccttttttgccagttaggttaatagcaaagagctttttacccatttgctttcctaaaattttgaaaagttgaatgcctattggaactgcttttttaacctcggctttaagggtttcgggctttttggttactctaatcgttacctttttatttgcctttgtttt

SEQ ID NO: 22824 - DNA, 52 bp, Glycine max
  Clone ID: LIB3106-033-Q1-K1-F1
gcccagtgtgcgatgggccatgcttggagcactaggatgcatcaccccagag

SEQ ID NO: 22825 - DNA, 360 bp, Glycine max
  Clone ID: LIB3106-033-Q1-K1-F10
agttctagatctttatcacatacagaggaccattttagatctgtgaaaaaaaaaaaattaggggtgaaaataaaaacaaatatgacatctaattaaccttaatcctaactgatacacccaatcttgcgaatcgcatataacatatgtgatcgctccatcatgaattgatcctgacatcctggcacaacctcatctctgatcaattcgtgatcctacataacttatctagtctgcctaaaatggtctcctcacaccttaagctaatgacgaaaacaataaattgattttttacttacaaaccatcttcatgcatacattgataaaggaatacactatattccttatctttaattcctacac

SEQ ID NO: 22826 - DNA, 433 bp, Glycine max
  Clone ID: LIB3106-033-Q1-K1-F11
cccacgcgtccgaccacgcgtacgattaaggttaacaggtatgctcagcagacagatgcaggacagttaacaagaacccttctgcttgaacctcgtgcgactgtaaatgttaaaccgaatcttcagattgtggctgatgatgttaagtgctcccatggagctgctataagcgacctggaagaaagtcaactcttatatttccaagctcgcggcattgacatatagactgctagaagagttctggtttttgcttttgggagtgaggcgatagataagtttccttattcttccattaaagacagaatgcgtcgtagattaaaaatttggtgggatccatattcgattgatcataatttaagggtggaccggatttgaacctttttaacttcccggtaccatggttaaccggaatcaccatggaaattggtttccc

SEQ ID NO: 22827 - DNA, 439 bp, Glycine max
  Clone ID: LIB3106-033-Q1-K1-F12
atgttggtgaaggtgtacggtccaacctatggagcccccaagagggtgctggtgtgtctgatgtgagaaggaaattgagtttgaaacagtacatattgatctcttcaagggagagaataaggaacctgagttcctaaagctgcagccatttggatcacttcctgttattcaagatggtgattatactctctatgaatctcgtgcaataatcagatactttgcagagaagtataaagaccaagggacagacttgttgggaaagacaatagaagaaaaaggtctagtggaacaatggcttgaagtagaagctcataactttcacccaccactctacaatttggttattaatgttctgtttgccccattaacgggtgctccttctgaccaaaaagtgatagaagagagtgataaaaagattgagaaagtgctggatgtttat

SEQ ID NO: 22828 - DNA, 369 bp, Glycine max
  Clone ID: LIB3106-033-Q1-K1-F2
ggaaatgcgaattctgatggttggtcttgatgctgctggtaagaccactatcctgtacaagctcaagctcggagagatcgttaccacaattcctaccatcgggttcaatgttgagactgtggaatacaagaacattagcttcactgtttgggatgttggtggccaggacaagattcgtcccttgaggaggcactactttcagaacacccagggtcttatttttgttgtagacagcaatgatagggacagagttgttgaggccagagatgagttgcataggatgttgaatgaggatgaactgagagatgcagtattgcttgagtttgccaacaaacaagatcttcctaatgcaatgaatgctgctgagat

SEQ ID NO: 22829 - DNA, 272 bp, Glycine max
  Clone ID: LIB3106-033-Q1-K1-F3
cccacgcgtacgcccacgcgtccgacatatctctatatattccctgcatttctgagaatggcgaaggctgcggagaagaagccagcggctgagaagtctccggcgcagaagaagcctaaggcagagcaatagatgccgaatgaaggcggtggcgagaagaagaagaagaggtcgaagaagagcgtggagacctactagagctatatcttgaaggagctgaagcatgtacaccctgacatcgggatttctagcatggccatgggatcatgaca

SEQ ID NO: 22830 - DNA, 391 bp, Glycine max
  unsure at all n locations
  Clone ID: LIB3106-033-Q1-K1-F4
gtgcaatgcatgcaggtgtggccaccagttggcaagaagaagtttgagactctttcctacgtggccagaccttgatgatgcacaattggcaaaggaagtagaatcccttcttaggaagggatggattccttgcttggaattcgagttggagcacggtttcgtgtaccgtgagcacaacaggtcaccaggatactacgatggacgctactggaccatgtggaagctgcctatgtttggttgcactgatgcttctcaggtgttgaaggagcttcaagaggctaagactgcataccccaacggcttcatccgtatcatcggattcgacaacgttcgccaagtgcagtgcatcagcttcatcgnctacaagcccccaggcttcttagtgtgaaaa

SEQ ID NO: 22831 - DNA, 364 bp, Glycine max
  Clone ID: LIB3106-033-Q1-K1-F5
gttcgccactcagagactcaacaaattgcttcgcctttggctctaaagtgactagcagggcgggtgtcctcattctcgtcgagagtatgtcttctctctctgttcagacttcagagtacgcttcctctatcacggtgggtttcattatgccataccactgaagaacgaagtttatctctctcttgtgacttgtgagcacttcaaattgcggagaacagaacctacacactgcattggaagatacaagaatatcatcacattctcctatgcattaactgcagttactcactgaagataacattagaagcattgggcaatacaaatgagcaatttcatctgtggaacctcatcaaaaccaagaaca

SEQ ID NO: 22832 - DNA, 158 bp, Glycine max
  Clone ID: LIB3106-033-Q1-K1-F6
atcacactctcaaagacgcgacaaatttgttagcacttgacacccaagttactactggaggggatgttcccattgccgtctcgagtatgtcagttatcatcgtcgactctacttcatacgcatcctctatgaaggccgtatccatcctgccacccaag

SEQ ID NO: 22833 - DNA, 368 bp, Glycine max
  Clone ID: LIB3106-033-Q1-K1-F7
gaagaaagaatggcagcttgcactgtctactcaacacaatctctgagcacaaattgctccatgtcaaccccatcaaagacgcaactcagttttttccaccaaaagcaggtagttttctggaggaacagcatgaagggcagctgcagcagcagaagaagctatgtgataacatgtgcagcaggtgactcacagacagtggtgattggcctggctgcagactcagggtgtgggaagagcaccttcatgaggaggctgaccagtgtgtttggaggagcagcagagccaccaaagggtggcaaccctgactccaacactctcatcagtgacaccaccacttgcatatgcctggatgattaccaatctttgga

SEQ ID NO: 22834 - DNA, 235 bp, Glycine max
  Clone ID: LIB3106-033-Q1-K1-F8
ctatttttgccgtgtaagcgtgtttacctatctagttggtgatttatatcacgaatctaggaaaggagaacaatgtgatatattctactactatatgtatgttacactaaattacttatatccctagtgtgaattgtgtgaaaaaaagaaataactgctaacctagaatactgtggatagagtgattgccctatgaatggtcataaaagcttgacttgactctcataaatagtaa

SEQ ID NO: 22835 - DNA, 424 bp, Glycine max
  Clone ID: LIB3106-033-Q1-K1-E2
cccacgcgtccgggagctatggcagttgaggttgtgggatttgagatggttcaagggccagtggagaatggtgctaaagaagacatatctatttcagaaaaaactgaaaatgggaaattggaacaagacacaggagttgctgagccaacaaaatttgggtcacatggagatgaatctgctaaaccagaagcaaatgttgtttcagatgccaatgtccccaaagatgcagttgacgattggcctgcgccaaggcagatacattctttttattttgctaggttccggccttatgatgatcccaacattaaagcaaaacttgagaagtatgataaagagattagccaggaaaatccagcacgaattcaggtcactgatgctttaaaggcaaaaaggacagaaccaacaagggggatttcttaaaata

SEQ ID NO: 22836 - DNA, 186 bp, Glycine max
  Clone ID: LIB3106-033-Q1-K1-C6
cccaagcgtacgatctgacctatgttcttactaaaatagctgagttactcacaactgggagggtgacaaggcatcatcaattctttgatcgcacactacgctgagctcctaaagcgtccacgatgactatgatccgaaaactttaaatgaccaacatgctacgcatgtagaagcgaatcttatatg

SEQ ID NO: 22837 - DNA, 321 bp, Glycine max
  Clone ID: LIB3106-033-Q1-K1-C7
gcgaggcatctggtgttattggtgagggatctatagttgcagagcctgttgcaactgcccctgctgcagacacaaaggctggttttgctgacgatgaccatgatgatgatggggatttgttcggggaagagacagaagaagagaagaaggcagcagaagaacgggcagctgcagcgaaggcatctacgaaagaaaaagagtctgggaaatcatctggtctggtggatgtgaaaccatgggacgatgaaactgacatgaaaaagcctcgagaatcagtgagatctgttcagatggaagggttgctttggggtgcattcaaac

SEQ ID NO: 22838 - DNA, 160 bp, Glycine max
  Clone ID: LIB3106-033-Q1-K1-C8
acaacgcattactccgatatcacttgcattctatccttattactcgagctttcattgctgctcataaaaaaaaacttgacttgaaaaatcgaaagacactattatcacaacaaaaacatattacattgcctagcaactaaagatctaaatctacatacca

SEQ ID NO: 22839 - DNA, 457 bp, Glycine max
  Clone ID: LIB3106-033-Q1-K1-C9
cccacgcgtccgtccacgcgtacgcaacagtggactagttggtcttcaacggcaaattatgagagagcaagacgatggccttgagaaattggaggagactgtaatcagtactaaacatattgcattggctgtgaatgaagagctgaatctacataccagactcattgatgacttggaccaacatgtagatgttacagattctcggctgaggagagtgcagaagaacttggcagtgttaaacaaacgtaccaagggtggttgctcctgcttgtgcatgcttttatcagtgattggtatagtgggttttcgtggttgtcatatggctgttggtcaaatatttgtgaagataaaaaatacccaactcgtgaacgttctctttttttcatgtttctgaatgtgcattgaaacatgataacgcgtttctttgttttttcttggtgctttggcagtggcatgg

SEQ ID NO: 22840 - DNA, 237 bp, Glycine max
  Clone ID: LIB3106-033-Q1-K1-D1
tgcatacctatgttcttctttttaaaatttaaagtctttgtattttgtatgtaaagatgtgggatggtgattattaggtggtgcatgtgtcgcgtcatgggccaatgttatcctctgcttttaagttggaagaggcccaactcatgtgtgatgtacggctgtgattgtgtaatttaatttgcaaaatcataaataacaccagagtcatatatatgcatctctttattttctctggcc

SEQ ID NO: 22841 - DNA, 447 bp, Glycine max
  unsure at all n locations
  Clone ID: LIB3106-033-Q1-K1-D10
gtttgttgtgagctataagctagtttatcgtgaggagaatatgaagttgtttgttttctttgttgctgcagtagttttggtagcatggccatgccatggcgcaggctaccaaaggttccctctccgaatgaaaactggctatggtgagcgttcttcggaggtaaaatgcgcaagttttaggcttgctgtggaagcacacaacatccgagcctttaaaaccattcctgaagagtgcgttgaaccaacaaaggactacattaatggcgaacaatttagatcagactctaaaacagttaaccaacaagctttcttttatgctagtgaacgcgaagtccatcacaacgacatatttatattcggcatagataacaccgtactctctaatatcccatactatgaaaaacatggatatggggtggagggacttaantgaaccttatatgatga

SEQ ID NO: 22842 - DNA, 459 bp, Glycine max
  Clone ID: LIB3106-033-Q1-K1-D11
gaagtccatcccaaggacacatttgtgttcagtatagatggcaccgtactctctaatattccgatactacaaaaaacatggatatggggtggagaaatttaactcgaccttgtatgatgaatgggttaacaagggcaatgcaccggcactgcccgagactcttaagaattacaacaagctggtgtctcttggcttcaagattatattcttgtcaggaagaacactggacaaacaggccgtaacagaagcaaacttaaagaaggctggctaccacacatgggaaaaattaattctcaaggatccacaagatccttccactccaaatgcagtttcatacaaaacagcagcgagagagaaactgataaggcagggatacaacattgttgggatcattggagaccaatggagcgatctcctcggaggccacagaggcgaaagcaggacctttaagcttcctaa

SEQ ID NO: 22843 - DNA, 459 bp, Glycine max
  Clone ID: LIB3106-033-Q1-K1-D12
atcgagataactagaaacagtgtgatgaaaatgaaggtccttgttttcttcgttgctacaatgttggtagcatggcaatgccatgcgtacgatatgttccctctccgaatgaacactggctatggtgcccgtactccggaggtgaaatgcgcaagttggaggcttgctgtggaagcacacaacatctttggctttgagaccattcctgaagagtgcgttgaagcaacaaaggaatacatccatggcgaacaatatagatcagactccaaaacagttaaccaacaagcttacttttatgccagagacctcgaagtccatcccaaggacacatttgtgttcagtatagatggcaccgtactctctaatattccatactacaaaaaacatggatatggggtggagaaatttaactcgaccttgtatgatgaatgggttaacaagggcaatgcaccggcactg

SEQ ID NO: 22844 - DNA, 355 bp, Glycine max
  Clone ID: LIB3106-033-Q1-K1-D2
cccacgcgtccggcgagacgagccgtttctaattaatgataggtgtcaagtggaagtgcagtgatgtatgcagctgaggcatcctaacagaccggaagactccagaggaaattcgcaagacctttaacattaagaatgacttcacccctgaggaggaagaggaagttcgtcgggaaaaccaatgggcatttgaatgattttgttaatctcaaaaaatctgaatcaaagatctgccatgtggatttatgctatgcttgtttgtttatcaaagatctctcttgtagatttgcctatgctatataccttgttgttttatattcaagactatttccgttgactggtgtcactacaacta

SEQ ID NO: 22845 - DNA, 367 bp, Glycine max
  Clone ID: LIB3106-033-Q1-K1-D3
accacacgtacgccctgtattatcataatggccctggctctggctgcttgcagtcttgcactgcacttgagtgctgataacaccttgagaccttttgaaacaaccaccgacttgaatgccctctataactagtatgacactaaaccatgacacatttgttacagaacaggattatcatcaccttcatcttcaggaataacattgatcgcacgatcaacaccagttactgttactgtggacgatggaaatcatcgagaggctgataccgttccaactcctgtagctatacttgatcaagactctgacccagatgctacttgagacgagataacctttggagatcgccttgaggctattcttgacacta

SEQ ID NO: 22846 - DNA, 338 bp, Glycine max
  Clone ID: LIB3106-033-Q1-K1-D4
gcatttctttggtacaaagtcagcggcagtgccatcatctggacagaatgaagtgattccgagtgcgactcagtttagcatcctctataacgggaaaatgtgtatctatgaatgaatgcctgctgaaaaggtgcgtgaactaatgctgatcgcttctgtctctgctaagtctgctgaaatgaagagtgggatccgattgacttcattcattcccaaaagcccttcttcttcacagggaaactctactaatttgccttcacccgaatcagtcaagagttccattcgcaggctgcaagatgaatttccactggctcgaatgcaatcactctaaagatttc

SEQ ID NO: 22847 - DNA, 336 bp, Glycine max
  Clone ID: LIB3106-033-Q1-K1-D5
ctcaagcctaccactaaaccgctgctcacacaatcagagccacgttcttcatatctgtcagtgccataactcactcactatcttcttctctgatattaccaatggcatctactgcatcagcgatggccatgatcaacgcctaatgcttgaccccaaatgctacgaatctgaccaagctatcaccttctgaaccctacattcatatcaaccttgcaaagggcctcatagtctcacccgaaagcactgaacattgccctgcgacagcattcgcatgagcaatattcacaaccctatggacctgcgactccgcatgcgatgatcaacgtatctgcgaca

SEQ ID NO: 22848 - DNA, 334 bp, Glycine max
  Clone ID: LIB3106-033-Q1-K1-D6
cccacgcgttcgcccacgcgtccgcccacgcgtccggatcgagataactagaaacagtgtgatgaaaatgaaggtccttgttttcttcgttgctacaattttggtagcatggcaatgccatgcgtacgatatgttccctcttcgaatgaacactggctatggtgcccgtactccggaggtgaaatgcgcaagttggaagcttgctgtggaagcacacaacatctttggctttgagaccatttctgaagagtgcgttgaaacaacaaaggaatacattcattgcgaacaatattgatcagacttcaaaacagttaaccaacaagcttacttttat

SEQ ID NO: 22849 - DNA, 288 bp, Glycine max
  Clone ID: LIB3106-033-Q1-K1-D8
accacgcgtgcggcccgtcatgattaattgctgacttgagtaaccgtataagtaacgtaggattgagctgtgcttgagccttaaggccctgtgttgtacgtatttgcttttatctgcctttatgacgcatgcatgtgaaagtacagatgtaattactgatcacctgaatactgatgatgaggctttggattatgacgtatcatagatgcttgacatgactctgagaaataatagagtcagttatatgatagtgcatggaataaatcttaatgatcaaatctttacttg

SEQ ID NO: 22850 - DNA, 396 bp, Glycine max
  Clone ID: LIB3106-033-Q1-K1-D9
cccacgcgtccggcctgctgtcatattcaacaacgagaaggcttgggatgaccagtggatctgtgtgggttggacccttcatcggtgctgctcttgctgcattctaccaccagtccgtgttgagggcccaagcagcaaaggctctagggtctttcacgagctcctcaaacctgtaattctggccaagctatttgagctacgagagacatgcttcattgaattgtgttcttaattaatttgcttatacatggtggattggaataatctgtatatcctcgtcactatgtttatttaatttatgtttactatatttgtggtgacgtccatctgaacagacatgtgcatgttaattagtgtatgtatttgtaagtgttacgtacatgtgcgttagtatcc

SEQ ID NO: 22851 - DNA, 395 bp, Glycine max
  Clone ID: LIB3106-033-Q1-K1-E10
ctcagaattctctaaaagagatctttttctgctctttgaagaaagaagggtctttgcttgattttggagatgtctctgctctcagatctcatcaaccttaacctctccgataccaccgagaaggtgatcgcagagtacatatggatcggtggatcaggaatggacctgaggagcaaagcaaggactctcccaggaccagttagcgacccttcagagcttcccaagtggaactatgatggttccagcacaggtcaagctcctggtgaagacagtgaagtgattttatacccacaagccattttcagggatccattcagaaggggtaacaatatcttggttatctgtgatgcctacactcctgctggaaaacctattcccactaacaagaagcacgc

SEQ ID NO: 22852 - DNA, 409 bp, Glycine max
  Clone ID: LIB3106-033-Q1-K1-E11
attttaaaggataagtacgagaatgatccagaagtttggaagatggagatagagttgaaaaaagtgcgagaggaactagagacgtatcaaaatttctacgaattgggggagagagaagtgctgatggaagagatacaaagcttatgaagccaacttgaattttatgttgactctttattcacatcatcaaggaagcaatatccgttattgtaattgacttactctgctgaaccacagatgtgagcgaccctcactgtcattccagagttgacagaggagacagaagacacagatgaaacttgtgcatcatacaagaatgatactggagcacaatttgaacaagaaagaattaaattgacagatgcagaaagcacgttgattgctctttctgaagaactgaaagctgagc

SEQ ID NO: 22853 - DNA, 320 bp, Glycine max
  Clone ID: LIB3106-033-Q1-K1-C5
cccaagcctactagttgtcctttgtcctttctgggattgcagaatttcttacaaccctgtggcaaacaaggcatctttgattcttctatctcacacttcttttggcacttgatgcttcaactattacttagctccttgccttcaatataccagacatgctattctattgagccctgaataatataatccataagacagaatacagtgaagaggcatggcatgcctcattcctggagttctactgaagcttctccatagtatggattctgatgtgaaaggtaatggggaatatacatcagtccttctgcatgtgatcaaca

SEQ ID NO: 22854 - DNA, 115 bp, Glycine max
  Clone ID: LIB3106-033-Q1-K1-A3
gctacacgaacagtcagaactctatcgatcatgaaacctgagcacgagactgaagctgacgggcgatgagaagtaactgtacaacggctcgcacagacgatgcatatctacctga

SEQ ID NO: 22855 - DNA, 148 bp, Glycine max
  Clone ID: LIB3106-033-Q1-K1-A5
cccacacttacggtttaaattctaattatctttaaacctgaacacaatccttgaactgaagggcgatgataataaattatttcttaaaccgcacagtatggtgtctctttaccttattatctaatacactgagcttacatcattcaaa

SEQ ID NO: 22856 - DNA, 196 bp, Glycine max
  Clone ID: LIB3106-033-Q1-K1-A6
cccacgcttacggtttaaaaactaattatatacagacataacctcaatctttggtctgaatggcgatgatactaaaggaattcttaaaacgcacagtatgctacatctttaccttatcctcaaagccaatgactttactcctactgaacatacctacgtatatcagcatatcgtcctttccattacatgatctcta

SEQ ID NO: 22857 - DNA, 102 bp, Glycine max
  Clone ID: LIB3106-033-Q1-K1-A7
ctcacacttacggttagaaaaacaactatacacatacataaccctacaccttgatggcaacgatgaccatactacatcaattcttaacacgcacagtatggt

SEQ ID NO: 22858 - DNA, 416 bp, Glycine max
  Clone ID: LIB3106-033-Q1-K1-A8
ctcatatgtctgtctacaaatcctactttctttatactcttcgctgctcactgttgacatggctgacatagtaggaggagcggtaagaggaaatgcatgttagggcatggctgttgctgagcatagcgtgaacaccttcctggattgttagtacgaaagttcatcgctatgtgattttaaaagacgatgataaaccgacagaggtcatcattcaagaaactaaactcgctgctgaaagctatgatgacttgaatgcatcgttccctgaaaatgattgccgatacgctgtctttgactatgagaaagggacatgagaaatctgcctagaaaagaaaattttttatagaataaggttttttttaggggcccgtattcccctttaaaagctatttgccatatttagggaccggtttaaa

SEQ ID NO: 22859 - DNA, 246 bp, Glycine max
  Clone ID: LIB3106-033-Q1-K1-A9
tgagctctgcgagatcttgaatcgccgatttgaaaagatgagttagcttcaaagtgatgctgggggtgaagccatctcaagaatcatggccgattccaaggagaagaatcgcaaatttggggagaccatcgaactgccaatcggtttgaagaactactatccacagaacgacaagcggttcattggcttcggcaagctggcccacattccttggcccaagaagaaaatttgcatgcttggtgatgc

SEQ ID NO: 22860 - DNA, 447 bp, Glycine max
  Clone ID: LIB3106-033-Q1-K1-B1
cttaaacttaatgacttgcctggagcaatgaagctatgttcacaggtgcttgatgttgaagggtgcaatgcgaaagcttattacagacgagcacaagcatatatagaaactggagattatctattagcagatgtagacatcaagaaagctcatgtggtggacccacaaatcagagatgttaaggtaattcaaaagacatggaagcatcttgaagctgacagtgacaaagtagatgctagactatatgaaaacatgcttggatgtgaaacagacgacccatctatggctataaagagattgaacgtcgagaacgatgaggcggataatgtagaggttgcatgaatggaaattgacgaacttgctgatagcgcaatgattcaatagatgattcatggtgaacatgtatagagtataatataaagcttctattaacaaaatactgaaact

SEQ ID NO: 22861 - DNA, 327 bp, Glycine max
  Clone ID: LIB3106-033-Q1-K1-B10
gaaaaataaagcgttccatagcctcccataaaaatgaagaatactatcttctctgctctctggctactttgtgccttcaccacctcatacctaccttcaaccaccgcggtggtcgataccaacggtgatattcttcagaatcctggcacatactttatcttgtccgtttttcgacccggcggcggagtataattcgccgccactggaaacgaaacttgccctctcactgttgtgcagactctcttcgggaggggatttccacgaatcttatcggcccacgtacgaattcctatcatcggcgaacgacaactttcagcatctgttcga

SEQ ID NO: 22862 - DNA, 454 bp, Glycine max
  unsure at all n locations
  Clone ID: LIB3106-033-Q1-K1-B11
gttgagttcagataccataaccataccataccataccagaaaattaaactgaagtgagagagagatgacagtactgtctccttctctttctcggcctaagttgcaatcttcctttctttgttgccctctcaaatattctaagcctacaaatagaaatattcaaccaaaacccacttcttatccacgcattagagctttggaccttgatcaaaacacggtagtggctataagtgtaggtgttgttagtgtggctgttgggattggcattccagtgttctatgaaacccaaattgataatgctgtgaagtgtttttgactccacactataacatttattttatgtattctaatctaatattcgtttggcaattctagttgggttttgattacagcttctctttgtttcangctaagcgaagaaacacacagcccttgttcccatgcaatggatctg

SEQ ID NO: 22863 - DNA, 106 bp, Glycine max
  Clone ID: LIB3106-033-Q1-K1-B12
cccacgcgtccgcccacgcgtccgatatttttctgcattgctttcagttattatattgttggtgttggattttagttgttgaagaaaatgtgtgaattaggcggct

SEQ ID NO: 22864 - DNA, 321 bp, Glycine max
  Clone ID: LIB3106-033-Q1-K1-B3
gcacacaaaggcctaattctatcaccagtaaacactatctcaaagtgaagctctaagcattgtaagtatggagttcttcggctctttgagctgatataccctgcttatccatagctaacttaccagatcaatgaagcccgtacactgaacttctctccacactgactttaggctcggcacaacccagagagaatatctgacgagagacgttatgatggcgttgacattactgcgattacgaccataatcggcgttgctaagaagacgatcagatccgtgctttgcgactatgaaaagggatcttacgatatccattgatgt

SEQ ID NO: 22865 - DNA, 351 bp, Glycine max
  Clone ID: LIB3106-033-Q1-K1-B5
cccacgcgtacgctttgtctgatcagtttgaggctaagcgtgcaaagaacaaggctagcagggaaaggaaacttgctcggagggaggagcgcttatcccaaggtcctattgacaagacatctactgcacccagtgccccagctgccacatcaccctagtctacccatgcgccaaagaaatccaagaagtgagtagcatatcctggaattcaaaggacgtggagtctttaatagctctggcaaaatctttagtctgctaaagtagttgtgacgaatctcttttcgatggtttagactttgtacggtttggatgtataagaacttcatatcttgcatatcgtaaattatatat

SEQ ID NO: 22866 - DNA, 176 bp, Glycine max
  Clone ID: LIB3106-033-Q1-K1-B6
cccactcgtacgcttagaaagatgattatccgaataccaatccgcgacactgagatccatgggcaaatacactgcatcgatgctttcaccgcttattacgttgcatccctgccttgacttataatctcatcactagaaaccgttcgacctcaacttcaactacccgagcgtcaatc

SEQ ID NO: 22867 - DNA, 178 bp, Glycine max
  Clone ID: LIB3106-033-Q1-K1-B8
cccacgcgtccgtccacacatccgaccacgcttccgaaaaaaaatgcttactgacgccatgggtcacaaaactagaatgagcaagaagagccaatatccatcatttaacatagactgttactttacatagtgtaaacacccttcttgaattgcattaacgtaaaaaagttcatcgata

SEQ ID NO: 22868 - DNA, 182 bp, Glycine max
  Clone ID: LIB3106-033-Q1-K1-C1
atttgttagctcaaactatttgttgtaggtcattatctcatctgagtttgattgtcactttgtttccaagtctcatcattgttacttttgtccccatagataaatgattatattctctcaatgaagctttcttgttttgtagcacattaaaaaaaataaaatgaaagaatgaacacatttgt

SEQ ID NO: 22869 - DNA, 324 bp, Glycine max
  Clone ID: LIB3106-033-Q1-K1-C10
gctaccttgctagtttccatcatcgtatctgttagtatttccaaatatacacattttctatggtattcatagaaatctttaacttgagaagcattacatggcgctgacgatgatggcggcgatcggcatcggcatgaagcaagagaagaagatgccggcgacgccggcgccggagaacgagctgaagaagcggaacgcggagctcgagaaggagctcagagagagcaaggagagggaggagcagatgaagcgcgaactccagagcgcgtgggagaggctgcgcgtggccgaggaggctgaggagaggctctgctcccagctcgg

SEQ ID NO: 22870 - DNA, 285 bp, Glycine max
  Clone ID: LIB3106-033-Q1-K1-A2
aaaactcgaccctccagaattctctcggctacctctccccaacccaagtcagattctctcttgtgcgtgcaactcattgattcaagtctcagacagaaccaaacttcatctcccagaccttcattgggcacaagctggctggctcatgctcaacagggcctagcagctttggctatctgcctggcactcaactttagcccagttttgcttaatggcaatgcattggcatctgagtctgatgtgcttaatgaggggccacccagagattcttatgcgtttgatgat

SEQ ID NO: 22871 - DNA, 454 bp, Glycine max
  Clone ID: LIB3106-033-Q1-K1-C11
gcagtatgggaatcaaggtttgaggtttatgagaggtgtggctggaaccgcgaaatagctcgtggagcagttcgaaagtttcccagtattgtgaagttgtcagaggaagtgtttataaaaaaaatgagtttcctagtgaaggatatgggttgttcatcagaagatattgctgaatatcctcaagttgtaacgtacaacttggagaagaggattatccctagattctcgataatcaaaatgttgaaatcaaaaggtctgctcaagaaaaatttgcacttcagtgccattatttgcataaccgaggcaaattttttggagaaatttgtcatcaattttcagaaagatttgcctttcttgccagattactacaacagtttggcaaatcaacagaatgtattataagctttgaaggcttttgctggtgattgccctaacttccagcttttctctttca

SEQ ID NO: 22872 - DNA, 313 bp, Glycine max
  Clone ID: LIB3106-033-Q1-K1-C12
gccacgcgtgcaggagcgtacgttacctgaaaaaggcttgggtgtactttgccgagagactgtgaccttacgctaaagttcgatagcctggatagagcaacaccaactgactgaaactaaaatactaagctagcatcgaatactacaattctgcagaaaaaactatgctgtcttatatcctccctccgtaataagacatctggctgaacatgttactattgaattcgttgagggctacaaaatgaaaacccacaaggcatctgcagagcgatttacggtgaccggacaatgcaaaataacgcgtaggagagct

SEQ ID NO: 22873 - DNA, 328 bp, Glycine max
  Clone ID: LIB3106-033-Q1-K1-C2
gtgaaaataactataaatacgatctttcttattggaataccgtctgaaaactgaaaagtagaggcgaaagactttaggtttggaattgggaattagggttgttcgcgtcacgaagatgatcgaggtggtgttgaacgatcgattggggaagaaggtgcgcgtgaagtgcaacgacgatgacaccatcggcgacctgaagaagctggtggcggctcagacgggcacaagagccgacaagatccgcatccagaagtggtacaccatatacaaggatcacatcactctcaaggattacgagatccacgacggcatgggtctcgaactctac

SEQ ID NO: 22874 - DNA, 342 bp, Glycine max
  Clone ID: LIB3106-033-Q1-K1-C3
cccacgcgtccgctctacactcctttcagcacagcacaacacaacacaaaaccctttcccaagaaaataaaaaataaaaaatggaggaatccaaattcggccaaaccgaccagcgaaagcgagttcgcgacgagtcggactcggtcctcaactcgcccgactcgttaaagcatccccgagccgagtctaacttgtccgagtctctccgagttgactcggacgagtttgaactcgcgcggctcgacccggttcttctcaacatgctgaatgacgcggagaatgtggcggagcgtgaacccaccgtgcttgactcctgtattaagaagttcgaagaagaaatac

SEQ ID NO: 22875 - DNA, 331 bp, Glycine max
  Clone ID: LIB3106-033-Q1-K1-C4
aaagcactgacttcaaaaacttaagttcattccttgcgtcatgctttcttactcaaaaccaagcatgtcgaacacatgcagcaactgcgactgcgctgacaagactagctgcaccaagggaaacagctatggggttatcgcagagactgagaagagttacatcgagactgatgtcatggacgttccagcagctgagcatgatgggaagtgcaagtgtggcactaactgcacttgcacggactgcacctgtggtcattaaagaatatgtatgaaaatgtaattgccatgtgtttggcactacaaatatgcaaatgatgtaaactgcgtatga

SEQ ID NO: 22876 - DNA, 345 bp, Glycine max
  Clone ID: LIB3106-032-Q1-K1-G4
aggagatgagcgagcgtgatgtgccggtgtccgattctggtagtggagttcctaaaagtgcatccggaagccgagtttggaagaaattcttcacagattactcattttttgaagcctgagacttttcaaggggttgtaaaagccataaacgagaggattctttctgttttggatgagaatggttcaggcaggctggatctgggaatgttttttgctattcttgctcctatttgtggcggtcctccggatagactcaaaagggttgcctttgatgcacttttgtggcgtcctatgaacgaagatggtgctaatattaggaaatttgatgtcactttatacatcaag

SEQ ID NO: 22877 - DNA, 336 bp, Glycine max
  unsure at all n locations
  Clone ID: LIB3106-032-Q1-K1-G5
gttttgaatcttttgagcgaaaatgcagtcgagtcctttgcttctggaggaacccataaggatggcctccatcctcgagccatccaagcctagtttctttccagcgatgacaaagattgttggcacacttggcccaaagtcacgatcggttgacgtgatttcccaatgtcttgaggcaggaatgtctgtggcaaggtttgatttttcatggggtgatcctgaataccaccaagagacgttggaaaatttaagggctgctatcaaaagtaccaagaanacttgtgcggtatgctgataccgtggtcagacntacagtgcacaaactgacaccaattc

SEQ ID NO: 22878 - DNA, 393 bp, Glycine max
  Clone ID: LIB3106-032-Q1-K1-G6
tccacgcgtccgcccacgcgtccggaaatgtttataactttgtatgcaacttgtgagttgtgacaggttaaaaaatgaataagaaaatgtatttttaatgtgggtatttggtgattaggcttttggttaattcaataaccaaatttactatgatagtatggttccctttgcatgagtggatttgagtgtttttcagtggcaccgatgagttagaggtctttatgctgtttgtttttgtttacaataatatatgataatgtgccactgatgtgatgtctttagggtctttatgtttcccttagcaaatagcttgtgaaagatttaatttcatacagtctatagagtttttatactgtcatcaattaaaaatcacctaaattatgacttttatgt

SEQ ID NO: 22879 - DNA, 243 bp, Glycine max
  Clone ID: LIB3106-032-Q1-K1-G7
tgaattacggtcccgacccacgcgtacgcccacgcgttcgcccacgctttccttaattatcatttcaaaaaaaacatctcctgggtcgggtcgattttaaggaaatcggagaccatgcttccttcatacctgtattataccactccttcctaagactaatactcattcctaaccaaccaatttagcaatattacccttccattaagttctacaaaactcacacacattacccgattcttgaat

SEQ ID NO: 22880 - DNA, 68 bp, Glycine max
  Clone ID: LIB3106-032-Q1-K1-G8
acgacataatataaattcctatcaaataccctgacaaaacaaggatactaccctgctggggaggttcc

SEQ ID NO: 22881 - DNA, 285 bp, Glycine max
  Clone ID: LIB3106-032-Q1-K1-G9
gtactcttatgctcggtggattatataatagtcattatcggttaaattcttctaaaaaaaaaaaaaagaaaaaaaaaaaaaaaaaaaaaaaaaaaaaaaaaaaaaaaaaaaaaaaaaaaaaaaaaaaaaaaaaaaaaaaaaaaaaaaaaaaaaaaaaaaaaaaaaaaaaaaaaaaaaaaaaaaaagccaacaatttaaaagtaccaaaacttaaaaaacccgttaatttaaaccaaaaaaacttttataatagtaaccccaaaataaaaacaattgcccaatttt

SEQ ID NO: 22882 - DNA, 208 bp, Glycine max
  Clone ID: LIB3106-032-Q1-K1-H10
accgtcttgaatgacccacccgtgcgccaaaaccctagcggcgcctgctttcttcgttcgtcttttgcatcagccatcaggatggagtctcaggggaagcatgctcttgttgtcaaagttatgggtcgtactggatccagaggacaggtgactcaggttagagtgaagtttttggatgatcagaaccgtcatatcatgaggaaatgtt

SEQ ID NO: 22883 - DNA, 481 bp, Glycine max
  Clone ID: LIB3106-032-Q1-K1-H11
cccacgcgtccggcctcagccgcatcccccaccactttctctctcctccactccgccaccgcttcctggtcctccaccgccacctccgcctccccctccccctcgcgcgtgcagctcacctcctccctccgcgcccgcccgctgcgccgcctgggcttcgccgcggcggacccgctgctcgcggcgagtgtagcggcgcgcgtggcggcggtgagaggaggaggaaagggcgcgaggggggtggtgtcgatggcgaagaagagcgtgggggacctgagcgcggcggacctgaaggggaagaaggtcttcgtcagggccgacctcaacgtcccgctcgacgacaaccagaacatcaccgacgacaccagaatccgcgccgtcattcccaccatcaaacatctcatccaaaacggcgccaaagtcattctctccagccacttggggcggccgaagggtgtcactcccaaatacagcttggcgc

SEQ ID NO: 22884 - DNA, 152 bp, Glycine max
  Clone ID: LIB3106-032-Q1-K1-H12
ctcactctctgtgtttgctgctgatgattttgaacgagttaccttcttcgtttctaccagagtttaaggaaacattggtaaggaaaggggtcacatcaacattgtcgtcattggacaatgtcactctgggaagtcaactaccactgttcact

SEQ ID NO: 22885 - DNA, 277 bp, Glycine max
  unsure at all n locations
  Clone ID: LIB3106-032-Q1-K1-H2
cccacgcgttcgcccacgcgtccgcttaagtttcggatcaggtctgagcaatctggttgggagaacctttggtcttagagagtcaagttttatgtctgaattagacgatcaaattcctactgccttcgatccttttgctgatgcaaatgctgatgactcgggtgctgggtcaaaggagtatgtgcatattcgcgtacagcagcgaaatggaaggaaaagcctgacaaccgttcagggattgaanaaagaattcagctattacaagatacttaaagat

SEQ ID NO: 22886 - DNA, 290 bp, Glycine max
  Clone ID: LIB3106-032-Q1-K1-H3
cccacgcgtccgcccacgcgtccgcccacgcgtccgctttttatatcttcactagatctacgacactcccaactccacacttcttcttcttcttcttcttcttcttcattgcacagtgcatccataaacatgaagtaatgaggtaatctaaagtggaaaaaatgggtgggggccggttcaaaccgacgcagaagaggaagagggttccaaagagggtgtggttaagcttccaaaaatcaatgggtgtcctcgtgggtggaaaccatacctcctccaggttttgcactcgc

SEQ ID NO: 22887 - DNA, 315 bp, Glycine max
  Clone ID: LIB3106-032-Q1-K1-H4
acagcatcaccagtgttggagggatcgttgaccaaggcttaggcttcataggcagtgcaggcgatgcacttacttttgcagccaccaaaatctccatccagttgattagtgctaccaaggttgatggtgggaaaggaaaaattggaaagagtacaaatttaagaggaaagataacattaccaaccttgggagctggcgaacaagcatacgatgttaattttgaatgggacagtgacttcggaattcccggtgcattttatattaagaacttcatgcaaaatgagttctacctcaagtctctaattctcgaagaca

SEQ ID NO: 22888 - DNA, 280 bp, Glycine max
  Clone ID: LIB3106-032-Q1-K1-H5
gccgcgctgtcaaatggaaaagaggagttagagaatggcaacgatcatggcggctcacgtggcgttcctggaggtgccaccggaggttacttcaccagcctcttgaacaacctatttcctgacctattcactggacagagcatggacgataggagggacgatcatagagatcacaatcataggaacatacttggaagattacgcggagccataagtcgccgcttaactgaacggtaaaacttcagatgaatctgttcacaccctacactactacatggat

SEQ ID NO: 22889 - DNA, 321 bp, Glycine max
  unsure at all n locations
  Clone ID: LIB3106-032-Q1-K1-H6
cccacgcgtccgaccattgtgggttcttacaatgtcactcctaatcaaccaactgcaaaggatccttcatggctatccgatagtgaccaaatcggtgtcctaggtcatgtagccattgtctacatatacgaagcaaatcccaacagcaacaccattgagagattgaggaactctcttagcaagcttttggtgtactactatccattcgctggcagattcagcttgacaaaaagtggtcgcatagaagtggattgtaacgcaaagggagtgacattgattgaagctaaaacctcacacacactngatgattatggagacttt

SEQ ID NO: 22890 - DNA, 296 bp, Glycine max
  Clone ID: LIB3106-032-Q1-K1-H7
acgcccacgcgtccggagaataacagatagagatccatccatcaattccaatggccgggcagcggtcctacttacagatcggcgagttcaaagaagccttcaccctcttctacaaggacggggatggttgtcttaccaccaacgaacttgggaccgtgatgcggtcacttggccagaacccaactgatgcagatctgcaagacatgataaatgaggttgatgctgatggcaatagtaccattgatttcccagaattcctgcatctcatggctcgcatgatgaaatacactgattca

SEQ ID NO: 22891 - DNA, 200 bp, Glycine max
  Clone ID: LIB3106-032-Q1-K1-H8
tccacgcgtccgcccacgcgtccgcccactcgtccgatttatttgtcttttcataggtatgcgcttatctaaagtgggggaaaagataaggctaatttgcacattgattggatggtgtcatcaagagtatgatacacctgaaatttgttgatatgtatgatactgtagtcttgacatgttataggtaaatatatgatgtc

SEQ ID NO: 22892 - DNA, 415 bp, Glycine max
  Clone ID: LIB3106-032-Q1-K1-G3
gatgaacccatcatcatcaatgcctattgctccacttactgccttgcaccctttctcaagggcctggaccacaaattcggcatgatcaacggtaccatcaccaccactcactcctacaccggtgaccaaaggctttttgatgcgatccaccgtgacctgaggcatgcaagggcaccaacactcaacattgtacccacttcaacatgagcaacaaaggcagagtgccttgttctaccaaccctcaaacgcacactcaatggcattgcactacgtgtgccaacaccgaacgtctcaatggtggacctagtcgatcaggtctcacagaagacctttgcagaaataattgaatgcatcattcagagagagtgcagacattgagctaaagggaatcctctctgagtgagatgagccactt

SEQ ID NO: 22893 - DNA, 420 bp, Glycine max
  Clone ID: LIB3106-032-Q1-K1-H9
atggcctcagccgcatcccccaccactttctctctcctccactccgccaccccttcctcgggctccacggccacctccgcctccccctccccctcgcgcgtgcagctcacctcctccctccgcgcccgcccgctgcgccgcctgggcttcgccgcggcggacccgctgctcgcggcgagtgtagcggcgcgcgtggcggcggtgagaggaggaggaaagggcgcgaggggggtggtgtcgatggcgaagaagagcgtgggggacctgagcgcggcggacctgaaggggaagaaggtcttcgtcagggccgacctcaacgtcccgctcgacgacaaccagaacatcaccgacgacaccagaatccgcgccgccattcccaccatcaaacatctcatccaaaacggcgcccaagtcattctc

SEQ ID NO: 22894 - DNA, 258 bp, Glycine max
  Clone ID: LIB3106-033-Q1-K1-A1
gttaaacatacagtctggtgtagaacgatgacgagattgtagcagcagcttgactctgcatgacgatgatgcattgatcatacagacagcacatcatattatatctgttatatctagatatagcaacacctaatcacaagggctactttaacatctttcatgattctaaatgccgcaagctgatcaagttgacagaacaccatagactctaaactactaccaacgataccttctggttcagtaggagcatttatctac

SEQ ID NO: 22895 - DNA, 215 bp, Glycine max
  Clone ID: LIB3106-033-Q1-K1-A10
cccactcttccagataagaaaaaaagcttgttcttaggtaccttgacacacagataatggtggtgacgacaaattagcgagtatgatcatttcttgtatggtggagattcctatttggagctaggtcaaagtggatccactaagcctactgaaatacttgatcgagatcgtcgatatgatgattggctctgttttaccagtcaatatcattatgt

SEQ ID NO: 22896 - DNA, 388 bp, Glycine max
  Clone ID: LIB3106-033-Q1-K1-A11
cagaacttttgaagtaacaaaaaaggtctgggcagaggttttcttataccttgctgagaacggtgacctttttgagggtattcttattaagcctagcatggttacacctggaactgagtgcaaggacaaagccagtcctcaaacagttgctaattacaccctcaagctccttgacaggataattgcccctgctgtacctggaattatgattatgtctggtagacagtctgaggttgaagctaccctcaacttgaatgccatgaaccaatctccaaacccgtagcacgtgtcgttctcgtatgccagaaccctgcaaaacacttgctttgaaacatggggagggccgccaaaaaaacgtgaaggcggaacaagatgccctctttttccg

SEQ ID NO: 22897 - DNA, 309 bp, Glycine max
  Clone ID: LIB3106-033-Q1-K1-A12
ataaaagccattatatgtttggtattgtttggatcaattgaactgctttacatctcggcttctatctgcaaagttcctgaaggaggatggatcccccttgtgctatcttttatctttatgagtataatgttcacttggaactatggaacaatgaagaaacatgaatttgatgtggagaacaaggtttcaatgagcaagatactatccttgggaccttgcttaggcatggtccgtgtcccgggaataggggtcattttcagcaatctggcttcaggtgttccagctatttttggccattttgttacaaac

SEQ ID NO: 22898 - DNA, 419 bp, Glycine max
  Clone ID: LIB3106-032-Q1-K1-E9
aacgccttctgcttggaaccctaaaaatctgatttcgtacctacccattatttaattggtccagatttattgggaaagttgtcaggtgaactgattaatcattaggggttggaggaacaagaggagtgagagcttcaattattctgtttataaaaattagggcttcttcatttggtacccgattcccttgtttcttgggcttctggaattgatgcaaattttaggtctggtgggtggtggttgttaaatcaaatcgacgactaaaattagttcttattcttcttctggggtgttgggatatggatatgggggtttctgattagatgttaagtacttttgtgccaatagtagtttactggatttattctgggatttacgttgttcttatgctgattgctgataattatcggttacattct

SEQ ID NO: 22899 - DNA, 317 bp, Glycine max
  Clone ID: LIB3106-032-Q1-K1-F1
ctcaggcgtgcgctattggctggtttatcgtgaggcgtatatgcagagggatggcaccttggtcacggcacccagcgtgttatcaggtccattccttcgaacaagctaccaaaagctgcttccttcgaatgaatactcactatggtgagacagcaatactagggataatgcggacgctttttgctctatatgactgcacactacatctgatcctgtaaaaccataggtaaagagcgcgttgtaccaacacagtacttagctaataggagacaattcatatcatgcgctactacaattaagccacaagctttctttta

SEQ ID NO: 22900 - DNA, 389 bp, Glycine max
  Clone ID: LIB3106-032-Q1-K1-F10
gccaaacccaaatccaccgctctttattttcgtcttttctacccttcccggatcccaatcgctaatcggtctaccactctcactccaaaaatctctaattttttcatctgggaagatcggttgacgaatcgaggatccgatcgcttgcgaggaactagggtttcaatcgatcgcatcacacacaaacaatcatgtttagccggatgttcggtaaacctaaacaggaaaccaatgctgttgccactttggacaagctaaacgagacacttgaaatgctggagaaaaaggagaaagtgctccttaaaaaggtggcagcggaagttgaaaaggccaaagaattcacaagggggaagaacaaaagggcggcaatacaatgtctgaagaggaag

SEQ ID NO: 22901 - DNA, 237 bp, Glycine max
  Clone ID: LIB3106-032-Q1-K1-F11
acgatacattctggcgtatgcccgaatgctacattcacggtttttccatccagtaccttatgggtcctctggaacttattgacagagtccaggaagaaacaaagagccatactgatcgcaaaccccttgttgtgggactgtcgaacattacagaagtatcctatgatgcgtcctggttgaccttaaccaaaatgaattgttacctgccttaattaatgtgtacctaaagtacaagga

SEQ ID NO: 22902 - DNA, 398 bp, Glycine max
  Clone ID: LIB3106-032-Q1-K1-F12
cagacgctcattagaaaggttcttgatctactcgtagctttgtgcatatataaatacatgtgcatcaggtgattttttaaggtgaggacgaaagcacttgtcttatataccttataaggccttggttcagttcttgctgccagcaatcgcatgggttgtgggttggagacttgtgaatgaggaaagtggacttaaaattcaatgcttgtggaagttaagagattttaaatgtggggttgaactcattaacaggatctctaatgttgttgaggcttttggccattttccaaatatctacttggagcaaccaaatcaaatcagaacataattattgacagcttccattggaggtttaactattaatgattttattgttgctgcaaagatagattatatta

SEQ ID NO: 22903 - DNA, 444 bp, Glycine max
  Clone ID: LIB3106-032-Q1-K1-F2
gttgatcgagataactagaaacagtgtgatgaaaatgaaggtccttgttttcttcgttgctacaattttggtagcatggcaatgccatgcgtacgatatgttccctctccgaatgaacactggctatggtgcccgtactccggaggtgaaatgcgcaagttggaggcttgctgtggaagcacacaacatctttggctttgagaccattcctgaagagtgcgttgaagcaacaaaggaatacatccatggcgaacaatatagatcagactccaaaacagttaaccaacaagcttacttttatgccagagacctcgaagtccatcccaaggacacatttgtgttcagtatagatggcaccgtactctctaatattccatactacaaaaaacatggatatggggtggagaaatttaactcgaccctgtatgatgaatggggtaacaa

SEQ ID NO: 22904 - DNA, 383 bp, Glycine max
  Clone ID: LIB3106-032-Q1-K1-F3
ggagaggtggttggagattgggtggcatcgagttgaaatcaaagatgctcgaacatgcataagcaggcgcataggcatgtgtggaagcggatcagagacagggaagctgggaaattgcgtgcaaaccatttcgcgaaccgcataaaatccaatcgcatttcgcaactccagttgtccaatcacaaagacattgtctcacctcacaaaggcgccatcaactcccttcaggttgattcgacagagggaagatatttgctatccgctgcctccgatgcctcggtagcagtgtacgacgtccaacgacccaccgtttacgaagcatgcggcggcggcggcggcggcatatcgaaacacagctccatatttgtcgttgacaagcagca

SEQ ID NO: 22905 - DNA, 397 bp, Glycine max
  Clone ID: LIB3106-032-Q1-K1-F4
gtgcaccgtaagggttgtgaagcaggcagagaagagccatggtgcacgtttctttctaccgaaacgatgggaaaacgttcaagaagcctcgtcgtccctacgagaaggagcgtttggacgccgagttgaagctggtcggtgagtacgggcttcgctgcaagagggagttatggagggtccagtacgccctgagccgcatccgtaacaacgccagaaacctattgacccttgatgagaagaaccctcgccgtatcttcgagggtgaagcccttctccgaagaatgttccgttacggactcctcgacgagacacagaacaagctggattatgtgttggctctcaccgtcgagaactttttcgaacgccgcctccaaaccctcgtcttcaagtctggcat

SEQ ID NO: 22906 - DNA, 361 bp, Glycine max
  Clone ID: LIB3106-032-Q1-K1-F5
gggcgaagagaagaagatggaggttagtttatcctcaacatcatgtatacccttaagctgggagttgaagcataagcatggccttttccactctcaaattcccattcccacagcttcaaccaaaaccagaagaacaaaacctttgtccatagttaacgcctccagacaaacctttgtcctccaactggctcgtttctccacacgatttttctgcatccaccgcttccccatggcttcccagattcgaagagctcgacgccaccaacatgcttctccgtcaaagaattatttttttgggttctcaggtggatgatatgactgcagattttatcattagtcagcttttgtttttggatgctga

SEQ ID NO: 22907 - DNA, 161 bp, Glycine max
  unsure at all n locations
  Clone ID: LIB3106-032-Q1-K1-F6
cccacacntccactttaccatatgtgtacttttaaagtcctcagcattaccttcggtcaggtattttttctaaggcaggggcgcctcttcaagatcactcctcaccattggaggatgtgtgcatggtgagataagcgttgctgttggcgtaggaagttatg

SEQ ID NO: 22908 - DNA, 401 bp, Glycine max
  Clone ID: LIB3106-032-Q1-K1-F7
cccacgcgtccgaaaacagcagagagaagagaaggtgtagacaaacacaatctctaatggcgctcaggatgtgggcttcttccactgccaatgcactcaaagtctcttctacctccagacctcatctcttgcatcctttttctttctccagatgcttgtcttccgtcttggatggacttaagtatgcagattcacacgaatgggtcaagcacgaaggctcagtcgccaccattggtatcactgaccatgcccaggaccatcttggagaggttgtgtatgtggagctgccagaatcaggtggcacagttacccagaagtctggcttcggagccgttgaaagtgttaaagcaacaagtgacataaactctccaatctcgggggaaattgttgaggttaacaaa

SEQ ID NO: 22909 - DNA, 374 bp, Glycine max
  Clone ID: LIB3106-032-Q1-K1-F8
cccacgcgtccgcccacgcgtccgctcagtagtgtcatttacgcttctcttctctgcagggactatgcctaaccctaaggtcttcttcgacatgaccatcggcggtcaatctgctggccgcatcgtgatggagctctacgccgacgtcactccccgcaccgccgagaacttccgcgcgctttgcaccggcgagaagggcgtagggcggagcggcaagcccctccactacaagggctcgtccttccaccgcgtgatcccgagtttcatgtgtcagggtggcgacttcaccgccggaaacggaaccggcggcgagtcgatttatggcgccaagttcgccgacgagaacttcgtgaagaagcacaccggtccccgca

SEQ ID NO: 22910 - DNA, 328 bp, Glycine max
  Clone ID: LIB3106-032-Q1-K1-F9
gctctagctcgagagcctacgctactcaggatccaactttacagtacacggcctttctaggccttaaaggggctattgtgactgctgagaagaactcactgaccggcctttcataactttcaaggctactacaacccatgtcagagacccaactcaaatggccgtagcaacacatacactgtcaacacttatcgaaataacgaagacagtcctaccagatcaacgtttcgaaccatttcgcaggctaagtaacgaataggacgcgcaccagatcgtcgacttatactgtgctaatgtcgatggttacacgcactatctaccactacac

SEQ ID NO: 22911 - DNA, 222 bp, Glycine max
  Clone ID: LIB3106-032-Q1-K1-G1
ctcacacgtgcgctaatggctggtctatcctgagacctatactcagagtaacggcactttggacatggcaccctcctggacatgaggtaccttcattacaacaagcgtaccaattggggttccttggcatgataatcatctccccttaacaacaatacaagggatgttgcggacgctgttatgctctataagattccacactatatctgatcctataataaa

SEQ ID NO: 22912 - DNA, 72 bp, Glycine max
  Clone ID: LIB3106-032-Q1-K1-G10
acgcccacgcgtccgcccacgcgtccgctagtattgttgttgttgttgttatatgatgtatgggtgaataag

SEQ ID NO: 22913 - DNA, 460 bp, Glycine max
  Clone ID: LIB3106-032-Q1-K1-G11
tgtgactgaaaaaaggttttagatcgtaaaaactaatcactacgaaaacaagagatatcggagatggcgctgcccaaagctaaggagatcgtgtcgtccaattccgtcgtcgttttcagcaaaacctattgccctttctgcgtcgatgtgaagaagctcttcggtgacctcggtgccaattacaaggccatcgaactcgacactgaatccgatggaaaagagctccaagcagcattagttgagtggacggaccagcgaaccgtgcctaatgtgtttattggtggaaaccacattggtggctgtgactcaacaactgccctgcacactcaggggaagctggttcctctgctgatatctgctggagctgttgccaaatcaactgcttaaaggatctcccatttctaggttatgcagttaaataaaaattaaaacccaagtagttgggtcggttatataattc

SEQ ID NO: 22914 - DNA, 392 bp, Glycine max
  Clone ID: LIB3106-032-Q1-K1-G12
gaccactcgtccgaccacgcgtccggcagctcgagcttgtgctagaacaacttcatttctagctatgaagctgactttacttttctgcttgtgtcgtgggtgatattcatccgattcatttgcagcctctaaattgaacccgggcttggagacattgtaaactttagtttcattagattgatgaagtgtttgtgacgaggaatttgagcatgcaggtgtggccaccagttggcaagaagaagtttgagactctatcctacctgccagaccttgatgatgcacaattggcacatgaagtacaataccttcttaagaagggatggattccttgctaggaattctagtttgagcacggtttcgtgtaccgtgagcacaacaggtcaccaggatac

SEQ ID NO: 22915 - DNA, 199 bp, Glycine max
  Clone ID: LIB3106-032-Q1-K1-G2
gaaagattaaatgttatactaaatctcaaaataactacaatgttaactggacacctacctgtacaacacatccatcaattacaaaaagtgtaccgagtagcacaaaatggaaggataatcataacaacttcaaaattatacaacttatgtcacggatcttatctgcaaattaagatgcatgactatttctgataggatt

SEQ ID NO: 22916 - DNA, 405 bp, Glycine max
  Clone ID: LIB3106-032-Q1-K1-E8
aatactgcacgttttagacagaaaaaaaatataaaaaagaaaaaagaaacactagggggggggtcatttttaaaccggtagataaaatagttataaaatcaacgattcaaattttctttctttctattttcttcttttccaatttcccctaatactcttcactctcaccccacaccctcccttcttcgcctcttccttcggtccactccgccgcctcctaacccaaccacgacggcggattcctctcgaacaaaaactgagcgcaaaaactcttattcgaattcgtgtgcatcgtcacgtgccattcatctctctaaaaccctgctcaagtgcgtgcgacagctgcaaccgcaacacttgtaatctcttccaattcaaagtagtttcattctctaaactgaactg

SEQ ID NO: 22917 - DNA, 475 bp, Glycine max
  Clone ID: LIB3106-032-Q1-K1-D10
aaaccatttaggctctcttaaaacaaaggtccctcaaaccactttccccacactctttagggtgtcatgtttttttttgctctttccccacaaagaggtcttggacccttcttctgtgtagtgcaatggccatggctaaggttttctgtgttctgcttctggcactccttggcatttccatgatcacaactcaggttatggcaacagattctgcttatcacttggatggaaggaattatggacctgggagtctcaagagctcacagtgcccttctgaatgcacaagaagatgtatccagacacagtaccacaagccctgcatggtcttctgcaaacaatgctgcaaaaggtgcctttgtgttcctcctggctactatgggaacaagtctgtgtgcccctgctacaataactggaagacaagcgtggaggacccaaatgcccctgaaaattgaaaatttaagcataatttcaccta

SEQ ID NO: 22918 - DNA, 421 bp, Glycine max
  Clone ID: LIB3106-032-Q1-K1-D11
aatttctctttctctctttttttgtgtgttcaaaatggctcctagttctactcacaacaagtggttcgatgtgcttatgctagttgggatagtggttagcgctatggttgctatttgtgctgctagcttctaccaagactttgatccaacatgggttggtgaccgtgctaagatattcaatggtggccagcttctatcactttccctagacaaagtctccggctctggcttcaaatcaaagaaagaatacctatttgggaagattgatatgcagctcaagctcattgccggcaactctgctggcacagtcactgcttactacgtgcgacaatcccttgtggatggcgtatagacccagaatcgatgccgctgtagccccagtgaataaagacagcgggggcgacattccttgtgtgggctc

SEQ ID NO: 22919 - DNA, 440 bp, Glycine max
  unsure at all n locations
  Clone ID: LIB3106-032-Q1-K1-D2
cccacgcgtccgatttgaccgtggttatatttctccatactttgttactgacagtgagaaaatgggcgttgaatatgagaactgtaagttgctgttagttgacaaaaagataaccaatgcaagggatcttatcaacatactggaggatgctattagaagtggataccctatattaattattgctgaggatattgaacaagaagctttagcaactcttgtggtgaacaaacttagaggatcactgaaaattgcagcactcaaggcccctgggtttggagatcgcaagagccagtaccttgatgatattgccatcttgactggaggtactgtaatcagagaagaggttggccttactttggacaaagctgggaaagaggttctcggatatgcctncaaggtgtttctcaccaatgatacaaccacaattgttggtgatggaa

SEQ ID NO: 22920 - DNA, 373 bp, Glycine max
  unsure at all n locations
  Clone ID: LIB3106-032-Q1-K1-D3
cccacgcgtccgcccacgcgtccggcatccctcttgatttgtagtttgttttgtgctttagataaaagttctgccaaatcaagaggggttttaagatcatagtgtgtgttttgcaacaatggctaagttctttgctgctatgatcttggcactctttgccatttccatacttcaaacagtggtaatggctgctaatgaacaaggaggccacttgtatgacaacaagagcaaatatggaagtggaagtgtcaagagttaccaatgcccatcacaatgctcgaggagatgtagccagacccaataccacaagccctgcatgtttttctgtcagaagtgctgcaagaaatgcctgtgtgtgcccccggngtattat

SEQ ID NO: 22921 - DNA, 344 bp, Glycine max
  Clone ID: LIB3106-032-Q1-K1-D4
cgattctcgctgtcgccgccgccttcgcggaaggggcgaccgtgatgaacggtctggaagaactgggcgtcaaggaaagcgagcggctctcggccgtcgccaatggcctcaagctcaatggcgtggattgcgatgagggcgagacgtcgctcgtcgtgcgtggccgccctgacagcaaggggctcggcaacgcctcgggcgccgccgtcgccacccatctagatcaccgcattgtcatgagcttcctcgtcatgggcctcgtgtcggaaaaccctgtcacggtggacgatgccacgatgatcgccacgagcttcccggagttcatggacctgatggccgggctg

SEQ ID NO: 22922 - DNA, 346 bp, Glycine max
  unsure at all n locations
  Clone ID: LIB3106-032-Q1-K1-D5
gggttctcgtccgtcacttgatcgctactgaattctaacgttgatgtttttaacgggaagggcaaatgcagaagccgcattagagacctagttcttgttcttgctcttgttacgttggacatccagtttgggacaactgttgctgctagattgtagtttcatagattatggatttcgtagtttgtttccttatttatagatcgtgccaatccctgttgattttccccctcctttgcctgacgctttgactaacttccctaatgcaagtaagcatgatttaccgctgcattccncacaanaaaaaaacttttttttccttttaataaaagttttaaccctaaatata

SEQ ID NO: 22923 - DNA, 51 bp, Glycine max
  Clone ID: LIB3106-032-Q1-K1-D6
ttttctctaccttaatgtctaatgttacactccctgttaccactcattaaa

SEQ ID NO: 22924 - DNA, 434 bp, Glycine max
  Clone ID: LIB3106-032-Q1-K1-D7
cccacgcgtccgcccacgcgtccgcagcttcttaacattgtcgtgtgcaggtgcagggcaaaatcaacatgtatcacaccctacaacgtttttgggagttcctaaaaacaatcagagaaaaaggaaaacaccgcacaggttagttgtggttgcggtgactcaaggctctgctgaatcaagcaagtccgatgaaaaaatcccttcgtgggccaaaccggactccgatgaacctccgccgtgggcccgggacgagcccaacaacaacagttcgcaacaagaaggatttgagatcccgttctatgcttatttgtttgcctctgctatcactgctattgccgctataggctccattttcgaatatgtgaatcaaaagcctgttttcggagtattaaagctctgacaagcgtgtttattgctccttggttggttttttt

SEQ ID NO: 22925 - DNA, 354 bp, Glycine max
  Clone ID: LIB3106-032-Q1-K1-D8
acgattactaatgcctcaacgacaacgctagtatttgctaatagagagtacacacccaaggcgggacaatacaatgggtggcgggcgattcttaaaaaacccgtatgtactaagtgatgttcgaatggagccaaacgaggagaacggaggcagcacgagcagtgaggaacatgatgaggcattggtggcctttattgaacaccgtacccacgaattcaaaaacctctttcaccgcatcgcttattataaaacccaacttgatgaacccgataaaaggttgcaagattctgaatccaaattggttcgccttctatgtcagacagtgttatctagaaataccttagatgatggaat

SEQ ID NO: 22926 - DNA, 278 bp, Glycine max
  Clone ID: LIB3106-032-Q1-K1-D9
gggaataaaccaagaaattatatacgtatacccattaattatgatgaaatcttcttcacgtctttctgcaatattcctattggtctttctccttactgccctatccccttcggatggagtttcattctcttcattcctaaagcaattaaaacaaaacctgaaaaaaagtccaaccctaaaagatttcctgaaaccaaccactttaggggatattaataatccgttgaatttaacagaaatctttttttccaaaaaaagaaccgcaccaccgtggtttt

SEQ ID NO: 22927 - DNA, 424 bp, Glycine max
  Clone ID: LIB3106-032-Q1-K1-E1
cccacgcgtccgcccacgcgtccggcaatcttcactcatcaacctgttgaagaagaaacgaggaacaacgacacaacatgtgtgtgtatatatacatacatagcctaagaaactaaacatgtatagatgaagatgataagctagctactacggtccgtggagggaagaagggtcatctatttgtatatatactctcttaattgttgtgcacctgcagcagttgaagctgccagcatgatctgagtacaccttctattggtaagaacagatcatgtggctgcttcacctgttgaatggaagcatatagaaaccctaatttgctttatgatcctcctagagatattcatccggtttcatagaaccctaaaaaaggatgcttcaatacattcttgcatcttgtatttatacgatggatgcggatact

SEQ ID NO: 22928 - DNA, 413 bp, Glycine max
  Clone ID: LIB3106-032-Q1-K1-E10
caatcatatagcattctaagaaatgaagagccctaccattttcattctctttctactttgtgccttctgcacctcactcctaccttcagccaccgctcaagtcgtggttgacatggaaggtaatgatcttcaaaatggtgggaaatattatgtgttgccagtaatagagtcatcatatggtggaataagagtagccgcaactggaaaagaaagatgccctctcactgttgtacaatctgccgatccgtatgataaggggattgcaacaattatttcaaccccatatcgagttcctgttatccgcgaaggctttcctttgaacattacgttcggtaattttgcagttatactgccttgtgtcccccttcgttctgagtggaccgtcgttaatggccaaccagaaggacccgcag

SEQ ID NO: 22929 - DNA, 371 bp, Glycine max
  Clone ID: LIB3106-032-Q1-K1-E11
caataacctatttttcaagcctgacatggaatcttttctaccaaaggtatatgatacatatatcttaaatacatttaatcaatcttaaacacttatgaattgttacttatattcttctcacacataatatatctatttcttacaatattttttttaatattcaaacctttcttcattttgtctttaataatcttttcttaccatactttatcccattttattttaatctatcctaataatatattttactcttttaattattaaatctatttctataaatatttctttatatttcaaatatattacttcttcttagtttataataatttatataataaaacattctaatacattttattactttattaatt

SEQ ID NO: 22930 - DNA, 413 bp, Glycine max
  Clone ID: LIB3106-032-Q1-K1-E2
ctctctctctcgttcgtgttcttcgtcgcaaattcaaaggaggatctctcttgcgttttcgctaggttttcgctatggcgtcgaagcgaattttgaaggagcttaaggatttgcagaaggatcctccaacatcttgcagtgccggtcctgttgttgctgaagatatgttccattggcaagctacaattatgggtcctccagacagtccctatgcaggaggtgttttcctagtgaccattcatttccctccagattatccctttaagccacccaaggttgcattcaggacaaaggttttccacccaaatataaatagcaatggaagcatttgccttgatatattgaaggagcagtggagccctgctctaaccatttccaaagtgttgctctcaatttgttccctattgacggat

SEQ ID NO: 22931 - DNA, 212 bp, Glycine max
  Clone ID: LIB3106-032-Q1-K1-E3
cccacgcgtccggttgaatgctttttaatttctgaacactttatatagcaagggcaaaatggggttgtgtcactaaataaaagctttgtagttcgtagttccactactatagtactacctatatttaccgtgtatcaccgtctggtgccccttgtgctttttctggtgtgtatcttattagaataagaaataaagggaggtcatttctatgt

SEQ ID NO: 22932 - DNA, 402 bp, Glycine max
  Clone ID: LIB3106-032-Q1-K1-E4
cccacgcgtccggttaaggactagagaatttccataggacttcaagaagacagtgggcagggctgggcttttcatatggagaaatatttctgttgcttggagctactgctgctctgatagggccaaaggatttaccaatcatatgcagaacagcaggaaggctagctggtcgagctattggatatgtacaattggctcgtggtcagtttgacactgttatgcagcaatctcaagctcgccaggttcataaggaactgcaagacacaatggctcagctagatgccattcgccatgaaattcgaagtatatcaatcataaatcctggccctttgacgcggaggcttgtggatgatcctgaccagacatctatctcaaatgaaagtaggaaaccagaaaaatctg

SEQ ID NO: 22933 - DNA, 412 bp, Glycine max
  Clone ID: LIB3106-032-Q1-K1-E5
acggcataacttgcatagactattgattaagatagctattgtcattgatttgctagcggcgaacgatgggttctagcagatggtcattcattttagtacttgcagaggcacgtaccctgccaaaatcagccttattgccttccaaagttgatatacctactgttgttcctcttccactggtggcaccactgccaaatttgcctgttactctccctccagtgcctgaactacctgcagtacctaaagtaccaattcctgaagtaatagttaataacgccaaaataatcccttgagtacctatgatctatccaatcactactacttattttgtcacttgctaaattaacttgttgttgccatcccatggtggttctggttctgttggggtttaattttttgtcattcaattaca

SEQ ID NO: 22934 - DNA, 391 bp, Glycine max
  Clone ID: LIB3106-032-Q1-K1-D1
gttccaagctagtgatctgggtctgcttgttgaaaacacctcagtggagcagcttggttgggctaggaaaattaccatctccaaggattctaccactgtcattgctgatgctgcgacaaaggatgagttgcaagccagggttgctcagttaaagaaggagctgtctcagacagactcagtatatgatactgagaaactggctgagaggatagctaaactgtctggtggagttgcagtcatcaaggttggtgctgctacagagactgagcttgaggatcggaagctccgaatagaggatgccaagaatgcaacttttgctgccattgaggaaggtattgtacctgggggtggcactgcactggttcatctctccactcatgtcccagcaatc

SEQ ID NO: 22935 - DNA, 431 bp, Glycine max
  Clone ID: LIB3106-032-Q1-K1-B4
gttgatcgagataactagaaacagtgtgatgaaaatgaaggtccttgttttcttcgttgctacaattttggtagcatggcaatgccatgcgtacgatatgttccctctccgaatgaacactggctatggtgcccgtactccggaggtgaaatgcgcaagttggaggcttgctgtggaagcacacaacatctttggctttgagaccattcctgaagagtgcgttgaagcaacaaaggaatacatccatggcgaacaatatagatcagactccaaaacagttaaccaacaagcttacttttatgccagagacctcgaagtccatcccaaggacacatttgtgttcagtatagatggcaccgtactctctaatattccatactacaaaaaaacatgatatggggtggagaaattaactcgacctgtatgatgaa

SEQ ID NO: 22936 - DNA, 356 bp, Glycine max
  Clone ID: LIB3106-032-Q1-K1-B5
cccacgcgtacgattaccttctacaacatgccaaacgacagcgttctgagactggggttggtcggtaccctctccacatgccttctatctgctacttcccaccatgaccatattttcctaccgagtcaactccatgaccatgactcaccgaggtgcactgcaaccgacccaagccttaactacaagccggtgatcggaatcctgacccaccccggcgactgtgcctgtggccgactcagcaacgccacccgggtttcttacatcgacgactactacgagaaattcgtggagtccggtggagctagagctattccccttatctacaacgagccacctgagaaccttaacaagaagct

SEQ ID NO: 22937 - DNA, 415 bp, Glycine max
  unsure at all n locations
  Clone ID: LIB3106-032-Q1-K1-B6
gcttccaagagtcacagtgaagctgaaaggagacgcagggagagaatcaataaccatcttgctaagctgcgcagcttgttgcctagcacaaccaaaacagataaagcatcattgctagcagaagtgatccagcatgtgaaggagctgaagcgtcaaacctctctgatagcagaaacgagtccggttccaacagaagctgatgagttaacagtagtggacgaagctgatgaagatggaaactcagtgatcaaagcctctttgtgctgcgaagataggtcagatctgttccctgaactcatcaagaccttgaaagcgttgaggctaagaacgcttaaggctgagataacaacgcttggtgggcgcgtcaagaacgtatngttcatcactggagaagaaacagactcatcaagcagtg

SEQ ID NO: 22938 - DNA, 446 bp, Glycine max
  unsure at all n locations
  Clone ID: LIB3106-032-Q1-K1-B7
ctctctgcgatggagtttcgcgtttccgtcatttggagccttctcctcattgtctctttcgtctctcctcaaatcaagggtgaggcttctggttccgtcttcttcgtcgatagctccagtaatcaattcattcgcgccagatcatccaactatgagcaaccttcactgttgctagaagaagctggtgctgttgtgtcagtcttgcttggttttgctcctccttccacccttccagctgccagctcatccaagttgaatgatgttctgattcctaacccattcaagaggcctcgtgctgtgtttttgctggaagtgaatggaatcaatggtcttggaaatattgtccaggataatccaatgttcagcaattcattttggagtacatattcagataaagttgacattcatnctccagatgaaaaatgatgttctgtgtttctttggat

SEQ ID NO: 22939 - DNA, 382 bp, Glycine max
  Clone ID: LIB3106-032-Q1-K1-B8
cccacgcgtacgggctaaagagaaacccactcacacacacacacacagaaatatgtgttcgccaagcaagcgccgagagatggacttgatgaaactgatgatgagtgattacaaggtcgagatgattaatgatggaatgcaagaattttatgtgcaattccatggacccaatgacagtccttatcatggtggtgtgtggaaagtaagagttgagttgccggatgcttatccttacaaatctccttccattggatttatcaacaagatctatcacccgaatgttgatgagatgtcaggatcagtttgtctggatgttatcaatcaaacctggagccccatgttcgatcttgttaatgtgtttgaggtgtttctacctcaactt

SEQ ID NO: 22940 - DNA, 380 bp, Glycine max
  Clone ID: LIB3106-032-Q1-K1-B9
ctcacgcgttcgcccacgcgtccgcccactcgtccgggaagagtagctgcaggattctgggaaattgaggattctgagtccctctggcgatgtctactggatgtgggccaggtagccctggtgccagggactgcatttggatatgacacttgcatccggatctcttatgcagaatcccttactaccctacaggcagctgtagaaagagttaagagagcacttatcccgctgagctctggtgcacttgtgtaatattgctgttttgatgtaatgggtgtattctatttttattgtaattatggcaatgtgtcctccgcctattctgaaaatattaggctgtagatattcatgcatataatgaagtgatacaactgtcttta

SEQ ID NO: 22941 - DNA, 475 bp, Glycine max
  unsure at all n locations
  Clone ID: LIB3106-032-Q1-K1-C10
caagcaccaaacccaacacacacctctctctctctctctctctctcttgtgctgttgttcgatttctcggtctttcgcaagtgaatgttgaactgactctgcggttcggttcggttttttttttttctgtttatggatccgggcgcgatgatgaacgagggttccttcgcgaacaatgcgagcggtaatacggcgccgtttagcttggcggagatctggcagcagttcccgccggcgattagtggcggcggtggattggggctcagaagcccgcagttcggtcacgggccaagagggcagtttggggatttcaccaccgggccgagccacggactcggacccagtaacagcagaaagcggcgcgactccgaggaggacgattccgctaagggcgtgtccaccagcaatgccgtgaatganggtgatggaaaacgtgttaaagggaataggaacgaaggtggtggtgatggtggta

SEQ ID NO: 22942 - DNA, 370 bp, Glycine max
  Clone ID: LIB3106-032-Q1-K1-C11
gtccgacacggaaaccacgcccgaacaacctttcactccgtcgcaaacggaagctccgcggcagcccggccccttcgccggcgtctccttcagcatatggccccccactcagcgcacccgcgacgccgtcgtcaaacgcttgatcgagaccctcttcggcccctccgtcctcttcaagcgctacggcactctctccttcgacgaagccttcgtcggcgtccgacagatcgaggacgaggccttctgcgccgtcaccgcagactccgcttcggccgccgccgacggcattgagaccctccaagtctactccaaggagatcagcaagcggatgctcgacaccgtcaaggccagagcttcgtcgagtcccgcc

SEQ ID NO: 22943 - DNA, 245 bp, Glycine max
  Clone ID: LIB3106-032-Q1-K1-C12
acgccacaagcgattttctaatctctcatatgtttcaccttttggatcttttcaattccttggctttctggtgaatttttaaatggcatcggcaactggatatcacctttcaatctcagtcctatctcgtaatgccaatgttctctaatatcatattaatgtcaatgatcattcgactcatgatcttgtataacgaccacgactagaactccttctttttctatgatattcacagcacaatccat

SEQ ID NO: 22944 - DNA, 417 bp, Glycine max
  Clone ID: LIB3106-032-Q1-K1-C2
cccacgcgtccggaaaagttggtagcgaaagaaagatgtcgatcttcgagtacaacgggagggccctagtggctatggtggggaagaactgcttcgccatcgcgagcgatcggagactcggggttcagctccagaccattgccaccgatttccagaggatttcaaaaatccacgacaagctcttcatcggtctctccggcctcgccaccgacgcccagaccctgtaccagcgcctccttttccgccacaaattgtatcagctccgcgaagagagggacatgaagccccaaacctttgccagcctagtctccgctattctctacgagaaaaggtttggtccatacttttgccagcctgtaattgctggactaggagatgatgacaaaccattcatttgcacaatggatgccattggag

SEQ ID NO: 22945 - DNA, 439 bp, Glycine max
  unsure at all n locations
  Clone ID: LIB3106-032-Q1-K1-C3
gaaaaaggggaaagaaaagatgccttgcctttacatctccaccaacataaacttagatggaggtaacatcgatccaatcttttctcaagccaccactgcagtttccacaatcatcggcaaaccagagaagtttgtgatggtcatattgaaagggtcagtgccaatatcttttgagggtaacaaagaaccagctgcatatgctgagatagtttcaatgggtggtataaatccagaagtgaagaggaagctaattaataccattggcaccatattgcagtccaacctatctataccaagaacaagattttttctcaaagtctttgacacaacactattccgtactaaatccaaaatgtaataatatgcttgatctgattatgacatgccacaatattgttccctaatcatttatcgatgangtttaacgtatgtngccact

SEQ ID NO: 22946 - DNA, 406 bp, Glycine max
  Clone ID: LIB3106-032-Q1-K1-C4
attgatgcaatttttgggactattcggcccgtgagtgttccaaggaagagtgccatttatgtgtgggggtacaatcaatcagggcagacaggtagaaaggggaaagaggatcagttgaggattcccaaacagcttcctcctgagctgtttggatgtccggctggcaccaatgcgtgttggttggatgttgcctgtggtcgggagcacacggctgcgatagcctctgatggctcactcttcacttggggggctaatgactttggtcaattgggtgatggaactgaagagcgaaggaaacatccagaaaaagtaaagcaattagagtcagagtttgtaaaatctgtatcctgtggagcacattgctctgcttgcattgctgaaccctctgaaaatgatggttccatct

SEQ ID NO: 22947 - DNA, 173 bp, Glycine max
  Clone ID: LIB3106-032-Q1-K1-C5
caaaaaaaaaaaaaaaaaaactaatttaaaatataaaaccacaaaaaaaaaaaaacggaggaagattaatatcaaatgttgcaaaaaccacccctctatttttcccaatcctctctcaaaaaccattacttcctaaaacctcaccccaaaaaacccagtccctaacccttttt

SEQ ID NO: 22948 - DNA, 433 bp, Glycine max
  unsure at all n locations
  Clone ID: LIB3106-032-Q1-K1-C6
agaaaatgcaggtgaagtggtgtcagctcaacatgaacaggcgaaccaacaagcagatgtggagtataatgagcgagatgtagaggcaaaggaccagcagtcataccccaggaggggttatcagaaccatagaggtggtcgtggtggaggtggtcgcaggggttactcaaatggtcgtggaggtcgaagtggtggcagaggaggctaccaaaacgggcgcaatcaatactacgatcagcctggaaattattatccaaggaacaactattataacaacagaggaaggggcggcagaggtggtggctattacaacaaccatggtgcaggcggtcaagttaatcatgtcgcangtgatgtggnggtgcaatcatgataagttatgagttgtttatagtggttattactgtcactagtttgtggggaaaccattttt

SEQ ID NO: 22949 - DNA, 239 bp, Glycine max
  Clone ID: LIB3106-032-Q1-K1-C7
acaatggcatatttgtgacacatagtcattttattactctcaccatatctctcaaaacgagtggaattatttcaccttaattcattaaaacaaaaaacaatatccaaaacatataaaaaacaaaaaaaaccataaaaaaaaaaaataaaaaaataaataacaaaaaaatcatcaaagcaacaaaaaaaacaacttcatattctcaaaaaggccccccttctttaaataaacaaccctac

SEQ ID NO: 22950 - DNA, 273 bp, Glycine max
  Clone ID: LIB3106-032-Q1-K1-C8
acgataaagttgatttcagtttagtttttaaatttaaaaaaaaaaaaaaaaaaaaaaaaaaaaaaaaaaaataaaaaaaaaagaagggaaaaaaaaaaaaaaaaaaaaaaaaaaaaaaaaaaaaaaaaaaaaaaaaaaaaaaaaaaaaaaggggcgccccttttaaaaaacccaattttacttccccttccttccaacttaataatttttttatatggccccctaaattaaattcactgccctccttttaaaaactttgtaactggaaaaccc

SEQ ID NO: 22951 - DNA, 106 bp, Glycine max
  Clone ID: LIB3106-032-Q1-K1-C9
accacgcctccgtccacgcgtccgaccactcgttcggttctaaatcgcgagctgcctctgtacactatggcaactcttacactacggcgtgcactgctactataag

SEQ ID NO: 22952 - DNA, 426 bp, Glycine max
  Clone ID: LIB3106-032-Q1-K1-B3
cccacgcgtccggaatggcaatgcgtgtgtctccttcagcttcaagtgcactctctctcctaaactgcaagcaaccacctccagtttcatgcatccgtgtaccttgtctctctcgctcctcgccgccatcgctctcctacaccttcaatcctcttaggtccttcatcggtcacggcggaagcagaagcccagggtttcgtgtccattgctacgctcctgctcctctcactcctcccaatctgcaatggatctctaccatttcctcagtggttttgatactggcgagaggcaccgcggtgccgaaatcgtatattgttccgttgtttgctctgcaagcacctgcaggtgtcgtttcctggatcaaaggtagatatggtgtgtggacagcattcttggcacttctgattcgtctattcttctatattc

SEQ ID NO: 22953 - DNA, 337 bp, Glycine max
  Clone ID: LIB3106-031-Q1-K1-H5
cacgcgtccgcccacgcgtccgcccacgcgttcgaaccgggagttggtagcagtaggagctagctgttagatatctgatcctattttcaattctctagttattctctagatatgtgatcctattatactcgtgcaagttggaaaaaataagatgattttttttttagcttcccttccgtccaaaatggctgcaataacttgatttttgaccgaagggaaactgaaaaatcaaattattgcagccattttgaacttattttccactagaccaagaacattaaatatgattaagtttcaaaacttaaaaaaaaaaaaaaaaaaaaaaaaaaagggcggc

SEQ ID NO: 22954 - DNA, 392 bp, Glycine max
  unsure at all n locations
  Clone ID: LIB3106-031-Q1-K1-H7
cccacgcgtccgggtgggagcttcttagtctggaagtacgaatcaacaactgctagcactgtgggtgcttagagaatgtatcaactttcatgggttttgctaccttgcagtcgccgttgagctagcatttgccatatcattttgatgtgtatttgaaggctggataagttatgtggtcttaatttttttaagaacctataatttagctagttaagtcaatttatcattgtggtgttctttttcttttagccgttggaggttgttctttaaagagatgactatggtttttggttttattttcaagtaatatatatgctgagaagatttgaaggatcgtaaantataaaaattaaaaactctctttctttctcccctataaaaaaattttaaaa

SEQ ID NO: 22955 - DNA, 384 bp, Glycine max
  unsure at all n locations
  Clone ID: LIB3106-031-Q1-K1-H9
cccacgcgtncgataaatattctaggtgtgttctaagccagaattgatggcaagtgcttttgtgagccaggaataaaatcaagataacgatttactattatctaaagtattttctattcatccttttgagtaatttaaatgtcattattatatactccataatcattggtcatgagttttaaaacaaaaaaaaaaannaaaacatatattttcttttntttttctgcccctttattttttttcatttttttttttaccacacctcctcttccccggnctttctcttttcctcaactttttttttttttcattttcttctctaatcctcgccgggcgtttcttattgataaacaaataggattaggatgggtaattacctatgtt

SEQ ID NO: 22956 - DNA, 327 bp, Glycine max
  Clone ID: LIB3106-032-Q1-K1-A1
aacaaaactctgtctatcaatctccttaccttgcaagcaccccacccacacactgtccaacgttatccgatcaaaaacccatctctgtctacctttgtttgatctcaaagttggctctcacaaaaacgtgaaaaaatttcattcccgtgagattctcctccaccgatgcatattgaatttcaggaatcctgggtgtctacgatacgtttgagacctgagatttgctagtcagttatatttttgagaacagtttagatcttttcttctgcaaagtttgttcactgcataaggcttggcagtgcccatgatggatgccacaaccagcgg

SEQ ID NO: 22957 - DNA, 84 bp, Glycine max
  Clone ID: LIB3106-032-Q1-K1-A10
gggtaagtcacctaagacactccacgtacctacgttgttgtctcttaccggctttaataagtcttctggccttgttccatattt

SEQ ID NO: 22958 - DNA, 240 bp, Glycine max
  Clone ID: LIB3106-032-Q1-K1-A11
cacattctgactattattcttctagatgctaagccatggctactagacgcaggcttaagggtgacgttgaactgaagtgtaacgcagacaattgctggcataccctcatgaactccaatgaaatatgccccatagccttcctgaatgatgacaatagcattgacgctctagacgttgatggcgaatcacctagttctatcccagacataagttacgttgaaggctcaacacttgtgaatt

SEQ ID NO: 22959 - DNA, 420 bp, Glycine max
  Clone ID: LIB3106-032-Q1-K1-A12
cccacgcgtccgcccacgcgtccgctcaaataccaattagcctaaaaacactcacaacccagcccaagggttttcagtttttctcttcccaaagagttttgttttgtctattgttctcatgggtgggtttgaacagcagatgaaggatagagccaaggagctcaaggtcttgctcaagaaaggggtgaagattgtgggagattcatgcaagaaggggtggaacaaagtcaaacacatcaaacgctagttgattagtgatttgtaatcatttgttgcatggcttattatcccaaagtctcttgattggttttcgtttttggtattgttatttgtactttcataggtttggtttgcatgtaaaatgtaatccttctatttttttgtccctctctccccttttttggggttggtttttgtctc

SEQ ID NO: 22960 - DNA, 364 bp, Glycine max
  Clone ID: LIB3106-032-Q1-K1-A2
cctatatttacaacgcaatgaatgaatcatgtattgtgtggatgaggacagtgtagtgtagggccattgagaagcattaatgatactagttagccatatccaagctccttgcgtaggagccatgttttcaaagtgttgttctctattgtctctacccaaattcatcactgttacaaacccaccaacgttttccaaccctgtacctaatttcatcactagaagaataagctccacaagaccctttcatctcacactcgccaaagcagagggaaacctcgattcagattcaccctcaacctccacttcttctccttctccttctccttttgccactgaccaaacggttttcgtgactggcaaggat

SEQ ID NO: 22961 - DNA, 356 bp, Glycine max
  Clone ID: LIB3106-032-Q1-K1-A3
accactcgtcaaccggtgcgcggtgcaccccatgtgctgcctccattcacgtggcgctcacaggccatgcgctggcgttgcccaccagaagagaccacacaatgacacttacactgcattcgctagcaacgagcggaagaacagcacatgcatcgcaggtgtcggccacccagctggcatagaagaagtttgagacgtctttcctacctcgccagaccttgatgatgcacaattggcaaaagaagtacaataccttcttaggaagggatggattccttgcttggaacacgaaccagaccacggtttcgtctaccgtgggcacaacatggcaccaggatactaccatggacgctgct

SEQ ID NO: 22962 - DNA, 443 bp, Glycine max
  Clone ID: LIB3106-032-Q1-K1-A4
cgtaaccaggctctggttttgcggttagggtagctctttctactcaaaacaaaacaaaacatcaatttctgtttcagttcgcggagatcaatatttgtcgctgaggtcgatcgtcgataaaaggcaatgtttttgtgggattggttttatgggattctagcgtcgcttggcctgtggcagaaggaggccaagatcttattcttgggcctcgataacgctggcaaaaccaccttgcttcacatgctcaaagatgagagattagtccagcatcagcctacccaatatcctacatcagaagagttgagtattgggaagatcaagtttaaagcttttgatctcgggggtcatcagattgctcgaagaagttggaaagattactatgcccaggtggatgcaagggtgtacttggttgatgcttatgacaaggaaagatttgctgagtc

SEQ ID NO: 22963 - DNA, 270 bp, Glycine max
  Clone ID: LIB3106-032-Q1-K1-A6
cccacgcgtccggcaggaagcatccagaagggtgtagagttcatcagaaaataaatgtgataaggaaaaactagtttttgtctcttatatttaaggaccatgtgtaatacttctctttgttcatagatttttttcttcttcttaagaatagtactctaaatttttggtgtcatccgtaattgctgatgataacggatttgacatcaataatctcagaaagatactaaaatatcagccttttgtactaattccagatcttattttctttaa

SEQ ID NO: 22964 - DNA, 389 bp, Glycine max
  unsure at all n locations
  Clone ID: LIB3106-032-Q1-K1-A7
ggactttttgctgaccctgagggaatgggtttaagagctcttgcaaagtcccaggtggatgagatacttacaccggctgcttgcaccattgtttcatctctcagaaatgatcatgtcgactcctatgttctgtctgagtccagtctctttgtttatgcctacaagatcatcatcaaaacctgtggtactacaaagctactgcttgcaatcccacccatattgaaatttgctgaaatgctttccctcaatgttagatctgtgaattacaccaggggaagtttcatctttcccggtgctcagccctatccccatcgcaacttttctgaggaagttgctattcttgatggctactttggcaagctagtgcangaagcaatgcttatattttg

SEQ ID NO: 22965 - DNA, 472 bp, Glycine max
  unsure at all n locations
  Clone ID: LIB3106-032-Q1-K1-A9
aatcactcttctcatattcattccaatgtcaaatcctcaaacaaacaataaccgccgccgggccagccgcctgcagcggcgagccccctcctccctgcaaataaaccgcgccgtcgagtggaacgtcgccatccccctcctctcgccgttggcatcatctccgacgccgatcgagctaaaaccgccgcaagagccgccgcagagggagccggagaaggtcaccttgtcgttcaagaagtggcagcatcctgcggctcccttctgttacgagcccgctccaatggtgccggcctttgttcctgtgtagatgaacgaacgagagagttttaggatgctatctaatggttcatatttagagagaatgaagaagaagatataacgctgtnattttaattaaataattaataatgttcctttcttctttttggtggggagaaggctttgccttattttgcacacggtgggatttatc

SEQ ID NO: 22966 - DNA, 370 bp, Glycine max
  Clone ID: LIB3106-032-Q1-K1-B1
aaaaaccagagactacagtgaggtctgagaatcgtttttgggaaggatgagatcaatcctgcgttatctatctatttgtatacaaaatgtgttgcaataactcttcactttgctacattaatgcacagcttgcaacagatgatgtcaatcatccaacatgcggtgttattcaaggtcaaagaagatgttgcaccgtctgaggctgatacgatggtcgagcgtatcaactccctagcctggttggaacagctgctttaccttaccgtgtggccattatttcacatccaaacctccaccccttcggtgaaattcactcacttctttcacacgcgtctcaacttcaaggacgacctccgctactatgtggcgc

SEQ ID NO: 22967 - DNA, 397 bp, Glycine max
  Clone ID: LIB3106-032-Q1-K1-B10
aaaaaaaaaaaaaaaaaaaaaaaaaaaaaattaaaaaaaataaaaaaaaaaaaaaaaaaaaagaaaaaaagaaaaaaaaaaaaaaaaaaaaagaaaaaaaaaaaaaaaaaaaaaaaaaaaaaaaaaaaaaaaaaaaaaaaaaaaaaggggcgccctttttaaaggacccaattttacttccccttccttccaacttaatactttttttttagggccccctaatttaaattcattgcccgccttttaaaaacttcgaaattggaaaacccttggctttccccaatttaatccctttgcaaaaaatccccttttccccacttggcttaataccaaaaagccccgccccaatcgcctttccaaacagttgcccaccctaaattgcaattggaacccccct

SEQ ID NO: 22968 - DNA, 423 bp, Glycine max
  Clone ID: LIB3106-032-Q1-K1-B11
acggacacaggcacttactcacagatatattttttttttttgtctccatcattttctcgagagctttcagtgtgtgtggctcatctttcttcttctccttacctcccccctctgtaacaccccgcttctctgaatccctttctgttaatcatctgtctttcaagctaagattttcgggtttgtctattaattcaccaagaagcaaacttagaaggatttttcgaaagccaagtgttttcagaaacgagatccacgttttattgtcgaatttcgctagtcaaattaattatcataattatttctttctttgaaaccagccaagagggttattcttgatccctcaaagctaattactctctctctttctctatttccgggactgaagaggttgtctatttgaaatcttctttatcctttcctttc

SEQ ID NO: 22969 - DNA, 473 bp, Glycine max
  Clone ID: LIB3106-032-Q1-K1-B12
cccacgcgtccgcccacgcgtccgcccacgcgtccgcccacgcgtccgcccacgcgtccgcgcacgcgtgcgagaggagtgaagcagcagagggaggagcggcattaaaaatgcagatcttcgtgaaaaccctaacggggaagaccataaccctcgaggtcgaaagcagcgacaccattgacaatgtcaaggctaagattcaagacaaggaaggcatccctccggatcagcagcgtttgattttcgccggaaagcaacttgaagatggaaggaccttggccgattacaacatccagaaggaatcaacccttcaccttgtcctcaggcttcgtggtggcatcatcgagccttccctcatggctttggctcgcaaatacaaccaggacaagatgatttgccgcaaatgctatgctcgtctgcaccctatggctgtgaactgccgtaagaagaagtgcggtcatagtaaccagttg

SEQ ID NO: 22970 - DNA, 176 bp, Glycine max
  Clone ID: LIB3106-032-Q1-K1-B2
attgtacatagctatgtttcatgtacaattcaaaggcaaagcaatttgtgtttagagagggtgtacgttttccgacaacaatatttatgcccccttcccctccggcttctctgttttgataatgagagatatttattggaaaaccttatcaaagagtcttttctctcatttttagc

SEQ ID NO: 22971 - DNA, 336 bp, Glycine max
  unsure at all n locations
  Clone ID: LIB3106-031-Q1-K1-H3
aatataaaacttttctcaccaacttttacttatatattcaacattccttncccgcaatatcgggcgtttcttatatttacccattcaccacnaaacatttttccataatttttaacatctaataacctccaatccccactaatttttactcctacactccccctgactaatcaaccacctcctcacacttataaccctttttctgactccgattttcatgcaacttggtctttacaatcacactcatatctgatacaaattaatatattacgcttctaaataaaactcctaaacaatctttttttttaaacatatataaaatacaactttttactt

SEQ ID NO: 22972 - DNA, 392 bp, Glycine max
  unsure at all n locations
  Clone ID: LIB3106-031-Q1-K1-E3
ccggggcggcgccacgcgtncgacttcttaaatttcattaccaaaccctattgttttctacctgtttgctcaaaataaaaacggcgggcactctctaaagctcactatggctcttanacatttacctattgcttcatcacaactcatatcctcttcttttcccatggcaacattctaaacttttacataaagaccactattcctatggcaagcttttaaatgaaaagccagcaaaaacaacaccttcaaagatatcattaaaaataaaaatttaaaaggctctttccaaaatctatacctataaataaacctatcacaaaattaattaaacctattcctataccccactataaccctataccaaaaccaaattccttggtaaagcctatttc

SEQ ID NO: 22973 - DNA, 400 bp, Glycine max
  unsure at all n locations
  Clone ID: LIB3106-031-Q1-K1-E5
ttatatttaattttctagtccagntaatctcaacttgggacggcgtgcttaccgaactgaggaaggaaaacctcttgttttgaatgtantgaggcgagttgaaagcaactcataaatgacgtgtcacgcaacaaggaatatattccgatcgttgggcttgctgattttaataaattgagtgctaagcttatttttggggctgacagccctgctattcaagacaacagggttaccactgttcaatgcttgtctggaactggttctttaagagttgggggtgaatttttggctaaacactatcaccaacggactatatacttgccaacaccaacttggggcaatcacccgaaggttttcaacttagcaggcttgtctgtcaaaacatacccctactatgctc

SEQ ID NO: 22974 - DNA, 339 bp, Glycine max
  Clone ID: LIB3106-031-Q1-K1-E7
tgacacaattttttcacctttttctctattagtaggattcaaaggttgcagaaaatggtcaagattgcatcgtgtactttgatattatgagaaattccagataaatgtcacaatataattataattaaccaaaaaaaccttggttttacaactaaaatcatggtctttgactgttttgttttttaaaactttggtcgaattatatccaaagagtaaaaaaaaacatagaatttccaaacttcatgttaaaattaaaaatcttgatgttacatcaaaaagtatggttatggactgttcttttaaaaccttggtcgaattatatttgaagagtaacaacat

SEQ ID NO: 22975 - DNA, 429 bp, Glycine max
  Clone ID: LIB3106-031-Q1-K1-E9
cccacgcgttcggagtgggggaacgaagaagcttcagctacagctgaaacagaagctccggcgagctacaatctatagcgattgagctctcattttctgagagcgttctttctttctctctcttctctctcaccgcgattccaccatttccccatcatgatttctgctaccaaactcaaatccgttgatttttacaggaaaatcccgagagatttgactgaggcgtcgctatcaggagccggattatccatagtggcagctctggctatgatgtttttatttggaatggaactaaatagttatttgtctgttagcacctcgacatctgtaattgttgacaagagttctgatggtgactatttacgtatcgatttcaatatcagttttcctgcactctcatgtgagtttgcatcagttgatgtgagtgat

SEQ ID NO: 22976 - DNA, 293 bp, Glycine max
  Clone ID: LIB3106-031-Q1-K1-F1
ctcttactcttcttcttgccgcagatattcatacgggagacgaagatttttaccatgctgtttggccaaacactcccattccacttcattgccaaatcttttaaaacctctccctacaactgttcatatcaatgatcaccctatgcaaaaccataaaacacagcacccaaaaaccttcttctataaataatacctttatccagacctaactttcaacgtacaattcaacaagccttcctttcaacatccatttcgacatcctacatggtttaaggcaatttaaaacactacta

SEQ ID NO: 22977 - DNA, 439 bp, Glycine max
  Clone ID: LIB3106-031-Q1-K1-F2
tggagaagcgccttcgtgaccgggggacagagactgaggaacagatcctgaagcgactacgaagggctgatgctgagattgagcaagggaaatcttctcaaatatttgatttcatcctatacaatgacatcttgaggagtgtcatgagagacttaagaaactattgggacttgacggttttgtcactgctccacctatatcaggccctatagagattgatttaccaatggatcattcagtgtcaaaaattgataacaaaatcatcataaactgcatctcctcaggagagaaggaatcaaagaatttggtcattttggatgtttcctcactaaaagggggtgcacctggacggacaagaggcctaaatttccaagccattggctctttctcaaatggtttgaatgggatagatcaacttagctaacattcaatgcacttg

SEQ ID NO: 22978 - DNA, 421 bp, Glycine max
  unsure at all n locations
  Clone ID: LIB3106-031-Q1-K1-F6
gcgtccgcccacgcgtccgggagacatgactttgacaactttgtttttttggtcgtttnncctctttttgcgctngggagcgtcgcgcgggtggcgccggaataaatgcaccaccagcaagatttttcattcctcttccacgtcatgccctctttcttgcatgatcatcactaccactctttcttattgcgagttgccaatgatgctgatagaagtgaagtgtcatctgatactgcaatcaagacatcgtattcagaagccgataagatggttgatggtatggactttggtgagctttgcaatgagtttgagtgcatcagcagtcccttggtagaatccactgcaagacaacttgcacgagatatacttgagctaagggagggaaatcgagcacttggaatctttgctgtttctgtcgcat

SEQ ID NO: 22979 - DNA, 253 bp, Glycine max
  Clone ID: LIB3106-031-Q1-K1-F7
gaaaacccggcgcgagccacgcgtacacatttcttctcattacatacacaaaacccattttactccttctttcacaaaaaaacaatatccgcgtgctatttaccagactacgagcatcatttataaccatatctttctctaccaaattgcctttgtccttttattttcatccctttttatccatacatctttagctcacatagtttgtgacgaccctccaaaagaaatatgttgctttctcattatcttcatc

SEQ ID NO: 22980 - DNA, 327 bp, Glycine max
  unsure at all n locations
  Clone ID: LIB3106-031-Q1-K1-F8
atggcttcaaatcaaaaatacgcgacgcgcttttttaaactactggaagcccaattttttncaatattcatatttccctcaaattgaaacagttcaatacaaatatgtccaataaaatttgatgaacaagagttaactgcttctcaaatccaacccatttcacaagaaggttccaatttttatttacaattaaaatcccataacataatctcttgttattcttgaatacatttattaaacatttaataacaaccctatcttacctttttatccttaccaaaaaacctttactcgattctcttccaaattcattcattataatttttt

SEQ ID NO: 22981 - DNA, 443 bp, Glycine max
  unsure at all n locations
  Clone ID: LIB3106-031-Q1-K1-F9
aaaaaacctgaaatggtagtttgtcctcctacnctgtagtggaagagatcttctgaattggggcgcaatggtgaagctggtccagatgatgattatgatggagtaccaggccctgatttgcacgagaccatgagacagacacacgaatgacaaatgatgatgttttaggagatgagatacctactgatcagcaggatgcattgcgtcagttctgttatcaaacgcttaaattgggtgttggggccaggggacacacacaatttccaggttcacacccagtttctctcaacagggataatttgcaattgttacgacaacgctattattatgcaacatggaaagcagatggtacaagatatatgatgctaataacaatggatggatgttacttgattgatagaagttttaattttcgaagggtccaaatgaggttttctttgcaa

SEQ ID NO: 22982 - DNA, 340 bp, Glycine max
  Clone ID: LIB3106-031-Q1-K1-G11
cgtaatttgtgtccttctctctaatcccccttcaacattttcgcttcttctctttctcaaatcgggatcttcaaaatttcaagattatcactttaaagacagattttttttttttgacaaaaaaaatgactctgctatggctgtttggagtgctggtcttcacttcagtgctgctcgtagtagctcgagacctttggagaaaaccatttgcactgccccttttttgaaggcgtcatctgggtttgcttgttctaacccattctgcatccttaacacaacaagattgtctttttttggaactacaattttccctccagccaccccctttttttgttgtaaa

SEQ ID NO: 22983 - DNA, 314 bp, Glycine max
  Clone ID: LIB3106-031-Q1-K1-G2
cgtccgccaccaccagagtggtgttggtgaagtctcaggccacagcacctgcttcttctgaggctgtggcggcgacacctgtgtcttctgagatgaaggcatgggtctatggggaatatgggggtgtggatgttctaagctggactccaatgttactgtgcctgatgtgaaggaagatcaggttctaatcaaagttgttgctgctgctcttaaccctgttgatgccaagaggaggcagggaaagtttaaggccactgtttctccctttccgactgttccgggttacaatgtaccggttgtggtggaaaaggttg

SEQ ID NO: 22984 - DNA, 261 bp, Glycine max
  unsure at all n locations
  Clone ID: LIB3106-031-Q1-K1-G3
cgctcaatcttgatgcttactacaggcatcaaatgtttaaagagatgaaaaaaggttttaaaaaagccgaggcttcaaagcgcactgggttcaattattaanaacancgcatgcaataattgttgcaagctctgaaaagcacaaggaggaccaagtaatggcattgaagcactctatgcaaactggaatgccacacgcaatgaaagaccaaactcaacttagggaggaaatggtttaccattacaaccttgaaaactttaa

SEQ ID NO: 22985 - DNA, 60 bp, Glycine max
  Clone ID: LIB3106-031-Q1-K1-G5
cgtaatatatatccttctctctaaacccccttttttattttctcttcttctctctctcaa

SEQ ID NO: 22986 - DNA, 365 bp, Glycine max
  Clone ID: LIB3106-031-Q1-K1-G6
cgtaatttgtgtccttctctctaatcccccttcaacattttcgcttcttctctttctcaaatcccgggcttcaaaatttcaagattatcactttaaagacagattttttttttttgacaaaaaaaatgactctggtatggctgtttgtagtgctgctcttcacttcagtgctgctcgtagtagcttgagacctttggagaaaaccatttgcactgcccctttcttgaaggcagcatctgggtttgctgctactaacccattctttattcttaccaaacccaaattggttttttttggaactacaattaattcttcagtagaacctattttttttttgatggaagggaataaatttaagactgatc

SEQ ID NO: 22987 - DNA, 361 bp, Glycine max
  Clone ID: LIB3106-031-Q1-K1-G7
cccacgcgtcctgcacggtttctataccgttattcaacaggtcacctggatactattacggacgcttctttaccatgtggaagctgcctattttttactgcactgattcttttcacatgttaaagacctttaataagctaagactgcataccccaatggcttcattccttataattggatttgacaacgtttcccaagtgcagtgcatcaccttaatcgcctacaagcccccatgcttttaattcattaaaaaatttgaaaagcatctttatccaccccactttgttggttgcacttaaactacattcccatttgtttttcctttataaaatttaataatcctgtatttttgctttcattt

SEQ ID NO: 22988 - DNA, 140 bp, Glycine max
  Clone ID: LIB3106-031-Q1-K1-G8
gctgagatgaacccattcttctatggggaatatgggggtgtggatgtcctaagctcgactccaatgttactgtgcctgatgtcaacgaagatcattttctaatcaaacttgtttctgctgcttttaaccctgttgatccc

SEQ ID NO: 22989 - DNA, 417 bp, Glycine max
  unsure at all n locations
  Clone ID: LIB3106-031-Q1-K1-G9
acaccacatncatctttgccttctgcatgttggttctctgtaaacagatactgcaaaagaagaagaatattgaatatttggttgggttgaatccctgggttgaagcgttgcagacatcacggctatttaagagtgtctcgctctctcattcatgtcccaactgtacgacggaggacaggttgcgtaactgccaccaacccttcgccgcacggtgggcgtggtgctttgccttctgaaggtggtagcccttcagacttgctcttcttagctggtggtggttctgctgtcttctagcttcttcttaactcttttttctttttactacttttaagctaccttgttttcaaaataacaaaaacaaacactttcttacttcataagatcaccttttcttcatcttctacttctccttcacta

SEQ ID NO: 22990 - DNA, 229 bp, Glycine max
  unsure at all n locations
  Clone ID: LIB3106-031-Q1-K1-E2
tttttttttttttattttttttttntnaacactaaatttaaaaatacccgccttttttttaacagcgggggcgctttttttttttttttttttttttttataattttttttttttttaaaaaaaaaaatctctcctataaataaataaaaaaaacatttaatagctttttattttaatataaataacacctattaattttataaaaaaatattttcaaaattttataat

SEQ ID NO: 22991 - DNA, 420 bp, Glycine max
  unsure at all n locations
  Clone ID: LIB3106-031-Q1-K1-H1
cgccacgcgtccgaaactacactctccacacacacacacacactcaccggcgtatcgttcacacgnagccgatccaaaccccactctctctctctccgccgcaaacgacccttctccggggcggcgccacctacaacccccgatttaactaaaggagcaacagaaggagctgcttggttacaaatggcggccaccgcaagcaacaatgacgtcgccgccgccaacgacggtcccgtgatgagccttatcaacaagcgcctccgcgctctccgcaagaagctgaaccgcatcctcgccatggaagaggccgtcaccttgggcaagcccttgaacaaggagcaggaagaggttctacgctccaaaccctccgtcctcgccctcatcgatgagctcgataagctccggcaacctttcgccacc

SEQ ID NO: 22992 - DNA, 169 bp, Glycine max
  unsure at all n locations
  Clone ID: LIB3106-031-Q1-K1-C1
cccacgcgtccgcccacgcgtccgattccgtgtggtttggctgaataaattaaagaactgggctgttattccagtttgcatgcagttgcagtaatcttgtaatgttgtactgagacaaaagctggccttttgtccaatcaataaattataagaacttgcttnanaagaa

SEQ ID NO: 22993 - DNA, 311 bp, Glycine max
  Clone ID: LIB3106-031-Q1-K1-C2
gaaaaaccgggcgagcgcacgcgttcgctctctcaatttttttcttaaaatgagttattttttggtgctcagtcaccaaactggcgcgcgcggttttttggttgtggcgtgattccaacaaattcacttttgatccacacacactttgtcttctggctttgttttctttttcccaattcctatcccaaaccttttttttgcttcttagattcaattcccccttttcgtttttacttctttaaaactttcctccccttaacctttcccatccatttcatttcactcaccccaaaaaaacaccctcacttttt

SEQ ID NO: 22994 - DNA, 400 bp, Glycine max
  unsure at all n locations
  Clone ID: LIB3106-031-Q1-K1-C3
gggcgagccgcgcgtccganttcattcatttttatttcttttcttttctttttatttattattattatttttttgcgcgccgccatggtctttcttgctcttctctgcttcctttccctgacaatctcattttcacttcctttcatctctgagacccaaaagctgcttcttctgcttctcatttccccaaaaccattcactctcttgattcatcaaaaagctgttttatttcccttttctcctggcttctgattcagattcagttcacctcttttttttcttcattttttttcgcttttgttaattttcttggtgtcattgtgtttgcaaagagaattttatgtgtaccattgatttaaacgtttcacctttgaaattgaattcttgtggcgtgtgtgta

SEQ ID NO: 22995 - DNA, 335 bp, Glycine max
  unsure at all n locations
  Clone ID: LIB3106-031-Q1-K1-C5
gcgtgcgcccacgcgtncgattcttcaaatacctaatatttagtttcacattcttcccatcattanctttggcatnncttggtggggcaactaatgctgatgctgcattacctcctgcattttactggaagtccaagctttctaccaaccaatgccgaaagccatcactgatttgctacaacctgattggaaagaagaaaaagacacctctgtggatgtagggaaagggggaataaatttttgtgtttaaaaaggaaacccaaggcccagaaaaggcacttatttttatggttgttggggagaccggggaatgaattttcccaccagaaccaaag

SEQ ID NO: 22996 - DNA, 434 bp, Glycine max
  unsure at all n locations
  Clone ID: LIB3106-031-Q1-K1-C7
cgcccacgcgtncncccacgcgtncgancgaagattttttgtcgtggaaagggaggcaagggttccgcagttttattagccaagaggcacacgaatctgcttcttgacaacatccagggtatcaccaaaccgcaattcggcgtttggctcgcataggtggtgttaaaagaatcagtggtctcatctacgaggagacacgtggcgtcctcaagatattcctctagaacgttattcgcgacgctgttacctacaccgagcacgctataagaaagaccgctaccgctatggatgttgtttatgctctcaaaaggcaaggcaggactctctaccgtttcggtggttaatttctacggtttccatcggcgtaacaactgcttattggttattgttgtaaatggttgctttttacgcttcttgctatatttgcttcaatt

SEQ ID NO: 22997 - DNA, 399 bp, Glycine max
  unsure at all n locations
  Clone ID: LIB3106-031-Q1-K1-C8
cggcgattgggattaaaaatgaactnatgcttatatctgaacttcagcacacgaatcttgtacagcgactgggattctgcattcatgaagaaaaaagaattctaatttacgagtatatgccaaacaaaagctggatttctatctgttcgattgcactagaagcatgttactagactggaagaagcgcttcaacataatagaaaggatttctcaaggaatactctatcttcataagtactcaagactaaaaatcattcacagagacttgaaagctagtaacatactacttgatgagaatatgaacccaaaaatttctgattttggattggcaagaatgtttatgcaacaagagttcacaggaactactagtatgattgttgggacatatgggtacatgtc

SEQ ID NO: 22998 - DNA, 337 bp, Glycine max
  unsure at all n locations
  Clone ID: LIB3106-031-Q1-K1-C9
gggcaaggcanancacatatcaacgcactttaactgttctctccagagtccacaattcattttgcgagacattttttgtgtctgaagaatccctcaaggtcatgcttctttgtggttctgatctccttcttcttttagcattcctggattctggattcctgaccaggttaaaactatatgcaaagattattgagtattctgcattcccagggaaggacatgatgttgagaaaactatatttaaagattacattcttaatgagaataacgataatatcaaaattgttaatgaactttttccaaatcaatatcatcttaaccagagttaaggattgcat

SEQ ID NO: 22999 - DNA, 328 bp, Glycine max
  unsure at all n locations
  Clone ID: LIB3106-031-Q1-K1-D1
ccacgcgtncgcccacgcgtncggccacgcgtccgttgttatgtcaagactattgaatctcctgctatattacgccgtttatgtgcctgaaaattgttctgctattgagatggaacctacaaagaattgattcctcccaaaaaaaaaaaaaaaaaaaataaaaaaataataaggccgtctcatctaaaaaaaacaaaaattacatacccgtgtatgccacgcaatactttttctaatattgcacccaaatcaaattcacttgccctttttttacaacaaacttacttaaaaaaaaatttaaaaattccccacctttatttaaatattc

SEQ ID NO: 23000 - DNA, 435 bp, Glycine max
  unsure at all n locations
  Clone ID: LIB3106-031-Q1-K1-D3
tcttacanacctttntcntntaaacacttttttacactacgcccttctcccatatcacccgacctttttttaaaagcctacatccgcctcttcatacctacacccaccaaccataactctttctcttcactcaaaaaaacttcctccatacctttaattaccaaaacccttccattctacccttttcacttcttcaatccaccccactctataacttctaattaacaccctatcatactccactcttaattactcacttttatcctcattcaccaacactaaatcctttattttctctcctatcatttcaaaacattttctttttcataacttcaaccctcaaacccttaatcctacatccccacccatctattattctaaaaaaccctttaaattctaatccacaacacattctcatcacctctctcatccatt

SEQ ID NO: 23001 - DNA, 141 bp, Glycine max
  Clone ID: LIB3106-031-Q1-K1-D5
cggggcgagcgcacgcgtacgggccaagccagtttagcacaaccaaagcttcactttcaaatggcttcagcttctgttcccatggcgttgttactgagctctgttaccaacaacaacaaaccttcatccttaacctttttt

SEQ ID NO: 23002 - DNA, 230 bp, Glycine max
  Clone ID: LIB3106-031-Q1-K1-D6
cgggcgagactatctttatataataatataaataagattttaaaaataaaaaaaaaaaaaagaatctatggaaatataaaaataggatatatggaggtacaaatagtaaatcgaggtacccattttatgataaacttccttccattttttgttcctttagtacgcctaatattttccgcatttgctatgggcttctctttttctttatgttcaaaaaaaaccaaattttt

SEQ ID NO: 23003 - DNA, 448 bp, Glycine max
  unsure at all n locations
  Clone ID: LIB3106-031-Q1-K1-D7
cgtgcgcccacgcgtncgataaaaacactcaaaagaggataaaaaaagaagaaaagaatggtaacaataggtggtggtgtgagtctttcaagccctancanggtatttgctaatgctaagggaatagactcagccaaaaggcccaggccgtgaggtttccagctctgtcgaggcccattcaaaagtggcctggtttggtgaagacccggcccgttcgggcgacgccggagaagatatcggagaacgtagaggagagcataaagagcgcggaggaggcgtgctcgggaagcggtggtgacgcggaatgcgcggcagtctgtgacgaggtggaggaactgagcgcggcggcgagccacgccagggagaagcagaagcagtctgacccgctcgaaaattactgcaaggacaatccagagactgatgagtgccgcacctatgataattgatg

SEQ ID NO: 23004 - DNA, 418 bp, Glycine max
  unsure at all n locations
  Clone ID: LIB3106-031-Q1-K1-D8
cggcgacaagctcccngaggccaccttctcctacctgtactcgtccggcgaggtgcatactacgacgcggtctgtactgacgaaggggaagaaggctgtgctgttcgcggtccccggcgctttcaccccacgtgctcgcagaaacacgtgccgggcttcttggagaaatcaggggagctgagggcgaaggggatcgacacaatcgcatgcattttggtcaacgacgccttcttcatgaatgcatggaaggaggacctcaaggtcaacgaggaagtcctcctgttatctgacggtaacggaacctttaccaaagccattggggtcgaactttatctcaccgacaagcccgttggtttgggcgttaggtctatgcgttacacgcttttggcccatgatggggttgtcaagctcttcaatt

SEQ ID NO: 23005 - DNA, 374 bp, Glycine max
  unsure at all n locations
  Clone ID: LIB3106-031-Q1-K1-D9
tatactccaaatgcactttatacaaagcatttttganagagaatctgttgaggcanggacgcagaattgttggaatcattggagaccaatggancgatctgcttggagaccacagaggcgaagcaggacctttaagcttcctaatcccatgtactacattgagtagtaccttcacctctctcaacaatctagctagagtttgctcctatctatatgtaataaggtatgctgatatgcactattcaaataggagcattagctatgtttgttaatgtcactttatgttatgtgggtaagtcacctaagacactccacgtacctacgttgttgtctcttaccggctttaataaatcttctgcccttgttccatattt

SEQ ID NO: 23006 - DNA, 186 bp, Glycine max
  unsure at all n locations
  Clone ID: LIB3106-031-Q1-K1-E1
tatcttaatactnnnnacctacngagtttattttctccctacatgcagatcaantccccgcgcgatttttaccatcaaacatacctcccaaaaatatcctttaccaatcttcattcataatgataatacaaaactatcaccttttatccaacatttaaacaaaataaaactttttacttaacatac

SEQ ID NO: 23007 - DNA, 449 bp, Glycine max
  unsure at all n locations
  Clone ID: LIB3106-031-Q1-K1-E10
gaannnccgggncgagcggggcgtacgaacacgcatccgatgaaaatgaacgtccttgttttcttctatgctacaattttggtagcatggcggtgccttgcgtacgagatgggccatcttctaatgaacactgactatggtgcccgtactcaaatgtgaaatgcacatgttggaggcttgctgtagaagcacacaacatctttggctttgagaccattcctgaagagtgcgttcaagcaacaaaggaatacatccatcgcgaacaatatatatcaaacttcaaaacactttaccaacaagcttacttttatgccagttacctcgaagtccatcccaaggacacatttgtgttcagtgtagatggcactcgactctctaatattccatactacaaaaaacatggatatggggtggagaaatttaacttaaccttgtatgatgaatgggtt

SEQ ID NO: 23008 - DNA, 260 bp, Glycine max
  unsure at all n locations
  Clone ID: LIB3106-031-Q1-K1-E11
taggaatcatcaattctttgtaactttgtattaacgctgattttttcttcaaagtcaccgtttaagccttgcacaatttctgtcttcctgatgtcatcttcattcttgtttttaactacaggaaggtgtacaacaacttgttcttggtttatacatcatcaggggtgacaacatgtatgtcccttactctatcatttttaaatttgngcatcatttagatttcattttgtggcactatttatatacactaaaaaatgtat

SEQ ID NO: 23009 - DNA, 433 bp, Glycine max
  Clone ID: LIB3106-031-Q1-K1-B9
ataactcattattattcactaacatgttgcatgtacgtaccatttttttatgctatatgctctggctatgaattttgctttaaattaaatttttactatatggtttcaggttatggcaacagattcgcctatcacttggatggaaggagttatggacctgagagtctaaagacctcacgtgagtaatcatactccatttttttgcacacttagttgtattatttgtttaccatgcttcatgaatctagagttgcttcagatttaccaaatgatctaatattttcagttcatttgctttctattatgtgaattaattaagtgtgatctaatgattaacaattctgaatttggtttgatatatcagagtgcccttctgaatgcacaagaagatgtagccagacacagtaccacaagccgtgcatgtttttctgcc

SEQ ID NO: 23010 - DNA, 118 bp, Glycine max
  Clone ID: LIB3106-030-Q1-K1-G11
cccacgcgtcctcccactcgtccggtttaaaaaaaaaaaaaaaaaaaaaaaaacaaaaaaaaggaaaaataaaaaaaaaaaaaaactacataaaaacacaaaaacaaccatcattaaa

SEQ ID NO: 23011 - DNA, 327 bp, Glycine max
  Clone ID: LIB3106-030-Q1-K1-G12
caagattctcacaaacaactcttgagaaagaaagaatggctgccaacacattgatgagttgtgccatctcagccttcccatctctcctttcctcctcaaaatccagatttgccgcagcagttcctctttccagctttgttgtcaccaatgcctcttcttctcgcttttccatgagtgctgattggatgcctggccagcctagacccccctaccttgatggttcagcacctggtgactttggattcgaccctcttcgtcttggtgaagtaccagagaatcttgagaggttcaaagagtcagaactcattcactgcagatgggccatgc

SEQ ID NO: 23012 - DNA, 450 bp, Glycine max
  unsure at all n locations
  Clone ID: LIB3106-030-Q1-K1-G9
ctcaactttactcctcttcaatcagttgcatattctttgctattccaatggccactgttgaggttgtgtcagccaaggttgccctcccagaggacacaaaagaggcatcattgaaggttgacgaggagaagaacacagaagaagttgttgagactccaacaccagaaactgtagtcactgagcaaaccaaggaggaaagtactgaggccccacgacctgcagcttcagaagacaagccctcggttgaagttcagactaaagaggtggcagaggaagttgtgtctgagaccgtcacacangagccaacagttgagatacatgaagctgctgagggaacaaangaaaatgccgatcctgctgagattaagacaccagaagcttcagaagatgttaatgttaaggaagagaaggaagctgaggctgaagctaaggaggaggaggcccccgcag

SEQ ID NO: 23013 - DNA, 322 bp, Glycine max
  Clone ID: LIB3106-030-Q1-K1-H10
tctcaagcaaccatggcaatggcaacccaagcccttctcttaaccccacccctctccggtggcaaagccagcgaccgcgcctccgtgccatggaagcaaaactccagcctctccttctccagcccgaagcccctcaagttctccagaacaatcagagcagcagccgccgacgagaccacagaggcaccagcaaaagtagaggctgcaccggtcgggttcaccccaccagaacttgacccaaacaccccttccccgatcttcgggggcagcaccggcgggctcctgcgcaaggcacaggtggaggagttttatgtcattacgt

SEQ ID NO: 23014 - DNA, 301 bp, Glycine max
  Clone ID: LIB3106-030-Q1-K1-H11
cggacgcgtgggaaacacggggcactggtttcgaaccctcgttgtggttaggtcttcttcagctttcgaattttggaatgcatgggtcagggaactccgggcggcatgaaccggcagggcgaccggaagccggacggcggcgacaagaaggagaagaagttcgagccgtcggctccgccggcgcgcgtggggcggaaacagcggaagcagaaaggtccggaggcggcggcgcggttggcgacagtgactccggtgacgaagtgcaaactgcggtttctgaagctggagcggatcaaggact

SEQ ID NO: 23015 - DNA, 162 bp, Glycine max
  Clone ID: LIB3106-030-Q1-K1-H12
gccacgcgtgcgctcttatctactctatctttatgagaatattgctatgcttgtggctaggggcactgctgcaagtgcgactgcatgaacctcacatgcaacccaccatcattgaacattcaacccaaacgcaaactgcttacactttatctctttttaatt

SEQ ID NO: 23016 - DNA, 405 bp, Glycine max
  Clone ID: LIB3106-030-Q1-K1-H9
cccacgcgtccggtccagttcaccctttggaaccatatcacatcccggatatgatgaaatgggatgaattgagacggtattttgtaagtacataattatcttgaataaattcactatttctttattttccgatcgcctggaaagaacaagatgtttcttttgttctttcttcaacaatttctgatctctagtagacctctcagtaggattcgaactcagatgaagttctgaccatctgtcagagaaaaaagaacgagtagctctgtatcaatggaatctcatcatccatccataacgaattggtgtggtatattcaaatcataccatatgaccagtaaaaactagtattttaattgaaactagacctcatagggaggaaattggattaatgattggattaaattt

SEQ ID NO: 23017 - DNA, 435 bp, Glycine max
  unsure at all n locations
  Clone ID: LIB3106-031-Q1-K1-A11
cacgcgggcggncggactcattgngggagaaccaagcatcggttctacttccaggaccaccgctacatcccgtcgagagctgttgttttatgaaaacgaaggccagctttttaaaatagatcacacaattgtgcgccctccctgataaagagcatagtgcattatctgaccaaagcagcccacggaagagaggggacacatcttctggcaatgataggttggccactcatcaagatgggtctgactacattgatggtcctagagggaaaagaaaaagccctgctagccctgcatgggaccgtgatgagggtggctatgattgccctcaagctaatggacatagtcggagccccagccggagccctatggatgatgacaggagcccccttgatgaagatgatgacaaccaccgtcgctcacagtcaccttgaaaac

SEQ ID NO: 23018 - DNA, 437 bp, Glycine max
  Clone ID: LIB3106-031-Q1-K1-A3
ggttgcttggcggggataagattaaagattcaacaatggcctctgcttctgctactcttgtcaagtcatctcctgttcttgacaagtgcgagtgggtcaaaggccagacccttcgccaacctctcggagatgtaacccttcctcagcatcagctctcaccatcaaagctgcttcctatgctgacgagctcgtcaaaaccgccaaaacagtggcctcaccggggcgtggtattttggcgatggatgagtcaaatgcaacctgcgggaagcgtttggcatctattgggttagagaacacagaaactaatcggcaggcataccgtcccctacttgtgacagtacctggtcttggtgaatacatctctggtgccattctctttgaggaaactctctaccaatccactgtcgatggaaggaagatcgtcgacgtacttgttg

SEQ ID NO: 23019 - DNA, 323 bp, Glycine max
  unsure at all n locations
  Clone ID: LIB3106-031-Q1-K1-A6
cgtngaagaagcagcgatcgtttctacttcctacaccaccactactgccgagggacagggtctgttttaagagaacaaagcccaccttcttttgataaatcacaacatcgtgagccctccaagataaggagcatagtgcattacctgaccaaagcaacccacggaagagaggtgacacatctcctgtcattgataggttggccactcatcaatataggtctgactacactgatggtactagacggaaaagtaaaagccctgctatccctgcaagggaaccgaatcagggtggctatgatagccctaaacctaatggacatagc

SEQ ID NO: 23020 - DNA, 271 bp, Glycine max
  Clone ID: LIB3106-031-Q1-K1-A8
gtaatctttaagaattctcccttttggaacatacacccggtttacagcagcaacgttgtttcgaggtgtcacgattttggctcctcgtgactctccaaatactgatggcattgatccggattcaagttcaatgtgtgcatagaggattcatacatatctactggagatgatcttgtggctgtgaagagtggatgggatgaatatgggattgcttatggccgtcctagctctgacatcacaatccggcgcataactggatcgtctccatttg

SEQ ID NO: 23021 - DNA, 443 bp, Glycine max
  Clone ID: LIB3106-031-Q1-K1-B1
gagagagagagagagagaaggctctttttttcttttttgttggtttctcttgtttttttggttgggtaggtactgaggaagaaagaccaaaactttatccgcttgcttcacttagctcaagagcgacaattcaggcaaaggccttgaagtcggagtgtgtgttaaggatttcttaggagttgcttctgtcttgactgaagaaatggaggtatatggcaaatctatggttgcaggtcctgcaaatgttatttttctgtcaagtattttgggccaagaaggtccagttcccggtcacaaatgcgactggaaatgtcaaaatgaacatgtttgtggaaacatgtatcgctgcaagctaactgggctgactcacatctgtgataaaaactgtaaccagagaattctgtatgacaaccatagctccctttgtcgagctagtggtcaaa

SEQ ID NO: 23022 - DNA, 330 bp, Glycine max
  Clone ID: LIB3106-031-Q1-K1-B10
ggcgaagaaaccactttcacctattcctccactccctaagtttacaccacttaatgcactccaaacttgtggcggagtttctgcacaggactttgtacattaccccaaatggtgcccacaaccaccttcttcctgtatgcttaggctgtatatattaatattgtataggtggatgactactcttgatgagactgcaaaacatgcacgcatattttctgccttctttattgtactgttcgtgtgaccaagtctatggagcaaccactatttgtttctaataaaaccttgaaaggatagcccatgacatgatcctgggtggagactttgaat

SEQ ID NO: 23023 - DNA, 414 bp, Glycine max
  unsure at all n locations
  Clone ID: LIB3106-031-Q1-K1-B11
atgaggttcatgacgatgggttatggattatgtttcataaactctcatatgcatcangattaacgtctttcatctgcatgaagcaccccttgccctcaaaagacatatatgtactttcacgtattgagagaatgagtgagactaaatatatgcttcatgctgaattcaatgattgcacgtcgtaataaaataatcgaagcttatttttttgcggtgttatataaagagccctcccgatgatcaagtatattgaggaagtctatttgttgctattaaagccttgaaaggatagggcatgtgatgagcctgggttgagagtgtcaataaaatttaaactaaaatagagcgatctgctccccatttttaaaagacccatgatttatcaccgtgaatccccactgttattcttttttt

SEQ ID NO: 23024 - DNA, 334 bp, Glycine max
  Clone ID: LIB3106-031-Q1-K1-B2
tcttcctctttttctcaacaaaaatgtgttcaattctagctagttctattacgtgggccgggaccattaacatggcgagcgcgcttctgttcatggttttcgcagtttcatcaactttagcatgtcaataatatcacacgacaacgctcatgcggatagggccactaggcgcaccgacgaggaggtgatgtcaatgttcgaggagtggctggtgaaacacgacaaggtgtacaacgcgctcggtgagaaggagaagaagtttcaaatcttcaagcacaatctgcccattatcgatgaacgaaactctcttaaccgaacctacaagttgggactc

SEQ ID NO: 23025 - DNA, 317 bp, Glycine max
  Clone ID: LIB3106-031-Q1-K1-B3
acccacgcgtccgctcgttcttcttcggcgttatcttcttcttttgttgtttgtgtgttggcgttttctctcacctgaaaatgtcttgctgcggtggtaactgtggttgcggaagcgcctgcaatgcggcaacggctgcggaggctgcaagatgtacccagacttgagctacaccgagtcaaccaccaccgagaccttggtcatgggagtggcaccagttaaggctcaattcgagagtgctgaaatgggtgttcccgctgagaacgatggctgcaaatgtggagctaactgcacctgcaacccctgcacttgcaagt

SEQ ID NO: 23026 - DNA, 444 bp, Glycine max
  Clone ID: LIB3106-031-Q1-K1-B7
gcagagagagagatagagacaatgctcttttctatttaattcccctctccaaatttcaaccgcgcgcggctctccttaacagcatcatcacatgcacccgcgattcctactatcccttcccatggtctttatctcaagcctcgccgtaccttctagaaccttccctcagatctcaattccccttccgctttctcctttcatggaaatggcttccactccccgcaccgtcgaagagatcttcaaggactacaccgcccgcagaaccgccatcgttcgcgctctctctcaagatgtggatgaattctacggactctgcgatccagataaggagaacttgtgcctctatggacatccgaatgaaacatgggaggtgactttgccggcagaggaagttcctccggagcttccggagcctgcactcggaatcaattttgctagggatgg

SEQ ID NO: 23027 - DNA, 258 bp, Glycine max
  Clone ID: LIB3106-031-Q1-K1-B8
caccaaacaaagttcacagctttttttgttctttcacctcgattcacgaactgggtcatcctcgggaggtggattattggatttcattttgagctacaccacacccccaagactttgattttaaaccaaaaccagttggcaagtacctggaatttattaatgatttccccccaatttgttgtgtaacccttaagaacctaatggttggtgaaggtgaaaaacaccaatcttatgtttttttaagaaaattttattctt

SEQ ID NO: 23028 - DNA, 405 bp, Glycine max
  unsure at all n locations
  Clone ID: LIB3106-030-Q1-K1-G10
gatggatcggatgctaagaccgggaggacgagtgtatatacgcgacaccacacttgttataggtgagcttcaagaaattgcaactgcattgggatggtcaactaccataaatgatgtaggagagggtccctattcaagctggaagatattaaggtctgataaacggttctgaattgctcaattgcgtcagtaacttatagaacaccatatatggtactcccaactgaaatctcattttgtgccagaaatgttggccaaaactaacccataatttgccagaaacggtagtcttaattacaatngtgaatcccaactaacaggtttttctctaaacactttanagaaactggctttnaatcaatctctacagaattaactggatatggttagatgaatttttttttt

SEQ ID NO: 23029 - DNA, 451 bp, Glycine max
  Clone ID: LIB3106-030-Q1-K1-B12
cccacgcgtccggtgtacttgtgttaattgtgttgttgttgtaggaaatttaagtgaagagagaatgatgatgaagtctgctatgtgtgcattggtgcttgtggcactggttgtggttgaagtggggcccatggctgaggctgcggtgacttgcaacccaacacagttgactccttgtcttccggcaattaattcaggttctgcaccttcgagtgcttgttgccagaagctgaaggagcaaaagccatgcttctgtggctacctcaaaaaccctagcttgaagcagtatgttaactctcctaatgccaaaaaaaccgttagttcttgtggtattgccaatccaacttgttaagcacctcttatatatatatttaaaaggtgtgaacattatttttatattgattaaaaattttagttaaattattttccccatttggatcttataaaacca

SEQ ID NO: 23030 - DNA, 456 bp, Glycine max
  Clone ID: LIB3106-030-Q1-K1-B9
tgacttttcattttgccatctccacgattttcggcaccttctccaccgccgctgcacccagagtgcgccttcgtcaatagcctttaccgctccagcttcagtttgttgattgaagacaacaacttccagcgaagcagcgtaagtgttagtaaaagattttatttttctctctctctcttccttctaaacgccgcttccgcatctctcttccttttctaactatagattttatttttccctctgattcttcctcttcctcttcctcttcctcttcctctccaccctccacatagcttccaccctctcaacccccaccaacttcatcaagtcctcctgcagcaccacccagtacccagccctctgcatccagtccctctccgtctacgccttcaccatccagcaagacccccacgagctcgtccagacagccctctccctctccctcaaccacaccga

SEQ ID NO: 23031 - DNA, 390 bp, Glycine max
  Clone ID: LIB3106-030-Q1-K1-C11
ctgagtcgtctaacaagcaatgtctctgacatcgtgtatgagaccaggaggatccatgagtggatcgatggactcaacaaagcactgagcttagagtcgggctttgagcgacatggtgagcattctgagcgaggttgaacaggccaaagagcatgtctacatgcataaatgcgagaggaagaggttgaagaagcagatgcagctgcatgagaaggtcaatgatatgaccgacaatgatacttacgctgatgctcataataaacctgatggtactcatgaggactgtgattatgactgacacaatctgtcacagtcactgtgaaggacactagcatggagattagcacacattgtccctgactgaactcctgactgaacatagatcgtggt

SEQ ID NO: 23032 - DNA, 373 bp, Glycine max
  Clone ID: LIB3106-030-Q1-K1-C12
ctgcaacttcttaaccgctgcagtctccactcctgctaatagtttagcacactctttgttgttactgtggggtcctgaagcacagggagattttacccgttggtgtcaattaggtggtctgtggacttttgttgctctccacggcgctttcgcattaataggtttcatgttacgtcaatttgaacttgctcgatctgttcaattgcggccttataatgcaatcgcattctctggtccaattgctgtttttgtttctgtattccttatttatccactgggtcagtctggttggttctttgcttctagttttggtgtagcaactatatttcgattcatcctctttttccaagggtttcataattggacattaaac

SEQ ID NO: 23033 - DNA, 456 bp, Glycine max
  unsure at all n locations
  Clone ID: LIB3106-030-Q1-K1-C9
attggatccactgatatcactgatacttgggagcccctagaggaaggcctccttcctttggagacaacgaggcatgtgtcaatgataacagtaaccctttcaaagaaggaacttgatacatcatctgtggggtatcagcctccattaccagctgaccaggtgaaggctgccacagattttgattatgaaggagagggttcgcccaatggccgtgctcatggtcgtggtggccgaggcaggggaaggggcagagggaatggttttatttcagctgattatgaggatggaggttgggatcgtaataggggaaatgcaaggggcaggggtaggggaagaggtcgtggctttcgtggtcgtggaaggnggggagggtacaatgggccccatgttgatatgcaagatggaggatacaaccaagatgtacctcaaggccgtggtcgtggccgtggcaggggg

SEQ ID NO: 23034 - DNA, 183 bp, Glycine max
  Clone ID: LIB3106-030-Q1-K1-D10
cttagtcgtaagtatttataggagtgcttattcaaatggttgtaaagtagttaggactatagaaaactcaagtttaatataagaattcatattttgatccaaaaaaagatccaaaaaaaaaaaaaaaaaaaaaaaaaaaaaaaaaaaaaaaaaaaaaaaaaaaaaaaaaaaaaacagcaaact

SEQ ID NO: 23035 - DNA, 230 bp, Glycine max
  Clone ID: LIB3106-030-Q1-K1-D11
cccacgcgtccgtggttatagaggacctgattcacctgagcaccttatatccagtgtctcgacacttgcgcatagggtgcttaacgggttgttacggaatgacgagtctacaccggaaagttcgatgatacaggaggtcatgttgcaagatgttactgctcatgttacagacactaatgatcatgatgcttgatctcactggtacactagctcctacgtcgcgccaaact

SEQ ID NO: 23036 - DNA, 452 bp, Glycine max
  Clone ID: LIB3106-030-Q1-K1-D12
agccaatcttcctgccacagcgtcacactttcaaccccatcagatgcaccaatactgataagaataacaatagtagtagtagcagcagcagcaacacaaccaatgatgatgcaaactcggttcaagttcaagcaccaaccacgacaccaactactcccgtagaaataagcttccggagaaggtcgagaaggcaagccaaacgactgcgagagaacgagaacagcggcatgcaaaaggcgagggtggagactccccccaagaagtgggaggacatgtctctgagtgagaaagcagtagagctgtatgtgggagagaagggtgctctcttctggctcaacaagtttgcatatgcttcaatcttcatcatgattgggggatggatagccttcaagtttgtgggtcctgcattcaacctttaccagcttgatggtcctctactctccccttctgat

SEQ ID NO: 23037 - DNA, 368 bp, Glycine max
  unsure at all n locations
  Clone ID: LIB3106-030-Q1-K1-D9
gcgccgcaataataatactaaaacatgtccaactctgatggagccactaacgccgtccctgccaacgacgccaacaacaacacaatcgttgagtaccagcagcgaaccaccaccaccaccaccgccgccgccgccgccctcgccgtcaagaaaccgccttccaaggaccgccacagcaaggtcgacggccgcgggcgccgcattcgcatgccgatcatctgcgccgcccgcgtcttccagctcacgcgcgagctcggccacaagtccgacggccagaccatcgagtggctcctccgccaggcggaaccctccatcatcgccgctaccggctccggcaccactccggcgagcttctncactgtctccga

SEQ ID NO: 23038 - DNA, 319 bp, Glycine max
  Clone ID: LIB3106-030-Q1-K1-E10
gagaattacagagcattttccaacacgattacacgaccgaatcaaacccctctttctctcggaagctgcttttaatatcgtactggccttcgattgttctcctctttaatacatactgttctctcttcgatttgagggaacagtacaagagtctgagcatcggttaacccaactgcacaggtagtctccaaataatggagcctcatgatgagactggatgccaggctcctgaacgccccattctttgcattaataattgtggcttctttggaagagcagctaccatgaacatgtgttccaagtgttacaaggacatgct

SEQ ID NO: 23039 - DNA, 352 bp, Glycine max
  Clone ID: LIB3106-030-Q1-K1-E11
cccacgcgtccgagctgttgcaaatttctactatttttcaatggcttctgcagatgttgaggtccgttgctttgttggtgggcttgcttgggtcaccggcaacgatgccctcgagaaagccttttcaatctacggcgacatcgttgaatcgaaggttatcaacgaccgtgagactggaaggtccagaggattcggatttgtgaccttcgcctcagagcagtcaatgaaagatgcgatcgcaggaatgaacggccaggaccttgacagccgtaacatcactgtcaacgaagctcagacccgcgccagcccgtgtggtagtggaaggcggggtttccgaagtggtggtggatac

SEQ ID NO: 23040 - DNA, 209 bp, Glycine max
  Clone ID: LIB3106-030-Q1-K1-E12
tgccttttagctttcttctagagagagaaaagcgggtgtcgacaaggaaacaactttttggccatgtctactttttcacactaaaaattcaatcttgtcagtgtttagctcaatctggtttaaaaggtaaaaaagttaagcgtattaaggggaatcaaaaaactgaaaaaaagtttccttcgcaaaaagtgagaatgacaatttccggt

SEQ ID NO: 23041 - DNA, 411 bp, Glycine max
  Clone ID: LIB3106-030-Q1-K1-E9
caaaaacatattttgctagaattgaacatgaacaagatgactggtcttgctcttggtggagtggtggcggctattttaatggttctacagtacgcagaggcacagacaagttacgttgttggagatggcacgggttggagagttccacaagatgcttccacataccaaaattgggcttctgacaagaatttcacagttggagatactctatcattcattttccagacagggttgcataacgtaattgaagtgtcggaagagtcatacaattcgtgcagttcagcgaatcctataggtacaacctacaacacgggccctgccaacgttacactgaacagaggtggtgaacattactacatttgtagcttttgtaatcactgcaacaatggcagaaggtaggcatcactgtct

SEQ ID NO: 23042 - DNA, 362 bp, Glycine max
  Clone ID: LIB3106-030-Q1-K1-F11
cttctgcagtagacattccttcagagcatctcaaaacagatggcagaccactagatcatactgagattacaagaaatgatctgtgttgtgcagatgaggaaatagagttgagcactgacaacattaaggagcaaagatttatggctacctcttctgccgtagacattcctgttgagcaactcaaaacaagttgtagaaagctagataatacggagattacaagaaatgatctgtgttgtgcagacagaaattttgctggcaaccaaaagaacaaacttctcatccttgatctgaatggactgcttgctgattttgtcagtatcagtgacactgacacttctttccgaagatatagacgagaa

SEQ ID NO: 23043 - DNA, 317 bp, Glycine max
  Clone ID: LIB3106-030-Q1-K1-F12
aaaggacatatgcagggatggcggtatatttaagaagataattactgagggggagaaatgggagaaccctaaggatcctgatgaagtattggttaagtatgaagttcatctagaaaatggaaagcttttagcaaagtctgatggggaggagttcacagtcagagagggtcattattgtcctgcattgtcaaaggctgttaaaaccatgaagaagggagagaaagtgcttttgacagttaagccacaatatggatttggtgagaaggggaagccagaacaaggggatgaaggtgcagttccaccaaatgcaacaatgc

SEQ ID NO: 23044 - DNA, 312 bp, Glycine max
  Clone ID: LIB3106-030-Q1-K1-F9
gaccgacgcgtccggagatatatgatccgtctttagaccctaatttatctggagatccatacaagacactgttagttgcatttcttagggatgagaggactgatcaccgactcaaaagggagtttgaagcatatgggccaataaaacggttaaggatgattactgataaggagactaataaaccaagaggatatgccttcatagaatactttcatacactatacatgaaatctgcatacaagcaatctgattgacggaaaatggatatttaaatatttctttgagatatctacccgtgtcataactgttcct

SEQ ID NO: 23045 - DNA, 460 bp, Glycine max
  Clone ID: LIB3106-030-Q1-K1-B11
gggggaagcaaagggaaaggaagaagaagtgttagcctcagttcactcaaccgtgttcaaagaatcagaaagccttgatggaaagtgtgttaagattgagggctatgatttcaaccgcggcgtcaattatccgttgctactcagctccatggtcacaactgggtttcaagcttccaacctcggtgatgccatccaagtcgttaatcaaatgctagattggaggctagttgatgaacccgtagctgaggattgcagtgaccaagagagggatttggagtaccgaaaatctgtgacgtgtaaagtgtttctgggtttcacttctaatcttatttcttctggtgttagagatactgtgaggtttcttcttcagcatcgcatggttgatgtagttgttacaactacaggtggcattgaagaagatcttataaagtgcctggcaccaacatataaaggagatttc

SEQ ID NO: 23046 - DNA, 252 bp, Glycine max
  Clone ID: LIB3106-029-Q1-K1-A9
aggttgggtcgggtgatgaggatccgacccgttcgcgcagctccagagcgcatttcggagaaggtggaggagagcataaagaacgcgcaggaggcgtgcgccggcgacccgacgagcggcgagtgcgtggcggcgtgggacgaggtggaggagctgagcgcggcggcgagccacgccaaatacaagcaaaaggaaaaggactccgacccgctcgagacctactgcaaggacaatccggagaccattgagtgc

SEQ ID NO: 23047 - DNA, 136 bp, Glycine max
  unsure at all n locations
  Clone ID: LIB3106-029-Q1-K1-B10
gtggagagtgctggtgaatgtgggaaatctaccaccccagataatgaggcttataagcttgcaccatgtgcctcagcagcacaagatgagaatgctagtgtttctcanagttgctgtgctcangtgaagaaaattg

SEQ ID NO: 23048 - DNA, 105 bp, Glycine max
  unsure at all n locations
  Clone ID: LIB3106-029-Q1-K1-B12
gccgctatcatcggccaagacggaagcgtttgggctcagagcaccaacttccctcagttcaaacctgaggaaataactgccatcaataatgactntaatgagcct

SEQ ID NO: 23049 - DNA, 201 bp, Glycine max
  Clone ID: LIB3106-029-Q1-K1-C10
ctcggcagccattgccatgttctttcacggctcaagtgagaagaagagggaaagggaaagtggtaatgagcatggaggcaggcattggagtgatgggcaccaagttgggtatgatgagctatttcgaatccgacggagaggttgttcctgtcactgtcgtgggtttcaaagaaggcaacatcgtcacccagatcaaaactg

SEQ ID NO: 23050 - DNA, 347 bp, Glycine max
  unsure at all n locations
  Clone ID: LIB3106-029-Q1-K1-C9
tcgaaattggcggaacagacaagattgaagggggagcgtgtgaacaaccttgatctttcaaagggccccattgaaacaaggtcaagggataaatttgggttccaggaagagaacaaatttgattctcttaacttaagcatgttgaacctggactctaaatttactgagaatgtgagcaaaagctcgcttcgaaatggtgtntatggtatgaaagcagtgtatcagaaaaacaatgcanactnggtgagtaatgtgatcagtaacaagtacaatggtaaatatcttcataacaaagagatcaacaacaacaccaacantgaaaagcacaacacanatgcaaccgacaa

SEQ ID NO: 23051 - DNA, 194 bp, Glycine max
  Clone ID: LIB3106-029-Q1-K1-D10
aatgcaaaattaggacatttctatcacctaaagcttcatgatagtcaggttaggactcatagttgctgcttcacttgcagcttttactgttaagcagctgaatgtcaaaagctcaaaaccagaacttaaagatgagtgcacagaagaggagcatgttctccaagagaatgaaagggtggaggaagaggagaaag

SEQ ID NO: 23052 - DNA, 131 bp, Glycine max
  Clone ID: LIB3106-029-Q1-K1-D12
atgtggacatggaagttgaagatatgaattcctcaggcaatactactgtcatcgatgtatctgttgcaaaggattccatgcacatagatcaactggttcagttgaatccacctgttgactaccattctgtg

SEQ ID NO: 23053 - DNA, 207 bp, Glycine max
  unsure at all n locations
  Clone ID: LIB3106-029-Q1-K1-E10
actcttgtcgctgctatagtcattgcggtcgataagcagaccaaggttgttcccattcagctttcagattccttaccacctttggatgttcctctcactgctaagtggcatcaaatgtctgccattgtgtacttttggtgaccaatgcaatagcatgcacgtatgcnagcctgtctctactccttgccctcgtgaatagaggtaaaa

SEQ ID NO: 23054 - DNA, 185 bp, Glycine max
  Clone ID: LIB3106-029-Q1-K1-E11
aagttgcagagattggctatgaaaaaggtaaaggggctttcatcacaagaatttgctgcccgaaatgatttggctcttgcattgccggataggattcaagctatcccagatggggcccctgcagcacccaaacaaactggaagttgggcagcttcagcttcacgtcctggaattaaatttgattc

SEQ ID NO: 23055 - DNA, 130 bp, Glycine max
  Clone ID: LIB3106-029-Q1-K1-E12
cttgtttgcaaggcacagaagcaagaggatattgatgtcagcccaatctctcgccggttagctctaaccgtgctcattggtgctgctgctgttggctccaaaagccaacctgctgatccagcttatgggg

SEQ ID NO: 23056 - DNA, 284 bp, Glycine max
  unsure at all n locations
  Clone ID: LIB3106-029-Q1-K1-E9
gtgaaggaggttcttcacaatgatgttgtttgagtctttcaatatattgggggtccgaaggtagggtattaggtgtttcaatattggagatcctagtgttgggctgggctatcaaacaatattatgaagaaactagcatgacttgatggctgaaaatcaagtctattaaataaagatttgtgtggatgtaattcatcatataattgattgaattgaagtgtatgtcggttacaatatacatgtaaactntcaatgcgatgtaattgaaggtaaaatataatttg

SEQ ID NO: 23057 - DNA, 205 bp, Glycine max
  Clone ID: LIB3106-029-Q1-K1-F10
gtacccattttatgataaactttccttccatttttgttcctctagtaggcctagtatttccggcaattgcaatggcttctttatttctttatgttcaaaaaaacaagattttttagatacagaaaacaaagtaaaattctggggttttttattccccaattataatactaaattaaaaaaaagaagagtaatgagtataatcttt

SEQ ID NO: 23058 - DNA, 321 bp, Glycine max
  unsure at all n locations
  Clone ID: LIB3106-029-Q1-K1-F12
gggctgntgaagatctgnttgaccgtgtttctgcaagggagaaatttgtttatgaaattgaaactacagatatgaaccgcaatcatatgggagaaactcgatannnnnnnnggatgggaaggcttgttcttcaatgaagaataatgaggcaaattggtctagtttttctgtaacctcaatccctaactgtggggaaggatgtgtttggagagcagatataataataagctttggagtgtggtgtatcaaacgtgttctggacctctccctaatggagagccgaccagagctgtgggggaagtacacttatgtactcaatcg

SEQ ID NO: 23059 - DNA, 218 bp, Glycine max
  unsure at all n locations
  Clone ID: LIB3106-029-Q1-K1-G10
actagnnctagatcgcgagcggcccctttttttttttttttcaaataaataaaaaatgtgggttaagttttggaattcattcattcatagtatttaatacacgttanncngggcggaaaaataatagtaaacgaaatggaaacgaaaaacaaacagaaggaaggcagcaacgcaacggaagggagggaaatgtcatacggcgagtgagatatcaccca

SEQ ID NO: 23060 - DNA, 172 bp, Glycine max
  Clone ID: LIB3106-029-Q1-K1-G11
aaaattgttgttttgttttagttcttctttgtgctatgacacgtttgattttaataataagctaggtaaacacgtgtttgccttagttagtaaccttttatcttttctagtaaatttggggaactttgattattggaatttttacttttggggtatattggaggggggaaaa

SEQ ID NO: 23061 - DNA, 371 bp, Glycine max
  unsure at all n locations
  Clone ID: LIB3106-029-Q1-K1-G12
nntcccttcnncacaccatagggcatcgaaaggatctcgaagacccaccaacgcacgagggccgggatctttcagaaaatggattcctattcgaagggtgcataaccgnnngataagctcacactaacccgtcaatttgggatccaattcggttccttaggaggtatcgggaaggaattttggaatgtaataatatcgattcatacagatacagaagaaagggttctctattgattcaaacgctctacctacgagatagggatagagaaagaggaaaaaaccgaggatttcacatagtacttttggtcgaaaaatcgatctgatttttttcgtacttttcgctcaatgatgaaatgggtcagattctacag

SEQ ID NO: 23062 - DNA, 235 bp, Glycine max
  Clone ID: LIB3106-029-Q1-K1-A12
gctgtcgtcgtcgtcgtcgtcgtcgatttcctcacactgtttcaacctctcttcgtctctccgccccaaacactcgctattctccaggttccgcaggatctgtcacaaagctaaggctaagccgcaggaacctgaagtgactgtggcgagtgatgcatttacgcaattcaagcatctgcttctgcctattacggataggaaatcctatctctctgaaggtacaagacaagctata

SEQ ID NO: 23063 - DNA, 352 bp, Glycine max
  Clone ID: LIB3106-029-Q1-K1-H10
gaattctctaaaagagatctttttctgctctttgaagaaagaagggtctttgcttgattgtggagatgtctctgctctcagatctcatcaaccttaacctctccgataccacgagaaggtgatcgcagagtacatatggatcggtggatcaggaatggacctgaggagcaaagcaaggactctcccaggaccagttagcgacccttcagagcttcccaagtggaactatgatggttccagcacaggtcaagctcctggtgaagacagtgaagtgattttatacccacaagccattttcagggatccaattcaaaagggtaacaatatcttggtatctgtgatgcctacactc

SEQ ID NO: 23064 - DNA, 348 bp, Glycine max
  unsure at all n locations
  Clone ID: LIB3106-029-Q1-K1-H11
aatggagctcatcaaaatccaaacctcattagtggcatagctccaaatggccttaactttcacaacaagtgtttattccaaaagggtgtgctgtctcatggtaacaagttaagggtggtcagaaaaaacttcactcccaaaggcagcatgtcagcatcatcatcatcatcatctangcctgggtctcagccaaagttcatccagcacaagaaggaagcattttggttctacaggtttctctctattgtgtatgaccacatcataaacccggggcactggaccgaagacatgagagacgaggcactggagcctgctgatctctacaaccgcaacctgagagtggtggat

SEQ ID NO: 23065 - DNA, 402 bp, Glycine max
  Clone ID: LIB3106-030-Q1-K1-A10
tctacgtgttctccattccctctctcactcctccatctacgtttcttaaatcatttccttgtttctctctttctttatcttctcattttcctcattacactcttttttttctctcaacttttctcttattaaccatagttcacatattatatcatcacatatcatagtgatatattatatcatatcacaatgtgtggcatacttgctgtgcttggttgctctgattcatctcaagccaaaagggttcgcgtccttgagctttctcgcagattgaagcaccgtggtcctgactggagtgggctccaccaatatggtgataactatttggctcatcaaagggttaccctaagtggacccagcttctggtgatcaacccctcttcaatgaagacaaaactgtcgt

SEQ ID NO: 23066 - DNA, 441 bp, Glycine max
  Clone ID: LIB3106-030-Q1-K1-A11
acaattgtaatagaataagttaggaaagagaaagaataagggttaatttggcctaattgaaattcggagtgaaactcgggatctcgtccaggcttccatggaattgaattaataattcaattccatttctattaataaaagagtgaaagcagaaatttaaatggaatgtatagggtgggggcaacaatatcataaaaaatacttagttaaaaaaacgaaaatactgtattgcaattgtattgcaattcgaaacgaaatatagttcgagatcattgtattatttttgtactatattaatcttaatcttaattggaacgaaatctttcaaaattggatctctaattcttaatctatattttcgttttttcgtccttttcttttcgttacattataatccgaaaacaaaggagttaagtgaattaaaaacccaaggaggttcat

SEQ ID NO: 23067 - DNA, 292 bp, Glycine max
  unsure at all n locations
  Clone ID: LIB3106-030-Q1-K1-A12
gcagtctcttgctcacttggatcaatcactgaagtctcttggatccagacttgtgctcatggaaacccacagtactgtcacggctctcgtggagtgcgtaaaggccattcaagcaacaaaagtagtgtttaaccatctgtatgatccggtttcacttgtccgtgatcacaacatcaaagaaaaactagtggaacaaggcatatcagtccaaagctacaatggagatctgttgtatgagccatgggaagtatatagcgagagtggacgtgcctttactacctntaatgccttt

SEQ ID NO: 23068 - DNA, 239 bp, Glycine max
  Clone ID: LIB3106-030-Q1-K1-A9
aaaaaaaaaaaaaaaaaaaaaaaaaaaaaatttaaaaacaacaaaaaaaaaaaaaaacaaagaggcatacacaaacatacaccatacccaactctaaaatacaatcaccttactccacttcacttccctcacattcacaacttcctacctaatctatccatcacattacccatctaaaccttcaaataacacatctctcttcctccatcctacatcatatcaaatactcccttatcaaa

SEQ ID NO: 23069 - DNA, 443 bp, Glycine max
  Clone ID: LIB3106-030-Q1-K1-B10
cccacgcgtccgcccacgcgtccgcaaaattgaatctctcttccgcacaaacaacctctcacgccccaaagccacacacaaaacatttaccttttccaacccttcaattccctaaacatttttcttttccttcgaactccaattccctcaccacaacctacaaattatgatctgcctaagacaaaagttattaaaccaagcagtaaaagtgttggtgttgaggctcctgcagtgcagatcaaaaggccagctgacccagctcctaaaaagtcatggaaggctggtccttcagttgatgaatttttgcggtcctggggtctcgaaaggtatctaatactttttcagcttgaaaaagtggatatgccagttttaattattttactggttgaaaacctaaaggttttggcattccaatgggaaccagaaaggagaatcctttaaca

SEQ ID NO: 23070 - DNA, 405 bp, Glycine max
  Clone ID: LIB3106-028-Q1-K1-G12
cccacgcgtccggaaagatgaaagtatgtaaggaaagatgaaaacattgcatcactgacaaattagtgatttcattgattcttttgcaacctcaattgtttccttatttgatttggtttgattattatagaaagcatgtgtgtgggtacaacacaacaatcagtaaatcctttctacaatttgtttgctgcgcttttgggaagatacctattctatatttctctttaattaatttttcttactagaaaagttgttttgtagtttagataattgctagagtaatagaataataaaaaatatcttgtccttgtctattttaatgccttttataatgaactgagtaaatacaatccaagtgaaaaacctcaacataatgaaacaaaaggttgattaaatatcttcacg

SEQ ID NO: 23071 - DNA, 210 bp, Glycine max
  Clone ID: LIB3106-028-Q1-K1-G3
cccacgcgtccgaaaaaagaaaatggtttaaaaaaagtcttgaatttctcacttctaggtctagtattgttgttgttgttgttatatgatgtatggttgaataaatgtgatttggtgtttgtactttgtagagttaattagtgacttctgtgtctgttctcttaattctaattccaaacaagagtactttcggccggcttctttttagct

SEQ ID NO: 23072 - DNA, 387 bp, Glycine max
  Clone ID: LIB3106-028-Q1-K1-G4
aaagcattgaattcaaaaacttaagttcattccttgtgttttgctttcttcctcaaagccaaacatgtcgaacacatgcggcaactgcgactgcgctgacaagactagctgcaccaagggaaacagctatggtgttattgtagagactgagaagagttacatcgagactgttgtcatggatgttccagcagctgagcatgatgggaagtgcaagtgtggcactaactgcacttgcacggactgcacctgtggccattaaggaatatgtatgaaaatgtaattgccatgtgtttggcaatacaaatatccaaataatgtaatctccgtatgaataaatgtgtgtgctgatatcctacttcaagtctgtgtagtcatgcagtctgaatc

SEQ ID NO: 23073 - DNA, 248 bp, Glycine max
  Clone ID: LIB3106-028-Q1-K1-G6
ctatcgggaggagaatattacattgagcgtattgtttattgctccaggagttactggagcattgccataccatgtctcatgctaccaaaggaaccctatcctaatgaaaactgactatggtaagcgttcttcgtaggcaaaatgctcaagttttatacttgctgatcaatcacacaacatcctatcctttaaaaccattccttaatagtgctttaaaccaacaaatgactacattaatgtcgaacaat

SEQ ID NO: 23074 - DNA, 252 bp, Glycine max
  Clone ID: LIB3106-028-Q1-K1-G8
aatccacacaaactaagggttgggcttttagagagagagagagagagagagagacagggagagagcatgggagggctggctatcccggtccatgatgtctctcttgtcaaccctaatctcctactctagcgccaacaagaagcgaaacaacttctcacgcgctgtctcaatcttggaatctctgctctaaattctaatcttccctccatagatgtcatctaactccttgtgagggatttggaaacgcatccg

SEQ ID NO: 23075 - DNA, 388 bp, Glycine max
  Clone ID: LIB3106-028-Q1-K1-G9
tgcaaagaaaatacacattacattacttagtctttgttcatttgagttgtggtgatggctagcctcaaggttgcatgtgtggttgctgtgatgtgcatggttgtggtggccatgagtgctgtacccatgtctcatgccgcaatcacgttcgggcaggtcgtctgcaacatgtctccgtgcttcagttatcttctaagcggcggaaaaccgtctcatgccttctgcaacggagtgaagtccctcagcaacgcggcgtataccaccgcggaccgccatgatgcgttcagttgcctgaaaaaccttgccaatattatgggacagagtttgaatgccggtaacgcaggctatcttcctggcaaatgtggcgtcaacattccttacaagatca

SEQ ID NO: 23076 - DNA, 280 bp, Glycine max
  Clone ID: LIB3106-028-Q1-K1-H1
catcttgcagcctgctctcaaccagctcaacaggatgagatcacagtgatttgagctgggtgaaatttaaaatagggaaggggcttaaatgctctgggatatcaattatcatcatcactaatagttttcatgcaacttgtatctaatgctatatccgctttctttttattattttccattcccaagctagccagtggtttcttttttgttgcaactgttgtgggtaccttcccttttgcgatttatagatctgattgattcagttcaagtttgtactttc

SEQ ID NO: 23077 - DNA, 424 bp, Glycine max
  Clone ID: LIB3106-028-Q1-K1-H10
gccatggccacctccaacttctctattgttctctccgtctccctagccgtctttttggtgctacttaccaaggcacactcgaccgataccgtttctttcaccttcaacaagttcaacccagtccaaccaaacattatgctccaaaaagatgctagtatttcatcctctggggtgttacaactcaccaaagttggcagcaactgcgtgcccacctcgggatctctcggtcgtgccctttacgctgccccaatccagatttgggacagcgaaaccggcaaggtagccagctgggctacatcctttaaattcaacattttcgcacccaacaaatcaaactcagctgacgggcttgccttcttcttggcacccgtcgggtctcatccccaatccgacgatggatttcttggtcttttcaacagtccct

SEQ ID NO: 23078 - DNA, 396 bp, Glycine max
  Clone ID: LIB3106-028-Q1-K1-H11
ttcagaggcacttatgctgactatggaggtggttggcaaggtggtcatgccacattgtatggtggaggtgatgcatctggcacaatgggaggggcttgtggatatggaaatttgtacagccaagggtatggcactaacactgcagcactcagcactgctctattcaacaatggcatgagttgcgggtcttgctatgagatgaaatgtgacactgaccccaaatggtgcctccccggtagcataatcgttactgccacaaacttctgcccccctaactttgcattggctaacaacaatggtggctggtgcaaccctcctttgcaacactttgatcttgctgagcctgctttcttgcaaattgctcaatacaaagctggaattggtccaatttccttc

SEQ ID NO: 23079 - DNA, 323 bp, Glycine max
  Clone ID: LIB3106-028-Q1-K1-H12
gtgtagttcatcttctgctaaccctttttcataatttcaaagttcttcttccttaaagaggaggtttacctgtcaactgccctacaatgtcatttcctcacaactttcacattacattgccacacacttctccaacttacactgctaaatacttcatttcaacatatagactcctcaattcaatgcgaatgttttttgatatgaactgttacactaacccttacttctaccctcccctttacacaatctttattatgacattcttcttctcacctaacttttcattgtctaacaacaatttgtgctatttcaacctttctttt

SEQ ID NO: 23080 - DNA, 403 bp, Glycine max
  Clone ID: LIB3106-028-Q1-K1-H2
cccacgcgtccgcccacgcgtccgatcccttcctatccacaggtaagtttggttgatgaatatgggttttttttttgctgggtagcagtgaggatcaaattcaaatggctatggccacagctgtcgtgtgtcctcagaacatcaccggagccatcgtgggctcacccaagaagagagtggtgcacgtgagagggttaaattcatttgggggactgaaggctagcaatggtgttgtctctttgggacttcctatgagcactgagaagtgctttgctaaagttgtgagttcagtgaaagcagcaacatcaaatggaaaaggaaagggtggaggggcactcttcttcacgtgcaacgccgcaggtgagatattcacgattgctgctttcatcaatggacttgttct

SEQ ID NO: 23081 - DNA, 102 bp, Glycine max
  Clone ID: LIB3106-028-Q1-K1-H3
ggaagctcttgatccttggcaactatttcttcctttatcttttgtataaatctatatggtcttcatttcttaccaatgtgcacagttgattgctttactgac

SEQ ID NO: 23082 - DNA, 425 bp, Glycine max
  Clone ID: LIB3106-028-Q1-K1-H4
attcctcaaggtgtgacaaaggtaccctaatgagtccaggagagatagagaatgattgacattcgtctccaaaatcttgtgccacttcaattgtggatcaacaacaatgccattcttctaaattagaggtcagagatgtggaagttgacagccaagctacaattgtcaggtggtccaagaggcatgcaaccaaattggccaaaaaagacactctacacagcaaagatttaagagagattagtgcagaagcccaagcatcatgggatattgacgagtcaaacattgacacttccaagttacagagagaggaagccaaaatcattgcgtgggagaatttgcagaaagcaaaagctgaaactgcaatacggaaacttgagatgaaattggaaaagaagagatcatcatcaacggataaaattctaaac

SEQ ID NO: 23083 - DNA, 428 bp, Glycine max
  Clone ID: LIB3106-028-Q1-K1-H5
caccaatgataacatcaaatcttgcttttgaacttacttgtatgagctacaggtacagctgaagtcacaacgaatctgggccatgactgaactaataaaaaatccaagcattatgaagaaagtgcaagaagaaattagaggcttaagtggtaagaaagatttcttggatgaagatgatattcaaaagttttcctacttaagggcagtgataaaagagacacttagattgcacttaccagcaccactacttataccaagagaaacaaataaaaaatgcatgttagatggctacgaaattccagccaagacattattatatgtgaatgcttgggcaattcatagagatcctaaggcttggaaagatccagaagagtttataccctataggtttttaaattgcgacatacatctttaagggacaggatttt

SEQ ID NO: 23084 - DNA, 118 bp, Glycine max
  unsure at all n locations
  Clone ID: LIB3106-028-Q1-K1-H6
tccactccaaggaacatagcttcgatcaatctatcagatatntgacagtattcctctcacaatctgagtcnntgcaatgaagaaagattgtaagacatacaacactttttggttttca

SEQ ID NO: 23085 - DNA, 416 bp, Glycine max
  Clone ID: LIB3106-028-Q1-K1-G11
gaagtacaccccatagggaaaaaatttcttcacatttacaatgaagctggccactcggttcctattcctattccacctggctcatgctgctctgtctgacgaagctactttcattagagatggcctcaaatcctattcccagcttgatctccctcactcggtttttggttctgaaagtgtagccttcgattgccatggtaaaggaccatatgttggcgtgtctgatggtagaatcctcaagtggcacgagacaaagagagagtggattgactttgcagttacctcgccacacaggaacaagaaattatgtgatgggttaacaaatgacaagatggaatcaatgtgtggaagacccttgtgcctcaaattcaacacttttacttgtgaactgtacattgccgattcatactttgggc

SEQ ID NO: 23086 - DNA, 391 bp, Glycine max
  Clone ID: LIB3106-028-Q1-K1-H7
gtagaaaccctagaaaggggattccttattaatgtgttttcagaaaggaagtgccccggcatgcttgcgggaatactcgactcctttgaagaactgtgacttgatgtgcttgatgctagggtttcttgcgaatacaccttccagcttgaagctgtcacatgagaagtaagataatacactaggatctacatcatcatctaattacttactaccttaatatatcactcttatatagtgatcctttgtaatacttcttaagcgtctaaaatcaggacacaattcttggcttatataccaatgacttgtgaaactcttaatatctatatattactaaggattgcttcatttatatatttgatagttaacatccagttaagtttccctgttaaat

SEQ ID NO: 23087 - DNA, 163 bp, Glycine max
  Clone ID: LIB3106-028-Q1-K1-H8
atcgcatatcacaattccttcttcaatatctacccggtcccagaacacagggcccgagacaccctcctaatgagcttcgaccgctgcatatcaccaatcatcacccatgactaagaccaaccacaactgccacacaggcttctgccatcctccaaatcccata

SEQ ID NO: 23088 - DNA, 332 bp, Glycine max
  Clone ID: LIB3106-029-Q1-K1-A10
aaaaaaaaaatagcccatcattaccaatgggaatcaagaaattttgaacagtttgtaaataatcgaaaccaaaatgacttgatgaaattaaatgaacccaaactattgaaccaagcccctctgcttgaaaacatctagcatggcagctccaattttggcaggggacttcacaaccatgaccccagctttcctgagggttttaattttgtcttgtgcagtgcccttgccacccgacacaatagctccagcatgacccatacgacggccagggggagcagttaaaccagcaataaaagcaacaacaggcttctcagttccactatccttaatta

SEQ ID NO: 23089 - DNA, 147 bp, Glycine max
  Clone ID: LIB3106-029-Q1-K1-A11
ggggggggagggaaaaaaaaaaaaaaaaaaaaaaaaaaaaaaaaaaaaaaagaaaggaaaaaaaaaaaaaaaaaaaaaaaaaaaaagaaaaaaaaaaaaaaagggggggggggttaaaaagaaacaaagtaaaagaaggggggaagg

SEQ ID NO: 23090 - DNA, 360 bp, Glycine max
  Clone ID: LIB3106-028-Q1-K1-E6
attcattatcttggcatgacactctgatagttcaagtgctcttttcttacgtactggtccaaaatcatacgcatagtttacaaaatggctatggaactcatgaggttcccaagcctcgacgaacaacatgacagctcaagaagccacatcataaggcctcaagggcatgcaacacctgatgcgcaccctttgctaccaacgctatgacttatacaccgaacttacctactttacactgtcaaagttcaagaaacttatttcactcttaaatcgaacctgccacgcccggttcagacgcgcacaggttcagtactcatctccacacgcacccgttcacagcactaacgcttacacctcatc

SEQ ID NO: 23091 - DNA, 263 bp, Glycine max
  Clone ID: LIB3106-028-Q1-K1-E7
cccactcgtccgcatggccttccacgcttctcttgcttctacaaggatcccgtcaaacgcaaagttcccatccaaggcctctcactctttcccaacccaatgcgccttaaagagacttgaggtgacagaattctctgtgcttacatccacttaatgtctcacatatgctaaccaccctagagaatcttttcctactaaccttgtatactttttaactgattctttagaccattctatctactattgctattttctaatcccat

SEQ ID NO: 23092 - DNA, 410 bp, Glycine max
  unsure at all n locations
  Clone ID: LIB3106-028-Q1-K1-E9
atnccggagccactctctcttcttattccaacagtttatgtacctcaaattcccaaaactgggaccttagtagaattttaaataagcgcaagatcataaaattattgctggattattatcaatggaaaggtatatgatatcacaccatctttggattaccatccaccagtttatataacttttactgacatcaacattgaatgatcccaccattgattttgaagatgttttccacaatcattctgatatacaaatgatttataaatacttaattaacaaggtagacacttccactattatcacacaaaattaaccataaactgtcacaacctactcttacacatgtcgctggcaatcaatcttctcgattagttgtaaagatcttgaaattcctgattcacatttttata

SEQ ID NO: 23093 - DNA, 414 bp, Glycine max
  unsure at all n locations
  Clone ID: LIB3106-028-Q1-K1-F1
cccacgcgtccggttttctgatcgctcatagagagttcgacgcggcggttgcagaaggagattgcaagatgaagttcagcatcgcgagtcccaccactggatgccagaagaagctcgagatcgacgacgatcagaaactacgagcattttgggacaagaggatctcacaggaggtcagcggagatgcacttggtgaggaatttaagggctatgtcttcaaaattactggaggttgtgacaaacaaggattcccgatgaaacagggagtgcttactcctggtcgtgttcgacttttgcttcacaggggaactccttgcttccgtggatatggaaggcgtaatggagaacgtangagaaagtctgttcgtgggtgcattgtcagcccaaacctttctgttttgaacttggtaaatt

SEQ ID NO: 23094 - DNA, 377 bp, Glycine max
  Clone ID: LIB3106-028-Q1-K1-F10
agcaagctcattctaatttaaaaatggcacacctccggcatgcgctatcttccccatgcttgggggccaaggcccttaatcttttcccatcatccccctaagtcgggagggtcagcatgatgaagaccgtcaccaatcattccttcttcttaagcccatggtacttcccataccgcgtcaagtacttgtgcccattctctgtcgagcccccgtcctacctcactgtctagttcccatgtgactactgctgttacactgtttgtctttcttcctacccataaaccttctccataaaccgttatctcgaattgatccactccatgtgtgccattctctttgccttgggcttcgtcttcccccaactattgtccctcaac

SEQ ID NO: 23095 - DNA, 407 bp, Glycine max
  Clone ID: LIB3106-028-Q1-K1-F11
aattgtggcgtcgtgggctgatggccggcacgagcctctctcacgtgaggcaatcgggggtcctagaattgcccagaaccacccgccacgtcagaatctccgccaagagccaccgcgtctccgccacctctgaccaacgccccgcgggaccctactgcatctacgttggccccctcgaaaccgccaacaaagagaacctcgaagccctttattgccaagcacgggatgcttattatagtggtcaacctctgatagttgatgacatgtttgatagagtagagttaaggctaagatggtttggttcaaagtcagttgtaaagtatcctcggtgcagtattaggaggcaatccacatttgctgatgctgagggcaggaagatctgtctatggtttttgcattagcaagca

SEQ ID NO: 23096 - DNA, 333 bp, Glycine max
  Clone ID: LIB3106-028-Q1-K1-F12
ctttgttgcaatatcacaaacacctcgtccgtcacaatgcatctagctgtggctgggaacgctgtcgtttcaccgtcgccgttccgacctcatccccttctccggtcatccttctccggcgtctccgttaagctcactccccaatccataacgttttcacgcttgaagcccctcaccgtcttcgccgccaccaataaggccgtcgctgtcctcaaggggacctccgccgtcgaaggcgtcgccactctcattcaagaagacgattgcccgacaacagtttctgttagcatcactggccttactccggggcttcatggttttcacctacatgag

SEQ ID NO: 23097 - DNA, 387 bp, Glycine max
  Clone ID: LIB3106-028-Q1-K1-F2
gttctttcctcacttcaaacttgccaaaaatggcatcagaattggcatcatctcccagttgggttccaagcgcagccacatgtttggcagcctttgccgccctccttctcctcttcctccgcggtctccgccgccgccgatacaacctccccccaggcccaaagccctggcccatcataggcaacctaaacttaattgggtcccttccacatcggtcgatccacacgcttggcaaaaaatacgggcccatcatgcacgtatggttcgggtcgagctccgtggtggtgggctcgtccgttgaaattgccaaagccgtcctcaaaacccacgacgccaccctcgccggcaggccgaagttcgcggcgggcaaatacacaacctacaact

SEQ ID NO: 23098 - DNA, 453 bp, Glycine max
  unsure at all n locations
  Clone ID: LIB3106-028-Q1-K1-F3
cacaaagaatgtttaccaagtatgggagttacccatattattgaagcattgtaaaacagttcnttgccagtacatgtccggggactacctgctggtgactaattgttttacaatgcttcaataatatgggtatatttcattccagggataccgtctactaacgttcgcatttatcgtcccgtgtatttctttcttgttcttgctgtccttcctgtcttttcattatcgattcgtattattatttttttttattacttttttttattttttcattttctttttcttattattactttctatttattattttttttccttattcttaatttttttattttccttttctttttgtttaattatattatttttttttcttttttttatctttatttatttttttttttatgtattatatattctaatttttattttatttttgtttttatatttttt

SEQ ID NO: 23099 - DNA, 404 bp, Glycine max
  Clone ID: LIB3106-028-Q1-K1-F4
cccacgcgtccgcaccacaccactctctctgctcttcttctacctttcaagtttttagagtattgagatggcagagacattcctatttacctcagagtcagtgaacgagggacaccctgacaagctctgcgaccaaatctccgatgctgtcctcgacgcttgccttgaacaggacccagacagcaaggttgcctgcgaaacatgcaccaagaccaacttggtcatggtcttcggagagatcaccaccaaggccaacgttgactacgagaagatcgtgcgtgacacctgcaggaacatcggcttcgtctcaaacgatgtgggacttgatgctgacaactgcaaggtccttgtaaacattgagcagcagagccctgatattgcccagggtgtgcacggccacctta

SEQ ID NO: 23100 - DNA, 366 bp, Glycine max
  unsure at all n locations
  Clone ID: LIB3106-028-Q1-K1-F5
taattgcnnaattcctggtgagctcgtggcataagcctttttgaatttaagtgtcgctctcctctctgtgttactctcttccagatatttgtcagataccagcaacgatcattgcagtgggaccttcgtgaaaagtaaaccttgtaagaaattcgatgttcaggttctgatacctgtatgctccatcgtgtgctttgttggcaataaaaaatcttagacaagtgcccatagctgcctccaagggattaaatacattactttgagataatatgtgcattccctttcaactttagccctgatgncccctaaagaagggcattgtacaagagggagtattaccagaagaaaatttgcgatctcaatcag

SEQ ID NO: 23101 - DNA, 429 bp, Glycine max
  Clone ID: LIB3106-028-Q1-K1-F6
tcgatccatagacatggctcaccgtctacttttgtcagccgttgcttattccctcatgcactggcgctcaaggcaagcgcagtgcaaagtgagtgccgcagttaaagtctcagctccccaagccacaaggttgggcatcaaggcttcgctgaaagacgttggagtcgctgttgtggccactgccgcgagtgcagtgctggctagcaacgccatggccattgaagtgttgctgggtggtgatgactggtctctggctttcgttcccaacaatttctccgtggcctctggggagaagatcgtgttcaagaacaacgcacgtttccctcacaacgttgtgttcgacgaggacgagattcctagcggcgtggatgcaaggaaaatctccatgagcgatgaagaccttttcaatgcgcctggtgagacttacag

SEQ ID NO: 23102 - DNA, 408 bp, Glycine max
  Clone ID: LIB3106-028-Q1-K1-F7
gtcattacaattgttccgagttcaaccttggatcaggtctagggaatggctgcaatcggagctcgaaaatcgctccttgctcttcgtgcgcgccaattggctgtaagcggtcaagggctgcacagctcccaatactatggccttcggttaagtgcacactccttctctaccaaaagagaggatgaggaaagggagcaactcgcaaaggacatttcaaaggattggagttctgtctttgaacgtagcattaacactctctttctcactgaaatggttcgaggactaatgctgactctgaaatacttctttgaaacaaaagttacaatcaattatccatttgagaaaggccctttgagccctcgtttccgtggtgaacatgcacttctgcgatattcaacaagggaggaa

SEQ ID NO: 23103 - DNA, 428 bp, Glycine max
  Clone ID: LIB3106-028-Q1-K1-F8
ttctttagttgtaactgacaaagttttctgagaaaataaggattattattgagagaatggctggctcatcggaagagggacaagtcattagctgccacaccgttgaagaatggaacgatcaactccagaagggcaacgaatccaagaaactcattgttgtggattttactgcttcttggtgtggaccatgccgtttcattgcaccattcttggctgagctggctaagaagttcacaagtgtcatattcctaaaggtggatgtggacgaattaaagagtgtttctcaagattgggctattgaggctatgcccacttttgtgtttgtgaaagagggaacgcttctggacaaagtggtgggagcaaagaaagatgagctgcagcagaaaatacagaatcatgttgctttcaactagtgcttaatctagctt

SEQ ID NO: 23104 - DNA, 389 bp, Glycine max
  unsure at all n locations
  Clone ID: LIB3106-028-Q1-K1-F9
cccacgcgtccggctaaacaagggatctattacctgaagaaggtttttggattgaaggatattgtcagcgtaagaaataagtctattggaaggttagattggaaaagttgggcacctgggctagtaagaacttggtgaatggtgataagtgacctgtatatcttggaaagaaaaatcttcttcccctacagtcacctgctaatcgcaatgtttgttgatcacatagttttcattcagtgaaatcaacattgtcaggcacacatttaacaacaagctggtatatatccaattttgtatcagttaataatcgtatgtacaggttaatatttgggaaagctataatttgttaaatgatttggccttctcatattctnttctntnnttttttt

SEQ ID NO: 23105 - DNA, 403 bp, Glycine max
  Clone ID: LIB3106-028-Q1-K1-G1
gttttcgctcacccgtgtgcagtcgagctctcccgaagaaaaagcgaaaatgccgtcgcgcaagacattcagaatcaagaagaagttggcgaagaagatgaggcagaacaggcccatcccctactggatccgcatgaggaccgacaacaccatcaggtacaacgcgaagcgccgtcactggcgtcgcaccaagcttggattctgaggtgcttgctttgcctcgattcagtttatccaattaattagtgttttattttcttgagccaaaaacaatgctttggagtttttaatattttgcattttattccaagactatattgtgtaaggaatttattgtagtacgtttgacgtgggtctatttgcaatttcgagtatttggcaaaaccaatctgttttggcagag

SEQ ID NO: 23106 - DNA, 414 bp, Glycine max
  Clone ID: LIB3106-028-Q1-K1-E5
gtgaagcttctcttctgagagctacagagtcaagcagctgccttgagaactgtaaagtggaagatgataggcaaatttctgaatgcttagactcttctaattgcagtttggatggtaatactgaagcaatcaaacaacctagtccaagcttaagtctaccatttggtaattggtttcatcacctatggccgaaacagtgtcgtgaaaaagcaagctcatctagaaaaggtgtaaataaggaagaaatgaaaccaagacccattcttccaaaagttacaatggttggtctctctacagaagaagcaggccaaacgagcaaagctaatttaaagaagacaatggacgatttgacaagagagttggagaagacagaactagatattatgacagatggtggcagtaaagagtgcaaag

SEQ ID NO: 23107 - DNA, 406 bp, Glycine max
  Clone ID: LIB3106-028-Q1-K1-D1
aatgaaagcaataagtccctccttcctctgccttataattcttgtgacccttttggctggtagcattgaaagtgcaccagcaaacgtgaagccaagccattatgctgcacccttcaataggagtgtttttccttctggttttctatttggaataggctctgcagcttaccagatagaaggagcagcagctatagatggcagaggaccaagtatatgggacacctatactaaacagcaaccagggaagatttgggatcatagtgatggaagtctagcaattgatttttatcaccggtacaagagcgacataaagatggtgaaagaagttgggttggattcatacagattttccatctcatggtccagaatattccccaagggcaagggagcaattaacaccttgggg

SEQ ID NO: 23108 - DNA, 69 bp, Glycine max
  unsure at all n locations
  Clone ID: LIB3106-028-Q1-K1-D10
tcccttttcgacccactcatcctcccactcgtccgatcagacttttttttttttctttnaaaaaaataa

SEQ ID NO: 23109 - DNA, 418 bp, Glycine max
  Clone ID: LIB3106-028-Q1-K1-D11
cgcactcgtccgcccactcgtccgctttctcgtccgatcgagataactagaaacagggtgatgaaaatgaaggtccgggttttcttcgttgctacaattttggtagcatggcaatgccatgcgtacgatatgttccctctccgaatgaacactggctatggtgcccgtactccggaggtgaaatgcgcaagttggaggcttgctgtggaagcacacaacatctttggctttgagaccattcctgaagagtgcgttgaagcaacaaaggaatacatccatggcgaacaatatagatcagactccaaaacagttaaccaacaagcttacttttatgccagagacctcgaagtccattccaaggacacatttgtgttcagtatagattgcaccgtactctctaatattccatactacaaaa

SEQ ID NO: 23110 - DNA, 371 bp, Glycine max
  Clone ID: LIB3106-028-Q1-K1-D12
tccacgcgtccggaaacgatgagggctttaagtgcgttaatggtggctgggatgtggacgctttaccactcgctccctgtccttggcaacgaaagcatacccttcggatcggtgtggtggttcgcctatgccggcgtctcctgtttcctcgtcctcttcgctggcatcatgtccggtctcaccctcggactcatgtctctgggcctcgtggacctcgagatcctcgaacgcagtggttctcctgccgagaaaatgcaagctgcgattatacttcctgttgttaaggctaggggaaaaggcaaagaaactccacaaatcattgatgaagagaaaaatgaagaaaacaaaagcattggtggggattcacagtt

SEQ ID NO: 23111 - DNA, 429 bp, Glycine max
  Clone ID: LIB3106-028-Q1-K1-D2
ctagaaacagtgtgatgaaaatgaaggtccttgttttcttcgttgctacaattttgggagcatggcaatgccatgcgtacgatatgttccctctccgaatgaacactggctatggtgcccgtactccggaggtgaaatgcgcaagttggaggcttgctgtggaagcacacaacatctttggctttgagaccattcctgaagagtgcgttgaagcaacaaaggaatacatccatggcgaacaatatagatcagactccaaaacagttaaccaacaagcttacttttatgccagagacctcgaagtccatcccaaggacacatttgtgttcagtatagatggcaccgtactctctaatattccatactacaaaaaacatggatatggggtggagaaatttaactcgaccttgtatgatgaatgggttaaca

SEQ ID NO: 23112 - DNA, 383 bp, Glycine max
  Clone ID: LIB3106-028-Q1-K1-D3
gggagttggagattgttcaactgcgggaatgtctccagatgagagggagaaattcatagcaatgttgaagcagaaagctggagaagagtaatatgatgatgatgatgatgccactagagcatagagaaaaaaataataaaaaaaaaaggtttcttataacttatgaataggtgcaactttatttggcattctaaatgccaaataaagttgcacctattcataagttataagaaaccttttatttttattatttatttctctatgctctagtggcatcatcatcatcatcatattactcttctccagctttctgcttcaacattgctatgaatttctccctctcatctggagacattctcgcagttgaacaatctccaactccc

SEQ ID NO: 23113 - DNA, 430 bp, Glycine max
  Clone ID: LIB3106-028-Q1-K1-D4
gcggaaagaacacaattgtgttgcacaacacttgtgaggattcactgttagctgctccgattatcttggacttggtccttcttgctgagcttagcactcgaatcgagtttaaagctgaaaatgagggaaagttccactcattccacccagttgcgaccatcctcagttacctgaccaaggcccctctggttccaccgagtacgccagtggttaatgcactgtcaaagcagcgagctatgctggaaaacatcctaagggcttgtgttggattagctcctgagaacaacatgatcctggagtacaagtgaagttcaaagtcttaagagtaatggtttgggatactgtagttgaatgagatcaaaacttaactcatatcccataccctcttttctgttatatatttatggcaaatgtgaaatttaaaagatcg

SEQ ID NO: 23114 - DNA, 375 bp, Glycine max
  Clone ID: LIB3106-028-Q1-K1-D5
gagaatcataccatatccattcagcctaacgcataggatctaaaagatctgagactttgggaatctaatagcgcgggaaacatcattttcttgtcttaatcattctatctacacactatcaacaccaatcttactattctatcagattattataacattatgaatattttccactatatttagactcataaatgttaattcaaatttaacatatttactttttttccgtttacataactcattattattttctgcaatatcttctattctcttcttgatcttaattattattgcttagattttactttagtcttataattactctttaattttttctttcttatttttatattattttttttttattattatttt

SEQ ID NO: 23115 - DNA, 396 bp, Glycine max
  Clone ID: LIB3106-028-Q1-K1-D6
gagaaatttaactcgaccttgtatgatgaatgggttaacaagggcaatgcagcggcactgcccgagactcttaagaattacaacaagctggtgtctcttggcttcaagattatattcttgtcaggaagaacactggacaaacaggccgtaacagaagcaaacttaaagaaggctggctaccacacatgggaaaaattaattctcaaggatccacaagatccttccactccaaatgcagtttcatacaaaacagcagcgagagagaaactgataaggcagggatacaacattgttgggatcattggagaccaatggagcgatctccttggaggccacagaggctaaagcaggacctttaagcttcctaatccccctgtactacattcagtagttcct

SEQ ID NO: 23116 - DNA, 426 bp, Glycine max
  Clone ID: LIB3106-028-Q1-K1-D7
acctcaccaaaggaactaataatttcattgaggctagagaaagtggtgatggatatgtgaaagaatccaaaagttgtctttgatattctaattggaaagatgaaagctggacgagtagtgatggagttgtttgccgatgcaaccccaaaaacagctgaaaacttcacggctctctgcactggggaaaaggggattggacgatctgcgaaacctttacactacaaaggttctgtatttcatcgaattattccagaatttatgtgtcaggtaggagatttcacaagagggaatgggaccggaggtgagtcaatctacggttccaaatttgaagatgagaatttcaatctgaggcataccggtcctggtattctctccatggcaaatgctggagctcatactaatggttctcagttcttcatatgtact

SEQ ID NO: 23117 - DNA, 336 bp, Glycine max
  Clone ID: LIB3106-028-Q1-K1-D8
ctacaaactataacacaaagtcccttcattcatcgattccacataatcaaagcttctagtaccatcaacactggcaccactaaagcactcacaactatccttcactccaccactcctcactcttctcattcagatctacccaacacacacacactaattaattacataaaaatgcaactacaactcactctctccactctctacctatcccttctgttaacaataacgttaacatctccaacctttgcagcacaaatcaagcctaaagatctggtccaatcctcaagcgttcacgcacggtacccgcgtctagtcctgcgcaccctctttaactac

SEQ ID NO: 23118 - DNA, 288 bp, Glycine max
  Clone ID: LIB3106-028-Q1-K1-D9
cccacgcgtccggctaaacaagggatctattacctgaagaaggtttttgaattgagggatattgtcagcttaagaaagaagtctattggaaggttagattggaaaagttgggcacctgggctcgtaagaacttggtgaatggtgataagtgacctgcatatcttggaaagaaaaatcttcttcccctacagtcacctgctaatcgcaatgtttgttgatcacatagatttcagtcagtgaaatcaacattgtcaggcacacacgttactactagctggtatatatcca

SEQ ID NO: 23119 - DNA, 317 bp, Glycine max
  Clone ID: LIB3106-028-Q1-K1-E11
tcccacgcgtccgtttcgatttctcggttgccattgccattgccattgcgggttcaagtgcaagtaagaagaagagcagaatggggaaaagtggtaatgagcatggaggcaggtattggagtgatgggcaccaagttgggtatgatgagctatttcgaatccgacggagaggttgttcctgtcactgtcgtgggtttcaaagaaggcaacatcgtcacccatatcaatactgatgccaccgatggatacgactccgtccatgttggttaccgaagggtcagagaccgcaaatttgaccaaacctctattgggtcatc

SEQ ID NO: 23120 - DNA, 407 bp, Glycine max
  unsure at all n locations
  Clone ID: LIB3106-028-Q1-K1-E12
gtgtggttgaaagttaagaagtagcaaagatgtttccattcgggcacaggggtcaagagataaaggggactatggtggttatgcanaagaatgtgttggatatcaacagcatcaccagtgttgacgggatcgtcggcaccggcttatacttcttatgcagtgcactcgatacagttacttttttagcctcctccatctccatccaacttattagtgctaccaaggctgatggtgggaaaggaaaagttggaaaggctacaaatttgagaggaaagataacattaccaaccataggagctaaggaagaagcatacgatgctcaatttgattgggacagtgacttcggaattcccggtgcatnttatattaagaacttcatgcaaaacgagttctacctcaagtcttta

SEQ ID NO: 23121 - DNA, 414 bp, Glycine max
  Clone ID: LIB3106-028-Q1-K1-E2
cccacgcgtccgcccacgcgtccgcccacgcgtccggctgaaattgtcacgaccatgttgtcattattcaccaacttgctcctcttcctatccctgctaatcggtctatgcaattgcagggtaacaacaacaaatgaagaggtgcaaaccctaaacacaaacactcacttcaacccacaggtcccacccctccgaaccctctcttcctcgaagcggttcgagggttcctcggagttcgtgaagctcaaataccacatgggacctgtgctatcgtctccgatcaacatctacctcatctggtacggcaagtggccccaatcccagaagctcctcatcaaggacttcctcaactcaatctccgacgaccaccaccgcgccttcccctcttcctccgtctccgactggtggcgcact

SEQ ID NO: 23122 - DNA, 378 bp, Glycine max
  Clone ID: LIB3106-028-Q1-K1-E3
gatatttcgtggttaaaaaaaaaaaaataaaaaaaaaaaaaaaaaaaaaaaaaaaaaaagaaaaaggaaaaaaaaaaaaagaaaaaaaaaaaaaaaaaaaaaaaaaaaaaaaaaaaaaaaaaaaaaaaaaaaaaaaaaaaaaaaaaaaagggcgcccctttaaaaaaacccaatttaactaacccttctatccaacttaaaacctttttaatagggcccccaaaattaaattaattgcccttcttttaaaaaaattataactggaaaaaccctggcttacccaaactaaatccccttaaaaaaaaatccctttttcccaaattgcctaaataccaaaaagcccctaaccaatctcctttcaaaaaaatttcccaacct

SEQ ID NO: 23123 - DNA, 391 bp, Glycine max
  Clone ID: LIB3106-028-Q1-K1-C9
gttgcttgcaaggaagagtacagagcttaaccatagatatgaacaccaacaccatgcgacatgccgacaatcctatcaccttggagaatcatcattggaaccaccatggataccactcactgtcttagatgaaactgctctcaaggccagacaaaggcttcacaagaagcttggacatttcttttcctcatacaggtcaagtgagaatccaagaaaagaaggaaaagtaaaccaaagcagctacgagaagaaggatggaggaataggtcggaagttgttagagagttcatggttgttgcgtggcaacaagtttaagaaagatagaaaagtgggcgctgtgtgcctagaaaatttggggcaagagctacaggttttgtacctttcttgcttt

SEQ ID NO: 23124 - DNA, 409 bp, Glycine max
  Clone ID: LIB3106-028-Q1-K1-E4
cttttctcttttttcgggtctcgtggtgttctctatttcttcacaaattaaagagggtgcaaacgaaactcattattcctccctgcaactctgtgttcactggttcccttgatggtaaactcttcagctcctcttcaatcatttttaaagctctgagcttaaacaaaacattggatacgacatgggttttcagaggtttctcataatatgaccaatgtttggtaagttttctgcttttgccgtttactagttgttactagtgtccaaagagagacaagggtcattttctgtgtgctggctgatctgtagttcactttgatgaggtcagatatagaacttcttggttattatacttttttctattaaaaaattcttctgcttttctgcatatgttcctgccgttctgctt

SEQ ID NO: 23125 - DNA, 373 bp, Glycine max
  Clone ID: LIB3106-028-Q1-K1-B3
gataactagaaacagtgtgatgaaaatgaaggtccttgttttcttcgttgctacaattttggtagcatggcaatgccatgcgtacgatatgttccctctccgaatgaacactggctatggtgcccgtactccggaggtgaaatgcgcaagttggaggcttgctgtggaagcacacaacatctttggctttgagaccattcctgaagagtgcgttgaagcaacaaaggaatacatccatggcgaacaatatagatcagactccaaaacagttaaccaacaagcttacttttatgccagagacctcgaagtccatcccaaggacacatttgtgttcagtatagatggcaccgtactctctaatattccatactac

SEQ ID NO: 23126 - DNA, 377 bp, Glycine max
  Clone ID: LIB3106-028-Q1-K1-B4
acgagctgctaccctatatgcaccacgaagcgaattaatagattggagaggagaatgaggtaagcaaccgtgatctttttttgtctgtcacctttggtctatattaaacttttaaagcaccacttttattgacatggactattcgggtgggctgaacatgtttgcttcgcattagctctttggagtaatttgctcatgcttgtgcatggttacaccatacatgatttgtaggtggcagggttttgtttcctattgtttttaattttaatatagatgggatatgttattaaggttgcattgtttcttgtatttcatgcaatgttgttaatggctgatggtggtacatggcggaaagccaaaaatccgccataaaaata

SEQ ID NO: 23127 - DNA, 405 bp, Glycine max
  Clone ID: LIB3106-028-Q1-K1-B5
atcagccagttttgtgccagtgatgtgtggctcagctttcaaaaacaagggggtccagccattgctcgatgcggtagtggattatctaccatcaccacttgacttgccagcaatgaacggcagtgaccctgaaaacccagaagaaacaatagagagggtagcaagtgatgatgaaccatttgctggactggcttttaagatcatgagtgatccatctgtaggctcccttacgtttgtcagggtgtatgctgggaagctaagtgctgggtcttacgtactcaatgcatacaaaggcataaaggagagaattggtagacttttagaaatgcatgcaaacagcacagaggatgttaaagtagctttagctggtgatattattgcacttgcaggtttgaaagatactat

SEQ ID NO: 23128 - DNA, 356 bp, Glycine max
  Clone ID: LIB3106-028-Q1-K1-B6
aatcactatatttattgagattgaaaacgcgacccatcatgtgtgtttcctgagcacacagcagaaaagaacaaacgcaggttcccaattgaaacggttctgaagaagtgaagaacaatctaggttttcctttctccgattcactcccagagcgaagaagccgccatgggaggcgaggagaagcggcaccagatgatgcagaacctcttcggagaccaatccgaggaggaggaagagctcgacgttgattctgagcacgaatcaaacccgcaactcaattacccctccgacgagggggagggggtggtggagcatgagggcgaggtggagggccagggcgaggtggagatcgagag

SEQ ID NO: 23129 - DNA, 433 bp, Glycine max
  Clone ID: LIB3106-028-Q1-K1-B7
cccacgcgtccgcaattctagattattgattcttgaacatgggttcttatgttcctatcatgccttggcaagttaaaacgttaattaggtttggctgtgtaacaaagtagcaaagacaaaatttaaaaggaaaatgcttaaagtattaaatgttagagtgcaagacatgcgaaaagtctccttacaaattcattcataagggtgacttacccagttatataaacccttatcatgttcattaactatttaatgtgggactcttaacacgccccctcgagtcagggctcacctcaaagtgaggactgacggcactatccaccaaactaccggactctgatgccatattaaatgtttgagtacaacaaagacatccgaaatatccccttaaaaatcggttcataagggagtgacctaccagctatataaacactta

SEQ ID NO: 23130 - DNA, 180 bp, Glycine max
  Clone ID: LIB3106-028-Q1-K1-B8
gagaaatacagtgaacaagatatggtagctctcaaaatttcgttgcatgaatgtttattgtatttgccaaagaaaaaaggaaaaaaaaaaaaaaaaaaaaaaacaaaaaagaaaaaaaaaaaaaaaaaaaagaaaatacaaaaaaaataaaatgtaaaaagtgaaagataagctattaag

SEQ ID NO: 23131 - DNA, 404 bp, Glycine max
  Clone ID: LIB3106-028-Q1-K1-B9
cccaaacatgcttctcccacccttcctcactctcactttcctcctccttttcttcaatgcttccgtcgctgcgatttactcaacgacaacatgttccaacatagtgtcgctgagatatcgcagcgacagaatttccgtaacggactttggaggtgtcggcgacggccgcacgctgaacacgaatgcgttcagggcggccgtataccgcattcagcaccttagaaggcgcggtggcacggtgctttacgtgcctcccggggtgtacttaacggagagcttcaacctcactagccatatgaccctttatcttgctgctggtgccgttatcaaagccacgcaggagttggggaattggcctttaattgcacccttaccatcttatggaagaggaagggagctccctg

SEQ ID NO: 23132 - DNA, 417 bp, Glycine max
  Clone ID: LIB3106-028-Q1-K1-C1
cccacgcgtccgcccacgcgtccgggcattagaaatcagtgaccggcgtgagagagcgaagatggtggttcttggcaccacctcaccttcaatttcctgcttgccgtcttcaactcaaaccgactacaaggcgcgtcgatactgttcttttccgcaacgcccacgcccacgcccacgcccacgcgcttcacgtttcttttgcggatcccctttcgctccaaatgccatccattctccttctctgtctgtgacgaatgaagcactgaatgttatgatttctggggctcctgcttctggtaaaggaacccagtgccacctcatcaccaacaagtacggtttggttcatattgctgctggagatttacttagggcagaaattgccactggaagtgataatggaaagcgagccaaacaata

SEQ ID NO: 23133 - DNA, 418 bp, Glycine max
  Clone ID: LIB3106-028-Q1-K1-C10
tcccactcgtccgcgcttctaacgtcaccgactcagttgttgtcagcgagtgagtgagtcgtttctctgcagcaacaaggtttagccactccaaacagacgagaaatgggtcgtggggtcagtgctggtggtggtcagagttccttaggttatctctttggcagtggggtgcctgccatcagtgcaaacagtcagcctgcaaatggtgctcgcactcaaaatgctagtgctccttcaccaccagtcgataagcaaagtccagcaccagcaccagcaccagcaccagcacctgcatcatcaccaattgataagcaaattccagctggaattcctggaagtctcaaaaacaattaccatcgtgctgatgggcaaaactgtggcaactttcttactgatcgggcatttacaaagttcatgc

SEQ ID NO: 23134 - DNA, 399 bp, Glycine max
  unsure at all n locations
  Clone ID: LIB3106-028-Q1-K1-C2
ctctaatctaggaataggaaaaagatgggcagcactagtgcgagtgccctcaggctatggtcgatggtcagcgtgtccccgaattgcaattgctcatcgatgacgcttatgaagaagacggcgatggcgatggcgatggctcctttttcacttgcaatgaaaatcaaaagcaaaaggggtggtattaggtgcgaggtggctattaatgcggtggatgaggagtcgaggacgtcaccggaggagacgaagatcggagcgcgtgtgaaggtgaaggaggcgggtttgaaggtgtaccacgtncccaaagttggggagcttgacctaacgggtctggaaggcgagatcaagcagtacgttggcctctggaacggtaagcgaaatctcgccaatcttccttac

SEQ ID NO: 23135 - DNA, 398 bp, Glycine max
  Clone ID: LIB3106-028-Q1-K1-C3
ctcctatactctatttttcgcgtcacataaacaaaaaaaataaactggggagaagcatgttgttgatgttgggactatgcttcctattgttctctgcatttccacttgcgttctctgagagatgccacccacaagacaagaaagcgttgctccaactccagaaggacctcggcaacccttatcacatcatatcctggaacgcaaaggaggattgctgcgagtggttctgctgcgttaagtgtgacgagaaaacaaaccgcgtcattagcgttgccttatcatccccttttccagacaccaatctctcggcccaaatacctccctctgtgggtgacctcccttacctcgagtccctcgtcttccacaaattccccaaactcgtgggcccaatccagccc

SEQ ID NO: 23136 - DNA, 422 bp, Glycine max
  Clone ID: LIB3106-028-Q1-K1-C4
cctatcttttgtgggccacacacagtaatgatttagatgcttgatttctgctctttagtcaatctgcttcaaagttcttatttgaagtatggatttcttttgtttgttttatttcttggtgtgtagtttatgatcaagctggtcaatactatccttttggctataaggatctcttattcgttactatgctctggcattattctcttaatgcagtttccttgacgaaatataagtttctgaccgttcaatgcaaactcctgagcaagagttcaaagtagttgaatgctgtgaaagtatggttggccttcaattttccaagttcctaagaggagccaaaattttcaagttcagcaactcgtggcaggttaagttcttccattgagttcatggaaagttcaacatatggctaatttccttttatg

SEQ ID NO: 23137 - DNA, 164 bp, Glycine max
  Clone ID: LIB3106-028-Q1-K1-C5
acgctctatgagatgtcatcattctgcattttaggtttctgttttcagactccgatggaagttaatggatcagaactaaaaaaaaaaaaaaacaaaaacacaaacaaaaaataaaaaaaaaccaaacacaagacaaaaaaacattactccaactccaaaaagac

SEQ ID NO: 23138 - DNA, 381 bp, Glycine max
  Clone ID: LIB3106-028-Q1-K1-C6
gggccttccatggcttccgcttgtgcttcctctgcaattacagctgttgcgatctctacgccgagttccgggcagaagaatggatcaggaggttgttttcttagtggaaggaaattgagggtgaaaaaggagagagcagcaattggaggacgatcgatgggcactacagtgtgcgcagttgctgagcctgacagacctctatggttcccaggcagcacccctcctccatggcttgatggcactctacctggagacttcggctttgaccctcttggtcttggatctgacccggagagtctgagatggaatgttcaggcagagctagtgcactgcagatgggcaatgttgggtgctgctggcattttcattccagaattccta

SEQ ID NO: 23139 - DNA, 346 bp, Glycine max
  Clone ID: LIB3106-028-Q1-K1-C7
gcacaacatgctggctctctttaagtgaataccttataaaaaccctgatacaattaagagttttcttgtttctcgttttaacatgtccatagtgtcatacaaaggcaaaagatcaaattgagttacaatgtgttaaaaaaaaaaaaaaaaaacaaaaaaaaacaaataaaaaaatccaaaataataatcatagaacaaaaaataagattgcaaaaaataatataaaataaaaaaaataaataaaagggggcgtcccttttaaaggatccaagtcttattaccctggtttccaaactctaatctcttttatggggtacctaaatttaatataatggcccgcttattt

SEQ ID NO: 23140 - DNA, 288 bp, Glycine max
  Clone ID: LIB3106-028-Q1-K1-B2
cccacgcgtccgcccacgcgtccggagctgaagaagcctgttgtggagaaagaagctcgagggcatgccatatgagggcatgcacgtacggcctcggaggggaaccagaaaattatgttaacaaaataatctggaaccctaatgtatcagtgtcatcatcagtgtgtagtttaagctagctttgctatggttacgttctttgagatgagagtcttgatgaacagtaccattctgatgtattgctttccttgaaagttaatgcatgcttcttatcttctgtctagctac

SEQ ID NO: 23141 - DNA, 410 bp, Glycine max
  Clone ID: LIB3106-028-Q1-K1-C8
tggttgaaagccatgagcatgatggctgcgtatttgcgtgtacccacatcggggcccggtactccgcaatctggcacagctacgaggaccaaatgcagaaatctgaaaacctcttgctccgttaatgccgccaaaattccaatgccccctctaaaccctaaagaccccttcctctccaagctagctttcatcgctgcctcttcccccgacacgctcctcaacactcccaaaaactccgacacccctccttttctcgacatcttcgactcccccaaactcatggccactcccgctcaagttgaaagatctgcttcatacaacgaacaccgacccagaaggccaccgtctgacctgccttcgctgcttctccatggtagaattgtttacattggcatgcccttggtgccagc

SEQ ID NO: 23142 - DNA, 278 bp, Glycine max
  Clone ID: LIB3106-027-Q1-K1-D10
tgctgaatttggacatttttatcacctaaagcttcatgatagtcaggttaggactcatagttgctgcttcacttgcagcttttactgttaagcagctgaatgtctaaagctcaaaaccagaacttaaagatgagtgcacagaagaggagcatgttcttcaagagaatgaaagggtggtggaagaggagaaagatgaggttaagttaattaccagcataattaatagagcgaatgactttgaagatgatattctaccagaatttgaagatcttctgtct

SEQ ID NO: 23143 - DNA, 305 bp, Glycine max
  unsure at all n locations
  Clone ID: LIB3106-027-Q1-K1-D11
gggggggggggagggggggggaaaggggggggggggagggggggggggggggagtgggagggggggggaggggagagggggggggggggggggggggggggggggggggggggggggggggagggggtattnccgggggggaagggtggtgtgaaggacaatcaatatgagaaagtgggggcggcgcgtggggaaattgcgtctggtgtgggattgacgttcaacaatggactgggggataagggggggggggacgacgggggcacgatggcggaagagggactgggtagggttgaggaactata

SEQ ID NO: 23144 - DNA, 165 bp, Glycine max
  Clone ID: LIB3106-027-Q1-K1-F12
ccattttatgataaactttccttccatttttgttcctctagtaagcctattatttccggcaattgcaatgacttctatatttctttatgagcaaaaaaacaacaatttttagatacagaaaacaaaggaaaattctggggttttttattccccaattataatact

SEQ ID NO: 23145 - DNA, 402 bp, Glycine max
  Clone ID: LIB3106-028-Q1-K1-A1
ggctctactgttttctcttaccataatcatcaatggcttccttatccctctcctctcgcccatctctctcttccgcacaccacaacgcctccacgcgccttattctacgcacccctaactcccttaaactgcgcactccaccccactccctccccgccatccgcgccatcaccctcacccaggacgacctcaagagactcgccgccgacaaggccgtggagtccgtcaagagcggcatggtcctcggcctaggcaccggctccactgctgccttcgtcgtcgccaagcttggcgcccttctcgccttcggccaactctccgacatcgtcggtgtccccaccttcaaacgcacggaggagcaagcccgctccctcggcatccccctctccgtcctcgacgaca

SEQ ID NO: 23146 - DNA, 153 bp, Glycine max
  Clone ID: LIB3106-028-Q1-K1-A10
gacacgcgtgcgggcactcgtcatgacacgcgtacgttataatcatatgtatagcagcggcaagtgcaagttgtgcggtttcatttactaacagcttaggcgtgagtaaacactggcctatcgggtcttcgagctctcgtctgaacagtctca

SEQ ID NO: 23147 - DNA, 399 bp, Glycine max
  Clone ID: LIB3106-028-Q1-K1-A11
caaaaagcactcttgatcccgcaacctatggtgatcaaactagtaccataacaaaacaacagttggagattaacttgggtggggtcacagtagaagaggcaattagtgctcacagattattcatattagattaccatgatgcattcttcccgtatttgacgaagataaacagcctacctattgcaaaagcttatgccacaaggacaatcctgttcttgaaagacgatggatctttaaagccacttgctatcgaattaagcaagcctgcaacagtgagtaaagtggtgttgcctgcaacagaaggtgttgagagtacaatttggttgttggccaaggctcatgtcattgtgaatgactctggttatcatcagctcataagccattggttaaatactcatg

SEQ ID NO: 23148 - DNA, 412 bp, Glycine max
  Clone ID: LIB3106-028-Q1-K1-A12
cccacgcgtccggcattccatagcctcccataaaaatgaagaatactatcttctctgctctctttctactttgtgccttcaccacctcatacctaccttcaaccaccgcggtggtcgataccgacggtgatattcttcagaatcctggcacatactttatcttgtccgtttttcgacccggcggctgagtataattcgccgccactggaaacgaaacttgccctctcactgtcgtgcagactctcttcgggaggggctttccagcaatattatcgtcccggttacgaatccctttcatcggcgaaggacaactcttcagcatcctgttccgtattgtgccatggtgcgccaccactccttctaagtggaccattgtggagggtttaccagaatcacccgcggtttaactcac

SEQ ID NO: 23149 - DNA, 393 bp, Glycine max
  Clone ID: LIB3106-028-Q1-K1-A2
cccacgcgtccgattccttgtaagtactctacctactcaaccgaaacgtagcgcaccaagagaatgagagtagaaggtatgagagacggagagatggccctccccctgaccgcagaaggccaagacaagaggccgctgcctccgattcatcctctacatgagccttgcaggtgagtttcagttttgctgatagtaactaatgccaagtgaaagctgctccttatcacagctctatcatgctcatggtcattttatcaaatagaagattgaacttgggttgaattctcatcagatgcatacaatgtttcttgcaagctcaaactggtattttcacaattcatcttgaggaatatgtgcttttggactattgatatgacatgtgggacaattgtt

SEQ ID NO: 23150 - DNA, 420 bp, Glycine max
  Clone ID: LIB3106-028-Q1-K1-A3
gctcaatggcatcatcatttgtgggtactttattacccaaccacttcacacaaaccaagacactcagctgttcctgcaagtagatcaggtgctccaagaaggaggagagtgcacttagcaacaacaagagcagagaccatgactactgtcatagaaaaactgggcattaagattgagaggaaccctcctgagtccaagctcactcaactgggtgttaggcaatggcccaaatggggttgccctccaagtaagttcccatggacatatgaagccaaagagacttgctatcttctggaaggaaaagtgaaggtctttcctagtgggtcgaatgagtcagttgaaattgctgctggtgacttggttgtgtttcccaaagggatgagttgcacttgggatgtgtcctgtggtgttgacaagcac

SEQ ID NO: 23151 - DNA, 415 bp, Glycine max
  unsure at all n locations
  Clone ID: LIB3106-028-Q1-K1-A4
caattttcaaactcaattaccattccataacctaaatctcctctttgtttccgagtcagagagcaatggcacgtaccaagcaaaccgctcgcaagtccaccggcggaaaggcgccgaggaagcaattggcgactaaagccgctcgcaagtcagctccggccaccggcggagtgaagaagccccaccgcttcaggcccggaacggtggctctgagggagatcagaaagtaccagaagagcactgaacttctgatccgaaaactcccattccagaggctcgtcagagaaatcgctcaggatttcaaaacagatcttcgtttccagagcagcgctgtttctgcgcttcaggaagccgcagaggcttatctcgttggactcttcgaggacaccaacctntgcgctattcacgccaagag

SEQ ID NO: 23152 - DNA, 299 bp, Glycine max
  Clone ID: LIB3106-028-Q1-K1-A5
cgacccatgcatccacgcgtcagcgggtagatgtgacgacattcacaaactccaatggcactcaagatgtacggggcatgggctgtcaatgcacggagagtctcttataccaccccacattatatgtagcattctctcccttactctagacgactcgtctctaactctctgatggaaattcgcatcaagatccacacgaatgcttcctgcacaaactctgcgtcgacaaggtcgtggaatccgtccagagccgcatggacctcggcctaggcaccggctccactgctgccttcgtcgtc

SEQ ID NO: 23153 - DNA, 368 bp, Glycine max
  unsure at all n locations
  Clone ID: LIB3106-028-Q1-K1-A6
tcgtcccacgtcgtctcgtgcatgtgttctccatgtttctcctatctccatctgaagtcgaacccggtattttgtcctctcccntaatggccttctcaagttctntcttcaggcaccctgtttgcccccaagcctaagtttccctntcttcnttctcgtaaccgtggcgttaactttctagcggttccttccactcccaatttcatggccgttgcacctcccctcattgcttaagcctagntttcgtagtgaggagctgacactcatacctcgatggccggtcggtgaagccactcgaggactgttccttcggataatggctgaaaaagtttcgtgaagggcgaagccagaacaaggtttctggattc

SEQ ID NO: 23154 - DNA, 395 bp, Glycine max
  Clone ID: LIB3106-028-Q1-K1-A8
ggctaaccaacgctgacacttctgcttatgcgtttgctacgacatcatcgacgtcacaatgccgcaccatgcagaccactgccagatcgactacatcgacttacgcctcaccacaaatgaagactgatcgtcaaagcttcgtcgattaaacatcggaccattgtgtctgtggcggacgaagatctgactagatatcacctacgaaacctgcatggactggaaggacctgcgcgtcaccgtcaagctcaacgagcaaaaccacgcggcctacgtcacggtagtccgatcctgcgacgcgctcgtcatcaatgcccttaaggagccacagcgtgaccgcaagaaaacgaataacatcacgcacaactgctacatatcactagacgacgtcatcgaag

SEQ ID NO: 23155 - DNA, 396 bp, Glycine max
  Clone ID: LIB3106-028-Q1-K1-A9
gggagaagaacaaacggatcatggtttcgacgagacgcagtggatctgtctctgccggaagatcttcctgctgggaagataaaccttcttcgccgaagcgccaaaaggtcgacaatggcggttcgtcggagaaaccggtgccgacgccggcggaaaattccaaggacttatctactccggagcccgtgcttgatcccggagaatgtggctccggcgaagctcagatcgccggcgcggttgccgactatggagtgagctccggcaagggtgacgctactcctgctgtgcctgtcacggcgccgattgctgatgccgcatgtccgtcgttctcttcgtggattaattatcagaaacaaaatgcgcatatcgaacgtgcgccgcggtgcatgttcttgt

SEQ ID NO: 23156 - DNA, 319 bp, Glycine max
  Clone ID: LIB3106-028-Q1-K1-B1
gagagacatgaaaaaaaatgctttaatttatttaaaaaaaaaaaaaaaaaaaaaaaaagaaaaaaaaaaaaaaaaaaaaaaaaaaaaaaaaaaaaaaaaaaaaaaaaaaaaaaaaaaaaaaaaaaaaaaaaaaaaaaaaaaaaaaaaaaaaaaaaatggccgccctttttaaaaaatccaacttaacttacccttcaatccaacttaaaacctttttatttgggccaccaaaattaaataaactgccccttttttaaaaactattgcccttaaaaacccttgcctttcccaaatttaaatcctttcaaaaaaatcccct

SEQ ID NO: 23157 - DNA, 419 bp, Glycine max
  Clone ID: LIB3106-028-Q1-K1-B10
cccacgcgtccgataagattgcagtagtgctaagtgctaacacctgcagtgaacaatggcctctgcatcagcatctctgctcaagtcttcacttgttcttgacaagtctgagtgggtgaagggacaaacccttcgccaaccttctgcatcagttgtgagatgcaaccccaccaccccatcaggcctcaccatcagagctggttcctatgctgatgagctcgttaagaccgcgaaaacagtggcttcaccagggaggggtattttggccatggatgagtccaatgctacctgtgggaagcgtttggcttcaattgggctagagaacactgaagctaaccgccaggcataccgtaccctcctcgtgacagttccaggccttggtcagtacatctctggtgccattctctttgaggaaacac

SEQ ID NO: 23158 - DNA, 399 bp, Glycine max
  unsure at all n locations
  Clone ID: LIB3106-028-Q1-K1-B11
gagagtacaatgcatcgcacgtgtggccgccaattgtcaagaagaagggcgagactctttcctacttgccagacctcgatgatgcccaattggcaaaggaagtcgaataccttctaaggaaaggatggattccttgcttggaattcgagttggagcacggcttcgtgtaccgtgagcacaacatgtcacctggatactatgatggacgctactggaccatgtggaagctgcctatgtttggctgcactgatgcttctcaggtgttgaaggagcttcaagaggctaagactgcataccccaatggcttcatccgtatcattggatttgacaacgttcgccaagtgcagtgcatcatcttcatcgcctacaagccncccagcttctaagtcattgaaaaat

SEQ ID NO: 23159 - DNA, 396 bp, Glycine max
  unsure at all n locations
  Clone ID: LIB3106-027-Q1-K1-C10
ggggggggggggggggggggggaangagaggagggggggggggggggaaggggggggggggggggggggggagggggggggagaaagggggggggnaaagggaggggggggggggggnnnaaggggggggggcggggagaggggggggggggggggagaacaacncggggggggggggaggggaggagggggccagggggangggaggggggggggggagggggaaggggaggggaaagggggggggaagacgggaggagggggagcgggggggganncgggggggggggggggggggacaggaaaaaggggggggggagagggggggggggacggggcacgagggagggaagggggggggggggggggagcaagggaggggcagggggggggggg

SEQ ID NO: 23160 - DNA, 133 bp, Glycine max
  Clone ID: LIB3106-028-Q1-K1-B12
aaaaaagaaaaaaaaaaattaaaaaataaaaaaaaaaaaaaaaaaaaaagaaaaaaagggaaaaatataaaaaaaaaaaaaaaaaaaaaaaaaaaaaaaaaaaaaaaaaaaaataaaaaaaaaaaaaaaaagg

SEQ ID NO: 23161 - DNA, 233 bp, Glycine max
  unsure at all n locations
  Clone ID: LIB3106-026-Q1-K1-G2
caatataaatggttccttttctggaatgggtaatgtaggttacaattgtacaaattctaaagttcgtgtcttcgcatatcatttcatgaaaagaatatgcatgtttcctaaaaaaaaaaaaaaaaaaaaaaaaaaaaaaaaaaaaaaaaaaaaaaaaaaaaaaaaaggnaaaaaaaacaaaaagaatcaaaggaacaaacccnagcataccaaaacgtagcctctctaataaa

SEQ ID NO: 23162 - DNA, 328 bp, Glycine max
  Clone ID: LIB3106-026-Q1-K1-G3
caactactttttcaacccaaacctaatccacacccagcgcattttttaaatctgggccacacaagttatcctaatttttcccattaaacgttaccgtattgctgatggccccctcggtgaggtcactgacccaatctacccaggtggcagcttcgacccattgggccttgcttatgacccataagcttttgctgagcttaacgtgaacgaactcaataacgtactattggccatgttctctatgtttggcttctttgttcaggccattttcacctgaaaggttccattgtagaacctctccgatcaccttgcttaccctttcaacaac

SEQ ID NO: 23163 - DNA, 374 bp, Glycine max
  Clone ID: LIB3106-026-Q1-K1-G4
tggcaagaaggagaccctcattgaccttacaattatagaaatcctgtcaaggcacgcatcgcatgagttctacctgggggagagagatggtggtgacttctggacttctgatgctggtccactagaggccttcaagaggtttggaaagaagcttcaagagattgaacataagcttatacagaagaacaaggatgagacgttgagaaaccgcactgggccagctaaaatgccttacactctgctctatccttctagtgaggagggattgactttcagaggaattcccaacagtatctctatctaagggctctctcattgaggttgctgtactactctgcctgtttttcaataatgtggaataggaggaatatgat

SEQ ID NO: 23164 - DNA, 233 bp, Glycine max
  Clone ID: LIB3106-026-Q1-K1-G5
cccacgcgtccgcccacgcgtccgaccattgaaggcatttcagtcaacagcgtgaattcagcttcatagaagatacaggctataattgatgagacagttaatagtcgaaatcttgattattcacacttcatatcccttccattggccattcatcctgagttggttaataaactcatcagttttcagcattcaatattgggaaatgggtcttgcgtgggtgtgaatacccatac

SEQ ID NO: 23165 - DNA, 320 bp, Glycine max
  Clone ID: LIB3106-026-Q1-K1-G6
cccacgcgtccgggcggcgattgaaggaggtgattgtgaagggaaatacttctggggaagcgcgttgtatcacgtggacgatttgccttttcaattggaggacatgccttccaattacggagggtttagggatagggttcagaaattggaggtaaggaagacaattgaagctttagatcatcttaagggaatgccttctcgcggtgattttgagcttggggagattccttccttaatggaccttggccttaatccatctgcgacaatgtcacaggatgggaagtttggtgccaatgcttatatgataggaggggagactg

SEQ ID NO: 23166 - DNA, 351 bp, Glycine max
  Clone ID: LIB3106-026-Q1-K1-G7
acaagatatggttcaccccgcttgggaaattcatggacgagagggacgcggcgatcagggagaagctgagcagcgtggaggacacgtccgaagaagtgaaacaactggaggagaaagccaatgcttgcatggccgctttttgggccgagatagcggcggcgctgaacacgatgaagaaggagacgcaagctgaggtggaacaaaagattgctgaggggaggaagaaagtggaggctgaactgcaagaggctctggctgccttggagaattaaaaggaagaaaccatcaagtcccttgattcccagatcgcagcccttatccaggagattgttaataaagttctttccactg

SEQ ID NO: 23167 - DNA, 427 bp, Glycine max
  Clone ID: LIB3106-026-Q1-K1-G8
cccacgcgtccgattaccactaaaatatcgcatccgaatgtttcgctcctcgtatcctgcgcatccttttatgcgtgggttcccccaacgaaaccagcgagaccaaacgtggtaacgctttgaatctttgaattcattcaaagatcccccttctgtctccctctctacgcatatcagggcactatggctgccacggtgaaacaaatgtctttgatcgtgtcactgttcggcgtggtgtccttcattttgggtgttgttgctgaaaacaagaagcctgcggcaggaacacccgtgcctggtttggatggtgtctctgtcacctgcaagtacccagctgatccaactgttgcattggggtatctttctacagcatttcttgttgcatccactgtgactggatatctggctttggttttacccctacaaa

SEQ ID NO: 23168 - DNA, 367 bp, Glycine max
  Clone ID: LIB3106-026-Q1-K1-G9
acgcccacgcgtccgcccacgcgtccgcccacttttccgcccacgcgtccgaaaaaaaaaaaccgaaaaaaaaaaaaaaaagaaaaaaaaaaaaaaaaaaaaaaaaaaaaaaaaaaaaaaaaaaaaaaaaaaaaaaaaaaaaaaaaaaaaaaacgacgccctatttaaataataaaattataaaaattcaaataacaaaccaaaaattcacaatatttgaacctaaaaaacaaataataaacctaatttaaaaaactttcaactctataaaaactctgcaaataccaaaaaaaacaattatgaccaaattattattggaaaaaaaattaaataaaaataaatcccaaatctaacttcttttttaaaa

SEQ ID NO: 23169 - DNA, 433 bp, Glycine max
  Clone ID: LIB3106-026-Q1-K1-H1
gcaaaaccctagcggcgcctgctttctttgttcgtgttttgcatcaggatggagtctcaggggaagcacgcacttgttgtcaaagttatgggtcgtactggatccagaggacaagtgacccaggttagagtgaagtttttggatgatcagaaccgtcacatcatgaggaatgtgaaaggacctgtgagagaaggagacattctcaccctactcgagtctgaaagggaagcaagaagattgcgctagatggtctcttttttttggcttgcctccaaattcgaacaaaagcaatatttttcttgatatttatggtagttagtcggtgctaaaggggttatagcaccctatcttattgttttggatctattttcattcgaattattgcttgaattttgtatgtttaaacttcgagattgaggtatgctttggttta

SEQ ID NO: 23170 - DNA, 213 bp, Glycine max
  Clone ID: LIB3106-026-Q1-K1-H11
gcggaagatttctaacatgttgttcttactttttttctgattccaaatactgtggcaacaagggggtctacaaacctcgattgataattcataatctgattgttcagcgcatagcctgtcacatattcgcccagcatcgagctctcctcatacttatacggatccaagctaaggtccataaccatgtccctatacgaactccagtactacata

SEQ ID NO: 23171 - DNA, 406 bp, Glycine max
  Clone ID: LIB3106-026-Q1-K1-H2
cccacgcgtccggtttttatttctctcttctctctgcatcgcttcaggttcttctgaaaagagctctcgcgtgtatgttggtaacttggattcacgagtcaccgagagagatctcgaagacgaattccgtgttttcggagttattcggagtgtttgggttgcacgtagaccacctggttatgcttttattgactttgatgaccgcagagatgcacaggatgctatccgtgaattggatggcaagaatggttggagggttgagctttctcacaactctagaggtggaggtggtggtcgtggtggtcgctctggtggttctgatttgaaatgttacgagtgtggtgaacctggtcattttgctcgtgaatgtcgcatgcgtggtggttcaagaaagaccccgtaccgt

SEQ ID NO: 23172 - DNA, 149 bp, Glycine max
  Clone ID: LIB3106-026-Q1-K1-H3
cgttacgactcctttaccatttcaagagactacatagatgttttggcctgtgtgcacgatggtggtgagaaaactactctagcaacatgagttatgttgtgtctatgtgtagacccgatatggacttgaaataaaataaattattgtcc

SEQ ID NO: 23173 - DNA, 283 bp, Glycine max
  Clone ID: LIB3106-026-Q1-K1-H4
ccggggcgaccgacgcgtccgcccactctttcgcccacgcgtccggataactagaaacagagagatgaaaatgaaggtgctgagtttcttcgttgctacaatttcggtagcatggcaatgccatgcgtacgatatgttccctctccgaatgaacactggctatggtgcccgtactccggaggtgaaatgcgcaagtaggaggcttgctgtggaagcacacaacatatctggctatgagaccattcctgaagagtgcgttgcagcaacaaaggaatacatccat

SEQ ID NO: 23174 - DNA, 347 bp, Glycine max
  Clone ID: LIB3106-026-Q1-K1-H5
cccacgcgtccgcccacgcgtccggctgcatatgtcttgaaatgtgatgatgacacttttgggagggttgataccgtcttaaaagaaattgaagctgtacccgagcaaaagcccctttatatgggcaatctcaatctcttgcatcggcctctaagaaacggaaaatgggcagttacttttgaggagtggcctgaatcagtatatcctccttacgcaaatggccctgcatacataatttccagagacattgttactttcatcatatctcaacacaaggagaggagactgcggctctttaaaatggaggatgtaagcatgggaaatgtggttgagagatttaacaacac

SEQ ID NO: 23175 - DNA, 405 bp, Glycine max
  Clone ID: LIB3106-026-Q1-K1-H7
cccacgcgtccgcccacgcgtccgcccacgcgtccgctgagagtgtttggttgaaagtagcgaagatgtttcctttcgggcaaaagggtcaaaagataaaggggactatggtggttatgcagaagaatgtgttggatatcaacagcatcaccagtgttggagggatcgttgaccaaggcttaggcttcataggcagtgcagtcgatgcacttacttttgcagccaccaaaatctccatccagttgattagtgctaccaaggctgatggtgggaaaggaaaaattggaaagagtacaaatttaagaggaaagataacattaccaaccttgggagctggcgaacaagcatacgatgttaattttgaatgggacagtgacttcggaattcccggtgcattttatatta

SEQ ID NO: 23176 - DNA, 390 bp, Glycine max
  Clone ID: LIB3106-026-Q1-K1-H8
agcagcaaagaattgtatccataagctgctgatgcttatacctctattgtaagaatccgtgcgcatgtttttcaagggggttcactcacaccatttcatttccggacaacataaagatcaggcattttatcgaagacataaccgagtcctttaatttgtattcatagccagatgtgtggtagttgctcacgaacatgtgtaagttaatcaagccagctgacatagaatatatgtatttaggatcaattttaccctcaaaagcctattacgaggcttgttagttggtacacctgtgggtggatttttttttggtactgatgttgtaaactgtgggaggtaatttaatccaataaatttaagtctgagtagaaaatcaattgaattgatatt

SEQ ID NO: 23177 - DNA, 370 bp, Glycine max
  Clone ID: LIB3106-026-Q1-K1-G12
cccacgcgtccgatagttaggctctattggaccgtacgattaagatcgttcggtgaaattgatggcgctggtgccgcatacgctagcgttcctgttattctattgtggctgaaacaaaacagtgttgaacggcgaggtagaacgacgacccccttctgcgttttgaccttcaatctcaatcatggccaaagctgaaggtggcaaggaaccaataaatgaacaagcagtagcaaatatgtatgctgcaatgaggtctgagctcaaccaaatttactccaaaataactgaactggagatggaagttagtgagcacacattggttaccaatgccattcaaccacttgaccaatctagacgatgctatcgtatg

SEQ ID NO: 23178 - DNA, 432 bp, Glycine max
  Clone ID: LIB3106-026-Q1-K1-H9
cccacgcgtccgggaaagcaaaagtgaggtgtagtggtagaaggataaggtgactataaagcgtggaaacggtggtgtagtgtgtgagtgtcattgtgaagttggaaacaatgctagcttcttcgctctccttcctccattcttgcacatccccctcttcctcttccttattgtcaatttcacctccaaaccccaaaccctctcacttcctacctttcgtggtcgaagccaaagacaggacccgcagggaagacaggaccgctcgccacactcgcatcagaaagaaggtcgaagggacgcccgagaggccgaggctgtccgtgttccggtcgaacaagcatctctctgtgcaggtgattgatgacaccgcaatgcgcacgcttgcttcggtgtcgacaatgcaaaaaacggttgctgatgagttcaactact

SEQ ID NO: 23179 - DNA, 439 bp, Glycine max
  unsure at all n locations
  Clone ID: LIB3106-026-Q1-K1-E5
cccacgcgtccgtgatgatttacctgatcaagggagtggtcatttttctgaaacagtgcgagaagctgaaggcactgaagccaaatatgctgatagaagccttagttccagattttcgaggagatgctgactgtgtagagaaggttgccaaatcaggattagatgtctttgcacataacattgagacagtcgaagagcttcagaattttgtacgggaccatcgcgctaattttaagcagtcattagatgttctaatgatggccaaggaatatgcgcctgctggaacacttactaagacttcaataatgttaggttgtggggaaacacctgatcaggttgtgaagacaatgganaaggtgagagcggctggtgtngatgtgatgacatttggtcagtatatgagaccttcaaagcgccatatgcccgtatctgaatatgt

SEQ ID NO: 23180 - DNA, 391 bp, Glycine max
  Clone ID: LIB3106-026-Q1-K1-E6
agagagatgggttcgtccgtgaagctttcatggagggccttggaaactgagatgcccgtgatggttcagatgcaggaattgcaacgaggagctaagaatgccttgtctttggcccagggggtggtttactggcagcctcccaagcaagcgttggaaaaagtgaaagaacttgtatctgagcctttaattagtcgttatggtaacgatgaaggtattcctgaactcagagcagcattagtcaaaaagttgcgtgatgaaaataatttgcacaaatcttcagtaatggttacatcaggtgccaatcaggcatttgtgaatctaagtcttactctctgggatccgggtgattctgtggttatgtttgcttcttactacttcaatgcgtacatgt

SEQ ID NO: 23181 - DNA, 263 bp, Glycine max
  Clone ID: LIB3106-026-Q1-K1-E7
ctgaagcatcacagctctgttgtcagctccaacagctgcttggtaatcccatcaaattaacgggtatgtattcattaaattcgctagaccaacagtgtaaattgctgtcccgaatatcagaactttgtattcagctacaggaacgattgacaaagactgataaacaataggtgcttgttttgtttaagcttatattgaggaatttataaattttcaaaagatgttttaagagctgaagtaaggcagtggtttcttatttgttc

SEQ ID NO: 23182 - DNA, 426 bp, Glycine max
  Clone ID: LIB3106-026-Q1-K1-E8
attgaacacacacatagaaacccaacaacaagaatgaagaagatgattctaaccctcttcgtcaatatcattttatcggtcctctccctctcccacgcctccgtggtggatttctgcgtagcagactacacaggccccaatggccccgcagggtactcatgcaagagcccagcaaaggtcacggtggacgacttcgtctactccggccttggcaccgccggcaacacctcaaacatcatcaaagccgcggtgacgccggcgttcgacgcgcaattccccggcgtcaacgggcttggaatctccattgcacgcctagacctagcagccggtggagtcatccctcttcacacgcaccctggtgcctcagagctgctggtggttgtgcagggaacaatctgcaccggcttcggtgcttcggacaacact

SEQ ID NO: 23183 - DNA, 421 bp, Glycine max
  Clone ID: LIB3106-026-Q1-K1-F1
ccgcccgaatcctcgaaatttctttcgattgaactcatttctctcttcttcgccacgcactcttcgctctgtaagcggtgatggtggttctggacaatgtctcgtgtttatgttgggaatttagaccctcgagtcagtgagagggacctcgaagatgaatttcgtatatatggtgttcttaggagtgtctgggttgctcgaagaccaccgggatatgcatttattgagtttgatgataggagggatgcacttgatgcaattcaagccttggattgaaaaaatggttggcgtgtagagctttctcattattccaagggtggtggccgaggagggcgtgggcgtagaggtgaagacacaaaatgctatgaatgtggtgaacctggacactttgctcgggagtgccgattgcgcattggatcac

SEQ ID NO: 23184 - DNA, 297 bp, Glycine max
  Clone ID: LIB3106-026-Q1-K1-F10
ccaacgcgtccgggaagttggattgaaagatttgacaagcaagaatcacatgaaaatagtgctgaaatggatgagagagagacagaagattcggctcctttgcaaccacgttggagcacacaaacagtttctctacaccacttggtttaccaagccggttacccctcccaagaattcctcttgaaagttgaaacttcatcatcagttggttgctgctgttttgtaccatgccttgtcaagagtaataatttcattttagaaccgttaatcaatagagatcgaaatgttttgccttac

SEQ ID NO: 23185 - DNA, 420 bp, Glycine max
  Clone ID: LIB3106-026-Q1-K1-F11
cttcggccaagccttccaacaaaaccaggaggcagcctttcctcaacactctttgctggcctctctgtctctcttacatagggctcaatttcccattgttctcactctccacaattctcttctctttcttcttcaactccattcacaaacggtgccgggaaagtccattccttttctcaattccccggcgaaacaaatgcgacccactttctagaacctcgccgcgtgccggaaagttcactcctttctcacttttccggcgtaccattaccctcttttttttcccgcagcaatgtcaatcttcgacggagctttcatgaacacgcaactctccaagcacacttcgatcttcggccttcgtctctgggtcgtgatcggaaatcctcatggagtcttcatcggcttcacgctctttctcct

SEQ ID NO: 23186 - DNA, 361 bp, Glycine max
  Clone ID: LIB3106-026-Q1-K1-F12
gtggtggaacctccgtccttcttctttggtggttctgggtttgggtttgttttttctctcaggggaaaatgtcttgctgcggtggtaactgtggttgcggaagctcctgcaagtgcggcaacggctgcggaggctgcaagatgtacccagacttgagctacactgagtcaaccaccaccgagaccttggtcatgggagtggcacctgttaaggctcaatttgagggtgctgaaatgggtgtgcccgctgagaacgatggctgcaaatgtggaccaaactgctcctgcaacccctgcacttgcaagtgaggtgttgggagagcaagcttcaagcagagatagcccttaattaggaataatga

SEQ ID NO: 23187 - DNA, 400 bp, Glycine max
  Clone ID: LIB3106-026-Q1-K1-F2
cggccggaatcccggtcgagcacgcgtccgcccacgcgttcgcccacgcgtccgaattcacattcatcaaagagagagatggtgaacgtggcgcaattgcataaacaggtgcagagtgggaatgtgaatgttgatgccaacggggaactcatgtatgtcaaggtcatgaccgatgaacagttggaaactctgaggaagcaaatagcagtttatggcaccatttgtgagcagcttattgagatgcactgaacactttcagctcaacaggatcttgcaggggttatattgggaaacatatactgtgacccattgatgacatctggtgggcacaaaataacatcaagacatatgtggacacctacacctgtgcagcttcaaattcttgaacgtatatttgatc

SEQ ID NO: 23188 - DNA, 429 bp, Glycine max
  Clone ID: LIB3106-026-Q1-K1-F3
atcctaaacgggccaactattagcaggagattcatgcctgaaaaggggtctcctgaatatgatgcgttggctaagaaccctgagaaggagtttttgaagactattactggcaagaaggagaccctcattgaccttacagttatagaaatcttgtcaaggcacgcatctgatgagttctaccttgggcagagagatggtggtgactactggacttctgatgccggtccattagaggcatttaagaggtttggaaagaagcttgaagagattgaaaagaagcttatagagaagaacaaagatgagacattgagaaaccgctatgggccagctaaaatgccttacactctgctctatccttctagtgaggagggattgactttcagaggaattcccaacagtatctctatctaaggaccctatggttgctta

SEQ ID NO: 23189 - DNA, 429 bp, Glycine max
  Clone ID: LIB3106-026-Q1-K1-F5
aactattgaagcacaaaaatcagattatgagaagttgaaggaattgctgacttcattgtgctttaaaatgtacaagaaaaagggtgacattgctgtatggaggaagtctccagataacaattgttataataagctggctagagattcctatccacctaaatgcgatgacagccttgaaccagattcagcatggtatactccacttcgtgcctgtattgtagttccagatactaagtttaagaaatcaggtctgctgtccatttctaagtggcctgagcgattgcacgttacaccagatcggatttcaatggttcctcgtggaagtgatagtactttcaaacatgatgacagtaagtggaaaaagcaggctgcgcactacaagaaggtgattcctgagcttgggactgacaaaataagaaatgtcatgga

SEQ ID NO: 23190 - DNA, 323 bp, Glycine max
  unsure at all n locations
  Clone ID: LIB3106-026-Q1-K1-F6
gagaaagattacactcctaccttaataggtgggagaagaaagaaagagaaggggccaaaggagaaggtgtatgatatttatatggtccaaagttgaatcttctgccacaacatacaccatcatcctcctccaatccatcatcaatggccgtgaccactccctgtatcaatgccacagaaaagaagcactggtggctcaccaaccgaaagatcgtaaagaaatacatgagagacgctcggagtctgatagcgacgcangaacagagcgagatcggttcggcgctgaaccttctcgacgcggctctggcgatctatccgcggctg

SEQ ID NO: 23191 - DNA, 381 bp, Glycine max
  Clone ID: LIB3106-026-Q1-K1-F7
attaaatacggcatttatttcagtgcctatactgttcacgcaccctatggaataaagacagaaacttggtaatctcaagtgatgtgcaaatgatgttgggaggtgcaacagcaaggggcgtttccctgattaaacttcttcctccgttccgctttcgcttcaaacactcctctgctctttcaaaaaccatttgttttcaggtttattcgacagaggcatctcctggcatagagagagtgacacatgaagtcctgaaagaatttcttgccactttgaaaatgcaccaacatccaatgcaaaagtctattacggatatatcgataagatatgcaaggctggaaatctttcagttgccagtaaaatgctagaaattttaaatga

SEQ ID NO: 23192 - DNA, 403 bp, Glycine max
  unsure at all n locations
  Clone ID: LIB3106-026-Q1-K1-F8
ggggaaacagattgtgccggtgaaatcagttatctacgcgctctcccctttccagcaggagataatgccgggtctctggaaggacttgcccacaaagattcaccacaaggtctccgagaattggatcagcgccactctcttgcttggtcccctcgtcggaacctacacgtatgttcagaactacctggaaaaggagaagctgtctcacaggtactgaactcatgcaagagctgattggataaccttctagtttgttgccttgatcttgtttagccacccaataatgtgacactgttgaaacttgctctaccgtttggttttgagatgtctgagtntgagctttttaaacttcgacagtgtttattgatggtctatttcattaatccatattactttgatagac

SEQ ID NO: 23193 - DNA, 338 bp, Glycine max
  Clone ID: LIB3106-026-Q1-K1-F9
gtctggagaagcgtcctcagtggcggaccgggcccaagtcccctggaagggggcgccagagagggtgagagccccggcgtgcccggaccctgtcgcaccacgaggcgctgtcggcgagtcgggttgtttgggaatgcagccccaatcgggcggtaaattccgtccaaggctaaatactggcaagtgttatcgattcaaacattttattgtattcttttaagatgtagctagttactctagtctaagtcttgtacacacaaaaaaaaaaagttactcaagtctaaattttatctttttctgtgtattttttgcattttagtgaatggaaattagtcttt

SEQ ID NO: 23194 - DNA, 249 bp, Glycine max
  Clone ID: LIB3106-026-Q1-K1-G1
aaaaaaaaaaaaaaaaaaaaaaaaaaaaaaaatttaaaaaaaaaaaaaaaaaaaaaaaaaaagagaaaaatattaaaaaaaaagaaagaaaaaaaaaaaaaaaaaataaaaaaaaaaaaaaaaaaaaaaaaaaaaaaataaaggggccgcccttttaaaaaattcaaattttacttccccttccttccaaaataaaaacttttttttagttcccctaaatttaatttaactgccccccttttaaaaacc

SEQ ID NO: 23195 - DNA, 373 bp, Glycine max
  Clone ID: LIB3106-026-Q1-K1-G10
gtccgcccacgcgtccgggtttttgcgttgcgttgcactagcccctgcacagtagtgtggtacgagggttgattttgataagataggtctgtgctgtggggaaaattggaagcatcgatcggaaaatgcaatcgttatcgttgagtatgagtctgaggagtagtagcttagtgaattttcttttgctgggttcagagacgagagtgagaagcagaaggagtgtcatcgtagcgtgtgcttcagagggagacagtggcagcagtagcacaagctcgtttctctctcggacccaaacctacgctcttcttaagcaacaattgcaagtagctgctaaatccgaggattacaaggaagccgctagaattcgagactc

SEQ ID NO: 23196 - DNA, 121 bp, Glycine max
  Clone ID: LIB3106-026-Q1-K1-E4
cccacgcgtccgcccacgcgtccgcccacgcgtccgcccacgcgtccgcccacgcgtccggaaaaccgcaattgaaacgtcattctgcatgctacctatgattaatctactagtttatcat

SEQ ID NO: 23197 - DNA, 321 bp, Glycine max
  Clone ID: LIB3106-026-Q1-K1-D11
cttccgccaacccttcccccaacccttccgacaaattttacttacctttacttactatgcctaccacgaaactcttgcccaccagttgggcccttcttctcctttctgacttaacattcactcatgcctattgcctaccacccactccatctgcaaagcccacaccaccaactccaataccaacaccacccacaccaaagcccacaccacccactccaaagcctacaccaccaactcctaagcccacaccacccacaccaaattccacaccacctactataaagcctagttggcctcctacttctactacttcaccaccat

SEQ ID NO: 23198 - DNA, 440 bp, Glycine max
  Clone ID: LIB3106-026-Q1-K1-D12
cacaccgaaaacaaccacgcgtccatgccttttgttaaagaacacgcgcatctccaaagggagaaaggctgccaagaagagggcggctgatccctttgccaaaaaggattgctatgacattaaggccccttctctttttcaagtgaaaaatgttggcaaaaccctcgtctctcgtacgcagggtaccaagattgcttctgaaggacttaaacatagagtgtttgaggtctccttggctgatcttcaaggggatgaggatcatgcattcaagaagattaggttgagagctgaagatgtgcaagggaagaatgtcctgacaaatttctggcgaatggatttcacaactgacaagctgaggtcattgttgcgaaaatggcaaactctaattgaagcccatgtggatgtgaagacaactgataactacacattgaggatgtttt

SEQ ID NO: 23199 - DNA, 432 bp, Glycine max
  Clone ID: LIB3106-026-Q1-K1-D2
caaaaatttccggtccgtgaaaagggaggcaagggtttgggaaagggaggagccaagaggcacaggagggtgcttcgtgacagcatccagggtatcaccaaacccgcaattcggcgtttggctcgcagaggtggtgttaagagaatcagtggtctcatctacgaggagacacgtggcgtcctcaagatattcctcgagaacgttattcgcgacgctgttacctacaccgagcacgctagaagaaagaccgttaccgctatggatgttgtttatgctctcaagaggcagggcaggactctctacggtttcggtggttaatttatagggtttccatcagcgtaacagctgcttattggttattgttgtaaatggttgctttttaagcttcttggtatatttgcttcaattgtaatggaaccaaaagtattttgt

SEQ ID NO: 23200 - DNA, 433 bp, Glycine max
  Clone ID: LIB3106-026-Q1-K1-D3
gaggaaccctacatagggtttggaagaagctgatccacgaagatggtgcagcgtctcacctggcgcaaacaccacagctgtgctaccaaattcaaccagcacagagtcgtcaagactcccggaggcaagcttgtttatcagaccacgaagaagagggccagcggacccaagtgccctgtcactggaaagaggattcaagggattccacatttaaggccagcagagtataatagatcaaggttacacagaaaccgaaggactgtgaaccgtgcatatggtggtgtgttgtctggcagtgctgttagagaaagaatcattcgagctttcttggttgaagagcaaaagattgtgaaaaaggtcttgaagatccaaaagacaaaggaaaaacaagctttgaagggctgagttttgagaaagagtgataaagatcttt

SEQ ID NO: 23201 - DNA, 425 bp, Glycine max
  Clone ID: LIB3106-026-Q1-K1-D4
cagtgatgtgtcatgggctaaatttcagaactgcagtattttactgccataaagtccgtgagacaacagctttcatggttccattggtggctggtgatggaaccaaaactcaggcacttgctgtttgccactcagatacttctggaatgaatcatcacatgcttcatgaactcatgggagttgatcctggaactaaccctgtttgccatttccttggaagcaaggccattttatgggtacccaatatatctatggacactgcctatcagactaacgttgttgtttaattagtccatgcatctgcatcttgggcaccataagattgtatataaaataaattatggtgtgttgtgtatgttgtgcaagacctggaacttcacctttctacgtacgtgtgctgttaggatgcaatgtgctttgatgat

SEQ ID NO: 23202 - DNA, 430 bp, Glycine max
  Clone ID: LIB3106-026-Q1-K1-D5
ggaatcaaccttgaagaaggtaatagattccaactttcaagttgatgaaacaaaaatttccaaactgactattctgaagaagttggaggaagcagctgaagaagttctacacagcaaacaagtcttgacagatgctttaaacagagttgaaaccgcaaacagaaagcagcatgctgctaaggaggctctaaggagatggattcctgaggatgatatgaaggagtataataacactattaactgcaacaagtttcatcaagctggaatttatcaagattctctgcaggatgtaaccaggtcaacaacatcaaacaatgatccaaagcctgctttaaggaccacaatttcaatgagagatgtacttagcagaaagcaggttcctgaaagatatgctacaagaaaggagatggaagagcacactgaacgacaa

SEQ ID NO: 23203 - DNA, 360 bp, Glycine max
  Clone ID: LIB3106-026-Q1-K1-D6
cttgcatagactattgattaagaaagctattgtcattgatttgctagctccaacaatggggtctagcagattatcatgcattttagtacttgtgcttgtaaccttttcatccatgatcattgactcaagggttgcagaggcacgtaccctgccaaaatcagccttattgccttccaaagttgatatacctactgttgttcctcttccactggtggcaccactgccaaatttgcctgttactctccctccagtgcctgaactacctgcagtacctaaagtaccaattcctgaagtaatagttaataacgccaaaataatcccttgagtacctatgatctatccagtcactactacttattt

SEQ ID NO: 23204 - DNA, 432 bp, Glycine max
  Clone ID: LIB3106-026-Q1-K1-D7
cccacgcgtccgagcatatactccacggaggggagcttcatccatgctattgaaatgaatgagcattttagaacaagagatcccaagaaagcacatgtgtttttccttccttttagcgtagtaatgatggttcgatacgtgtacataagggactcacacgattttggccccataaaaagaacagtcagggactatatcaatgtcattgctgcaagatacccttattggaatcgaagccttggagctgatcacttcatgctctcttgccatgattgggggccagaggcttcaaaattctcaccttacttgcgtaagaactctattcgtgtactttgcaatgccaacacctctgaaggattcgaccctagaaaggatgtttcatttccagaaattaatctccaacgtggtccaatagatggtttacttggtggg

SEQ ID NO: 23205 - DNA, 400 bp, Glycine max
  Clone ID: LIB3106-026-Q1-K1-D8
cccacgcgtccgagagttaggctctattggaccgtacgattaagatcgttcggtgaaattgagcacgctggtgccgcataccctagcgttcctgttattctattgtggctgaaacaaaacagtgttgaacggcgaggtagaacgacgacccccttctgcgttttgaccttcaatctcaatcatggccaaagctgaaggtggcaaggaaccaataaatgaacaagcagtagcaaatatgtatgctgcaatgaggtctgagctcaaccaaatttactccaaaataactgaactggagatggaagttagtgagcacacattggttaccaatgccattcaaccacttgaccaatctagacgatgctatcgaatgattggaggggtgcttggggaagagaccatc

SEQ ID NO: 23206 - DNA, 394 bp, Glycine max
  Clone ID: LIB3106-026-Q1-K1-D9
cccacgcgtccggtcgaagcgtggtcgtggtggttcggcggggaacaagttccgcatgtgggtgggtcttccagtggcggcgacggtgaactgcgccgacaacacgggggcgaagaacctctacatcatttcggtgaaagggatcaaaggccgtttgaaccgtcttccctcggcctgcgttggcgacatggtgatggccaccgtgaagaagggaaaacccgatctgaggaagaaggtcttgccagctgtcatcgttcgccagcgcaagccatggcgccgaaaggacggcgtctacatgtacttcgaagataatgctggtgttattgtcaatcccaaaggagaaatgaaaggttctgctatcactggtcccattggaaaagagtgtgctgatttg

SEQ ID NO: 23207 - DNA, 367 bp, Glycine max
  unsure at all n locations
  Clone ID: LIB3106-026-Q1-K1-E1
gcgcaagccttccgcgaacccttggccggacccttggccggacccttgggttcacagcgaantcgtangaaggtttgaaaagatggagaacatgcagagcttctggcaattgggcgatgaactccgtggacactcaaaagcatcggaggatcacaaatggttaatggttgcttcgaaattggcggaacagacaagattgaaaggggagcgtgggaacaaccttgatctttcaaagggccccattagaacaaggtcaagggataaatttgggttccaggaagagaacaaatttgattctcttaacttaagcatgttgaacctggactctaaatttactgagaatgtgagcaaaagctcgcttcgaaat

SEQ ID NO: 23208 - DNA, 261 bp, Glycine max
  unsure at all n locations
  Clone ID: LIB3106-026-Q1-K1-E10
caaaaaaaaaaaataaaaaaaaaaactaaaaatttaaaaaaaacaaaactaaaatcaaaacaccggaggctcttaacaaccgcggcagactncatactacctatgattaatctactaatttatatactccccaactatccaaactccaacaatcccaacaaaacccttatcatttccctcccctataccaattacaccaacataaccagctcaacatgaaaccaaagataacgtccctctttctctttttggaggttcagg

SEQ ID NO: 23209 - DNA, 394 bp, Glycine max
  unsure at all n locations
  Clone ID: LIB3106-026-Q1-K1-E11
aaaaaccagcctttaatatttttctaactgtttttccagagaacttgatagagagatggcgggtgcaacatctggtgctgggttaaatgggttgggatcttccttcttgagtggaggaaacaggagccaaacccttctggcctctgctattggaggcaaagttggtgctgctgttactgttaatcccagaagactcattgtggtagctgctgctgcaccaaagaagtcatggctccctggtgttagaggtggtggcaatctcgtcgacccagaatggcttgatggatcgctaccaggtgactatggttttgatccactaggccttgngaaggacccagcattcctcanatggtacagagaagctgagctcattcatgggaggtgggcaatggct

SEQ ID NO: 23210 - DNA, 391 bp, Glycine max
  Clone ID: LIB3106-026-Q1-K1-E12
gcaagccgtcggccaacccttccaaccactataccaatagaaccttttgcttttgaaaaacccctaactcttgatcactacactagctagccacatacaatgtcgaccaaatttaaggtgtttcgtgaattcacaagcgatgactcattcctaaaccaagttatccctgaaaacatcaccgaattccaagtgactctgtccctcgctagagactacgatggcaacaactcaaccaacggaaagttcattccttactgggacactgaaaaggtcactcccgaagtgataaaaaaattcaagaaaaaatacgaacccaccgcactgagggttaaggttcttgtcagcattggaaacaaaaacaaacaatttcctttcaccattggctcggact

SEQ ID NO: 23211 - DNA, 411 bp, Glycine max
  Clone ID: LIB3106-026-Q1-K1-E2
gcgcaagccgtccgatcatcatttcggacaaaaagcaccatttccagtccaaggcagacgccggtgcctccaaagcgtacccttagcaagccggtaccattcgcaagaacggctacatcgtcatcaaaggacgcccctgcaaggttgtggaagtttcgacttccaaaactggaaagcacggtcacgccaagtgccactttgttggaattgatattttcactgccaagaaacttgaggatattgtgccctcttctcacaactgtgatgttcctcatgtgaatcagactgattaccagctcattgatattgctgaggatggatttttgagtctgcttactgaaaatgggaacaccaaggatgacctcaagcttcccactgatgagagtctgctcactcagataaaggatggat

SEQ ID NO: 23212 - DNA, 392 bp, Glycine max
  Clone ID: LIB3106-026-Q1-K1-E3
ttaaatatccgtacctaatccaagttgaattgtgatccatgggcatatactatggttgtccggcttctcctccacacaccgtgagggctggctggtcagaaatgagaatggcttcagcattgtccctgcatctctcaacccctttctcccaactccaccctagtctcaaacctaaaaaactccatgatttccccactctctccctctccaaacctcgaaaactcagcgtgaactccgtggacatctccaaagaagacacgcccgtgaaacccgaatcggagctggagaacttggggccgcggcggctggaggagaagttcgcggttctgaacactggaatctacgagtgccgctcctgcggctataaatacgacgaggcagtgggcgaccct

SEQ ID NO: 23213 - DNA, 414 bp, Glycine max
  Clone ID: LIB3106-026-Q1-K1-D10
ccaacccttccgttcagaaccaaactcaaatccaaactcgccaaaactagggttttgcatcgatggcactgtgcaaccgcgtcagatcgggaatctctctcttcaccaaatccacgttccttacttcccagcgatccagtctccaacgatccctcgttgcccctttcatttccctcgcctccagaaattacgccaacgtgccggggcaaaaggaaaccaaagttaaggtccctctggctttgtttggaggttcaggaaactatgcctctgctttgtatattgcatctgtgaaagccaatgcagtggaaaaggttgagactgagcttctgcaatttgttgaggcagtaaagaatagtcccatattttcacagtttataagggacttgtctgtggctaaggatgttagagtgaaag

SEQ ID NO: 23214 - DNA, 409 bp, Glycine max
  unsure at all n locations
  Clone ID: LIB3106-026-Q1-K1-B12
cggcccggantcccggggccgcccacagccttccgttaaggaattgattaaatcgcccacacaaaattggccagggcttttttgattccagtttcggggttgccttggcggccactttctcctttcaagggaacggtgaaaaccttggtcgcaaaaccatggctgaagaagattcagcaagcaagacccctcatttccgtggttaacaaggctgcctctctatcttcccccgtgacagcacccagcgtcggcgttcggtttcggctggacaatttggggccgcaaccgggttcgaggaagagggctaagagaaagggtagaggaatatccgcagggcaaggggcaagttgtggttttgggatgagaggtcagaaatctcgatctggacctggcgttaggaagggtttcg

SEQ ID NO: 23215 - DNA, 469 bp, Glycine max
  Clone ID: LIB3106-026-Q1-K1-B3
tacgggtggaaaattcggggcgcgccacgcgtccgttgtactatggacagctcttgctccaatgctcctgctccagctcaacaagaaagaaaagcaagtgaatcaatatttgatgcttgccactgggttgattgcggaggtggctcgtgcaacaagacatccttattctcttatagttgcaactgtgatgctggctattacaatcttctcaatgcaactgccttaccttgcttcagagaatgtgctattggttttggttgctctaaccttggaatatcaatgacaaactcatccaccgcttcaccaccaccaccattaaatgagaatgctagcttgattctaaaaggaagctccccgtggctactcgtgctgattatattcatagctaatatgcagttgcagtaggaaatttggcacatgactttgcaatactgaactgtgtgctattttaagtgagaactggattttc

SEQ ID NO: 23216 - DNA, 396 bp, Glycine max
  unsure at all n locations
  Clone ID: LIB3106-026-Q1-K1-B4
ggaacacaggagcacacagtgttggtcgaacccattgtgtgaagttggtgcaccgtttgtgcccanagattgatccagctctgaaccctgaccacgtccctcacattctgaagaagtgccctgatgccattccagaccctaaggcggtgcagtacgtgagaaacgaccgtggcactcccatgattctagacaacaactactacagaaacatattagacagcaagggtctcttgatagtggatcaccaactagccaatgacaagaggaccaagccttatgtgaagaaaatggccaagagccaagactatttcttcaaggagttctctagagccattaccttgctctcagagaacaaccctctcactggcacaaaaggtgaggtcagaaagcaatgca

SEQ ID NO: 23217 - DNA, 79 bp, Glycine max
  Clone ID: LIB3106-026-Q1-K1-B5
gctacttataattatgtatgtatgtttgtactctgttgtatgcttctgtatgatattcaggattggtactttgatgaag

SEQ ID NO: 23218 - DNA, 462 bp, Glycine max
  unsure at all n locations
  Clone ID: LIB3106-026-Q1-K1-B7
accgcaacaattaacatacatttagtgagagaatttatcatcaaccaaccatgtctgatattcccgtntttgttgccgaagagtatgatataaggacaaatcattatatgaagggtggttctttctcttttttttttttttatttctatttcatttttctttcttattatctttttttgtttttctcatttcttttttttttcttttttactttttttttctttttttatctcttttttctattttcttttttttttttttttatttttttttttttttatcttttatttttttttttttttttttttttatttttttttcttgtttgttggtttctctttattttttttattttcnattctatttttctttattatttttatcctttatctttatttctttcttttttttttgtttttatcttttattatttttttttcttttttcttttattttattttt

SEQ ID NO: 23219 - DNA, 428 bp, Glycine max
  Clone ID: LIB3106-026-Q1-K1-B8
cccaaacctagcaaccattgagttttgtttgctttgaaacatcgtgtgcacagtaccccaggagatcgaacaaggatctccacaaagacaaaccccagttctcaactgtgttttacctctctctcacctactttcagaccatacccagggtttttgctttttctttttaaattagtttcagtgacattaacgaggctgagaagatgcagcagacaccgccaatgattcctatgatgccttctttcccacctacgaacataaccaccgagcagattcaaaaataccttgatgagaacaagaagctgattctggcaatattggacaatcaaaatcttggaaaacttgcagaatgtgcccagtaccaagctcagcttcaaaagaatttgatgtatttagctgcaattgctgatgcccagcctcaaaccccg

SEQ ID NO: 23220 - DNA, 262 bp, Glycine max
  unsure at all n locations
  Clone ID: LIB3106-026-Q1-K1-C10
ccacaaccttntttctcttctccccttttcttctggcctggttttgggtgtgttttgcggaacaattccataatacggacttatcnttactaattgttttcgcctatgcctatacatcttaatcaaaatcacacccaccccgtctttattacaagccattaagcctcttcttcgactgctcatctatcctacactatgctctgcaacccggatcatcaacgtcaaggaagatcttcctgccactgagaatcaaactacttac

SEQ ID NO: 23221 - DNA, 421 bp, Glycine max
  unsure at all n locations
  Clone ID: LIB3106-026-Q1-K1-C11
gcctttttgcacacaagattaacagctttgtcactgctcccaagaagttgttggcatctgagtctcgtttacgtcccgggggaatggcccttgagaagggtgacctatccacatctggttatgagaagagcagtttggaggagaggcaaagaactgagaagagaaaccgagaggccaagggccataagttcactcctagatggtttgatttaactgatgaagtaactccgaccccttggggtgacttggaaatttaccaatacaatggtaaatataccgaacatcgcgctgctgttgatagttctgagtgcatagaggtgcctgacagcagaacagaattcaacccttggcaatatgataatttggatgctgaataataagcatcctngtagaattctttctattctttgaactatcattt

SEQ ID NO: 23222 - DNA, 402 bp, Glycine max
  Clone ID: LIB3106-026-Q1-K1-C3
taggggtggaataaccgggtcggcgcaagccttccgccaacccttccgttcgttcttcttcttttgttgttctgcgtttgcgtttgatttttctctcggctgaaaatgtcttgcggaagctcctgcaagtgcggcaacggctgcggaggctgcaagatgtacccagacttgagctacactgagtcaaccaccaccgagaccttggtcatgggagtggcacctgttaaggctcaatttgagggtgctgaaatgcgtgcgcccgctgagaacgatagctgcaaatgtggaccaaactgttgctgcaacccctgcacttgctagctaggtgttgggagagcacgctttacgcagatatagctcttaattacgaataatgataaactattaatgtgtagctaaaaa

SEQ ID NO: 23223 - DNA, 360 bp, Glycine max
  Clone ID: LIB3106-026-Q1-K1-C4
cccacgcgtccgggggatcatgcaagcatgattcaatttggtggagaaatagtgaattgggggtcatcagggtctcagacttccacccaaatgggtagtggacattttgctgaagagggttttgcaaaagcttcatattttaggaacatgcaagttgtggattgggataacaacttgattcccttgtcaaatttaaaggttctagctgatcaccccaattgctatgacatacaaggaggggttaataatgcgtgggggaattatttttactatggtggacccggcagaaatgtaaagtgtccctaaaggaatcaatgatatagaatttataggttataaacacaccattaccacctggac

SEQ ID NO: 23224 - DNA, 434 bp, Glycine max
  unsure at all n locations
  Clone ID: LIB3106-026-Q1-K1-C5
ctttttctttcctcacttcccttgttctcacaaagtcacaatggaccccctctctctctgcggcaccggagccctccgcgccggcggcctctactggttcgtgtgcgttctgggccccgccgagcagaagggcaaacgcgccaccgatctttccggcggctccatctccgccgagaaagtccaagacaactacaaacagtactggtccttcttccgccgcccaaaggagatcgagaccgccgacaaagtccccgacttcgtcgacaccttctacaatctagtcacagacatctacgagtgggggtggggccagtccttccacttctccccctccatccccggcaagtcccaccgcgacgccacgcgcctncacgaggagatggccgtcgatctcatcgaggccaagcccggcaacagaatcctggatgtgggct

SEQ ID NO: 23225 - DNA, 382 bp, Glycine max
  unsure at all n locations
  Clone ID: LIB3106-026-Q1-K1-C6
cccacgcgtccgagcccctcaaccagctcaccgaggatgacatttctcagctcactcgcgagagactgtcgcagatggctgagagaaaaagggatgcgcaggccttcctggaacaaatcgcaggcgatccaacaggtcatttccctgaaagcgctgctggaaccttccgacgatgatactcctncttctaccgccatgcaccaccgtagtcatgctccttccccttcaccttaacctcaatctcaagtgaatttgactgaaccttcttcttcngccaaggcttcgncaactgaagaatcctcttttcatgctgctgaagacattcagaaacctgcgtcgtctgggggaaaacccttcggaactaatgacaccaacaccaacg

SEQ ID NO: 23226 - DNA, 414 bp, Glycine max
  Clone ID: LIB3106-026-Q1-K1-C7
gccaccgctccttcgcttctacactcatctgggtcctctttcttctctcaatttcgtgccgttcaattctcttcttctttgctgttccctcatagtaacaagcatgggaatgcactggtctctgtgaaggcctctgtttctggggttgtgttggtggagaagtctgaggcagagaaggccaataggctcaaaacagcttacactgagaaaattattcccttgctcatggaagagttctcctacaccaacaaacaccaggtgcctaaaattgagaagattgtggtgaactgtggtatcggagatgctgcacaaaatgcaaagggtttggacgcggcaataagtgatctagcactgatcacagggcagagacctattaagactcgggccagggcttctcttgccacctttaagatc

SEQ ID NO: 23227 - DNA, 415 bp, Glycine max
  Clone ID: LIB3106-026-Q1-K1-C8
aaaaaatgctattcctttagatattttgatatacaagttagtaaagtcatatgtgcgtgcgtcacctttgagacgtgcagcattgaagtctctcgcaaaagcattgaatgaagacgagctaatataccttagagcgcagtttaacctcttggagcctaaagatggctgcatctcacttgagaattttagagttgctctcatgaaaaatacaactgatgccatgaaggagtcaagggtccctgaaattttaaatttgatggagccactctcctataaaaaattggacttcaaagagttttgcgctgctgcaatcagtgtgtaccagcttgaagttcatcaagaatgggatagaatcgctaccacagctttcgagtattttgaggaaacaggaaaccgagtcatttcagttgaggag

SEQ ID NO: 23228 - DNA, 438 bp, Glycine max
  unsure at all n locations
  Clone ID: LIB3106-026-Q1-K1-C9
agccgtcggccacgccttcggaacccggttcatgtctccaactgcaattccacgaaccccccaatgccgtctctttgcccacatgggccattcacgtgtccagtgtcgctgaatggattatagctatggctttggtgtggcaatacggagaaaaatctggatacccagcttggaagggcctttcttggggaatggtacctctacttggtggagctttttgtgcgtgcacatggcatttcttttataactctgagtccctcgaggtattggtggctcttcaagcggcactgactgttataggtaatgccacaatgtgcatagctgcatatcggatttacaaatcatcccaaggctcctagaacttttgaattgcatgaaaatgagaatctggaagcatgtatataggcctcaatgaaaatcaaaggctnttgctgattg

SEQ ID NO: 23229 - DNA, 190 bp, Glycine max
  Clone ID: LIB3106-026-Q1-K1-D1
aaaaaaaaaaaaaaaaaaaaaaaaaaaaaaaaataaaaaaaaaaaaaaaaaaaaaaaaaaacacgcccattttaaaaacagcgcccccccaaacaaaaaaattttaaaaaaaaataactaaaaattcaaatctttaccccatactcatccaaaatccacctacaaaaactctttttctaaacaaataaaa

SEQ ID NO: 23230 - DNA, 239 bp, Glycine max
  unsure at all n locations
  Clone ID: LIB3106-026-Q1-K1-B11
ctcgaaccctctcgttccacccaatcagtaggtttcacttcagcgatggcgtntagaggcaaaaccctaggatccagcgccgctaagaaggccacctcaaggagcagcaaagccggcctccaattccccgtcggtcgtatcgccaggttcctcaaggccggaaagtacgccgagcgcgtcggcgccggagcccccgtctacctcgccgccgttctcgaatatctcgctgctgaagtttt

SEQ ID NO: 23231 - DNA, 441 bp, Glycine max
  unsure at all n locations
  Clone ID: LIB3106-025-Q1-K1-G4
cccacgcgtccgggccatataattttttttaatttgaaataatgtccgggatcatccacatggttgaggggaccctccatgtgggagggcacaagaaagaggagcacaaaggagaacaccatggtgagcacaaaggtgaacacaaaggagaacaccatggtgagcacaaaggtgaacacaaaggagaacaacaccatggggagcacaaggagggacttgtggataagatcaaggacaagatccatggtgatggccatgacaagggtgagaaaaagaagaagaaagacaagaagatgaaggagcatggacatgaccatcatggtcatagcagcagcagtgacagtgattaaatcttatatgttaagcangtgtacggtacgatggtagtgaggagccaaaatccctcttcctgctttatgatatattaaaattaaattgcga

SEQ ID NO: 23232 - DNA, 115 bp, Glycine max
  Clone ID: LIB3106-025-Q1-K1-G5
gcgaaaaaataaattcattagacttgaccatgagacctggacaagtctaatggtcaacaaaaaaaggcaaataggaggaaaatacaacagaaatactataaaaaaaaaagatgag

SEQ ID NO: 23233 - DNA, 267 bp, Glycine max
  unsure at all n locations
  Clone ID: LIB3106-025-Q1-K1-G7
cgggtcggcccacgcgtgcgncaaaaatgagggcactcggagagtaaattgtcattcctattgaggtttatggacgtgagcggcaattactggtatatgcaaacacgcaatccaatacatcactgctgctgcttaattatccattcttaggccaatgccttctattacaagtattttcatggctagtttgaagtgattgttgattcttggttccctttccaactctcagaattggtaactttggtgagttagagcatatgctgttac

SEQ ID NO: 23234 - DNA, 349 bp, Glycine max
  unsure at all n locations
  Clone ID: LIB3106-025-Q1-K1-H1
ggttcttcattttgattatgacttattcaaaggaagtatgtttaaaggtttgggcattacagattctagaaggagggattggggtccggcgcctagatgggttgctttcgtcgatttttttcttgcttctcgtgcaaaatatgccgccatttctggagctcaccaccgtgtcgggactacatatgctcaattaatcgctgcactggctgcagcatacaatctgggggacaagtctagttcaaggtttacattccttagcagtttccagagtaatttgttgattgatggcctaaagaatcagggtggttggngccatgtgtggaacagatatgcttgtccattgagttgt

SEQ ID NO: 23235 - DNA, 196 bp, Glycine max
  Clone ID: LIB3106-025-Q1-K1-H2
taaatccaaaagaaaatttgattcgggtaggatttctcgtctgcttgataaagaacctatgagtacattctgtatcaactatgcaaggctcactactgcttactcgtgtctctcatatgcaacacgtgacacccatctcaagctagctgtatgcttcaacatgacgctagtcttcaatgctatgttgcgccacaac

SEQ ID NO: 23236 - DNA, 293 bp, Glycine max
  Clone ID: LIB3106-025-Q1-K1-H4
gtccgcccacgcgtccgaattgtttacattttccgtcaaccaaaatgctacaaacgaaaccagagatgggtaattgcacattctcttttgttgtctccagctcatagaatattataaactcagattcattcagaatttcagattcacctttttcttttcttctctaccttctttttcctctgacagctttttgcagaaagttgtgatttttccttgaaagatggcatctttgagcatgatccagatcagaactgtgaattgtgcatctgggtttggtttgaattgtgctggga

SEQ ID NO: 23237 - DNA, 289 bp, Glycine max
  Clone ID: LIB3106-025-Q1-K1-H5
tctctactactttttcaacctatgcctgatccacgcccatagcgtcctttgcatctttgccacacaagttattctaatgtgtgccattgaatgttaccgtattgctggttgccccctcggtgaggtcactgacccaatctacccatgtggcagcttcgacccattgggccttgcttatgacccatatgcttttgctgagcttaatgtgaaggaactcataaactgactattggccatgtactctatgttttgcttctttgatcaagccattttcacccgaaagggttca

SEQ ID NO: 23238 - DNA, 331 bp, Glycine max
  Clone ID: LIB3106-025-Q1-K1-H7
ggccggcccacgcgtgcaaaataaagggcttaaccacaaatttttatgattccattacacaacaacatcattggtttttttctatatttatgggggtcctctgcaatgatcaccttgtgaagatttgatctagacttgcttattttttttctgttgctctttgccatggtaatcagagtggtgcacttctattatcatggttctgcctactgtacttggtgctcttttttaatggtgatccagctaaatccttttttatgctcaaccacaatttatctatccatcacaattttatacatatcttttcctacatgtattttctttcttccat

SEQ ID NO: 23239 - DNA, 435 bp, Glycine max
  Clone ID: LIB3106-026-Q1-K1-A10
caaccaatgccattggcaccccaagccttttttttaaccccacccctctccggtctcaaagccagcgaccgcgcctccgtgccatggaagcaaaactccagcctctccttctccagcccgaagcccctcaagttctccagaacaatcagagcagcagccgccgacgagaccacagaggcaccagcaaaagtagaggctgcaccggtcgggttcaccccaccagaacttgacccaaacaccccttccccgatcttcgggggcagcaccggcgggctcctgcgcaaggcacaggtggaggagttttatgtcattacgtgggactcacccaaagaacagatctttgaaatgcccactggcggcgccgctatcatgagggagggtcctaaccttctcaaagtggccaggaaagagcagtgcttggctcttgggactagg

SEQ ID NO: 23240 - DNA, 340 bp, Glycine max
  Clone ID: LIB3106-026-Q1-K1-A11
aaaaaaaaaaaaaaaaaaaaaaaaaaaaaaattttaaaaaaaaaaaaaaaaaaaaaaaaaaaccgcaaattttaaacaaaacaaaacaaaaaaaacaaccctccccccttaacatttccatccttactctccctctcttcctacataacaattattttattatccccccacaattccattcattcaccacctttttacaactctccacctgtcaaaacccttccatcccccaatttaataacttttcatcacatccctttttccccaactccccaattctccaaaaccccccacccattcacccttccaaacacatccccaattataaacccaaataaca

SEQ ID NO: 23241 - DNA, 230 bp, Glycine max
  Clone ID: LIB3106-026-Q1-K1-A12
aaaacacataaactcactttgcacaaagattgcattgggaggagaaacagcattgtttggggctggttatcgatacaggtgtgaaccttcatcacacccttatctagatgaacaagagtcatgatatcattcgaacatccgatatgcatatactgaaaaacttacacttttattttcttggatatggcgagtattgctatagaatccgcggctggggtctcatatatata

SEQ ID NO: 23242 - DNA, 424 bp, Glycine max
  unsure at all n locations
  Clone ID: LIB3106-026-Q1-K1-A3
aaactcaagcatngcatctttctngatttgtagtttgttttgtgctttcgataaattttctgccaaggcaagaggggttttaagatcatagtgtgtgttttgcaacaatggctaagttctttgctgctatgatcttggcactcaatgccacttacattctctgtaccacagaattaaacgatctcaaatccattttccctcgtgttaaggatggagacgttccttatatatgcttagatcttgtatacgaatatacattgctcgttgatggatttggcatagatccgcagcaagagattacgttggtgaggcaagttgagtatcaagattctctcgtggaagcagcatggccactaggcagtgccatagaagccatatcatcattacctaaatttgagaaattaatgtatttcatttaagcttt

SEQ ID NO: 23243 - DNA, 407 bp, Glycine max
  Clone ID: LIB3106-026-Q1-K1-A4
cccacgcgtccggattatcctaagtctttgtgaatagtgctgcaatggcttcaagtcagcgcgaggtgacccttttgggagctactggaagcccatttgtgtgcagggttcatattgccctcaagttgaagggagttcaatacaaatatgtcgaagaaaatttgaggaacaagagtgaactgcttctcaaatccaacccagttcacaagaaggttccagtgtttattcacaatgagaagcccatagcagagtctcttgtgattgttgaatacattgatgagacatggaagaacaaccccatcttgccttctgatccttaccaaagagccttggctcgtttctggtccaaattcattgatgataaggtttttggtgctgcatggaaatccggattcacagctgatgag

SEQ ID NO: 23244 - DNA, 332 bp, Glycine max
  Clone ID: LIB3106-026-Q1-K1-A5
cccacgcgtccgaaaaaaaaaaaaaaaaaattaaaaaaaaaaaaaaaaaaaaaaaaaaaacgcaaaatttaaaaaaaaagaaagaaaaaaaaaaaaaaaaaaaaaaaattaaaaaaaaaaaaaaaaaaaaaaaaaaaaaaaaaaaaaaaaaaaaacggggcccccttttaaaaaatccaaatttaatttccttgtattacaaactaataattttttttaagggtaacctaaaataaatttactccccccgtttttaaaaacagtggcccagaaaaaatcttggtttacacaaattaatttcctttgaaaaaaatccctttttcccaatttgt

SEQ ID NO: 23245 - DNA, 349 bp, Glycine max
  Clone ID: LIB3106-026-Q1-K1-A6
aaaacaaaaaaaaaaaaaaaaaaaaaaaaaataaaaaaaaaaaaaaaaaaaaaaaaaaaaccgccgaattcaaaaacacgggaagcaaaaaaaaaaaaaaaaaaaaaaaaaaacaaaaaaaaaaaacatacacccgccccccccccttaatggatcatcccttacaaccccttcccaacaactattttcttctatattgccaccccccaatcttaaaaccccccccgaagtctcacacctataccccttaaaaccccttcccgaaccacacaaaaaaacctgagcacctctacccttatccccaatctcttcaattcccgagagaccccctcacaaaaacctttcccta

SEQ ID NO: 23246 - DNA, 356 bp, Glycine max
  Clone ID: LIB3106-025-Q1-K1-G2
tccaatttaagctttctttggatattgtaatggaagcaggttaaaaatcaatgcgagtttcggaggcttggaaggctcatgtggccatggctctggtgcagctattctatggtggctaccatgtcctaaccaaagtggcacttaatgttgggatcaaccaactagttttctgcttttaccgcgatttccttgccttcactattgttgctccgctcgctttttttcttgaaagacggactagaccacccattaccaagaagctactgatgtcattcttctttcttggattgactgggatatttggcaaccagctttttgtttcttattggtttaagttatactaatccaacttatgc

SEQ ID NO: 23247 - DNA, 218 bp, Glycine max
  Clone ID: LIB3106-026-Q1-K1-A7
gtttgttgatcgagataactagaaacagtgtgatgaaaatgaaggtccttgttttcttccgggctacaattttggtagcatggcaatgccatgcgtacgatatgttccctctccgaatgaacactggctatggtgcccgtactccggaggtgaaatgcgcaagttggaggcttgctttttaagcacacatcaatctttgtcttttagaccattccctt

SEQ ID NO: 23248 - DNA, 333 bp, Glycine max
  unsure at all n locations
  Clone ID: LIB3106-026-Q1-K1-A8
ccacgcgtcctcaaaactcaagcattgcatccttcttgatttgtagtttgttttgttctttcgataaattttctgccacgagcggacnnnttttaanatcatantttgtgtttttcaacaatggctaagttctttgctgctataatctttgcactcttttccatttccatacttcaaacagtggtaatgtcttttaatgaacaaagatgccacttttattacaacaagagcatatattgaagttgaagtttcaatagttaccaattcccatttcaattctttagtgtatttatccagacccaataccacaagccctgcattttttttttgtca

SEQ ID NO: 23249 - DNA, 430 bp, Glycine max
  Clone ID: LIB3106-026-Q1-K1-A9
caaggattgcactttcggagggatatggaatggtggtgggggagctggagaaaacaacttgtttattgcctcatttttctttgaagttgccgatgaggctggttttgttgatccaaacgcccccaatgccaaagttcgtcctgtggattttgagaatgcagcaaaggttgcctgtaacacagaattaaaggatctcaaatccattttccctcgtgttaaggatggagacgttccttatatatgcttagatcttgtatacgaatatacattgctcgttgatggatttggcatagatccgcagcaagagattacgttggtgaggcaagttgagtatcaagattctctcgtggaagcagcatggccactaggcagtgccatagaagccatatcatcattacctaaatttgagaaattaatgtatttcatttaa

SEQ ID NO: 23250 - DNA, 173 bp, Glycine max
  Clone ID: LIB3106-026-Q1-K1-B10
ccaacccttccgaattttctctggaatctttttctgtgtatggttttccttccttgtgttcgcttcctaattcactttcgagggttgtacttgttcctttcgtcttaaatccttggatggttgatgatcatgaagttctctttaaagttaaattattatcattttgtgcaaaa

SEQ ID NO: 23251 - DNA, 236 bp, Glycine max
  Clone ID: LIB3106-025-Q1-K1-D4
acacccacgcgtcctattatttctttttttattaattattaactctaattttcctctgggactctgttaatattcaatccgaacaacatccataaaaaaattttaatttttcaatgatgttccaacattcactgatatttacaatattatatttcatcctttttacttaaaatgaactttttatcactctaatatcttctcttatcaatactcttatcccttcctttcttataatt

SEQ ID NO: 23252 - DNA, 451 bp, Glycine max
  Clone ID: LIB3106-025-Q1-K1-D5
ggccaccagttggcaagaagaagtttgagactctttcctacctgccagaccttggggatgcagaattggcaaaggaagtagaataccttcttaggaagggatggattccttgcttggaattcgagttggagcacggtttcgtgtaccgtgagcacaacaggtcaccaggatactacgatggacgctactggaccatgtggaagctgcctatgtttggttgcactgatgcttctcaggtgttgaaggagcttcaagaggctaagactgcataccccaacggcttcatccgtatcatcggattcgacaacgttcgccaagtgcagtgcatcagcttcatcgcctacaagcccccaggcttctaagtgtgaaaaatttgcaaagcatttgtagccgccaccccacttttgtttgttgtacttaaactacattcccattttgttttgctttttga

SEQ ID NO: 23253 - DNA, 423 bp, Glycine max
  Clone ID: LIB3106-025-Q1-K1-D7
cccacgcgtccgcccacgcgtccgcccacgcgtccgcccacgcgtccgcccacgcgtccgcccacgcgtccggaagaagagaaaagagagagaagggtaaggtaaccctagagtggtgaatcgaatctgcaaagatggaagctgtttctcgaagaagaggtggaggcattttcgaaagcctctacaaggtcgttatgcgtcgcaactctgtctacgttaccttcgtcatcgctggcgccttcctcggagaacgggctgtagattatggagtccacaagctctgggaggctaataatgttgggaaacgatatgaagacattcctgtgctagggcaaaggcagtcagaatagtgaccagcttgttagccattttgaagttttattattttcatgaaaatttgaagtgattaagagctggaagcag

SEQ ID NO: 23254 - DNA, 440 bp, Glycine max
  Clone ID: LIB3106-025-Q1-K1-D8
catacaaagcattgaattcaaaaactaagttcatttcttgcgctttgctttattcggcaaaagcaaacatgtcgaacacatgcggcaactgtgactgcgctgacaagactaactgcaccaagggaaacagctatggtgttatagtagagactgagaagagctacatcgagactgttgacatggatgttccagcagctgagcatgatgggaagtgcaagtgtggcactaactgcacttgcacggactgcacttgtggccattaaggaatatgtatgaaaatgtaattgccatgtgtttggcaatacaaatctccaaataatgtaatcttcgtatgaataaatgtgtgctgttatcctacttcaggctctgtgtagacatgcattctgaatcatgtacagttcctgtcatagatattaacagccaatgttgtggcattctat

SEQ ID NO: 23255 - DNA, 464 bp, Glycine max
  Clone ID: LIB3106-025-Q1-K1-D9
cccacgcgtccgcccacgcgtccgaacttgttttccttgcgcgaagctttggcatgcccccagtcgcttcatcctcatctacttaaccctaaccccacactctcacatactacatatataaaaccgccgtcacgatgatgctcagaattcgtagccgcgatggcctggagcgagtgagcgtcgaaaaccccctcgccacaacagtctcggacctaaaacggattatccaaacccaattgggaatcccggttcacaaccaaaccctctccaccaaccagaacctcctcttggccaaatccctcgaagatctcctccgattcaccgacatgtccaacctcgatgcgtctctctcgtctcttaacctcggccacggctccatcgtcttcttggcctacgaaggcgagcggcgcgtggcgggccccgcctttaaccccgccggctccttcggccgcaagatgaccatg

SEQ ID NO: 23256 - DNA, 388 bp, Glycine max
  Clone ID: LIB3106-025-Q1-K1-E1
aaggctgggggtaaaacctaaaagaccaaaaaaccagcaccaaaatccgatgactggtacctcaaattacttgtcaagctttatcggttccttgttcgaaggactggcagcaatttcaatgctgttatactcaagcgcttgttcatgagcaaggttaacaagcctccaatttctttgtcaaggttaattaagtatacaaaggggaaggaggataaaattgctgtaatagtggggactgtaactgatgatatcagagtatatgaagttccagcattgaaaattacagcactcaagtttactgagagagcacgtgcaagaataaaaaaggctggtggtgaatgcttgacatttgatgagcttgcccttagggctcctttgggacagaata

SEQ ID NO: 23257 - DNA, 245 bp, Glycine max
  unsure at all n locations
  Clone ID: LIB3106-025-Q1-K1-E11
ctttaaaaaattactcctantcccaaccactccgctattttcatatttaaacccccctatccctctcaaccttcaatcccaactaatcttctacaactcatcctctatctattctcatacttaaaacaaaacatattcttcaaccatctcacaaactcacattttcattttcttcaatcattttctttttccaccctctatcctctcctatcttcttcattcatttttattcatccctcactttc

SEQ ID NO: 23258 - DNA, 277 bp, Glycine max
  unsure at all n locations
  Clone ID: LIB3106-025-Q1-K1-E12
tcatctncttntaacttcaaaaaattactcctcttctcaacacctcggtgtgttgcaatatctaaaacaccccactttttctctcaaccttcaaatcccaacaaagcttcttcaactcttcctcttcctattctttgacttaaaacaaaacaaattctccaaccatctcacaaactcacattttcaatttgtaaatcaaatactaaaaccaccctccatgctctcctctctgcttcatatcatcttttatcatcccccacttacattcaaaaattat

SEQ ID NO: 23259 - DNA, 380 bp, Glycine max
  unsure at all n locations
  Clone ID: LIB3106-025-Q1-K1-E5
ttcttctttcccccttttctcactcccactcttgaaacttggctcactctctcaccccccaaaagaaacgcgccaacaaacacttcaccaaatccccaacaaactcagttacttcattgcaagctctataagtctataacactgttaattccaccagagaaagaaacaatcacccccacgaagcaagcaaagcaacccattacgattcctgcttaaagcaccgattttgacactgaatcccaagacccagatggcgcaatagccagatccgtgattctcctcaaatgggtcactccaattcttcctcctcctcgncaccttccaagcgcggccacgcccttgggcaatggcggctcctggacttggtctccggcgtgttc

SEQ ID NO: 23260 - DNA, 404 bp, Glycine max
  Clone ID: LIB3106-025-Q1-K1-E6
tttggccgccgtgagttgcatctgcgtgtgactgcaagaaatggctctggttctcaacgtcggattgtgtgccatttctaaaccccatctttctctctcaacctccaatcccaacaaagcttcttcaactcttcctcttcctattctgggacttaaaacaaagcaaagtctccaaccatctcagaaactcacattttcattgggtgaatcagtggctggtgccaccctcgttgctctcctctctgcttctttcatctttgttgatcccgcacttgcattcaagggtggagggccatacgggcaggaagtgacaaggggacaagatctcactgggaaggactttagtggcaagactctgatcaaacaagacttcaaaacgtccatactgagacaagccaatttta

SEQ ID NO: 23261 - DNA, 391 bp, Glycine max
  unsure at all n locations
  Clone ID: LIB3106-025-Q1-K1-E7
ggtcggccgacgcgtacacttattctttctttcaangatttcattataatttcacaaaataacaataacaactgtaacttgttcaactataaaattacgtgtcctacctttataaattacacactacaactattaaatcttaactttcatattctaaaccccacctgctcttaaaaaacttctaaaagcctcatctctttaaaatacttcaaaatacctcaaaccaataatattttcaatcctcactattaatcatattcttacaaatactcattataatctaccccactcttatttctcttttattcaattatttataacaattatatcctatcacttatgacatacattatttatttgtacttgatccttttatatccctgatcttatc

SEQ ID NO: 23262 - DNA, 398 bp, Glycine max
  Clone ID: LIB3106-025-Q1-K1-F1
gggtttgatcactcggacattaatcttagttgatttgttccatgaatgttttggggttacattttgtccggcggtaggcatgaaatttcgtccttataaacccgatccaggtccactactgcatatttgttctctttgggaagttcaaccaaatgaagttataatgattggagatagccttaaagatgatgtgccttgtggaaggcaagcaggagcctttacatgcttgcttgatcaaacaggagtatatgattctcccgaatatgctgatgttgaatataaaccaaatttaaaggtgacttcccttgatgaaagtcactcatttctgaaggaaaattttgatttgtcaccatgatgtcaaggattgttaacgtgaaccattatttttgtggtttatg

SEQ ID NO: 23263 - DNA, 99 bp, Glycine max
  Clone ID: LIB3106-025-Q1-K1-F10
tattttttatattccaatccttttctcctaaagcttcaattttatttttttgtttccacaaaaatattttttatatatttttttttatatatatttttt

SEQ ID NO: 23264 - DNA, 375 bp, Glycine max
  Clone ID: LIB3106-025-Q1-K1-F4
ttttaggatgaaaaaggaagaaaacgggttttaactgttgcggtgataaaattactgggccagtgttgattttttggtgataccagtgcttttctcctaaagcttcaatttttatttttttggtttctgaaaaaatgtggggtaggtggtggtggcgtgctggtggcggttttctgaggcaaagggtatcttcaattggtagtgttagccatggttatggggaaaagcttcatcctttggaccctcctttgttgggtttgaggggcgttgttgaagtgatgtgtggtggaagaaggacacctttatctgttgtgttgaaccaaatcaagaggggtgtatcaacttccacttgggaatggtggtgtcagcaatggc

SEQ ID NO: 23265 - DNA, 428 bp, Glycine max
  Clone ID: LIB3106-025-Q1-K1-F6
cgtccggaaacagtgtaatgaaaatgaaggtccttgttttcttcgttgctacaattttggtagcatggcaatgcgatgcgtacgatatgttccctctccgaatgaacactggctatggtgcccgtactccggaggtgaaatgcgcaagttggaaggcttgctgtggaagcacacaacatctttggctttgagaccattcctgaagagtgcgttgaagcaacaaaggaatacatccatggcgaacaatatagatcagactccaaaacagttaaccaacaagcttacttttatgccagagacctcgaagtccatcccaaggacacatttgtgttcagtatagatggcaccgtactctctaatattccatactacaaaaaacatggatatggggtggagaaaattaactcgaccttgtatgatgaatgggt

SEQ ID NO: 23266 - DNA, 187 bp, Glycine max
  unsure at all n locations
  Clone ID: LIB3106-025-Q1-K1-F7
gggtcggcccgcgcgtacatttaaggaaaccctctaccanatcttanctgttttcaatccctttaataatatggggaatgagcctattttgcttcctggcatcaacattaacaagttcacattctatcttgctggaactaatgtagaaaccaccactcatggtctatatttccttgatcagatttat

SEQ ID NO: 23267 - DNA, 461 bp, Glycine max
  Clone ID: LIB3106-025-Q1-K1-F8
aaattaagagcatggctgcacaagctcttgtatcatcatcttctcttaccttctgagcggaggctgcaagacaaagtcttggaccaagatcactccaatctccatttggcttctccagaaaagcctcctttcttgttaaggcagctgctaccccccctgtcaagcaaggatcagacaggcctttgtggtttgcatcaaagcaaagtctttcttacttggatggcagccttccgggtgactatggatttgaccctctgggactttcagaccctgaaggaacaggagggttcattgagccgaaatggctagcatatggtgagataatcaatggtcgttatgcaatgttgggtgcagttggtgcaatagcacctgaaattctaggcaaggctggtctgatccctcaggagacagcactcccatggttcagaacgggtgtgttcccaccttgaggaacctacaac

SEQ ID NO: 23268 - DNA, 420 bp, Glycine max
  unsure at all n locations
  Clone ID: LIB3106-025-Q1-K1-D3
aaatcccgggaccaccttttaacaatttggtggtttccaggagggtccggttccttttcttatttaaaaaggcctttttttgaaggattaattgccgcatcttgccaaatggccttttaaggagaaggaggaggaagaaaggtttcctcatttggtaaatattggcaaaaaaatggtgaaaaaatgcagaggcattccatttccagtgagaacgttagggagtttgctattttcaaaatttgaggcaaatgagtgggaatatgtgagaaacaatgaagtttggaatttccaccgganaagatgacattttaccagcacttaagttaagctacaatctcttgcctatntgagacagtgttttgctttgttgtccctcccctgtccaaaagattacttatttgtttaatgtatcccggtcac

SEQ ID NO: 23269 - DNA, 219 bp, Glycine max
  Clone ID: LIB3106-025-Q1-K1-G12
cattccaatctttttcaacttttgaatcaatttacaactttcgttgactggtactatttttttctctcaaaatgatcccaacaatgtaagaagatactgcatgtaagaatgatgaataggagttcaacacctgaccactatctgtactcatgatgagtgttaaaaataatactcaggtactgataaattgtcagaacaacaaaaagcttctgggtcgag

SEQ ID NO: 23270 - DNA, 426 bp, Glycine max
  Clone ID: LIB3106-025-Q1-K1-B2
caaactcttcttccttcattggtatgtgctatggaaacaccataacacagcttcacataataggtgaaagaggagtttgagtctgtgttgcaaaagtctgtgttgttgttccagttgcttaaagaaacaggaaagttcaatagctgctgaattctgagaagagtctgagagtgagaggattgcaattgctctgagcaatggatagaaagtaaaacagtaacaaacacaagaaacactgaggggtggtgtttatatgccattgacaccaactcatgcagtgaatgagagagttttggttatattctcaaaaggattgaaattctctcaaaattgaagcttggggagtacaagcagaagccatttcagaattgagtctccaaatcctagtgaagcctggaaaccattttccaagggggtcagcttttt

SEQ ID NO: 23271 - DNA, 381 bp, Glycine max
  unsure at all n locations
  Clone ID: LIB3106-025-Q1-K1-B3
gtccggagaaaaaaaaagggaaaaagaaagaaaggccttgaaaattgttaagcctttcagttgcttcggcttcttgttaaaccatttcttttttcccaaagccattcaatggcattcagttccgtcgctctgccacatgctccattccacccacaaaatgcagcgcttcggtgccagtggtgatgatgtctaaaaggacggaggaattgaaggaaattagacaaatgaccaccgaacanattaacgaagaggttgtcgaccttaagggcgagcttgtcatgcttcgccttcagaaatcggctcgcaacgagttcaagtccagcgaattcggtcgcatgcgcaagaggattgctcgcatgcttactgtgaaagcggaaagag

SEQ ID NO: 23272 - DNA, 271 bp, Glycine max
  Clone ID: LIB3106-025-Q1-K1-B4
cacccacacatacagacaaggctattccattgttaagcctctctctcgcttcgggttcttgttaaaccaagtgcgtcctcccaaacccattcaaaactcattcagctaacacccctctgacacacactccattccacccactacttgccaaactatggtaccataagtgctgatcaataaactgactcaaccattccattaccttatactaacaaacacaccacatattaactctgatcttcaagacctactcgacaatctcgcactcctt

SEQ ID NO: 23273 - DNA, 383 bp, Glycine max
  Clone ID: LIB3106-025-Q1-K1-B5
cttccggacaaattcggcgaggccgtgtggttaagggccgttgcacaaatcgtctaaaagggaggccttgactacttggccaacccaaacctgatccatgctcaaagcatccttgctatctgggctgttcaggttgtgctcatggggtttgttgaaggttacagagttggtggaggaccacttggtgaaggacttgacccaatctaccctggtggtgcttttgaccctcttggtctggctgatgaccctgatgcattcgctgagttgaaggtcaaggaactcaagaacggtcgcttggctatgttctccatgtttggtttctttgttcaggctattgtcactggcaagggccctattcagaacctttacgaccacgttgctga

SEQ ID NO: 23274 - DNA, 448 bp, Glycine max
  Clone ID: LIB3106-025-Q1-K1-B6
cccacccgtccgtgattggaaagttcacatggaaaaaacagaattcaactatcatgaggatacttccgctgtagaatctgggaagaaagaccttgtagaggctcttcaaatctgcctcaacaaggcaaaagtaggttcacaacaatggagaaaagctcaagaatctttgcttagtttggagaagagaaatgctgcttctgtggatactattgttaggggaggaatggaagctaatcaagctctacgtgcccgattctcaagtgctgtatcaactacacttgaagatgcaggaatagcaaacaaggatattaactcatccattgatcattcgttgcaacttgatcatgaagcttgtgggaatctgaactctatgatcattccgtgctgtggtgatttgagagaacttgaaggtggtcatttccacagtattgtggagataacctgaaat

SEQ ID NO: 23275 - DNA, 228 bp, Glycine max
  Clone ID: LIB3106-025-Q1-K1-B7
cgtacactaatcaatcatcccagatggtttatgggtttaaattgtcctattccggcagacttgttatgtttcattggatacaactcaaaccattatttgcaatgtaccaatgtgtgtttttgattttgataagtttgccacattaacagatgctatatccaataaactttcatagctgaatgtgaagtgagtgacaaccatcatctaatgagtcgactccattgcctc

SEQ ID NO: 23276 - DNA, 389 bp, Glycine max
  unsure at all n locations
  Clone ID: LIB3106-025-Q1-K1-B8
aagcccttttgccagaatgtttcagatttccctgnaactgaacggaggcgaatacacgtactttgaagaagatcttangaacaagagtgatcttcttatcaaatacaaccctattcacaagaaggtacctgtgcttgtccacaatggaagaccattggctgagtcccttgtgatccttgaatacattgatgagacatgggagaaccaccaccccatcttgcctcaacaaccttatgatagagccttggctcgattctggtcaaggttcattgatgacaaatgcatgcctgcaatatcaaaggcagcatttactgcatacaatgaggaaacgtacatgggcactgatgaatcactcgagtctctttaaattcttgagaatgtactcaaac

SEQ ID NO: 23277 - DNA, 409 bp, Glycine max
  unsure at all n locations
  Clone ID: LIB3106-025-Q1-K1-B9
tagaggatcactcttcttccatcctttcctctctctctctccctctgcatttccggagttatgttgattttttgcggatagggctggatttgtcaatgctcagagcagatattagaagatggcagacgctgaggatattcaaccccttgtttgcgacaatggaactggaatggtgaaggcaggatttgcaggagacgatgccccacgtgcagtgtttcctagcattgttggtcgtcctcgtcacactggtgtgatggttggtatgggccagaaagatgcatatgttggtgatgaggcacaatctaaacgtggtattctgactctcaagtatcccattgagcatggtattgttagcaactgngatgatattgaaaagatttggcattataccttctataatgagcttcgt

SEQ ID NO: 23278 - DNA, 352 bp, Glycine max
  unsure at all n locations
  Clone ID: LIB3106-025-Q1-K1-C1
tatatattgtaaatctcattctgttttttaattcatttcatanaaagggggacgaaggcttggattatattgcttatcaaacttctcaccgcaattttgctgttggcacttaacagttatttgtaactgtatttcttgcttcaggtaaaagagggtggttatgattacaatgtcaatgaaactgtcaatgttgtctctcagaaaacatcatatattggacaaaagacttgttgtataatgaaagggttcatgtcattgacttcacacaatgttgaggaattcgctataaataaccctaattgtatgtcttgataactttcaaccaaattaaaatgatagaaatggtttctac

SEQ ID NO: 23279 - DNA, 470 bp, Glycine max
  Clone ID: LIB3106-025-Q1-K1-C12
cgtcggcccacgcttccggttggtggttgaaactcgttcttcttctttggttgttctgtgttggtgttggtttttggtctcacctgaaaatgtcttgctgcggtggtaactgtggttgcggaagctcctgcaagtgcggcaacggctgcggaggctgcaagatgtacccagacttgagctacactgagtcaaccaccaccgagaccttggtcatgggagtggcacctgttaaggctcaatttgagggtgctgaaatgggtgtgcccgctgagaacgatggctgcaaatgtggaccaaactgctcctgcaacccctgcacttgcaagtgaggtgttgggagagcaagcttcaagcagagatagcccttaattaagaataatgataaactattaatgtgtagctaaaaacttatgtattatgtctgtgatggttttcgtgcactctggtgttttgtgttaaacaaacattct

SEQ ID NO: 23280 - DNA, 412 bp, Glycine max
  unsure at all n locations
  Clone ID: LIB3106-025-Q1-K1-C2
cgccaacccttccgatggtgggggggggccgtccgcctaatccaatcaatcgcgatcggcgccttccttaaacgacatcgcgtccatcaccccttttctcttcctcacagtcacagcagtgggtggcttcccaaaaaagagtgccaatggcatcttcttcagactcatgggtgaaggaatataatgaagcactgaaacttgctgatgatatcagtggcatgatttctgagcagagttcatttcctgcatctggaccagaaacccagcatcattcatctgctataaggagaaagattacaatattggggaccaggcttgatagctngcagtcccttttgtcaaagctttcccgcaagcagcccatatctgagaaggagatgaatcggcgcaaggacatgctttcaaatttgag

SEQ ID NO: 23281 - DNA, 349 bp, Glycine max
  Clone ID: LIB3106-025-Q1-K1-C3
cgcttttccttaattgccaaaaacaattcgtttcttttcccttccaactattccaatccaacttgcaattttgcttttctccattgacacccaacacaaattacatacatcgaattcctcggttttttcctttcccacatttcggttgttattaattatcatattattattcaatattcatggcgtcagttttgatcgatgtgaaaaatatcctttctttaacgcggccgaagaagttcaagaatctgcatacaggatggaatctacatatcaacatggattcatcaatgaaagatgcgtccagcccatgtaactgtgatgaactcctcctagatcttaaaactactct

SEQ ID NO: 23282 - DNA, 317 bp, Glycine max
  Clone ID: LIB3106-025-Q1-K1-C8
ggccttttgagggttcgcgtgaagcgtggtgtcaaccttgccgttcgtgatgtgggaagcatgtacccttatgttgtcatcaagatgtacaaccagaaactaaagactcgtgtgattaaaaaggatgtgaatcctgagtggaatgaagaccttactctttctgttataaatccgaatcacaaaattaaactgactgtgtatgaccatgacacttttagcaaagatgacaaaatgggagatgcagaatttgacatctttccctttatagaggccttgaagatgaacttaactggccttccaaatggtactgtagtcac

SEQ ID NO: 23283 - DNA, 324 bp, Glycine max
  Clone ID: LIB3106-025-Q1-K1-C9
caaactgccccatatcacagggcacattaaaaaaagactcccacgttctcttctctctccgtctctctctctctctcttcatttctcattgactctctctttctctctctctctgcacagtgccaatggcggatccaatcgcgaaagctctgatcgcgtttgcgctcttagcttcccttttgctgtgcttgcaagcttcctccgatgtccccttcatcgtcgctcacaaaaaggcctccctcaacagactcaagtccggcgccgaaagggtctccgtcaccatcgacatctacaaccaaggaacctccacggcctatgatgtaa

SEQ ID NO: 23284 - DNA, 389 bp, Glycine max
  unsure at all n locations
  Clone ID: LIB3106-025-Q1-K1-D10
tggaattaaaattcctgtttctacatttaatcattttnttccttccatggcggttcggttccctctcctattttagaaggcctttctttggaggattcattgtcgcatcttgtcaaatgggcatttaaagagaaagaagaataagaaaagtatcctcatttggtaaatattggcaaagaaattgtgaaaaaatgcagaggcattccatttccactgagaacgttatggagtttgctattttcaaaatttgatgcatatgagtggcaatatgtgagaaacaatgaattttgtaattttccaccgtcaaagatgacattttaccagcacttaaactaaactacaatctcttgcctatttgagacagcgtctttcttttgttgtccctcccc

SEQ ID NO: 23285 - DNA, 367 bp, Glycine max
  unsure at all n locations
  Clone ID: LIB3106-025-Q1-K1-D11
aaatttatactatttttaaatgctcttggcatatgtggagttccgtggctttgttggtggcctggcttgggtcaccggcaccgatgccctcgagaaagccttttcaatctacggcgacatcgttgaatcgaaggttatcaacgaccgtgagactggaaggtccagaggattcggatttgtgaccttcgcctcagagcagtcaatgaaagatgcgatcgcaggaatgaacggncaggaccttgacggccgtaacatcactgtcaacgaagctcagacccgcgccagcccgtgtggtggtggaagccgtggtttncngaagtggtggtggatacaaccgcngtagcggtggatatggtgggtgtggtgg

SEQ ID NO: 23286 - DNA, 247 bp, Glycine max
  Clone ID: LIB3106-025-Q1-K1-B11
catctccatttttcaccttatattttacacttttctactcaaaactttcctggggatattgttacatttcaacaaaaactactccatcaactactacttaactcattctcatactcctatccctacctctcttgacctacaaatccctacccattctcattataatttacatacttcattcttgaccactttacaataaaactaaatacacaatatctttactcatataataaacactataatctct

SEQ ID NO: 23287 - DNA, 455 bp, Glycine max
  Clone ID: LIB3106-025-Q1-K1-D12
aaatgttgatctcgtggtggaaatttctttgcaaccatggcatgtttttaagcccgatggagtgatggtattctcagacattcttaccccactttctggaatgaatataccctttgatattgtgaagggtaagggtcctgttatatttgatcctattcacacagctgcccaggttgatcaagtgagggagtttattcctgaagaatcagttccatatgttggtgaagcactgacaattttgaggaaagaggtggataataaagctgcagtccttggttttgttggggcaccattcaccctggcatcatatgtggttgaaggtggttcatcaaaaaacttctcaaaaataaagagattggctttctctgaatccaagatcctgcactcattactgcagaagtttacaacatcaaatgccagatacattcaataccaagctgacaatggaactcaag

SEQ ID NO: 23288 - DNA, 198 bp, Glycine max
  Clone ID: LIB3106-023-Q1-K1-H2
atcatacctatggccactcctactacacgttgttccccatcattgggaatcaggttttatccgagtaaacgttctgatcctgtgttttttagctcttaaatgaactgcctcactatctccttatttaaatttctcataactctaacttcaatgcttatttcttcctcacacaactttttatcaatcttcatccattgt

SEQ ID NO: 23289 - DNA, 412 bp, Glycine max
  Clone ID: LIB3106-023-Q1-K1-H5
attaactctactgggtagttcatgtatgatctctgtttcatgtacagtcataccagcggggtaaagggattatacataggccactagcttgcctttgaatagctgggtgtcatttatgacactagttcgattctgctgcaagctgccctttattgtactaaggaatatatattgaacaaattaatctacataatatgtatatatatcacgatcccaaagtgcagtgcatcagcttcatcgcctacaagcccccaagcttctaagtgtgaaatattttcaaagcatttgtagccgccaccccactttgtttgtttgtacttaaactacattcccatttgattttgctttttgagatttcatcatcctgtatttttggttactgttttcggacttcaatggaaattaatggatg

SEQ ID NO: 23290 - DNA, 427 bp, Glycine max
  Clone ID: LIB3106-023-Q1-K1-H6
cccacgcgttcgtccacgcgtacgaccacgcgtccgattcccagcaataaaaggatgcggctttcctcgccccgttccaaaacttttggaactttgcattaatggggttgaagggaatgctcacctaatccagtttctcaattctttaacccaaccaaatgtcccgtgttgatttggagcaagggaatgtgaatcatcgccattcggttgttggaagtgatgtgagtggtgaagggagcgtatgcttctctgatgctgatgatggttcttgctattcccgtttctactcaacaaatggtggttcatatgatgattacagctttgcttgtgtttctgatcctgaagttggaggtgttcctcattctgggagagcttcttcttcggcttctgagtgttctgtggacgcggaaactagaagtggcgttcc

SEQ ID NO: 23291 - DNA, 226 bp, Glycine max
  Clone ID: LIB3106-023-Q1-K1-H7
gtgtaaagaacattaactatattgaaagagattgtaatttaccaaaataaaaaaaaaagaaaaaagtaaaaaaaaaaaaaaaaaaaaaaaaaaaaaaaaataaaaaaaaaaaaaaaaaaaaataaaaaaaaaaaaaaaaaaaaaaaaaataaaaaaaaataaaaaaaaataaataatttaaaaataattaaaagataaaaaatggtcattcttttataagaattaa

SEQ ID NO: 23292 - DNA, 239 bp, Glycine max
  Clone ID: LIB3106-023-Q1-K1-H8
aaaaaaaaaaaaaaaacaaaaaaaaaaaaaaaaaaaaaaaaaaaaaaaaaaaaatctgggggatccgtacttacaagcgcatacatacaacgccataaaatctaatatacagaatcctaaattctatatcactgaatatcattttacaacatcttcaactcggaaaactctgtccttacccaacttcatttcctcgctcaacatcctcctttttcaagctgccgtaatatctctcactt

SEQ ID NO: 23293 - DNA, 349 bp, Glycine max
  Clone ID: LIB3106-025-Q1-K1-A1
caatcgtcttctgcttcaaggaaggagagcttgttattctctatcaacaaggaaaatgtcaggtgaagaggttgttgttgcagctgagccagctgctgccatcccaggcgagcctatggatatcatgactgccttgcaacttgtgctcagaaaatctctggcttatggtggtcttgcacgaggccttcacgaaggggcaaaagtgattgagaagcatgctgcacaactctgtgttctagcagaagactgtgaccagcctgactatgttaaactggttaaggccctttgtgcagagcacaatgttagcctgctgacagttccgagtgcaaagacccttggagaatgggct

SEQ ID NO: 23294 - DNA, 283 bp, Glycine max
  unsure at all n locations
  Clone ID: LIB3106-025-Q1-K1-A10
cgtacgcccacacntacatatcaacggttcatatatgctatgcatacaagtctctccaccgggtgctagtaaaaattttgaaactcgttcctaccttccacaccttgataatccacaattggcaaaagaagtagaattccttcatatgaagggatggattccttgcttgtaattcaagtaacagcactgtttcatgtaccatgatcacaacaattcaccaccatactacgatggacgctactgcaccatgtggaacctgcctatgtttggttgcactgatgct

SEQ ID NO: 23295 - DNA, 444 bp, Glycine max
  Clone ID: LIB3106-025-Q1-K1-A11
caattctctgtatttcagggttgaaaattcacacgttgaattgaaatttggaaatcgtgacggcaaccctacaccaccatggcctccgtagacaaattttgggcttttgccctcgctcttgtcctccttgccttccctctcctccaagttgctaggtgtcagtcagactccgaagatgtattggaggctgctgaagaatcaagtgatatcggcattgatggtgatgatgtccaagactatggtgatgggaccttcccttctgctccaggaattgaaacaataagtgtttctccaaaaaatagtgcgagattgataacagctggagaagagacagagctgcttgctggtgttaaaaatgatggggattcaagcttgaatgttatcgcgatcaaggctagtgttcaccttccttttgatcaccgtatgctggatcaaaatcttact

SEQ ID NO: 23296 - DNA, 428 bp, Glycine max
  Clone ID: LIB3106-025-Q1-K1-A12
gactcatatcgttatccattgacgaatatggtgcagcgtctcacctaccgcaagagtgacaggtatgcctccaaatccaaccaacacagggtcgacaaaacccctggtgggaagctcgtttatcataccaccaagaatagggccagcggtcccaagtgccccgtcactggcaagaggattcaggggattccacacttgatgcctgcagagtacaagagatcaaggttacccacaaaccgtaggactgtcaaccgtgcatatggcggaattttgtctggaagtgctgtcaggtagaggattatccgagctatcttagttgaagagcaaaagattgtgaacaatgtcttgaagatccagaatgcaaaggaaaagcaagcctcaaaagcttgaatttgaacaacacaatgagacatctttttggaggactt

SEQ ID NO: 23297 - DNA, 317 bp, Glycine max
  unsure at all n locations
  Clone ID: LIB3106-025-Q1-K1-A2
accggnccggacgacccagcgcgaccgcacacgccgacgcactggaaagcctacagatgataagaaatcactcaaggaactcactggcaagctcttccaggatatcagcaatctggatcatgcagcananattaagagcagcccagaagcagagaagtactatgctgctactgtatcttctctgaacgatgtccttgccaaacttggttaatgtgattaatttcttgctttcttgtgtaagctttgtgcatcattttctcagacactttgttgactgatattttaagaaaatcaaatgatgagggaaaattttctat

SEQ ID NO: 23298 - DNA, 386 bp, Glycine max
  Clone ID: LIB3106-025-Q1-K1-A3
cccacgcgtccgcccacgcgtccgtgtggttatggaagatttcaattctttgtctttcaaactcctcaagttgggtttatgtgatgatggctctcaacatctcttctccagctgaagtcaagtccatttttttcgctgattccttcaagtctaactgcctcacagcaaaattctcaggtgggtttgcttttaagagaaaagagcgtagagcagcatctggaggacgggtttattgctcagtgcaggcaacaccaccaccaccagcctggccgggacgagcggttccggaacaaggtcgcaagacttgggatggaccaaaacccatttcaattgtggggagtactggttcaattggaactcagacactagatattgtggcagagaat

SEQ ID NO: 23299 - DNA, 319 bp, Glycine max
  Clone ID: LIB3106-025-Q1-K1-A4
gctttaacacacacacttctacctcttcaaatggctcaaaaggttgtgttaaaggttatgactatgactggtgacaaaacaaagcaaagggctatagaagcagctgcagatatctatggggttgattcaattgttgctgatgtaaaggagcagaagttgactgtgattggtcaaatggacacagtgaaaatagtgaagaagctgaagaaagtaggaaaagtggatatagtatcagttggacctgccaaggaagagaagaaggaagaaaagaaagaggagaaaaaggaagaaaaaaaaagaagagaaaaaggaggagaag

SEQ ID NO: 23300 - DNA, 304 bp, Glycine max
  unsure at all n locations
  Clone ID: LIB3106-025-Q1-K1-A5
atttggcttcnctcttcggtcaggctgtcaccgtttaggttgctgaggttatttataatagggccactgaccgcagtcgtgggtttggatttgttaccatgagtacacttgaagagcttaagaaggctgtcgagatgttcagtggttacgaactaaatggaagagtgttgactgttaataatgctgctccaaaaagagcacagtctgaacgcccaccacgcccaccacgttcctttagttctggtttaagagtctatgtntgcaacttgccatgggaagttgacgatgctcggctggagcaaat

SEQ ID NO: 23301 - DNA, 468 bp, Glycine max
  unsure at all n locations
  Clone ID: LIB3106-025-Q1-K1-A6
ccacgcgtccggtttgttgtgagctataagctagtttatcgtgaggagaatatgaagttgtttgttttctttgttgctgcagtagttttggtagcatggccatgccatggcgcaggctaccaaaggttccctctccgaatgaaaactggctatggtgagcgttcttcggaggtaaaatgcgcaagttttaggcttgctgtggaagcacacaacatccgagcctttaaaaccattcctgaagagtgcgttgaaccaacaaaggactacattaatggcgaacaatttagatcagactctaaaacagttaaccaacaagctttcttttatgctagtgaacgcgaagtccatcacaacgacatatttatattcggcatagataacaccgtactctctaatattccatactatgaaaaacatggatatggggtggagggaattnatgaaaccttatatgatgaatgggtaaca

SEQ ID NO: 23302 - DNA, 409 bp, Glycine max
  unsure at all n locations
  Clone ID: LIB3106-025-Q1-K1-A7
acctcctaaaccaaaattatncaaaaccatgtccagcttcactcatgcgcgcacactgctccatgcccacatcaaaaccaagcacaaaaaaccctccaccaccaccaccaccaccaccccattaccccataaccattcccccaacagaaggaagctgatttcaacctttctagccacttcaacagcagcactactagtgcatggagtcaccagcaccccacaagcactggcccagagctggggcacgcactccttcatcaaggagcacttcttcgagccggggctctccccggaagacgcggtggcgaggataaagcagactgcggaggggctgcacagcattcgggaggcgctggagaccatgtcttggaggtatatcatgttctacatacgcatcaagcaggcctat

SEQ ID NO: 23303 - DNA, 249 bp, Glycine max
  Clone ID: LIB3106-025-Q1-K1-A8
gggaaaaaatgtcacttaataataaaaatttaatatcttcattccctcaaaaaaaaaacggccattttgttaaatgtggacagcaaaaccaaacacaataaatctcttcattccaataaccaacactaccaaattatccttttaccattccaacaacacaatgaaaatcaattctcacctctctatttttttaaattccaactttacttacccattcttccaaccttctaccttttttaactttccccc

SEQ ID NO: 23304 - DNA, 409 bp, Glycine max
  Clone ID: LIB3106-025-Q1-K1-A9
cgcctatcgagagttgtttgggtctctttcgttcccccaatgagtcactgagtgcagtcctgtgtgattggctcatcttttgtcttttctcggctctgataaaaccgagaattcgcaaaactctttgctctggttcagttctgtcgtgttgcaagttgcaactgaaccaatcaacaactttcttgtattccaaattatcttcaccattacaatcctcaaagtcaaaaagtgaagaccttaacataaaacaaaacacaatggtaatgtgggtatttgggtatggttctttgatctcgaaagctgggtttcactatgacgaacgtattgttggtttcatcaaaggctatcgacgagtcttctaccaaggctctactgaccacagaggaacccctgagttccctggaagaac

SEQ ID NO: 23305 - DNA, 407 bp, Glycine max
  Clone ID: LIB3106-023-Q1-K1-G8
tccaagcgtccgcccacgcgccagaccaaactcaaaaccctagcgaaccaacaccaggtgcagccatattcaccaatggctttctccaaggcaatgtatctcgccgccataatgtcggtgctcgtcgacgccatctgcgacatccaagctccagctccgagccctacgtgctccgccgtcagcgtttcgccgctcttcatcctcggcgttctcgccgccggagccgatcttgcgttcgcatctgctatgcacatctgaacgtagatcatggatactctcgtctacatagcgcagatctttagtacaagccgagatatgtgcagcattagtatataactctctctgtgtctgtgcctgcctgtctctctatatatatagatattgctatgtagagatcattactacat

SEQ ID NO: 23306 - DNA, 375 bp, Glycine max
  unsure at all n locations
  Clone ID: LIB3106-025-Q1-K1-B1
atttctctttcaacaagaaacttattcagattttcgcntncgctcccctatgcgctctttgtactttactacaggatggcaatggaaccttacaccaccgaatctgcacctattctttctactccttctacttctagcgttgccacaaagctctactccggattgaaacttcaagctgcgagtcctttcagagctgcaaaacctaacgtaaccgctgagttttatggaaaagttcacaacactcttcactgtcggtatgctcaccacaatacattaatggcacgtattccaatgatgccaatatggacttctaaagttccctataggacacctgttgaacgaactttgcaatgtgtttatgtatggaaccccctt

SEQ ID NO: 23307 - DNA, 419 bp, Glycine max
  Clone ID: LIB3106-023-Q1-K1-D8
ggcgaagcgaaacgctgtcgttgcgccaatcgcggcgttgttgttggtggtgctactggcggcgagtgtggtggtggaggctcaggagaactcggacgtgaagacgctggtgaagcacatgcacgggaagaagtactgcgacaaaggatgggaatgtaagggctggtcaatttactgttgtaacctcactattactgattatttccagacctaccagttcgagaatctcttctccaagcggaactcgccggtggcgcacgccgtcggattttgggactaccactcgttcatcgccgctgccgcgcttttcgagccgcaagggttcggcaccaccgggaacaagacgatgcagatgatggaaattgcggcgttcctcggacacgtcggcagcaagacctcttgtggttatggagtggcta

SEQ ID NO: 23308 - DNA, 389 bp, Glycine max
  Clone ID: LIB3106-023-Q1-K1-E2
acgtccacgcgtccgcccacgcgttcggtctctttctctccatttttgcttcagaggacaattgttctctgaatttcgttttgatattttgacatcatttacattgctgccatcattccctgccactactgcgcttccctcaggcccaaatggttcaattccaacaactcacattctaagcctttatcgtacccactattaggactcctaggtttcaatgctcgttgcttttaccaaccactccatcattctgaatctcataacaaccataatctgacgttattttacttgaagcagtgtgctatatctattgcactggcattttgcgttactaacacgagatcctacattggatggtcccaccattgctcattcagctaatcctgtgt

SEQ ID NO: 23309 - DNA, 325 bp, Glycine max
  Clone ID: LIB3106-023-Q1-K1-E4
catccacgcgttcgtccacgcgtccgcttgaaatgaattatgtgccacagaagtttaagctttgggcggctgggacagaagggcttgctattgaggttgatacccgcccgagaattgatgctgcaatctggcactatgtgaaggctaagaaatcgctaatcccaaatgacccttcctactttcactgtgagcagcctcttctgaaagtatttggagaagaaaagatgaaatttacaatgggttcacagaaaatatcatgatatttgttcccctcacagcctatacttttggagcataagatcaaggctttgggaaacaatcctgc

SEQ ID NO: 23310 - DNA, 392 bp, Glycine max
  Clone ID: LIB3106-023-Q1-K1-E5
ggaaagcgaagttctcaatgcccttatggctcagaacccaaatatatataacattggtgcacttcaatcgttaggaaggcattttcctgataaagacaagggcttcaaggtgagtgggtcaaatctttggaaaaatgactcacaatgtatccaatggctagaccaatgggaaccttcctcagtcatatatgtgaattatggaagtattactgtgatgtccgaggatcatttgaaagaatttgcttggggactagcaaatagcaatttaccatttttgtggataaaaaggccagatttggtaatgggtgagttcacacaattgccacaagactttttagatgaggttaaagatagaggatacatatcacgttggtgccaccaagagcaagtgc

SEQ ID NO: 23311 - DNA, 344 bp, Glycine max
  Clone ID: LIB3106-023-Q1-K1-E6
gttttacgataccagggctctatctctctggagagtttgtctttcattggaatgactggtatcgcaacctctatgccttttacgaggatagtatctttgagctttacagctttagtcatgcagttagaccatggaccgcatattgaatgtctggatcatatcctctaattatatgtgtgattagcgccttttttatggctagaacttttaactgtgtttggggaggctgttcacgatttattgatgtatttcctatgcacacgcttgcaaactcattcgtcaagtattatgcactgctcttgccctctatagtcatcatggattcttcttaaccaaagatggaa

SEQ ID NO: 23312 - DNA, 429 bp, Glycine max
  Clone ID: LIB3106-023-Q1-K1-E7
gtctttcgaagcaggaactaaatatggctgacttgttggaatggtcaaagcaagataggaaacgaatgcttcatgtcgtctaccgtgttggtgaccttgatcgcaccatcaaattttacacagaatgtttaggaatgaagcttttgaggcaaagagatatcccagaggagaaatatgctaatgcctttcttggatttggccctgaagaatcccattttgttgttgaattaacatataattatggggttacctcgtatgacattggcgatggctttggacattttgcaattgcaactcaggacatttataaattggttgagcacatcagggccaagggtggaaacatcacaagggaacctggtccagttcaaggtggaactactgttatcgcctttgttaaggatcctgatggttatacttttggactta

SEQ ID NO: 23313 - DNA, 419 bp, Glycine max
  Clone ID: LIB3106-023-Q1-K1-E8
gtggctagtggaagtgtggtgatatccaggagagatatccctgggaagcaagggaaagggtttggaatctctatggagcctttaaatttggaggcttatgttaaagacaagttggatgaaatacagtcatctcttttggaaagggcaattgcatttcgagacagtaatattgtagatgtgagcacatatgatgatcttaaagcagcaatatcacaaggcaaatgggcaaggggcccttggtctgcaagtgatgaagatgagttaacagtaaaagaggagactggagcaacaattaagtgttttccttttgaacagccacaaggggttaaaaggtgcttgatgaccggcaatcctgctgaagaagtggctatttttgccaaatcttactaaatctgcaaggtttcttattctttgaagtc

SEQ ID NO: 23314 - DNA, 421 bp, Glycine max
  Clone ID: LIB3106-023-Q1-K1-F3
cccacgcgtccgccaggctatgcccctccttatcccccacaacagggttaggcgccagcgggttacccgtcagcgccgccgcagcctccgccggggtactcgccgtacccgccgccgccgcagtacgaaggttaccaaggctatttcaatcaagggtatcctcctccacctcctcccaattaccactgccaccacgttcagcatgataaccccggttttacttccttcttccaaggctgcttgacagcaatttgctgctgttgtttgctagaggagtgttgctttttctgataatcatattaaaagttgtatctgcagtttggtgtacttggttggttatggctctctggataaatgttgctctaattgtcttactcatatgtgcgggacctggcaagtgttagtcattcttgtaactctt

SEQ ID NO: 23315 - DNA, 398 bp, Glycine max
  Clone ID: LIB3106-023-Q1-K1-F4
acggacgcagagccttcgatccagaaaccatgactaagagaacgaataaggcaggcgttgtcggaaaatatggtacccgatatggtgctagtttgcggaagcagattaagaagatggaagttagtcagcatagcaaattcttttgtgaattttgtgggaagtatgctgtgaagaggaaggctgtgggaatatggggatgcaaggattgtggtaaagtgaaagctggcggtgcctacactttgaatactgcaagtgctgtcactgtgcgcaggaccatccggaggttgaaggaacaaaccgatggttgagcttttaggttgatgttagattttgagcaaattaactggagaaatgattcgtttttgtttaagaagctgtattgggtcaacttacaatgc

SEQ ID NO: 23316 - DNA, 318 bp, Glycine max
  Clone ID: LIB3106-023-Q1-K1-F5
gtcaattgcttcttcatctctctatgtgtgtcaaaccccaattatattcatgggaggggaatctggggacttatgacttatggcttgatacatatatcaagcatgcaatccgaacttaaagaccttgattctaaatcgacgaacggctacggtaacaacgctcgcgatgaccgttctctgatgaagccgttgactcctgcatccgacgacagcatcgtcgatatggagaaaaaattcgccgattaggtcctgaccgacacgttcgcaaacatcctactcaactagtaggctcccaaggagaaacttatggtcggctta

SEQ ID NO: 23317 - DNA, 392 bp, Glycine max
  Clone ID: LIB3106-023-Q1-K1-F6
gcaaaccaccccaccatcgcagcaagagcaacagcaatctttaacactccctcctccggctccttgttcacattcacactctttctctctctctctctcctcctccaactttctctctcctccccctctccctccatccacgaccttctccgctccaaaggcttgccccccggcctcctcccagacgaggtgaaatcctacagcttctccgaaaccggccacttggaagtcttccttgactcgccgtgcctgaccaaatacgataacagaatcctcttacagcaagtcgtcaccgccaacctcacctatggaagcctcatacgagtggagggtctccagcaagacgagctcttcgtgtggctacccgtcaaggacataatcgcaaatgaccc

SEQ ID NO: 23318 - DNA, 425 bp, Glycine max
  Clone ID: LIB3106-023-Q1-K1-F8
tgtcaccccgtcacaggcaaataataaaggaatatggtcaagcaattcatgacttgggatcaaatgtatcacaaaaaatggctgagtctttgggtataatggataatgatttcaaggactggccattcattttgaggactattaaatatagttttaccccagatgttataggctccacgggagcacaattgcactcagatacaggatttatcactctacttcaagatgatgaacatgttagtggtcttgagatgatggatgattttggctcatttaaggcagttcctcccataccaggggccttcctttgcattgttggagatgttggacatgtttggagcaatggaaaattttggaatgccagacatcgtgtaatatgcaaggaaacgggtactcgttattcatttggtgcatttatgttatca

SEQ ID NO: 23319 - DNA, 443 bp, Glycine max
  Clone ID: LIB3106-023-Q1-K1-G3
tcggaaaaatataatctttcgttctatccgattatttccatgacggaaaacgtcttgggagacctggactgaagtaggctttcttatgcttgacattcgtattcacttctgcctcaaagtagggtgtacctgttatcttgtcacacatatttcaagtagttttatagttttcgttgtattagatatctttgaatgttatgcttcgtagtctttaatctactatattttccactttttattatggcatcatacttatatgtctttctccgtatatgatactcatgcatcgtcaaaagctagtatctatgcttatagtatcataatatgcctttttaatagtgaatttttttggggtcggaatgatgcagtttccaattcattgcactttaaccctcttgagtgatgaatcagtacaaaatatcctttccttaatttgttttatg

SEQ ID NO: 23320 - DNA, 420 bp, Glycine max
  Clone ID: LIB3106-023-Q1-K1-G5
tggattccttgcttggaattcgagttggagcacggtttcgtgtaccgtgagcacaacgggtcaccaggatactacgatggacgctactggaccatgtggaagctgcctatgtttggttgcactgatgcttctcaagtgttgaaggagcttcaagaggctaagactgcataccccaacggcttcatccgtatcatcggattcgacaacgttcgccaagtgcagtgcatcagcttcatcgcctacaagcccccaggcttctaagtgtgaaaaatttgcaaagcatttgtagccgccaccccactttgtttggttgtacttaaactacattcccatttgattttgctttttgagatttcatcatcctgtatttttggtttctgctttcggacttcaatggaaattaatggatgagaactaatg

SEQ ID NO: 23321 - DNA, 402 bp, Glycine max
  Clone ID: LIB3106-023-Q1-K1-G6
gctagctgttcatttagacaaatgaatgattcttttttagggatcaatcaattgatttaataaaggccatttcaaaatattcaaacatgaatgatttttttttatttaatctctcccctaatgaaatgggcaaaaaagggaggtaaaatgaaagtcacaaatatattctctcttccccttagtatctttctgtcttcttcccatgtatcctctgttgtatggtctttgagactttgtccactagtgtacctcaaattatgtttgtgaccttcatttagtaaacgcttgatttccccctaatgaaatgtgcaaaacagggaggtaaaatgaaaaggaatgtattactgaaatagttggttgtgtatttttttaacgagatgataatattctgctagatcgcga

SEQ ID NO: 23322 - DNA, 423 bp, Glycine max
  Clone ID: LIB3106-023-Q1-K1-D7
ggttgtcggattaggaaaaagggtttttaggtatgtgagccttgggagcgagcgaggggtttggttttcgtaaggcaaaatcactgataccaatggtgagcacggcggtggagaagacggatgaagaactccgcatcgagatcgatgagcttcttcaccaacagcgcgagattactgagaggctctgagatcctctaggtcttcgcaaaggttccttggcgggtcctgctataccttctaacggtgctcgccaacgacactttattcatcctgttactgaatgattctgaagatcaacctactgctatacgtcgactatcatctgctgtcgttaaggtggatgatggggagttgcctgaagatgctggtgcaggacaggatgggaagacacatgattcatcgaacgaagctgtcaatgggact

SEQ ID NO: 23323 - DNA, 424 bp, Glycine max
  Clone ID: LIB3106-023-Q1-K1-B5
accactcgttcggacttgcgatcaactacgtcacttgtctcttagacttcttcatcgggcaccttcacctggattacttccttcgataatgaactttgtcaaaatcaaactttgatgttcttgcttgtcttaattacgttctctgtcgtttgacgaatagtattacactattgtctgggaatgctgtcttttcctcttttctgaattccgcttctctgaaaagaagtttatcataaacacggtaggtagaagatgatcatcgcatttattagggtactctttttcactttacatataagattttgatttccgatggttattccccatccgcttctagtttttagctaattatttgctagcttcgagttgctcaagtttaatttttgtcgttttatgtattaatccttttagataacatgattga

SEQ ID NO: 23324 - DNA, 237 bp, Glycine max
  Clone ID: LIB3106-023-Q1-K1-B6
accacgcgttcggccagacaatggaccaaagctaatgtctatgtaacttcttttttgggcgtgggtgagacgatggtcttaggagctggtgttataaagatatagtgtttgttatttttcttatttttatgttactagtactggttattctattccaatataagcaatattatattttgaaagcataaatgattaaactaaatgaatttaaatcacccttaaagaaggttatgatta

SEQ ID NO: 23325 - DNA, 281 bp, Glycine max
  Clone ID: LIB3106-023-Q1-K1-B7
accacgcgtccgcacgtagaactaacgagcgttagaatcagcgaagataatattgcatgcaactgggcattatatacataaaagactgaacaccgacgattttaactgccagatctaaaaacagattgcaccattcccacaattgaaagtactctatagatcagccgctactgcgtctctattgacatagatcaaatggctattttctgatgcatcgatattccctaagttctcattctaattattcgacacgaatacgagtgaggaacatctttgatcca

SEQ ID NO: 23326 - DNA, 383 bp, Glycine max
  Clone ID: LIB3106-023-Q1-K1-B8
cccacgcgtccggaaatataactaatattctttagaataatcaaaaagaatattaaaggcaaatggattttagatagaaaaaagacttaaaaaggaggatttgaaatgcgagatctaaaaacatatctttccgtggcaccagtagtaagtactctatggttcggggctttggcgggtctcttgatagagatcaatcgtttttttccagatgcattgatattcccttttttttcattctagttattgacacggaaaggggtgaagaatattatagatccaattaagtattaaatatatgtaattaatatgtaattaatctcctcttctttatttcgtcttttatttcttcttttttttacaattgtaatagaataagttaggaa

SEQ ID NO: 23327 - DNA, 211 bp, Glycine max
  Clone ID: LIB3106-023-Q1-K1-C1
ccacgcgtccacgcattcgaaaacatgttgataaaacgagatgttcaaagctgttagggatggcaaatccggcaccaggccactctacaccgccatgcttgataaccctcaactacgatgaaccttcattcccaaggcttaccccaatctcaccattcaattgctcactaacatcatcacactacttcttcgacaatttcgttctccccat

SEQ ID NO: 23328 - DNA, 420 bp, Glycine max
  Clone ID: LIB3106-023-Q1-K1-C2
cccacgcgtccgcgatgaacttgttcagatgtatgaaacagtggagaaagtgttgctgaatccagatgaggcattgaagatgaagcacatggaagaatcaactatgactactgatgaatcaaagcgccggttttctactggtgagccaaagcaccggtttaagagacttagccatatctttggtggcaaggataaactgttgacaaggccggtctgtaaaaacgaggtaaacgatgaagaaacgcagattcgacattctttctcgagtttctttgacagcaagtcatctttattttcaaagaagccacctaagcctggaaacctataccctgctgagcaacctctctctctggaaagtgacaggacagttatttagacaagttcagtttcaccccatttaggataagcaacatacttttt

SEQ ID NO: 23329 - DNA, 351 bp, Glycine max
  Clone ID: LIB3106-023-Q1-K1-C3
cacatatgcacagaggagagggagacggtagcagataagcctaaacacggggctcgcggattccctcaacactggagtcgctggaaatttcattctgggactcagctgagctgaccaaacatgattcaaaatggttgcattgtatcccaagggtgtgcccctatgaattctaagtcacgcaaccatggcatacctagtacctctgcctttagttgcgcttctctaatgcctcccaaggttgccgactctaacattcggagcttttggcgacataatctttaatgtaaacccttgttgccaagaggaatgacatttacatacacgtttgctaaatcaaacctacatattagg

SEQ ID NO: 23330 - DNA, 413 bp, Glycine max
  Clone ID: LIB3106-023-Q1-K1-C4
cccacgcgtccggtcccaaagagctaacaagagattcaagaccggcatggggaatgaggaggaacagaacaaccacgtcttcggcatcaaagatctgggtcacaagactctccttcagagtgatgctctctatcagtatagacttgaaaccagtgtctatccaagagagcacgaatgcttgaaagagatacgcttgatgactgcaaaacacccactgaacatcatggcaacaccatcagacgaaggacaacttctgagcatgcttgttaagctcacgaattcaaagaacgccttggaaataggtggattcactggttactctctgctatccactggcctggctcttcccgctgatggaaagatcttggctttggatgtgaatcgcgaatactaagagttacgaatgccaataa

SEQ ID NO: 23331 - DNA, 326 bp, Glycine max
  Clone ID: LIB3106-023-Q1-K1-C5
acgacgcgttcggagttgtgatcaactacgttacttctctcttagatttcttcatcgggcaactgcacctggatgacttccttcgataatgaactttgacaaaatcaaactttgatgttcttgcttgtctaaattacatctctgtcgttcgacgaatagtattacactattgtctgggaatgccgatcttttgctcttttctgaattacgcttctctgaaaagaagtttatcattaacacgcgtggtcgaatatgatcatccgatttattagggtactatttctcactctacatattagatctcgatatccgatgggtatgcccca

SEQ ID NO: 23332 - DNA, 422 bp, Glycine max
  Clone ID: LIB3106-023-Q1-K1-C6
cggacgcgtgggtttcgttcgtcaccatgactttcaagcgcaggaatggaggtcgcagcaaacacggccgcggccacgtcaagttcattcgatgctccaactgcggcaaatgctgccctaaggacaaggctatcaagaggtttctggtgaggaacattgttgaacaggctgcagtcagagatgtgcaggaggcttgtgtctacgaacaatacacgctttcgaagctgtatgtgaagatgcagtattgtgtttcctgtgctatccactctcatgttgtgagggttcgatcccgcactgataggagaaagcgtgagccttcacagcgattcatcaggcgcagggatgatgcaccaaggcctggtcagcctggtcaagccccacgttctgctggagtaggagctcctgcccgagcttaaaagaaa

SEQ ID NO: 23333 - DNA, 430 bp, Glycine max
  Clone ID: LIB3106-023-Q1-K1-C7
attctgtagcagcgagaagcagagtagcggatatgaagaagcaagcatcaagcactttgctgatgtgggttatggtgatatcgcttcacgcacatctcatcattgcagctgtgtctaagtctaatggcacaatttccgtgtgcgatggctccgtagaggactgcctcaacgtcgtccacttggactcagagcttcttcccaccatctccagctcccacttccgcagaatccttgctggaaaatatgatggagttaccaacgatgcactaattcctgataaacccttcaagggatgtaaaatcggagaagcttatcgtagctgtctggcccaagttgaaggtagagcgagaaactgtgccatctacaagaggggttgctaatgaatatctaaggttgtgatcgcgccgagctatttgcgtgttttaatgct

SEQ ID NO: 23334 - DNA, 344 bp, Glycine max
  Clone ID: LIB3106-023-Q1-K1-C8
ctatattctatcatggtgaaactcaaactctcttgcctcacctcatatgtagaataagtgaatagggctttaactccattgcttcattacttcaacctccactcaatttttcaaaaccctagctaaaaaacactaccagttttcgagtaataataattaaaagaggagaatattttttgggttcttttttttctattgctttagggagggaaagttgagagcgatatggaattctacgagcaagaggagcatgaagaggaggaaatggtgatgccggaaccggcggcggtatcggcgccgccgagttacgactcgctcgggaactccggggcgatgtcgaaact

SEQ ID NO: 23335 - DNA, 358 bp, Glycine max
  Clone ID: LIB3106-023-Q1-K1-D1
acctactgcgagccacgcatccgtgatcaaatccacagcacttttacatgcatgaatcttggatcaacaccgtgcattgtggtgattcatgggaactctagattgataaatgagattcgataagcagaaatttggacacattaatagaacatatagttacaaaatggaccttgaagataacctttacattcgctcacagactgcaacaactatcgtaccctattttactatacatattaaggataatttatcgaatagaaactgttaatgacataaacactactactcaaaagccacaaaacatcctgaatcatttacagatcaatttgacttgaattaaccataatacccctattgt

SEQ ID NO: 23336 - DNA, 422 bp, Glycine max
  Clone ID: LIB3106-023-Q1-K1-D2
tcggagaaaaatgccatggttgctgctggtgcccttgtgagacagaatacaaggattcctgctggcgaggtatgggcgggcaatcctgcaaagttcctgagaaagctcactgacgaagagatagctttcatctcccagtcagctaccaattatactaaccttgcacaggtccatgcggccgaaaattcaaagtcctttgatgaaattgagtttgagaaggtgctactaaagaagtttgcacgcaaagatgaagagtatgactctatgctgggtgttgtgcgtgagatcccaccagaacttattctttctgataatgtcttacctgataaagcagataaagctcttaaaaaatctggtatttaaaagcagtgtttttctattccaatcttgaaatgacatcatgggactctattgttttttgc

SEQ ID NO: 23337 - DNA, 407 bp, Glycine max
  Clone ID: LIB3106-023-Q1-K1-D4
gccacgcgtccgcctcatcttcctctttttctcaacaaaaaggggttcaagtctagctaggtctattacgtcgtccgcgaccatgaacatggcgatcgcgcttctgttcatggttttcgcagtttcatcagctttagacatgtcaataatatcacacgacaacgctcatgcggatagggccactatgcgcaccgacgaggaggtgatgtcaatgatcgaggagtggctggtgaaacacgacaaggtgtacaacgcgctcggtgagaaggacaagaggtttcaaatcttcaagcgcaatctgtgcattatcgatgaacgaaactctattagccgaacctacaagttgggacttaacgtgttcgctgatcttaccaatgctgggtacagagcccttttcctgctaacct

SEQ ID NO: 23338 - DNA, 419 bp, Glycine max
  Clone ID: LIB3106-023-Q1-K1-D5
cccacgcgtccgcgagtgatatgcaagttaaaagggtatcatcatctatgagtgctgtgaatggaactaaagattttgttgctatgaatagaagtctaagtggtcgatcaaggataaggtcacttaccaaagcggatggttccaaatttgacctagagaaaaaaccttacaatcgacaacagagttccttatctcacgtaaggacattagagagaaatagaaggattcctaatgtcacacaactagaaggtacaggttctgtttattcagttggtacaaaacaaagaaatctccattctggtggaatgggtggcaaaagaagggacttcaatgcttcttccttgaacaattctattgtaaaaaataaacaagatggtcaaggagaaagagttattaatgttaatgacaattagatcaat

SEQ ID NO: 23339 - DNA, 265 bp, Glycine max
  Clone ID: LIB3106-023-Q1-K1-D6
gtcagcgtacgacaagccaactgtatctgccatgatgctctcgacagctaacgataggaaacgcgggcttcatgcactgtcccttgttacacacgttaactaaaccgcgcgcgtgtgacactggcatgacaactttcacagtctagaaccccataagaacaacctcaggagaatcctgataaacaccaacatcacattggtaatctgtaactatactctatcagcgccagcaccactattaaacgtgatcatgaaccaaacttta

SEQ ID NO: 23340 - DNA, 420 bp, Glycine max
  Clone ID: LIB3106-023-Q1-K1-B4
cccacgcgtccggtcccaaagagctaacaagagattcaagaccggcatggcgtaatgaagaggaacagaaaaaccacctcttcggcatcaaagatctcggtcacaagactctccttcagagtgatgcactctatcagtatatacttgaaaccagtgtctatccaagagagcacgagtgcttgaaagagatacgcaagatgactgcaaaacacccactgaacatcatggcaacaccagcagacgaaggacaacttctgagcatgcttgttaagctcacgaattcaaagaacgccttggaaattggtgtattcactggttactctctgctctccactgccctggctcttccccctgatggaaagatcttggctttggatgtgaatcgcgaatactatgagttaggattgccaataattcaaa

SEQ ID NO: 23341 - DNA, 194 bp, Glycine max
  Clone ID: LIB3106-022-Q1-K1-F11
ctagatcgcgagcggctgccctttttttttttttttttttttttttttttttttattggttttttttttttaatattttattttttaattttattttaaataaaaaaataatatattatttatttttttatattataataaattataatattacatactatttaactaatataattacaattcaataaaacttt

SEQ ID NO: 23342 - DNA, 380 bp, Glycine max
  Clone ID: LIB3106-022-Q1-K1-F12
actcatatccttatcctgtttctttcaatggaagtcatttctgcttctagcttgaatcccaacgctccgatgttcgtgccactcgcctatcggacggtggaggatttctccgaccagtggtgggacctcgttcactcctacccctggttccgcgactactggctccgcgagtgcttccaagatccccagttccaaaacgacgacgctttcgacttcgactttgacctagatctccaagatgaagatgaaagggaacgaaaggaagggaaggaggtggtgtcgttggggctgctgaaatggcgaagctgtggaagaggatgggcccaggcgccgaggtatgtggaaaaggcccccaagtttgtgaagcccaaggtgagccc

SEQ ID NO: 23343 - DNA, 390 bp, Glycine max
  Clone ID: LIB3106-022-Q1-K1-F9
cccacgcgtccggcgtcgctccgcaccagtttcaccgcacgaatatcttgttgtttggagcgatccgagaaaaactctgtaaacatgttggtttaccaggacctccttacaggtgatgagcttctctctgactccttccgttacaaggaaattgagaatggaatgctgtgggaagttgaggggaagtgggttgttaaaggagcagttgatgtagacattggtgcaaacccttctgctgagggtggaggagaagatgagggagttgatgatgcagctgttaaggttgttgacattgttgacacattcagacttcaggagcaacccgcattcgataagaagcagtttgttaccttcatgaagaggtttatcaagaattttgactcccaaaaa

SEQ ID NO: 23344 - DNA, 386 bp, Glycine max
  Clone ID: LIB3106-022-Q1-K1-G10
acggcgcgtgtaactgcggacgttagattaaggcgaggtatgcacgcgcagtcttagcacggggctacataatccttaagggggctctacgaccagaccaatttgatgttatttataagcccgactgaccaacactagtggtatatatatgccgcaacctataccaaccgcacacccatataaccaagtttgagctcacgctagagaaccaacctaataccagcctcatgagcaataacgcgtagtgctagatatcgcctaccgttggagtctactgctgatactattgcaagcaattcaacggtggtaaccgtatcatacatattgacgacgaccacaacgattgccacatcgattgcgactatcgtttctgggtcttacacaac

SEQ ID NO: 23345 - DNA, 276 bp, Glycine max
  Clone ID: LIB3106-022-Q1-K1-G11
ccaattcccaactggagccacgcatcacggcataacttctgctctatacacaagcatataatgatatactaactagctatcaaaatgtacagggtgaatgttgggctgtgttaattccctagagcttcaattatattgatataactgctgcgattattcactataattaagtaattcaacgtatattacactatttacttcattattacttcaatatacataattattcttttgatatatcatatttatgctgcactatacaaaataaaactctaa

SEQ ID NO: 23346 - DNA, 416 bp, Glycine max
  unsure at all n locations
  Clone ID: LIB3106-022-Q1-K1-G12
cccacgcgtccggtttttttttttttcttgctctttctctgtgtcgatggcggcaaaaggagggaaggggcttgtggccggaaaaaccacggcagcgaacaaggacaaagacaaggataagaaaaggcctgtctctcgttcatcccgtgctgggatccagtttcctgtgggtcgtatccataggcagttgaagcaaagggtgcaagcaaatggacgtgtgggggcgactgctgctgtgtacttggcctccattctggaatatctgactgctgaggtgctggagctggcggggaatgctagcaaagatctgaaggtgaagaggatcacaccaaggcacttgcaactcgctatcaggggagacgaagagcttgacaccctcatcaaaaaaaaaaagngggggggggggaaaccattgc

SEQ ID NO: 23347 - DNA, 415 bp, Glycine max
  Clone ID: LIB3106-022-Q1-K1-H10
cccacgcgtccgcccacgcgtgcgcccacgcgttcggccacgcgtacgggcggccgggcggattgaatgcatctacggcaacaactacactttctcaaactacttcgacgccctcaaatccctcatgcacctcactcaactccaactcaacaacctctccgtcgctaaagacggtggcaaagcctctgagcttctcgcgggcctggcctgcgaccgattccacacttgcgccattctcctcataggctccgacgaaggcctaattggctacggaacccaatggctcgatgttagccaaagaattcaacctctaccatactggcagatgtgtgagtttctgagcatgggagggaacagcacgacgtggatgaacactgacgttttgggggggtttttaaaaaaaaccccccatcca

SEQ ID NO: 23348 - DNA, 433 bp, Glycine max
  unsure at all n locations
  Clone ID: LIB3106-022-Q1-K1-H11
tcgcccacgcgtccgctggtggcagctttgacccattgggataacttggtttnntttatggggttgggtttttataagattgggttgggctttattttttaatggttttgattgttatatattgtttatgttatttgatgtgtttttgtttatttttgttaaaatttttaattattttaaaatttttggtatggggttatttttttttagaaatttgtaatttttctaaactattttaagcttattttccattgtttttggtttgatgagtagatttagtatttgaaggaaactgggtcttttttttttgggttatattaataaacttttttttggttggaatcctgtttgggtgttttttggtttttatattgggcttttttttttgtttttaaattttatattttttattatattttttattttattttat

SEQ ID NO: 23349 - DNA, 307 bp, Glycine max
  Clone ID: LIB3106-022-Q1-K1-H12
aggcagaatcagagactggcagctatgactggtgtgagcctttcatgcccatagggttggcgtcaaggtataactcgtgaccgcaaaacgcgcatgctgtaaagttctcacttccacccaggcaagcagtgcgaccgggtagtatcaagttgggtcgcgtgatgaggatccgacccgttcgcgctgagcctgatcgcatatcgtagaaggtggaggacagcataaataacgcgcatgaggcgtgcgccggcgatccgacgagctgctagtgcgtagcggcttgggacgaggtggaggagctgagcgc

SEQ ID NO: 23350 - DNA, 382 bp, Glycine max
  Clone ID: LIB3106-022-Q1-K1-H9
ggcttccatctctcaaaagctcaaccacttgccatggcagcagcagcgtcaatgtgtatgagcttcaacctggcaacagcattcaagggtctctctttttcttcttcctcatcgttcttcgctggaagtggtagttattctctccgcgcgggtcccacctcggtggtgtcgctgccccggcgctgcccgctgaccatagagaacgcccacaagaagggggcgggcagcaccaagaacggccgcgactcgcagggcaagcgtctcggagtcaagatatacggcgaccaggtcgccaagcccggctccatcatcgtccgccagcgcggaaccaagtttcatgcaggaaagaatgtggggcttggcaaagattataccattttct

SEQ ID NO: 23351 - DNA, 425 bp, Glycine max
  Clone ID: LIB3106-023-Q1-K1-A1
ggttttctgattaactctttcttctcataactctgccgccgcaacagccccaaatccaatggcttcagagaagaaactttcgaacccaatgagggagataaaggtgcagaagctcgtcctcaatatctccgttggcgagagtggagatcgtcttaccagagccgctaaggtgttggaacagcttagtggccaagcccctgtgttttccaaagcaaggtacacggttcgttcctttgggattagaagaaatgagaagattgcatgctatgtcactgtcagaggtgacaaggcaatgcaacttttggagagtggtttgaaggtgaaggaatatgaacttctcagaaggaacttcagtgatactgggtgctttggctttggcattcaggagcatatcgatttgggaatcaagtatgatcctttcactg

SEQ ID NO: 23352 - DNA, 289 bp, Glycine max
  Clone ID: LIB3106-023-Q1-K1-A3
gcgaccagccatcctctcatcctttacgtattaccgagtgaggtcccaaataatctaatggcctatcagctagaacattcctatatgggcttcattactcagcttttcatcgcatgcatggcatactcaatataatcccagctcagactgtaaacatgaatacgaaggacccaatctacaccgattttgcatatctagacctcaagcttgaataacatgcagttacgttcgtatacttatacactgaacaaactattacttttggtaaaattcataatcacattaaatg

SEQ ID NO: 23353 - DNA, 427 bp, Glycine max
  Clone ID: LIB3106-023-Q1-K1-A6
cccacgcgtccgggaactagaaaatccatacaatcttcaccaccaaaaagaaaataatggcaatggccagtgcaacaactctagccacaatcactgttgtggcggctagccccagtgttggcagcagaaggagtgggaagaggaatgtgaacttcatcagagggttgaattcttttggagggttgaaggctcagaacaatgtgacattactaggccttcctgtgtgcactgagcagtgctttgcaaaggtggtgagctcattgaaatatccatcatcatcatcacgtaaggggagaggtggaagtgctgccttttcaacatgcaatgctgctggtgagattttccagattgcagccatcatgaatggccttgtgcttgttggggtggcaatagggtttgtccttcttcgagtcgaagcgtttgtgga

SEQ ID NO: 23354 - DNA, 54 bp, Glycine max
  Clone ID: LIB3106-023-Q1-K1-A7
accagccatgctatgatcatttatggattaactagtgacgttccaaagagtcta

SEQ ID NO: 23355 - DNA, 404 bp, Glycine max
  Clone ID: LIB3106-023-Q1-K1-A8
cccacgcgtccggtccatgctaaattaggtggtggagatgaacaagccaagaacggaggcaagaagaaattcataacaagagaggaagaaccacaacagtattggcagacagcaggagaaagagaaggagagaatcccatgaagactcctcttccttacataatcatatttggtatgtcaactccttttgtaatcttggccattgcttttgcaaatggttggattaaggtgcctgttcgatgagacaacactttacttctcattctcaaacttcaccagagaaattctttactttttcacatatgttatggctcgttttaatgaacaaagttcacttatgaatgtcggattgaagaaagcataaatgaggtttcttgtttcaagaatagcacgttggtgatccg

SEQ ID NO: 23356 - DNA, 420 bp, Glycine max
  Clone ID: LIB3106-023-Q1-K1-B2
cccacgcgtccgcccacgcgtccgataacttaagtcacatacattctgacgccaaaaggaaggaaaggaacttgagccacattctgtccctggtggactcaagaagagtctttcataggacagttaaaattatagcttgcaaaaagggttcactagcaaacattgcaatggcctcaacctcttctgctctcactatatcctcttcttccacccttcttgatggcaaggctccaagacagtcaccagctgcttcccctcaatgtgtgagcctcccccctccccctttgcactctcagaaccgttcatggaagaccactgcttattgtcgcaaggttgctcgaaaagttatggcaatggccacaggagaggcaccagctgaagctaccccaactgaggtgccagagattgtcaagactcttc

SEQ ID NO: 23357 - DNA, 423 bp, Glycine max
  Clone ID: LIB3106-023-Q1-K1-B3
cccacgcgtccgatctttatataataatataaataagaataaaaaaataaaaaaaaagaaaagaatctatataaatataaaaataatatatataaggtacaaatagtaaatcgaggtacccattttatgataaactttccttccatttttgttcctctagtaggcctagtatttccggcaattgcaatggcttctttatttctttatgttcaaaaaaacaagattttttagatacagaaaacaaagtaaaattctggggttttttattccccaattataatactaaattcaaaaaaaggagagtaatgagtataatctttcgctcagacgatgtactgatatattctatggcggaggttcgaagaacaagcaatttattttgggccgttttcactttgttaggttcattgaggttattgatcg

SEQ ID NO: 23358 - DNA, 343 bp, Glycine max
  Clone ID: LIB3106-022-Q1-K1-B10
cccacgcgtccgggaagaagcataagaaggaggaaatgtaagttagttttgtaaaatccagcaagtgtttgaatttggtgtaggttgggctttcagctatgaacagtttgatgtgatcaagtatagttcgtgctgtgttgtgaaacacggtgatcaacaagtgaatggttctggttcgtgctctgttgtgaatttgccagcttctctttgtacgctattttttgtaaagtggagcaaattattaacttgaggagatttgatcagatttagtttctgcaaaaaaaaaaaaataaaaaaataaaaaaaaataataataaataaaaatatataaaatttatataat

SEQ ID NO: 23359 - DNA, 369 bp, Glycine max
  Clone ID: LIB3106-022-Q1-K1-B11
gccacgcgttcgtccactcgttcatccactccttcgtcttctccttcgtgatctcttctatcgcaactattacactattctcattgctccaccattctagctaatgggtactcacagtgaaagaaccccacagatcacattggagattccatcattttcaatcacaagcaacaccacaacatctacataatcaagaaccagaaagcctttgacctcttcaatttcacacaagctacttttttcaccaacctcaacactgcttactacatgttgcattcatcactgcctggtctatactactttaccttcaatgatgggactctcaaaacatgtaaagcttgacagaagctagcatttaatgtcatcact

SEQ ID NO: 23360 - DNA, 419 bp, Glycine max
  Clone ID: LIB3106-022-Q1-K1-B12
cccgaacatcaatagcaatggtagcatttgtcttgatatcctgaaggagcagtggagccctgcactcaccatctctaaggtactgctttctatctgctcattgctgactgatccaaatcctgatgatccacttgttccggaaatcgctcacatgtacaaaactgaccgggccaagtatgaggccactgcacgcagctggacccagaagtatgccatgggctgatttgtgtttggataatgtatattgaaatggattgcatctatgaaaacttttgtgggtttgcttttcacttcctgttttctgggtaagattatgtttctgttatgaggggctagggaagggaggtgtcttaatttgataaaaaaaataactgtgttcaacaacccttccaaaacctttttgggggggtgatgttttt

SEQ ID NO: 23361 - DNA, 382 bp, Glycine max
  Clone ID: LIB3106-022-Q1-K1-B9
ctgacaaactacaacaattttcattttgttcttgttctttgaattattccgtcgttgtctgctacagcgtgcgtgaaccggcgaatatttagttcgaattgttcgattgcgatggctaggaagatgcttatcgacggtgaagctgaaattgctcaaggtggtggagaagaagtgtcgaattttgatttcgacttgtttattattggggctggaagtggtggcgttcgtgccgctagattttcgtcgaattttggagctaaggtggggatttgtgagcttccatttcatccaattagctcagaaacaattggaggagtcggtggaacgtgtgttattcgtggttgtgttcccaaaaagattttggtctatggagcatcttttg

SEQ ID NO: 23362 - DNA, 421 bp, Glycine max
  Clone ID: LIB3106-022-Q1-K1-C10
attctgtatgatatttacgtttacggcgtgtgataaaaagatactatatagaactagagggagattcccgtttcagttacattcaattcaacgattgaccaaaagagaattcaaaaaataacatttagatcacccaaattccaatatttctatgaaacaataattaaatctaacgaatttatttcgattgattgtatccatatggggtaataataaaagggggaggagagcttaaaaaaacaagataacaaataaagtataagtgcggggggtcaaactgggtgtatataatcggatcactataagacaactctttcttttgaggtttcaaagaatgattttcgaattcgattgaatctaaaacacataagaattggtttacaggaataagggtaaaaaaaagggttaaaaaaaacccacg

SEQ ID NO: 23363 - DNA, 268 bp, Glycine max
  Clone ID: LIB3106-022-Q1-K1-C11
taaaaaaaaaaaaaaaaaaaaaaaaaaaaaaaaaaaaaaaaaaaaaaaaaaaaaaaaaaaaaaaagaaaatttaaaaaaaaaataaaaaaaaaaaaaattaattattttatttttctatttttacattcttttttattctatttttttattttatattttttttttttaaattctatttaattctctttatttttctcaacttttttaactttaaaatttctttaaattttttaattttttttcttcttttttttctttatttccttt

SEQ ID NO: 23364 - DNA, 387 bp, Glycine max
  Clone ID: LIB3106-022-Q1-K1-C12
aatcttacatattctctctctctttctctttctctttctctctctcttaagttctgagaagaagaattcataggactagtctttcactccagagattccattcaatcgctgttcttaatcactctttcatctttcagtctcacacccaaaagaaaaaaaatgttttagtttcataagggttggttctgacttgaattaggatctgattcaaagagaggaatggagggtggctcattcaatggtgctcagattgatgccaagatcatgcagacatttaagaagaactttgttcaagtgcaggacatttttgatcagaacaggctactcatcaatgagataaaccagaaccacgagtctaaggtccctgataacctcaccaggaatgtg

SEQ ID NO: 23365 - DNA, 421 bp, Glycine max
  Clone ID: LIB3106-022-Q1-K1-C9
cccacgcgtccggaaaacctaatttctcaaatttgatttcgcaccaaattttcctcactaaaatgtctggtcgtggaaagggtggcaagggtttgggaaagggaggtgccaagaggcacaggaaggttctgcgcgataacattcaaggaatcacgaaacctgcgattcgtaggttagcgagaagaggtggcgtgaaaaggatcagtggtttgatctacgaggaaaccagaggagttctgaagatattcttggagaacgtgattcgtgatgctgtgacctacactgagcacgctaggaggaagacagtgactgctatggacgtggtttatgctcttaagaggcagggaaggaccctctacggttttggaggctgaacaattctttttttttttgggggggcccccttttttttgtgctccta

SEQ ID NO: 23366 - DNA, 364 bp, Glycine max
  Clone ID: LIB3106-022-Q1-K1-D10
cccacgcgtccgggaaaaagaaacacaaactataatcattagctagttaatgctttcaccaagcacgacatattgatgatcaactaacctggatgccagtttccaatgctttttatttttgacagatttctttgtatgagttcttttctccccccctctcaagagacccgggggctgggttgcttcagaaaagatttaaaactctgttcatcgatcatataattgttacatattgttcattggacatttaatgttaatgtatcaggatcaaaacggtaatttagtatgctcggtaaatgtacacctatgtatttgtaaagggatcgtaacatttgagttctgaatgaaaaaggtgggatgattc

SEQ ID NO: 23367 - DNA, 417 bp, Glycine max
  Clone ID: LIB3106-022-Q1-K1-D11
cccacgcgtccgcccacgcgtccgcccacgcgtccgcccacgcgtccgcccacgcgtgcgtctgtctctctctgcggcaactaaaaaacttaaccctcatttcaatcgcagaaaccgatccaaacacgaatgcaacacacactctcttcgtgactcagatcctgtgccgattcgatcggagagaaagctagctagatatagcttatagggaatggaattcacaagatgaagttctatgtatctgcaaaggggataaagagagtcgtcgctggaaaaggatccgccaagaccactgctcctgcctacaccgttgccgctcgccggatttccaaccggatggtggtggtgctcggaatccgaatgctgctcagctttgtgagaatggcgcgggggttttttttttttttgggggggtgc

SEQ ID NO: 23368 - DNA, 422 bp, Glycine max
  Clone ID: LIB3106-022-Q1-K1-D12
tctgactctcactctttcgcaccatcattctatctgctttattacactacctatattggaaaagtgtacttaagaacccgcgacataacatagctgaatatgtagaactacgcatctatagaccaaatcattgtatgacactaacatgaaaaaatacctgattccattgatggatatatttttcttgatctattatacaaacccattgtgctatcttgtggtcacaatgttctgatactggtgtgtctataattcaatgaattgtctgctgtagtctcaatgtccattatgtataaatcaatactatcactttccaacaatttgctcaattgcttcactttttgcttcttaagatctataccgttgcttacaaatataaagtaaagccatttaaaaccctttttttctttttttttttgaaa

SEQ ID NO: 23369 - DNA, 420 bp, Glycine max
  Clone ID: LIB3106-022-Q1-K1-D9
agcacaaaggatcctggccagaacccattcactttcaaaatcggccaaggttctgggatcaaaggatgggatgaaggtgtgcttggcatgcaaattggtgaagttgctcgtctccggtgctctccggattatgcttatggtgctggtggctttcctgcttggggaatacggcccaactctgtcttggaatttgaaatcgaagtcttaagtgcgcaatgaaaaccttggtagtctgtctctgtcctaaagaataaaattcttccattttcatggacttgtacaatggtatccccacattgtgacttgtgggtgatatctacagtggttgagttgtccaagtgaaatactaaataactttctgaatgatctcaaactctctaatattttaaaattttaaattttttttttggggggtagcct

SEQ ID NO: 23370 - DNA, 390 bp, Glycine max
  Clone ID: LIB3106-022-Q1-K1-E10
ggattcccgctcgaccaggcgtccgtccacgcgtccgaattctctcttattttctttgttattacctctttccaaagtccaggttttggagttccaccaaaccgaaccaaaccaaaatggcagcagcctcagcctcatccatgatatcaacaccagccttatctccaaccattcaaaagcaccatcatttgaagccattcaacgtgtgcttccaaggtcttagacccctcgcaaggtttcaccaaagccttatcaaccaaagtgagcaccaccaccaaaagggttattccaaagggtggtgttagagctgaacttaactcaacccttgtgataagcctcagcacttgcctctacctctttttgggaaggtttgtgttcttcaactttcaa

SEQ ID NO: 23371 - DNA, 415 bp, Glycine max
  Clone ID: LIB3106-022-Q1-K1-E11
gctttcctttgtaagttgtaagcatttggcaccagcaagccctgtcttcttcttcgatcagagtagggcatttcatttctgcgatggccgcagcacccgctagagctcgtgccgattacgattacctcatcaagcttcttcttatcggcgacagcggtgtctggaagagttgtctgcttttgagattttctgatggctcattcacaaccagttttatcaccaccattggtatcgattttaagataagaaccattgaactagacggcaaacggattaagttacaaatctgggatactgctggtcatgaacggtttcgaactattaccacagcttattaccgtggagccatgggtatcttgctggtttatgatgttactgatgaaagttcctaaattttttcccttttttttttttc

SEQ ID NO: 23372 - DNA, 380 bp, Glycine max
  Clone ID: LIB3106-022-Q1-K1-E12
gagataactagaaacagtgttatgaaaatgaaggtccttgttttcttcgtggctacggttttggtagcatggcaatgccatgcgtacgatatgttccctctccgaatgaacactggctatggtgcccgtactccggaggtgaaatgcgcaagttggaggcttgctgtggaagcacacaacatctttggctttgagaccattcctgaagagtgcgttgaagcaacaaaggaatacatccatggcgaacaatatagatcagactccaaaacagttaaccaacaagcttacttttatgccagagacctcgaagtccatcccaaggacacatttgtgttcagtatagatggcaccgtactctctaatattccatactacaaaaa

SEQ ID NO: 23373 - DNA, 380 bp, Glycine max
  Clone ID: LIB3106-022-Q1-K1-E9
cccacgcgtccgagaaaatacacattacattactaagtctttgttcatttgagtaggggtgatggctagcctcaaggttgcatgtgtggttgctgtgatgtgcatggttgtggtggccatgagtgctgcacccatggcacaggccgcaatcacgtgcgggcaggtcgccggcgacatgtctccgtgcttcagttatcttcgaagcggcggaaaaccgtcgcaggcctgctgcaacggagtgaagtccctcagcagcgcggcgaataccaccgcggaccgtcagggggcgtgcagttgcctgaaaaaccttgccaataatatgggacagagtttgaatgccggcaactcattctttctccctggcaaatgtggcgtcaaca

SEQ ID NO: 23374 - DNA, 366 bp, Glycine max
  Clone ID: LIB3106-022-Q1-K1-A9
aggccacgcgtccggccatctaaaatgaataatcagaatggtttggctgctgatctgaaaggcaagaaacaaggggaaaagcggaagcagaacttttattctgaagagagcttacaaaatatagatgaagaaattaaggaggtgagagaaaaagaggcagttggcagctcaaagatagacaaagcttcagagcattcaccctcgaaatcaacaaatcgaccagatgattttgtttacccagacgcagagttcagtgactttgacaaagacaagaaagaagggtcttttgctgttgggcagatttgggctatttatgatactatagatggtatgcctaaattctatgctgtaatcagaaaagttttc

SEQ ID NO: 23375 - DNA, 247 bp, Glycine max
  Clone ID: LIB3106-021-Q1-K1-G4
aattttgtacttcttaagagttttcaaacatgttattacctttcctttaaaaaaaaagagagaaaaaaaaaaaaaaaaaagaaaaaaaaaaaaaaaaaaaaaaaaaaaaaaaaaaaaaaaaaaaaaaaaaaaaaaaaaaaaaaaaaaaaaaaaaaaaaaacccaaaaaaaaaaaaagggggggcccttttaaagggcccaagtttaccaacccgggcctgccaacttaaaaccttttttagggggcc

SEQ ID NO: 23376 - DNA, 315 bp, Glycine max
  Clone ID: LIB3106-021-Q1-K1-G5
cccacgcgtccgcttaagtacactcctgttttaactatagaatacattgttgacatgagcgtgcttatgattggtgattgggacgacttcagttccgacgacacgtaacatgcattctaattccgtaagtaacaaaggtctaccagtgaaagagagagagactgataccatgagaaccaactacgacttcatgaattacaaaggattcatggactatgggttcaataatgatgaactacgagcctgaggcgcttccaaagtaccaagatcatgtagcgtggcgacattgcaagagtcggaaggtgttggcgacaa

SEQ ID NO: 23377 - DNA, 271 bp, Glycine max
  Clone ID: LIB3106-021-Q1-K1-G7
cccacgcgtccgggaggagctggtggtgattgtggtttaggtggtggatatggaggaggggcaggaggtggtggagttggaggacttggaggtggtagtggtctaggtggtggttatggatgatgaagtggtctatgtggtggaataggtggaggcatttacaaatgaataggtattgtaggaagcatttacataggaattggaattggatgaagcatttacaaaggcattgttgttagtgtagattctataattagtgattttattatta

SEQ ID NO: 23378 - DNA, 426 bp, Glycine max
  Clone ID: LIB3106-021-Q1-K1-G8
atggtgtacttcttaagagttttcaaacattttattacctttcctttaaaaaaaaaaagaaaaattaaaaaaaaaaaaggaaaaaaaaaaaaaaaaaaaaaaaaaaaaaaaaaaaaaaaaaaaaaaaaaaaaaaaaaaaaaaaaaaaaaaaaaaaaaaacccaaaaaaaaaaaaaagggccccccttcaaaaagacccaatctttcccccccctcctttccaatataaaaccttttttttcgggcccctaaattaaattcaatggcccccttttaaaaaccttcatacctgaaaaacccttccctaccccaatttaatcccttttcaaaaaaacccctttttcccattttgccataatcctaaaatcccccaacctaatcccttttcaaaacattttctcacccaaatattctaattgaacccccc

SEQ ID NO: 23379 - DNA, 405 bp, Glycine max
  Clone ID: LIB3106-021-Q1-K1-H1
actacgcgtacggatgtttaagatataactttttccatgtgactatctaataatgaaggggtattcttaaagtacttcgtggatatgttccttgtgttctataaatgagtggatgtgaaaaaacttttttgttagtaaaaaaaaaaaaaaaaaaaaaaaaaaaaaaaaaaaaaaaaaaaaaaaaaaaaaaaaataaaaaaaaaaaaaaaaataaaaaaaaaaaaaaaaaaaaaatatgggcatccgttttaaaggatcaaaggttacttacgcatctatctaactaaaaatttcttatttctgggttccttaaattaaattaactttgccagtttttataactttcaaattggaaaaaccttactcttacctaactaaatacacttgcaataaatctacttttcg

SEQ ID NO: 23380 - DNA, 258 bp, Glycine max
  Clone ID: LIB3106-021-Q1-K1-H10
cccacgcgttcatctacactttctctatactaaactgattttttattaacattatagggattactaatagatattcttcatctataaatcgcattgaattttaccatatctctgagatacttttcataaataactatctaataactactttgattttattccgattcatatataagtcatactaagtaacaatctttttacatttttagtaccatttaatatcacaaatgtcatgatccaaaaacatttacttttgct

SEQ ID NO: 23381 - DNA, 427 bp, Glycine max
  Clone ID: LIB3106-021-Q1-K1-H11
cccacgcgtccgggggggcaaaaggggtcacttttcagatccgagattgagctcctggacccatcatcatcatggagctcctcgggtacctgaatcagggtcacccttctagaggaacaacacttgttattactctttcattggtgctttcgacacttgtgtccttctccactttcacacatgccttctcttcttctgcgtttccggaactgaatcctataaaacctaggcactcacgtcttctcaggagtgccgtgcaacatgaaactcctacatcacagctttctgaaatatggtcacctctggaaagccaaggatggaaaccttatgttgaatcaaataagccaacattaccagagaagtccgagggatatatccaggtctttcttgatggaggtttgaaccaacaaaggatggggatatgtga

SEQ ID NO: 23382 - DNA, 326 bp, Glycine max
  Clone ID: LIB3106-021-Q1-K1-H12
acccacgcgtccggccacgcgttcgcccacgcgttctcaattataagctgattttttatcaactgaatggggatgactcaaaggtgttgtgagcgatacaaccggtgcatcagaagcatgtcctgcgcgtcttagttcagagactctacctgacaatactatcaagatatcgggattcctacacaacagaggacaagctcactgggtctgtctctaaactaccgcttaatatagggaatgccctgatccaaatacgttcacttttgcttgtggagcctgagccgcaggcaactgtgactcccttcacgctctacgatttatcgcct

SEQ ID NO: 23383 - DNA, 477 bp, Glycine max
  Clone ID: LIB3106-021-Q1-K1-H3
cccagcgcgtccgcccacgcgtccgatctgtttaaaacaacaaagagggatcctcaaactcgtataacagcagtgatgctagcgcagaatggctctaacagcaatgaaaatgcaaatgacaatgggaatgctagtcatgaagcacaaaacaatgctgatgcgggacagggcaacaatgaggccactgttgagagtaaggcaagtgaaaatgaaggtggtgctcaaaacgaaacagtggagtcacaaaaagaggaggaatctgcacactccggcggagatagcaattctaacttgaatgatcaaggaagttctgatcattcaatcactcaggaggataaagaatctcgcgtggatttgggaactctaccacaatccaatgcagaaaacaataacattgaggttactgctgctgagtgataattcagatagagtaattgtatcaagcttcttttgatcctacttctttttttctatttt

SEQ ID NO: 23384 - DNA, 445 bp, Glycine max
  Clone ID: LIB3106-021-Q1-K1-H4
cagacgacaggttcaaaccggagcaaacattcttgttacgatggattcttccgacaagggggcactagaggaagtccttgaagcatggtacatggatgatagtgatgaacatcaaagacttccccaccacaaagaaccctacgagtttgtgtcgtagaaccaacttgctgaacttggagtccttagctggaaattatatgctgataaccatgaacatgatccacagctgaaaaagattcgtgaagagcgtgactacacctacatggatgtttgtgaggtctgcccagaagagttgccaaagtatgagcagaaaatgaaagacttctttgaagaacatcttgacactgatgaggagatccgcttatgtgctgctggaagtgggtatcttgatgctagggattgcaatgatgcttgtattcgagcgttggacaagaaatgatgaatg

SEQ ID NO: 23385 - DNA, 426 bp, Glycine max
  Clone ID: LIB3106-021-Q1-K1-H6
cagaggactgcgcccactcgtacggcgctttattatccatttctacaatttggcaaatcgagcagttgagaggggagctggttcatatggtcagaagatatcttacacccttatcaagcatcgtatgggagatctgttctaccgattagtgtctcagaaatttgaggatccagcagaaggggaagctgctttggttgctaaatttcagaagttacacgaggacctgactaatggtttccgcaaccttgaggacgaaacccgatgattgaagatttggtatggtagtttgctcaaataatgtgttatttccaattgtaagaggcagtctagcatcgcagggttacaccgtcccgagtgttcttatatttgactgtttgattcattcatatcacatttatttccttttttgttgctggtttggctttt

SEQ ID NO: 23386 - DNA, 432 bp, Glycine max
  Clone ID: LIB3106-021-Q1-K1-H7
aaaccctaaatctctctcgtcttcttcttcttcttcctccttcaaccatgagagagatccggcacgttcagggaggccaatgcggtaaccaaatcggttccaagttctgggaggtgatatgcgacgagcacggcatcgatcctaccggaaagtacaacgacgaaggcaacagcggcatccaactcgagaggatcaatgtctattacaatgaggcctctggcggaaggtacgttccgagagccgtgcttatggatctcgaacctggaaccatggacagcatcagatctggcccctacggcaagatcttccgccctgacaacttcgtcttcggccagtccggcgccggtaacaattgggccaaaggtcattacaccgaaggcgccgagctgatcgactccgttctcgatgtcgttcgcaaagaggctgaaaact

SEQ ID NO: 23387 - DNA, 455 bp, Glycine max
  Clone ID: LIB3106-021-Q1-K1-H8
cccacgcgtccgcccacgcgtccggcgcaacattatccatttctacaatttggcaaatcaggcagtagagaggggagctggttcagatggtcagaagatatcttacacccttatcaagcatcgtatgggagatctgttctaccgattagtgtctcagaaatttgaggatccagcagaaggggaagctgctttggttgctaaatttcagaagttacacgaggacctgactaatggtttccgcaaccttgaggacgaaacccgatgattgaagatttggtatggtagtttgctcaaataatgtgttatttccaattgtaagaggcagtctagcatcgcagggttacaccgtcccgagtgttcttatatttgactgtttgattcattcatatcacatttatttcctttcttggtgctggtttggcttttgatctagtctcatgtgtagctataatcat

SEQ ID NO: 23388 - DNA, 147 bp, Glycine max
  Clone ID: LIB3106-022-Q1-K1-A10
tttacactctcttcaacctaacgcagcatcgctatacgctccattccatggctttgcgcatggagcaaaccgtggattgccctagcttcacactcactatggtcagcgatggtggcacatggaagacaacctttgtgaataggcata

SEQ ID NO: 23389 - DNA, 352 bp, Glycine max
  Clone ID: LIB3106-022-Q1-K1-A11
gaaagtgtctgagagtgtgtgtgacttatggagtccaattcagagttcgacgtgatgatcatcggagctggcgtcatgggcagctccaccgcctaccacgccaccaaacgcggccttaaaacccttctcctggaacagttcgacttcctccaccactgtggctcctcccacggcgaatcccgcaccatccgcctcacctatccccaccactactactaccctttagtcatggactcttaccgcctctggcaagaggcgcaggcccaagtcggctaccagatctacttcaaggcccatcacatggacatggcccatcacaacgagcccgccatgcgcgccctcatcgactact

SEQ ID NO: 23390 - DNA, 316 bp, Glycine max
  Clone ID: LIB3106-022-Q1-K1-A12
gctgatatcacctgggccaggagaacctcaagattcaggcatatctttgcaaacggtgttggaacttggaccaactgtgccattgtttggtgtgtgcatgggtttgcaatgcattggagaggcttttggagggaagattgttcgttctcctcatggtgttatgcatggaaaaagctctatggtttactatgatgagaaaggagaagatggattacttgctggactatcaaatcctttcttggctggtagatatcacagccttgtaattgaaaaagaagctttcctcatgatgaacttgaggcaacagcattgacag

SEQ ID NO: 23391 - DNA, 463 bp, Glycine max
  Clone ID: LIB3106-021-Q1-K1-G3
cccacgcgtccgcgtcgctccgcaccagtttcaccgcacgaatatcttgttgtttggagcgatccgagaaaaactctgtaaacatgttggtttaccaggacctccttacaggtgatgagcttctctctgactccttccgttacaaggaaattgagaatggaatgctgtgggaagttgaggggaagtgggttgttaaaggagcagttgatgtagacattggtgcaaacccttctgctgagggtggaggagaagatgagggagttgatgatgcagctgttaaggttgttgacattgttgacacattcagacttcaggagcaacccgcattcgataagaagcagtttgttaccttcatgaagaggtttatcaagaatttgactcccaagctcgatgcagagcaacaggagttgtttaagaagcacatcgagggagcaactaaatacctgctctctaagattaaaga

SEQ ID NO: 23392 - DNA, 362 bp, Glycine max
  Clone ID: LIB3106-021-Q1-K1-E6
atcacttgtgcgactgtgcgttccgtagtttatcatgatgcttcaccacatatgtacagggcgtgctcaacgatcgcaggtgctgctgccagtggatccgcaggtggtactaggggtggacttttcagaacacccatttctggtggcgagcatagagccacctaagctcacggtttacctagaccgcctttagcagtacggaattttatgtagcacgagagatttggtcatttgtgcactgccatgtgttgtatgcaccacctaccaccatgatctgcatttggtactctggctgatggttgaccatactcatcgagtcatacaatatctggatcatcaccacttgttacttacacaccgaa

SEQ ID NO: 23393 - DNA, 471 bp, Glycine max
  Clone ID: LIB3106-021-Q1-K1-E7
cgcacgaacaccaccatgggcacaagagtcttccctcccgttgcccttctcctctcctgcggcctcttactcctcaccctgtgacgcgcccgcgatctccccaaccctttctcccaacccaaacctcactccgaacctaaaaccgtttcgttcacgatcgacaccatcgatcccgttccgctgacgctcctccgcttccgtccgatcaaccgccacttccagcccggccgtccgttgccgctgtcgctccgcaccggccaccgccgttgccgccaccgccgcgagatcccctacggcaacgacgcaatcctggtcggcgacgccgctgccgccagtcggatccatccgcgctgggttaggcttcactccgccgccgagacgcggtttccgggcgacggtggagaggcaggattccgatcacgatcatgatcacgagcaccaccaccaacaccacggcgagcgccaccacca

SEQ ID NO: 23394 - DNA, 89 bp, Glycine max
  Clone ID: LIB3106-021-Q1-K1-E8
ctcagacattcgagtctatgctggtccgttttagctacgcagtgcttagattagtacaagatattcttacatcctgggcgggccgatat

SEQ ID NO: 23395 - DNA, 335 bp, Glycine max
  Clone ID: LIB3106-021-Q1-K1-F1
cccacgcgtacgaaacagtgatcgtgacctttggctcagatatcggtcatattatccggggttgatatatagatcgtagcacccgcttctctcaaatgtactaggggcatttcaagctcagttaatttatcaaaatgtgctacatatttttttattaaaattttattctgcagaattacatacatgatgtcagggcgtttgtaagttgaattcttcctatgttgataattaatcagttttatacttgagaacccttttttaaaaaaaaaaaaaaccaaaacaagaactaatacaaaaagatcaacatacttaataaataacttcaataaaaacag

SEQ ID NO: 23396 - DNA, 325 bp, Glycine max
  Clone ID: LIB3106-021-Q1-K1-F10
cgacgcgtccgcaagaatactcatatttatatagtggctagcatagagctagtaatgatattaatattggtaagctagctctaagccatggctaatgaacgtgatctgttctcggcggagattgtgaaccgtggaattgaatcgtcaggaccaaacgctgggtcgttgacgttttcggtgagggtgagaaggcgcttaccggattttcttcaatcggtgaaccttaagtacgtgaaattgggttaccattatctgataaaccatggcatatacttgttcaccataccggttcttctcgtggtgtttagtgctgaggttggaagcc

SEQ ID NO: 23397 - DNA, 375 bp, Glycine max
  Clone ID: LIB3106-021-Q1-K1-F2
tccaaacattctgatgaacatgaacgagcttgtactgttcattgatgcaattttggtaggatgtccatgccatgcgtgcgagatgaaacctttccgaatgaacactggctatcgtgcccgtactccggaggttaaatgcgcatgttggaggctggatgtggaagcacacaacatattgggctttgacaccattcctgtagagtgcgttgatgcaacaaaagaatacatccatggcgaacaatatatatcagactacaaaacagctaaccaacaagcttacttttatgccagagacctggaagtccataccaaggacacattagcgttcagtgtacatggcaccgtactgtctaatattccatactacaaacaaca

SEQ ID NO: 23398 - DNA, 412 bp, Glycine max
  Clone ID: LIB3106-021-Q1-K1-F3
cggaaaaattcacctctccaatcccaatcctatcgttgcaaatgatccgattcattctgttgcagaacaggcagggcaagacccgtcttgccaaatactacgttcctctcgaggactccgagaagcacaaggtcgaatacgaggttcatcggctcgtcgtaaacagagaccctaaatacacaaatttcgtcgagtttcgtacgcacaagataatatacaggcgatatgctgggttatttttctcactctgtgttgatatcactgataatgagttggcgtatttagagtgcatccatttgtttgtggaaatattgcatcacttcttcagcaatgtctgtgagctcgatttggtttttaactttcacaaggtctatcttatacttgatgaattcattctagcgggtgaactgca

SEQ ID NO: 23399 - DNA, 437 bp, Glycine max
  Clone ID: LIB3106-021-Q1-K1-F5
cccacgcgtccgcccacgcgttcgaaaccttgtctacctacgtagcttctctcgcactgcgaacccttactcttcgaactggacaacctctctgaacttcccaatgcttcttctagtccctctacctcacccctaacttcaaacccatttccattttcgccgtttttctcaaaacaaccctgtcttcgtcttcggcgttgtcgctgtcgactcgcttcgttccccatgtctatgtgtttgaacacgaggaggacactctttgcgacagagtactgccccagcttctaccgcgaccttaagctctttgtcaggaatctccccttcagtgtcgacagatcgcggctcgcttagctctttgagagtgctatgaatgtgtacgtcgttgaggttatttattataagactactgtgatgagcacaagcgcttggttttttac

SEQ ID NO: 23400 - DNA, 466 bp, Glycine max
  Clone ID: LIB3106-021-Q1-K1-F6
tccacgcgtccgcttgtgcttttcctagccctcactgatcattcaagtgctctttattggttatgcaaagatggtgtgagtgatcaaacccttcagaaagcaatagattatgcttgtggaagtggagctgactgtacccctattctccaaaatggagcttgttaccaacccaacactgtgaaggatcactgtaactatgcagttaatagctattaccagagaaagggcaatgctccgggaacctgtgattttgcaggtgctgccacaaccaatgcaaatccacctactgcatcatctggatgcgtctacccctcaagtcctagcaatacaggaacaacaccatctattggttcaccaccaggcacaacaccatcaacaggtggtacaactccagggacaagtacaacacccaccacatttggaatgagtccaacatctacaactggtatcaacaatgacaatggag

SEQ ID NO: 23401 - DNA, 419 bp, Glycine max
  Clone ID: LIB3106-021-Q1-K1-F7
cccacgcgtccggtactctacactcacgcgtcaagcatataaaacattgtggctatatgggggcttctggtatgcagttcatgcaacacaagatacagggacacctaactgcagtactgatctccgacgaggctgctgatggtgatggaaagagtgatagacttgaagcaggagatcctgcttttgctggacaaatagcacgtgataggcaaaggatggtttataaagctatatagtacgaacttgagactgtagcaaatgctgaagatcatatgactacaagacactgctgcagtagcaaacgggtagtagtcaaagatcatgataacatacattgactactcatacatggcggatatctacgagtgtttgtgctctgtataaaataaaggattgatggtgaaatatgaatgaaattc

SEQ ID NO: 23402 - DNA, 442 bp, Glycine max
  Clone ID: LIB3106-021-Q1-K1-F8
aacgcgcatacaccagcacgtcacggactttacgacatggagccctgcggtgaggctgggccaggtggagtacgcgatggaggcggtgaatcagggctcggatgctatagggctcccatccaagacccacgtggtcctcgcatgcgtcaacaaggctaactgcgaactttcatcgcaccagaagaagatcttcaaggtcgacaaccacatcggcgtcgacatcgtcggcctcaccgacgacatgtcgatcctctcccgctacatgcgatccgagtgcatcaactataactacacctacgagtcaccgttccccgtacggagactcgtcgttcatctagccgataaggctcatgattgcacccagcggtcatggaaacggtcttatggaggtggactcctggtagctggattagatgaatcgggagcttacctctattacaac

SEQ ID NO: 23403 - DNA, 449 bp, Glycine max
  Clone ID: LIB3106-021-Q1-K1-G1
cccacgcgtccgctacactacactcctgtgttgagcatagaagacattgctgggatgagggggtttctggatggtcattgagacgacgtcggatccgacgacacgtatcatacatactaatttcgtacgtaacaaacgtctttcctagaaagagagagagacggagaccatgagaaccaacttcgacttcatgaatttcaaaggattcggtaactctggttccgataatgagttagtccgagcctgaggcgcttacaaattccgaagttcatgttgggtggcagacattgcatgagtcggaaggtgttggagacaaagaacgtgctttcagttgccgtgttataccacatgcaccataataagccactcattgttagcgtatattaataaaggattgactgtgacatcatttaattattattggttgagtttatattattgctctcgtg

SEQ ID NO: 23404 - DNA, 333 bp, Glycine max
  Clone ID: LIB3106-021-Q1-K1-G11
cccacgcgtgcggtgaacttatggctgtcggcgtggttctgttggatacatgggccagcatgtttgggatgaggattaagattgcattacctgaaaagggtgttgcgtatgaatacaaggaataaaatctaatgtacaagagtcctttgcttttgcaaatgaacccaatatacatgaaaattccagttctgatccataatggcaaaccaatttgtgaatctgcaattatagtgcagtacattgatgaggtctggaatgataaagctccaatcttgccctctgacccttatgagagagctcaagccagattctgggtagattacattgacgaaa

SEQ ID NO: 23405 - DNA, 337 bp, Glycine max
  Clone ID: LIB3106-021-Q1-K1-G12
cccacgcgtccggagaacgcatgcgtgcacaccacaattccacaacatgtttttcactgccgctacaggggtagcttcctagatttcttcttctattaacagtgtcaaatgtcttcgttcctccaagaactgctccattatatacccccttataaccacattgccctcaaaccgtggcatgtttgtgtcacacttagtggaacctttgtccattgggggtgccattaatacgcacaaaatgtgggggcctataatttctgctgctgtcgcacaagaagatgctcgttgcgtagctgatgatgaagtaaatgatggtgctgttttagctgaaaaatag

SEQ ID NO: 23406 - DNA, 336 bp, Glycine max
  Clone ID: LIB3106-021-Q1-K1-G2
cccacgcgtccgaccacgcgtccggcaaattatgatgttgcaatatcaacagcatgccagagacttgattatattgtggtggaaacaactaatgtagctcaagcatgtgttgagttacttcgtagagagaatcttggtgtcgctactttcatgatattggtatttttttattctttatattaatcaactcgtttttgtctctaaatggctgtttaatattttgaatggcatgaattaaatatgttcacttttacttctggacccttggatttgtataactgtgactgagttcatgctctacgatatatttgctaatttaaggacatgttggtataa

SEQ ID NO: 23407 - DNA, 413 bp, Glycine max
  Clone ID: LIB3106-021-Q1-K1-E5
cccacgcgttcgcccacgcgttcgaaagcttttctacctccgtaacttctctagcactgcgaacccttactctgcgtgctggacaacatctgtgctctacccaatgcttttgctcgtccctgtccctaatccctaactccaaacccatcaccattgccgacgtctacctcaaaacagcgctgacgacctcgttgccgacgtcgctgtcacctctatctggtacacgtgtctttcgttcggaacaagaggaggacaccttaggtgacagcgactgccccaccttattcccctaccttaagctcttttttgccaattttcacttcaatttcgacagtacgctgcttgagaagctcttcaagagtgccgtgaatgtgcatgaggttgatgtcttcaatgactagactactgtgatg

SEQ ID NO: 23408 - DNA, 463 bp, Glycine max
  Clone ID: LIB3106-021-Q1-K1-C8
gtgagctataagctagtttatcgtgaggtgtattatgaagttgtttgttttctttgttggggcagtagttttggtagcatggccatgccatggcgcaggctaccaaaggttccctctccgaatgaaaactggctatggtgagcgttcttcggaggtaaaatgcgcaagttttaggcttgctgtggaagcacacaacatccgagcctttaaaaccattcctgaagagtgcgttgaaccaacaaaggactacattaatggcgaacaatttacatcagactctaaaacagttaaccaacaagctttcttttatgctagtgaacgcgaagtccatcacaacgacatatttatattcggcatagataacaccgtactctctaatatcccatactatgaaaaacatggatatggggtggaggaatttaatgaaaccttatatgatgaatgggttaacatgggcgactca

SEQ ID NO: 23409 - DNA, 408 bp, Glycine max
  Clone ID: LIB3106-021-Q1-K1-C9
acctccggacacacgcgcgcggacggctggcgctcttggcaggagctttactcccttatgtgctggggttcttaaggtcttccttactttttgcttgctgcacccatgcctactcccaggcacctcctccaattgtggatggactttcatgggatttctataggacgagctgtcccatgcttgaagggatagtgagcaagcatctccagaaggtgttcaagaaggacaatggtcaagctcctgccttactcatgatcttcttccatgactgctttgttcagggttgcgatgggtcgatatcgttggatggaagtccaaatgaaaaggatcaaccggcaaacatagggataaggccagaggctttgcagaccattgaaaatctttcaactcttgttcacaagcagtgtg

SEQ ID NO: 23410 - DNA, 351 bp, Glycine max
  Clone ID: LIB3106-021-Q1-K1-D1
cccacgcgtacgaggaagaccaataaagtttttacctacattgtttgcaacggtggacggggacaatgcatgcaggtgtgggctcaaattggcacgaagaaaagcgagactctatgctacttgccagacctagaagatgccaagttgtcaaaggaagtcgaataccttcaacggacaggatggacttcttgcttggaattcaagctggagcactgttacgtgcaccgggagtacaacaggtcacctggatactatgatggacgctactggaccatgtggaatctgtctatgtcgggctacactaatgcttcataagtgttgaaggaccttaaagaagctacgactgcatac

SEQ ID NO: 23411 - DNA, 414 bp, Glycine max
  Clone ID: LIB3106-021-Q1-K1-D10
attccatccgaatttgaataaaaaacataagaaaagaaaggtgacggggcaaagtgagaataatagctttcttctccgtctcaattcatctcttctctgagtctcaacctaattccccaatcaatcatctttacgtgtttgttcgagaccatggccaaaagccccttcaagcttgaacatcccttggaaagaaggcaggctgagtctgctcgcattagagacaagtatcctgatagaatacctgtgattgttgagaaagctgaaagaagtgacatcccagacatcgataagaagaagtaccttgtcccagcagatttgactgttggccaatttgtttatgttgtccgtaaaaggattaagttctggctgtacttatgaaccgaatctcttgttgcagccgctttgatgtcttct

SEQ ID NO: 23412 - DNA, 467 bp, Glycine max
  Clone ID: LIB3106-021-Q1-K1-D2
cccacgcgtccggcttgttgcggggcttctaggagtagagtctggacaagatgcagtttggagagaattgctgtatgaacgtaaagaacagttggtgccaccatatggcgtggccgtggaagagttcacaaaccgcatttctatacttaggagcaagttaggaaatagaggtttgaaagatgaaggcattgttgtgcctacagggctgggtgccgagggcaaagttagaggtaacattcttgctggtgacgtaaactcattggcatattcaaggactccagaagaaatattgaggatagtatatggaagtggtgatgaacatgttcgtggtggcttctatcctaaaggagcaagtggtcacatagctcaatcttacttaaagtaaactacatttattatggacttttatagattatatcacttgtctttaatccattgctaatttcctttgtggtaattaaatattg

SEQ ID NO: 23413 - DNA, 474 bp, Glycine max
  Clone ID: LIB3106-021-Q1-K1-D3
cttcgattctcaggcggatgcgggagcgttcaagacgtatcctcagcaggctggtaccattcgcaagaatggctacatcgtcatcaaatccaggccttgcaaggttgtagaggtctctacgtcaaagacaggcaagcatggacatgcaaagtgtcactttgttgcaattgatatttttaatgggaaaaagcttgaagatattgttccatcatcccacaactgtgatgttccacatgtgaatcgcactgactatcagcttattgatatctctgaagacggctttgtgagtctgttgactgataatggaaataccaaggatgatctgaagcttcctactgatgaggcattgcttgctcagattaaagatggattttctgaaggaaaagatcttgtggtttctgttatgtctgcaatgggagaagaacagatctgttcactgaaggacatcggtcccaaaaattaatatgatgctat

SEQ ID NO: 23414 - DNA, 399 bp, Glycine max
  Clone ID: LIB3106-021-Q1-K1-D4
agacctcgaaggttaggcaaccactagagtattctcatcaagcttcttcgcacaaagtatgtgtgcgtcaaattatgcaattggactagtagaactgaatggattcttaaagaaagtgtaagtcaaggaattttattgtacgactttgtgattgtgagccattatggaatatacaactacacttccattggagatgctattgctgctgcacccaataatacatagcctgaagatggatatttccttgtgtatgttatggagggactctatgaggaatatgtagttatttccaatgaatagaagaatatattgctagttggagatggtattaacaagactatcatcacatggaaccatattgtcatagatggttggactacttttaattctttcaccttt

SEQ ID NO: 23415 - DNA, 394 bp, Glycine max
  Clone ID: LIB3106-021-Q1-K1-D5
cccacgcgttcgcccacgcgtacgcccacttgtccgcttacgtgttcacgcaattatcggggaaacttgcaaagtgtcacggggtcaaacctcatgaatggacagatcatgtacatgatgatgctactgcgcgcgactttgcatgtgttcttctgtattattgaccgtgtagtcgccaacatgaactctgagttgggtacaaagcgctactgtctaaaaggaacaatggcctgcgtcgtaatgccactagatctcagaatgggagatctacttgttcgcggaatgcataaactccggcctgaagcagggcgtcatattgctcgtcgggcaagagggcatgttcatggagcgcctagagagcgagtactccgttcagctgaggatcaaggtcttc

SEQ ID NO: 23416 - DNA, 468 bp, Glycine max
  Clone ID: LIB3106-021-Q1-K1-D6
agcatacaacactaaatatgggatttactcagagagatgtggacttaacaatgtgatgatgtcatggggacacgatgactacatgtatctagtggcaaaggagaatgatactacactgccctctgcggctttgttcattataagataccattcattctatgcattacataaggaaggagcctataagcacttgatgaatgatgaggattttgagaatctgaaatggctccatattttcaacaaatatgacctttacagcaagagcaaaattcgaattgatgttgaaagggtcagaccgtactatctgtccctcattgaaaagtacttccctgcaaagctgaagtggtgaagagttaattggagccatgaagtgccaataatttaccatgatagccaactagtttcgtatggagtagagggaataataagctataaagctgtagttgcattaattaatttatatgcttt

SEQ ID NO: 23417 - DNA, 307 bp, Glycine max
  Clone ID: LIB3106-021-Q1-K1-D7
ctcacgcgttcgcccacgcgtgcgaaagcttttctacatacgtaacttgtcttgtactgcgaacccttactcatcggacgggccgatttcattgttctactcaatgcttatgctagtgcctatgctgatccctaacttcaaactcatttgacagtaaccacgttttctcataacaacgatgaccacttattcgcctttgtagatgcctcctcgtataagcttcccttatcatatttatacaaccagcaaagtacacctatgtgctatcaaacactgcccacagtttatatctctaccttaagctctt

SEQ ID NO: 23418 - DNA, 251 bp, Glycine max
  Clone ID: LIB3106-021-Q1-K1-D8
accacgcgtacgtctgggcgctagtacattttctcattaagcttattcgctcagagtatgtgtacttcaaataatgcaagtgtactagttgaactgaaaggattcttaaagaaagtggaagtcaaggaattttattgtacgactttgtgattgtgagccattatggaatagacaactacacttgcattggtgatactattgctgttgaacccaatcatacataatctgaatatggatatttaccttgtgta

SEQ ID NO: 23419 - DNA, 436 bp, Glycine max
  Clone ID: LIB3106-021-Q1-K1-E1
cccacgcgtccgcccacgcgtccgaaaccatgtctacctccgcagcttctctcgcactgcgaaccctcactctccgaactcgacaacctctctgttctccccaatgcttctcctcgtccctctccctcacccctaactccaaacccatttccatttccgccgttttcctcaaaacaacgctgtcgtcgtcgtcgccgttgtcgctgtcgtctcgcttcgttccccgtgtctctgtgttggagcaggaggaggacaccttcggcgacggagacggccccagcttctcccgcgaccttaagctctttgtcgggaatctccccttcagtgtcgacagtgcgcggctcgcggagctcttcgagagtgcggggaatgtggaggtggttgaggttatttatgataagactactgtgaggagcacggggtttgggtttgtgac

SEQ ID NO: 23420 - DNA, 390 bp, Glycine max
  unsure at all n locations
  Clone ID: LIB3106-021-Q1-K1-E11
cacgcgtccgcaggcnnggagtttttganncgangtttatatatatatatatatggacacatacattgcatgtttatatatatatatgcgtagattattataaaacacatgtaagttttgtgttcgatggtttatatatatagttctctctttcattttagatcttcttcattcatctgttcatcattcagtctgacagttgcgttgattgaatggtgtgacccaaaatatggctcaattgccaccaaaaatttacaaacatgacacccaattggccagacttatcttctcctcaccaaaagattccttacctcaaaaccatgtcacctaaccaaaacccttcaaggattgatgaattatttgaattcttcacgttaagacatggggccc

SEQ ID NO: 23421 - DNA, 337 bp, Glycine max
  Clone ID: LIB3106-021-Q1-K1-E2
ctcaaacgttggactgttcatacgtgcgtgaatgctgatgatgcacacaacttgtatcggtgaagtttaaatagcagaggggatgcttccattgactgcttacatggattaaccctcggagcacttgctttgactattaaagtgctacacagaagacctttatgaacctgttatgcatggagtgacctactgtagagtatggaaatgctcatgctgcaatcgaattaattaatcattgcactgattgctgcagattttgcaaagcctatccaaggtcaacgttgcatttacagagatacagaagaatatactcagtatgtacttaaagttcgtgatg

SEQ ID NO: 23422 - DNA, 295 bp, Glycine max
  Clone ID: LIB3106-021-Q1-K1-E3
cgcaggacctacctcgtgcactccttagtttttgccttcctctactggctctatgactcgtgatacttaattctaccaagggcacttccctgtgatattatatggccttatatcataccaacaataacaatattcctaattatgatttatattagacagactccaatcatccctcttcacacgacactttataagcttccgacctatcaacctatactttctagtatagcgctcactgtcgtgtaattgtcaatccatatatcgtatgtgacggcatcatctagagaaccattac

SEQ ID NO: 23423 - DNA, 430 bp, Glycine max
  Clone ID: LIB3106-021-Q1-K1-E4
ctcggcacctagagacgacgcagggccttttaagcggcgaaatgcttaggcgagtacagggtaagcgtatatccggggattcctgatatacgtgaacctttcggactgctggtgaattcacgggcaggcaagagacaacctggtgaactgaagcatcttagtagccagaggaaaagaaagcaaaagcgattccgagtaatatcggcgagcgaaatgagagcagcctagaccgcgataacagagctagtgcagatctatacaagggtctagctgctagcgcgaagcagcagagaatgctgtgccctagatggcgagagtgcagttgccgaacgcattactagcttacgctctgactgctaatagcatgcatcacgtggaatgacgtgtgaatcagcaaggaccacgttgcaaggctaaagactgctggatg

SEQ ID NO: 23424 - DNA, 296 bp, Glycine max
  Clone ID: LIB3106-021-Q1-K1-C7
cccacgcgtaggttcccgccgatgaaattatcggctacaacatcttgttctgtcctcgggataataacccatgtgggtatggtgcggttcatttcgaccaattccgaaacaggcgtttggtggcgtctgagggtcaagaagattggttatgggttatggtttagaaaccttcataagccttaagagttaccttttcatatgtgtgtgacacaccttttgctctaaagtgatatatatgctcttacacattgtgagacacatgagtgagtctatataagcgctatactctgttttaa

SEQ ID NO: 23425 - DNA, 184 bp, Glycine max
  Clone ID: LIB3106-021-Q1-K1-A7
cccacgcgtccgacaacacgatcaaaaactttttacaaatccataatacttctaaaacagcgttttcaacctaacagtggggatacaactaactataaactgaaacttaatacgcttctactgcatcagcaacaactcaaattttaacgaataaccaactttccaaaacaaacctaaatattca

SEQ ID NO: 23426 - DNA, 468 bp, Glycine max
  Clone ID: LIB3106-021-Q1-K1-A8
gtgatgattatgattctgatactagtcaaattagccacgagactcgtaagaagagcaaggggtttaaggatttctttgagaacttggatggcctatctatcgaaaagatcaatgaaccggaaaggcagtggcactgtacagcttgtcgaggtggtcccggtgctattgattggtacagaggactgcagcctctgattactcatgccaaaacaaaggggtcaaaaagggtgaagatccatagggagtttgctgagcttttggaagaggaactgcgcaaaaggggctctgcagtaattccacctggggaagtatttggtaagtggaaaggtttaaaagatgatgagaaagatcatgaaatagtttggccttcgatggttgtcattcagaatacaaggcttgaacaggatgaaaatgataagtggctaggtatgggtaaccaggagcttcttaattattttaacgcatatg

SEQ ID NO: 23427 - DNA, 420 bp, Glycine max
  Clone ID: LIB3106-021-Q1-K1-A9
cccacgcgtccgcaagtcccaacccgtttaatagaagagaaggatggctgtggtataggagtgtttatggtgtgctcggagtgaccccttcctcactcttgctttacaacgcagaccacttctttgctctgtctttctttcctctcgccctcgtaacctctgctcttcaatcgtcgctgctgcttccaaaatcaaaaacaagcaaaaaaagtctcgtgatcatgttactaaggactatgaagatggcgtggacgcttttgagctgctcttcaagcaactcgaagaagatctcaaacgcggtgatttgtcatacgatgatggtgaggatgagataagtgaagaagacatggcattgcttgaacgtgagtcggaaaatgctttgggggactttgatggtgaatcgttaaactcggatgtaat

SEQ ID NO: 23428 - DNA, 438 bp, Glycine max
  Clone ID: LIB3106-021-Q1-K1-B2
cggacgcgtgggttaatatcatgccctccttctgcatccaaaccttcattttgtagtgcgtgggggtttctcatttgtctgccgttccatggatcgggaaggaggatccaacggcggatcttgctactactccgttctcgggattcgtagggacgcctccttctctgatattcgcactgcctaccgcaaactcgctatgaggtggcacccggacaagtgggctcagaatcctgcaaccgctggcgaagccaagcggcggtttcagcaaatccaagaagcctactcagttctctccgatcagtctaaaaggtcaatgtacgatgcggggctctacgatcctttggaggaagaagaccaagacttttgtgacttcatgcaagagatgatctcaatgatgaacaatgtgaaagacgatgtggacaagttggaggacctaca

SEQ ID NO: 23429 - DNA, 451 bp, Glycine max
  Clone ID: LIB3106-021-Q1-K1-B3
gttgagaactaagaaggagaagcaaatggtttcctcaatgatctcttccccagctgtacgactgtcaaccgtgccggtgccggcatggttgctccattcactggcctcaagtccatggctggcttccccaccaggaagaccaacaatgacattacctccattgctagcaacggtggaagagtgcaatgcatgcaggtgtggccaccagttggcaagaagaagtttgagactctttcctacctgccagaccttgatgatgcacaattggcaaaggaagtagaataccttcttaggaagggatggattccttgcttggaattcgagttggagcacggtttcgtgtaccgtgagcacaacaggtcaccaggatactacgatggacgctactggaccatgtggaagctgcctatgtttggttgcactgatgcttctcaggtgttgaaagagcttt

SEQ ID NO: 23430 - DNA, 417 bp, Glycine max
  Clone ID: LIB3106-021-Q1-K1-B5
acgcgtccgttcactcgcacgaaaaatgggatcctggttttcgacacatctgtattgacatgatcttagtgaagttcgccaaaacggcgtggttgtggttgtccaatggacaagtggcggagattctcgttacctataatgccggcacgagcctcttggctgctcctctgatcctcgcttcatagaaaacaagttacatcctctctgacacattgaacttgaagagtaatactttcgaatgggtgagcgttgagttctctgtcaccaccgatttgcatgaaaggtccgattaaacccatgatgtgatttcttggtcttttgctttcaagttgtcacatggcagcattaatgatgctttgcatcttacaagctttgagctcaatgatgtcatctatcttttaacatcgttgttaaatg

SEQ ID NO: 23431 - DNA, 441 bp, Glycine max
  Clone ID: LIB3106-021-Q1-K1-B6
acgtgcgaaagcaatattgattctttgttgtacagatgtgggcacatgtgcacatgttcaaagggtgctaatgatttgctgcagagtagaagaaagtgtccaatgtgtcaagcaccagtggtggaagtgatacgagcttattctatacaatagttttgacattaaagggtcacacatataacagaatacaagatcctaacaagttctatctcctggacgtttccagcgtattgtttgtaggtttcttaatgaagaaatagccgaatttatgtgacaagtgacggctcagttcacgcttgggttatgtactatctagaaaaacatttttttcccataactatttgacatttcggttttggataaaattgacattttttccttatatattggatatttcttacataaaattaataattttattattaaatttttattttatat

SEQ ID NO: 23432 - DNA, 443 bp, Glycine max
  Clone ID: LIB3106-021-Q1-K1-B7
gttgagcactctaaaggaaaaccaaatggtttgaacaaaggtccatgtaaaataaaataggtgcaattaaaatagcatgggggagccttgctaactatatgtttcctctcctaatgaacactggatatggagcccgttctcttgtagtgaaatgcgcaagttgaaggcttgctgcggaagctcacaacatctttggctataaaaccattcctgaaccaagcgtaaaagcaacaaaggaatacatccttggctaacattatatatcagactacaaaacagttcaccaacaagcttacttttatgccatagacctaaaagtccattccaaggacacatttgtgatcaatataaatggcaccgtactctctaatattctctactatatatatcatttttattgtgtactaaatatcaactctatcttttatgatcaatgctttaac

SEQ ID NO: 23433 - DNA, 56 bp, Glycine max
  Clone ID: LIB3106-021-Q1-K1-B8
cccacgcgtacgacaaaacgaaagttctctttatctgaacccttatgaacacgtta

SEQ ID NO: 23434 - DNA, 365 bp, Glycine max
  Clone ID: LIB3106-021-Q1-K1-B9
accacgcgtacgcacccgcaccggcctcatcctgacgctgcaggagatgggcgccgaggtcgaagtcatcaacccgcgccttgccggcggcgaagacgtggcggacctgcgcgttcgctcctccacgctgaagggcgtcacggtgccggaagaccgtgcgccttcgatgatcgacgaatatccgattctcgctgtcggcgtcgactttgcagaaggggcgaccgtgatgaacggtctggaagaactccgcgttaaggaaagcgaccgcctcttggacgtaggcaatggccttaagctcaatggcctacattgcgatgaatgctagacgtcgctaagtgtgcgtggacgacctgacggctaggggc

SEQ ID NO: 23435 - DNA, 391 bp, Glycine max
  Clone ID: LIB3106-021-Q1-K1-C10
cccgtctggacccacgcgtacagcagcttcggcttgggcacataaacttatagggtactgtgctggggacgctatggggagcccgtggaagaagaagcgtttgaggaggttgtagaggaaccgccgctagatgagacagagatccaagtaacgcgttaaacctagcgcgtgcctgacgcttttacaattgctgataggtgcgcatgggacacaccacacgttaatggcacatggcctctccatgaatgatggttgagacatgatggcggatacaggttcactatatgcggcatatgttattaacgtaactcatcgatatgactcgctactgtcatgagcaataagcatctatttgcgagaaattattggatgggagaacatataacttatc

SEQ ID NO: 23436 - DNA, 465 bp, Glycine max
  Clone ID: LIB3106-021-Q1-K1-C4
cccacgcgtccggcaagtgcttctaaaggactatgttaccggttttcccaaagaatccgggatgaatattgtcgaaagtaccataacattgaagcttccacaaggttccaatgatgtcttgctcaaaaatttgtatttgtcttgtgatccgtatatgaggaatctcatgaacaggcccgaaggccctcccaatagtcgtgcttacactcctggctctccattaataggatatggtgtgtctaaagtcctggaatctgggcacccagattataaggaaggtgatttagtgtggggctttaccaaatgggaagagtatagcttgttaccctcagctcaaatactcttcaaaattgagcacactgatgttccacttacctactacactggaattcttggtatgccaggagtgactgcatatgcaggtctatttgaagtaagatctcttcagaaagagaaaatgttttt

SEQ ID NO: 23437 - DNA, 255 bp, Glycine max
  Clone ID: LIB3106-021-Q1-K1-C5
cccacgcgtccgaaaaaaaaaaaaaaaaattatataaaaaaaaaaaaaaaaaaaaaaaaaaaggaggaataaaaaaaatgggagagcataggaactcctattctatgggtacctaacttccgtgcgcttgcttgcgactccatttttcttctttcgggtcgcctatttttattttattgtccgcttcttgacagctctgttgcttgtaaatccctgccttttcctagcataatgtcccttcagctcatacctctt

SEQ ID NO: 23438 - DNA, 402 bp, Glycine max
  Clone ID: LIB3106-021-Q1-K1-C6
cccacgcgtccgaaaaaataaaaacttcttttataaattggaaaagggactcttcactcgtctctttctctctctgcagatgtacgtcgtcggagaatggcaaagtgtcatcagaacaacgtcggatccatcgctcttgaccaccgccactccgccaaaaatgccaccgccgccggccacttccgcgtgctccgccgcttgatcttcgacgccgtcagctgcggcggcacctctcgctaccggtatcgccagcgcggtggcgatgtcagcgacggcggtgacttcagctcagcggcgtgccacacagagaaggaggagaggtcggagaagctatcggatcttctgaacgccgcggagaataaaatggctgctgcggatgatgagaagaaaaagaagaggcac

SEQ ID NO: 23439 - DNA, 407 bp, Glycine max
  Clone ID: LIB3106-021-Q1-K1-A6
ctttgcacaaaccctaacacctaaaagccataagaagcgaaatcgtaatcgcaatctagcggatatgaaggtcgtcgctgcgtacttgctcgcagtgttgggagggaatccatctccttctgccgatgatatcaaaaacatcctcggcgcagttggagctgaggctgagcatgagttgattgagttgctcttgaccgaagtcaagggcaaagacttcaatgagctacttgctagtggaagtgaaaagatttctgcagtggctggtggtggtgcagcggttgctgttgctgctgcaccagcgggaggtgctggtggcggtgctgcacctgctgccgaagcaaaggaagaaaagaaagtagaagagaaggaggaatctgatgatgatatgggtttcagtttgttcgact

SEQ ID NO: 23440 - DNA, 459 bp, Glycine max
  Clone ID: LIB3106-020-Q1-K1-G2
gcgaccacgcgtccgaattatttgtgaaagccggatttaagaatataaatcatcttcttaaagcaagtgggtccgtataattggtcatgagattttggcaaatcgattgttacaacggttcttacatttcttacttaattattcattctcgaacgcacatggagatgtataaaatgctttcttacttattgtcttctctgtttgtgtgcgagactgtgagtgcatttgtatttgtgcacaccgatatgtaaatctggactgattattggcctgccaatgttttaagaagttcatgaactgttcactgattggaaaccttattttgatgcttccaattgcatttttatacatgcaccttcaagtagtcgtcaactgctttatgatggagagagatcgtactttaccaatcagcaatgtgctattagaaatattgcttttactgttcggaggcctactttc

SEQ ID NO: 23441 - DNA, 459 bp, Glycine max
  Clone ID: LIB3106-020-Q1-K1-G3
ggaacgctaatcatccactgtcactgaacaatttaccattaacacgaacacgaacatttcaagggaggacatagtaatggacatggctctgcattcatacttgtacccaccatctttgtcttgttcctcttctactactggaacaagacggcccaattcccaggttgcagatagttcgaactgtaagaactagtacttggtgccttgtgcactgaaagcatattatcactctgaattggagaataaaaagcatctacttactacctctgtgcaatacacgcataagcgcctcttaacaactgctgaacaactctcttgtatcgtagaagctctcgtcagtctccaaggatgcaacattgactcttaccctatcaatctctacaacttggatcgaacatggcgcctacagttcactttttgctctgatgttctcattcttctgcaagctgatgctactct

SEQ ID NO: 23442 - DNA, 411 bp, Glycine max
  Clone ID: LIB3106-020-Q1-K1-G7
ctctaaacaacttgataaaaatgattttcccttttatcttcgtggctacaacactggtagcatggcaataccatgcgggcgatatgtaccctctccgaatgaacactggctatactgcccgtactccgcacgtgaaatgcgcaagatgtacgcttgctgtggaatcacacaacatctatggctcatataccattcctaaacagtgcgttgaagcagcaaatgaatacatccatgatgcacaatatacatcatactttaaatcagttaaccaacaatcttacttttatgccacataccttaaagtttattccaaggtcacatgagtgatcaatatatattgcacccaactttctaatatttcatactacaaaaaacattcatattgcttggataaatttaactctacctttt

SEQ ID NO: 23443 - DNA, 253 bp, Glycine max
  unsure at all n locations
  Clone ID: LIB3106-020-Q1-K1-G8
gactcactaacttatcaacagtgtttttagcatttatgtacatgactccaacacttgttgcatgccaatattatactggcgattcgcntattatctgatgaagaaccatataaactccttctacgaatcaacttaagtctacgtttggatcacttgttgttgatttacaattgattctataacgcatccatttctttaaaactttactttgaacttgcgtttcatcatttttcaaattcacaatatgcatcat

SEQ ID NO: 23444 - DNA, 455 bp, Glycine max
  unsure at all n locations
  Clone ID: LIB3106-020-Q1-K1-H1
cacgcgtgcgaccacgcttacaacaacacgtgagaccactctttcgaatattcattggcacaggcttactttaagctttgtgggctgctttttgaacacattgctcaatatcacacatactaaaaccatctattaattaaatcaaaccatacaatgactttttcttaacctgttacaagatctgtataatatctacctcacctcatatactcttaaaaaaagtctttgaactcttcgttgtacgaaacgaacccgggtcattcgaatcatatccatatcaaatttacgattcacatcttgttattctaaaacaagaactctttaatgtcttactgataggtctactcctatatattgtgcacgccttacgacatgttactggtataaatataaaatgtgcttttgttaatgataagattgccttacacaangttttactggttggcactgataca

SEQ ID NO: 23445 - DNA, 380 bp, Glycine max
  unsure at all n locations
  Clone ID: LIB3106-020-Q1-K1-H11
tccgattctttctatttgttttaagcttactngtaaatacattaaattaagacatgtgtttacttgtcagcagggcttagattcttagagtatgtggtaagagtagcacaccatgaaatctgaatgcctattatcatgtttaacgttaattatcgcacgtgccactatgccagtatggtatataacttgaaatagataatcaagtattgtgtggtgcaaaaattcttcttaattatttcttaaaaaagcttcctttattataccctcctttataaacagcttttatcttaatatttccttttatcatttttctaatgctttctcttaatataatactcattataatcttaatttcttttcttataaaaattctaattttt

SEQ ID NO: 23446 - DNA, 245 bp, Glycine max
  unsure at all n locations
  Clone ID: LIB3106-020-Q1-K1-H2
ccacgcgtacnactaaatttgtcatttccaactatatctttccatcaaagacacatacttttggttacatggtacacacaatggggcatatgcacccttcaaatactctaacttaacgtattactgtaaacattaatgtgtacacacacgtttttcctttactcaagtttctaactataaggaaacttgttaacaattaatccaacctccaccatttacttttagacaaggcaacatccaatgca

SEQ ID NO: 23447 - DNA, 447 bp, Glycine max
  Clone ID: LIB3106-020-Q1-K1-H7
ctagaaacagtgtgatgaaaatgaatgtccttgttttcttcgttgctacaattttgggagcatggcaatgccatgcgtacgatatgttccctctccgaatgaacactggctatggtgcccgtactccggaggtgaaatgcgcaagttggaggcttgctgtggaagcacacaacatctttggctttgagaccattcctgaagagtgcgttgaagcaacaaatgaatacatccatggcgaacaatatacatcagactccaaaacagttaaccaacaagcttacttttatgccagagacctcgaagtccatcccaaggacacatttgtgttcagtatagatggcaccgtactctctaatattccatactacaaaaaacatggatatggggtggagaaatttaactcgaccttgtatgatgaatgggttaacaagggcaatgcaccggcac

SEQ ID NO: 23448 - DNA, 425 bp, Glycine max
  unsure at all n locations
  Clone ID: LIB3106-020-Q1-K1-H8
gatcgagataactagaaacagtgtgtttaaaatttatgtccttgntttcttcgttggtacaatggtggtagcatggcaatgccatgcgtactatatgttccctctccgaatgaacactggctatggtgcccgtactccggaggtgaaatgcgcaagttggaggcttgctgtggaagcacacaacatctttggctttgagaccattcctgaagagtgcgttgaagcaacaaaggaatacatccatggcgaacaatttatatcagactccaaaacagttaaccaacaagcttacttttatgccagagaccttgaagtccatcctaaggacacatttgtgttcagtatagatggcaccgtactctttaatattccatactacaaaaaacatggatatggtgtggagaaatttaactcgaccttgtatg

SEQ ID NO: 23449 - DNA, 436 bp, Glycine max
  unsure at all n locations
  Clone ID: LIB3106-020-Q1-K1-H9
ttcttttttgcactcaataattatttttttttattagcgtctcgacaacacgaatagattcctgtaatgataaagcgtgggccgctagancatgagattgatgggctaaaaagaagactgagagaagagagatgggcgtgacgaatgaagaagttgaatcattcttgaaggccaaactgaactcttttcatcttgaagtggttgatacatctggtgggtgcggtgcaagttatgtggtggagattgtattataactatttgaaggcaaatggttattttagaggtatcgtatggtgaattctgtcttatatgaggaaaatgaataaattcatgtttttttttataagaaagctgttttctcttactatttgtaatattatttttaattttatcaattttaattactgatttttaaattatatttttctgtttataa

SEQ ID NO: 23450 - DNA, 427 bp, Glycine max
  Clone ID: LIB3106-021-Q1-K1-A10
gtctggacccacgcgtacggactacagagagtttgagttagagaatagatggaaagagtagcaggggtatatcgggcgctgaaaatatacttccttgcattcttctcaccggggcacctaatgcctctggtccagctggctcgcttggtggcggcacgaggccagcacgtgaccatcatcaccacccacgccaacgctcaactctttgaccagaacatcgacaaggacaccgcctacggccaccacattcgcgtccacatcatcaagttccccaacgcccacgtacggctaccggaaggcatcgagcacctgtccgacgccaccaacaatgaaaccggctacaagatccacatggcggcgcatctcatcatgccccagctcgagtctatggtcaaacactcttcaacggacgtcttcatccctgaca

SEQ ID NO: 23451 - DNA, 115 bp, Glycine max
  Clone ID: LIB3106-021-Q1-K1-A11
acgcggaacgctgtgggcttgtacgcgtgaggcgtgttcgcgtgggacggactgcgtgggctgtgtttaggcgggaactcccgtgattgacatttttagttaatgcgcagcagag

SEQ ID NO: 23452 - DNA, 429 bp, Glycine max
  unsure at all n locations
  Clone ID: LIB3106-021-Q1-K1-A12
aacacacacatagaaacccaacaacatgaatgaagaagatgattctaaccctcttctgcaatatcattttatctctcctctccctctcccacgcctccgtggtggatttctgcgtagcagactacacaggccccaatggccccgcagggtactcatgcaagagcccagcaaaggtcacggtggacgacttcgtctactccggccttggcaccgccggcaacacctcaaacatcatcaaagccgcggtgacgccggcgttcgacgcgcaattccccggcgtcaacgggcttggaatctccattgcacgcctagacctagcagccggtggagtcatccctcttcacacgcaccctggtgcctcagagctgctggtggttgtgcagggaacaatctgcaccggcttcgttgcttcngacaacactgtgtacc

SEQ ID NO: 23453 - DNA, 407 bp, Glycine max
  Clone ID: LIB3106-021-Q1-K1-A2
ctttgcacaaaccctaacacctaaaagccagaagaagcgaaatcgtaatcgcaatctagcggatatgaaggtcgtcgctgcatacttgctcgcagtgttgggagggaatccatctccttctgccgatgatatcaaaaacatcctcggcgcagttggagctgaggctgagcatgagttgattgagttgctcttgaccgaagtcaagggcaaagacttcaatgagctacttgctagtggaagtgaaaagatttctgcagtggctggtggtggtgcagcggttgctgttgctgctgcaccagcgggaggtgctggtggcggtgctgcacctgctgccgaagcaaaggaagaaaagaaagtagaagagaaggaggaatctgatgatgatatgggttttcagtttgttcgac

SEQ ID NO: 23454 - DNA, 323 bp, Glycine max
  Clone ID: LIB3106-021-Q1-K1-A3
acactccctctgatgttcccaccggatttaacaagatcatcaatactgatatcactgcagcttctatctaacagggggaaaatgtccttgcctttagtgacatacatccacaagctcctacccatattctaatcattcctaaagttatggaattgcctaactggtctgtccaaggctgatgataggcactgtgagattctaggacgtcttttgtgcactgctaatctgcttgcaaagcaagaatgtcttgatgatggcttcatgattgtaattaatgatggactatacggttgccaatcattttaccacattcatgtgcacct

SEQ ID NO: 23455 - DNA, 465 bp, Glycine max
  Clone ID: LIB3106-021-Q1-K1-A4
cccacgcgtccggcaatcttcagcttctactttggagactatggtcacatagcagtgcggggaccttacctgacctatgaggacacatatttggctgtgactggtgggtctggcatatttgagggtgttaaaggtcaagtgaagctgcgttatattgtgtatcctttcaagattttgtacacattttatctaaagggtatcaaggatttgcctcaggagcttcttgtcaagactgttgagccaattccatctgttgaaccttcccctgctgctaaggcccttgagcccaatgctaccattgctggcttcaccgactaattcatcaactttttttgtatttgctttggcctttgtagtagtatgatttaagttactgaataataataacaagtggggactatgatgggttttgtagtggtggagtttctatttaacgaatagcttgacattattcagttagtggtg

SEQ ID NO: 23456 - DNA, 142 bp, Glycine max
  Clone ID: LIB3106-021-Q1-K1-A5
acgttcacacttactataacgcttccaccgtatttaacatgatcatcaataatgaaattactgttacttttttatatgaggaggataacatccttgcctttacttacatacatccacaagctcttatatatataactattta

SEQ ID NO: 23457 - DNA, 382 bp, Glycine max
  Clone ID: LIB3106-020-Q1-K1-G10
agccaatggaaacgagaatgaaagtgttccaaataaggcagtacacaagttgaatggaggtgagactggcaatgatacttctcctagtacatcacccaaatcttcaagtcctgatttttcgtctcagagcccctatgtggaggccccgcgctttgctggcatgcaatttgattataatttccctaggccaaccgcccccccgggtgcccagagacctacttcaaccagcaaggattgagtttgatatccggtttgtagtttatttgattgtttgttggtttttgagggggtgtattgtatgtatcgctcgtgtggaatgtgcctgtatgtgctggacatcgcatcttgtcggcggtgaccgcattgtgcagcgttgttttgc

SEQ ID NO: 23458 - DNA, 463 bp, Glycine max
  Clone ID: LIB3106-020-Q1-K1-E1
cccacgcgtccggtctcattcaacaaaaggagtagataaggaactcttgtgaagtctatacttggcttagcattgttttcactcttgtttcttcatctgaatcaagtaagaagagcatggaggtggatttcaagtctccttcccttgaaaaaacagaagctgagcctcaagtagaagaaaacatgcgctttcacaagtctcttcaggagctaagagaattgcagtctcagttgcaccatgctgcagattattgtgaaacaactttcttgaaaagtgaagctaagagagatgtgttggaaaatacaaaagaatacatatgcagggccatggttactgttgttgatcatcttgggaacgtctcggctaatcttgatgaccttatttctcaaacaaatgcattttctgaggctgagtctagaatccggtgcctcaaacaaagacttttctcatgtgaacaatatgc

SEQ ID NO: 23459 - DNA, 386 bp, Glycine max
  Clone ID: LIB3106-020-Q1-K1-E10
gcgtacgcatatatatctcgtggatacttgcattaatcattatcagcaacaatggaactcatgggtgaaagggataaatcagatctggttcagaagaccactttcttcagagatggctatcttttacattacccatgacactcaaaggcatcctctacttcctgaattaaaatcttgaataatctgtactcaatgttctttgtctggtcctattagtggtgagttaactgtataaacatctgcatttccaattcattcaattgatcttcaattgtttctagtttagtccattcttctctgttagaaaattgtgacctaaactcttttgtttcaaacaacacaaatagcatttaatatcagtgcctcaattttactcttcctaatta

SEQ ID NO: 23460 - DNA, 444 bp, Glycine max
  Clone ID: LIB3106-020-Q1-K1-E2
gcggccacgcgttctagcacatgaagcatactgagtttatactgtactctcgttaaggctacccttggctcacgattgatgcactgtagcttgtgaatcaaaatcaatcaataagagcatagaagaacttcttccagtctccatcccttgaaaagacatagactcagcctcaattataacaaaacatgcgctttcacaagtctcttcaggagctaagagaattgcagtctcagttgcaccatgctgcacattattgtgaaacaactttcttgaaaagtgaagctaagagagatgtgttggaaaatacaaaagaatacatatgcagggccatggttactgttgttgatcatcttgggaacgtctcggctaatcttgatgaccttatttctcaaacaaatgcattttctgaggctgagtctagaatccggtgcctcaaacaaagac

SEQ ID NO: 23461 - DNA, 465 bp, Glycine max
  Clone ID: LIB3106-020-Q1-K1-E3
gacggctaggtttatccatctcattaatgagtagtacgtttattgcattactctcttgaaggctactcttgggaacagcgttcatacctactatgggttgttaatataaataaattaatagggcttaaatgtacttatatccatttactttgtttgaaaaaacataaaatcagctttacaattttatataatattcgctttccaaactaatttcattaattaatatatttttcatctttattgtaccatgcttcatattattaatatacatctttattgaaacattaaagctcttataaatgattttttaaatacaatataatatatattctatgacattgttattattgaaaatcattttttggaacatattatctaatctttttgaccttattttattatataaatgtactttttttaggtttgtgtctagaaacctgttctttttaaataagaattttctaa

SEQ ID NO: 23462 - DNA, 285 bp, Glycine max
  Clone ID: LIB3106-020-Q1-K1-E5
ccctacttcttccgcggcgtttgcattttaattcctgtaatggctattgagaatatggttaaacatgaagccggtgaagaaaaaagagagcgggccaaaatggcttcttttgttggagccatggctattgctgacttggtgaagacaacctttgggccaaatgtaattgataaaattttgcatgcaacatgtagaggacgtgaatttactgtcactaatgatggtgctacaatcttgaagtcccatcatattgataacccagcttctaaagtccttgttgacata

SEQ ID NO: 23463 - DNA, 460 bp, Glycine max
  Clone ID: LIB3106-020-Q1-K1-E6
gtccgcagggaagattcctatgtccatggccgcccttgtttatatggaagccttggttttacgaaacaggggtggaatgggtgagttgccttcttctttgaagaattgcagcactttatttatgctggacctgagtgaaaatatgttgtcgggtccaataccatcatggattggagaaagtatgcagcaattgataatcttgaacatgcgaagaaatcacctctcaggaaatctacccattcctctctgttatttgaaccgtattcaattgttggatctttcaaggaataacttgtcaagtggaattccaacatgcttaaagaatttcactgcaatgtctgaacagagcatcgactcaagtgacactatatctaatatatattggaataatcagacttacttagaaatttatggtggttacagatatggaggttatacgcttgacataacatggatgtgg

SEQ ID NO: 23464 - DNA, 427 bp, Glycine max
  Clone ID: LIB3106-020-Q1-K1-E8
gccaccgacactctcactctcactagtgttggttgtgctgtttttcgccgccgtgggcgcgcagtttccggcgaccggcgagcttgcaacgttccgcgaggcgccggcattccgcaacggaagagaatgccgcaaccgcccgcgaagcgactccgtgatccacatcgcgatgacgcttgacgcgacctacctccgaggctccgtcgccggagtgttctccgtgctgcagcacgcgtcgtgtccggagaacgtcgtgttccacttcatagccaccacgcaccgccggacggagctccgtcgcatcatcaccgcgacgttcccgtacctctccttccacctctaccacttcgatgcgaacctcgtccgcggcaagatctcgtactcgatccggcgcgcactggatcaaccgctaaactacgcgcgcatg

SEQ ID NO: 23465 - DNA, 246 bp, Glycine max
  Clone ID: LIB3106-020-Q1-K1-F1
aattccaaccagataaggagtgtggaatttgttagcttcacttctttcttgtattacttgaggcccttggcccttctctccctgcctcttctcttattctcattgtttagttacctaccgtggatcaaagtcaattccctatctcgcttctttttgtagttgatttcttttgggtttcgcagtctccccaaaagggttgtttttattttgttctaaaattttgtaatttttgcttggacttgtgat

SEQ ID NO: 23466 - DNA, 414 bp, Glycine max
  Clone ID: LIB3106-020-Q1-K1-F2
gagccacgcgggcgcggacgcgaaccctatcagctagagagaaaaattctaccataaatgccggctggacaccgttggagatccggcaccagagattccgtctctcgtcccttcaagaagaagggtaccattaccctcaccacatacctcataacctaccacgtcggcgattatgtcgacttcaaggttaacggcgccgtccacaaaggaatgcctcacaagttctaccatggccttaccggacgcgtgttgaatgtcaccaaacgtgctgtaggggtcgacgtcaacatgcaggtcagccacacaatcatacggaagaggattcacttacgtgtggagcatgttatgccctaaaggcgcactgatgagctccgccttaagaagatcaagaatgatcaactcaaggctgacgcc

SEQ ID NO: 23467 - DNA, 363 bp, Glycine max
  Clone ID: LIB3106-020-Q1-K1-F3
ggaaggcgaatcaagcactttctctgaacaatttacccttaccaagagcacatgcatataaagggattaccgatgctctgacatggatctgaatccatactattaccaacacaaaatttcctgttccactcttactactctatacaggataagtccacttacacgatacattgttgatcttcatgtggaatagtctctggctcaaaacctaaagcaaacaaggcatatcattacatatgtacaaggctactaatagattatgcttctgtccactgatcaatacacacttatgggcctcttatcaactcctaatcaactctcatgattcattgagattttcttcagacatctacgatgcaccaa

SEQ ID NO: 23468 - DNA, 416 bp, Glycine max
  unsure at all n locations
  Clone ID: LIB3106-020-Q1-K1-F4
cccacgcgtccgcccacgcggtccgctggctcgtatttgtggtcttacaatgaaaataagtccagactcctgtccaatacatgttggggggtggctcaccnttttttttttttctctctttttgtgcctttgtgtctggtttatatttggttctgcttggctgtgcctttttttgtttcctttgtcttttagtcttctttttgtgctctttttgtactttatttatttagtattctgggttttttttgattcattttttttctcctgttttttgcacgctttttggttctcttattactttgtgatgtatttcttttgtttttttttgggttttttttttatttttctttttttgtctctatttttttcgtcttctattatttttcgttttccttttgttttgccctttttttctt

SEQ ID NO: 23469 - DNA, 437 bp, Glycine max
  Clone ID: LIB3106-020-Q1-K1-F5
gaaaagcttgacttctgttcttaaaagtaggctgtaaatggataggcaattgacagaatcagagagatgagatggaattgatgagagagaagctggctggtctagagttggcccaggaagagaccaacaacctatcaaacattgtgcattctgacaatgtacggctagagcatgatgttgccttcctcaaggctgttttagatgatacacaaaaggagttgcactcgacaagaggagttattgcaggagaaagagcaagggcattccaacttcagtttgaagtttttcatctcaaacaaagattgcagtcaatggaaaaaaatcgagcatctactactccgaggaaaccatttcatgtacaaggaagtggatgtttgaactttgaagtagcttatttcagttttttttttatgtttttagagaagcatatttcactt

SEQ ID NO: 23470 - DNA, 323 bp, Glycine max
  unsure at all n locations
  Clone ID: LIB3106-020-Q1-K1-F6
agaatatgaatttgtttgtttcctttgtggctgcattagtgttggtggcatgaccatgccagggcgcaggctaccaaaggttccttctccgaatgaaaactggctatggtgagcgttcttcgaaggtaaaatgcgcacgttttaggcttgctgttgaagcacacaacatccgagcctttaaaaccattcctgaagagtgcgttgaaccaacaaaggactacattaaatgcgaacaatttacatcagactctataacagttaaccaacaagctttcttttatgctagttaacgcgaagtccatcacaacgacatantttatatt

SEQ ID NO: 23471 - DNA, 311 bp, Glycine max
  Clone ID: LIB3106-020-Q1-K1-F7
aacaaacaatctttgatacctgattttataatatttatctactctaatcaaaaccaggctccatgtgtttcttctaatgctgcggcgtcaacgacaaatactacttcttgcattgttccaattacatatgtatcaagctatgcttcttaatgtataacgatacacattctacatttttcccagggtcaaaccttattatacaataattcttcgtcgccccattttctatgaatcaaccttacatactcaatcattttaattcatttcctttttataatttcacctaacatttacttattttttcgcccttt

SEQ ID NO: 23472 - DNA, 211 bp, Glycine max
  unsure at all n locations
  Clone ID: LIB3106-020-Q1-K1-F8
aacaaaccaacttanatacatatattttaactcttttctacgagactcaaaccaccgcgttcatgtcaaattattactggtgctatgctaactaaacactatctaatttcatctaaactcccttttagtaatcacctatactatacatattatccactagttgtattttctctcttttttcacatctcattcacttactacaaaacttttt

SEQ ID NO: 23473 - DNA, 240 bp, Glycine max
  Clone ID: LIB3106-020-Q1-K1-F9
ggcagtggcagctacgatcctgctcttggtgcctgctcggaggagctcggccggcgcgaccagtgggacctgcgctggggcagtaccggctgaacctgatggcgttctgcaaggacttcaacgcccgcacccagaagtacaaggcggagacacccattgccgttacgataacggcttacaaggacaacaccttcgagttcaccgttaagtcgccgccggtgtcgttgtacctgaagaaag

SEQ ID NO: 23474 - DNA, 458 bp, Glycine max
  Clone ID: LIB3106-020-Q1-K1-G1
tttacccttctcttctgtgtttcttagaagaattaagatggctaccttgactgtacctccagtgcctccttcccccagagatgatgccatgcagctttaccgtgcttttaagggatttgggtgtgatacaagtgctgttatcaatatacttgctcatcgagatgctacacagcgtgcctacatccagcaagaatacaaagcaatgtattctgaggaactttccaagcgcttagcttcggagcttagtggaaagttagagactgcagttctgctctggttgcatgaccctgcaggacgtgatgcaacaatcattaggaagtctctaacagcagacaacaaaacccttgaaggtgctactgaagttatatgttcacgcactccatcgcagctacaatatttaaaacagatctatcattctatgtttggtgtttatcttgagcatgatattcaaacaaaca

SEQ ID NO: 23475 - DNA, 330 bp, Glycine max
  Clone ID: LIB3106-020-Q1-K1-D9
gaaaagaaaagatgtttgagccacattagctatacactcgcgcgaagaccgaggaggtcgaccgtgaatcaggagaaaccctctacccatggctgagcgtcggctagaaccagctccgatggggtttcatccgcaaggtctacggcatcctcttcgcgcagatcgttctcaccaccctcgtcttcgtcaccaccgttttctatacttcaatcaatgacctccttaagggcaattccaccctacttctcatccttcttcttcttcccttcaactttatgattcctcttgtgaagtaccagctaaagcattctcatatttacatcttgcttg

SEQ ID NO: 23476 - DNA, 443 bp, Glycine max
  Clone ID: LIB3106-020-Q1-K1-C11
ctcctctgtctttttctctctcttgctatccttttggctagtggcactgctgcaagtgcaacggcaagaagcgcagtgccaagccaccatgtttcaacattcaacagaagcctttttccttccacttttctctttggaattggttcttctgcttaccaggcagaaggagcagcaagtgtagatgggagaggaccaagcatatgggacacctacactagacagcatactgaaaagatttgggatcatagcaccggtgacatgggagctgatttttatcatcgatacaagggtgacataaaaatagcgaaagaaattgggctggactctttcagattctctatctcatggtcaagaatattcccaaagggcaagggagcagttaacccccttggggttaaattctacaacaatgtcatcgatgagatcctagccaatggtttaaa

SEQ ID NO: 23477 - DNA, 347 bp, Glycine max
  Clone ID: LIB3106-020-Q1-K1-C12
caacaacacaaggccatcatcatggcttttgcttctcctatggcaagccaactcaagtgcaccggcactaaaactcttgtggctcccaagggcctctctgcctcttcaccactccacctcctgccttctaagaggcaatttagcttcactgttagggccatccaatcataaaagccaacctatcaagtgattcaaccaatcaacggtgatcccttcattggaagcctcgaaaccccagttacatccagccccttgattgcatggtacttatctaacctccccgcatacaggaccgtagttagcccactactaagagggatcgaagtgttccttgcccatggctacct

SEQ ID NO: 23478 - DNA, 424 bp, Glycine max
  unsure at all n locations
  Clone ID: LIB3106-020-Q1-K1-C2
gcgnccacacgtncgcttttattatggattactcgttaaacaaatttggcatttcgaaatcacatgtgtctatggttgatgacagattagacactgatatcttgattgaacaaaatggtggttgcaaaactcttcttgtgctctcaagtgtcaccacactggccatgcttcatagccctaacaactacatacagccagacttttataccaataaaatttcacattttcttttcctgaaagctgcaattgtctgactataatatatatacattatccacacacgatggtgagaaaagccatgtatttaagaaataaattcacatttatacattacttgtttatatatattaatcaatattagtccctgcgaggactatacctattatgatattaaaccaagaagcatcattctttataaggtgaa

SEQ ID NO: 23479 - DNA, 289 bp, Glycine max
  Clone ID: LIB3106-020-Q1-K1-C4
cttcctctgtggctctgtttcgagatctctgtttcgtcccttcgattgcccggtttggaccaagacgccaaggccacgcatggatcggtgctaaggttgaacagaggtggctcttcagtgaagtttgatcccacacgggtcactcagctctcgtggagtcccagggcttttctgtacaaggggtttttatccgaggaagaatgtgatcatttgatagttctggccaaggacaagcttgagaagtctatggtggcagataatgattccggtaaaagcataatgagtgata

SEQ ID NO: 23480 - DNA, 287 bp, Glycine max
  unsure at all n locations
  Clone ID: LIB3106-020-Q1-K1-C5
cgtccgcccacgcgttcgacaagactttgtatagaatctctcgatttagcaaacagntgcgtctcaatgcacaatgataatatcctgggtcttctcaagctatcaattaaaagaggcgttaatctttcaattcgcgatgctcgtaccacccatccacatgtcgtctgcaacataggttatcaaaagctgaatactctcgtcgaaaaaaacaactgcaaccctttctggaatgaagaattgaccctttctttaaaggacgttaaaaccccactacatttgaccgttta

SEQ ID NO: 23481 - DNA, 126 bp, Glycine max
  unsure at all n locations
  Clone ID: LIB3106-020-Q1-K1-C6
gcccttgtcgttgttcacccataatcttgtttcgtcaataatgaagttatcttttaaataaaagcaacatttgtcgtagtaaaatgttctgtagttttttaaaatctanattctcatttttattaa

SEQ ID NO: 23482 - DNA, 454 bp, Glycine max
  Clone ID: LIB3106-020-Q1-K1-C7
cccacgcgtccggtttgttgtgagctataagcttttttatcgtgaggagaatatgaggttgtttgttttctttgttgctgcagtagttttggtagcatggccatgccatggcgcaggctaccaaaggttccctctccgaatgaaaactggctatggtgagcgttcttcggaggtaaaatgcgcaagctttaggcttgctgtggaagcacacaacatccgagcctttaaaaccattcctgaagagtgcgtttaaccaacaaaggactacattaatggctaacaatttacatcagactctaaaacagttaaccaacaagctttcttttatgctagtgaacgcgaagtccatcacaactacatatgtatattctgcatagataacaccgtactctctaatatcccatactatgaaaaacatggatattgggtggaggaatttaatgaaaccttatat

SEQ ID NO: 23483 - DNA, 459 bp, Glycine max
  Clone ID: LIB3106-020-Q1-K1-C9
ctgaaagcgaagaagtagagaacaaagaaagagagagagaattgaatgtgaatggggaatcaggagcagaagtggacgcaggacgaagaagatgctctcatcgccggcgttgaaaagcacggccccggaaagtggaagaacattctcaaggatccccaattcgcccctttcctcacttcccgttccaacatcgacctcaaggataaatggcgcaatttgagcgtcagcaacggtgctcagggctccaaagaaaaatctagggttcccaagcttaaagccctccctgctcctcctgctcctaccgccactcctcagaacgccgctcctgctctgcaaaacgcagcatctgatgtcactcccccagatgcttctcagaatgaccaagatgccaaaaaccctccaaggtataatgcaatgatttttgaagctctatcagcgctgaaagatagtaatggatct

SEQ ID NO: 23484 - DNA, 464 bp, Glycine max
  Clone ID: LIB3106-020-Q1-K1-D1
gcgaacagtgtgatgaaaatgaaggtccttgttttcttcgttgctacaattttggtagcatggcaaggccatgcgtacgatatgttccgtctccgaatgaacactggctatggtgcccgtactccggaggtgaaatgcgcaagttggaggcttgctgtggaagcacacaacatctttggctttgagaccattcctgaagagtgcgttgaagcaacaaaggaatacatccatggcgaacaatatagatcagactccaaaacagttaaccaacaagcttacttttatgccagagacctcgaagtccatcccaaggacacatttgtgttcagtatagatggcaccgtactctctaatattccatactacaaaaaacatggatatggggtggagaaatttaactcgaccttgtatgatgaatgggttaacaagggcaatgcaccggcactgcccgagactcttaagaa

SEQ ID NO: 23485 - DNA, 411 bp, Glycine max
  Clone ID: LIB3106-020-Q1-K1-D10
tatcacttccctcaccatggccgagtcctgcctcctctcttctccctcctcactctggcacacgaaaaccaaaccctctctctttacacccccctccaaacccctcacactccaattttcatgcctcaactcctccgtctctctctccctcgccgcaccaactcaccgttctccccttgtaactttcgtggcccaaacttccgattgggctcaacaagaagaagaacagagcctcgctgaaaccgaagcgggcctggaaagttgggagcccaacggcgaagacgccggcgatgagagcttcgtcgaaccgccggaagaggccaagctcttcgttgggaacttgccttacgacgttgatagccagaaattggccatgcttttcgaacaggccggaaccgttgaaatcgctga

SEQ ID NO: 23486 - DNA, 455 bp, Glycine max
  Clone ID: LIB3106-020-Q1-K1-D2
ccgggcgacgcagcgtgcgccacgcgtccggggggtaggagatactctcattcacctcctatcatcattataatcattcatggcaacctgcccttattcttctggttcaatttcacacccatcatggaccgctttccgatcctctttctcgtcgccaccctcatcaccctcgcctccggtgcccgccacgatattcttcggttaccctccgaagcttccaggttcttcaaagcacctgctaatgccgatcaaaacgatgagggcaccaggtgggccgttttagttgccggttccaatggctactggaattacaggcaccagtctgatgtttgccatgcatatcaactactgaggaaaggtggtgtgaaagaggaaaatattgttgtatttatgtatgatgacattgctttcaatgaagagaacccacggcctggagtcattattaacagtccaca

SEQ ID NO: 23487 - DNA, 435 bp, Glycine max
  Clone ID: LIB3106-020-Q1-K1-D3
cccacgcgtccgcaagaatggcacaaattaacatcatggcacacgggatacaaacccttaatcggaattccgatttccataaaccccaagttcctaaatcttcaagttttcttgtttttggatctaaaaaactgaaaaattcagcaaattctatgttggttttgaaaaaagattcaatttttatgcaaaagttttgttcctttaggatttcagcatcagtggctacagcctgcatgcttcacggtgcaagcagccggcccgcaaccgcccgcaaatcctctggcctttccggaaccgtccgcattcccggcgacaagtcgatctcccaccggtccttcatgttcggcggtctcgcgagcggtgaaacgcgcatcacctgccttctggaaggcgaggacgtcatcaatacgggcaaggccatgcaagccatgggcg

SEQ ID NO: 23488 - DNA, 314 bp, Glycine max
  Clone ID: LIB3106-020-Q1-K1-D4
ccctctccggtctgaaagccagcgaccgcgcctccgtgccatggaagcaaaactccagcctctccttctccagcccgaagcccctcaagttctccagaacaatcagagcagcagccgccgacgagaccacagaggcaccaacaaaagtagaggctgcaccggtcgggttcaccccaccagaacttgacccaaacaccccttccccgatcttcgggggcagcaccggcgggctcctgcgcaaggcacaagtggaggagttttatgtcattacgtgggactcacccaaagaacacatctttgaaatgcccactggc

SEQ ID NO: 23489 - DNA, 461 bp, Glycine max
  Clone ID: LIB3106-020-Q1-K1-D5
gctttctttcttcttcacaactgttggttattatgtctgcaccatgatgacagtccttacagggtatattgtcttatatggaagagcatacctggctttttctggtcttgatgaagatgtctcgaagaatgcaaaattgcagggtaacacagcacttgatgcagctttaaatgctcaatttttggtccagattggtgttttcactgcagtaccaatgataatgggttctatacttgaattaggattgctgaaggctgttttcagtttcatcacaatgcatctacaattgggttccgtcttcttcactttctcattgggaactagaactcattattttgggcgtaccattctgcatgggggtgcaaaatatcgggctactggtagaggctttgtcgttcgtcacataaagcttgctgaaaattacagactatattctaggagccacttcgtcaaagcgcttg

SEQ ID NO: 23490 - DNA, 455 bp, Glycine max
  Clone ID: LIB3106-020-Q1-K1-D7
cgtttctcagttttattcgaatccctctctcaatctcctttccaaatggccagcgtggaggttgcgacagcaaacaccaacaacagttccagaaaatgaaacaaccgaggtaagcaagacccaggaaacaaccccagtcactgaggctcctgcaacagaacaaccagcagctgaggttcctgcaacagaacaaccagccgctgaggctcctgccccagaatcaaccaccgaagcaccaaaggaagaaaccaccgaggcaccaacagaaacagtagaaaaaacaactacagaagtagccccagaggagcctaaagaagttccagttgagaccgaggaggtggtggcaaaggagacagaggaagagaagccagcataagagaaatcagaggagaaaactgaagaagtgaaagaagaagcagaggagcctaaagaaactactgaaacagaatcagcag

SEQ ID NO: 23491 - DNA, 440 bp, Glycine max
  Clone ID: LIB3106-020-Q1-K1-D8
aaaatgcgagtgctattttcaagcatgagagtttttcttcttcttgtgtggttgttggagctggtttgtgtttcggtgaccgccgtgaacccttctctgaacgacgacgttttggggcttatagtgttcaaagctgacatacgagatccgaaggggaagctcgcttcttggaacgaggacgatgagagcgcgtgtggtggtagttgggttggggtgaagtgcaaccctagatccaatagagtggtggaggttaaccttgatgggttctcgctctctgggagaataggtagagggttgcaaaggttgcagtttctaagaaagctttcactggcgaataataacctcactggtgggataaaccccaacattgctcggattgataaccttagggtcattgacttgagtgggaatagtctctcaggggaggtttctgatgatgt

SEQ ID NO: 23492 - DNA, 341 bp, Glycine max
  Clone ID: LIB3106-020-Q1-K1-C10
gttgcattcacaagacaaatgggctgttacttttacggatgatgaaaatgacatgaggctcgtgggtgatgatccatggccggaggtcttcaacatggtgaagaggattttcatttgttcacgggaggacttgaagaagatgaaatgctgcaagctacctgcttcttcatcagacgttgaagaggttctattgagtccagattcacagaataaggatgagactcaacagtcttacatgccttagacaacttaaatttatttttttttttcctttttttttgggttctgggaatggaaatatatctcatggcataagttgcttcattttaatgaacttttac

SEQ ID NO: 23493 - DNA, 138 bp, Glycine max
  Clone ID: LIB3106-020-Q1-K1-A2
tcaactataccgtcggagcagcgcgcagctatgagaagctcgtcgcccacgcatgcggcgcagcgcgcatagcccagccaagcgcgccaagccaccaagcacaatcgatcgacgcgctttggtgactgcgcacttcgg

SEQ ID NO: 23494 - DNA, 424 bp, Glycine max
  unsure at all n locations
  Clone ID: LIB3106-020-Q1-K1-A3
cggaangaccgaggcgagcgaggcggcgaatcagccactggcactgaacaattttccattaacaagaacaacaccatcttaagggaggacagggtaatggacatggctctgcattcacccttgaacccaccatctgtgcctcgctcctcttctactactggaacaagatgcgcccacattccggcttggagctactttgattttgatgagctcgtacttgatgccttctgcactgaacgcatattatgattcttaattggacaataagaagcctctacttcttacctctgttcaagacacaccaaggggcctgttaacaactcctaatcaacgctctagtattacagtaggctcaccctaactctaaggatgcaacattggctctcaccctatcaatctctccaacttaggattgaacatggct

SEQ ID NO: 23495 - DNA, 215 bp, Glycine max
  Clone ID: LIB3106-020-Q1-K1-A4
taccattttcattaacaacaccatttcaagggacgacgtagtaattaacatgggtctgcattcatccttgttcccaccatctctgtcttgtacctcttctactactgtaacaagatggcccacttcccggcttggagcttgtttgaattggatgagctcgtccttgattccctaagcacttaacgcatattattattcttaattgttcaataaaa

SEQ ID NO: 23496 - DNA, 461 bp, Glycine max
  Clone ID: LIB3106-020-Q1-K1-A5
gttcatctactctgagccgcatcacttcccggaatcgtgcatccctacgttcaatatgtcgctggtggcaaacgaggatttccagcacatacttcgtgttttgaacacgaacgtagatgggaagcagaagataatgttcgctcttacctcaatcaaaggtattgggaggcgatttgctaacatttgctgcaagaaggctgatgttgacatgaacaaaagagctggtgaactgagtgctgctgagttggatagtgtgatgactgtggttgccaacccccggcaattcaagattccggactggtttttgaacagaaagaaggactacaaggatggcaagtattctcaggtggtgtcaaatgcactggatatgaagttgagggatgacttggagagacttaagaaaatcaggaaccatcgaggtttgagacactactggggtcttcgtgtacgtggccagcata

SEQ ID NO: 23497 - DNA, 456 bp, Glycine max
  unsure at all n locations
  Clone ID: LIB3106-020-Q1-K1-A7
tcgactacgcgtccgcccacgcgtccgctcacgcgtccgtccacgcgtccgtccacgcgtgcgctaggttatcgtgaggagaatatgaagttgtttgttttctttgttgctgcagtagttttggtagcatggccatgccatggcgcaggctaccaaaggttccctctccgaatgaaaactggctatggtgagcgttcttcggaggtaaaatgcgcaagttttaggcttgctgtggaagcacacaacatccgagcctttaaaaccattcctgaagagtgcgttgaaccaacaaaggactacattaatggcgaacaatttagatcagactctaaaacagttaaccaacaagctttcttttatgctagtgaacgcgaagtccatcacaacgacatatttatattcggcatagataacaccgtactctctaatatcccatactatgaanaacatggatat

SEQ ID NO: 23498 - DNA, 426 bp, Glycine max
  Clone ID: LIB3106-020-Q1-K1-A9
cccacgcgtccgcttcagtgtgagttaaccctcttatcttggcttcttgagctctgcgctgaagggactcagaatctgcttccccaaattgccacccacacccctcactgcttcttccttccccacaccccttcctatcgttgccaatagagtgtgtcccttcactggaaagaaatcaaacatggccaacaaagtatcattttcaaaccacaagacaaagaaactgcagtttgtgaaccttcagtacaagagaatttggtgggaagcagggaagcgctacgtaaagcttcgtttgtcaactaatgcattgaatactatagaaaacaatggacttgatgcacttgcaaagaatgctggaattgatctcacgaagaaataagcctatctaataattattgtaatttgtattaaaatggaagaatacaa

SEQ ID NO: 23499 - DNA, 469 bp, Glycine max
  Clone ID: LIB3106-020-Q1-K1-B1
gcggagacatagttaggttagagcggtgaataggtgcggttagtttgggtgtagaaaagcgagtgagagacatacgatacatcggcgcagtgagatggaagaagaaggtgttccggtggaaggttcttcaggtacggtgagtcgggcacggaagcttctgtttcggcgaatgctggtggggatcaaagacggaaggttcttcttgggctccttctactgcatcgacaagcaaggcaacatcattctccaggacgccgtcgaatatcgcagcacgcgccaatcttcgccttctcccatggaacagaggtgcctcggccttattctcattccttcctcttgccgcacctcttgtcacgtcgattgcgctatccacgaacagttatctctcctttcgctgaatcaaacaccaccgcactagccagggttttactgtgccccttcaattgcttatatatgttactgaaaatta

SEQ ID NO: 23500 - DNA, 399 bp, Glycine max
  Clone ID: LIB3106-020-Q1-K1-B11
cccacgcgtccgaaattagttcattctctttgcgcagttccctacctctcctttcaagatgcaggtcttcttcaagaccctcaccggaaagaccatcacccttgaggtggaaagctctgacaccatcgacaacgtcaaggccaacatccaggacaaggaaggaattcccccggatcagcaacgtctcatcttcgccggaaagcagctcgaggacggccgtaccctcgccgactacaacatccagaaggagtcaacccttcaccttgtccttcgtctccgtggtggcatgcacatcttcgtcaagactctcactggcaaaaccataaccctagaggtccaaagctctgacaccattgacaacgtcaaggccaacatccaggacaaggagggaaatccccc

SEQ ID NO: 23501 - DNA, 405 bp, Glycine max
  Clone ID: LIB3106-020-Q1-K1-B2
gaccacgcgtgcgggacaacaatggaaaaagacggatggaagaaataagatttgtggaaggaaagaaactagaaatgttcattgattgacaccaaatcgtgtgccctgcaaaaaaaagaaagaagggagagaagaagttggtggggtgagttggatcggatttctaatctaatctatacctctcttttttactatgctctgaaggcacaaaccctgctttctttactgttctttcttgttctgattgatattccttgcctacaccctttaaggaaggaagaagcgaacaactatactactattattcttacaaatgtgattattgcaaataatcattccattatagtgactgaccgttgtgataattcctcagacatagaaccaacgggcctctcctactactca

SEQ ID NO: 23502 - DNA, 446 bp, Glycine max
  Clone ID: LIB3106-020-Q1-K1-B3
gcggccacacgtccgggcacgtaaggcaggagcatttgtgatatttgtggttgatgcaagtggaagggtggtgttgaacatgatgcaggattcaaaaggtgcaacacttaagcttctggctgaaagttatacaagcagggatcaggtctctataatttcattccgtggagatgcatctgaagtacttatgccaccttctagatcaattgcaatggctaggaaacgtcttgagaggctttcatgttgtggaaggtccccacttgctcatggtcttacaacggttgttagagttggattaaatgcagagaaaagtggcgacgtatgacgtgttgatattgttgcaatcactgattgcagatccaatatatcattgaaaaggtctactgaccctgaatttgtcgcaactactgatgcttcaaaaccttttacacaagaattgaaagatg

SEQ ID NO: 23503 - DNA, 455 bp, Glycine max
  Clone ID: LIB3106-020-Q1-K1-B4
cctttccttctttgcaaacacaattctccgattcagttcataatttcgatcgcaaagcaaatgagcccacagcaagaacccgattgcaatctcaatcacctcaaattatattacggaaagctgtttccgtttgctgatttagttagatgggtgtcgtatggcaacgatggaaagcaccctgcttgtgatcaatcctacattgggcgaagagagttttccttcactctggagaatgatatatatctgcgtttccaatctttccacaatgcacttgagctcgaaaactccatcaaagaaaagacccctgttaagatagatattggacctgtctacactcgtgatcctgcaaaaaggaatgcctatgcacagagtggcgataataatgtctttgccccacttgagagggagttgatttttgatatagatatgtcagattatgatgatgttagatactg

SEQ ID NO: 23504 - DNA, 215 bp, Glycine max
  unsure at all n locations
  Clone ID: LIB3106-020-Q1-K1-B6
ccccctcccaccccccctccccctttcctcccccctcccccccccccttttttcccccctatcccccccccccctactcccccccttcccccccccctcttcccccctccttttcccccccccttcccccccccccccntaccccctcccctttctctccccctccccccccctcttcccccccccccctttccccccccccccattcccccccc

SEQ ID NO: 23505 - DNA, 455 bp, Glycine max
  unsure at all n locations
  Clone ID: LIB3106-020-Q1-K1-B7
catggctgcctcatccaccatcaacaacttcctctctttcttcttacgcacaaaaccggcaccggcaccctctccaccggagttcaaccccaccacttctcagaaccagaaaccctcctcctcacagcccctaattgcccaatacaaccctcctccttcaccctcttgcgcttcttcttctgagttgtcctctgttatatgcccatccatggcgtactccaacacgctcttcttccggtcgccgtacaacgtgcaggtggtggtggccgaggacgagtccgaggagaagctcctgggcaggttccgcagagaggtgatcaaggccggcatcgttcatgagtgtaggaggagacggtatttcgagaacaaacatgaagagaaaaaacgcaagtcgcgcgaggctgccagatgtaaccgcaaaaggcggcccatgtcaaaaactgtangacagaaga

SEQ ID NO: 23506 - DNA, 452 bp, Glycine max
  Clone ID: LIB3106-020-Q1-K1-B8
cccacgcgtccgcttttctactttgagtcttcttgatccttctttttctccttgagcgtcaaacgtggcagatgaggtggttctgctagatttctggccaagtccatttgggatgagggtcaggattgcacttgctgaaaagggtatcaaatatgagtacaaagaagaggacttgaggaacaagagtcctcttctcctccaaatgaacccggttcacaagaagattccggttctcatccacaatggcaaacccatttgtgaatccctcattgctgttcagtacattgaggaggtttggaatgacagaaatcccttgttgccttctgacccttaccagagagctcaggctagattctgggctgattatgttgataagaagatatatgatcttggaaggaagatttggacatcaaaaggagaagaaaaagaagctgccaagaaggagttcatag

SEQ ID NO: 23507 - DNA, 190 bp, Glycine max
  unsure at all n locations
  Clone ID: LIB3106-020-Q1-K1-B9
gatcgcgagcggcttanaaaaagaatcatctatctatgtgtttatgtgggcatgtgagaacgtggatctgtttgcttttgtaattatctcgtgtttcttagacaagttaattaaaatgctatgttggttctcggagaaaattgttgttgagtcttaaagaacttgatctcggagaaattaaatctatcct

SEQ ID NO: 23508 - DNA, 455 bp, Glycine max
  unsure at all n locations
  Clone ID: LIB3106-020-Q1-K1-C1
gcgnggaaaggggtgctaangatgatgaaaagccaattgaagaacatgagaagggtggatttcttggtcagtggaggatttcattcaagacattggtgagaagattgagggagcagttgggtttgggaagccaactgcagatgtcactgggatacacattccatcaattaatcttgagaaggcagagctagttgttgatgttcttataaagaacccgaatccggtgccaattcccctaattgacataaactacttggtcgagagtgatgggaggaaactagtttcgggattgataccagattcgggcacaatccatgcacatggagaggagacagtcaagattcctcttactttgatttttgatgacataaggaatacctatgatgatattaaaccaggaagcatcattccttataaggtgaaggttgatctcattgtggatgttcctgtctttg

SEQ ID NO: 23509 - DNA, 279 bp, Glycine max
  Clone ID: LIB3106-020-Q1-K1-A11
aaaggctgtaccctcttttatccctcaaaaactataaaccctaatggcagatcgcgggggtggcgagcgtggcagcgaccgtggcggtttcggacgcggctttggtgggcgagggcgcggaggtgacaggggcctaggccggcgcctaggtcctcgccgcgaggaatatgataaatgggtcccagtgaccaaactgggccgtctggtgaaggagggaagaatcctaagccttgaacagatctacctccactcgctcccgatcaaggagcaccagatcat

SEQ ID NO: 23510 - DNA, 383 bp, Glycine max
  Clone ID: LIB3106-019-Q1-K1-G3
cttcagcctttctctctaactccctcactcacactcacagttaagcaatggcggggaaaggaggaaaggggcttcttgcagcgaaaaccaccgcggctaacaaggacaaagacaaggacaagaagagacctatttctcgttcatctcgtgccggaatccagtttcctgtgggacgtatccataggcagctgaaacaaagggtccaagctaatggacgtgttggtgccactgctgccgtatacttagcctcaattcttgagtatcttactgctgaagttcttgaacttgctgggaatgcaagcaaggatctgaaggtgaaaaggataacaccaaggcatttgcagcttgctatcagaggagatgaggagttggacacccttatt

SEQ ID NO: 23511 - DNA, 162 bp, Glycine max
  Clone ID: LIB3106-019-Q1-K1-G4
ctttttggcctattgcaaccagattcctccatgagggattctcactgctttgtatgcattttacaaacatgacatgtcaagaagaatattatccttaactttccttcttgctgtgcttaaactcttgaacatttttcacatgtgctcactgcctgcttttta

SEQ ID NO: 23512 - DNA, 424 bp, Glycine max
  unsure at all n locations
  Clone ID: LIB3106-019-Q1-K1-G5
cccacgcgtccgcccacgcgtccgcacgaatcacactctccacagtgcgattcagtcgccaatggatcgcaacggcgttctctctctcgcattcatctgcattgtagtcgccggcgtcggaggacagtctcccgccgcagcgccgtcaaacactccggcaactcccgccgccgccactcccgcccaagcaccttccacagtaccgaaatcaccagctcccgttgcttctcccaaatcatctccaccagctgcaacccctgcatctactccggcggcatctcccaccaccacccccgccgcgcctgctccggtgaccaagccacctgcagcctctcctcctccggcgactcctccaccggcaactcctcctccggcgccggttcccgtgagctcttccnccggtcccgtgccggtgagttcttca

SEQ ID NO: 23513 - DNA, 390 bp, Glycine max
  Clone ID: LIB3106-019-Q1-K1-G6
cttttgggcctatggcaaccaaatgcctccaggagggattctcactgctttgtgtgcgatttcacagtcatgacatctcaagaggaatattagccttagctttccttcttgttgtgtttaactgcttgagcagtttccagatatactcaatgcctgcttttgacagttttgaagctggctacaccagtaggacaaaccgtccctgctccatatgggtgagatcaggctttagagtcttctatggatttgtctccttctttataggagtggcacttcccttcctctcaagtcttgcaggtttgttaggaggactcactctcccagtcacttttgcatacccttgcttcatgtgggttcttataaaacagccaccaaaatatagcttcaact

SEQ ID NO: 23514 - DNA, 217 bp, Glycine max
  Clone ID: LIB3106-019-Q1-K1-G7
accacacgtacgtccactcgtcctaattaaaacaaaacataacataaaacttacagagaagacttataaaagctaacagtgacataaaaaaaataacttgcaaaccccatcaacctcacactgtgccacaaggccagcttcatctgtctctatccctgtctcctttaagactgtagctcttttctccaaaaagaatgctacaccttcaaaaaaaaca

SEQ ID NO: 23515 - DNA, 407 bp, Glycine max
  Clone ID: LIB3106-019-Q1-K1-G8
ctgttgtctcttggcttcaagattgtattcttgtcaggaagatatcttgacaaaatggccgtaacagaagcaaacctaaagaaggctggcttccacacatgggagcagttaattctcaaggatccacatcttatcactccaaatgcactttcatacaaatcagcaatgagagagaatctgttgaggcagggatacagaattgttggaatcattggagaccaatggagcgatctgcttggagaccacagaggcgaaagcaggacctttaagcttcctaatcccatgtactacattgagtagtaccttcacctctctcaacaatctagctagagtttgctcctatctatatgtaataaggtatgctgatatgcactattcaaataggagcattagctatgtttgttaat

SEQ ID NO: 23516 - DNA, 390 bp, Glycine max
  Clone ID: LIB3106-019-Q1-K1-H1
ggtttgggaatatggatgggtttcgttagcctgtgtcttctgtctgtatcagtatcgggtctgctccaacgcctagagcaccctgtcaaagctgatggctcacttagccttatggtcattggagactggggaaggaaaggaacatacaaccaatctcaagttgccactcagatgggaagggttgctgcaaagttaaatatcgactttgtgatatccactggagacaatttctacgatgatggattgactggtatagatgaccctgcatttgaaatttccttctcaaaaatctacactgccaagagcctccaaaagcaatggtatagtgtgttgggcaaccatgactacaggggtgatgttgaagctcaattgaatccaatccttcagaaa

SEQ ID NO: 23517 - DNA, 418 bp, Glycine max
  unsure at all n locations
  Clone ID: LIB3106-019-Q1-K1-H10
cgtccgagccaaaagacatgtccgttactgatgcgagtgttcactaagattgggagtcaccggtccatgggagactttgccgtgagaggcaaacatcccaaacacgaggttcagatttacacctggaaggacgctactctccgagaactcaccgatcttgacaaagaagttgctccggctgcaaggagaagaaacgccaaactctccttcgcctttgtattccccgacaaaaacggccgtttcaaagttcaagaggtgggcaagacattatcttatggaaatggaagattagatgatggcaaggctttagccgaacttggttttgaaatcggtgactacttggatgtggctattctgtagtttattatggatacttgcatgtggctggttatgtttgaaggcctngaaacacttattt

SEQ ID NO: 23518 - DNA, 356 bp, Glycine max
  Clone ID: LIB3106-019-Q1-K1-H11
ctactcttcatactaccagcaacgtcatcttgccagtatttggggaacaaccttctcactcatcgcaagatattcctaaaaaaagacaacattattacctcgttcgctgtcatctttgacggtggtagcacaggaacccgcgtgcatgtcttccattttgaccagaatttggatctccttcccattggtgatagtcttgagcttaataaaaagatcacaccccgtttaagtgcttacgaggatgatcccgagcaagctgcagaatctctgattccacttttggaggaagcagaaagtgtagttcctgaggacttgcgtcccaacacacccgtttagctaggggcaactgcaggctt

SEQ ID NO: 23519 - DNA, 383 bp, Glycine max
  Clone ID: LIB3106-019-Q1-K1-H12
accactcgtgcgtccacgcgtccgatagaaatcttcattaagggtttaatggtagtgcatggcgtgatcacatagccaagccaaggttcttcattcttatcacaaaaacaaattgatacaacaactagactcaaacaaccttcgacaattccagttctaaacaaatccaaacaaaaggaatcctaacacggttttaaattacagccagcatcaacaattgcaggcacaatatttacagtttctaatgccttggcgtcacaaccacaaccacaatttaaatccacatatctttaagaatagcaatatttagcttacaagtagctgatagtactcatcctccctaaacagctctgagtactgagattccttgagagccagcacca

SEQ ID NO: 23520 - DNA, 307 bp, Glycine max
  Clone ID: LIB3106-019-Q1-K1-H2
ccggctggagccacgcatccgcccacgcgtccgcggacgcgtggaaaaccctacaagtcacgaatttgagattctaatgcggtcctctctctcgtacttcatcggaaccgaaacccttcgccgcaaaaaatgcctcccaaatctgccaaatccaaggaagctccagctgagcgacccatcctctgtcgattctcttctcacctcaaaattggcattgttggcttgccaaatgttggaaaatctactctctttaatactctcaccaagttggcaatacctgctgagaactttcccttttgcaccattg

SEQ ID NO: 23521 - DNA, 279 bp, Glycine max
  Clone ID: LIB3106-019-Q1-K1-H3
gtcgggtcgttggatacttcggctaagagtaccgggtcgggtgggaagaagcgtgggggcgctccgtatagaatatttaacctggggaatacttcgccggttactgttcctactcttgtgagtatattggagcggcatttgaaggtgaaggcgaagaggaatattgtggacatgcctggaaacggtgacgttccttttactcacgcgaatattagttcggcccggagagagctcgggtacaagcccacgaccgatttgcaaaccggcttgaaaaagttc

SEQ ID NO: 23522 - DNA, 389 bp, Glycine max
  Clone ID: LIB3106-019-Q1-K1-H5
tacctttttcgaatcccggtggacccaacgtccgcatttattcaaaacttaagtttattccttgtgtaatgctttcttcctcaataccaaacatttcgaacacatgcggcaacttcaactgcgctgacaagactagctgcaccaatggtaacagctatggtattattgtacagactgagaatacttacatctacactgacatcatggatgttccagcatctgagcatgatcagaagtgcaattgttgcactaactgcacttgcactgactgcacctgtggccattaatgaatatgtattaaaatgtaaatgccatgagtttgtcaatacaaatatccaaataatgtaatcttctatatgaatacactatcgtgcttttatcctaaatat

SEQ ID NO: 23523 - DNA, 311 bp, Glycine max
  Clone ID: LIB3106-019-Q1-K1-H7
gtatctacatgtcaaaaacagggtttttcttatcacatcccttcttcaacacctggcggactcttatcgctctctgcatggcttcatcctccttcaaggtgtctaagagcaaactcgttaccacaccgatcacttgcatctcttcatgcaagatagtttcttcgcttacttgttttgagtcatatatcctggattctattcatctattgacgtttcaactttgaattctatcctatttgctcctatgttaccttctgattattctagcttaatctttcgatattaatccactctcctactttaaggaacac

SEQ ID NO: 23524 - DNA, 397 bp, Glycine max
  Clone ID: LIB3106-019-Q1-K1-H8
tttcagtctttcttggaactttgtttttctcacacatgtctcgctcctagccttggctttcaaccattgttgtcttgcttctgcttctgatgcctattaaaataattgtcccactattgttgccaataccaaaactctttaattctaaaagccaccttttttaagggtccattttttatttacaccaactgtgtttctgtttgccaaacctaacttttcacttgaggacactgccttggcttccttctcatatgcttcttcaccaaacattgttaattttaaaaaattaattaacagtgctttcatataatatgatagatctatcatccttctactcgtgttgttaaattacccacttttgttttgataattaaggttacccattctactaatgttt

SEQ ID NO: 23525 - DNA, 455 bp, Glycine max
  unsure at all n locations
  Clone ID: LIB3106-020-Q1-K1-A1
ngcactaaactttccctcgcagcagccgcagcttcagaagccgccgcccacgcatgcggcgcagccgccaacccagccaagccgccaagccccaagccaatgatcacgcctttggtgctgcgcattcggttcagctggttcagcgccggctgcagaatgttgaacagaacccaccctattgctgctgggtgcatatttgagtatgacaaagctcatccagagggttctggcattggctttaaggaggaagacaaacccaacttcattggttctttctattccaaaactaaggctatggtcgaagagctcttgaaagaatatgacaatgtgtgcaccctcagggttcgcatgccaatttcatctgacttgagcaatccgcgcaatttcatcaccaagatttctcgttataacaaagtagtcaacatttcaaacagcatgaccattttggatgaact

SEQ ID NO: 23526 - DNA, 446 bp, Glycine max
  unsure at all n locations
  Clone ID: LIB3106-020-Q1-K1-A10
cttcaacgaagacccagcttccttatacatattattctcttccttattgtccaccaaggaaaagggtggatagtgctgaaaatcttggataantgcttcgtggtgatcgcattgaaaattctcgttatgtgtttaaaatgcgtgaaccacaaatgtgcaatattgtgtgtaagcttaaacttgatgccaaaactgcaaaagagttcaaggagaagattgatgatgaatatcgagtgaacatgatccttgataaccttcctctggttgttcccataaaacggatggatgcagactctactgtttatcaactcggtttccatgttggactcaaagggctgtatagtgggagcaaggaggaagagtattttattcacaaccactttggcttttactgtcaagtatcataaagatacacttactgaatctggtagaattgtgggctttga

SEQ ID NO: 23527 - DNA, 320 bp, Glycine max
  Clone ID: LIB3106-019-Q1-K1-G2
caaaactcaagcattgcatccctctttatttgtactttgttttgtgctttagataaaagttctttcaaatcaagaggggttttaagatcatagtgtgtgttttgcaacaatggctaatttctttgctgctatcatcttggcactctttgccatttccatacttcaaacattgttaattgctgctaatgaacaatgaggccacttgtattacaacatgatcaaatatggaagtggaagtttcaagagttaccaatgcccatcacaatgctcgaggagatgtatccatacccaataccacaagccctgcatgtttttctgtc

SEQ ID NO: 23528 - DNA, 371 bp, Glycine max
  Clone ID: LIB3106-019-Q1-K1-E4
gccgatgtctaccgaagcggcgtggtttttagcaaagggaatccaataaatggtgacaggctgattgcaatcatgtctgccattgtgctgagggaacatccagcatcaaccatagtgactgatgctcgtactagcatggcactcactagattcataactgatatacgttgtcaccattgcctataccgtgtctcatacagaaatgtcattgacaagggagtgcatcttaacaatgacggaattgaaactcatcttatgatggaaacatctggtcatggtgctctcaaagaaaatcatttccttgatgactgtgcttacatggtggtgaacattataattgaaatggttaggatgaaacttgcttcatcaaa

SEQ ID NO: 23529 - DNA, 404 bp, Glycine max
  Clone ID: LIB3106-019-Q1-K1-E5
cccacgcgtccggagcagcagaatcttcaggccaagccaggtaagcaagcacagggggccccgaaatggcttctgcttctgttcccatggctttctcgctgagctctgttatcaacaacaacaagccttcatccgaagccttcttcaggccactacccctacggcaaccaaagaggaccctcttcaccacaaaggcagtgtcaaactccaaggctcaaatcaatgcatctttgaaggagaaggcagttgcaggactcacagcagcttctgtgacagcatctatggtggttccggaggtggctcatgctgctggatatgagttctccccttccctcaagaactttctgctaagcatctttgctggtgggtttgttctagtagccatatttggagccgttattggg

SEQ ID NO: 23530 - DNA, 363 bp, Glycine max
  Clone ID: LIB3106-019-Q1-K1-E7
ctcttctaaataccctgctgtacccacacatccgaacaaatcaaatccatatccaccttttcttctctattcttctctccatactccctgtccttttttaaaaaactacttaccaattcacactccattaataccaaatttttcaccttcaacatattcaacccattccaaccaaacattattctccaaaaattttctaatatttcatcctataatattttacaactcaccaaatttttcaataacctctttcccacctctttatctttctttcataccctttactcttctcaaatccacattttatacatcataaactctcaaaataaccatcattttcatacatcctttatatttaacatt

SEQ ID NO: 23531 - DNA, 63 bp, Glycine max
  Clone ID: LIB3106-019-Q1-K1-E8
cacacatccgccttcatatggataaacaacaagtttttcataaccttttcatgtcacttcaat

SEQ ID NO: 23532 - DNA, 239 bp, Glycine max
  unsure at all n locations
  Clone ID: LIB3106-019-Q1-K1-E9
tcacaacatttntcacaggcttcatgttgtatttcacaagaaggaggcatatcataatttttatcaccattcttgataatacaaatgggatcaccatttttaacacattattgagtacaaattatatcttcattgtgaacacaaagcttaagattaccatttttagcacataccatatcacaaatagttgttcctatacaaattcaatgacaatatccatttttagttcttctcctcct

SEQ ID NO: 23533 - DNA, 186 bp, Glycine max
  Clone ID: LIB3106-019-Q1-K1-F1
cccacgcgtccgtttgcatttagctaaaacactgttttctgtttgacttgcttttgtcgtcattgtagctatatatgtgaccacatgctcatttcaacaaccatatcaattcataatgaaaagttttcaagagtaaaattacctgtgaactatatagctacaatgaaccaaaaagcaagttaaaca

SEQ ID NO: 23534 - DNA, 422 bp, Glycine max
  Clone ID: LIB3106-019-Q1-K1-F12
gggggagccacgcgtccgctgatcacatttcttaggcgcgcgtttgtggtcttcgaggctgcgccgaaaaaggtgcattcgggtgtgaagagagcgcgccaagcctttaatcgcctcttgtacaacaaagctcggaaatcggagattaaaacacgcaccaagaaggttttggaggctctggaagtgcttaagaagaaacaagatgcgcaggccgaagaaatcctctccattgagaagttgatcggagaggcatactcgataattgacaaagctgtgagagtaggcacactgcacaggaacactggagctaatcgcaagtctcggcttgctcgaagaaagaaggcagtggacatccatcatggctggtataccccaactcctgaagccagtgtctgaaactatccacgtgctagtttacattg

SEQ ID NO: 23535 - DNA, 447 bp, Glycine max
  Clone ID: LIB3106-019-Q1-K1-F2
cggttcggaataccttccggagccacgcgtccgcccacgcgtccgctcagctcaaccatattctatctccacgccgctaactctctctcagactcattctctgtgtctctctctctttcacacccttcactttactctctctctctgacagctaaaatgcaaggaggaatgacatcatttttgtcacatgggaatgtcattagaaatgctgttctacaacgcgtgcgcatggtgaaccccctgctacagacaattgcctcttcgcggtttgaatctgttacgcctgctcgcattgaggagcatggttttgagagcaccacaatttcagacatcttgaatgataaaggcaagggtgctgatggctcctggctttggtgcaccacagatgatactgtttacgatgctgttaaatcaatgacccaaaacaatgtttgaaccttggttgtt

SEQ ID NO: 23536 - DNA, 314 bp, Glycine max
  Clone ID: LIB3106-019-Q1-K1-F3
cgcaaccgggagaacacgctattccgtttccacgtttccgttaactgtcagaaaccgagtgtgctagcggctttggagagattgaggataggagggacatgggcaggggtgctggaagaggtggacctccaggcgtggaccctggctacgcttcgcgacctcgacgccttccgatcgaactccccctactccgactccatcaacctcatctgcgccggcaagattctcaaagacgactccgatccgacccaaactcttgcccaactcggcgtcaagaacaatgctaagatcctcgccacgcgcaccttcacttc

SEQ ID NO: 23537 - DNA, 394 bp, Glycine max
  Clone ID: LIB3106-019-Q1-K1-F4
gctataacctgatttatcgccaggataatattaacttgtttcggcgctttttaaatacagtaggtttcttaacatgtccatgccatatctcatgctaccaaaccttccctctccgaatgaaaactcgctattgtgatccttcttcttttttaaaattctcaacttttaagtcttctttttaatcacacaacatcctatcctttaaaaccataccttaataatgcttataaccaacaaattactacattaatatctaacaatttacatcatactctaaaacagttaaccaacaatctttcctttattctattgaactcttaatccatcacaacgacttatttatattctgcatatattacaccctactctctaatatcccatactattaaaaaca

SEQ ID NO: 23538 - DNA, 418 bp, Glycine max
  Clone ID: LIB3106-019-Q1-K1-F5
ccgatgtcgaccgaagcggcgtggttgatagcaaagggaatccaataaatggtggcgggctgattgctctcatgtctgcaattgtgctgagggaacatccaggatcaaccatagtgactgatgctcgtactagcatggcactcactagattcataactgatagaggtggtcaccattgcctataccgtgtcggatacagaaatgtcattgacaagggagtgcatcttaacaatgacggaattgaaacgcatcttatgatggaaacatctggtcatggtgctctcaaagaaaatcatttccttgatgacggggcttacatggtggtgaagattataattgaaatggttaggatgaagcttgctggatcaaatgaagggattggtagtcttatagaagatcttgaagaaccgtatgaatc

SEQ ID NO: 23539 - DNA, 321 bp, Glycine max
  Clone ID: LIB3106-019-Q1-K1-F6
ccgccgatgtctaccgaatctgcgtgtttttatatcaaagggaatccaataaatgacagaagcttattactctcatgtgtgcaattgtgctgagggaacatccatcatcaaccatagtgactgattctcgtactatcatggcactcactatattcattttttatttatttggacaccatttcctataccgtgtctcatacataaatgtcattgacatggtattgcatcttaacaatgacagtatttaaacgcatcttatgattgaaacatcttgtcatggtgctctcaaagaaaatcattttcttgatgactgtgcttaca

SEQ ID NO: 23540 - DNA, 416 bp, Glycine max
  unsure at all n locations
  Clone ID: LIB3106-019-Q1-K1-F7
accacattcacctgagctttttgtgaggattccaaagcatggcttcccttgcagggggcactgctgctgcttcccttggcatgtcagaaatgcttggaaaccccatcaacctcagtggtgccacaaggccagctccatctgcctctagccctgcctccttcaagactgtggctcttttctccaaaaagaaggctgcacctccaaaaaaagctgcagctgctgctcctgccaatgatgagcttgccaagtggtatggtcctgacagaaggatcttcttgcctgagggtctcttggaccgatctgagatcccagagtacttgaccggagaagtccccggagactatggttatgacccatttggtcttagcaagaagccagaagatttttccaaatatcangcatttgaattgattcac

SEQ ID NO: 23541 - DNA, 395 bp, Glycine max
  Clone ID: LIB3106-019-Q1-K1-F8
accacgcgtacgtccactcgtcctcataaacaaaagtgcaagaattaggttgcaggggccgatgttcatggagctggcaacagcgtcgagatcaacaatctacctcgctttgctgtataggaacaaaacaaaagatagaattcacttttggagttcgtgattgtgaatagtgcaaatcagcaagtggttgctggagtgaattactacataacattggatgcaaaatatggtctgattaaaaatgagtatgaatctaatgtctgactgaaggaatggttgaactccaaagagttgctagaattcaagccagtcaatgtctttagcacaccaatacgtggcattaccgatgtgactgcgaatagcctttagatcgacattttagcatcgtttgctat

SEQ ID NO: 23542 - DNA, 394 bp, Glycine max
  Clone ID: LIB3106-019-Q1-K1-G1
ctgctataacctagattatcgcgaggagtttataaacgcgatcgtctctcttccttgcttgaggcattttagtagcatgggcatgccatggcacatgctaccaaacgttacctatccgaatgaaaactggctatcgtgagcgttcttctgaagtaaaatgcgcatgtttaatgcttgctgtttaagcacacaacatcctaacctttaaaaccattcctgaatagttcgtttaaccaacaaaagactacattaatggctaacaacttacatcagactctaaaacacttaaccaacaagctatctatcatgctactgaacgcaatgtccatcacaactacatatttactttcggcataaatcacaccgtactttctaatatcccatacttattaaa

SEQ ID NO: 23543 - DNA, 433 bp, Glycine max
  Clone ID: LIB3106-019-Q1-K1-G10
ccacgcgtccgaccactcctcctcccacgcattcggcatagatattgtgcgaacgaatctgctacaggcgaggggagtagccttttatctccgggcacattctatctcactgaagttgactccatgtatcggagattctattcaaagaaaactaaagaaagcagcttgactcacgctgagaacggtgtgattgctaatggcgttgctaatggccactgatgttgagcatgtacaatcagcagtcaacttcgcctagaatgaggaagggtattgttatttgcgaagttctgttggtaaattgtttctggggtggcaagtgttatcgattcaaacattttattgtattcttttaagatgtagctagttactctagtctaagtcttgtacacacaaaaaaaaaaaagttactcaaatctaaattttatctttttct

SEQ ID NO: 23544 - DNA, 335 bp, Glycine max
  Clone ID: LIB3106-019-Q1-K1-G11
ctccatttccattttctctctcacttttcaagaatcgttagctatgggaaagtcttacccaactgtgagtgctgattaccacaaggcccttgacaaggcgaagaagaagctcatacgcttcatcgctgataagagatgcgctcctctaatgctccgtttggcatggcactctgctggaacctttgacaagggcacgaataccggtggacccttcggaaccatcaagcaccctgccgaactggctcacagcgctaacaacggtcttgacatcgctgttaggcttttggagccactcaaggcagagttccctattttgagctacgcccatttctacc

SEQ ID NO: 23545 - DNA, 295 bp, Glycine max
  Clone ID: LIB3106-019-Q1-K1-C2
cccacgcgtccgcccacgcgtccggtttcaccgttttcctttgctttgcgttctacggtggccaaaacctcagagattgttacatgcaaagctgctatttgctgcggaataggaaaacctgtgactgtggaagagatacaagtagaccctcccaaagccaccgaagttcgagttaagatgctttgagccagtatatgctccacagacatttctagcacaaaaggattaccacataccaattttactatagcacttgtacaccaaggagtacgtattatagagagtgtctgtgatc

SEQ ID NO: 23546 - DNA, 375 bp, Glycine max
  unsure at all n locations
  Clone ID: LIB3106-019-Q1-K1-C3
cagcgactgcgtttttggatcggaactttttctgcggcgtagcaatgggacactccagcntttggaactctcacccaggaaactacggtcctggttctcgcacttgccgtgtgtgtgggaatccacatggactgatcaggaagtatggccttatgtgctgcaagcagtgcttccgtagcaatgccaaggaaattggcttcatcaagtatcgctaaaagagcagttgtcaactacggaccaatattgtgttctggcactaggatgttttgaggatgttatgtttgaagaaacttgagactttcttttttcatctaattaattattagaacgtatttggggtacttaaaatacctttatataaatttgtttgaaccc

SEQ ID NO: 23547 - DNA, 388 bp, Glycine max
  Clone ID: LIB3106-019-Q1-K1-C5
cccacgcgtccggcggaagaagaagacgccgcagccatggtgaagtactccagagagcccgacaatcccaccaagtcctgcaaggccagaggcgctgaccttagagtgcatttcaagaacactagggagactgcctttgccatcaggaagttgcccctggttaaagctaaaagatacctggaggatgttttggcccacaaacaggccatccctttccgacgcttctgtggtggtgttgggaggacagcccaggctaagagcagacactccaatggtcaaagacgctggcccgtcaaatcagctaagttcatcctagatttgctgaaaaacgctgagagtaatgctgaagtaaaaagtttggatgtcgatgctctgtacattttccatg

SEQ ID NO: 23548 - DNA, 423 bp, Glycine max
  unsure at all n locations
  Clone ID: LIB3106-019-Q1-K1-C6
cgaaaggaaagaagaagaagaagcgttctttcggagagttcgaagatgtcgggcgttaccaacaacaacgaggaagacaagaagccaaccgaacagggagcacacatcaaccttaaggttaaggggcaggatgggaatgaagtttttttcaggatcaagagaagcactcaattgaagaagcttatgaatgcttactgtgaccgacagtcggtggatttcaactccattgcttttctgtttgatggacgccgcctccgagctgagcagactccagatgagttggaaatggaggacggggacgagattgatgccatgcttcaccagacaggaggttctgttgtctgaaggatgtgattactntgctcctcattataagtaggaattagttaacttagagctatgtatggcataagatacatattt

SEQ ID NO: 23549 - DNA, 399 bp, Glycine max
  unsure at all n locations
  Clone ID: LIB3106-019-Q1-K1-C7
cccacgcgtccggtttctttccttctctctctctggagctagcgcgagtgaccggggcggcgaagatagagtcagatcggaagcggaagaaggcgtcgacctcggcggcggagaaggagaaccggaataagcataagaagtcgaagatgtcgtcgtcgtcgtcgaagggtggtggcggtattgaggttagggcttcgcacatattgataaagcacgaaggttctagaaggaaggcctcgtggaaggatcctgaaggtcgcatcatcaagagcacaaccagagaaaacgcggtttctcagctcaaggccctccgcgacgacatcgtttcgggcaaagcctccttcgaggacatcgcctctcgcttctncgattgcagctccgccaagcgcgggggtgatc

SEQ ID NO: 23550 - DNA, 394 bp, Glycine max
  Clone ID: LIB3106-019-Q1-K1-C8
cccacgcgtccgtcctgttttcccaaccaacttgaagctccttccaacaccatcatggtcatccatggcatctcaaggtcatggtaacaagctcatcgtttccacatcaccaaagagtgacagtggcagcggcggcggtggcggtgcagtgggatcattgcccaaagggcagtgcctgtgctcaccaacgacacatgaagggtccttccggtgtcgtttgcatcgtgggcctacagcctcaccaacaaattggatgaaacgctccaagtccatgcctgctaataaagcctgtggttctgactccacatgctgattaatacaccaaaaaatgctattgtgagttatgtgttcatgtgtacctttatatgatatatgatatgaatccttgctttgg

SEQ ID NO: 23551 - DNA, 406 bp, Glycine max
  Clone ID: LIB3106-019-Q1-K1-D1
cccaactgaggcagaactgcaggatatgataaacgaggttgatgctgatggcaacggagccatcgatttcccagagtgcctcaacctgatggctcgcaagatgaaagacaccgactcagaggaggagcttaaggaggctttccgtgtgtttgacaaggatcagaatggtttcatctctgcagctgagctccgccatgtcatgacaaatcttggggagaagctgacggacgaggaggtggatgagatgatccgtgaggccgatgttgacggtgatggacagatcaactatgaggagtttgtcaaagtcatgatggccaagtgaggaccattccaaccataacctaaatttgaaaagcatataaagagaagagggacagggcaaataagttttgatgagaattctatt

SEQ ID NO: 23552 - DNA, 110 bp, Glycine max
  Clone ID: LIB3106-019-Q1-K1-D10
gcgcagtaatgagaataatcaaattagatttttaaattttaaaaaaaaaaaaaaaaaaaagaaatattgaaaaaataaaaaacacgtcagcctttctcaaacatccttcc

SEQ ID NO: 23553 - DNA, 415 bp, Glycine max
  Clone ID: LIB3106-019-Q1-K1-D12
gcgtgcggaaactgtgtctctacttgatgtgatctttcctcaaaacatcaaggtctgggctaaaaaccagagatgggatgacaaaaattattcctgatcctgagatagaaaccagagggttgatgacatcccaaaagagctcccagaccccgaagccaagaagcctgaagattgggatgatgaggaagatggtgagtggacaccccctaccattgccaaccctgagtacaagggcccatggaaggcagagaaaatcaagaaccccaactataaaggaaaatggaaggcaccattgattgataacccagatttcaaggatgaccccgacctctatgttttccccaacttgaagtacgtggggattgaattgtggcaggtgaaatctggtactttgtttgacaatgtcttaattact

SEQ ID NO: 23554 - DNA, 388 bp, Glycine max
  Clone ID: LIB3106-019-Q1-K1-D2
gaagagtcctcgatagaaaagggagctgagatttgttgttctgttgccccaaatgaagtgcaggtgccagctgtgaaaacctcggatcccaagagtaagcctgagtgctatggtgtcttctgccttacctatgatttgagggctgaagaagagacaagatcctggaagaaattaattaacattgcagtctcaggtgctgctggaatgattgcaaatcatctacttttcaagcttgcatctggtgaagtttttggcccagatcaacctattgctctcaaattattgggatcagaaaggtcaatccaagctcttgaaggtgttgcaatggaattggaggactctttgtttcctttgttgagggaggttagtattggtatcgatccttatg

SEQ ID NO: 23555 - DNA, 416 bp, Glycine max
  Clone ID: LIB3106-019-Q1-K1-D3
ctgtttctctctctacactctattcaacccttcacattttctctcttctttatcttagggtacttttccatggaggaaagcaagaaacgagtccgggacgagtccagctactcacccgagtcccaaactcagctggtcgactctcccgagtctgaaagtcagcgggtcgactcacctgagtctaagattcgtcgagttgactcgtccgagtctcaactcgactcggtccttgactcggaggtgcgtctacaagacgacatttttaacatacttgacgacgccgataatgtgcctgagcgtgactcggtgcagggtcttgactcagtgatcaaaagcttcgaagatgagataaacgctcctggttcggattctggttcgggtgacccgacccaagaaccaaaactctgggagctaca

SEQ ID NO: 23556 - DNA, 421 bp, Glycine max
  Clone ID: LIB3106-019-Q1-K1-D5
attctattcattcaagattcagcaagtgcgttttggaagcagagaccgaaatactgggagatggcccgtacaaagcaaactgctcgtaagtcaactggaggaaaagctcccaggaagcagcttgcaaccaaggctgcacgtaagtctgcaccaacaactggtggtgtgaagaagcctcatcgttatcgccctggaactgttgctcttcgtgagattaggaaataccagaagagcactgagctcctaatcaggaagcttcctttccagaggttggttcgtgaaattgcccaggatttcaagactgatctgcgtttccagagccatgctgtgcttgcattgcaagaggctgctgaagcataccttgttgggctctttgaggacactaacttgtgtgccattcacgccaagcgtgtgactatta

SEQ ID NO: 23557 - DNA, 384 bp, Glycine max
  Clone ID: LIB3106-019-Q1-K1-D6
cccacgcgtccggtggaacatgcacgtccagatccccttcagcaccttctccaagcggtccttcaccgttcccgaacggcgaagacctcctcctctgcggcgccctcgagtattacgaccgcacctacgatcggatcactcccaaaaacgaacgccgcctcgaacgcttcaagaatcggaacttcttcaaagtcaccaccaccgacgaccccgtcattcgcagactcgccaacgaggacaaagccaccgttttcgccaccgacacgattctctccactctcatgtgtgctcccaggtctgtttattcctgggacattgtcgttcagcgtgtggggaataagctcttcttcgataagcgcgatgggtcgcaacttgatttgctct

SEQ ID NO: 23558 - DNA, 333 bp, Glycine max
  Clone ID: LIB3106-019-Q1-K1-D7
gagccacacatccggcagtgcatcagcttcatcgccttttttcccccaggcttctaagtgtgaaaaattgcaaattattagtagccgggagcccactttgtttgtttgtacttaaactacattcccatttgtttttgctttttgagatttcatcatcctgtatttttggtttttgttttcggacttcaatggaaattaatggatgagaactaatgaataaaaaatatatttaataattcatttaattaataattaagtaaatatatttacttacatatatttacttttacaacaataaaaaatataagtttacctgtctttttttttattttt

SEQ ID NO: 23559 - DNA, 381 bp, Glycine max
  Clone ID: LIB3106-019-Q1-K1-D8
ggaattcccggcgggacgccacgcatccgcccacgcgtcctcatggcagcttcttttgcatctgcttcctccaaacttatactattcccccattctacatcttgttcccttatctccacacccttccgttcctccaccaacacccacaaactatcccctctctcctactccttcctccaccccaccaccttcctccgccgcaccccctactccaccactactcccacgttgactgccccggtcacgccgactacgtcaagaacatgatcaccttctcctcccatatggactgcgccatccttgtcttcttctgcgccaactgtcccatgccccaaaccaaataacacattctcttaaccaatcaagtcagtgtccccaaca

SEQ ID NO: 23560 - DNA, 409 bp, Glycine max
  Clone ID: LIB3106-019-Q1-K1-E1
gccgattcttcaatcttatatagatttttatacagagacagagatagattcccttcgcatccttaaaagagtgcaaggggaatgccctatcctttcgttaactagatgtttgtgtaacccaaacactccttcaaattcaacctcgataacatctctacctcttccaatcataaagataatctcataacacacggaatcatgtatttacccaatatctcaatcgtctcatttgctaaaaatccagctatacacttcactacatttgatattcctacactatacatccatcttcaaaagtttaaccatcctatattttacttcatcatatccttctgtacatatctaacctctaatcccaaatgaccaacacataattcttttctcaatacacttattcaacatcttattt

SEQ ID NO: 23561 - DNA, 421 bp, Glycine max
  Clone ID: LIB3106-019-Q1-K1-E11
gcgcggactccttggaagcatgtcaaattttcctcaacttgctaggcaggggagctggggttctaaagagtgttcccatgagaggtaattcacctgcatcattgagtcgacaaaaatctgggagtggcaaaccaactgagcaatctctatcatcatcacctgcctcttctcaatcactgctaaaactgaaaaaagatgcaatgaccaagaattctgaagccatggacttcagagtttggtgtgagaatgaatgtgcgaggctcattgggacaaaagatacaagtttccttgagttttgcttgaagcagacaacatctgaagcagagatatttctcacagaaaacctgtgattatatgaccatgatcatgaattcattgataaattcctcaattacatggacctactaccatcagatggttt

SEQ ID NO: 23562 - DNA, 320 bp, Glycine max
  unsure at all n locations
  Clone ID: LIB3106-019-Q1-K1-C12
accttcaactcttatctnatcttctcaccctctctctcacaggatcaccataaaacctagcggcctctctctctctctatttctatcacatcacaatttcatcaaaacctcttaagtcttcatagtcttccttctttctttcttcttgaaaaaacaaaaagtccaaaccatggctcagaaaaccgacaaagaagaaaccgacttcaaggttcccgaaacgattactctttgcgttaacaactgcggcgtcaccagaaaccctgctacgaataacatgtgtcagaagtgcttcaccgtcttcaccacctctaccgccacca

SEQ ID NO: 23563 - DNA, 412 bp, Glycine max
  unsure at all n locations
  Clone ID: LIB3106-019-Q1-K1-A6
cccacgcgtccgagatatcatcacattgcaaagaaaatacacattacattactaagggtttgttcatttgagtagtagcgatggctagcctcaaggttgcatgtgtggttgctgtgatgtgcatggttgtggtggccatgagtgctgcacccatggcacaggccgcaatcacgtgcgggcaggtcgccggcgacatgtctccgtgcttcagttatcttcgaagcggcggaaaaccgtcgcaggcctgctgcaacggagtgaagttcctcagcagcgcggtgaagaccaccgcggaccgacagggggcgtgcagttgcctgaaaaaccttgccaataatatgggacagagtttgaatgccggcaacgcagcctatctccctggncaatgtggcgtcaacataccttacaagat

SEQ ID NO: 23564 - DNA, 422 bp, Glycine max
  Clone ID: LIB3106-019-Q1-K1-A7
aacacaacaccttttccttttcccttccgttggtgccattcgtgcagcaccggatcctctcatttctccggcgataactctcccttttccggcgaattcaccgcttcctcgatatgaatcccgagtatgactatctgttcaagctccttctgattggagactctggtgttggtaaatcatgccttcttctaagatttgctgatgattcatacattgagagctacataagcaccatcggagttgattttaaaattcgcactgttgagcaggatgggaagacaattaaactacagatttgggatactgctggacaagaacgatttaggacaataactagtagctactatcgtggagcacatggaatcattattgtttatgacgtgacagatgaagatagcttcaataatgtgaagcaatggctc

SEQ ID NO: 23565 - DNA, 402 bp, Glycine max
  Clone ID: LIB3106-019-Q1-K1-A8
aacacaacaccttttccttttccctttcgttggtgccattcgtgcagcaccggatgcgggtcatttctccggcgataactctcccttttccggcgaattcaccgcttcctcgatatgaatcccgagtatgactatctgttcaagctccttctgattggagactctggcgttggtaaatcatgccttcttctaagatttgctgatgattcatacattgagagctacataagcaccatcggagttgattttaaaattcgcactgttgagcaggatgggaagacaattaaactacagatttgggatactgctggacaagaacgatttaggacaataactagtagctactatcgtggagcacatggaatcattattgtttatgacgtgacagatgaagatagcttc

SEQ ID NO: 23566 - DNA, 389 bp, Glycine max
  Clone ID: LIB3106-019-Q1-K1-B1
cccacgcgtccggtaatggcacgggtcccattaccaaccaagaagcgaatctactgtgttcttaaatccccgcacgtacataaggatgcccggttccatttcgagatcagaactcaccagcgtctcattgatattctatatcctacagctcaaacaatagattctctgatgcaacttgatcttcctgctggtgttgatgtggaggtcaagctgtagagatatttgcttttcaggttgctaactgtcttgaatttgagtgaggttcaacttgttatcaatagccaaaatatattggcagatatcatgtgtttcactgcctaaacttgatttctaagaacaatgctaaaagtccttttgtttgctttccctttctgtcttcattaaattag

SEQ ID NO: 23567 - DNA, 361 bp, Glycine max
  unsure at all n locations
  Clone ID: LIB3106-019-Q1-K1-B10
ttgggaganccacggggagccaacaaggatgcaaacgaactggtacatatgttacttgcaatatacccttacctggagtgtcaagggcactttaatgaacttcttagagcaaatcctgtactgactgtatcacatgctgaattttgtaagtgcctatgccatgtgcataatgtggttaatagaagccttgccaaaccgatattcccctgtgaacgacttgatgcaaggtggcgctaactgtactgtgaacagaatgcatgtgacattatcggaagcacataagtttttgggaggatatggcagaaacctacctaaaaatgattggcacacatactatgcgagatgtgttaacatttgacct

SEQ ID NO: 23568 - DNA, 347 bp, Glycine max
  Clone ID: LIB3106-019-Q1-K1-B11
cattgatactcttttgctctcagtactgcaccttagtacccagagaaaaactaatgagttcactgcgaccctataacacatgtcttgaaacaacaaagtttctcttcaacccttcaaagcttggaatctctacacaaacatgcttgatagcaccaaggaagacatcacgtagaatacaagtgaaatgcagtggtgcataaaacaagggtgagagacgaacgtttttgacactggaagaagctggtttggttgagatatcacgtttgagcacacatgaacgctttctatgccgtttaacgatatcgtccctgaacttgctaagagtgatatcagagcaagaaagatgt

SEQ ID NO: 23569 - DNA, 168 bp, Glycine max
  unsure at all n locations
  Clone ID: LIB3106-019-Q1-K1-B12
tcgtaccgcaccacgtccgtccgcttatgtaacaaaaagtacaatcacaaatcagcaattantngaaataaacaaaaaaggaaaaaaaaggaaaaaaataaaaaggagaaaataaaatnaaaaacaaaaataaaaataaaaaataaaaaaaataaaggggcgcgggcc

SEQ ID NO: 23570 - DNA, 189 bp, Glycine max
  Clone ID: LIB3106-019-Q1-K1-B2
gagcaatgtatataggaaattgtaggccattcttattgcttacgctaatcctatcacatcatacgctggtttgcctataattgctgctataaagttctacagatgaaactagaaaagaattcacggtgtaacttctttgaagattgattccaccaacactgttctgtaacatgtaaggagcatttaatg

SEQ ID NO: 23571 - DNA, 424 bp, Glycine max
  unsure at all n locations
  Clone ID: LIB3106-019-Q1-K1-B3
ctataagctagtttatcgtgaggagaatatgaagttgtttgttttctttgttgctgcagtagttttggtagcatggccatgccatggcgcaggctaccaaaggttccctctccgaatgaaaactggctatggtgagcgttcttcggaggtaaaatgcgcaagttttaggcttgctgtggaagcacacaacatccgagcctttaaaaccattcctgaagagtgcgttgaaccaacaaaggactacattaatggcgaacaatttagatcagactctaaaacagttaaccaacaagctttcttttatgctagtgaacgcgaagtccatcacaacgacatatntatattcggcatagataacaacgtactctctaatatnccatactattgaaaacatggttatggggtgggaggaattaaatgaaac

SEQ ID NO: 23572 - DNA, 367 bp, Glycine max
  Clone ID: LIB3106-019-Q1-K1-B4
aacagagagtggtttcagtgagtgatctgtgatcacttgatccttcataagtcgtcggggcatcatcatcatcaccgttgattgaagaagatgccgatcagaaacatcgtcatcggaaggcctgaagaggctactcaccccgacacgttgaatgcggggttggctgagttcatctacaccttgatcttcgtgttcgcccgttcaggttccggcatcgcctacaacaagctcaccgacaacggcgccgccacttccgccggcctcatctccgcttccatcgcccatgctttcgccctcttcgtcgccgactccgtcggcgccaacatcttcggcggacacgtcaaccccgacgtcaccttcggcgcct

SEQ ID NO: 23573 - DNA, 409 bp, Glycine max
  Clone ID: LIB3106-019-Q1-K1-B5
cccacgcgtccggtttccaaagcagcaaacaacaaacccacaattcttcttcttcacttccctcagcattgccgttctcaaagatggcacatttgctggcaatggtggtggaaggtgttggaggcttcgtcaaaacgctttgggctcttcaagaacggcgttggtcctacaccttcgacgctgtggcctctgctgcggtgtccgtgaccatggcattggtgctctgcttgttgtctattcgtactagttatagacatagacgaggtgatatgttgtttgcctctttctgatgtaactactgtgtgtttctcttcttatccgttcagcaatttttatcaaaattctgaattatgatatcttggttgccacgcagaacatcaataaagaaagattagccgtgtttttattc

SEQ ID NO: 23574 - DNA, 60 bp, Glycine max
  Clone ID: LIB3106-019-Q1-K1-B6
cccacgcgtccgcccacgcgtccgacaatactcaaatgataaatcaaccaagattcggat

SEQ ID NO: 23575 - DNA, 366 bp, Glycine max
  Clone ID: LIB3106-019-Q1-K1-B7
atccgaagcaggcccaatttccctctgcagctgttagagaaaaaggacgttgatgaggtcaccgaacaaccttgttccaccaccagcgtggtaactactgctgctgctactattacttctggtaacaacgacctccacgtggcggagcagtcgaagaagcctccgccaaagcggagttccacgaaagaccgccacacgaaggtcgatgggcgaggccgccggattcgcatgccagcggcctgcgccgcaagagtgttccaactcacgcgtgagctgggacataagtctgatggtgagaccatcgagtggctcctccagcaggcggagccggcggtcatcgctgccacaggcaccggcaccattccc

SEQ ID NO: 23576 - DNA, 422 bp, Glycine max
  Clone ID: LIB3106-019-Q1-K1-B9
aacacgatgcagagacttgagaatggcactcgccagtggtctgagactcatagtaccgggaagagggccacacggctggccgagatctccgcgcactcatcgctgacaggaactgcgctcctataatgcttcgactggactggcacgacgcccgaacttactatgctaagaccaagactggtggacctaacggttcgatccgtaacgaggaagagtattctcaccgcgccaacaatggcttgaagaaggctatcgatttctgcgaggaagtgcaggaaaaacatcctaaaattacatatgcagatatctaccagcttgctggtgttgttgcaattgaaggtaccgggggtcccacaattgattcccctcctggtagaaaggattcaaaaatatctcctaatgaagggccggtttctgatgct

SEQ ID NO: 23577 - DNA, 367 bp, Glycine max
  Clone ID: LIB3106-019-Q1-K1-C1
cccacgcgtccgcccacgcgtccggagaagaagtgaaagaaagcatcagccgcggcggtgttaggtaggcggagccatggcggcgcctgaatcccctctctgttacgtcggtgtcgcgaggcaatccgctgcttttcgcctgatgaagcaaatggggtgggaagaaggagaaggtcttggaaaagagaagcaggggatcaaaggacacgttcgagttaaaaacaaacaggacactattggtattggccttgagaagccaaacaactgggccttcgacaccactcagtttgataatattcttaagagattgaaagttcaagcaccgcaatcccatgacatagaagaaaaagtggaaaccaaagctagt

SEQ ID NO: 23578 - DNA, 425 bp, Glycine max
  Clone ID: LIB3106-019-Q1-K1-C10
cttgtcaggaagaacactggacaaacatgccgtaacagaagcaaacttaaagaaggcgtggctacgacacatgggaaaaattaattctcaaggatccacaagatccttccactccaaatgcagtttcatacaaaacagcagcgagagagaaactgataaggcagggatacaacattgttgggatcattggagaccaatggagcgatctcctcggaggccacagaggcgaaagcaggacctttaagcttcctaatcccctgtactacattcagtagttccttcacctctcaacaatctagcttgctcctatctatctatatgtaataagatgcgttcaaataggggcactagcttcactttattttgtttcagctgtgtgtcaacaagtcatgtaagagacttcactatgttgttttctctttcgt

SEQ ID NO: 23579 - DNA, 247 bp, Glycine max
  Clone ID: LIB3106-019-Q1-K1-A4
tccgatcaacaccagccttatctcctatcatttttttacaaaatcaccatcattataactcatgcaacttttacatataagggcggttaccccttacaaggttcacaaccaatttgagcagcaccaccaaaatggttattccaaatggtggtgtctgtcttagagcttaactcaactcatcacttgtcatatgcctcaacactgggctctcccttttcttgatgaggttcgcgttctttaactttca

SEQ ID NO: 23580 - DNA, 300 bp, Glycine max
  Clone ID: LIB3106-019-Q1-K1-C11
cacgcgtgcggtcttcaatcatatctcattccaagttatgaagatccctaccatactcatactctggggacttggggacatctacacggcactcctaccttcatccacctgttcaagtcgacggttgacatggaatgttacgatcctcaaaatggtgggaaacattttgtgttgccagtcatcaattcatcatatggtggaatcagattagccgtatctgtaatagaaaagatccccctcactgttttacaatctgtccatccgtttgttaacgagatttcatctattttttcaacccca

SEQ ID NO: 23581 - DNA, 224 bp, Glycine max
  Clone ID: LIB3106-018-Q1-K1-C9
catgcttgattggaaaaccaaatcaatgccactcaattagaccctatatgatcacctcatgactttagacacaaccaagcttgtgtaaatgatttcagtatccatttcaaactaagaacctgatacatcatctgttcaccattatccataattactaaatcaccacttaaaaactttcacagattttaattataaatgagaattttcgcccactgttcactctc

SEQ ID NO: 23582 - DNA, 284 bp, Glycine max
  Clone ID: LIB3106-018-Q1-K1-D10
aacaaaacaatacaacttaaaaaccaatacaatctacacttctaaataataaaaaaaaacactggataatagaactataaaaatactgaagcacaattaaaattttcccaattatatcaattaaataaactataaacttttattgctattcacggcgctttctcattaataccgatcatattacttcaattttaactttctctatcttttcaattgctaccttataatataatctcattctctgtttcaaatactttccttgtttcataattccttatttatcc

SEQ ID NO: 23583 - DNA, 377 bp, Glycine max
  unsure at all n locations
  Clone ID: LIB3106-018-Q1-K1-D11
cctcacccattttcttcgtagccaaacactctgaaattctcagttatgtcgtggcaagcgtatgtgggtgatcacctactgtgtgaaatcgaaggtaaccacctcactcacgccgctatcatcggccaagacggaagcgtttgggctcagagcaccaacttccctcagttcaaacctgaggaaataactgccatcaataatgactttaatgagcctggatcacttgctccaactggattgtatatcggtggcaccaaatacatggtcatccagggtgagcctggtgctgtcattcgagggaagaagggtcctggtggtgttactgtgaagaagaccggtgctgccttgatcatttgcanttatgatgaaccaatgac

SEQ ID NO: 23584 - DNA, 412 bp, Glycine max
  Clone ID: LIB3106-018-Q1-K1-D12
gcttccgctctttacttccttttatgcctatcgcccatcactttgcttctttctgcgtttcgtgctgaagctcaatctcatgctccagctcccactttcaagtactgtgaaaagaatgcagactatgctgtgaaggtgagtggagtggaaatattgcctgaccccgtggagagaggagtgccattcacctttaagatcccagcttatactcctgaaccaattcaaagcggggacttgttatatgaaatttcttatgctggaatagaagcacaacctgctacatttctccatgatctctgtgaggaagcaccatgcccagtacctgcaggcaactttgtgctcgttcacaccgaattattgccttccgttaccccaccaggcacctataatgtgaagctgaatttaaggatca

SEQ ID NO: 23585 - DNA, 336 bp, Glycine max
  Clone ID: LIB3106-018-Q1-K1-D9
gcggttcatcccctgaaggtctctctggaggatctttacctcggaacatctaagaaactcgctctggcaccaaacgtgctgtgttcaaaatgcaatgggaagggctcaaagtctggggcttcaatgacctgtgctggttgccagggtactggcatgaaggtgtctattaggcaccttggtccttctatgattcagcagatgcagcatccttgcaatgagtgtaagggtactggagagacaatcaatgacagagacaggtgccaacagtgcaaaggagagaaagttgttcaggagaagaaagtacttgaagtttgtgtggagaaggtaatgcataat

SEQ ID NO: 23586 - DNA, 355 bp, Glycine max
  Clone ID: LIB3106-018-Q1-K1-E10
gcggccagcagcacaccttaaaaaagttcccggctcctttcttgaatttcactgaagccataaagcctagcacatttactacaattggttattttattttcacaaatcacgataaaccatctccaattccttacgttactctgtgcttcaatggcgtccaaccacgagatggatcaagacgacgacggaggagcaaccgacctcagcaccagcgacgccgaaaccaccaccaccaacctcaatggagtccccaaacagcacaacgcgtttgaagaagaaacaacggggtttcaagtcttgccgctgaaaaaggaggagccaacatattcggacccgaacatggggattactcccg

SEQ ID NO: 23587 - DNA, 239 bp, Glycine max
  Clone ID: LIB3106-018-Q1-K1-E12
attacatagcattctacaactacaattcccgacctaaacaaacccacaacgctctagtcatctttacttaataacactctcaactttaactgttctcctctttaatacatactgtactctcttccatttaatggaacatttcaagaatctgatcacttgctaacccaacttctcatatagactactaataatttaaccttaaaaatatactaaataccactctcctgaaccccccattc

SEQ ID NO: 23588 - DNA, 361 bp, Glycine max
  Clone ID: LIB3106-018-Q1-K1-F11
gcttcctcttctgcaacagacattccttcagagcattttataaacagatggcagaccactagagcatacggcgattacaagaaacgagctgggttgtgcatatgaagaaatagagttgaacactgacaacattaaggagcaaagatttatggctacctcttctgccgtagacattcctgttgatcaactcacaacaagttgtagaaagctagatgatactgatattacaaaaaatgatctgtgttatgcatacagaaattttgctggcaaccaaaagaacaaacttctcatccttgatctgaatggactgcttgctgattatgtcagtatcaatgacactgacactcctttccgaagatat

SEQ ID NO: 23589 - DNA, 358 bp, Glycine max
  Clone ID: LIB3106-018-Q1-K1-F12
cccacgcgtccgcccacgcgtccgcccacgcgtccgataaatcccatattttccccccacattaactcacccaacccctctttctaaaaggcctcaaggatacactccggacttaattacgttattttgttagggtcaccgtttcgagatattctaaacttgtactgaaaaatatggagggaaaagaagaggacgtaagagttgaagccaacaggtacggaaagaggcagccaatagggaccgttgctcaggctaaagactacagaaagccaccgtcggagcctttcttcgaaccgggaaagttgtcatcggggtctttttatagggctggcataccaaaatttgtggccactttttt

SEQ ID NO: 23590 - DNA, 349 bp, Glycine max
  Clone ID: LIB3106-018-Q1-K1-F9
ccgggacgacggacgcggccgcgcccaaaccctaactccctaccctattccgctttctttcatccatcatgaaaggaggaaagtccagtaccgaatctaagagagccggggccaaacttgctgcgaataagaagggcgccgccaccaagactaggaaacccgccggaaaggggaaggcagcgaaagatcctaacaagccaaagaggcctccaagtgctttcttcgttttaatggaggaattcaggaaggtgttcaacaaggaacatcccgacaacaaagcagtgactgctgcgggcaaagctgctgtagcaaaatggaatacgatgtctgatgctgaaaaacaccttat

SEQ ID NO: 23591 - DNA, 59 bp, Glycine max
  Clone ID: LIB3106-018-Q1-K1-G10
tattggttaagtatgaagttcatctagaaaatggaaagcttttaacaaagtctgatggg

SEQ ID NO: 23592 - DNA, 284 bp, Glycine max
  unsure at all n locations
  Clone ID: LIB3106-018-Q1-K1-G11
cccacgcgtccgtgaacctctccttctcgcagagtgagcgagcaagcgaatatcccaatcccacacgaatggcatgctcagccacctctgcttccctcttctccgcaaacccaacacccctcttctctcccaaaccctctctctccctccaccttaaccctctccccacgcgcccttctccctccctcacgcgcccttctctctccctcacgcgcccttctcactctcgccgctccttcgttgtcaaagcctnctccagcgagcttccgctggttggtaacacc

SEQ ID NO: 23593 - DNA, 174 bp, Glycine max
  Clone ID: LIB3106-018-Q1-K1-H10
aatggctgccaacacattgattactagtgccatttcaaccttgcgatctctcctttcctcctcaaaatccagatttgccgcagcagttcctctttccagctttgttgtcaccaatgccttttcttcttatttttccataattgctcatggatgcctggccagcctaaacccccc

SEQ ID NO: 23594 - DNA, 268 bp, Glycine max
  Clone ID: LIB3106-018-Q1-K1-H11
gcgccgacgcgtgggctgtgttccaaccacttcttaaagataaccttgtggccaaagggctagttctgtgatttatgactgacttctttaaggagtatctgattgacaacagccttgatgatcttatttcaattctaaaacggggaaaagtagacgaggatcttttggacattttcccccctacaaaaagatccattgaagctttctctgagcatttcaccaatgaaagattggtggccttggtggagtataatgaaaaagaaaattt

SEQ ID NO: 23595 - DNA, 452 bp, Glycine max
  unsure at all n locations
  Clone ID: LIB3106-018-Q1-K1-H12
tactcggtcttgaattcgacccacgcgtgcgccggaaccataattgattcgggcacggttataacccgtttcgtggagcccgtttacaacgcggtgagagaggagttcaggaagcaggtgggaggcactacattcacgagcattggagccttcgatacgtgttttgtgaaaacctacgaaactctggcgccgccaattacgctgcacttcgaggggttggacctgaaactgccgttggaaaacagcttgatccacagcagcgcgggttcgctggcgtgtcttgcaatggcggcggcacccgacaatgtgaactcggtgttgaacgtcatcgccaactttcagcaacagaaccttanngatttgttgataccgtcaataataaggtggcatagcccgtgaggtttgtaactagctggttggctacatttttattaatttatttattaatatgt

SEQ ID NO: 23596 - DNA, 400 bp, Glycine max
  Clone ID: LIB3106-019-Q1-K1-A1
cccacgcgtccgaaaaaaaaaaaaattttaaaaaaaaaaaaaaaaaaaaaaaaaaagggggaaaaaaaaaaaaaaaaaggaaaaaaaaaaaaaaaaaaaaaaaaaaaaaaaaaaaaaaaaaaaaaaaaaaaaaaaaaaaaaaaaaaaaaaaaggggcggcctttttaagggtcccaagtttacttccccgtgtttgcaacttattagtttttttttggggcccccaaatttaaattaattggccgtgtttttaaaacgtcgtgtctggaaaaaccttggctttcccaaatttaatccctttggagcaaatcccctttttgccagttggcgtattaccaaaagggcccgacccaatggcctttcccaaaagttgcccaccttgattgggaaatggaacccc

SEQ ID NO: 23597 - DNA, 396 bp, Glycine max
  Clone ID: LIB3106-019-Q1-K1-A11
atggccatggccatggccaagtctacacctttggctttcactcctcttcatctccgttctcgaatacaacaacagcatcatcatcacaacgccaatttcccacaattcaaatatctcgctccctcacaccacaatccctttatccttctgaacgtttgccccttgtctcagttccgtcccttctttggcttgcctcggcaacgccccaatttcgctataaaagctctggattgcgacgcagcaaagcaggaatcagctcacgttgggaaaaatgaaagttaccagcaatgggattcgcttaccgcctaattgtccgctgccagcaatttttcctttctgttactgcaaatgccgcaaatcatactcaatgctcgaaatctgttatcgggaaataaa

SEQ ID NO: 23598 - DNA, 177 bp, Glycine max
  Clone ID: LIB3106-019-Q1-K1-A12
tccacgcgttcgtccacgcgttcgtcttcgcgtccgaaaaaaaaaaaaaaaaaaaagggaaatagggaaaaataaaaggggaataaaaaaaaaaaaaatataattaaaattaaataaaaagggggggggaatactaagggggataattattttggtatcgggtggatgatatttttt

SEQ ID NO: 23599 - DNA, 423 bp, Glycine max
  Clone ID: LIB3106-018-Q1-K1-C12
acgctgcaacttcttaaccgctgcagtctccactcctgctaatagtttagcacactcgttgtgggtctgttgagtcctgaggcacagggagattttacccgttggtgtcaattaggtggtctgtggacttttgttgctctccacggcgctttcgcattaataggtttcatgttacgtcaatttgaacttgctcgatctgttcaattgcggccttataatgcaatcgcattctctggtccaattgctgtttttgtttctgtattccttatttatccactgggtcagtctggttggttctttgctcctagttttggtgtagcagctatatttcgattcatcctctttttccaagggtttcataattggacattaaacccatttcatatgatgggagttgctggtgtattgtgcgctgtactacta

SEQ ID NO: 23600 - DNA, 395 bp, Glycine max
  Clone ID: LIB3106-019-Q1-K1-A2
gaacacaagtacttaaacacacattactctctcagtttctctctcttcttacttctgtctccaaaccttacatgcacaaagttgtgtttgtgttctaatggaacttgcttgcttagactaatcaaccaagttttgcatttccagtaaccaaaactctcttctttttttttttccccctttcttctgggttggcaaagtcaacatgcaagaacaagattttttttaggctggttggtggtttgagttccaaaaaaactgactttttgttgaataatttgggtcggtgaaggggtgttatgaagaacgaagagcaggctcgtagtttgtttggaatttcactctctgacagacccagatggcagcaattcctcatttgttcatcagggttcttcttt

SEQ ID NO: 23601 - DNA, 280 bp, Glycine max
  Clone ID: LIB3106-019-Q1-K1-A3
aaaaaaaaaaaaaaaaaaaaaaaaattttaaaaaaaaaaaaacaaacaaaaaaaaggggcgcttataaaaaatcccagttaacctacacattcatacaacataaaaaggtctcttcttttaaaacctccattcttccatctgcctcttttctactaacaaccccatctttaaactcccttaatttccccttcttgtccatctttcttcaacttcctactttgaaaactcccttcttacccaaaatcacccttctaaaattccttcccatcttctccactt

SEQ ID NO: 23602 - DNA, 275 bp, Glycine max
  Clone ID: LIB3106-018-Q1-K1-A10
tcttctagatcttccaaacaaattgcaccataagtcccattgccaaagagactagtgttgtttatctatgtcccatcaaatcacaaggttggggtgagaattttgatcataaaaaacttgtaataacaacactagctgctaatggaaagaaagatgatagtaatggagcacctaatgacacatatgctgcgtttcccgggtcgtatgctgatgtttcctggccatcagaagcacacacatataaaatagacaagatcctatttcacgggaaaatc

SEQ ID NO: 23603 - DNA, 441 bp, Glycine max
  Clone ID: LIB3106-018-Q1-K1-A11
gaacaagtagttgagaactaagaaggagaagcaaatggcttcctcaatgatctcttccccagctgggaccactgtcaaccgtgccggtgccggcatggttgctccattcactggcctcaagtccatggctggcttccccaccagaaagaccaacaatgacattacctccattgctagcaacggtggaagagtgcaatgcatgcaggtgtggccaccagttggcaagaagaagtttgagactctttcctacctgccagaccttgatgatgcacaattggcaaaggaagtagaataccttcttaggaagggatggattccttgcttggaattcgagttggagcacggtttcgtgtaccgtgagcacaacaggtcaccaggatactacgatggacgctactggaccatgtggaagcttgctatgtttggttgcactgatgcttc

SEQ ID NO: 23604 - DNA, 423 bp, Glycine max
  Clone ID: LIB3106-018-Q1-K1-A9
ccggaaccataattgattcgggcacgggtataacccggttcgtggagcccgtttacaacgcggtgagggaggagttcaggaagcaggtgggaggcactacattcacgagcattggagccttcgatacgtgttttgtgaaaacctacgaaactctggcgccgccaattacgctgcacttcgaggggttggacctgaaactgccgttggaaaacagcttgatccacagcagcgcgggttcgctggcgtgtcttgcaatggcggcggcacccgacaatgtgaactcggtgttgaacgtcatcgccaactttcagcaacagaaccttaggattttgcttgataccgtcaataataaggttgggatagcccgtgaggtttagtactagctggttggctacatttgtatttatgtatgtattaatatgt

SEQ ID NO: 23605 - DNA, 284 bp, Glycine max
  Clone ID: LIB3106-018-Q1-K1-B10
caaaatgtctgaagtgaatgcgacccctgaaattcctttaagcaacaccatctacatcaacgacctcagggagaagattaagattgatgagttgaagaagtctctgaacgctgttttcactcagttcgggaagatacttgaggtgttagctttcaaaaccctaaagcacaaaggtcaagcttgggtggtctttgaagatgcctcttctgcttccaacgcccttatgcaaatgcaaggtttacccttctatgataagcccatgagaatacagtatgcaaagacca

SEQ ID NO: 23606 - DNA, 454 bp, Glycine max
  Clone ID: LIB3106-018-Q1-K1-B11
cccacgcgtccgcccacgcgtccgatttgaagatgaaggctacaaagaaaaagtatgaagaaatgctgatgcggggaatcaaggccaatcagacaattttaactactatcatggatgcatatggaaaaagtggagacttcgacagtgctgttcattggtttaaggaaatggagtctaatggaattcctcctgatcagaaagctaaaaatgttcttctatctttagcaaaaacagatgaagaaagggaagaggctaatgagctcgtagtgcatttcagtgaaaatagcagtttacctaaagttaatggcattgttaaacttgttgacgaagatgaagaagaagataattatgaatattttgatgcccagctcgcaagggcttatgaacattctacagaggtaaaagttgacgaatgtcaagtcctttgagacctaaacactcaaattttgtacac

SEQ ID NO: 23607 - DNA, 279 bp, Glycine max
  Clone ID: LIB3106-018-Q1-K1-B12
gcgcccacgcgtccggcgcgattgctgcatcctcctccaattagagctcgctgctagcgaaccctaacacggcggcaacgtgaggtgttcggttgaagttcagatcagccatggccgcagcaacccccacttctctgccgttcctcctgttcgtttccgtaaccctaaccctaaccctgcttaacctcgccgcctcaaattccgaaggcgacgctctctacacgctgaaacggaacctctcggaccctgacaaccttcttcagagctgggatcccactc

SEQ ID NO: 23608 - DNA, 322 bp, Glycine max
  Clone ID: LIB3106-018-Q1-K1-B9
ctctaaattttgccatactgactagtttctccacataactcactacagatagatcagagccgcatcaactaatactgtgtaccattccatcttatcttcctttattaaagacaacaaacatgcagccaaacacttctagccactgctattgattgcatatttgtctctgtttctttcacttaaactcctataacacatatctcttgattttctaactataccaaataatttatcctttcatacttcatatgctcttgctacctcttttactcataacgcttcacataacctctaccatctgaatattcatcaacttcattaa

SEQ ID NO: 23609 - DNA, 341 bp, Glycine max
  unsure at all n locations
  Clone ID: LIB3106-018-Q1-K1-C11
cacaaatactgttagtgttaagctatggaatcctgtgcaactcttccactttctcagcttgcttatggctacccttcaacacttagcagcaacaaagcttatcctttttggccttgcaagcgaaggagctcatcacaaccaacacgcttacactgcagcatgatgtttgtacctggatttggagaagcatcaccagaagcaaaggctgctcaaaacctccacaatttcttcaccttcgttgcagcgaagattgttgctgctcaacttgagagctacaatcatgaagcatatgaggagctgatggaattcttgagtagacactctntgaatgattgtgacaa

SEQ ID NO: 23610 - DNA, 381 bp, Glycine max
  unsure at all n locations
  Clone ID: LIB3106-016-Q1-K1-D9
cacgcgnncggctgcgcagaagagagagaacgaacgaacgaaccataccaccctncaataagcnngnggcagngagnagggatatgcagcaaggggaaccaacggncctaagcttgaggcctggtggtggtcgtggcggtggaagcaggcttttcgctcactcgtcctcctcttcctctctctccgccgatctccctctctcgcgccctcatgcctctttctctctcaagactggagattcacggtttgagggtcatgagcgtgtgcgatataccagagatcagcttttacagcttaaagaggctgttgaggtccctgatgatattcttaagattaaacaagatatagaagctgaactttttggtgaagatccaagttggg

SEQ ID NO: 23611 - DNA, 309 bp, Glycine max
  unsure at all n locations
  Clone ID: LIB3106-016-Q1-K1-E10
tgtgattattttaataaggtattgagttaaatgtgaggatgatgaggaagagaatntttatgagggtatgaagaagtatggagcattgttaaaattgaaaggtttaacaaggaatgacaatgnagattgngttgntgaaaaaatagntgaccaattgaagaaacaangntgtagaaataccacacgtgctaacactgtacctggcacagagcctcagttttctaactatccagaccttttatctaagtgtgacttggctatttccaacacaagggatggaaatgtaatgcctgcttgtgttcctgacct

SEQ ID NO: 23612 - DNA, 386 bp, Glycine max
  unsure at all n locations
  Clone ID: LIB3106-016-Q1-K1-E11
gaggcaaccgaaccaaactccgaagctatggcagagctccaaaccaagggtgaacctgttacgggcccggctccggctccggtggatcccgagccaccgctagctgaggctccgccgctcgagaagaaagcggtggcggtgccaccacctgttccggctgcggcagaggaaaccaaagctcttgttgttgtggagaaggagaatgagaagataccagaacctgtaaaaaagaacgcctcangtggatcccttgatagagacattgctcttgcagaaatagagaaagagaaacgattgtctaatgtgaaggcttgggaagaaagtgaaaaatccaaagcagagaataaagcccaaaagcagctctctgctgttgctgcttgggaaaa

SEQ ID NO: 23613 - DNA, 245 bp, Glycine max
  unsure at all n locations
  Clone ID: LIB3106-016-Q1-K1-E12
ccaccacagcagcgcaaaccggaaccanggngagcacctccggcacgaggaggcaaccgangaccagcacaagccgaaagacangccccaacggcggngaagcgcnnnnnggncngaaaaggggacgaggagggcgnggcacnngcaaggccgcgnacaaggggaagcncaaaaccccagaaggagaagnggagnnngaaggcccagangangncnncaacggggacaaggcagaggacgaaggc

SEQ ID NO: 23614 - DNA, 123 bp, Glycine max
  unsure at all n locations
  Clone ID: LIB3106-016-Q1-K1-F10
gagagaagcgngagagccnnagncgnncaagattagagcnaagnggaagaagaagcgcacggggaggnngaagaggaagcgccgaaagaagagacaaagancnaagnaggggcccgagcagga

SEQ ID NO: 23615 - DNA, 268 bp, Glycine max
  unsure at all n locations
  Clone ID: LIB3106-016-Q1-K1-F12
aaagaaccaacaagcggcggaacccncncagccaaaaaaaacaangcagacccaccagaacccncccacaccggannccgacccgcagcncccgcagaacaaaanccaccaccccnccnccccgcgccancaccaccccnccnccgccgccacccccacccccaccgccggcgcacgccgcaaaancggcgnggccgncgaccccnccgacgagagcgccnaccgcggccgcngggccgngcagcacnacanccgccccggggacgcc

SEQ ID NO: 23616 - DNA, 152 bp, Glycine max
  unsure at all n locations
  Clone ID: LIB3106-016-Q1-K1-F2
aaaaaaaaaaaaaaaaggaaggggaaaaaaaaagaggaaaaaaaaaaaaaaaaaaaaaagaaaagagaagaaaaaaaaaaaaaaaagnagaaggaagaaaaagaaaaaaaaaaaanagagagggggggaagagagaaaaaanaagaggggag

SEQ ID NO: 23617 - DNA, 220 bp, Glycine max
  Clone ID: LIB3106-016-Q1-K1-F7
attgcttttaaaaaaaatttgggaaaaaaaaaaaaaaaaaaaaagggggagttaaaaagaaaaaagggtaaaaaaaaaaaaaaaaaaaaataaaaaaaaagaagaggataaaataaaataaataaaagaaaggaaagaaaattattaaggaagaataataatagaaaaaaaaaaataaaatggggggaggattaaatataaaaaaaattaaagtgaaaag

SEQ ID NO: 23618 - DNA, 260 bp, Glycine max
  unsure at all n locations
  Clone ID: LIB3106-016-Q1-K1-F9
ccactcaaaaaaaaaaaaaaaattttgggaanaataaaaaaaaaaaagggngggggaataaaaaaaagaaaagggggtaaaaaaaaaaaaaaaaaaaaaaaaaaaaaaaaaaaaaaaaaaaaaaaaaaaaaaaaaaaaaaaaaaaaaaataaaaaaaaaaaaaaaaaaaaaaaagtgaaaaaaaaaaaagggggggggggtttaaaaaaaaaaaattttttaggggggggtgtagaaaaaaaaaatttttttttttgaag

SEQ ID NO: 23619 - DNA, 270 bp, Glycine max
  unsure at all n locations
  Clone ID: LIB3106-016-Q1-K1-G6
agtgcagccttttngncggngacgacgacaccgagtttctgatggagtcggagagcaaccggcgcattctagcaggaaggagctacataagctacggtgcgctgagaaggaacactgtcccttgctcccgacgtggcgcctcctactacaattgccgccctggcgctcaagccaacccctacaggcgtggatgcaatgctatcacccgatgcangcgttgaaaaagttattcttctcttttaattacacttcgttttatatatatatatt

SEQ ID NO: 23620 - DNA, 273 bp, Glycine max
  unsure at all n locations
  Clone ID: LIB3106-016-Q1-K1-G9
aacgtgatgggaaggtaaaatgtnttggaggtnntgaacgtacaggtagngtaactattgttggtgctgttttgccaactggaggagatttcttagatcctgtgacatctgcaaccctgagcatagttcacgttttctggggtttggacaaaaagcttgctcagaggaagcactttccttctgtaaactggcttatttcttattcaaaatacttaacggcacttgaaaccttttatgagcaatttgatccagattttatcaacattaggacaa

SEQ ID NO: 23621 - DNA, 392 bp, Glycine max
  Clone ID: LIB3106-016-Q1-K1-H4
caaagaagaacggaatcattttatgaaacacgggacacaagataaaggggaacttggtgattatgcgaaagaatgtgttggatatcaacagcattaccagtgttaagggtgtcatcggaaccggcattaacatcattggaggagtcgtcgacaccgttactgctttggcgtcccacatctccatccagctcattagtgccaccaaggctgatggacatgggaaaggaaaagttggaaaggctacaaatttaagaggacaagtgtcgttaccaaccttgggagctggcgaagatgcatacgatgttcattttgaatgggacagtgacttcggaattcccggtgcattttacattaagaacttcatgcaagtgagttctatctcaagtcttaac

SEQ ID NO: 23622 - DNA, 184 bp, Glycine max
  Clone ID: LIB3106-016-Q1-K1-H7
aactagtgtatggtgcgactttgcaaacattaagacaggagcttatatctacgactttgggattatccgacttctcctttagaagctggcatttatcttcccatatagggtcgttatcaatatatgtatacttgagtcttgaaacaagaatagcaaatactctataaaaagcggagatttactg

SEQ ID NO: 23623 - DNA, 331 bp, Glycine max
  unsure at all n locations
  Clone ID: LIB3106-016-Q1-K1-H8
gacagaagaagaagaagaagangaaggggaagacgaagaagaagaagaaaggtgaaggggtgtgtgatcgggtccttaagtgaagatctgaggctgttggtgtctcttttcttttctccgagttccaaagatgagcgcttctaggttcatcaagtgcgtcactgttggggatggtgctgtgggcaaaacctgcttgcttattgcctacaccagcaacactttccccaccgattatgtgccgactgtttttgacaatatcagtgcaaatgtggttgtcaatgggagcattgtgaatctggggttgtgggatactgctggacaagaagattac

SEQ ID NO: 23624 - DNA, 249 bp, Glycine max
  unsure at all n locations
  Clone ID: LIB3106-016-Q1-K1-H9
cacgcgtncgaaaatggcttctagntcagaatctcaatctcagtctaaaccgctccaagagcgagttgcaatcgtcaccggctcgtgccgcggaatcggccgagaaatcgcgcttcacctcgcctcactcggcgcgcgactcgtcgtcaactacacctgcaactcggcccaagccgactcagtcgcggcgcagatcaacgccggtttcgncaccacgacaccgngcgccgtcgtggtccaagccgacgt

SEQ ID NO: 23625 - DNA, 317 bp, Glycine max
  unsure at all n locations
  Clone ID: LIB3106-016-Q1-K1-D5
cccacgcgnncgaccacgcgaacggaggggtttgtgagngancggngancactngaccctggagaagtcgtcatcatcatcatgatcatcaccgacgattgaagaagacgccgatcagaaacatcgccatacgaaggcctgaagaggctactcaccccgacacgtagaaagcggcgttggctgagaacatctacaccttgatcttcacgttcgcccggtcaggttccggcatcgcctacaacaagctcaccgacaacggcgccggcactaccgccggactcatctgcgcgttcatcgaccatgcttacgccctcttc

SEQ ID NO: 23626 - DNA, 308 bp, Glycine max
  unsure at all n locations
  Clone ID: LIB3106-015-Q1-K1-G8
cccacgccaacaaccacacatacaaatcctttcttactttttatctaaccttcaaaaaccttcttaatttgacaaatcatttctccctaattccnactaacctatcaaatactatcttctacttattcctacttccttctcctatacacaattcaaaaacatcactcttaattcttctcttcttttcaccttttaccacattattattctcctaacaacttcttcattcaccactaccactcaaactactactttaacatttttataataccaatttccacacataattttcaattattactaacttc

SEQ ID NO: 23627 - DNA, 209 bp, Glycine max
  Clone ID: LIB3106-015-Q1-K1-H1
cccatacgttcgtaatttcaaacaccataacttcatttttttgctccaaagactaaatgttgcatgcgaaaacttaaatgggcatggccacaatcacaatgggaggaaaccacaattgctgcatcactctcacgccactacaacacccacaagcgtgttcctgaccatgcaacatacattactgtagtgtgcacgacatagctgcatca

SEQ ID NO: 23628 - DNA, 350 bp, Glycine max
  unsure at all n locations
  Clone ID: LIB3106-015-Q1-K1-H12
cacgcgtgacccacacatncnnctccatactacctagattagacaactttttgtggacangaagatactgtacttcttcaatcatttgaacgggctcgctttaaacgaataactgttaaagcaatggtgatcataaatcctggaaaccctactggtcaatgccttagtgaagctaatctaagagaggttttgcaatttctctatcaaaaaaatttatccttgctttgagatgatgtttaccataccaatatatatcacgatgaacgacccttcattatttctagaaatgattttattgaattggttccacctataagcaaagaaatttaacttatttctttttaattctt

SEQ ID NO: 23629 - DNA, 277 bp, Glycine max
  Clone ID: LIB3106-015-Q1-K1-H2
ccacattcacctgaacttttagtgaggattccaaagcatggcttcccttgcagcattcggtgcttctgcttaccttggcatgacaaaaatgcttggaaaccccatcaacctaacatgtgccacaaggccagctacatatgactatatccctgccttcttcaagactgtgactcttacttccaaaaagaaagctgctcctataaaaaaagctgcagatgctgctcctgcctacgatgagcttgccaagacgcttgggcctgacctaatgatcttcttg

SEQ ID NO: 23630 - DNA, 258 bp, Glycine max
  Clone ID: LIB3106-015-Q1-K1-H4
cccactcgtccggttcctggggagaagaaagacctgtatgtgaagagtgttcaggggtgttcaatttggatggggaagaaatatcaaacagttgaggatgttccttgtggaaacacagttgccttggctggtttggaccatttcattaccaagaatgctactattacaaatgagacatacattgaagcacaccccattcgagctatgaagtcttctgcgtcaccattgctacgtgtagcttctaactgcactgctgca

SEQ ID NO: 23631 - DNA, 179 bp, Glycine max
  unsure at all n locations
  Clone ID: LIB3106-015-Q1-K1-H5
cccacgcgtccgccgacacannccatacttanaaaaaaattacaccagtttatcaatcaatctcaaacttgttcattttggaatttttatccccatcaaacacctacaaaacattacatactaacacataaaaccctctcctctataccaaacataacataataacatctctaaccata

SEQ ID NO: 23632 - DNA, 391 bp, Glycine max
  Clone ID: LIB3106-015-Q1-K1-H6
cccacttgttgcctctgcctaatgatatttcccaaattttttgtgagagagagaaactgtgacacttccaaccatgaagggaactttttacctgctatattcttcctggattttgtggatggtggtgcgttactatagatatttgtaaatatttttgttggaccaaatacagtttcttcacttttcatgtttcatgtttattatcaactttttgccagatttatgtgctggcacaaggaaactccaaatagtggatactgccttgttattttctttaataagtagtgtagcttttgtaagatgttatctattccatattctccttgattaggactatcttcataacacttaattaaaatgatttcgtttttggcaaataaaaaaaaataaa

SEQ ID NO: 23633 - DNA, 431 bp, Glycine max
  unsure at all n locations
  Clone ID: LIB3106-015-Q1-K1-H7
cagggagatgggtcatctctatgctttttactttgatggagttatctgtgatagctgtggtgagacagctatctctgctcttaaggctgccaaattgagatggcctcccttgtttgatggtgtggattcaaccatagaagattggattgttgaccagatgattacagtacggccagtggtggaaactggatatgaaactcttttacttgtgaggttgttgcttgagactagagttccatccatcangaagtcttcggtttcggaggggctcaaagttgaggatatactggagaactgcgtcaaattgaagcctatcattattgaagaatggaatgagaatagagaagaactaattgatctttttggaaggtcagaaattactggtttgagtgtgatttcacaggttgtattgagcaaacttactttatcct

SEQ ID NO: 23634 - DNA, 267 bp, Glycine max
  unsure at all n locations
  Clone ID: LIB3106-015-Q1-K1-H8
acaancactaataacactcctgctgcttttttattacactgccgctccactcaaacacatatctcactccaaacctcatctctttcactactttttctttctccatatacttatcttcctacttgtatctacttaactacacttattcacattaattatttaagcactaacgctcattctccaccatttgtatcactgaccatacccaagaccatcttatacatcttctttataattagctttcataacacatattcacaattttca

SEQ ID NO: 23635 - DNA, 214 bp, Glycine max
  Clone ID: LIB3106-016-Q1-K1-A1
ggaaaatcaagttccatttcgcctactatgatattttggaattgtaaaatcaaagagaacaccattatgaagtttgtaaaccattgtttattattggtacaaatttgcatttcaagaaaaaaaaaaaaaaaaaaaaaaaaaaaaaaaaaaaaaaaaaacttattaataaaagaatagatttattggtttgaaattcaaataggaagacgggttt

SEQ ID NO: 23636 - DNA, 317 bp, Glycine max
  Clone ID: LIB3106-016-Q1-K1-A2
gccacgcgtacgccacgcgtaccgtcacgcgtacgttcatgcgttcgagggcagacaccatggacaatgtgaaagacaagattcaagattaggagaggatacccccagaccagcagaggcttatctatggtgggaaacagcttgaagagggacgaacccttgcagataataacatgcacaaggaatctaccctgcacttggttttgaggctatcgggaggcatgcaaatactggttaagactttgaccggaaaaacaatgactgtaaaagttgaaagttgtgataccaaccataacgtgaaggcaaagatacatgac

SEQ ID NO: 23637 - DNA, 204 bp, Glycine max
  unsure at all n locations
  Clone ID: LIB3106-016-Q1-K1-A5
acaangaaagnacaangcaccaagcgggcctangcacaaccnnaggcgananacanggnnaacggagannaaagacaccncnaaagaaggananagccnngaagagaaangcancaagaaagaagcgcnngagggagaagagaacgcncgngcaaaaaccccgggaacacgaannggcgnngccacnncaaagcggggaaagaa

SEQ ID NO: 23638 - DNA, 238 bp, Glycine max
  unsure at all n locations
  Clone ID: LIB3106-016-Q1-K1-A6
aatccaactcgtgcatttgaagaaagaaaaaaaaaaagggttggcttttggttttggtttggttaactccttccacttccacccatggtctccgaatccgaactcatcggccgcctccgcgagttcctccggagctccgaccttaacaccaccaccaccgncaccgttcgncgccagttggaggccgatttcggaatcgacttatccgaccgcaaggcattcattagggaacaggtcg

SEQ ID NO: 23639 - DNA, 162 bp, Glycine max
  unsure at all n locations
  Clone ID: LIB3106-016-Q1-K1-B1
ggagggcaccgaagaagagcgagaanacgaggnacgacgaaaaccncggcggcnccaagaacgccccgcaggaagaacngaagaaggcggacaagaaagccgccannaagaaacaccccgacaagggcggngancccgagaagnnnaaagagcnggcgcaag

SEQ ID NO: 23640 - DNA, 291 bp, Glycine max
  Clone ID: LIB3106-016-Q1-K1-B12
ggggaccaaacaaggaggaaaagctaagcctgagaagaaacccaagtgtgataagaaggaatacgacgaggttgacatggctaacattcagaagaaaaaggaagaggagaaggcgctaaaggagtggaaagccaaagcgcaacacaagggaagctttggaggttctgggctcaagaaaagtggaaagaaataagggctctttatcatgaatgtatacatacaatattgagccctgtaacttattaccatgataacattatggcttattgtggacttctttattgctctaat

SEQ ID NO: 23641 - DNA, 114 bp, Glycine max
  unsure at all n locations
  Clone ID: LIB3106-016-Q1-K1-B2
agattcaacaggancagangaaaccccgagagcagcccactttggaggaangagcgacccnncgctgggcagnncccggccacaaacnacgganaaggcaccagcaagccgagg

SEQ ID NO: 23642 - DNA, 459 bp, Glycine max
  unsure at all n locations
  Clone ID: LIB3106-016-Q1-K1-B5
acccacgcgtacgcccacgcgtccggagangtacgaggnnncatttatgttcgggtgtggagcggtgatggcgggggcgcaagcaatgggaattggaaggagaagcgatggtggattgacgatagtgtgttcgtctaggccgcagaagaaagcgacggcgcatcacatgaagactcggcctcggaagacgcaggcatgggatagaaaccgcaagcccaccgtctacgatccactccctcctcttcctcctgattggaccctcgttattcccgctgacgcttcttctgctcccgttacgcctccgcctccaactccctctgcctagtcactctctcggaactctctctcggtttcatgtaagcttatctttaattccagcagcttttctttcatgttttcatctcaaatcaaaccttcatcatttgttttggatcaataaatgtttctgaattctctctc

SEQ ID NO: 23643 - DNA, 418 bp, Glycine max
  Clone ID: LIB3106-015-Q1-K1-G7
gtgagagttagagagagttaagaaggcttttttcttctttttttttttctgtttttttggattctcttgttcttttttgtacgtactgaggaagaaagaccaagactttatccgtgtgcttcacttagctcaagagcgtacaattcaggcaaaggccttgaagtcggagtgtgttaaggtttcttaggagttgctgctgtcttgactgaataaatggacgtataagcttagctgctcatgctctaatatacccctgccgaagtttatacaacaatgatgggcctgtaagtaacgagtcatgatgagactaaactacttggacctggcacggcatttatttaactattttatgaaaggacagttattattgctcctaacaattttttgttggattatctaatacacttttaaaatgttt

SEQ ID NO: 23644 - DNA, 374 bp, Glycine max
  unsure at all n locations
  Clone ID: LIB3106-016-Q1-K1-B6
gcatgtctccggccgccggagtcagcgtccccctcctgggggattccaaaggaacgccgccgccggcttccgtccccggcgcggagttcaacgtggccaccagcatagtcggcgccggaatcatgtcgattccggcgatcatgaacgttctcggcgtagttcccgctttcgcgatgattctcgaggtggccgtgctggcggaacctgccggggacttcctgatgcggntcacgcactccggcgaaacgacgacgtacgctggcgtcatgaaggaagcgttcggatcgggtggagcattggccgcgcaagtttgcgtcatcatcaccaacggtgggggtttaattctctaccttatcatcatcgatgtgctatct

SEQ ID NO: 23645 - DNA, 131 bp, Glycine max
  unsure at all n locations
  Clone ID: LIB3106-016-Q1-K1-C10
aaaaaaaaggggaaaaaaaaaaaaaaaaaaaaaaaaaaaaaaaaaaaaaaaaaaaaaaaaaaaaaaaaaaaaaaaaaaaaaaaaaaaaaaaaaaaaaaaaaaaaaaaaaaaaaaaaaaaaaaanggggggg

SEQ ID NO: 23646 - DNA, 130 bp, Glycine max
  Clone ID: LIB3106-016-Q1-K1-C5
ggtttggatgcaatgtccataactgtaatggttatactaattcaatgcgccaccgggttctggctgatttatagttttattttggtcatgtatcattcatatattgagtatgaaatggagattttgtttt

SEQ ID NO: 23647 - DNA, 190 bp, Glycine max
  unsure at all n locations
  Clone ID: LIB3106-016-Q1-K1-C8
aaaaaaaaaaaaaaaaaaaaaaaaaaaaaaaaaaaaaaaaaaaaaaaaaaaaaaaaaaaaaaaaaaaaaaaaaaaaaaaaaaaaaaaaaaaaaaaaaaaaaaaaagggggggggggaaaaaaaaagggnnggggaagggagagagggaaanaanannnaangnnnanaaaaaaaaaaaagggggggcggg

SEQ ID NO: 23648 - DNA, 250 bp, Glycine max
  unsure at all n locations
  Clone ID: LIB3106-016-Q1-K1-D1
cgcacncncaacncnncacnngnnaaggcnnccggcngaaagnncnaaacncaacgcaagggagcnnagcaaagncacgnnagagaacncnncaaaannggagcagcaanggcncncgcactacgaagcancaaccaaaacgcgcanncncagcanngacggcggaggaaccaccgccanngncgccggcgccnccctcgnccaccncgaagaccagaaccgcgcccaaaccgccganccncacacgcaa

SEQ ID NO: 23649 - DNA, 271 bp, Glycine max
  unsure at all n locations
  Clone ID: LIB3106-016-Q1-K1-D12
gaggaaagcatatagnaaggaggcctattacaggtaagcgcagatgaaaattccccaatggatttggtttttttgtattgtgtggatgcatgtttagatataagctagttagactctatatatatacctaggatttcatgttatgacatgactgtgttgttccttggttatcatgtggtttggtttttttgtattgtgtggatgcatgtgtgcatgtttagatataagcgagtttcactatatatatatatatagcaaggatttcatgttg

SEQ ID NO: 23650 - DNA, 218 bp, Glycine max
  Clone ID: LIB3106-015-Q1-K1-F10
ccacgcatccgattaaaaataagaacgtttatatcaagttacaatactcctaataaacccgcctattttgtaaaacttaccggcccccacccaaaacacttcatcttacaactctcattctctcaactacatatcaaaaatcctaccctaattaaatctacccattcctttctatctaacaaccttacatatctcactatttcaatcataaaattttc

SEQ ID NO: 23651 - DNA, 474 bp, Glycine max
  Clone ID: LIB3106-015-Q1-K1-F11
ccggggcgacccacgcatccgcccacgcatccgctttttttgattgtgtgtttgatttttctctcacctttaaatattgggctgctgtggtaactctcattgctaaagcgcctgcaagtgctgcaacagctgcagaggctgcaagatgtacccagacttgagctacaccgagtcaaccaccacctagacctttgtcatgggagtggcaccagttaaggctcaattctagagtgctgaaatgtgtgttccctctgataactatggcttcaaatgttgagctaactgcaccttgcaactcctgcacttgcaattgaggttggtgtagagctaaatcttcaaataaagatttacccttaaaatattattatatactacatcttctttttaaaactttaaaattattttatatattattatctttatactattccattttatcttttaatcaatattccttaaaaatatatttttatt

SEQ ID NO: 23652 - DNA, 83 bp, Glycine max
  Clone ID: LIB3106-015-Q1-K1-F12
tttaaaaaaacaaaaaaaaaccccccaaattgcaaaattttaacccccctcccccaaaaaaaaaactactattaacaacaaaa

SEQ ID NO: 23653 - DNA, 398 bp, Glycine max
  unsure at all n locations
  Clone ID: LIB3106-015-Q1-K1-F2
caaaaaacgagaatcgccaacgtgttcttcttgnactttatggccgcaacccaaccagcgtggatatgctacaaggtcctacaacagactacacatcattttatccttcacggataccaaggcatgaaacgtcttatgagcaaactaaaaaagctggttctttatatcgatactactgattctctttatagcaactgttactctgctctacttaatagacaagcactttgaagctatatctgtgctaaatgccactcaacacctgcttttcattcagtttttcggagctctaaaagagctcatgagaccgatgtaaatgctgatgcatggcacatctcagaacagatctgggtgtagttctaacatatgttactaccacctctactagttactctatg

SEQ ID NO: 23654 - DNA, 329 bp, Glycine max
  Clone ID: LIB3106-015-Q1-K1-F3
gcgactccaacaaatccctaatctcaacttttacagtatcacccgcaggcgaacacgcgtgcactatgccgaacgcgacggaacatgtgaatcatcaatctgtacgaaccgactgttgtgctacaaacatgttgatgaacgcgcagaataatctggcgaagcagatcaacttcgaggctatgaatgcgagcaagaatgacaccgcacaggatcatacgctaaaagtattagagtgaatgcggactgagtgtgatgcgagctcttgctgtcgacccaatttagcaaaagcagaacttataaactctcgaacgaacctacgtatgtagaga

SEQ ID NO: 23655 - DNA, 340 bp, Glycine max
  Clone ID: LIB3106-015-Q1-K1-F4
cccacgcgtccgaattctgaatttgcggtttttggatttggacttggtcgtcaacaccggctaattggtatcttttggctccttcgcttatgaatctttttcttcttcttcttcttgttcctgcaacgcacttaattcgatcaatcaatccatcttcaattcgcttcgtttcgatcggtggaaaatggcccatcagttatcgaagggagaggaattcgtgaaaaatgctgagatgaatctcagctgatggggctcgtttggctcctattatgcagatgccgccgatctcttcaataaaacctccaattgcttcaagctcgcctaatcatgggacaaggct

SEQ ID NO: 23656 - DNA, 449 bp, Glycine max
  Clone ID: LIB3106-015-Q1-K1-F5
cccacgcgtccggccaaaaattggaatgaggagaaatgaagagcgaagaaaaaaccagggttgcttaacctaagcgaccatgctataaggagcaaacatctaaggtgtgtgtcttaattgcatttgcatagcatggacatcaaaacctttgctttcgccccatcttctccgccgttaccggtaatcgccgccgccaagctcgccggaatctctccctcgattgatacctctctctctcctgactcacctcccgcatttatcttctccgatgggctcaagttgcatggagcatatgctcttctacgttatatcggccgagttgccagccttcccaatttctatgggcaaaatgcattagaatctagccagattgatgaatggctggactatgctcctatcctctcatctggccctgcttttgagaatgcatgcaaatatatagatgagta

SEQ ID NO: 23657 - DNA, 420 bp, Glycine max
  Clone ID: LIB3106-015-Q1-K1-F6
gtgatatgcaaaacatgtctctaatagcttcactctcctccacaacttcacaactcacggcccttccgtccctcccttcttcctcctctccactttctcgcaaatttcccctcactttccgggaaaaaaacagaactccaatcacacctcacaagctccctttttcagcaaggcctaccaccaccagagtggtgttggtgaagtctcaagccacagcacctgcttcttctgaggctgtggcagtgacacctgtgtcttctgagatgaaggcatgggtctatggggaatatgggggtgtggatgttctgaagctggactccaatgttactgtgcctgatgtgaatgaagatcaggttctaatcaaacgtgttgcttctgctcttaaccttgttgatgcctagatgaggccgggaaagttta

SEQ ID NO: 23658 - DNA, 427 bp, Glycine max
  unsure at all n locations
  Clone ID: LIB3106-015-Q1-K1-F7
ccgggacgacccacgcatccnaaaaaccctaanccctatttcaccttctgaccaccaccctacaaaccctgccaaatttgcaacatcatatgacaccaacccacaactccctatcctatgacgctcaatcctcccaactaaaaatcacaatcaaactaactacccaatcccatctaaatcaacccaatctcaacacagcccatccaagctatcgattaaactcctactaactacaccactctaacaccatattaacctcaacgaccacattacaacactgacccactatgaacaccactatttgacctaccatctttaccatccaaaaaatcaactttcaacattttactaaatacatgatatagcccatattgatcgaacttcccaacaattgcaaagcctgaataacaacttcgacccacacatt

SEQ ID NO: 23659 - DNA, 278 bp, Glycine max
  unsure at all n locations
  Clone ID: LIB3106-015-Q1-K1-F8
cccacccaccaaaaaccctaaccttttttaactatttataccaccaacaaaactgccaatttttcaaattaaaaacccccccccccaacacaaaatcctcaancgctaatcctcccacctcaacatcttaatcataaaactacccaatctctctaatcaacccttttcaacacactcaccaatctaccgattacctcctataacttcccactctacaccatctaacccaacgatgctctaatcaccttccccgaggaacaccccgangggatntacca

SEQ ID NO: 23660 - DNA, 252 bp, Glycine max
  Clone ID: LIB3106-015-Q1-K1-F9
taccaaacgttccctctcccaatgaaaactggctatcgtgagccttcttcggaggtaaaatgcgcaccttttaggcttgctgaggaagcacacaacatccgagcctataaaaccattcctgaagagtgcgctgaaccaacataggactacattaatggctaacaatttagatcagactctacaacatttcaccaacaagcttgctgttatgctagtgaacgcgaaacccatcacaaccacatattgatattc

SEQ ID NO: 23661 - DNA, 414 bp, Glycine max
  unsure at all n locations
  Clone ID: LIB3106-015-Q1-K1-G1
cgggcggacgcacgcgtccgctgaaacttttccacctccaccaacatttaacaagcattgctgcaaagttgcatatctggaactttggatggggggctgattcttgcaacttcngctgataatggtggagctgccacagccttaacgtacgatgaggcactgggacaacctttgagcctccctggtactggggactttgatgtgaatggctttgtggagagtgtcgctggctttgcagctgagaaccctgcaattgttgccgggggagtggttgttttggcagagccattggttttgtctcacgttttcaagaaacctaaagcttggggtgttgagtctgctaataacgcgtatgctaaacttggagctgatgggaatgctcaacttctttacataagggcactggtggagatt

SEQ ID NO: 23662 - DNA, 373 bp, Glycine max
  unsure at all n locations
  Clone ID: LIB3106-015-Q1-K1-G2
acgagatattctcgcanaatctcacgttcatccgctcccacaacaagaaacgtttgccgtgatactctctctgttaatcattttgctgattggacttgggaggagttcaaaagacacagactaggagctgcccaaaattgctctgccactcttaacggcaaccacaagctcaccgatgctgttcttcctccaacgaaagactggagaaaagaaggtatagtgagttcagttaaagatcaaggcagctgcggatcatgctggacattcagcacaactggggctttagaagcagcctatgcacaagcatttgggaagagtatctctctttctgagcagcagctagtggactgtgctggccctttcaacaactttg

SEQ ID NO: 23663 - DNA, 245 bp, Glycine max
  unsure at all n locations
  Clone ID: LIB3106-015-Q1-K1-G3
acaacaaaaaaccnaaacttgtatatttttgtaagtttattattctcctcattaaacttnnaacgaattcaaaatacacatactagtaacttcccaaaattgctcttccattcttaacgtcaaccacaacctcacctatgctcttcttactccaactaaagactgcttaaaagatattatatctctttcatttaaatatcaattcatcttcttatcattctttacattcactacaactttttctt

SEQ ID NO: 23664 - DNA, 432 bp, Glycine max
  Clone ID: LIB3106-015-Q1-K1-G4
gcagctgcgagtaacaactcggacccgaatgaggtcaagtactgtctcatcattctcatgaacatcatcatcatcctcttcaacctccttctccttgtcttgtaagaggaggaaattaaataatcgtttgtgggtagatgatgagaaaggaaactccgagtaaagaaaaaaaggaacaataataataaaagagcaagggaagaaaaaaaaaaaagagaaagagagagaggaaataaggtgggccaagtcgtctagaaacctcaacattttttagagggattttgctattaaaatttgacttgagtgacggtgtagattataatagtattagcatatatatctctatcgtatgtactacgagagtttgatgggtttggagtacattttatttttatgttggtgactcattaatattgagttggcataattcct

SEQ ID NO: 23665 - DNA, 452 bp, Glycine max
  Clone ID: LIB3106-015-Q1-K1-G5
ttctcattctcccatttcctctcagaaccctcgatcactcccacgcgctcctatatcctctccttcaccgtcgctctctccaacgatcacaacaacatcgtcatcccatggcaaacgccgcatctggtatggcagtccatgatgactgcaagttaaggtttttggagctgaagacaaagaggacacaccgtttcatagtttttaagattgaggagcagcagaagcaggtcattgtggagaagcttggtgagccagcccaaggctatgaagatttcactgccagccttcctgctgatgagtgccgttatgctgtttatgattttgagtatctgactgaagggaatgtccctaaaagcagaatttttttcattgcatggtcccctgacacatcaagggtgaggagcaagatgatctatgcaagctccaaagacagattcaaagaggagctggat

SEQ ID NO: 23666 - DNA, 287 bp, Glycine max
  Clone ID: LIB3106-015-Q1-K1-G6
gcgtccgcccacttgttgcctctgccgtatgttatttccaaaactgtgtgtgagagagagaaactgcaacacttgcaaccatcaagggaagtttttacctgctatattcttactggattttgtggatggttgtgtgttactatagttatttgtaaatatttttgttggaccaaagacagtttcttcagttttcatgtttcatgtttattatcaactttttgccaaatttatgtgctgtcacaaggaaactccaaatagttgatacttccttgttatttctttaataa

SEQ ID NO: 23667 - DNA, 397 bp, Glycine max
  unsure at all n locations
  Clone ID: LIB3106-015-Q1-K1-F1
ctgacccttactctcagtccttctacattactacattttgtcgcacaaccaatccaccgtacaacttccagaacgacgagggacaaatcatcgatctctacatccccaagaactgttccgacacgaacaggctcatcaccgctaacgatcatgctgccgtccacatcaacatcgggcatttggatgagagcggagtttacaccgaccagatcactaccttcgccctttgcggcttcatccgtgctcanggtgatgctgatggtgctctggaccgtctttggcagaaaaagaaagtagaagctcgccagcagtaaaaagtagctgtagggcgttttgcagtggaagatctggttttagtttcaacatatgttactttgacctctactagttactctat

SEQ ID NO: 23668 - DNA, 409 bp, Glycine max
  Clone ID: LIB3106-015-Q1-K1-D4
ctcactctcattcaaacacaacacaacttaaagtgtcacaaacacacacagttccaaacgcaaatctcgcctcaaacctctcttgttctcgtttccccactccctcattttccttcctctacccgcatttttctctaaccacccctcacacacttcacttatagagagagagaaagttcagtgcttttgtatagaatcaccaccccattaccctgcatacaccatttaatgcattgattccatctgggtcagtcacaataacagaagaaaaaaagaaaggaaaaaacccctctttgatgatggacaccacttcatcccctttgtccctccaaacccaaaaaaccaccttccaagaactttcagaagcttctcccaagccatacaagaagggcatagtagcaaccttaat

SEQ ID NO: 23669 - DNA, 407 bp, Glycine max
  unsure at all n locations
  Clone ID: LIB3106-015-Q1-K1-D5
acgcgtccgctgaaatatgcttttatacttacatattttatcactggtttatttaactatttgaattgttgacttggatatgcttttgtgcttacatatantatcacaggcttatttaattatgtttatttgtcttgctagcctagcttattcttttatgatgatttagaagattttggaaagggtgattggatatagtattgtcaatattttctttctatgcctaaaattttgctatgatattctacaaaatgtctacgtgacctatcacagtagctattgcttttaatggattctgtaataaaaaagggtgacttactttcttattttatttcaacacctacgtaatcatgatgctatatctgttcctgtcagttcttaacattgttgaaacttgtctttaaaat

SEQ ID NO: 23670 - DNA, 448 bp, Glycine max
  Clone ID: LIB3106-015-Q1-K1-D6
aaaaaccgggcggacgcacgcgtccgactcattctacatttctatcttctccttctccattaccaaatttttctgtacgtagttgctaccttctaggtcccacctgcgtttctctgaaaaatctcatctttttggggctcttttcacttgaatctccccagttatgattcctcaacttatggtacaaattgtctgaaaagtttggtactttattaaagtagttttgctcttccctcatacaaattccattgagcagaaagttaccaaatccaaaaaggtttctatttccgttattgatttagcaatggattcagcttgtgcaaccctgaatggccgccatctagccaaagttagtgagggaattggaagaaacagaacaagtggcttctggggtgagagtacgaggggaagtgtgaacacaaaaaggtttttgagtgttcaatcatgc

SEQ ID NO: 23671 - DNA, 447 bp, Glycine max
  unsure at all n locations
  Clone ID: LIB3106-015-Q1-K1-D7
gcctgactatgccacatgtgttaagatctccactgatgcttccattaagggaatgattgcacctggtgctcttgtcatgcttacaccgcttgttgttggaatcctttttggtgttgaaacactttctggtgtcctagctggatctttggtgtctggtgtacagattgctatttctgcatccaacaccggtggtgcttgggataatgccaagaagtacattgaggctggtgcttctgagcatgcaagaagccttggtccaaaagggtcagattgtcacaaggcagctgttattggtgacaccattggagaccctctaaaggatacatctggaccttcacttaacatccttattaagctcatnggcggtgagtctcttgttgttgctcccttctttgctacacatggtggcctactcttcaagatctaaaggatttgatagaaaaagag

SEQ ID NO: 23672 - DNA, 313 bp, Glycine max
  unsure at all n locations
  Clone ID: LIB3106-015-Q1-K1-D8
cggcgcgacccacgcatccnaccttatcccttatcctttcaaaacctttccatgtctacctccnncactgctctttttctcccaaccctcactctccgaactcnacaacctctctgttctccccaatgcttctcctcgtccctctccctcacccctaactccaaacccatttccatttccgccgttttcctcaaaacaacgctgtcttcgtcgtcaccgttttcgctgtcgtctcgcttcgttccccatgtctctttgtttgatcatgaagaggacacctttctcgactgatactgccccagcttctctctct

SEQ ID NO: 23673 - DNA, 386 bp, Glycine max
  unsure at all n locations
  Clone ID: LIB3106-015-Q1-K1-D9
cccacaccctccccaaaattccatggaagtgaatcaccataagcactctaaatccnaaaccgtcgcttttggccggtacaatggcttcnacnacccctcctacnccnaaacgcactcgcttttcggcgagtccaattattctttctccggcgaaacacaagaaatccttaaggatttggtgacatgtgcgagtgttagtgaaaggaatttgctagcggacactacaaagatcattgagaagaataaaacaacgtgcaaacgcaaagactattgttgcataaagatcgttactgaagcgttgatagctctcggatacgacacttccgtatgcaaatctcgctttgaaaaattaactttcttttcatccttgcgaatattatatacat

SEQ ID NO: 23674 - DNA, 238 bp, Glycine max
  Clone ID: LIB3106-015-Q1-K1-E1
cattattgcatgacatactcggatatgtctaccacggcctcctctctgcttcacccacgtggatctacttgaggcagaagtacctctttcactcctcaaaccattacggacgataaactctaaacataagctagttaacctcaaatcctcatagactatgcaacgcaccactactactgataatgctcaattcacgtacagactttattgggaacctttaacagtctacagtggtcta

SEQ ID NO: 23675 - DNA, 441 bp, Glycine max
  Clone ID: LIB3106-015-Q1-K1-E11
attttatactatacccacattttgataattatttttctagttgataagcgatggctacgcgaggaaagcttgaggttgacgttcatctcaagtctaacgcagacaagtactggcaaacccttaggaactccactgaaatattccccaaggccttccccaatgattacaaaagcattgaggttcttgagggtgatggcaaatcacctggttctatccgccacataagttatggtgaaggttcaccacttgtgaagtcatcctttgagaagattgaggctgttgatgaagaaaagaaggtagtgtcgtacactatcattgatggagaactccttcagcactacaaaacattcaagggagacaatttttgtgactccagttggcgatggatgcgaggtgaaatggagtgctgtgtacgaaaagggtagccatgattgttctgat

SEQ ID NO: 23676 - DNA, 444 bp, Glycine max
  Clone ID: LIB3106-015-Q1-K1-E12
gattgaacatgcgtacgtttttgtgaagaaaaagtttgaggaattgtggttccagatcgactgctcctgactgtgtacatcgcgtgttcaagatctatcaggcgactgcccttgatcagaagcttgtgaagaagactttcaagcttgttgatgagactttgagacggaggaatctctttgaagctggcttattatgaccatgcaacagtatgtatgtttaagagggatatgatatttttacattgagaaattaaaacgtcatctgattttgttgggtatattagaggtcaggtatacaacaatataaaatcgatttgttgattttatgtcaagtaaatcctgggtggatagggaaagcctttttgaatacctacttgatcaccacatccatctttagaaggaaaattagttgcgctcaaattttcaaagatgacattatgcttt

SEQ ID NO: 23677 - DNA, 177 bp, Glycine max
  Clone ID: LIB3106-015-Q1-K1-E2
cgaaaatgtggaagagacggggatatgtagaagacgtatttcaattgataaactcatggttcataggcctaaatctagctggcataggctacacagcctattttttcggattctttactgtccacgcttctttttatctcgtgatcttggatacgtacaacactgcgaagacattat

SEQ ID NO: 23678 - DNA, 450 bp, Glycine max
  unsure at all n locations
  Clone ID: LIB3106-015-Q1-K1-E3
gacgaattnnacagacacgctgacatttatagtacatttttcccttcacattaccattgtctatttggtgaaaacaaattcaccgcggacacactgcaaacgctgacaaacaatctatgctacacttatgctaggtgcacacgatctgtttcaattgtgccgcctgcttattatgctcatctagctgctttccgtgcacggttttatttggaacctgatacatcttacagcgggtctatggctggaaccggacggggaggtcctcttggaggccgtaacactcgggccccaaataatactgctgttaggcctgtccctgcattgaaagaaaatgtgaagagggttatgttttacttctgagtctcactaattgaaataatgttttaacttatattaatatccgttgccgttcgtttgaagattcttgcaaacaaagttattttttttttt

SEQ ID NO: 23679 - DNA, 96 bp, Glycine max
  Clone ID: LIB3106-015-Q1-K1-E4
tttgattttgctttatgagatttcatcattctgtatttttggtttctgcattcggactgcaatttaaattaatggatgagaactaatgaataagct

SEQ ID NO: 23680 - DNA, 437 bp, Glycine max
  Clone ID: LIB3106-015-Q1-K1-E5
ccgacgtcaatggcagcctcatcctccttctccaccctcttctccttcctcctccctcgaaagccacaccctcctcccatcatcactcgcttcccactccagaagctacgtgccaagcatcaggaccaggaccaccactcgtcggcggagctgtccgccgtggcgaacccgtcccacgcgcatgcgaacacgctcttcttccggtcggcgtacaacgtgcaggtggtggtggacgagaacgagccggaggagaggctcctcaaccggttccggagagaggtcatgagagccggagtcattcatgagtgcaagcggagacggttcttcgagaacaagcaggaggaaaagaagcgcaagaaccgcgaagctgccaagcgtaagagcagaagcaggcgctctcaatcgagatttcaaccacaaaacaagccggatgttgc

SEQ ID NO: 23681 - DNA, 441 bp, Glycine max
  unsure at all n locations
  Clone ID: LIB3106-015-Q1-K1-E6
atttcctcgtttttttcttcccttttctctttctccggcgacgatctcagattccggcgactcctctcgccggcgagcccttactcttccctcctccgtcgagccctctccgattcgaatcgttcccagcctcgcaccaccatgaatcccgaatacgattatttgttcaagcttttgctgattggagattctggtgtaggcaagtcatgtcttctcctgaggtttgctgatgattcataccttgacagctatatcagtaccattggagtggactttaaaatccgcactgtggagcangatgggaagactattaaacttcaaatttgggacactgcgggtcaagaacgtttccgaacaatcactagcagctattatcgtggggctcatggcattattggtgtttatgatgtcactgaccaagagagctttaataatgttaag

SEQ ID NO: 23682 - DNA, 352 bp, Glycine max
  unsure at all n locations
  Clone ID: LIB3106-015-Q1-K1-E7
cccacgcatccactaattccatcaatcattttctaacattatacacgcatatactanattcgtgtaattcgaccaacactctgtccaaattgctactctttaaatcagatccgcgacacccaccccaccaaaaccttgcacaacccatccactacacttgactcatgacgatccagccactttcatcctaggaacatcatattgctttaatagcttaaacatattgaaaaatgaatcttagatctcacacttagctatcgaatgtatgatcgtgatgacatttacatgcactctaggacttacacgattatcgtcccccataatactggacatgaacgaagaatttatcaac

SEQ ID NO: 23683 - DNA, 419 bp, Glycine max
  unsure at all n locations
  Clone ID: LIB3106-015-Q1-K1-E8
aggaaaagccggcgcgacccacgcatccnaccactccctccctttcttataacaattatccactcataacacaccatcgtgaccttggaggaactaaaccgtgacatggcaaccacaaacatctcaacctgtcacatccaatacgtcatcaattccattattcgcctacacaacagaaattttttacactctaacatttacatgaacagacgacacccatacatccaatatacgacatacatgtcactcatacaacttacgaattctatcttaccaaccaaacctgaaaacttatacttccttttctcagcagcagaactcatcatatctgcctaggaaaactttgatacataatccacactcaacacatcatactcttcaccaaaatataccatataccatacatcaaatgccttttt

SEQ ID NO: 23684 - DNA, 175 bp, Glycine max
  Clone ID: LIB3106-015-Q1-K1-E9
ccacctacacagatggagattctgggggttggaccattaacactgttgcctggcccaaatgaaagctctttcgggctggtgacacaacttgctccaattatagccctgggactcacaatgtggtggctcggaacaaggctggatatgatagcagcaagacttcaatatgagccaa

SEQ ID NO: 23685 - DNA, 436 bp, Glycine max
  Clone ID: LIB3106-015-Q1-K1-D3
cccacgcgtccgcccacgcgtccgctttgattgagcagttaattggaaaagagaaaggagatgaagttgcaggtccattggtcatgcattccaatcatgatgatgaacatacttttaaggagtttaacccagtgcagtggacatcagacaatccacccaagattcttgtaccaattgcaaatggttcagaggaaatggaagctgttatcatcattgatattctgcgaagagcaaaggcaaaggttgtggttgcttctgttgaggataaactagagattgtggcatcacgcaaagttaaactggaggcagacatgctccttgatgaagcagccaaactttcatatgaccttattgtgttacctggaggacttggtggtgcccaaacttttgcaaactcagaaaccttggtgagtttgctgaaaaagcaaagagaatc

SEQ ID NO: 23686 - DNA, 344 bp, Glycine max
  unsure at all n locations
  Clone ID: LIB3106-015-Q1-K1-B7
cgggggggcgcacgcgtccggaaaaccactgaacaagtttaagagttttcttcgtttaaccaccacatggtagaaactgaaacacacgcgcgcacacacacntgcgtggtgcaaactctccagtctcacacacatgtgtccgttgctgctgtaaccgtcgacgaagaagaagaataaagaaataaaccgtttaaagtaaagcaaaattcgtaaaccaaacaaacccttatgcgtggtgactagtgagtgacgactcatatctgttgcggggttatcgaaattggttattggccgagggagatggatgtgaactccggtggatgaggctgccgtagctgtttaaa

SEQ ID NO: 23687 - DNA, 113 bp, Glycine max
  unsure at all n locations
  Clone ID: LIB3106-015-Q1-K1-B8
naaaaaaaaaaaaaaattttaaaaaattttaaaaaaaaaaaaaaaaagtgggaaaatatgtaaaaattaaaaaaaaaaaaaaaaaaaaaaaaaaagggctccctttttaaaaa

SEQ ID NO: 23688 - DNA, 451 bp, Glycine max
  Clone ID: LIB3106-015-Q1-K1-B9
gattgatccatccatttgtcttctaattagcttatttttgtgaattttgtagactttgaaagtcttaccaagttaccacattatcatatttggcctcaattctcttgaatatttgtttctttacggctgttcaaaactgtataataaccagttattgaatgaacctagggatgtagaacatttgatgaagatttatataggtaaagctcctttttatccccaatcaacaccttcctactccagagaacataaaagttgagttagctatttattgccttcctcgccaattttcccatgtatctgcaaacttgatctaagtttctgtaatttactttaaatccctgatgctatcggaaatttatgttgcttaaaaagcctagatttaaatggaaactaattttctatactgcccaacctcaagaacttttcaaactgttccatttaaacttac

SEQ ID NO: 23689 - DNA, 430 bp, Glycine max
  Clone ID: LIB3106-015-Q1-K1-C1
ctgagaacaattacaagaaagattgaggtccttgtggacctttcagcgatagagattggtcaagacatgcttctgatgagatctaccttgggaagagggacagtgacgattggactgatgaccaaaaggcaattcaagcctttgaaaagtttggaaccaagctgaatgaaattgaggccaaaatcaattcgaggaacaaagattcaagccttagaaaccgtaatggaccggttcagatgccttatactgtgcttcttcctaccagtgaggaaggccttactttcagaggaattcccaacagcatctgtatctaaggccagagtgcgtttatgtgtggttctctttccaaacctacgttacctttctcgttgacgaataaatatgcaagcttatgcatgcatataataattgtcttatgcattcttaagtg

SEQ ID NO: 23690 - DNA, 330 bp, Glycine max
  unsure at all n locations
  Clone ID: LIB3106-015-Q1-K1-C10
cccacgcgtccgggttttttcaatctcttcatcaccgttctcaactctcgcgtttcggggtctcgtcgtacgcaatgcgacnccgtctccgtgcaagccgcgtgccgttaaacccttaacggcactttcgagcgcggggcggaggcagttgctgttttttctgacggcgacgacggcgttgacggcgagggaagcggcgtccgtggcgcangacattcccttgttcgggatacggaagagtctgaagaaggtggaggaggaagcggaggagattgtgagagagggatttgaggctgcggataagggattggtggcggcggaaaaagggct

SEQ ID NO: 23691 - DNA, 455 bp, Glycine max
  Clone ID: LIB3106-015-Q1-K1-C11
cggactcgtgggaaaaataataaaaattttataaaaaaaataaaaaatttttaaaatttggaaaaatttaatgcaaaaaaaaaaaaatataataaacttatttttttttttaataacactatatattatcttttatatttttttcattaaaattaattttttttttcttctataaataatattcaatttaatattttatttaatatctttttaataatataattatttttttttttattatatattttttataaactttcttacttttttaatcattttttattaattatattttataatttgtttatgttttatattatatattatattttaatttttattatattatatttttttttttatttttttaacttaattatattaatttaacttttaattattttaatttatattttttttattttttttatacttaatattattttttttttttt

SEQ ID NO: 23692 - DNA, 377 bp, Glycine max
  Clone ID: LIB3106-015-Q1-K1-C12
cgggtcgcccacgctccgctctctttgcgctttctttaaccgaacatttcatctccaaagggatcgcaggtcggggagaaatggggctgacattcacgaagcttttcagccggcttttcgcgaaaaggaaatgcgaattctgatggttgtcttgatgctgctggtaagaccactatcctctacaagctcaagctcggagagacgtactacaattcctaccattgggttcaatgttgagactgggaatacaagaacattacttcactgttgggatgttgtggccaggacaagattcgtcccttgtggaggcactactttcagaacacttaagggcttattttttgttgagacagcaattatagggacagagttgttga

SEQ ID NO: 23693 - DNA, 329 bp, Glycine max
  Clone ID: LIB3106-015-Q1-K1-C2
aaatgatttcaggtcaacaggtatctgttgcacatgatgcacctcctgcttcaactccgggagagcgaatggacatcatgactgctctacaacttgcgctgagaaaatctatggcctatggacgtctagcacgaggtcttcatgaaagtgctaaggtgatcgagaagtatgctttacagctgttcgttctatcacaagattgcgaccaacctgattatgtgaaactggtgaaggctctttgatcacagctcaatcttagcctttagacagttataagtgccaagacccttggagaatacgctcatttgtgccagatcgattgacaggga

SEQ ID NO: 23694 - DNA, 455 bp, Glycine max
  Clone ID: LIB3106-015-Q1-K1-C3
catcatcgcatgacatccttggatatgcctaccatggcctcctctctgcttctcccacgtggttctgcttgtggtagaagtccctcttttactcctcaaagcattttggtggataaacttcgaagattagttgttaaagtcaagtcctcagagacaagggaatgcaccactgctatgtttaatgccaattcacgtagagactttcttgggttggctttaggagtctcgggtggtctctttatgggttcattggatgcaaatggagctggtttgcccccagaggaaaagcctaaactgtgtgatgacacttgtgagaaagagcttgaaaatgtgcctacggtaactactggatcaggtttgcaatacaaggatattaaagttgggcaaggtcctagtccaccaatcggatttcacgtggctgctaattacgttgcaatggttccctctggacaaat

SEQ ID NO: 23695 - DNA, 477 bp, Glycine max
  Clone ID: LIB3106-015-Q1-K1-C5
ccggggcgacgcacgcgtccgtctcctcctaacgctacgacgtcgtttgcccctcgtcggcgcgttttgcatgctcgggttgggacgctccaatctctgcacgcccttccattcctctgccctcaaaacgggatccaagttcggtattcgaagccactccagcaccagaatggaagggagtaactccactgtgccgagtattgttgtctatgtcactgttcccaacaaagaagcaggtaagaagttggctgaaagcatcgtcaaagagaagcttgctgcttgtgtcaacagggtaccgggtattgaatcggtgtaccagtgggagggaaagatccaaactgattctgaggaacttcttattatcaagactaggcaatcccttctggaagcattgacagagcatgtcaaaactaatcatgaatacgatgtgccaaaggtgatctccttacccatcactggaggcaatcttaatattta

SEQ ID NO: 23696 - DNA, 428 bp, Glycine max
  Clone ID: LIB3106-015-Q1-K1-C6
gagcgagcgagcgagcagtttcaaagataggatttggtattgggaaggctagggattgcgctacatctcttcctctgctctttcaattcatccctcattcataatcttccaatccaacaacctcagcctcacactcacacatacacacatctgaacgcgtatcgtccctcccatggcttcaaagcgcatcctcaaggagctcaaggacttgcagaaagacccaccaacttcttgcagcgctggtccagtagctgaggacatgttccattggcaagcaacgattatgggtcctgctgatagtccttatgctggaggtgtattcctagtcactattcactttcctccggattatcctttcaaacctcccaacgttgcctttaggactaatgtgtttcatccgaacatcaacagcaatcgtagcatttgtc

SEQ ID NO: 23697 - DNA, 315 bp, Glycine max
  unsure at all n locations
  Clone ID: LIB3106-015-Q1-K1-C7
cccacgcatccnataccaccaacttttttttatacacattttatttaacaattactcattgtacaatttgtgttatcttactgaaaacttagcacaaaaaaatgaatgctacacatttccaaacaagagttacatccacttattagctaattaagaagccaccatatattcaaataccatatagtacttttatggtgtctcaccacaacgccacacaaagccttatcgaatttactattcagcttaatatatccactctttctccatatcccatcatttttttttaactataccagaattaacacaatttcgact

SEQ ID NO: 23698 - DNA, 289 bp, Glycine max
  unsure at all n locations
  Clone ID: LIB3106-015-Q1-K1-C8
ccacgcatccactgaccaaaacgatcctttttgacagttcttgattataacttactttcgttaaaatgtgctgttcttgcttctcaattacctcaaaaaatntatgggtccattttcatgtttagggtttcttagttcttattcgctacttgcgaagatgttggattttaaggttgtcttgattttcttcacctggctttgatgtttcactttttgcgaattattgattttttttttatcaatattttattcacttattaagctatcaagcgctctattccccagtagc

SEQ ID NO: 23699 - DNA, 425 bp, Glycine max
  Clone ID: LIB3106-015-Q1-K1-C9
tgataattatatatcagttccacaaattgataacaaacagtagtaacatgaatgggagaatagagttcaacacaaaccaaacttattttcaaaggtcattacagacccattacacatcacatttcttcttaaaatgtttgggaaaatccaacatcgaacatcacacagaaatcagctccagcttaaaaccccccacgaagacgcaacaccaagtgcagagttgactccttctggatgttgtagtcagcgagggtccttccatcctctagctgtttgccagcaaaaataagcctctgctggtccggtgggattccttccttgtcctggatcttcgccttcacattgtcaatggtgtcggagctctccacctcgagggtaatagtcttacccgtaagggtcttgacgaagatctgcataccaccacg

SEQ ID NO: 23700 - DNA, 443 bp, Glycine max
  Clone ID: LIB3106-015-Q1-K1-D11
ctaaaaccaaatactttgtgtgcaaaaccatcacatcatcggcaacaggggcagtaacggtggaagagagaaaggattcgctctcctcaatccttatataagctccagcgacccaatttcttctcttatcgatttgattgtttctgagtaatggcttcgtcgcgagtagatctggatgggaaccccataaagcccatcaccatttgcatgattggcgccggtggcttcattgggtcccacctctgcgagaagctcatgtcggagacccctcacagtgtcctcgccttggatgtctacaatgacaagatcaaacacctcttggaaccccacacgctcccttgggcctctcgcatccagttccatcgcctcaacatcaagcacgattcccgtctcgaaggcctcatcaaaatgtcagatctgactattaatctggctgccatttg

SEQ ID NO: 23701 - DNA, 178 bp, Glycine max
  unsure at all n locations
  Clone ID: LIB3106-015-Q1-K1-D12
cacaacttccaaacctgtcaattttgcaacctagcctgccttatncacccaccnaccaacccacactcnacccataccccttctatcacctttaacaaattcaacccaatccaaccaaacattattccccaaatagatcctaatatttcaccctccttcctcttacaactcaccaaaa

SEQ ID NO: 23702 - DNA, 411 bp, Glycine max
  Clone ID: LIB3106-015-Q1-K1-D2
cggggggacgcacgcgtccggcagaccacgctaaaccttcgtgcaacttatggcctttcacttcgactctctagaattgctcactcggttgctctgcctaaagagatggcacatcatgagcgtaggaggaaggccatgaacaggcacagaggtgctatgcacacacatcaacataagggtattcacagaaacaactgtgaaagtgattctgtgaaatatggagatctcgttgacaatatcatgcctaacctgctgactactaacacgaatttaatgactctttcgactactattacaataccgaaccttcgaatccattaatcaagcctgtgtattcaaaagatgacatcttcgacaccctaaccggcaacacgctagatcgtggatcacataaccggatgtttagtgttc

SEQ ID NO: 23703 - DNA, 425 bp, Glycine max
  Clone ID: LIB3106-015-Q1-K1-B6
aatgatgatgactctttgtaggtcagagcttttgcagaaaacacattgctcattatgggcaccacatggcctcctacgtcctacacctgcaccttctgcagaagggagtttcgctccgcccaagccctcggcggccacatgaacgtccaccgccgcgaccgcgctcgcctccaccaagctccagtaccctcctcctcctccaaccccatgacctcttctcttcccacttcacccttcatcaatatccctcctcaagaccttgttgcaaatgctggcttgtgcctcctctaccacttgcccaaaagccctagtagtactgcaccaccctttccaccttcccacactactccttcttcttccactcttctctctatctcttcttatcctacaaccaactttttgattcaaactttccttaatttttc

SEQ ID NO: 23704 - DNA, 395 bp, Glycine max
  Clone ID: LIB3106-015-Q1-K1-A11
gtaatgagagggcgaagttattaatgctctagatcgttacgagcgtttcgtcgtccttgaaggcaccaaaaaggtttcttatgagagggacacgaagatcatcaatgcggcgtccttcaccatcgagagagaggagcacactatcggcaacatcctcctcatgcagctgcacagagaccccaatgtcttgtttgccggatacaagcttcctcatcctcttcaatacaaaattattgtcaggatacacaccactagtcagtcttcgccaatgcaggcatataaccagtctgttaatgatctggacagggaacttgatcatttgaagagtgccttttaggcagagatgttgaagttttctagggactattgatatacggtcaaaatggacggtgttg

SEQ ID NO: 23705 - DNA, 416 bp, Glycine max
  Clone ID: LIB3106-015-Q1-K1-A12
agaagctaccatatctgttcctcctagatggttgtcctttggtaatgggcctgaatcgaagcccggcacgtggggtcagcaagctttgtctattaccctccttgagaataagatgagtagagtttatgctgcgcctccaaaggaaagattaaaggcattctataacacccctccctccaagtatgaaaccattgatcagggacgtgggctttgcttcagggtgataagaatgggttttgaggatatttatttatcaagccctggttccttgtcagagaaatatggaaaggactacttcatctgcactggccctgcttcaatactggtgcctgtgactgtaaatcctggttaagaatggagaggggcacaagttattgagcatgataatttaacattggatagcttgttaaaaattc

SEQ ID NO: 23706 - DNA, 391 bp, Glycine max
  Clone ID: LIB3106-015-Q1-K1-A3
gcggaaaaaaaagattctaaagaaatataactaatattctttagaataatcaaaaagaatgtggaattcaaataaattttagatagaaaaaagacttaaaaaggaggatttgaaatgcgagatctaaaaacatatctttccgtggcaccagtagtaagtactctatggttcggggctttggcgggtctcttgatagagatcaatcgtttttttccagatgcattgatattcccttttttttcattctagttattgacacggaaaggggtgaagaagattatagatccaattaagtattaaatatatgtaattaatatgtaattaatctcctcttctttatttcgtcttttatgtcttctttattttacaattgaaaaaaacacacgattgg

SEQ ID NO: 23707 - DNA, 410 bp, Glycine max
  Clone ID: LIB3106-015-Q1-K1-A4
gtgctcttcacctttcattccacgaaatcaaaaacaagtgctaagaagcgccgtgtctctattctcaaacatgtagcaccaaacccaagttggcatccaagttttataacactaatactgcatataatattattataatatacataacaacagttattgatattgttgtgattgtgtgtgattttggtgtcgtccctttttcttatgtttaaggttgtacggagtttatgtgttgattcaattcggcgataagaaaccttagtttgatattttgattggttctgtggagagtttttttttctttggtgtggatattggcttgtgctgtttttggttgggaataacaatggccgatgaaggaaacaaaagcaataacttctattcgatcttggggttgaagaaagagtgca

SEQ ID NO: 23708 - DNA, 282 bp, Glycine max
  Clone ID: LIB3106-015-Q1-K1-A5
gaaaaaccggggcgacgcacgcgtccgtcttcaacgcggtgtgttgcggaggacttgatcgtgaatgaagggagggttgccggggtgttgactaggtgggctctggtgtcgatgaaccatgacacgcagtcatgcatggaccccaacgtgatggaagcgaatgttgtggtgagctcttgtgggcacgatggaccctatggcgccactggggttaagaggttgaagagtattgggatgattgatagctttcctggaatgaaggctttggatatgaatgctgct

SEQ ID NO: 23709 - DNA, 365 bp, Glycine max
  Clone ID: LIB3106-015-Q1-K1-A6
cgggccgacgcacgcgtccgctagaaagtgatcctacaacacgtacattcttatgcttaaaaaaccaactacggtatcgtctacattgaaccacattgacttggcatacaacacttactctaggtatgctcattcattaccatcatgcaactgtataaacagaagatatatcacgctctacgacttttgatgttttgaacctggtgcatggtaaatcgctagcatcttctaattgaaatacagagttaaatccttttaatggacactcatttattaaagatgctaaagattattaaacaatcattcatccctttaaagaaagctagtacaacattaccaaacataatgcatataatccttttaat

SEQ ID NO: 23710 - DNA, 253 bp, Glycine max
  Clone ID: LIB3106-015-Q1-K1-A7
ataagaatggacttgatgcacttgcaaagaaggctggaattgatctcaggaagaaataagcctatctaataattattgtaatttgtatcagagtggaagaatacattcatgttccttggtgttaattgtagaattttcttttgcgtatattattttcaaaagcaagttgtgttgatgtttgtagagaaacaaaatatggcaaggtcatgagcttactaggccatgagtctcgctaatggaaatctcttttgac

SEQ ID NO: 23711 - DNA, 300 bp, Glycine max
  Clone ID: LIB3106-015-Q1-K1-A8
gagattctgaaagggaaagttgctctaatcactggtggagcctccggaatcggattcgaaatttccacccaattcggtaaacatggagcctctgttgcgctcatgggtcgccgcaaacaagtccttcagtccgctgtctccgttctccaatccctcgtcattcccgctgttgggtttgagggggatgtacggaagcaagaggatgccgcaagggtggtggaatccacgttcaagcattttggaaggattgatatactcgttaatgctgcagctgggaactttctccgttctgcagaagat

SEQ ID NO: 23712 - DNA, 303 bp, Glycine max
  Clone ID: LIB3106-015-Q1-K1-A9
gtttgatgttctaactctttcttctacttttattgttctgactatgtttgtgttttttgtctcacctaaaaatatcttgctacaactgtaactactgttgcagaagctcctgcaagttcggcaactgctacctaagctgcaagacatacccacacttgagctacactgagtcaaccaccacctataccttagtcatgtgagtgccacctgctaacgctcaatatgactgttcttaaattggagtgccctctaagaacgatggctgctaacttaaaccaaactgcatctacaacccctgcactt

SEQ ID NO: 23713 - DNA, 403 bp, Glycine max
  Clone ID: LIB3106-015-Q1-K1-B1
accaaatccaacatgcaaaacctcaatttcctctgcctaaccatcatttccatttctgtgatccacagctacagcatcctagtccaagccctgacctcaccctcagacattgcagcactcaaagccttcaaggcctcaatcaaaccctcctccatcacacaatggtcatgcctcgcctcatggaactttacaaccgacccatgctcactccctcgccgcacctccttcatttgcggcctcacctgcacccaagactccacaagaataaaccaaatcactctcgacccagcagggtactcaggcacactcaccccactaatctctcaactcacacaactcaccacactagacctcgctgaaaacaacttgttcggcccaatcccctcttcaatctcttcactct

SEQ ID NO: 23714 - DNA, 418 bp, Glycine max
  Clone ID: LIB3106-015-Q1-K1-B10
cccagcgtccgggctgcttcattctcaagcatgctcattattccctcggcaaaataagctacgaagctagcttgggaggattaagcttccacaacttcctaacagcaaaatcaccacctctgaagcgaaaccaaaagtcaataaaagttgttacacgcgataaccactcacccctggtcgacgacctcatgatagaagtacaagaacatgaacatgaacatgcaacgctgcatcagaaagatctctcagaaatgtggcgccaaatccacggtgagaagaactgggaagggcttctagaccccatggaccctcttttgaggtcggaggtgatccgctacggcgagctggcgcatgcctgctacgacgccttcgactacgagccattctctaggttctgcggcacatgcaagttcgagga

SEQ ID NO: 23715 - DNA, 285 bp, Glycine max
  Clone ID: LIB3106-015-Q1-K1-B11
cctggttacacctgctccctctaaaccagtgaaaggattgaggaaaatgtggtcaaaatcgacatgagaggatgtcgagccacactatctctcttctgtcctgattggaactgctgttgtttgttttgctattatttgaaaaaccatttgtttttaattgagattgttgcatgtatgttttaatcctaggcaagtagcagcaaagatgcttctctgtgacatgttcaattattaatttatatgaattgcgcttttattcaacaaattaaaggttctagatcgcga

SEQ ID NO: 23716 - DNA, 333 bp, Glycine max
  Clone ID: LIB3106-015-Q1-K1-B12
ggacgacccacgcatccgcctcaataaaaacccgtttgttaccaattccatcttacacatgcacctcgctcactttgacactttagaagccacctctccacacaatgcttctaatccaaaccaccaacataaacaaattcatattgaaactgtttactgaaccattgttttcttatttgtttgttactctaccaatctttataacaattcattctctaaaaatatccttcttttttattaatcaaagccaaactcaaaatacaactcttgtaaatcaaccataatataatcttaaaattgattctgctatgtattacgaaaaacaccttattt

SEQ ID NO: 23717 - DNA, 421 bp, Glycine max
  Clone ID: LIB3106-015-Q1-K1-B2
ggggattgcaacaattatttcaaccccatatcgagttcctgttatccgcgaaggctttgctttgaacgagtacgttcggtaattttgcagttatactgccttgtgtcccccttcgttctgagtggaccgtcgttaatggccaaccagaaggacccgcagttaaaattggttcgcccccaaatgcagaaaatggttggtttgaaattgagaaattgttaactttgggctataagcttgtgttctgtacgcggcctgagcgtagctattgtcaggatattgggattcatgtcgatgatgaaaatcacgcgcgtttggtgttgacaaatgatgatccactagtggttgagtgtctggaatatgatcccttctggccccaaaataatctagtgcttactacatgtcaatgagagactatttaaat

SEQ ID NO: 23718 - DNA, 415 bp, Glycine max
  unsure at all n locations
  Clone ID: LIB3106-015-Q1-K1-B3
gcgggaaaattggcatcttcatatggaaaccggttgcgagaacgatttcttaggcaagtgggacggcactgacgatgacgagttcttcagagacatccttcancaaccaccacctgcggctttctcttccgaaagcgaaagcgatcactccttcctcgctgtccaaaacacttctagcatccccaacgacggtgccgttttgtctcctaggaattacctcgtcaaaagcagcagctccaactccttggtctctcaaaacgcttccaaacgacctcgtcgtttgtcctctcccaggacttacattctgtccttcgacaactcaaccatggttccggccacacccgaaacccgcccccgctcctccaataattcccctctgcctgccaaacgggccctggaaagcccaggcccagta

SEQ ID NO: 23719 - DNA, 457 bp, Glycine max
  Clone ID: LIB3106-015-Q1-K1-B4
gccgggggtagtgcgactgcggtagggacgacgttgctccgcgagcttgtcctcctggggatgtgccaacccgacggcttggaccagggtcagaggctggagaacttggacctcgcagcgaatatcggggttcaaacccaagaagaagcaactcaagcggagagatggcggaagaccgactatccgatttgccagagctttaaactgatgcaggtactcactcaccgaacctgtttgggttaccttgaagagaattcccgtagggtcctcatagggtgaatgcgcaaaacgggtctcgatggcctgcaaaagtcctgcccaagtggggaaccggtggttgcacatcatccactggaaccacgctaaggcgggtccttccatggtgaagaaaacaatggttagacgctctagttctggggtggagtgataggcgaaaaactgaatgattttgaacgcc

SEQ ID NO: 23720 - DNA, 422 bp, Glycine max
  Clone ID: LIB3106-015-Q1-K1-A10
cccacgcgtccggtgggtgttaacacattttcttgtgtgccaccatcgacggcaagctatgcatgcgagcctacactccaacaagtagtgtggatgaagtgggtttctttgatctactcatcaaggtgtacttcaaaggtgtgcatcccaagtttccaaatggaggactcatgtctcaacatttggactctctacccattggatccatgttggacgtgaagggcccattaggtcacatagaatacaccggaagaggcaacttcatggttcatggaaaaccaagattcgccaagaggttggccatgttggctggtggaactgggatcacgcccatttaccaagtggcgcaagcgattttgaaggacccagaggaccacaccgaaatgcatgtagtgtatgcgaatcgcacagaggatgatata

SEQ ID NO: 23721 - DNA, 439 bp, Glycine max
  Clone ID: LIB3106-014-Q1-K1-E7
atggaatttcgatgctcagtcatctcttttaccattctcttctctcttgctcttgcaggggagagccatgtccatgcatcgctacctgaggaagattattgggaagctgtttggccaaacactcccattcccactgcactgcgagagcttctaaagcctctccctgcaggtgttgaaatcgatgaactccctaagcaaattgatgatacacagtacccaaaaacattcttctataaagaagaccttcatccaggcaaaacaatgaaagtacaattcaccaagcgtccctatgcacaaccttatggtgtatatacatggttaacggatattaaagacacctctaaagaatgatatagttttgaagagatatgcatcattaaagaagcgtttgaaggagaagagaagttttgtgcaaaatccttgggaacagtaattgggt

SEQ ID NO: 23722 - DNA, 315 bp, Glycine max
  Clone ID: LIB3106-014-Q1-K1-E8
cccacgcgtccgttctagatcgcgagcggcgcccttttttttttttttttttttatttggtttttgggttttttttttttgttgcaccgtattcaaggattctatgttgttttttttaaaaatacttacagcacaattgatttaatggaagctatttaatttgtccagttttgtggccacttatttgaaggcaatctttgtacgttttgtttggtataaattttcatttttgagcgttcaatattagctagttcttatattttaacgcaatattactttctgaaaatctttataaagttaactttttccataatt

SEQ ID NO: 23723 - DNA, 451 bp, Glycine max
  Clone ID: LIB3106-014-Q1-K1-F3
cccacgcgtccgcttctacctctaatctatgaataggaaaaagatgggcagcagtagtgcgagtgccctcaggctatcgtcgatggtcagcgtgtcctcgaattgcaattgctcatcgatgacgcttatgaagaagacggcgatggcgatggctatggctcctttttcacttgcaatgaaaatcaaaagcaaaaggggtggtattaggtgcgaggtggctattaatgcggtggatgaggagtcgaggacgtcaccggaggagacgaatatcggagcgcgtgtgaaggtgaatgaggcgggtttgaaggtgtaccacgttctcaaagttggggagcttgacctaacgggtctggaatgcgagatcaagcagtgcgttggcctctggaacggtaagcgaatcttcgccaatcttccttacaaggttcagtttttcaccgacatccccggtcgt

SEQ ID NO: 23724 - DNA, 443 bp, Glycine max
  Clone ID: LIB3106-014-Q1-K1-F4
cttatttcttgccgttgggaggaaaccacttccagcggtacacatgcagcatgttaaggggatgtgagtggtgcaacagcacctggtcataccgagaagacaacgttcatgaagccaaataggagctgcgcacttctcgatgcgcatcctgacatgtactccaattgactatcgatcacgttatgtgcttgtacacctaaatcgctgcacataggcgtcaccttaaagcctatggccttgatcatgaagctatacgttgagaagtgagaatctacagcgattgagaagcccaagcgcgtatggtcatgattcaagctcatgactattgtacctgtgacgaatggtgacataacaggagcgtacattggcatgacctttactctagtggacatgtgaccgcttatgaatgagcatgatccggcatagtatactattggatacag

SEQ ID NO: 23725 - DNA, 484 bp, Glycine max
  Clone ID: LIB3106-014-Q1-K1-F5
aacaaattgtagcataagtcccatggccaatgagactagtgttgtttatctatatcccagcaaatcacaagtttggggtgagaattttgatcataaaaaacttgtaataacaacactagctgctaatggaaagaaggaggagagtaatggagcacctaatgacacatatcctgcgtttcccgggtggtatgctgatgtttcctggccaggagaagcacacacatataaaatagaaaagattctattccacgggaaatcagaattccaagagcttcttgtatttgagtcttctagacaaggcaaggttgcaattcttgatgggcatatccagctgacagaaaacgatgaatttgcttaccaagagatgctcactcaccttgcactctgttccattccagatccaaagaaggtgctgcttattggagggggagatggtggaattcttagggaaatatcacgccattcttctgttgagcatattgat

SEQ ID NO: 23726 - DNA, 472 bp, Glycine max
  unsure at all n locations
  Clone ID: LIB3106-014-Q1-K1-F7
cccacgcgtccgcccacgcgtccgctatgggttggcttagtcggttcataactgccgtggctttcttagccatcggagtgatattctcaccggagacactggggtcaaaatcaaccacactttccacctacctcaaactcgctcacctcctctgcttctccaccgccttcggcgccgctctgtgggtaacattcatcggcggcatcatcatgtttaaaaatctgccgcggcatcagtttgggaacctgcaaagcaagatgtttccggcgtatntctcgatggtgggtgtctgctgcgccgtatcggtggcttcctttggctaccttcacccgtggaaaacttccttcaccactgaaagataccaacttgggtttttgctctcttcctttgcgttcaatcttaccaaacttgttggctttacacccatgaccattgagatgatgaagcagaggcataaagtggagagagaaaa

SEQ ID NO: 23727 - DNA, 220 bp, Glycine max
  Clone ID: LIB3106-014-Q1-K1-F8
tcgcccacgcgtccgtgacgcgtgggcggattcttggttcatgtcttctcgactcacctggggaatcgcgatcataagggccgtgttcgcggcatctccctcaagcttcaatatgatgagcgcgtgcgccgtatggacttcttcctcgacttctccgctatcaacaccgaccacatataggtctacaaggataccctatacatgctccaatccctcggta

SEQ ID NO: 23728 - DNA, 406 bp, Glycine max
  unsure at all n locations
  Clone ID: LIB3106-014-Q1-K1-G10
cacaacatggtcttccacttgccgctgcagagcgatatcttccttgggtttcttctgtctattaacatgggtcaaatgttcttcgttcctaccaagaacctgctccattatagacccccnttataaccactagtgccctcaaaccgtggcaatgtttgtgtcacacttggtggaacctttgtccattgtgggtgccattaattcgcacaagttgtgggggcctataatttctgctgctgttgcacaagaagaggctgttgttgttgctgaagatgacgtatatgatggtgcttggttaattgaagaatataaagtgtaggataatgaaagaaaagttttttcagatcaagactcttaatcctctgccaccaacctttatttttggaatttgccttatattgattat

SEQ ID NO: 23729 - DNA, 438 bp, Glycine max
  Clone ID: LIB3106-014-Q1-K1-G12
tgcatcaccgcaagtccacaacatggctgccactgccgctgcaggcatagcttcctggttttcttcttctattaacagtgtcaaatgtcttcgttcctccaagaactgctccattatagacccccttataaccacagtgccctcaaaccgtggcatgtttgtgtcacacttggtggaacctttgtccattgggggtgccattaattcgcacaagttgtgggggcctagaatttctgctgctgttgcacaagaagaggctgttgttgtggctgatgatgaggtagatgatggtgctggtttagttgaagaagagaaagtggaggagaatgaaggagaagtagttgcagaacaagactctgattcctctgccaccaagctttattttgggaatttgccttatagtgttgatagtgccaaacttgcagggctaattcaaga

SEQ ID NO: 23730 - DNA, 459 bp, Glycine max
  unsure at all n locations
  Clone ID: LIB3106-014-Q1-K1-G6
ggcagctcctcgaagcagacatctagtatgagcatctccagcacgagcttcctgcgacaattctgcgatgccacagctttctgctacaccagaaagccgaggaatccgtcgccctaagttccctgcagccggagcagcaccttatgttcccattagacaaatgaggccttgtcaggggatggcacctccggtgacaataaggactgcaatacctgtattctccccaccgtcagcagcagctgcagtgtcccatcaagtactacgagctcctcatgtacgagttgcacctccggtcactattcggcaagctgttccagtatttgctactccacctncttcgattcgaaaagatgaacctgttcccatcccataagacgaaccaccaaccattagtgcccctagcccggaagacaaactgccagctaaaacgcccgaagcagagaccaagactgagaacat

SEQ ID NO: 23731 - DNA, 426 bp, Glycine max
  Clone ID: LIB3106-014-Q1-K1-H11
cccacgcgtccgcccacgcgttcggaagcgcatctggtttggtcccatatgatggccaggttcatctgcgacaagacgaagacccacttactccgtcactccgaatcggcgaaaggggtgatagtgtgccatcgtcaccaatcctcggaagcaacgaaggcgaagtgggtggagatcgatggagtgaagctgttggaggagcacgtccagcgtgttatggtgaagaaggccacacccgattggcttcccttcctccccggttcctccttctgggtcccaccttctacttccccctttcttcacaaattctccatcccctctcataccttcttccttcaagatgacgaatctgggaattctattgccacccctcgagggacagaggttactgtgcaactcaaggttatgacacccgctgaacacgtg

SEQ ID NO: 23732 - DNA, 157 bp, Glycine max
  unsure at all n locations
  Clone ID: LIB3106-014-Q1-K1-H12
cccgnaccccggaggngaaaagcgcaagnnggaggcccgccgnggaagcacacaacancnnnggccnngagaccannccngaagagngccgcgaagcaacaaaggaanacanccaaggcgaacaananagaacagacnccaaaacagnnaaccaaca

SEQ ID NO: 23733 - DNA, 484 bp, Glycine max
  Clone ID: LIB3106-014-Q1-K1-H5
cccacgcgtccgcgattgctagaatggaatttcgatgctcagtcatctcttttaccattctcttctctcttgctcttgcaggagagagccatgtccatgcatcgctacctgaggaagattattgggaagctgtttggccaaacactcccattcccactgcactgcgagagcttctaaagcctctccctgcaggtgttgaaatcgatgaactccctaagcaaattgatgatacacagtacccaaaaacattcttctataaagaagaccttcatccaggcaaaacaatgaaagtacaattcaccaagcgtgcctatgcacaaccttatggtgtatatacatggttaacggatattaaagacacctctaaagaaggatatagttttgaagagatatgcatcaagaaagaagcgtttgaaggagaagagaagttttgtgcaaaatccttgggaacagtaattggttttgccatttcaaagctgggaaa

SEQ ID NO: 23734 - DNA, 277 bp, Glycine max
  Clone ID: LIB3106-014-Q1-K1-H7
ctcacgcctacgtcaacgcgagcagtatatgcaagtgtatcgtgaggagaatactacagtggttgtggtctcaggtgcaggccatggcgcaggcgtacgaacgtgccatgtcgcgaagctacccaaggtatcgtgagcgaatgaaaactgtctatggcgcacgttctacgctggctaaatgcgcacgcatcatgctagccgtgaaagcacacaacatacagtgcgttgaaaccactcatgactagagcaatgaaccaacatatgaatccaactatgg

SEQ ID NO: 23735 - DNA, 338 bp, Glycine max
  Clone ID: LIB3106-015-Q1-K1-A1
cacagaccgagaaatcccaatcctatggcacaagacgggtatctcgatgaacagttggcgcagctactatccaattttgtgcaccagagggaatcactgtcgaatcaagaagaagtagagctgcgtactaaaaatgaaactcttgtattagaggttacaatagatcttttttaaagacaacgcagcaccatgaacgagacgcaaatagcttataatgtcggataaataatcaccctgattggataacttagatgagaggatatcaatcatcaaaggcttcagtaacacaggtgcagacgctcttgagtgatgcaaacataatgtggatgccagctata

SEQ ID NO: 23736 - DNA, 460 bp, Glycine max
  Clone ID: LIB3106-014-Q1-K1-E6
ggaaactttttcgattttcgctttctggatgtgtgaattgttgtttgaaagtcacaagcgatggtgaaggacactgcgtattatgacatattaggtgtcaattatgatgcatctgctgcagagatcaagaaagcttattatgtcaaggctagaattgttcaccccgataaaaatcctgaggatcctaaggccgcagaaaactttcagaaacttggtgaggcttaccaggttttaagtgatcctgggaagcgtgcggcatatgatgagcatggaaaggagggagtaccacaagattccatgatggaccctacaactgtatttggaatgatttttggaagtgaattttttgaagaatatattggacaacttgcactggcttctttagcatctatagaaattgaggaagactcacaggatccttgagttttgaggcatagaattcaagaaaagatgaaagctt

SEQ ID NO: 23737 - DNA, 485 bp, Glycine max
  Clone ID: LIB3106-014-Q1-K1-C3
cccacgcgtccggcaagcaaaccattaaccacaacacatggcgctatgttcctcgactctggcttgtctctcccatcaaactcacttccaagtccttcttatctccaacaccagtcagttggcatggcatcttgataaagaataacacctcaacaagattcttgctgaaagctggttttaatgagattgaacctgacctcagtgaagatcctagagaccaatttgccaccaatggcgttgacgctgatgattttgtgtatggaatatatgatgaccaccacacttaccatgaaggagaacagaaaggaacattttggggctcaattaaagaagagatggcagaagcagaaccccccacatgattccaggggcttatttcatggctcttcccaccagccattgctcttggggtgtacttcaatgttccgggggagtacttatacattggagcaggcatatttacaatcatattttgcattattgag

SEQ ID NO: 23738 - DNA, 299 bp, Glycine max
  Clone ID: LIB3106-014-Q1-K1-C5
actactcatgctgtcatcaacggcagattcgctgacctggcagagctacaccattacatggatcgcggtataccaaaggagctagctaatgctaagccacttgttcaagaacctgacccgtcttaattacatacaacagccatgcattcattataatccttaccttgtaacatgtttaacttaatactatatgaacatctgggcaattgcgcactgacaaatagttcacttatctgcacttgaaaatgtgtcaggttatgtcctcaccatcataatggagactactgtgagatgaacta

SEQ ID NO: 23739 - DNA, 408 bp, Glycine max
  Clone ID: LIB3106-014-Q1-K1-C7
gaggtgtaacacccaaagtgttctctcattgcttaaaaggaggagagaacggaggaggcgtgctagttcttggtgaaattttggaaccaagtattgtttatagtccacttgtcccatcacagcctcattacaacttaaatcttcagagcattgctgtcaatggacaacttctcccaattgattcaaatgtatttgcaacaactaacaatcaaggaacaattgttgactctggcacaacattggcataccttgttcaagaagcttacaatccttttgtcaagctataactgctgctgtgtcacagttttcaaaacccattatttcaaaaggaaaccagtgttatctgctatcaaacagtttctgatgatctcaattgaatttatgcttattcaacgtaagtgatatatt

SEQ ID NO: 23740 - DNA, 302 bp, Glycine max
  Clone ID: LIB3106-014-Q1-K1-C9
ctcttgagagtcacactcttacttcaagacacgtaccgaaagaaactatcatccatcaaattatacactatacacgaacggtcccgctatctctctccaatatcacgaactactaactttcattggcaattttcacgaaacacttgctgcaagaactcccaggagaaccgtcattgctgcataaacatatgatctgattgatccaaacactgttcaccgagttcgcattactacaagtaacctgtactcaactgcattactgcatgaacgtaacaaacactttggaacatctctttcaacaa

SEQ ID NO: 23741 - DNA, 132 bp, Glycine max
  Clone ID: LIB3106-014-Q1-K1-D11
gcaaatcgatgtgttaagttatttcatagtccatgtttctatctaaaaatgaagaactattcgagagatactttgaatatatgttccgtctgttctataaatgagtggatgtgaaaaaacttttttgttagt

SEQ ID NO: 23742 - DNA, 286 bp, Glycine max
  Clone ID: LIB3106-014-Q1-K1-D12
cacgcgtccgaggccgcaaatgtctgtcctcttctttttcttcattctatttcaaccatgaaagagagcctgctcttaaggggttgccaatgctgtaacgaaatcggatccaagttctgatacgtgatattctactagcacgtcattgatcctaccggaaagtacaactactaaagcaacagctacatacaactagagaggatcaatgtctattacaatgttgcctttgacataaggtacgtatcaagagccctgcttatggatcttgaaccttgtaaccatggac

SEQ ID NO: 23743 - DNA, 516 bp, Glycine max
  Clone ID: LIB3106-014-Q1-K1-D4
tcgtcccactgcgtctcgtcttcaattctatcacattctcatatcactcacattcatgaaactccttctgtccctgtggaacaacattgagacgatctgtgatgtgcaccataagggcggagatagaagccccgcagtaggagaagacagtccatcggtgggagacaaggtctccgtgcggagaagaagccaaagggccggaaagaagcttccgaaggagggaggcgccggcggagaagggaagaagaagaagaggaacaagaagagcgtggagacatacaagatctacatcttcaaggttctgaagcaggttcaccctgacattggtatctcaagcaaggccatgggaatcatgaacagcttcatcaacgacatcttcgagaagcttgcccaggaatcttctagacttgcccgctacaacaagaaacccaccatcacttcgagggaaattcagaccgcggtcaggcttgtgctgcccggtgaattggctaagcacgccgtctctgagggtaccaa

SEQ ID NO: 23744 - DNA, 441 bp, Glycine max
  Clone ID: LIB3106-014-Q1-K1-D5
gagaaataaagctgcaaagatattcagtattccggatgttgctgctgaagaaccctggtggggtcgggagcatgaatatgcattattgcagaaagatgtccaatggcctcttggatggcctcttggtgggtttcctgggccccagggaccatactattgtggaactggtgctaacaaggcttttgggcgttgatattgttgactcacattacaaagcatgtatttatgcgggaattaacataagtggaatcaatggagaagtgatgcccggtcagtgggaattccaagttggtccatcggttggcattatctgctgctgactaggtgtgggttgctcgttacattttggataggatcaccgagattgcttgagtggagctttcctttgaccctaaaccaattcagggtgattggaatggtgctggttctcacacaaattac

SEQ ID NO: 23745 - DNA, 458 bp, Glycine max
  Clone ID: LIB3106-014-Q1-K1-D6
cccacgcgtccggcggagacgaagaagtgtagagaagagaagagaagggatttggatctgaaaagagaagatggggggaggaatggaagcaaacaagaacaagttcatagaggattggggcactgccagagagaatctggagttcaatttccgttggactcgccgcaaccttgctcttgttggcatcttcggcatcgctattcccgtcctcgtctacaagggcatcgtccgtgaattccatatgcaagatgaagataatggtcggccgtacaggaagttcatgtgagagagtatggagagtcttttgtaataattcgtcaagttagaccttgatattatgaggctacaaaccatgtttttttttttccttaattcgcaaaggcttgcttgcttttaagtactctagacctatcaaacctctccatgtttgcctgtcttcattcaaatttctgttatgc

SEQ ID NO: 23746 - DNA, 472 bp, Glycine max
  Clone ID: LIB3106-014-Q1-K1-D7
cccacgcgtccgcctagtccttatcagcttcactatttcgattgaaatcgccgaagaaggtattgacgtcgatgatgaaaatgaaattggtgaaaacattactgcttctcctttgtgtgaaactcttctgttatgcagtgattggtgctcctcaaacttgtcctgctaacaatgaggataaatgcggcgattcagatgaatggaaaggggagtttttccctgacattcccaaaattaaatatgagggtccgtcaagtaagaatgtgctttcatttaaatggtataatgcagaggaggaaattcttgggaagaagatgaaggattggttaagatttagtgttgcattttggcatacattccgtggaacaggtgctgacccatttggtgcacctaccaaatactggctatgggaagatggtaccaattcattaaacatggctaaaagacgaatgagagctaactttgagttcat

SEQ ID NO: 23747 - DNA, 473 bp, Glycine max
  Clone ID: LIB3106-014-Q1-K1-D8
ctcaaatgttcatttaaaggatacagtgatgcttggtgctgattactatgaaaccgatgcataagtggtagcactcttagctgaaggaagagttccaataggaataggagaaaatacaaaaatcaaggactgtattattgacaaaaatgctagaattggaaagaatgttgtcatagcaaattcagagggcatacaagaggctgacagatcttcagaagggttttacatccgttctggggttaccattgtattgaaaaactcagtaattgaagatggattcatcatataataaattcgcccgtgatttgtttgccccgttttaccatgaatttgaggatgggaatgttttgatctttatgaattatgtctttttttttaaagaaaagcattaaatgacaatgtgttgccgaaatggatattccaaattcagcacaacttctctgagcttgtacttgtatatcataattattaac

SEQ ID NO: 23748 - DNA, 243 bp, Glycine max
  Clone ID: LIB3106-014-Q1-K1-E11
tttaattctcatcttattctcatctccaatccaaatatggaggccatcactgcttccttatagagctctatcaaaaactgttccttaaacaataccaacaactaccatcatcatatcacccccccataagaagatgatagatcatctacataattagacataggaatctcattctgctaaaactatatccctgaccccaataaaaaacatatctccgacaccacattagagctcaactcccac

SEQ ID NO: 23749 - DNA, 253 bp, Glycine max
  Clone ID: LIB3106-014-Q1-K1-E4
ggtttcggaatatcccgggtgcgactccactgcgtctcgctgagacaacctattttatattaatacctaaaatatattgtcagctttcagtgcctgttcggtagagtattctgtatggtacgttttctggggtttcgccacttcacatctcagtatgtatgggttgtgtgcacccttttaactctccaacaaccttcaaagctctctaaggcatacaatgaacacattgtcaatgcttttataccatactcat

SEQ ID NO: 23750 - DNA, 458 bp, Glycine max
  Clone ID: LIB3106-014-Q1-K1-C2
tcgcccacgcgtccgtggaagaaaatggcgggttgtggaaaggtttcgttcaaagtggcactggcctcctatccaaaattacccttcaaagtgtttagcgtttcataggctgcgccttttactgccgttctcaaattcgccgccgaagaattcaaagtcccgccccagaccatcgctatcatcaccaatgatggtgttggcataaatccccagcagagcgcatgctatgtcttccttaaacatggttcagaattgcgcctgattccgcgcgatagggttggtgccttttatatgttacagatgtgtttgactggagttgatgccttttatattttacagatgtctgacttgatattgacccttctcgattgatacatgaactgtagcttcatatgttgtaatcatttaataccattgttactgatttcatatattgatattgagatcaaaggtgtctt

SEQ ID NO: 23751 - DNA, 410 bp, Glycine max
  Clone ID: LIB3106-014-Q1-K1-A11
gggagtagcggcattaaaaatgcacatcttcgtgaaaactctgacagggaagactatggccctcgaggtcgagagcagcgacaccatcgacaatgtcaaggccaagattcaagacaaggaaggcattcctccggatcagcagcgtttgattttcgccggaaagcagcttgaagatggaaggaccctggccgattacaacatccagaaggaatcaacccttcatctcgtcctcaggcttcgtggtggcatcattgagccttccctcatggctttggctcgcaaatacaatcaggacaagatgatttgccgcaagtgctacgcccgtctgcatcctagggctgtgaactgccgcaagaaaaagtgcggtcatagtaaccagtttgaggcctaagaagaagatcaagtgaatt

SEQ ID NO: 23752 - DNA, 408 bp, Glycine max
  Clone ID: LIB3106-014-Q1-K1-A12
gggggatccactgttgcagaatccagtttgtgacaccaattccaaatcactattcacgatgactactgagacccaagaggagcttcttgctcaacatctcgaacagcaaaagatccatgatgatgaacctgtcgtcgaggatgataatgatgaggaagaggatgatgatgatgatgaggatgacgaggatgatgaccatgccgacggactagaaggtgatgcatctggtaggtccaagcagaccagaagtgaaaagaagagtcgcaaggcaatgcttaaacttggaatgaaacctgtaacaggtgtcagccgagtgacggtcaagaagagcaagaatatcctgttcgtcatctcaaaaccagacgttttcaagagtccaacgtctgacacgtacattatatttgggga

SEQ ID NO: 23753 - DNA, 178 bp, Glycine max
  unsure at all n locations
  Clone ID: LIB3106-014-Q1-K1-A2
gtcgtctgagaccattgatattcccgacggcgtgagcatcttggttcacgcttaggttatcgatgttgatggccctcgtggaaaacgtttntcgagtacttccactcatttgaactttgaacttgtaacttattaccgactatggcggtgaaatgtagtcttatattgattcttggtt

SEQ ID NO: 23754 - DNA, 316 bp, Glycine max
  Clone ID: LIB3106-014-Q1-K1-A3
tgaaaacccaaagtgcttctctcctctgtctatttctctctcttgctatcctgggggctagtggcactgctgcaagtgcaactccaagaagcgcagtgtcaagccaccatgtttcaacattcaacagaagcctttttccttacacttttctctatggaattggttcttatgcttaccaggcattaaggagcatcaagtgtagatgggagaggaccaagcatatgggacacctacactagacagcatactgaaaagatgtgggatcatagaaccggtgacatgggagctgatttctatcatcgatacaatggtgaca

SEQ ID NO: 23755 - DNA, 294 bp, Glycine max
  Clone ID: LIB3106-014-Q1-K1-A4
gcggctataagctagtttatcgtgaggagaatatgaagttgtttgttttctttgttggtgcaggatttttggtagcatggccatgccatggcgcaggctactaaatgatccctctccgaatgaaaactggctatggtgagcgtgcttcgtaggttaaatgcgcaagttttatgcttgctttggaatcacacaacatccgagcctttaaaaccattcctgaagagtacgttgaaccaacataggacgacattaatggctaacaatttagatcagactctaaaacagttaaccaac

SEQ ID NO: 23756 - DNA, 347 bp, Glycine max
  Clone ID: LIB3106-014-Q1-K1-A5
gctagcgaagatgtctggtcgtggaaagggtagcaaggctttgggaaagggacgagccgagaggcacaggaaggtgcttcgtgacaacatccagggtatcaccaatcccgcaattcggcgtacggctcgcacaggtggcgttaagagaatcagtggtctcatctacgatgagacacgtggcatcctcaagatattcctcgtgaacgttattcgcgacgctgttacctacaccgaacacgctagaagaaagaccgttaccgctatggatgttgattatgctctcaagaggcaggacaggactctctacggtttctgtggttaatttctagggcctccatcggcgtatc

SEQ ID NO: 23757 - DNA, 456 bp, Glycine max
  Clone ID: LIB3106-014-Q1-K1-A6
tccacgcgtccggtctctctctcacatcatcatggcctccccaacactaataacccccaggtcagtgaaatcactcacacccatcaagcccaaacccaccaccaccatcgccgccactctcacaccacccacaacaacctccaccgtcgtcgccacccaccctcgccgccgcgaattcttgtccatcatcaccgccaccacatggctggtccctctgagcccggcactggcttcctcggacgaggaatacatgaaggagacctaggaagtgatcaacaaagtgaggacaacaatcgtgatggacaagaatgaccccaacgtggcaaccgtggtggcggagttgagagaaaccttgaactcgtgggttgcaaagtacatgagtgaaaaagcgcttctgggacgcgtttcctttaaggacaattatttcggcggctaacgctatttctggtcactaca

SEQ ID NO: 23758 - DNA, 158 bp, Glycine max
  Clone ID: LIB3106-014-Q1-K1-A7
attgaaaatcatttaccatcaattaaatccaaactaggataaccaaatcactcttttcttgtcattttgttatcctagtttggatttaattgaaaatcatttaccatcaatttgtgcagacggctatacctttattaactgttagaaagttttactct

SEQ ID NO: 23759 - DNA, 249 bp, Glycine max
  Clone ID: LIB3106-014-Q1-K1-A8
atggtacgtctcactactgataatgattctgctggcaatgaacagactatcaccttggaggaaattaatgaatcaacagccaacatgtaacagattattgtgtattgagttactgttgaattgttacgggctgaatgcttggaaagacaagtgaaactaaaggtgttacgatatgtatgtaatatatttgtatttaccgaaaatcatatgtaattaatgtaactgcatttttatctgactctgtattac

SEQ ID NO: 23760 - DNA, 416 bp, Glycine max
  Clone ID: LIB3106-014-Q1-K1-A9
cccacgcgtccgcggacgcgtgggaaagctccatgcttctgtgctcgcccttgtattcgcttcttgtcatagtatttcaggaaggattggtaacatgtatgaagaatgaagacggatcagaagaatggggatatgtgcaagttagaccaaaagcccacttgttctggtggctttacagaagtccatacagagtggagaatccctccaagccttggccaatcattctctggcttcagggaggaccaggctcttcaggagttgggtttggaaattttggagaggttggtcctttggatgctaatttgaagccacgaaatttcacatggttgagaaaagcagatctcttgtttgtggacaacccagttggaacccggtacaattacgtggaggattccaatctttatgccaaaacagac

SEQ ID NO: 23761 - DNA, 430 bp, Glycine max
  Clone ID: LIB3106-014-Q1-K1-B12
catgatccagatcagaactgggaattgtgcatctgggtttggtttgaattgtgctgggaaggttaaggttggtcccagcagagttgggtttaaggtgtttgcttcagagactcaggctacagagcctgatcttagtgtaactgttaatgggttgcgcatgcctaacccctttgttattgggtcaggtccaccagggaccaattacacagtcatgaagagggcctttgatgaaggttggggtgctgtgattgcaaaaactgtatcacttgatgcggcaaaagttataaatgtaactcctcgatatgcccggctacgggcaggtgcaaatggatctgcaaaaggagaaattattggatgggagaacatagaacttatcagtgataggccacttgaaactatgttgaaagaattcaagcaatttaaagaagag

SEQ ID NO: 23762 - DNA, 460 bp, Glycine max
  Clone ID: LIB3106-014-Q1-K1-B6
tcgcccacgcgtccgctcacgcgtccgcccactcgtccggcacctccttcatgaggaagcagcgtatgacgaccaagagcctaaagacattccccaacgctctttttggtctgaaaggtggacgaggtggtcgtgtaacttgcatggcctcgtacaaggtgaagctcataaccccagaaggagaattggagtttgaatgcccatatgatgttttcattgatgacaaggctgatgaagaaggcattgaactttcgtactcgtgcagggctggttcttgcgtttcatgtgttgggaaaattgtgaaaggtgacgtggaccaatcagatggtagctttcttgatgatgaacaaattcaaagtggatggggtcttacctgtgttgctgtacctaagtcatacgtttgcattgagtcacacaacgatggatagatcgaatgatcgatatgtatcataatgtaatc

SEQ ID NO: 23763 - DNA, 296 bp, Glycine max
  Clone ID: LIB3106-014-Q1-K1-B7
ctggtggtgatagtggtttaggtggtggatatggaggaggagcatgaggtggtggagttggaggacttggaggtggtagtggtctatgtggtggttatggaggaggaagtggtctaggtgatgtaatcggtggacgcctatacacaggaatagggcttggatgatgcctttacaaagggattggaattttgagtggccttaacaaaggcatatttgttagtgtactttgctataagtggagttaacatgtgtattcgtgcgttcaagcatgttgaattcaaagagccttgaaaaat

SEQ ID NO: 23764 - DNA, 451 bp, Glycine max
  Clone ID: LIB3106-014-Q1-K1-B8
gtttgttgtgagctataagctagtttatcgtgaggagaatatgaagttgtttgttttctgtgttgctgcagtagttttggtagcatggccatgccatggcgcatgctaccaaaggttccctctccgaatgaaaactggctatggtgagcgttcttcggaggtaaaatgcgcaagttttaggcttgctgtggaagcacacaacatcctagcctttaaaaccattcctgaagagtgccttgaaccaacagaggactacattaatggcgaacaatttacatcagactctaaaacagttaaccaacaagctttcttttatgctagtgaacgcgaagtccatcacaacgacatatttatattcggcatatataacaccgtactctctaatatcccatactatgaaaaacatggatattgggtggaggaattttatgaaaccttatatgatgaatgg

SEQ ID NO: 23765 - DNA, 433 bp, Glycine max
  Clone ID: LIB3106-014-Q1-K1-B9
cgttttagatcgtaaaaactaatcactacgaaaacaagagatatcgaagatggctctgcccagagctaaggagagcgtgtcgttcaattccgtcgtcgttttcagcaaaacctattgccctttctgcgtcgatgtgaagaagctcttcggtgacctcggtgccaattacaaggccatcgaactcgacactgaatccgatggaaaagagctccaagcagcattagttgagtggacggaccagcgaaccgtgcctaatgtgtttattggtggaaaccacattggtggctgtgactcaacaactgccctgcacactcaggggaagctggttcctctgctgatatctgctggagctgttgccaaatcaactgcttaaaggatctcccatttctaggttatgcaggtaaataaaaataaaaacccaagtagttgggtc

SEQ ID NO: 23766 - DNA, 258 bp, Glycine max
  Clone ID: LIB3106-014-Q1-K1-C1
cccacgcgtccgcccacgcgtccgtggaaagaatgtttggccacattgatggaggaaacgggtcaaaaacttcagtgactgttgacagggaatgtgtatccccattgaattctttatgtgcagaatgtatacccaatgaggaaggaaagccttgtgcttttccttaccttaaagtgatcaaaattgttgctttcaggctgtaaccgcatattttgataaccattgttgattaaaaggcaagaaattcatgctttctct

SEQ ID NO: 23767 - DNA, 318 bp, Glycine max
  Clone ID: LIB3106-014-Q1-K1-C11
actcgtccgtcaatatagcccattccctatacaacttaaccctaacacacaccgatttgattcagtgtccatggctagcctcaaggttgcatttttggctgcagtgctctgcatggttgtggtgagtgcacccatggcacatgcagctatcacgtgcgggcaggtgacgagtagcctggccaattgcatcggttacctccagaagggaggaacgccgtcgtcgggatgctgcaacggagtgaagagcctcaatgccgccgtcaagaccaccgacgaccgacagacggcgtgcaactgacttaaatcctcttgcagcca

SEQ ID NO: 23768 - DNA, 414 bp, Glycine max
  Clone ID: LIB3106-014-Q1-K1-A10
gtgatcgagataactagaaacagtgttatgaaaatgaatgtccttgttttcttcgttgctacaatttgggtagcatggcaatgccatgcgtacgatatgttccctctccgaatgaacactggctatggtgcccgtactccggaggtgaaatgcgcaagttggaggcttgctgtggaagcacacaacatctttggctttgagaccattcctgaagagtgcgttgaagcaacaaaggaatacatccatggcgaacaatatacatcagactccaaaacagttaaccaacaagcttacttttatgccagagacctcgaagtccatcccaaggacacatttgtgttcagtatagatggcaccgtactctctaatattccatactacaaaaaacatggatatggggtggagaaatttaac

SEQ ID NO: 23769 - DNA, 290 bp, Glycine max
  Clone ID: LIB3106-013-Q1-K1-G4
cccacgcgtccgcccacgcgtccgcggacgcgtgggtagtttatcgtgaggagaatatgaagttgtgggttttctttgttgctgcagtagttttggtagcatggccatgccatggcgcaggctaccaaaggttccctctccgaatgaaaactggctatggtgagcgttcttcggaggtaaaatgcgcaagttttaggcttgctgtggaagcacacaacatccgagcctttaaaaccattcctgaagagtgcgttgaaccaacaaaagactacattaatggcgaacaattt

SEQ ID NO: 23770 - DNA, 390 bp, Glycine max
  Clone ID: LIB3106-013-Q1-K1-G5
caaaaaatgaaaaattactcgatttttatttctccaaaatgatcaattttataagattgaatcgactaaaaaatgaaatgaatcatttcatattgatagtattgctatgcttagtgtgcgactcgttagttttttagaacggttccaatttaacaaatttataaaccggttcatcgtataaatgaattaaaaaagaactaataaccaacgcatcgcttcggattatctagatctaaagaactagtcaaaacaaaaaaaaatataaaaaaagatatattatagcaactgaactattgtgaagcataaaagaacaaaaatcttatttagttgtaaagcaataaaaatatacagataaatgaagaggtgaaagaaagagagaaaaaaatcaat

SEQ ID NO: 23771 - DNA, 429 bp, Glycine max
  Clone ID: LIB3106-013-Q1-K1-G7
acttcccaaaaaatatacagcactatggaacaccaaaaagaggagcaactagaaccagtgagtcctgtgggacaatacttcaacagctctgtgctatgcatatacatcattggagttttagaattcgaagttccaatagatgacttgcaaacatatgctcttcttaaagatgttttccttcccatcaatccacgcttctcctccatcatggttccctctctttgcttcccttattatattcgttaatttatttttatatgcttatgatgtctatgaacattagaatattatacatacataatatatatgacaagatgacaatgttagatatggcacttattaatttcacaaggctatttatgttaattaattaatttctatagatagttttgcattataagtttgctttgcgtctttagttgcatattt

SEQ ID NO: 23772 - DNA, 438 bp, Glycine max
  Clone ID: LIB3106-013-Q1-K1-G8
cccacgcgtccgcccacgcgtccgcccacgcgtccgctgatgccaaagtcctaaactaatggatccattatgcttcatttacgatccattgttacacattgcgtttcttccgcaggagaggccacggaatcacttggatatgcattcaaaattatgtaatcgaatgggaagatactatgttcccttcaattggacgaattcaatctcacatctgacactgaaacatttggtcttctgatttcttcaaaacagttataattacatctctggttagcgaactaagagtcgttgaacttcttgatggcctttgcgaaaagatgcaagattatacactcaagatagatacaaatacctatgaatggttcaaagtggatagctgggataacctcacaacaaataagcaagaagctcgggcatattcaaaagatatatcttctt

SEQ ID NO: 23773 - DNA, 458 bp, Glycine max
  unsure at all n locations
  Clone ID: LIB3106-013-Q1-K1-G9
aaaagggggcgaccgacgcgtacgataaaattaaaaattactcnatttttatttttccaaaatcatcaaatatataagatggccgcgacttttaaatgaacggcagcacttcatatttatcttattactatgcttaatgagcaactccctacttttttagaaccgctccactttaacacatttataaacccccatcatcttataaatcaattaaacaagaactaataaccaactcatccttctcaattatctatatctaaagaactattcaaaacaaaaaaaaatatacaaaaactatctattataacaacttaactattgccaagcatataataacaaatatcttatttacttttaaatcaatataaatatacatatctattaatacgtcaaacaaaaaaataaaaaaaaccattcatatatatactctaatatctaaaacgcctattccttatatt

SEQ ID NO: 23774 - DNA, 406 bp, Glycine max
  Clone ID: LIB3106-013-Q1-K1-H1
gcgctgacaatgaacagaacatcaagaccagtaggtttgatgcgcatattttgtgaatatatatattagggcgggagtaacaagctttggctcacgggtaagctggctagctatgggggaattcaagcactttgtaattgttaagttcaaggaaggtgtggccgttgacgagctcacaaaagggatggaaaagttggtcacggagattggtgctgtcaagtcctttgaatggggacaagacattgaaagcctaaatgtgttgagacaaggtttcactcatgcattcttgatgacattcaacaagaaagaagactttgttgcatttcagagccacccaaatcatgtcgagttctcgacaaagttttcggcagctattgagaatattgtgctactggatttcccatct

SEQ ID NO: 23775 - DNA, 328 bp, Glycine max
  unsure at all n locations
  Clone ID: LIB3106-013-Q1-K1-H10
gccttcancaacagtttttctgggtcattgtctgctgaattctctcanctagcatccctcggcgttcttaatctagctgggagctacttcaaaggttcaattccatctgaatatggttctttcaagagccttgagtttcttcatcttgcacgaaattctctttcaggaagcatacctccagaacttggtcatctcaacacagtgacccacatggaaattggctacaacctataccagggttttattccacctgaaatacgtaacatgagccagcttcagtatcttgacatagcaagagcaaatctttctggccttataccaaagcaac

SEQ ID NO: 23776 - DNA, 441 bp, Glycine max
  unsure at all n locations
  Clone ID: LIB3106-013-Q1-K1-H11
cacacatcgttttatccgaaagcaagcattatcagaagcagaaagaaagaataagaggttgcagcaacaatggcagccatggctgcgcttcanagctcaatggtcggtctctccctctcctccaactctttcttaggccaacgcctttctcccatcaccctcccctctcttcttccgggtaagtcaacagagaagcaatgtcctattgtaatgaggcttaaacgatgggaacggaaggagtgtaaaccaaacagccttcctatcttgcacaaaatgcatgttaaacttggagatacggtgcaagtcatatctggacgtgaaaggggtaaagttggggagattactaaaatcttcaagcataacagcactgttatagtgaaagatttaaatttgaagacaaagcatgtgaagagtagagaagagggggaaccagggcaaatt

SEQ ID NO: 23777 - DNA, 397 bp, Glycine max
  unsure at all n locations
  Clone ID: LIB3106-013-Q1-K1-H12
cccacgcgtccgcccacgcgtccgggtgtacacagtgtatgccacagcagcagaccctaagaagggatcattgggaaccattgcaccaattgccattggtttcattgttggtgccaacatcttggcagcagggccattctctggcggctcgatgaacccggcacgctcctttgggcctgcagttgttagtggtgacttccatgacaactggatctactgggttggacctcttattggtggtggnttggctggncttatctacggcaatgtcttcattcgctctgaccatgcacctctttccagtgaattttgatctgattcaagtcatggcctttgnaattcatggttctttttctatctctctttgttttctctctcttccatctatgcttttttt

SEQ ID NO: 23778 - DNA, 207 bp, Glycine max
  Clone ID: LIB3106-013-Q1-K1-H2
cccacgcgtccgaaaaaaaaaaaaaaaaaaaaaaaatttttaaaaaaaaaaaaaaaaaaaagagaaaggggaaaataaaaaaaaaaaaaagaaaaaaaaaaaaaaaaaaaaaaaaaaaaaaaaaaaaaaaaaaaagggggccgccctttttaaaaaaccaaattttctttccccttctttcaaaattataattttttttttggggcc

SEQ ID NO: 23779 - DNA, 268 bp, Glycine max
  unsure at all n locations
  Clone ID: LIB3106-013-Q1-K1-H3
gcgcccacgcgtccgcccacgcgtccgaaaaaatacaagattgtataaaaaaaatataagagtcgcctctggttttgagagaattggacataaagaaaaaaatgatcttatttaagtcataatatatatgggatttccaaagttattaatagaggaaaagcctaaaaaaaattgaagaatcacagacaaatntgaaaaaaaaaaaaaaaaaaaaaaaaaaaaaaaaaaaaaaaaaaaaaaaaaaaatattaaaaaataaaataaattg

SEQ ID NO: 23780 - DNA, 415 bp, Glycine max
  unsure at all n locations
  Clone ID: LIB3106-013-Q1-K1-H4
gcgcnacgcgtccgtgaaaacatggaatgggatgggcacctagggagcaaacctacgaatccacacgtggtagaggagcttgtggaagctcaacctaccaataaacaagtgattgaagatgttaccaataataagcataatgtggcagtggcacctaataagacaggtcgaggatcttcatggctgcaaaaacaatcctggacacaaatggttagtcagaataacaattcatttagtatttcaaatatttttcctggcattactttcccagagccaatggccacggagcccattgtggaacctgccatttccaatgattgtaagcataatggtgtagctaaggatactgttaatgaagttgtcagtgatgggtttagctcaagggagactataccagtaaagagtcaacatactg

SEQ ID NO: 23781 - DNA, 399 bp, Glycine max
  unsure at all n locations
  Clone ID: LIB3106-013-Q1-K1-H5
cgacccacgcgtgcgtaacaacagaacacacagctcttactttcttccgccattttccacaagaactctccaaggatcctcggtgccacgagattctttggtgggaaaaatccaagaggtttgaaatttgaatgcatggaagatggattattttaatgcaccaggaagaaaccatctctttgttccagggccggttaacattccggaccacatcatccgggccatgaacagaaacaatgaggactaccgttctccagcaatttcagctatgacaaaaactttgcttgaggatgtcaagaagattttcaagaccactactggaaccccatttctcatccctacaactggtactggtgcttgngagagtgctctcacaaacacactgtcttctggggatcg

SEQ ID NO: 23782 - DNA, 420 bp, Glycine max
  unsure at all n locations
  Clone ID: LIB3106-013-Q1-K1-H6
tcgnccacgctatcgtgaggagaatatgaagtngtttgttttctttgatgctgcagtagtttgggtggcatggccatgccatggcgcacgctaccaaaggttccctctccgaatgaaaactggctatggtgagcgttcttcggaggtaaaatgcgcaagttttacgcttgctgtggaagcacacaacatccgagcctttaaaaccattcctgaagagtgcgttgaaccaacaaaggactacattaatggcgaacaatttacatcagactctaaaacagttaaccaacaagctttcttttatgctagtgaacgcgacgtccatcacaacgacatatttatattccgcataaataacaccgtactctctaatatcccatactatgaaaaacatggatatgcggtggaggaaattaatgaaac

SEQ ID NO: 23783 - DNA, 143 bp, Glycine max
  Clone ID: LIB3106-013-Q1-K1-H7
ctcacgcgtctctatagatgatctcaacctttatctaatatccgtgaagactactcgcaacggggaccaactacagatcaattgcaaactcaaaaaacacttacaacaggacgatagtgaaatgcacgaccaaaaacatatct

SEQ ID NO: 23784 - DNA, 319 bp, Glycine max
  unsure at all n locations
  Clone ID: LIB3106-013-Q1-K1-H8
ctnctctctctctctctctgaactcaacccttctttccttccgcgacgacaacagcaacggggaccaactacggcacaattccaacctcctccacaccttccaccaacctcgagttcatctcacgcgccaagcagcgcgtcaaggagggactcggaacccgccgtccatggaagctcatgttcaattgccgatccttcgccctccccgccggcgtcggagacgccgtctcgcgcgtgagggagaacatctcctacttccagatgaactacgcgatcgtcgggctcatcgtgctgttcctgagccttctctggcatccaa

SEQ ID NO: 23785 - DNA, 293 bp, Glycine max
  Clone ID: LIB3106-013-Q1-K1-H9
ggggcgaccgacgcgtccgcaaaaaattaaaaattactcaatttttatttcttcaaaatcatcaattacatacgagcgccggtctctatataaatgacacgcagcatttcatatccatcctattgctatccttagtgcaccactcgctccattcttataactaaaccaattctccaaacttatttaccgaatcaccttctaattttattaaaaaacaactaataaccaaccccatttctttacattattctacatctaataaaactaaatcaaatcctacttccaatattaac

SEQ ID NO: 23786 - DNA, 438 bp, Glycine max
  Clone ID: LIB3106-013-Q1-K1-G3
gcggaaagagtctccgcagtcctcaccagaagcaaaaagactgggttttggcgttaacctaagcgaagagagagagaggttgaagaaggtgaattgaatggcttcctcatcctcttatcctcggacggaaggtgaagaagagtatgggtctgaatcgggatgggtggatgctcgaagttggtgcgatcacctggcatcatccttatcggaggatctagggcagattccggggcctgatactccgtgccagacctgccaacacccaactgaaaactggttgtgtctgtcctgtaagcaggtcctctgtagccgttttgtgaacaagcacatgctccaccattctcgtgacactaatctcactcactgcgtcgccctcagtttcagcgatctctccgtctggtgtttctcctgcgacgcttacttggatcctcaactcat

SEQ ID NO: 23787 - DNA, 437 bp, Glycine max
  Clone ID: LIB3106-013-Q1-K1-F10
gagaatttgtggagcagcaatcagcagcagttacaccaccacgtccaattccctgttaggggttgcttcctcttccctctccagtcctgcaaaaaccaagttcctgccctcactttctagattttctgtcaagcgtccgtacttcctttcccaaacttatccgcgcattgctgtgaacaagccctccatgaacctgttgaacagactcgggtttggcagcgcaagagcaacagagaacatggattcatccattcctcagggtccagatgatgacataccagcaccaggccagcagtttgccgagtttggtgctggctgtttttggggtgttgagttggccttccagagggtgcctggggtgaccaagacagaggttggctacacccaggggcttgtgcataatccaacctatgaggatgtgtgtacagggaccacca

SEQ ID NO: 23788 - DNA, 406 bp, Glycine max
  Clone ID: LIB3106-013-Q1-K1-F11
cccacgcgtccgctctcattgattacagccaccgttttctctttcttccaacttgctttggttcctctcctcaactaaagcctattcccttcttctcacccatgtccatttgtagcatgttttctcttgagcacttcaaagttcaaatctttcacacacactcattcatctccaacctccacacccacttgggtcacttctagaacatctatctgccaacccttttggctgaaaaaagaaaaaagaaagaaagaaaataatgggaagcaaatggaggaaattgaagctggctcttggtttggattcctgtgttcacattcccagagcctttgatgattcctccgccgccgcagcaaggttttccggcggcatctcacccaccgtcgtttcgccggccggtgacacc

SEQ ID NO: 23789 - DNA, 331 bp, Glycine max
  Clone ID: LIB3106-013-Q1-K1-F12
tgagaactaagaaggagaagcaaatggcttcctcaatgatctcttccccagctggtaccagtgtcaaccgtgccggtgccggcatggttgctccattcactggcctcaagtccatggctggcttccccaccagaaagaccaacaatgacattacctccattgctagcaacggtggaagagtgcaatgcatgcaggtgtggccaccagttggcaagaagaagtttgagactctttcctacctgccagaccttgatgatgcacaattggcaaaagaagtagaataccttcttaagaagggatggattccttgcttggaattcgagttggagca

SEQ ID NO: 23790 - DNA, 320 bp, Glycine max
  Clone ID: LIB3106-013-Q1-K1-F2
atctcttccccaactattacgcgctgccgcccattctcaagccggcatgcgcactccattcactgtcctcaaatacatggctagcttccccaccataaaaaccaacaatgacattacctccattactaccaacggtggaagagtccaacccatgcacgtgatgacaccacttctcatgaataaatttaaaactacttttctacctgccaaaccttgatgatgcacaattggcaaaagaagtataataccttcttaagaaggtatgcattccttgcttggaattcgaattggatcaccgttttctgttccttgaacccaac

SEQ ID NO: 23791 - DNA, 343 bp, Glycine max
  unsure at all n locations
  Clone ID: LIB3106-013-Q1-K1-F3
cccacgcgtncggctttcattggtgtggcctagctgttttctcaatgagaaagccttcatgtctgcggagcgcacttttgcgctttggggttcccttgttgcttgttatcaccttctgttatgctacttctactgctgcagcaacaactcaagtttcagggaatgaagagctgccaaagacaaacctaaatgggcatgatgaagaagcaaaattcggattttttcatcataaaccaatattcaagaaacatattccaattccagtatataaacctgtaccaaagccatttccagtgtataaacctataccaaagccagttccagttccagtgtacaagcctat

SEQ ID NO: 23792 - DNA, 360 bp, Glycine max
  unsure at all n locations
  Clone ID: LIB3106-013-Q1-K1-F4
cccacgcgttcgaggaaatggggcttcaccaagtttagccgttctgattatctcaagttcgggtcagagaatagaattgtgcccgatggtgtgaatgctaagcttcttgggtgccatggaccattggccaaccgtgaacccggaagggcctttttggatactgatactggttcttagtctgtttgttaatttggaaatactagactttggattactttagttttgcaagagtgaatttgagttattgtcagaacattccaattacttaaattgcttgcgaacctcttcaatttggctattttaatgctatattttgttatgaagcaaagacaccaacacccttnnccgggaaaggaaggg

SEQ ID NO: 23793 - DNA, 444 bp, Glycine max
  Clone ID: LIB3106-013-Q1-K1-F5
ctcatgatgcacggtagaaacaatggcaagaaactcttggctgttaggatcatcaaacatgctatggagattattcatttgttgactgaccagaaccccattcaggttattgttgaagctgttgtcaacagtggtccacgtgaagatgcaacaagaattggttcagctggagttgttaggagacaggctgtggatatctcaccccttaggcgtgttaaccaggctatctatcttctaacaactggagcacgggaagctgctttcagaaatattaagacaattgcagaatgcttggctgatgaacttattaatgcagcaaaagggtcatccaacagctatgctatcaagaaaaaggatgaaattgagagagttgcaaaggccaatcgttgagcagttgtggaagcaatatttgcgatcgggaggattttgtttcggtcaatgttt

SEQ ID NO: 23794 - DNA, 368 bp, Glycine max
  Clone ID: LIB3106-013-Q1-K1-F6
gtttgttttgtgctttagataaaagttctgccaaatcaagaggggttttaagatcatagtgggtgtgttgcaacaatggctaagttctttgctgctatcatcttggcactctttgccatttccatacttcaaacagtggtaatggctgctaatgaacaaggaggccacttgtatgacaacaagagcaaatatggaagtggaagtgtcaagagttaccaatgcccatcacaatgctcgaggagatgtagccagacccaataccacaagccctgcatgtttttctgtcagaagtgctgcaggaaatgcctgtgtgtgcccccggcgtattatggtaataaagctgtgtgcccttgctacaacaactggaa

SEQ ID NO: 23795 - DNA, 433 bp, Glycine max
  Clone ID: LIB3106-013-Q1-K1-F7
cccacgcgtccgctgtcccataacccagtctctgttcacctgggtggaacaccctgtgacgctcttcacccaattacgttccatccaattctgaataagcctcgttcttctgcctctctgttttggaactgcaaaaggagaaggaagaggaaaagctccattactatggcttctaatctcagaaccaacaatttcctgcgccatgtggaatcaatgaagcttcttccatcaggtgcgggtcacatttcacacttgaatgctgtgatacttggtgaatctctcgccactgaagaggatgatttcgttcttccaagtgaggactttgctagccaagccaatgttcagtccccagaacagtatctgaagatgtataatacatccattgaggatcctgctggattctggtctgagattgcctcagagttctattgga

SEQ ID NO: 23796 - DNA, 427 bp, Glycine max
  Clone ID: LIB3106-013-Q1-K1-F8
cccacgcgtccggcagttagatgcctcacacaataatgatagtgaagattcacatcgacaagcaataatattaacatcttgttagttattcatgttctcttattaagaaaataggaggtgatatggtttgagaaaatcagtgttttaaaacccagagatagcagcaggtgtagcagccgacccgaaaactgttatcacaggatagctgctactttgaagcagattaactagtaggttggtgattgattcttctagtgctgtgattttattgtatttttttttcagagagagtgtgtcccttcactggaaagaaatcaaacagggccaacaaagtatcattttcaaaccacaagacaaagaaactgcagtttgtgaaccttcagtacaagagaatttggtgggaagcagggaagcgctacgtaaagct

SEQ ID NO: 23797 - DNA, 373 bp, Glycine max
  unsure at all n locations
  Clone ID: LIB3106-013-Q1-K1-F9
ctaaccaatcctgacactacttcttttacactttctctatcatcatcatttaagaatgccgccgaaattataaccattccagatcgtatacagtcttcttacacttaaacaataggtagagtgtatatggcggcgagataattcgcccctaacatccgatacataggtctctgccccaaaaacatccgagaaaatatcgtcaaagaaaccgtcatagactggaacggactacctattaccgtcaagatcaccgtgcataaccgtcaggccaaagtcactgtggttctatccgacagcgngctcgttataaaggccctaaatgaacccgagcgtgaccgctagaaatctaaaaacatcaagcacatcggctaca

SEQ ID NO: 23798 - DNA, 403 bp, Glycine max
  Clone ID: LIB3106-013-Q1-K1-G1
gcgcccacgcgtccgcccacgcgtccgcaagtagttgagaactaagaagaaggaaatggcttcctcaatggtctcctccccagctgttaccaccgtcaaccgtgccggtgccggcatggttgctccattcaccggcctcaaatccatggctggcttccccacgaggaagaccaacaatgacattacctccattgctagcaacggtggaagagtacaatgcatgcaggtgtggccaccaattggcaagaagaagttcgagactcttttctacttgccagacctcgatgatgcccaattggcaaaggaagtcgaataccttctaaggaaaggatggattccttgcttggaattcgaagtggaacacggtttcgtgtaccgtgagcacaacaggtcacctggatac

SEQ ID NO: 23799 - DNA, 132 bp, Glycine max
  Clone ID: LIB3106-013-Q1-K1-G10
taaaatcaaaattactcaatttttatttttccaaaatgatcaattatataagattggcgcgacttataaatgacgtgcatcatttcatattgatagtatatctatgcttatcgtgccactcctttcttattt

SEQ ID NO: 23800 - DNA, 376 bp, Glycine max
  Clone ID: LIB3106-013-Q1-K1-G11
cccacgcgtccgaaaaaaaaaaaaaaaaaaaaaaaaaaaaaaaaaaaaaaaaaaaggaaaagggaaaaaaaaaaaaaaaaaaaaaaaaaaaaaaaaaaaaaaaaaaaaaaaaaaaaaaaaaaaaaaaaaaaaaaaaaaaaaaaaaaaaaaaaaaaaaaaaaaaaaggggggggcctttttaaaaaatcaattttttcttccccttttttgaaaaatatttttttttttttggggccactaaaataaatttaatggcccccttttttaaaactttggattggaaaaaaccttggttttcccaaatttaatccttttgaaaaaaatccctttttgccaagttgggtaataaaaaaaaaggcccaaacaattccttttt

SEQ ID NO: 23801 - DNA, 437 bp, Glycine max
  Clone ID: LIB3106-013-Q1-K1-G12
cccacgcgtccgcccacgcgtccgagaaacagtgtgatgaaaatgaaggtccttgttttcttcgttgctacaattttggtagcatggcaatgccatgcgtacgatatgttccctctccgaatgaacactggctatggtgcccgtactccggaggtgaaatgcgcaagttggaggcttgctgtggaagcacacaacatctttggctttgagaccattcctgaagagtgcgttgaagcaacaaaggaatacatccatggcgaacaatatagatcagactccaaaacagttaaccaacaagcttacttttatgccagagacctcgaagtccatcccaaggacacatttgtgttcagtatagatggcaccgtactctctaatattccatactacaaaaaacatggatatggcgtggagaaatttaactcgaccttgtatga

SEQ ID NO: 23802 - DNA, 441 bp, Glycine max
  Clone ID: LIB3106-013-Q1-K1-G2
ttcagaagttatttcatgaattcaattctttttggagggtgacttctgtgttatatgttaatatcagggagtaaatagtgtataatttcaaaaagctgattccttttttacattttttttgtacagcttctcacattttctatatattttaattgaatgagttggcttattgataaatgtgacggttggaaacttgttctggtatatcaggttttaaatggaaaccatttttaacctctgccaacatgaatgagtttccaacagccgtgatgagcctctaacatgtaagaaggaatccctagtaagattacttcaatgaaatttacctgttacgcttggcttctgagctttaataatttgttaatacgattctggcctctctttcctttgctaattaactattttctcttaatgctaccctctctttcctttgctaattaa

SEQ ID NO: 23803 - DNA, 430 bp, Glycine max
  Clone ID: LIB3106-013-Q1-K1-F1
gttgagaactaagaaggagaagcaaatggcttcctcaatgatctcttccccagctgttaccactgtcaaccgtgccggtgccggcatggttgctccattcactggcctcaagtccatggctggcttccccaccagaaagaccaacaatgacattacctccattgctagcaacggtggaagagtgcaatgcatgcaggtgtggccaccagttggcaagaagaagtttgagactctttcctacctgccagaccttgatgatgcacaattggcaaaggaagtagaataccttcttaggaagggatggattccttgcttggaattcgagttggagcacggtttcgtgtaccgtgagcacaacaggtcaccaggatactacgatggacgctactggaccatgtggaagctgcctatgtttggttgcactgatgct

SEQ ID NO: 23804 - DNA, 428 bp, Glycine max
  Clone ID: LIB3106-013-Q1-K1-D4
ccagccatgttctcctcttgtgaactgcacatcaagtggtctaagagtttcaacagccacgggttcaactgctgcaatgcaatcagcacgtggatttccaatgcccattttatctcaggatctccaatacatgttaagagaacctatttcactgggggcaacctcaaactatatgcatgggttgatcaaacgtaaccagacaatagtggccacatggacttgtagaaaaggtgtgatatatattgatggttctcatgtcaattatactttcaaagatggggatatcattgccatatcttccaaagcaccggttctgaaagttctcttgcctcataagtttttatagagatgtcaagtaaatttcacagcatatcgtcattgggagaatatgcaaatttggtgggaggagtagtctgttgtaatgaaaa

SEQ ID NO: 23805 - DNA, 446 bp, Glycine max
  Clone ID: LIB3106-013-Q1-K1-D5
gcgcccacgcgtccggaattgaagtccataatcataatgggtccaatatgggcatcaggaattgtgctcgtcacagcttatgcccaacaaaacacattctccctccaacaagccaagaccatggacagacacctaaccaaaacctttcaaatcccagctgggtccatgtctgtcttcaccatccttaccatgctcaccaccactgccttctatgaccgagtcttcatcaaagtggctcgtaggttcaccgggctggaccgtggcataagcttcctccacagaatgggcattgggtttgtgatctcaaccttagccacattggttgctgggtttgttgaaatgaaaagaaagaaggcagctttggcccatgggctttttgaccacccacatgccataatcccaatctcagtgttctggcttgtccctcaatacagccttcatggaat

SEQ ID NO: 23806 - DNA, 433 bp, Glycine max
  Clone ID: LIB3106-013-Q1-K1-D7
caataatctattttatactatacccacattttgataattatttttctagttgataagccatggctactcgaggaaagcttgaggttgacgttcatctcaagtctaacgcagacaagtactggcaaacccttaggaactccactgaaatattccccaaggccttccccaatgattacaaaagcattgaggttcttgagggtgatggcaaatcacctggttctatccgccacataagttatggtgaaggttcaccacttgtgaagtcatcctttgagaagattgaggctgttgatgaagaaaagaaggtagtgtcgtacactatcattgatggagaactcctccagcactacaaaacattcaagggagacatttctgtgactccagttggcgatggatgcgaggtgaagtggagtgctgtgtacgaaaaggttag

SEQ ID NO: 23807 - DNA, 262 bp, Glycine max
  Clone ID: LIB3106-013-Q1-K1-D8
cccacgcgtccggagctttttgtgaggatttcaaagcatggcttcccttgcagcatccactgctgctgcttcccttggcatgtcagaaatgcttggaaaccccatcaacctcagtggtgccacaaggccagctccatctgcctctagccctgcctccttcaagactgtggctcttttctccaaaaagaaggctgcacctccaaaaaaagctgcagctgctgctcctgccaatgatgagcttgccaagtggtatggtcctgac

SEQ ID NO: 23808 - DNA, 351 bp, Glycine max
  Clone ID: LIB3106-013-Q1-K1-D9
gttctagatcgcgagggccgccctttttttttttttttttttttttttttttttgtttttgtttttttttttttttttttttttttttttttttttttttttttttttttttttttttttttttttttaaaaaaaaaaccttttttaatttttttaaccaaaaaattaaaaatttgatttttttttttttttttaaaaaaaaaaaaaaaaaaaaaaaaaaaaaaggggggcctttttaaaaaaaaaaaattttctttccggttttttgaaataaaaattttttttttaggggaaaaaaaaaaaaattaattggccgttttttaaaaaagtgggaaataaaaaaaacttggg

SEQ ID NO: 23809 - DNA, 409 bp, Glycine max
  Clone ID: LIB3106-013-Q1-K1-E1
cccacgcgtgcggttcttggcgggggagatatcactggacctcattagcatactaggtatgctgacgggttaacagacaccctaccatgagctacaatgggagcaggatcacttgctgcaaagtctgaattcgaggataagtacaaggaaagtgagagcatggatgaaggcattaagctagttggtgaggcgatatgtactgacatatgtaatgacctaagaagtggaagtaatgttaataccagtgtgaaaaccaaaggacataaggaatatcttatgaaccaccttctaccaaatgctcatacctatggcaatccaaaacgctatgatacccccaaaaagacaaaagacctttcaacaaagaatgcaccggtggaagagaatgtaggagagactgaaggagatgctc

SEQ ID NO: 23810 - DNA, 420 bp, Glycine max
  Clone ID: LIB3106-013-Q1-K1-E10
cggggcgaccgcacgcgtccgctttcagctcctaagagcacgcatcactgttgcacttcttactcgttctccctcgttttcgttcttcttcttcttcttcgctaaaccccccctttatttttcctatctcactaacatcgatgggagacgagaataagaccaagtcccctgcttccggcgtgtggtccaccatcaagcctttcgtcaatggcggagcctccggcatgctcgccacctgcgtcattcaacccatcgatatgatcaaggtgaggattcaacttgggcaaggatcagctgcgcaggtcacttccaccatgcttaagaatgagggtgttgctgccttctataagggtctatctgctggattactcaggcaggctacatacaccactgcccgtcttggatcatttaaaatcttga

SEQ ID NO: 23811 - DNA, 432 bp, Glycine max
  Clone ID: LIB3106-013-Q1-K1-E11
cccacgcgtccggcatatctcatttgaatacattccttgtagtttatactgaaagatgggggtgaagatggcgttactgatcctaggcctttccctcatgctccttttggtctcctctgacgtggcatccacgaatacaaaagaggaggcaaatggagtggatgatgccaaatatcccggtggaagctatggagggggttacccaggtcatggcggtggcggttatcctggccatggcggtggcggttatcctggccatggcggtggtggtggctatcctggtcatggtggtggccaccctggtcatggtggcggctaccctggccgtggtggtggatactgtaggcatggctgttgcggtggccggacatacaacggaggttgcagaacgtgctgctataacgctggcgaaagctgtgctgcacaaactca

SEQ ID NO: 23812 - DNA, 68 bp, Glycine max
  Clone ID: LIB3106-013-Q1-K1-E12
aaaaaaaaaaaaaaaaaaaaaaaaaaaaaaaaaaaaaaaaaaaaaaaaaaaaaaaggctagggggcga

SEQ ID NO: 23813 - DNA, 293 bp, Glycine max
  unsure at all n locations
  Clone ID: LIB3106-013-Q1-K1-E2
ccacatggtttctttnttttaaatatacattttaatgtatctaattagcatactatntaagctgacggtttaacttacaccggcccattatctacaatactatcangaacacttgcttcaatgtctgaattcaagtctaattacaatgaaaattaaagtatgaatcaatgcattaagctaatttttgatgctatatgtactgacatattaaatgacctaaaaagtgaaagtaatgttaatacctacgtaataaccaattaacataacgaatatcttataaaccaccttctacc

SEQ ID NO: 23814 - DNA, 386 bp, Glycine max
  unsure at all n locations
  Clone ID: LIB3106-013-Q1-K1-E3
ggaaattgttggcgttaagaagttgattgaaaagaaggcttggccatatgttcagaatgagctgcgtctcanggccgagtatctgcgctttgatctcaacactgtcattgctgcaaagcctaaggatgagaagaaatcactcaaggaactcactggcaagctcttccaggatatcagcaatctggatcatgcagcaaaaattaagagcagcccggaagcagagaagtactatgctgctactgtatcttctctgaacgatgtccttgccaaacttggttaatgtgattaatttcttgctttcttgtgtaagctttgtgcatgattttctcagacactttattgactgatattttaagaaaatcaaatgatgagggaaaattttctat

SEQ ID NO: 23815 - DNA, 424 bp, Glycine max
  unsure at all n locations
  Clone ID: LIB3106-013-Q1-K1-E4
cgactcggtatttctcttcctctaaagaccgagtccgactcggagggcgaagaaggcaagcgcaggggcctttccttccttcactacacgcgagagagacctcagtgtctgagacgcaggcaacgtgcattttcccatacgaaggacaccatcacgccgttttcgcgtccccgtcgtttcggatccatcgtcatcgtttttgtcttcttcttccattagtttagttgagaatcaatcccaagacaccgagctggagcctncgcccgccaccgncgctgccttcaacggtcagatccggtaccgatcgccgtcctccgccgagctcttcgacggcagcagcaactttttcgcctcgcacgccgncgaccagcactcgccggagttcgagtccagcaaaatgctgaagcgcccccgccgncaggag

SEQ ID NO: 23816 - DNA, 117 bp, Glycine max
  Clone ID: LIB3106-013-Q1-K1-E5
ggccgcccttttttttttttttttttttttttttttttttttttttttttttttttaaacggaacgggcatttttttatttaaaaataaaaggctttaattttacatctacatactc

SEQ ID NO: 23817 - DNA, 427 bp, Glycine max
  Clone ID: LIB3106-013-Q1-K1-E6
ccacttttccgcaatgccgtcctcaacctagtttaaaaatttaaactttatgtctttctcgaattttcataagtgcccagttatatctacttaacttcagttcatttttctttggcttactaattagaagtaagaatttttcttttgggaaactgattgaactatgtctcttgttatgatgcagggtcagtccattcctgggttcactttttttattttgtgatatcttttgttgaggaggtggattgagtttaaggatttagttaagggaaacactgtagaggaaataattttgcagggtaggtaacaagaagggataaaagttggattagttttgtttttatcaattgtgggtttgagatggatcataagagtgcaaaggatgaggatgctgaagttgatcttgaaagtgggttggttttgactg

SEQ ID NO: 23818 - DNA, 431 bp, Glycine max
  Clone ID: LIB3106-013-Q1-K1-E7
cccacgcgtccgagaagagagagagagagtttgttggaagaagaagaagggaagatgaacttgaaatggatggaagcggtgctgccgctgggaatcatagcgggaatgctctgcgtcatgggaaacgctcagtattacattcacaaatccgcgcatggcagacctaagcacatcgggaacgatatgtgggacgtggccatggaacgaagggacaagaagcttgtcgagcaagcctctccctccaattaacatcgttgttttgccaatgacattgtgaagaaaataaactgctcacctggatttacgactgtgttctagggaagcagggttaatcacaagaatcaaattccgtctgttttcttgtatgcaattcaacataagatttataaatatatctatgttccaatcgcaattactttcgctaagcttgg

SEQ ID NO: 23819 - DNA, 424 bp, Glycine max
  unsure at all n locations
  Clone ID: LIB3106-013-Q1-K1-E8
cccacgcgtccgcccactcgtcctttgacgtttgggtagtttatcgtgaggagagtatgaagttgtttgttttctgtgttgctgcantagttttggtagcatggccatgccatggcgcaggctaccaaaggttccctctccgaatgaaaactggctatggtgagcgttcttcggaggtaaaatgcgcaagttttaggcttgctgtggaagcacacaacatccgagcctttaaaaccattcctgaagagtgcgttgaaccaacaaaggactacattaatggcgaacaatttacatcagactctaaaacagttaaccaacaagctttcttttatgctagtgaacgcgaagtccatcacaacgacatatttatattcggcatagataacaccgtactctctaatatcccatactatgaaaaacatgg

SEQ ID NO: 23820 - DNA, 437 bp, Glycine max
  Clone ID: LIB3106-013-Q1-K1-E9
cccacgcgtccggttgagaactaagaaggagaagcaaatggcttcctcaatgatctcttccccagctgttaccactgtcaaccgtgccggtgccggcatggttgctccattcactggcctcaagtccatggctggcttccccaccagaaagaccaacaatgacattacctccattgctagcaacggtggaagagtgcaatgcatgcaggtgtggccaccagttggcaagaagaagtttgagactctttcctacctgccagaccttgatgatgcacaattggcaaaggaagtagaataccttcttaggaagggatggattccttgcttggaattcgagttggagcacggtttcgtgtaccgtgagcacaacaggtcaccaggatactacgatggacgctactggaccatgtggaagctgcctatgtttggttgcactg

SEQ ID NO: 23821 - DNA, 439 bp, Glycine max
  Clone ID: LIB3106-013-Q1-K1-D3
cactctttgtatttttcgctgactccggcgtcacttttcgttgagtctccgtccaccggcgtggcgatggactcggaatcttcaaactccgattctcaaccgcaccctctctcgaacccaatcgacgacgcgtgccacgacatgagctccctggaagagctcgcgaaccgcggcgcgtggcgttccatcattgacaaggtctcacgcgcccgcgccctctctctcctccacaagccccacgaccacctcacctaccttgccttcaacgccctctccttcaccaaactgcgtcgtttcaacgaagcctctgcggaactcgattccctcgaagacctcgacagctcccactaccgctacgaaacctaccccaaaatctaccccaatcggatcggatccatggtccccttctccctccggtggctccacgccctaatcccca

SEQ ID NO: 23822 - DNA, 431 bp, Glycine max
  Clone ID: LIB3106-013-Q1-K1-C10
cccacgcgtccgcccacgcgtccggataactagaaacagtgtgatgaaaatgaaggtccttgttttcttcgttgctacaattttggtagcatggcaatgccatgcgtacgatatgttccctctccgaatgaacactggctatggtgcccgtactccggaggtgaaatgcgcaagttggaggcttgctgtggaagcacacaacatctttggctttgagaccattcctgaagagtgcgttgaagcaacaaaggaatacatccatggcgaacaatatagatcagactccaaaacagttaaccaacaagcttacttttatgccagagacctcgaagtccatcccaaggacacatttgtgttcagtatagatggcaccgtactctctaatattccatactacaaaaaacatggatatggggtggagaaatttaact

SEQ ID NO: 23823 - DNA, 439 bp, Glycine max
  Clone ID: LIB3106-013-Q1-K1-C11
cccaaatcgaataagatagataggtgaaaatggcgcagtgtgtggccaacacattcgtgcggggaaaacccttttcttccagttgcagcagctcccactaaaaatgttcggagagcggttcagtgcggtgtgtggtgcaagaagaaggagatacacccgcaattctacgaggaatcgaaggtgtactgcaacggggagctggtgctgacgacaggtgggacccagaagggatacgtggtggacgtgtggtcggggaaccaccccttctacctcggaagccggtcggcgtctatggtcagcgacgaccaggtcgagaagttccgcaagaagttcggggagctcaaagagatcatggagattcctgttctcaagggagagattgttatcccctcaaggcgcaagggtgtttccaaaggaggcaagaaaaaataatctattt

SEQ ID NO: 23824 - DNA, 344 bp, Glycine max
  Clone ID: LIB3106-013-Q1-K1-C12
ctgttatttacatcaatggaaaaccatttgttcttcgtgaagttgaaagaccatacaaaaacatgctggagtacacgggaattggtcgtgaaagggtggagaaaatggaggctcgattgaaagaagatatcctacgagaagctgaacagtatggcaatgcaataatggttattcatgaaacagatgatgggcatatatacgatgcatgggagcacgtcacttctgaaatgattcaaaccccacttgaagtttttaaaagcctggaggctgatggatttccgattaagtatgcacgtgttcccatcaccgatggaaaagctcctaaaagctctgactttgacact

SEQ ID NO: 23825 - DNA, 411 bp, Glycine max
  Clone ID: LIB3106-013-Q1-K1-C2
cccacgcgtccgatttgagcttaaaccctagccgctcttctcttcattcttcactttggaaacaatgataatggcgttctgtaataaggttggaaatgtcttgaggcagggtgctgctcgcagcacacatgcccctgttgcgtccatgcttaattacatccgctgcatgtcttcaagcaagcttttcattggaggcctttcatatggagttgatgaccagtctcttaaggatgcattttctggctttggagatgtggttgatgcaaaagttataactgatagagacagtggaagatcaaggggatttggatttgtcaacttctccaatgatgagtctgcaagttcggcactctctgcaatggacgggaaggatctaaatgggcgaagcattcgggtatcctatgcaaatga

SEQ ID NO: 23826 - DNA, 431 bp, Glycine max
  unsure at all n locations
  Clone ID: LIB3106-013-Q1-K1-C3
acaccctcatcctccaccacctcctaagaagctatactactatcattctccaccacctncacgccaccctcacccttacccccatcctcacccccacccacaccctcatcctccttacgtttaccactctcctcctccaccccctaagaagccctacaagtacccttcacccccaccaccagttcaccctccctacattccacacccactttaccactctcctccaccaccaccttacaagaagccttacatctatgcatcacctncccctccttaccactattagcatacctctcatcgatatgaacaatatgtgcaacgaataaaataaagcgatggaaagcgcttctcgatgcacgaaagagaaaaaatggaaacaaagtttccgccttttttctttcataaaaaaaaatgttaaacttatttttttc

SEQ ID NO: 23827 - DNA, 442 bp, Glycine max
  Clone ID: LIB3106-013-Q1-K1-C4
gcgcccacgcgtccgatcgagacacacatcatagtgatcattttttaatttctcagatttatccgacgtggctgcatatccaccaaccgttatggttgccttcagcggtgatgaaacggcaccgtttttcggcttccttggcgccgcagctgccctcgtcttctcctgtatgggagctgcctatggcacagcgaagagtggcgtgggcgtggcttccatgggtgtaatgagacctgagctggtgatgaagtcgattgttcctgttgtcatggctggagttttgggcatttatggccttattattgctgttattatcagtaccggtattaatccaaaggccaaatcctattacctctttgatgggtatgcacatctcttttctggtcttgcctgtggcttggctggcctttctggctgcatggctattggtatttggtggtga

SEQ ID NO: 23828 - DNA, 427 bp, Glycine max
  unsure at all n locations
  Clone ID: LIB3106-013-Q1-K1-C5
cccacgcgtccgtgttgatcgagataactataatacagtgtgatgaaaatgaaggtccttggtttctgcgttgctacaatttgggtagcatggcaatgccatgcgtacgatatgttccctctccgaatgaacactggctatggtgcccgtactccggaggtgaaatgcgcaagttggaggcttgctgtggaagcacacaacatctttggctttgagaccattcctgaagagtgcgttgaagcaacaaaggaatacatccatggcgaacaatatagatcagactccaaaacagttaaccaacaagcttacttttatgccagagacctcgaagtccatcccaaggacacatttgtgttcagtatagatggcaccgtactctctaatattccatactacaaaaaacatggatatggngtggagaaattta

SEQ ID NO: 23829 - DNA, 439 bp, Glycine max
  unsure at all n locations
  Clone ID: LIB3106-013-Q1-K1-C6
gcgcccacgcgtccggcagaaacagaattacctgctctgccgttcaagaatcatctcctagcacgagcagggactactgctgaaacaaaggagggaggtaaaggaagccccaaaagccgcagcaccagcaaagaaacctcctgctaaagctccagctaagcctctgcctcagatgatggaggaggatgtgatcccttcactgaaagcaatatttgaagcccaagaagatttctcaaatattgagctggtcttcaaggacaataagttggaaggttcgtttttgaagaaaggtaacccctattcattttgggccttctttcccacaggaaaccttattggtccaaaggggttttctctgtcatcgtataactcgagagcaagcaccgttgagccatttctcgttgatgaaaagaagatcactgcangacacattatcttt

SEQ ID NO: 23830 - DNA, 434 bp, Glycine max
  Clone ID: LIB3106-013-Q1-K1-C7
cccacgcgtccgctgccataggattgggaaacccgatgaacagctctttcagcttctctccaatcttctccaccaggtggaatcactgacgaatcaagaagaagttgagctgcgttctaaaattgaaactcttggattagaggttacaaaagttccttcaaagtcaacgcagcaccttaacgaggtgtttttcacttgatgcagagttctcttatccctgttgaaatgtgctagaacatatgaaaagattttttcatcttatattatcctgtgaattagtttttcgatttcctcgttatctcttgggattagttattatattttctcaacatttttatttcctcattgaggattagctatcatattttcttttcttatcatgattttttttcttaattaattaggatcattattagtatagataagggttagtg

SEQ ID NO: 23831 - DNA, 435 bp, Glycine max
  Clone ID: LIB3106-013-Q1-K1-C8
cccacgcgtccgcccacgcgtccgctttgtcggctttttactctgaaaaagtaacgacgaggtccactgcagagcaccgttgtcaccgcaacaatcatcgacaaaacgccgtcgtttgaagcagctacggagatccactgcgatattcgattgaattccgcgctctcttacaactagaagaatcaggttcaattttccatcgcaatttcggtatcttctcttcctccaatttaaactcgcgttgcaatattcagggtaattcctcaatcgtttctcctgtagcttcagtttccgttttcctagaacttatcattgttaaattgttgctctgttattttattcgcatgactgctgcaaaggtttctgctcagtgtctcggtgctcgggttttgcagtagtcgtcagaattgggcaactgcaaagagggtagtatcg

SEQ ID NO: 23832 - DNA, 362 bp, Glycine max
  unsure at all n locations
  Clone ID: LIB3106-013-Q1-K1-D1
accgacgcgtgcgcccacgcgtccgctcanggttaggatcgtttcatctactatgtttgttctcctacggttagcgcgcgtgtttcccatagcagcgtccaatttcttagttttgtgaattagcgtctttctcttttccgtgtttaattcatcaatgttatttgtcatgtattcaattgaatccgtgcacaataagccgatgctctggataacataatgaaggcagcatggttgtgtgctcggaaattgaaatattacgtcaatatgtctgctctctttgatgaacttaatgataagagggcctggttgcgacctacattttttccttgtttcctttcaaattttctttaatccctgttttt

SEQ ID NO: 23833 - DNA, 407 bp, Glycine max
  unsure at all n locations
  Clone ID: LIB3106-013-Q1-K1-D10
cccactcnttctttgactcttggtttgacttttgggccgacccgtgaatcaggggcccgcgctttctcccaagcagcccgaatcttttgaccatngcttatcatcttctcctttgctcacattccttacattcgtagatgaaaaggaagagatagttaatagccgctccaagagaaaaaaaatggagggcatatcttacagaagcacaagttacgttgcatcatccatcaccttcaacaaatcatattctcaggcatcattaaacagaattgattcacttaatgaaatctaactgttgcatatttatttgctcataattttgtagcctcttgtactaactacttgtgcatcacaccttattcttcatttcctattgtaactgcttgctttctactacattccctatt

SEQ ID NO: 23834 - DNA, 428 bp, Glycine max
  unsure at all n locations
  Clone ID: LIB3106-013-Q1-K1-D11
tgaaatgtctaggtttcttttgaagaacgatggtctcttccttgggagttcttctgcaatgaactgtgttggagcagtaagagtagcgcaagcaattggccctggtcacacaattgtaaccattctctgcgacagtggaatgagacatttgagcaaattctatgatgctgaatacttgtctctgcttggtttgacaccgaaagcaactggtttggagctcttaggcatcaaatgagaaggtttcttcagatttttgaaattttaatgccactgtctagctgctatatacttgagtgcttagtgcctgccttggatgagagtggccacctagaagttagtttagttatattgatatatagaagatattacacttattaatacactgttttggggggtattacagggctcattctttgntagtcttcatg

SEQ ID NO: 23835 - DNA, 324 bp, Glycine max
  Clone ID: LIB3106-013-Q1-K1-D12
cccacgcgtccggctcattttcattccaattaacaacatcatcgtcggatctggttagatgaagggaactactatcgccaaagtaattcaagttgtcaagcaaaaggaggcagacagatttccctcatcaatagatcattctatgccaccaatcttagttcttttttcatttttgtttttttcttgtctcaggaatctttacttcctttagatgtaaaattttatttatcctctgttgcaccttgacacattgttttgatttaagataagaaggaaaaaacaatgttgaaacttgaaactgtagttttattttgatcctatgtt

SEQ ID NO: 23836 - DNA, 434 bp, Glycine max
  Clone ID: LIB3106-013-Q1-K1-D2
cccacgcgtccgcccacgcgtccggagataactagattcagtgtgatgaaaatgaaggtcgttgttgtcttcgttgctacaattttggtagcatggcaatgccatgcgtacgatatgttccctctccgaatgaacactggctatggtgcccgtactccggaggtgaaatgcgcaagttggaggcttgctgtggaagcacacaacatctttggctttgagaccattcctgaagagtgcgttgaagcaacaaaggaatacatccatggcgaacaatatagatcagactccaaaacagttaaccaacaagcttacttttatgccagagacctcgaagtccatcccaaggacacatttgtgttcagtatagatggcaccgtactctctaatattccatactacaaaaaacatggatatggcgtggagaaatttaactc

SEQ ID NO: 23837 - DNA, 435 bp, Glycine max
  Clone ID: LIB3106-013-Q1-K1-C1
cccacgcgtccgtgctgtaatagcagtttggagcacattcctgcaacagtattacgtgcatgttcttgagaggaagtattctattgggtcatttaacttgttgggccatactgcaccagcacaggcagcaagtttacttctagtaggcccctttatggactactggttgactggcaaacgagttgatgcctacggctatggtttgacatccacgttgttcatcattctgtcttgcactatcgcagtagggacaaacctcagccagttcatctgcattggtaggttcacggctgtaacgttccaagtccttggtcacatgaagactatcctggtcctgatcttaggattcattttctttggaaaagagggtctcaatctacatgttgttctaggcatgatcatcgcaatagcaggaatggtttggtatggcagtgc

SEQ ID NO: 23838 - DNA, 414 bp, Glycine max
  Clone ID: LIB3106-013-Q1-K1-A6
ctcggatcgcgcattcacaaataaggttgaagagggccctgccggaagaagataaataccgtctttcattttccggcgatctcttttttcttccatcaccgttttccggctatccctaatccttaacagaaatgacgacatcaaggcgccttgcggacaggaaggtggagaagtttgagaaaaacatcaccaaaagaggatttgtgccagacacaaccactaaaaaggggaaagactaccctgttggcccagtgctgctcggtttcttcgtctttgttgtcattggatcatctctcttccagataatcaggacagcaacgagtggaggcatggcttaaatggagctttattttggattgtgtcatcatctcttagcctcctcgtagaaaatgctaatacttctctacatgtact

SEQ ID NO: 23839 - DNA, 325 bp, Glycine max
  Clone ID: LIB3106-013-Q1-K1-A7
cagttctctcacacactcattcggcgctccgaatctcagattctaaggttaggggtcccaggttctccaccgatcagaaaatgagtttaactggtggttctaccaagggcggaaggggcaagcccaaagtctccaaattcgcttcaagatcgcagaaagctggtcttcaatttcccgttggaagaatcgctcgattgcttaaggctgggaaatacgcctagcgtgttggtgctggtgctcctgtgtacctctatgcagtgctcgaatatatcgctgctgaggttttggaattggctgggaatgcttcttaggataacaagaaaaa

SEQ ID NO: 23840 - DNA, 405 bp, Glycine max
  Clone ID: LIB3106-013-Q1-K1-A8
gaaaggtcggaacataaggcggggaagagttagtttcttctctcttcgatggaaggcggggaagaggttctcccttcggccaccgccacctccgccgccaccggcaatcccaccgcttcgcctcctccgctcgctgatcttgtcggtgctcccgatctcgctgctgcctcggacgacgtcgttacgcaacctgaaattcacgcgctgatttcagacgaagagcacgatcacgagcatgaacatgacgatgacctcgagcacgagcacgagcagcatgagcatgaccaccaccacgaggaccgcgatgatcacgccgctgtggccgctgtctccttggaagatctcaaactcaagatcattaagcaggcggagtattatttcagcgatgaaaacctgcctactgat

SEQ ID NO: 23841 - DNA, 414 bp, Glycine max
  Clone ID: LIB3106-013-Q1-K1-A9
aagagaagcattagcaaaagcaagaagaactagtctaagcagaaatggcctcttcagtgatggcatctgtggccctcaaacctgcccctttcactgttgagaagtcctcagttagaggccttccctccctctcaaggaactcctcttcattcagagttgtggccagtggtggcaagaagatcaagactgacaagccttatggaattaatggtggcatggctttgagggaaggagttgatgcatctggcaggaaaggaaagggaaagggcgtttaccagtttgtagacaaatacggtgctaatgtcgatggttacagtcctatctacgacaccaaggactggtctccaaccggtgatgtctacgctggcggtacgactggcttggctatctgggctgtgactctactttgtcttc

SEQ ID NO: 23842 - DNA, 458 bp, Glycine max
  Clone ID: LIB3106-013-Q1-K1-B1
ggtcgacgacgcgtgcgcttcttcaattccatccaaacaattaaaaataaaaataaaaataaaataagcagacatgtccacacgtccctcctcaacctttccaaactccaacctctccctctctacctccttatcctcacaaaaactcccacttttccacacccttttccccaaacccctcccttttcctcatctgcgaattcaaaccccaccaccattccttcccccgcttctctgcaagtcccccgagggcacggaggcggatgaggccgcgccgccgccggaggaagacgagtggctgcagaagctcccggagaagtcgaagccgctctattcccacagcctcccctgcattgaagcctggctccggagcctcggcttctgccagagcaaggaggacagagccctcttggtcgttcacaaacccgattggcacgcgcagctctcccttgatgtca

SEQ ID NO: 23843 - DNA, 431 bp, Glycine max
  unsure at all n locations
  Clone ID: LIB3106-013-Q1-K1-B10
atctcgcctacgccctatacaaccaaaccctaacacacacccatttgattcagtttccatggctagcctcaaggttgcatttttggctgcagtgctctgcatggttgtggtgagtgcacccatggcacatgcagctatcacgtgcgggcaggtgacgagtagcctggccaattgcatcggttacctccagaagggaggaacgccgtcgtcgggatgctgcaacggagtgaagagcctcaatgccgccgccaagaccaccgccgaccgccagacggcgtgcaactgcctcaagtcggccgccagccaaatctccggcttcaacgccaacaacgccgcctcgctccccggcaaatgcggagtctccatcccctacaagatcagcacctncaccaactgcgctaccatcaaagtttgaagagaaagtcatggac

SEQ ID NO: 23844 - DNA, 413 bp, Glycine max
  Clone ID: LIB3106-013-Q1-K1-B11
actgtgtctaagtcttcctttcaggctttgtgaattgaattccgatgtcacagccaaggcggaataagatgatgagtccaaaccttgcaaaacaagttggtgacgcaacctataccaagatttttgttggaggactggcttgggggactaagagagacactctaaaacgctattttgatcagtttggggagatcttagaggccgttgtcatcactgacaaaatcactggaagatcaaaaggatatggctttgtgaccttcagggacccaaattctgcaataagagcttgtcataatccctatcctgtgatcgatgggaggagagctaactgtaatcttgcagctcttggtgcccagaaatttgatccatctataacaggaaggcaaaaactcagtagcccgtcatggaatatg

SEQ ID NO: 23845 - DNA, 424 bp, Glycine max
  Clone ID: LIB3106-013-Q1-K1-B12
attgaatttgaagggagtataggaaaaccaaccaaagttccaaattttttggtttggggagagatagagtgatacgcgtcacattttcataataataaaaaaatggcagcggcggcggcagtgacggtgctactcccacctaggattccgaccaccaccaacgttacccgctgctctgctttgccttctctccctcctcgcgtctccaacaccaaaaccactttgttctcaccttccctcaacaacttttcagtgtcccgaaaatcttctctgcttcagaccagagcttcttcagaggaatcatcctcagtagatgccaatgacgtgttcacagatttgaaagaaaagtgggatgctcttgaaaacaagtccacagtacttctttatggtggaggggctatagttgctatttggctatcgtcaa

SEQ ID NO: 23846 - DNA, 392 bp, Glycine max
  Clone ID: LIB3106-013-Q1-K1-B2
gcgcttttactatattttgtttttctctctcacaatttttctgcttgcttctacttcgtgtttgtctgacgcttgctgaaccagtcttgcatagtcagagaaaacaaacgtaagcaagaagaaggagaacttcgccaccgttgtggctgccatggaattcacagctgccaccgctactctcacgaagaagctctccaacggctgtggctacagcgtcaccggaagatctgcgtacgacggtgtcttcgccactcctatcaagctccgcgctccgagcttctcctctcacttcgacgattaccgcgagattttctgcacgtcgtcgcccggttcctcgattccgatccttgaacttccggagctcaaccagaggagaaagaacgacgatgttt

SEQ ID NO: 23847 - DNA, 436 bp, Glycine max
  unsure at all n locations
  Clone ID: LIB3106-013-Q1-K1-B3
gcgatgatagactgatttgggccgaaccgcgagcaatgatttgttggtgtgagagagagggagggcgaagtaaanattccattttggggtgaagcgaancgaagccatgagacgaaagcattcgaactccggcaattatcggaatccatgtttaactatgcaccagccttgggcttctctcctcgtttacgggatcaagcgcgtcgagggcaggtcatggcccgctccaatcacaggtcgtctttggattcattctgccagtaaagtcccggaggagtctacaatcaaagcaatggaatacttctacaaggagatttatgcactcaatggcatcagtgatatccaatttcctcaacactaccctgtctttaggcttttgggctgtgttgaagtggttggctgcttaacacgtgatgaactagcatgctgggagatg

SEQ ID NO: 23848 - DNA, 348 bp, Glycine max
  Clone ID: LIB3106-013-Q1-K1-B4
gcgcccacgcgtccgctcaaaagcaagggataaacaatagtacgaggcaccgcattgttgagacgtgagagttgagttatggcactggttgaagcctatgcttctctttcaatctcttctgttgctcgtcttttcactccaccaaaatgctctcccaccgctcactttcctcatcggaattttgttgcaactcgaccatcattcatcgttggttccccactcttgattcaaagaaatcatggaaggaaagctgcatgcaaagcaatccctgttccaataagatgtgagcaaagtacccaacaagggaatggtctggatgtgtggctaggcagactagccatggttggc

SEQ ID NO: 23849 - DNA, 411 bp, Glycine max
  Clone ID: LIB3106-013-Q1-K1-B5
cccacgcgtccggcaccacaacactgtgccctctttctctctttccttcgcagaagccatggcctcagttgcacgtggagccgcatctttaacccgcattggtctttccacttccaagacctccccttcaactcatccaccgccgtggcctcgccgatcaccatggccctcccaaagttgcctgctggaaagatccaatgagcccatctaaatggaaggaggagcactttgtgattgtctctttaactggttggggactactcatctatgggggatacaagttggccacaggaggcaagggcaagaaagaagaggaattggcaaaagcataacactgacgtttggagaatattaaaaatacaaaacgttcttcgtaataatgctgctagcgcccagactttttccaagttt

SEQ ID NO: 23850 - DNA, 352 bp, Glycine max
  Clone ID: LIB3106-013-Q1-K1-B6
gattcatcaaaaaaaaaaaaaaaaaaaaaattaaaaattaaaaaaaaaaaaaaaaaaaaaagggaaaagagaaaataaaaaaaaaaaaaaaaaaaaaaaaaaaaaaaaaaaaaaaaaaaaaaaaaaaaaaaaaaaaaaaaaaaaaaaaaaaaaaaaaaaaaaagggccgccctttttaaaaattcaaattttttttccccttcattccaactttttatttttttttttgtgccccttaatttaatttcattgccccccttttaaaaactcttaacttgaaaaacccttgcctttcccaattttattccctttgaaaaaattccctttttccccagttgtctttttaacaaaa

SEQ ID NO: 23851 - DNA, 417 bp, Glycine max
  Clone ID: LIB3106-013-Q1-K1-B7
cccacgcgtccgcttgggtgcgattccttcactcacaacaacaacacatcactatggctctgctgagtcgagcctcttcacgcttccctcagctggtttcccctcaaagggtagtttcactccacacaacgctcccatctctgaacgcatccccatccacagccacgcctacaccatatgccccgccaccgcctccgtccgcttcctctcccgccggcgtttcgaaggcggcggagttcgtgatctcgaaggtggacgatctgatgaactgggcccgccgcggctccatctggcccatgaccttcggcctcgcctgctgcgccgtcgaaatgatgcacaccggcgccgcccgctacgatctcgaccgcttcggcatcattttcaggcccagccctcgccagtctgattgcatgatcg

SEQ ID NO: 23852 - DNA, 434 bp, Glycine max
  Clone ID: LIB3106-013-Q1-K1-B8
cccacgcgtccgcccacgcgtccggtgagtctacgtgtttgagagaaaggttgagctatagcctaaagggagagacacataaatagtttctactttctattcatagatagatggctggcccaattatgagacctcagattgtgctatttggctcctccataattcaaatgagcttcgacaatggtggttggggtgctattctagctaacttgtacgctaggaaggcggacatcatcttaagaggatactctggttggaattcaaggcgggctttggaggttttggatgaaattttccccaaggatgcttatgtgcaaccatcattggtaattgtgtattttggtggcaatgattctattgatcctcacccatctggccttggtcctcatgtaccccttgaagaatatgttgaaaacatgaggaaaattgctaat

SEQ ID NO: 23853 - DNA, 237 bp, Glycine max
  Clone ID: LIB3106-013-Q1-K1-B9
tccacgcgtccgcccacgcgtccgaaaaaattaaaaaaaaaaaaaaaaaaaaaaaaaaatgggaaaaaaaaaaaatataaaaaaataaaaaaatatataaaaataattaaaaaaaaaataaaaattatataaagaaaaaataaaatttaattttatggtcgtatattttaaattgttaagacttgtaaaaaccgtggcgtttcctaactttatttaatttgtaataattttaaaatt

SEQ ID NO: 23854 - DNA, 432 bp, Glycine max
  Clone ID: LIB3106-013-Q1-K1-A5
gcggcctccctttttttttttttttttgctaattccatcgaagccgctccattaatggaaaggtagattacagcagaagcaacatccggtgagttaacagcatcttcatacacctcttacaactaccgaacaaactcgcctaaggcgtaaatgtcaagagaaaaaaaaatgaatgattcaaaggcacttatagttacatccccccaaaagttctcaatagcagatcagaataatcaatgtacccactaagaaaaacatagtgcaacagaacattcaataatatatccattagttggaccagacatgaactagtccatgcctgttgcctgtatagatttcattgcgctcttcatcatagaagagagcagtaatgtcttgcaaggcttctgcaacagtgctcctcggctggcatccatgttttcgcttttttga

SEQ ID NO: 23855 - DNA, 412 bp, Glycine max
  Clone ID: LIB3106-011-Q1-K1-G3
acgcagctatacttgttccttttgaaggttagaagtgctacaatacaaacaatggcagctactgaggaagatgtgaagcttttgggtattgtgggaagcccatttgtgtgcagggtccagattgcccttaagttgaagggagttgaatacaaatttttggaagaaaatttgggcaacaagagtgatttgcttctcaaatacaaccctgttcacaagaaagttccagtgtttgttcaaaattagcagcccatagcagaatctcttgggaatggtgaaatccttgattagaccttggagaacaaccccatcttaacttctgaaccttaccaaagagccttggcttcgttctgggcccaattcattgattattagattgggggtgccttattgaaatctggttttaccggttatt

SEQ ID NO: 23856 - DNA, 294 bp, Glycine max
  Clone ID: LIB3106-011-Q1-K1-G4
acgcaacttgcctcgcctctttctattttttattgctttttcgtattttcggtattagaaaacgaattgaccagagagaggcgcttgccgtaacgctaattgtgaaagaagatgcaaccaacatccaacggctctgattcgcaagcgacggagcagcggacgccgccgtcccagtggatgccgatgcagtacccggcagctgctatggtaatgcatcaccacatgatgccggctcaacattacgcttcttcgacgtcgcatccctacatggcctaacaccactaccaacaacag

SEQ ID NO: 23857 - DNA, 404 bp, Glycine max
  Clone ID: LIB3106-011-Q1-K1-G5
cagaattattaggacagttgcttgggcagcttcttcagtcaggtgtgggagaagagcctagggaggcaacacatacgcgacactctccgaaccccggtgctggtgctcatcctcgccacagtcataatgagctgccaagagcctcgattaacaacacaggcacacataacattagacgtcttatcaacaacaccggttgtactcaagggtaatggtcatggatccatcgactatggtggctttgactcatacaacatgtctcggtactaattaatcactcgcgcaacgcactgatatataacattatcttctatataattaataccttgtaccatctctgaaactgatcatgcatatctctaatatcaaactactgcaaaataatggtgtttctatacctactg

SEQ ID NO: 23858 - DNA, 135 bp, Glycine max
  Clone ID: LIB3106-011-Q1-K1-G6
acgaaaaaaaaaaaaaaaaataaaaaaaaactaataaaaaactacaaacacacaaaaaaggaacgggcactcataaaagaaagtgagagtaaacaacaaaaaacatatataacataaactggccggaccttttaa

SEQ ID NO: 23859 - DNA, 359 bp, Glycine max
  Clone ID: LIB3106-011-Q1-K1-G7
acggagagggaggagggagagtgttgacgctccatcaagatgggtatttctagggattccattgacaagatgcgtgccactggtggcaagaagaaggcatggagaaagaagagaaagtatgagcttgggcgtcaggccgcaaacaccaagttatcaagcaacaaaactatccggaggattcgtgttcgaggtggcaatgttaaatggagggcattgaagttggataccggcaattactcatggggtagtgaagcagttactcgcaagactcgtattctagatgttgtttacaatgcctcaaacaatgagcttgtgcgaactcaaaccctggtcaaaaatgctattgttcaagttgatgc

SEQ ID NO: 23860 - DNA, 254 bp, Glycine max
  Clone ID: LIB3106-011-Q1-K1-G9
acccactcgtccgaactgaacagcgctccttatttcactcgaatctactcttttcctttattctataatacacgtgacaggcatcatatcatgaataaactctatacaaattactcaatcacataactcatacacttatcttctctcttacattctcatattctacacatgactaactgtatatcattaatcatctctatctaagctagattatcacataactcataacataattgctcatactcgatatatat

SEQ ID NO: 23861 - DNA, 177 bp, Glycine max
  Clone ID: LIB3106-011-Q1-K1-H1
acgcccacgcgtccgctcagtttcatttaaattgattgacgatattatgaattgtatgtgtatgttcagttggttctgttaaggtgtatttgattttagttttttacttttgcttgtaaaaaaaataaaataatatattatatatataattcaaaatttttaataaaaaaaatttat

SEQ ID NO: 23862 - DNA, 207 bp, Glycine max
  Clone ID: LIB3106-011-Q1-K1-H12
acacgtacaagtacttgtgcactaacaaggataagcaattggcttcctcaatgatctattcgccacctgttaccactgtcaagcgagccggtgcctgcatggttgctccattcactggcctcaagtacatggctggcttcactaccaggtacaccaacactgacattacctccatcgctagcaacagttgaagagtgcactgcatgc

SEQ ID NO: 23863 - DNA, 427 bp, Glycine max
  unsure at all n locations
  Clone ID: LIB3106-011-Q1-K1-H3
gcacgtactcggtctcgtgaattcccgtggtcgactccacgtcgtacctgcccaacgccgtctcgtatcgtagatatatnttagaaaccagtnngtgatgaannatatgaaggggtccttgggttttcgtggtcgttggctacatannttttggtagggcatggcnatatgtccatgcccgtacganntatgttcccttcttccgaaatgagacatcttggcttatnnngtgcccgttactctcggaggggtgaaattgcgcacaagttggaaggcttttgcttgtggaaagcaccactaactatcttntgggcttttgagaaccattctctgaaaaaggtgcgttgaaagcaacaaaaggaatacattncatggcgaaacaatatagatcaagacttcaaaacaggttaaccacacaaagcttact

SEQ ID NO: 23864 - DNA, 226 bp, Glycine max
  Clone ID: LIB3106-011-Q1-K1-H5
acgcatagctcgtaagataacagtgagtaagttagttattcataacccactatttagcggacgggatgctattagcagtgataggcatattcatgttgcctagaacttttctaaaggaagcaaaattgctcttaaatggcctatttacaatcttattcgtaaccgtgacatactttacatcgtacacatcaagcctttctgacgaagtgaattcccaaatcttctc

SEQ ID NO: 23865 - DNA, 343 bp, Glycine max
  Clone ID: LIB3106-011-Q1-K1-H6
acgcccacgcgtccgctagtctttatgatgcttaccagcatatagagctggtttcccgtgccgcgtcaaatgctgaaacagagacttttgatgtggttggccctgtctgtgagtctgcagatttcttaggaaaaggaagagaacttcctactccagccaagggtactggtttggttgttcatgatgctggtgcttattgcatgagcatggcatcaacctacaatctatagattcggccttctgagtattgggttgaagatgatggatcaatgagcaaaataagacatggatagacttttgaagaccacattcggttttttgaggggcttttaagctaataatt

SEQ ID NO: 23866 - DNA, 163 bp, Glycine max
  Clone ID: LIB3106-011-Q1-K1-H7
tacacgctttctatcgatataactagaaacagtgttttgaaaatgaatgtccttgttttcggctaggctacaattatagtagcatggctatgccatacgtaccatatgttccctttcctaatgaacactgtctatagttcctctacttcatatgttaaattct

SEQ ID NO: 23867 - DNA, 407 bp, Glycine max
  Clone ID: LIB3106-013-Q1-K1-A1
aatcaataaaaactgagaatattgattcacgaaaaaacaaatcaatattcgaaaaaaaaagagattatgaattttaagatatgagaaaggctccattgtcgaattcagacctaaccattaatcgagaagtgatgggaacgacgaaacctgcaaatacttaagattttattaaaaacaaatcttaatgattcattacgtgggatggcggaagaaaccaaaaagcaatcctttttttaggagttgtgccctacattacatctgaatttgattgataataaaagagtaaatattcgcccgcgataattttgattttattgaattttttttttatttttgccaattctatttattctttctaataataaaaaatattctaataactaataataaaaaggaaaataaagatt

SEQ ID NO: 23868 - DNA, 435 bp, Glycine max
  Clone ID: LIB3106-013-Q1-K1-A10
cggcgcactccgtctgttcctcaccgtcaccggcgcgcgcaccctctgttccagcgactcctaattaagttgggaaataaaaaagacttcaaatttcccagatggctgcagcctttgcttccagatgctctcgtgtgggccgttctctgtctggtggattaagcaacagttcccctggtttatttacctcatcacatggcatgacatgcaacaatttgttttctcagcaacaacgtaccttcatacagatgaggactgttctcaaggttgtcgataactcacgtgctaaaaaggtgatgtgcatacaggcattgaaagggaagaaaggggcaagattaggtgacacaataatagcatctgtgaaggaagcacatcctaatggaaaagtgaagaaagggaacgttgtatatggcgtaagtgtgcgtgcagcaatgc

SEQ ID NO: 23869 - DNA, 235 bp, Glycine max
  unsure at all n locations
  Clone ID: LIB3106-013-Q1-K1-A11
cagagcgtgaaagcaccggccaccggccatgacattcaagcgcaagaatggaggtcgcaacaaacacggccgtggccacgtcaaattcatccgatgctccaactgtggcaaatgctgccccaaggacaaggccatcaagaggtttcttgtgaggaacattgttgaacaagctgcaagtagagatgtgcaagaagcctgtgtctatgaacagtacacgcttncgaaactctatgtg

SEQ ID NO: 23870 - DNA, 437 bp, Glycine max
  Clone ID: LIB3106-013-Q1-K1-A12
cccacgcgtccggggcaacacaacctatcctctggttcctgggcacgagattgctggtgtggtaacagaagttggaagcaaggtgcaaaagttcaaagttggagaccgggtaggtgtggggtgcatgattggatcctgtcgttcatgtgaaagctgtgatgaaaatcttgagaattactgccccaaaatgattctcacatacggtgtcaagtattttgatggcaccataacacatggaggctactctgacttgatggttgcggatgaacactttgtggttagaattccggataacctaccacttgatgctgctgctcctctcctctgtgctgggatcactgtgtatagccctttgagatactatggacttgacaagcctggtctgaatcttggtgtggttggtcttggtggacttggtcacatggctgtcaagtttg

SEQ ID NO: 23871 - DNA, 363 bp, Glycine max
  Clone ID: LIB3106-013-Q1-K1-A2
tcgccaccgatacgtcgccgtatcagctctgggctgtcaggaacaactgtccaaacaacttgggcccggcccagctcaccgatgttgccatccctcgggctgggcctgctttctctattctggaatccaccgtccgcgtctaggttatgttggttgctctacttgagtgtcggtagtgttgttgggaaacatatgttttttgggacataatacttttggtgaggtttgtacttgcgtcctccttaagcttgttctgtctcgctagaacagaattgcttactgggctcatgagtctagactctagaagttacaatttatatatttatcctttattattgaataaaggaggatgcggtttggact

SEQ ID NO: 23872 - DNA, 456 bp, Glycine max
  Clone ID: LIB3106-013-Q1-K1-A3
gacccacgcgtccaaaaggttcaaaaagtggaactgctggtaggtgttttggatgcaaaggcactggtatgaaaattacaagggggcatattggactaggcatgattcaacaaatgcaacatgtctgtcctgactgcagaggatctggtgaggtcattaacgagagagataaatgtcctctgtgcaaaggaaacaaggtttcccaggaaaagaaggtgctggaagtgcatgttgagaagggcatgcagcaaggtcagaagattgtttttgaaggacaagctgatgaagctcctgacacaatcacaggagacattgtttttgtattgcaagtaaaggatcacccaaagttcagaagggagcaggatgacctctatattgatcacaatctcagcttaaccgaggcactctgtggcttccagtttgctgtcaaacatcttgatggtaggcaactattga

SEQ ID NO: 23873 - DNA, 172 bp, Glycine max
  Clone ID: LIB3106-013-Q1-K1-A4
ccacgcgggcgcagtctctaatatttttctcactgtcttgtctctccttatatactgcatagagagagatggcagctccgacatctggtgctgtgtggaatggcttggcatcttccttcttgagtggaggaaacaagagccaaacccttctggccactgttattggaggcaa

SEQ ID NO: 23874 - DNA, 324 bp, Glycine max
  Clone ID: LIB3106-011-Q1-K1-G2
tctatccacacacaacacacacctctgcctctactccgcacaactcctcacacacaaaacgcaagggacgctcatgttgttgatgagtggaggcaacaaaaaacatatatccatcactcacaagaccaattgacctttgttcttggtacaattcgattcaaatttttcgcactaaggagagccactcaaggctctgggatgtactatacgccgttcggggttctgattttcggcggcgagaaagttcaagagacacagtgggagaaggagcgataagagagaccatggctgggaaggttttgaaagaaacgaaatcgctgtcgg

SEQ ID NO: 23875 - DNA, 408 bp, Glycine max
  Clone ID: LIB3106-011-Q1-K1-D3
cccacgcgtccgcccacgcgtccgcgaaccccctcctctccgggattctgacatgcggaagacggtgatggacttgttcttcgggcaagcaatggaaggggaggtgcaaaagaagatgagggagacaggagagtggctctccaccaatgctgagcctagaattacttcttccagaaaaggaattttaatgtttatgtttcaatggattctaccaatttgggctatattactcctagtagcctttggagccatcaagttaccattcaacagcccttttcttgatgatctgctcatgtgagcataggtccatacatgcagatggtccaaaagccaaaatttaacatgtccgacttcaatgagttagcatcccctctagtgattggaaaacactagtagaaaagagaaaaa

SEQ ID NO: 23876 - DNA, 364 bp, Glycine max
  Clone ID: LIB3106-011-Q1-K1-D4
atccattcctcttccatggtccattagaatgaaaattgcactaggagctgctaagggtctggcttttcttcatgaagaagctgaacgaccagtaatatatagggattttaaaacttcaaacatattactggatgcagagtacaatgccaagctctcagattttggtcttgccaaagatggtccagaaggtgataaaacccatgtgtctactcgagtgatgggaacctatggttatgcagcaccagaatatgtcatgacgggtcatcttacatcaaaaagtgatgtgtacagtttcggagtggtactacttgagatgtttaccggcaaaagatccatggacaaacaacgacccaacggtgagcat

SEQ ID NO: 23877 - DNA, 436 bp, Glycine max
  Clone ID: LIB3106-011-Q1-K1-D6
gcccaaattttccaggaaattatccccagccatggaattcaggaatgggtggtgtgccttttgaacaagcacagggtggtatggttgtggatccaagggagggcaaaggtatattggcaccacagcccatgcccctcccaccgccacctccacctccatcccacatgtcatatgggaaacagaactactattctggggagcttgggcatgatggtcagagttatggggggtggcagcatgatacccgtgatagctttggtagccaaagctagtaaggcttccaatctttactttcttggattaggtttggttactgttcaggatgtttctgcaaccatatttgtctcatgcatcattcaaattgctaaacagcgattagactatttacttttgggcccaaattgaatttggatattttaatcgaattttgaggttt

SEQ ID NO: 23878 - DNA, 355 bp, Glycine max
  Clone ID: LIB3106-011-Q1-K1-D7
cccacgcgtccgcttccttcttctctcagaacccttttccacatctcatctcaacgttctgttcctaattcctttcacaactccatcactcttgcatcatctttcaatccactgactcattcaaagcagcacctgaaccacagaggctgcaactccaagctcttggctatttcttacaggtatttcattgaagaagaagaagaagatgatgaaaacaacaactttgatgaagcagtggctctcttcaatggaggagagtactacaaatgccatgactatcttgaagccctttggctcaatgctgaagagcccaccagaactctcattcatggaatactgcaatgtgccgtgggtt

SEQ ID NO: 23879 - DNA, 208 bp, Glycine max
  Clone ID: LIB3106-011-Q1-K1-D8
tccacgcgtccgcaaacttcttgtattatatccactgatcaactttcacaggctcgaagggtgtataacaaataggtggcatacaatactctaccatgaatcataaatccaattactaacctagagcatgcaccaatccatataacatgtctcttatatctgataactactttttaatcgaatcataattaaaatcaaaatttctatt

SEQ ID NO: 23880 - DNA, 134 bp, Glycine max
  Clone ID: LIB3106-011-Q1-K1-D9
gcgaatttgaatccaatttggaatgaggaacttatgttgtttgttccttaacaatttgtactagtgaatggcgtaatgttcaatgtcaaagagaaaaaaaaaaaaacaataaaaaatgactaccactctaaatt

SEQ ID NO: 23881 - DNA, 359 bp, Glycine max
  Clone ID: LIB3106-011-Q1-K1-E8
acggtacaccccatagggaaaaaatttcttcacatttacaatgaagctatccactctattccggttcctattccacctggctcatgctgctctgtctgacgaagctactttcattagagatggcctcaaatcctattcccagcttgatctccctcactcggtttttggttctgaaagtgtagccttcgattgccatggtaaaggaccatattgttgcgtgtctgatggtagaatcctcaagtggcacgagacattatgagagtggattgactttgcatttacctttccacacatgaactagatattatgtgatgggttaacatatgacaagatggtatcaaatgtgttgtaataccctt

SEQ ID NO: 23882 - DNA, 408 bp, Glycine max
  Clone ID: LIB3106-011-Q1-K1-F1
ctcaaaacaaaacacagcaatgtcccaacccagattcatttccatgatctccctctgtctggcccttgttctgttctacacctgcaatggcctaccatttgtggacctcaatttccatgaagtagatgtgatgaccaaaagggtttgcaccaagagcattggggagtgcctgagcttgacagagccggagatggattcggagaccaacagaagagttctggcaatgcagaaaaagtacattagctatgacacactcaagagagacatggttccctgtgatagggctggagcttcttactacaattgtcatgcaatacgagcaaatccttataatagaggttgtgaggtaattactgcttgtgcaagaggtcaagacatcaaaacttgatgcatcagcgtcacaatgga

SEQ ID NO: 23883 - DNA, 408 bp, Glycine max
  Clone ID: LIB3106-011-Q1-K1-F2
gtacaccccatagggaaaaaatttcttcacatttacaatgaagctatccactctattccgattcctattccacctggctcatgctgctctgtctgacgaagctactttcattagagatggcctcaaatcctattcccagcttgatctccctcactcggtttttggttctgaaagtgtagccttcgattgccatggtaaaggaccatatgttggcgtgtctgatggtagaatcctcaagtggcacgagacaaagagagagtggattgactttgcagttacctcgccacacaagaacaagaaattatgtgatgggttaacatatgacaagatggaatcaatgtgtggaagacccttgggcctcaaattcaacacgttaacttgtgaactgtacattgccgatgcatactt

SEQ ID NO: 23884 - DNA, 440 bp, Glycine max
  Clone ID: LIB3106-011-Q1-K1-F3
cccacgcgtccgcccacgcgtccgcccacgcgtccgcccacgcgtccggttgagaacgccgctatgtgacccataagggggtctgcgtgtaaagtcccaagcatttgtcatcactcaaagagtggacaagtccggtcaaaattgctgcaccttggcctgcaccttccttgctccgtcccttctttctctaattcttcaccctcttaattaaaaccttctccctcgttccccttgtgaccacaacacacaacaacacatcacatatatagttatttcttttgcaacaaaccctcatatattataagctgagccaggattagaaatggatcattcattccaacatgggtttttcctcaaaagaagagaagtccaaaagaatattgaagggcctgaagactcttttcttcttgaacactaatggtatatcgcgtcctcttttc

SEQ ID NO: 23885 - DNA, 357 bp, Glycine max
  Clone ID: LIB3106-011-Q1-K1-F4
gtcttttcttgcttcccggagctctgaacttgaccgacgccattttcacatcaaaacgcggcaacgaaaaaaatggcgttcttgtggaacaaaactagtatcgcttcccattttcgatctcactctcagaagactgagggtttggcttcttttccgcgccgtcgattccacgtcgaacccggggctcgagaaaaagctctcttggcagaagatgcaacgctgaaaccggtcaaatcatataagaagagtgtcaaacagctcagaaaaattgggaatgctctgacagttgttgttgttgcaggatgctgttacgaagtatatgtcagagcttttacaagagaggaagctcagaaactg

SEQ ID NO: 23886 - DNA, 376 bp, Glycine max
  unsure at all n locations
  Clone ID: LIB3106-011-Q1-K1-F5
acgcccacgcgtccggctggatcgcaacaactgcggtttcatcccttccgatgaattcggtcntgattcccgaattcgccgtcaatcctctctctcagagtttgttgaggatgctggatgggttgaacttcaaggaatttgtggccttcttgtccgccttcagtccccgtgccactctccaccacaaaattgaattcattttcaaggtctatgacaccgattgcaatggaaaagttaccttccatgacatgttgagggctttaagggatttgagtggacccttcatgtctgagcaacagagagaggacgttctgacacaggttcttgaagaagctggctatgcaaaggattcttcattagtcttgtctgactttca

SEQ ID NO: 23887 - DNA, 451 bp, Glycine max
  Clone ID: LIB3106-011-Q1-K1-F6
cccacgcgtccgaacaaatcaaagccatggccacctccaacttctctattgttctgtccgtctccctagccttctttgtggtgctacttaccaaggcacactcgaccgataccgtttctttcaccttcaacaagttcaacccagtccaaccaaacattatgctccaaaaagatgctagtatttcatcctctggggtgttacaactcaccaaagttggcagcaacggcgtgcccacctcgggatctctcggtcgtgccctttacgctgccccaatccagatttgggacagcgaaaccggcaaggtagccagctgggctacatcctttaaattcaacattttcgcacccaacaaatcaaactcagctgacgggcttgccttcttcttggcacccgtcgggtctcagccccaatccgactgatggattcttggtcttttcaacagtcccttaaa

SEQ ID NO: 23888 - DNA, 230 bp, Glycine max
  Clone ID: LIB3106-011-Q1-K1-F8
acgcctatccacacacaacacacacctttgcctctacttcgcacaacttctcacacacaaaacagaacagacgcttatgttgttgatgagtgcaagcaacaaaaaacatatatccatcactcacaagaccaattgacctttgttcttggtacaattcgattcaaatttttcgcactaaagatagccactcaaagctctgggatgtactatacgccagtcagggttctgat

SEQ ID NO: 23889 - DNA, 203 bp, Glycine max
  Clone ID: LIB3106-011-Q1-K1-F9
cccactcgtcgcatcacacatccagctaaatcaacaatcacttttctaattttaaacaccctcttcaatgatggcatctagagccttcaaacaggcccctgtcactcttaataaatcctcatctatagtccttccctccctctcaaggaactcctcttcattcatagttgtggccactactcacattaatatcaatactcaca

SEQ ID NO: 23890 - DNA, 420 bp, Glycine max
  Clone ID: LIB3106-011-Q1-K1-G10
gcggctgcttccgatctgaggccatggcggggtctgggagttccatgctatattcctttcttgtcttcagagtcattctctcacttcaagaaatgtaccgagggaaactagcatcatcagaattatacactatacttggagggttcgttagctctctcctatttcttgtgctcctaactttcattggaaattttcaggaaacaattggtgcaagaactggttggggagctgtcattgttgcataagctgttgctctgattgctgcaagcactgtccaccgagtttgcatcactacatgtttcctgttctcggctgcattgctgtatgatgttaacaagatctctgggtcagcgctttcaacaagtgactacaagactaacaagcaaagtcgaagagcttaaacctatgtatgcttactat

SEQ ID NO: 23891 - DNA, 414 bp, Glycine max
  Clone ID: LIB3106-011-Q1-K1-G11
gttgatcgagataactagaaacagtgtgatgaaaatgaaggtccttgttttcttcgttgctacaattgtggtagcatggcaatgccatgcgtacgatatgttccctctccgaatgaacactggctatggtgcccgtactccggaggtgaaatgcgcaagttggaggcttgctgtggaagcacacaacatctttggctttgagaccattcctgaagagtgcgttgaagcaacaaaggaatacatccatggcgaacaatatagatcagactccaaaacagttaaccaacaagcttactttatgccagaaaacctcgaagtcaatccaagggcccatttggggtcaatataaaatggaccgtactctctaatattccatactaccaaaaacattgatattgggtggagaaatttaac

SEQ ID NO: 23892 - DNA, 417 bp, Glycine max
  Clone ID: LIB3106-011-Q1-K1-G12
cccacgcgtccgcttccaccctcctctcaggtttttgtggataagagtgagctataatggctgccaggagaccgggtttaattgctttgtttgatgttgacgggactcttacagctcccaggaaggtggtcacaccggaaatgttgacattcatgcaagaactacgaaaggttgtaacggttggagttgttgggggttctgaccttataaagatatcagagcaacttggcagcacagttaccaatgagtatgattacgtattttctgagaatggtcttgtggctcacaaggaaagaaagctcattggaactcagagcttgaagtcattccttggtgaagaaaagctcaaggagtttattaactttacacttcattatattgctgatttggacattcccattaagaagggaacattta

SEQ ID NO: 23893 - DNA, 302 bp, Glycine max
  Clone ID: LIB3106-011-Q1-K1-D2
cccacgcgtccgcaaccatggcggtccctgctacatcctcagcccctgtccttcgacccagccgcgccaatcactccttctctgcccctttccgctctctaccctctgccgccgccagaaaacccctaaccgtcttcgccatggcccccaaaaagaaggtgaacaagtacaatgattagtggaagaaggagcggtttggagcggggatattctacgagggaagcgaggaggtggaggtggacttgttcaagaagatagagaagaggaacgttttgagcaacgtggagaaagctggcttgctc

SEQ ID NO: 23894 - DNA, 406 bp, Glycine max
  Clone ID: LIB3106-011-Q1-K1-B8
acgggatgaagcggaagaaacgaagagcgcggcttgaatattcgtcggaggattgtcagaagcgtggagcgccaaggaccgtcgaagcttattcgcctctctgggctccgtccaatccgtccaaaccatccgaaccaaatgccgcagcttcgcctaccttgacttcctcttcgaccccaaatccctctccaagctcttcagcaagtataatgggtgtctgtggaagggtggaaggctgaggctggataaggccaaataagactatcttgtgcgtttgaagagagaatgggaacaaggcactctagatgatgctactcaaaaaccacccactgctgcttctgatgaagaaatgcccaacaccgtacaatcttccaagtcaaattccaaacaccttaatattttcttt

SEQ ID NO: 23895 - DNA, 315 bp, Glycine max
  Clone ID: LIB3106-011-Q1-K1-B9
ggtttcaaacctaggaagttggtgcagaggcaactgaagtttgtgatgaaggagaggattatgattagagttttgcactattatgttactgtctgtgttgtttttcttctcgtgctctgtgtatcgttgtactttccgtggaacttgccttgttccggtacttttggagctttatgtgaagtgtggtgaaaacatttatttgaaattgcttggtgaaatttagagttttaaatgtattaaaaaaaaaaacatttaaattactaccaaacataaattaatcacaactaacatatttactttaatacctccttattt

SEQ ID NO: 23896 - DNA, 411 bp, Glycine max
  Clone ID: LIB3106-011-Q1-K1-C1
gctgctgcaacatatgggaatcctaatgtccctaatgctgcttatgctggtggtccaccaggtggcccaaggagtacatggcctgctcaggctccttctggttatggatctatgggctatgggaacactgctgcttggggtgctccaagtggtggtgctggctctggtggcggtggtcctggttcagcaactgcaggtcaatctcctggtggagctgctggatatgggaatcaaggttatggatatggtgggtatggtggatatggtggaagtgatagttcttatgggaattctggtgcatatggtactgttggcggacgtactggaagtgctccaaacaataatgctagtgcttctggtggtagtgaactaacaagtagtggtggcagtggcaactatatgggtgggggc

SEQ ID NO: 23897 - DNA, 170 bp, Glycine max
  Clone ID: LIB3106-011-Q1-K1-C10
cttcttgatccttctttttctccttgaactcaaacatgtcagatgaggtggttctgctagatttctggccaagtccatttgggatgagggtcaggattgcacttgctgaaaagggtatcaaatatgagtacaaagaagaggacttgaggaacaagagtcctcttctcctc

SEQ ID NO: 23898 - DNA, 291 bp, Glycine max
  Clone ID: LIB3106-011-Q1-K1-C11
cccacgcgtccggttctagatcgcgagctatctactcattttatctagtttttttttacgggctgtggtaagttacttgaaactttgacctggtattttgattttaatggtgagacgtgtgctactgctacatcataattcccatcaaatttaattatcgatgggttagaatttcattaatttatgattttggtcgtgctagattcccggaagtttcttttgaagaatttttgggtgtgtactagaaatattttaatttggcttcatggttttattgataaggatttgaat

SEQ ID NO: 23899 - DNA, 317 bp, Glycine max
  Clone ID: LIB3106-011-Q1-K1-C12
ggacaaaaaagcaagcttctattgtgaaagaggaggaaaaggaaaagaaggaagaagaggagaaaaaggaagagaaagaaaaagagaaaaaagaaggtgaagaaagcaagggagaagatgctgaagagggtgatactaaaactgacatcaagcgaagtgaatactggccattaaggtcctacgttgactacgttgactacccttatgctcctcagattttcagtgatgagaacccaaatgcatgcactgtaatgtagatcagtctattgtactaactcggtattttttagtagctgatcaactgaagcaacttgtgc

SEQ ID NO: 23900 - DNA, 340 bp, Glycine max
  Clone ID: LIB3106-011-Q1-K1-C2
tctatcaccagacgacacacgttcgaccgcccatggaagctgttgcgtcactggttcaagaggctaaaggtgtacaaagcggtgggggaatagctcaacttgcaggcttagctcaaagcctctttaaaaaactattcctacgccactacgtacgcccttaattgtgtccttattcttgatctacttgtcccgtttggctaatattcaccagatcatacatttaaatcttcatatcataaattaagcaactgccaacttgcaaagtcttgaatttcttacttctaattctagtattgttaatgctgttgctatatgatgaatggctgaataaatctgattt

SEQ ID NO: 23901 - DNA, 406 bp, Glycine max
  Clone ID: LIB3106-011-Q1-K1-C3
cccacgcgtccgcccacgcgtccgttttctttttttcatttgcattgcaaagcaaaaacctggcagattgcaatggcttccaacaaggttattgccaccatcttggttctttctctccttgcctactcaacatcattcaccaatgcatgtggcacatgccacccaaaacctactccttctccccctcctccatcagggaagtgccccaaggacacattgaagctaggggtgtgtgctgatgttctaggacttgttaatgttgatgttggttcccctgtctctagcaagtgttgtgcattgcttgaaggtttggctgattccgaagctgcactttgccttagcactgctattaaagccaatgttcttggaatcaacctggatgtgcctatcacactcagtgtgctac

SEQ ID NO: 23902 - DNA, 365 bp, Glycine max
  Clone ID: LIB3106-011-Q1-K1-C4
acgcccacgcgtacgaaacactatagcaatagaaacatttgcttttgaaaaacccctcactgtgcatgagtacactagctagccacatacaatgtcgaccaaatttaaggtgtgtcgtgaattcacaagcgatgactcattcctaaaccaagttatccctgaaaacatcaccgaattccaagtgactctgtccctcgctagagactacgatggcaacaactcaaccaacggtaagttcattccttactgggacactgaaaaggtcactcccgaagtgataaaaaaattcaagaaaaaatacgaacccaccgtactgagggttaaggttcttggcagcattggaaacaaaaaccaacaatttcctt

SEQ ID NO: 23903 - DNA, 444 bp, Glycine max
  Clone ID: LIB3106-011-Q1-K1-C5
cccacgcgtccgcccacgcgtccgcccacgcgtccggtgactcgttcttcttcgtggttatcttcttcttttgttgttcgcgtgtttgttttttctctcacctgaaaatgtcttgctgcagcggtaactgtggttgctgaagcgcctgcatgctcggcaacggctgcggaggctgcaagatgtacccagacttgatctacaccgagtcaaccaccaccgagaccttggtcatcttagtgtcaccagctaaggcttaattctcgagtgctgaaatgggtattcccgctgagaacgcttgcttcacatgtggagctaactgctcctgctaccactgctcttgcatgtgaggtgttagagagcttaatcttcaagcacagatggcccatatgaaccattgttacatctatatcttagccaaaacttcaaaattatgtaatatgcatt

SEQ ID NO: 23904 - DNA, 321 bp, Glycine max
  Clone ID: LIB3106-011-Q1-K1-C6
cccacgcgtccgcactgctccttcacagcctgcagagtctaaaggtgaagaaagtggtggtgggttaggtggtcttgcaaacttggctggaggcttcttcaaaaagtagttacaaagcaactaaataagaccttaattgagtccttattctcggtctagtagtggggtttgggtaatatgcaccagatcatagatttaaatcttgttattgtaaaaaaagaaaatggaaaaaaaaaaagtcttgaatttctcacttctagttctagtattgttgttgttgttgttatatgatgtatggttgaataaatgtgatttggtgtt

SEQ ID NO: 23905 - DNA, 440 bp, Glycine max
  Clone ID: LIB3106-011-Q1-K1-C7
catggtgcaaaactggtgggttaggagatgttcttggaggtctaccaccagcattggcaggtttcgggcatcgagtaatgactattgtgccacgctatgaccagtacaaagatgcatgggatacaggtgttgtaattgaggtgaaagtaggagatagaacagaaaaggttcgcttcttccattgctataagaggggagttgatcgtgtctttgtggatcacccttggtttcttgaaaaggtctggggcaaaactggacaaaaactttatggaccaactacaggagatgattacgaagacaaccaactgcgttttagcctcttttgccaggtgaagatgtcattttcgtcgccaatgattggcacactgcccttatcccctgctacttgaaaagtatgtaccagccaaagggcatctatatgaatgcccgggttggttttt

SEQ ID NO: 23906 - DNA, 362 bp, Glycine max
  Clone ID: LIB3106-011-Q1-K1-C8
agcattttcatttttcaacttgagagaagaagagaaggggaaaaggaaaaaaaggcaaagggggtaaggatctgagcgatgagcaagtgtcttcaatgaaggaagctttctctttattcgacacagacggtgacggtcggatcgcgccgtcggagctggggatcctgatgaggtctctgggagggaacccgactcaggcccaactcaaagccatcgtggccgaagagaacctcacggctcccttcgacttcccccgattcctcgatcttatggccaaacacatgaaacccgaacccttcgatcgccaactccgcgacgccttcaaagtcctcgacaaggactccaccggcttcgtcgccgtc

SEQ ID NO: 23907 - DNA, 451 bp, Glycine max
  Clone ID: LIB3106-011-Q1-K1-C9
ggaagcaccaaatttgaaccaaggagcacaaagcaagcacaagcagaagctcacactcaagaagaaagagaactcagtaaggagaaatgcaagcgtaaacaataaagactgaacgctgcaacccctactgcaagcctacccatctttttcagactgaacactgcaaccccacatgctagaacgtgttcgcgccaatggcgggactgcccagatgcctagtcagcatgtcccgccacgccagtttgaatggcggtatggaccctgtcccgctgctgtcaatggcggcatccatggttttgcaccctccgctgtttcacagcttttatggattttgtggtagtggattcagacaacggaaatgaagcagaacatagctgtctagaagagagtacaagtatatttgaaagagttgaagttcaagaaccatatgtgggcatggaaattgattctg

SEQ ID NO: 23908 - DNA, 404 bp, Glycine max
  unsure at all n locations
  Clone ID: LIB3106-011-Q1-K1-D1
cccacgcgtccgtatcaatggctccccaaaccatttccattctcaacctcttaccagaacggtgatgtcttcattcacacttcccatggaacacgcattccagcccacgcacccattctggcttctatgtccccggttctggagaacttgatagatcgcccacgtaagcatcggagctccgagagaataatccaaatccacggcgtcccctgcgacgctgtcaccgccttcgtccgattcctctactcctccaggtgtacggaggaagagattgaccagtacgggatgcacctncttgcattgtcccacgtgtacatggtgcagcaactgaaacagaggtgcatcaagggtttgacccaccgtttgacgactgagagcgtcgtcgacgtgctgcaactcgcgcg

SEQ ID NO: 23909 - DNA, 85 bp, Glycine max
  Clone ID: LIB3106-011-Q1-K1-D10
aaaaaaaaaaaaaaaaaaaaaaaaaaaaaatataaaaattaaaaaaaaaaaaaaaaaaaaatagaaaaagtaaaaatttctacct

SEQ ID NO: 23910 - DNA, 445 bp, Glycine max
  Clone ID: LIB3106-011-Q1-K1-D12
gcgatttgatctgcgactgagagaagagaagagaattgtgatggggggaggacagggtcacgggacaaccgacaaaggtgttaccattcatcagccaaagcgctggcacactatcaccggcaagggtttgtgcgcggtcatgtggttttgggtattctacagggcaaagcaagatggtcctgttgtattgggctggagacatccttgggagggtcaccatgatgatcatggcaagggccattagcattccttaggcatgagctccaagaacaggaagaacagaatttgaagtgtctgttgctgtggatgtgttgttcaaatgtttactttgatcaattcaataatttggctgtaaaaatagaaaattctttttgcattatttcatgaacattaaatatgtctgtgcaacttaactggttacttggattaaagtcattctattttt

SEQ ID NO: 23911 - DNA, 470 bp, Glycine max
  Clone ID: LIB3106-011-Q1-K1-B6
gaattcccacctcgaccgactcgaacgtttatgcaactattaactctgcactatactttctcgaagcatgagctatctactttacaggcttattacaacaacgagaacatccatctttacatactagctactaccgttactgtatcatcagatcttatcattagtaaattttccttgctcaatctctttctgatttacatcttgcgcattaaatatatcttcattagatcctctactcaacttcatgtcgatggaaatatcttttgttcatactatactatttgccagcgccttatactttttccaaagttatatttctaataatactctatgccctgtttacctttatcatctacatcttcttctgacaacactcacaattttttactgaagaaatttatgcagacagtctttatactattgtaacttgtcttaatctacatattcctaattctattttatgattgttt

SEQ ID NO: 23912 - DNA, 135 bp, Glycine max
  Clone ID: LIB3106-011-Q1-K1-A12
caaatctgttcctatctaacgaagcgctattggatcaaatgacaaagacattgttgagaagaagatggcttttcccagatgagatggttgttgctatctgctccaataacgaatcattggtttaactgaataact

SEQ ID NO: 23913 - DNA, 297 bp, Glycine max
  Clone ID: LIB3106-011-Q1-K1-A2
aaaatagcccctgaatatcacaacaaagccaaattttatttcgtggatgtgaataaagtacctcaggctctattcaagcgtggcaacatatctaaaatgccaacaattcagctgtggaaagattgaaagatgaaagcagaagtcattggaggccataaagcctggctagttattgaagaagtcacaaaaatgatccaaaagtatttatgatccaaaaagtattttttttcttcaactttttcatattggctaccgtatttagctgtgtatcatatatattgaactgtgtacaatatc

SEQ ID NO: 23914 - DNA, 343 bp, Glycine max
  Clone ID: LIB3106-011-Q1-K1-A3
ggagattttggatgggcaaattagggatgcttatgatagtagggcacactttgagatggttaatgggatggtgaagactgcagtgtggtgtctgcaagataggcctgagttgaggcccactatggggaaggtggccaagatgttggaagggactgtggagatcactgagcccaaaaagcccactgttttcttccttggtgaagagtagattcatgataaagtttctgtgtgatgttcagcctttcttgtttaagtttctctcgttatatctcttgtaccggcatggtagcatgtatgctcaatagttggaacgatggcaaataaattgggtgatcaagtgtat

SEQ ID NO: 23915 - DNA, 409 bp, Glycine max
  Clone ID: LIB3106-011-Q1-K1-A4
cgagataactagaaacagtgtgatgaaaatgaaggtccttgttttcttcgttgctacaatgttggtagcatggcaatgccatgcgtacgatatgttccctctccgaatgaacactggctatggtgcccgtactccggaggtgaaatgcgcaagttggaagcttgctgtggaagcacacaacatctttggctttgagaccattcctgaagagtgcgttgaaacaacaaaagaatacatccatggcgaacaatatagatcagactccaaaacagttaaccaacaagcttacttttatgccagagacctcgaagtccatcccaaggacacatttgtgttcagtatagatggcaccgtactctctaatattccatactacaaaaaacatggatattgggtggagaaatttaac

SEQ ID NO: 23916 - DNA, 431 bp, Glycine max
  Clone ID: LIB3106-011-Q1-K1-A5
ggtataccatgtttgactattagtttaacttgttagaaggagtataatgggtgaacaattggggctgctaaaagtcattgttgtgcaagggaaaaggttggtgatccgggatttcaagaccagtgatccttatgttgtgctcaagctagggaatcagactgcaaagaccaaggtaattaatagctgcttgaatcctgtttggaatgaggagctgaatttcactctgacagaacccttgggagttctgaatttggaagtgtttgataaagatcttctgaaggctgatgacaagatggggaatgctttcctgaaccttcaaccaatagtctctgcagccagattaagagacatcttaagagtgtcctctggtgagacgacattaaagaaggtcatacctgatggtgaaaacttgcttgtccgtgaaagcagta

SEQ ID NO: 23917 - DNA, 356 bp, Glycine max
  Clone ID: LIB3106-011-Q1-K1-A6
aattcccacctcgaccgacgcgaactaatttaccacattacactataaatttaacttgttacaaactgtataatgactatacaattgcgacttctaaaagtcaggtggctacaatgcaaatggttgatgatcctctatttcaagaccacgcatccttatgttgtgctcaagctacagaatcatacttcaacaaccacactaattaataccttcttaaatcctatcttaaatgacgaactgaatttcactcttacacaacccttgccagttcttaattttcaactcttaaatatatatcttctcaatgcttattacaacatggccacttcatttcttaaccttcaaccattaatctc

SEQ ID NO: 23918 - DNA, 432 bp, Glycine max
  Clone ID: LIB3106-011-Q1-K1-A7
cccacgcgtccgatcagcctctaatatttttctcactgtctctccagagaacttgatagagagatggcagctgcaacatctggtgctgtgttaaatgggttgggatcttccttcttgagtggaggaaacaggagccaaacccttctggcctctgctattggaggcaaagttggtgctgctgttactgttaatcccagaagactcattgtggtagctgctgctgcaccaaagaagtcatggctccctggtgttagaggtggtggcaatctcgtcgacccagaatggcttgatggatcgctaccaggtgactatggttttgatccactaggccttgggaaggacccagcattcctcaaatggtacagagaagctgagctcattcatgggaggtgggcaatggctgcagttctaggaatctttgttgggcaagca

SEQ ID NO: 23919 - DNA, 434 bp, Glycine max
  unsure at all n locations
  Clone ID: LIB3106-011-Q1-K1-A8
ctcacgcgtccgaaatgaaaatggataaattgataagggagtctgctcaaatttctggcgtgacctgaagccaggagctgtagtcacaataactggacctgttgggaaagaaatgcttatgcccaaatatcctaatgccaccatcatcatgtcgggaaccggaaccggtattgccgcatttcggtcatttatatggaaaatgttctttgagatacacgaagattacaagttcaatggtttggcatggctctttttgagtgaccctacaagcagcttattgctatataaagaggaatttgataagattcactataaatatcctgacaactntaagcttgacttcgctgtaaggccagagcactcatactataacggatagaagatgtacatacaaacccgaatggcataatatgcataagagctgagggaattac

SEQ ID NO: 23920 - DNA, 466 bp, Glycine max
  unsure at all n locations
  Clone ID: LIB3106-011-Q1-K1-A9
ggggaggattgtggggactggaccgatggggaggattgtggctaaagatgttgaggcatttgcggcggcaggtaatgttgcagcggcagcaccggcaccggggaagagtgcagcacctgccgggatggagttgggatccgtggtgcctttcaccacaatgcagagtgctgtgagtaggaacatgctggagagtttggcggttcccactttcagagttggttacaccatcaccacggatgcactcgatgccttgtacaagaagatcaagtcaaagggagtcacaatgacagcattgcttgctaaggctactgcacttgcgctggttaaacaccctgttatgaactctagttgtagagatggtaatagctttacatataatagcagcatcaatattgcagttgctgtggctatagatggcggattgattacaccagtgcttcanggtgctgataagattgatgtctat

SEQ ID NO: 23921 - DNA, 457 bp, Glycine max
  unsure at all n locations
  Clone ID: LIB3106-011-Q1-K1-B1
atcgagataactagaaacagtgtgatgaaaatgaaggtccttgttttcttcgttgctacagttttggtagcatggcaatgccatgcgtacgatatgttccctctccgaatgaacactggctatggtgcccgtactccggaggtgaaatgcgcaagttggaggcttgctgtggaagcacacaacatctttggctttgagaccattcctgaagagtgcgttgaagcaacaaaggaatacatccatggcgaacaatatagatcagactccaaaacagttaaccaacaagcttacttttatgccagagacctcgaagtccatcccaaggacacatttgtgttcagtatagatggcaccgtactctctaatattccatactacaaaaaacatggatatggngtggagaaatttaactcgaccttgtatgatgaatgggttaaacaggggcaatgcaccgcac

SEQ ID NO: 23922 - DNA, 203 bp, Glycine max
  Clone ID: LIB3106-011-Q1-K1-B10
gcgcacaaagataccgagaaatgattggtttttgtaacttgtgtgcagtaacaaaataattgagtgatttgtcacaaataggaagttggatgatttcatgtcttgctttttctagctacatatggctttggaaaagaaaaaaaaaaaaaaataaaacatgaagttctaaaaaaattttattcacaaattcaaattcattatat

SEQ ID NO: 23923 - DNA, 426 bp, Glycine max
  Clone ID: LIB3106-011-Q1-K1-B11
cccacgcgtccggagaaggtatgaagaggagggatctgaaggtagcagattccataagttgttcaatgagtgtgaagctatgttgggtaacttctttgtttcagattatattcctttcatgggttggattgataaactcaggggactggatgcacgtcttgaacgcaatttcaaggagatggataagttctaccaagaagccattgatgaacacatgaattctaagaaaaaaactccagaggaagaggatttagttgatgtcttacttcaactgaaagagaacaacacgtttcccatagatctcaccaatgataacatcaaagcagtgctcttgaacttacttgtaggagctacaggtacaactgaagtcacaacaatctgggccatgactgaactaataaaaaatccaagcattatgaagaaagt

SEQ ID NO: 23924 - DNA, 298 bp, Glycine max
  Clone ID: LIB3106-011-Q1-K1-B12
cccacgcgtccggccgagcagcgagagagagaaaccctagcaaaaatgccggctggtcacggtttgagatcccgcaccagagattccttctctcgtcccttcaggaagaagggtaccatcgccctcaccacatacctcagaacctaccacgtcggcgattatgtcgacgtcaaggttaacggcgccgtccacaagggaatgcctcacaagttctaccatggccgcaccggtcgcgtctggaatgtcaccaaacgtgctgttggggtcgaagtcaacaagcatgtcggcaacagaatca

SEQ ID NO: 23925 - DNA, 370 bp, Glycine max
  Clone ID: LIB3106-011-Q1-K1-B2
gcaaaggtttaccaagaaccccagaggcattacccttcttcagaggatgggaattggccttgtaaggcacacactgatcatgatcattgcatctgggactgaaagctatagactcaaggttgcaagagaacatggggtagttgaaagtggagggcaagtccctttgagcatattcattttgcttcctcagtttatactcatgggaacttgttatgcattcttaaaagttgcaaaaattgagtttttctaatatcaatccccggaacacaataaaagcattggaacttcatattccacaactaccttaagccttggtaacttcatcaattcctttcttctcttaacagtgtcaaatgtcaccaagaaaaat

SEQ ID NO: 23926 - DNA, 431 bp, Glycine max
  unsure at all n locations
  Clone ID: LIB3106-011-Q1-K1-B3
ggttgtgcaagacgaggtgcagtgcacattcgaggcccaacttgtgcactagggcgtgtggcacgtgctgtgtgaggtgcaagtgtgtcccacctggtacatctggaaatagggaactatgtggaacctgctacactgatatgaccacccatggcaacaagaccaagtgcccttagagaaacaaaaagcttcattagattggccaatttgtgcttcgttcattatgcatcaaagtttaagtgtactcctatgtggggtgcaattctgtttactatagcgatggatttgtgtgcactactatggctatattaattgactgttagtgtttttatttaaggtgtgcctgtatgattgatgtgatgagctaatcattgtaactttgtgccttntgtttgcgtaatataaaatgtagtacattacttgaccctttt

SEQ ID NO: 23927 - DNA, 444 bp, Glycine max
  Clone ID: LIB3106-011-Q1-K1-B4
cccacgcgtccgagcgtatccgcgagtctcgatttccttctctgcaagcggattggtcgcttgtgaaggaggaacatgtattcaagagggagcggcggttacggccaatcgtacactggtcaatccgcatatggccagaacctgggtggcaattattctgggagttctgttggagggcatgatgtgggtcagcattctgtggcttctaggcattcaacaattttaggtggttctcaagacgttgatgttggtgggtataggccttcggctgcgacccagtatgggggacagtatagttctggttatggctctgctgcattgagcaatgcacagcaagtcccttcattgagtaccaagggttctgcatcatcagctttagatggtcctggaggctatgctttgggtggctctgattcacctaaagttgcatcttgagattatgtc

SEQ ID NO: 23928 - DNA, 333 bp, Glycine max
  Clone ID: LIB3106-011-Q1-K1-B5
cccacgcgtccgcccacgcgtccgaagaaattcaactttatccgatactaccgctgtcagtctcatccttcgaaacccaaacttgagcttcttcttgtttcttgctcgtggaagcaaatgacaaccgcgccctctctaactggtcccttgtcaaacgcggtcggattcagtgactggaaaaaacatgcccctttgtcagcttctctctgtaaactaagctccagttcaaatatagttgacatgaagatatctggatgtggttgtcgaaaagttggacatgcccaaggatgtttccgatattatgcccaatttgaaggaaaaagggccattatt

SEQ ID NO: 23929 - DNA, 277 bp, Glycine max
  Clone ID: LIB3106-011-Q1-K1-A10
attcacatcataaagtgtttgaaattcaaaattctcaacacttctcttcaaccattctcttgtcagatgaatacaacaatgggatttcgtttacctggcatcagaaaggcatcaaaagcggcggacgcaccaaaaggctatcttgcagtctatgtcggagagaaattgaagcggtttgtgattcccgtatcatacttgaaccaaccttcattccaggacttgttgagtcaagctgaggaagagtttggatatgatcatcccatgggtggcctcacaa

SEQ ID NO: 23930 - DNA, 322 bp, Glycine max
  Clone ID: LIB3106-010-Q1-K1-G4
cggacgcgtgggttgaaatcgaaaagagaaaaaaagttcaaaagaagaagaaggagaagaagcgctataccagcagcagcattttcttttccatttccaacatcaacagcgagagaaaggatcatcgatcatcatgtcgttttcgtttttcaaggctttgaggcctaaaacgccgcaagaggtggccaagtccatcaaggagagtctcatggccctcgataccaaaaccgttgttgaagttaaagcccttgagaaggctttagaggaagttgaaaagaattttgtaacaatgagaaccatgctttctggagacggagagtca

SEQ ID NO: 23931 - DNA, 242 bp, Glycine max
  Clone ID: LIB3106-010-Q1-K1-G5
ctgactcatggcggacatcggactgaaaactggacctgctgaatctcgttttccgacaacggatcacaccagacgttgatccactcgctgcatagagattcacagatgcttgaacgcacagggtggacaactctctgaacgtgaaagattctgtaaatattacccctaactttgaccgattgaatggcttgatcggtggaatgaacagagagagagttggacttagacaagacctcgatgca

SEQ ID NO: 23932 - DNA, 267 bp, Glycine max
  unsure at all n locations
  Clone ID: LIB3106-010-Q1-K1-G6
ccacgcacgcgggaaccggaagcagaacgagcacaaaagngcaacagacgaagcaacaagcgcaggcggccggccaccacaagggcgaccaacgccagaacgcacaacaagagacagagaaaggcacagcggngaacangaccggggcagggaacaaggcancgagggccaaaacagccgcaaacgaggacgagaagagcaaggccagggccaaggaccacgaggccaaaaacgccanacaaggcgaagaccgcaacaaggcggaag

SEQ ID NO: 23933 - DNA, 294 bp, Glycine max
  Clone ID: LIB3106-010-Q1-K1-G7
aaacaacagaaccaaactcagaaccaaactcagaaccaaactcgccaaaactagggttttgcattgatggcactgtgcaaccgcgtcagatcgggaatctctctcttcaccaaatccacgttccttacttcccagcgatccagtctccaacgatccctcgttgcccctttcatttccctcgcctccagaaattacgccaacgtgccggggcaaaaggaaaccaaagttaaggtccctctgcctttgtttggaggttcaggaaactatgcctctgctttgtatattgcatctgtg

SEQ ID NO: 23934 - DNA, 350 bp, Glycine max
  Clone ID: LIB3106-010-Q1-K1-G9
ctcgtcctcaatatctccgttggcgagagtggagatcgtctcaccagagccgctaaggtgttggaacagcttagtggccaaacccctgtgttttccaaagcaaggtacacggttcgttcctttgggattagaagaaatgagaagattgcatgctatgtcactgtcagaggtgacaaggcaatgcaacttttggagagtggtttgaaggtgaaggaatatgaacttctcagaaggaacttcagtgatactggttgctttggctttggcattcaggagcatatcgatttgggaatcaagtatgatccttcaactggtatttatggaatggacttctttgttgttctggagcg

SEQ ID NO: 23935 - DNA, 300 bp, Glycine max
  Clone ID: LIB3106-010-Q1-K1-H1
cttacaacgaaaccctcttcatcttgttctatctgtgacgagcatcatggcctcaagagcagtgttattgttggctatgtgtgtgcttccggcgatggttgtggccattcgcccagcaaagaaccctttttgcgtgaagggtcgtgtctactgtgacccttgccgtgctggttttgagacctcagctaccacctacattgctggtgctgagattatgttgcaatgcaagagcagggttagcaacgaggttgtgtacacgaagaaggtgtacaccgactcaaccggagcatacacaatgta

SEQ ID NO: 23936 - DNA, 356 bp, Glycine max
  Clone ID: LIB3106-010-Q1-K1-H10
cccacgcgtacggttattttttatttcttgctctttctctgtgtcgatgggggtaaagggatgtaaggggcttgtggccggaaaaaccactgcatcgaacaaggacaaagacaaggataagaaaaggcctgtctctcgttcatcccgtgctgggatccagtttcctgtgggtcgtatccataggcagttgaagcaaagggtgcaagcaaatggacgtgtggtggctactgctgctgtgtacttggcctccattctggaatatctgactgctgaggtgctggagctggcggcgaatgctagcaaagatctgaaggtgaataggatcacaccaaggcacttgcaactcgctatcatgg

SEQ ID NO: 23937 - DNA, 347 bp, Glycine max
  Clone ID: LIB3106-010-Q1-K1-H11
ccatttcccactgtcttcgattttagggcattaaatctgccatggcagcagcacccgctagagctcgtgccgattacgattacctcatcaagcttcttcttatcggcgacagcggtgtggggaagagttgtctacttttgaggttttctgatggctcattcacaaccagttttatcaccaccattggtatcgattttaagataagaaccattgaactagacagcaaacggattaagttacaaatctgggatactgctggtcaggagcggttccgaactattaccacagcttattaccgtggagccatgggtatcttgctggtttatgatgttactgatgaagcatct

SEQ ID NO: 23938 - DNA, 386 bp, Glycine max
  Clone ID: LIB3106-010-Q1-K1-H12
gaagaatcagagaatggcaactatgactggtgtgagcctttcatgccccagggtttgcttcaacgcatcagcctcaccgcaaaacgcgcatgctgtaaagttctcacttccacccagccaagcagtgcgaccgggtagtatcaagttgggtcgcgtgatgaggatccgacccgttcgcgctgcgcctgagcgcatatcggagaaggtggaggagagcataaagaacgcgcaggaggcgtgcgccggcgatccgacgagcggcgagtgcgtggcggcgtgggacgaggtggaggagctgagcgcggcggcgagccacgccagggacaagcaaaaggaaaaggactccgacccgctcgagaattactgcaaggacaacccggagacca

SEQ ID NO: 23939 - DNA, 353 bp, Glycine max
  Clone ID: LIB3106-010-Q1-K1-H2
cccacgcgtccgcagcaagcttatctctgcagcattgaacaccaattgaacaccaatctgcagcattgaacaccaattcaacgccaatgggtcaggaagaggaaaaatcccaagaaaacaaagtggaggagaaaaaagtagaagaagaagaaaagaaagaagaagagaaaaaatcagatgagaagaaattcaaggagaaatctgcgccgccagaaatcgtgcttaaagtgttcatgcattgtgaaggttgtgctcgcaaggttcgtcgctccctcaaaggattcccaggggtcgaagatatactcacagattgtaagtctcacaaggtggtcgtgaaaggagaaaaagcggat

SEQ ID NO: 23940 - DNA, 312 bp, Glycine max
  unsure at all n locations
  Clone ID: LIB3106-010-Q1-K1-H3
cccacgcgtccgctgagtactggttcgggaacttctnccaagtgtgaagagcatagtgaaaaatggcattgcccatggggttttacagttgttgatgatgtggctccaacattcaaaacaattttagaagaaaactacttgtcaacaaaatctccttttgaagatacaacacaaaataggatgttatggtggaagcggagaaagaaccttgatcactgtcttgataaattactgaggaacctttgagagtcgtggtttggttcatggaaatgcttgctttttggagaatggttgaactgcaaaaattttgac

SEQ ID NO: 23941 - DNA, 395 bp, Glycine max
  unsure at all n locations
  Clone ID: LIB3106-010-Q1-K1-H4
gtgcgatggcaagttacaatgtgaagctgataaccccagaaggagaacaagaatttgaatgcccagatgatgttttcattcttgaaaaggctgaggaatttggcattgaccttccctactcatgcaaggctggtgcttgctcttcctgtgccggcaaagttgtttctggcaaagtcgaccaatctgatggtagttaccttgatgatacccaaatcggtaacggatttgttctcacctgtgttgcttatcccacctcagatgttgttattcagacccaccaggaggatgagctattctagttctatatctcatgtctctntctatcttgcattttcatntatatgcttgnttatcatatcaccaacttcaactgtagtacctacgtaccatgtcat

SEQ ID NO: 23942 - DNA, 223 bp, Glycine max
  unsure at all n locations
  Clone ID: LIB3106-010-Q1-K1-H5
aaccccggagcgacccacgcgngcgcaaccacggaacaggaccagggaccggccgcaaacgcagcgaggacagcacacggggcncggcgcgcacgccaagagacagcaagcgancaagggcagcacagacgccaaaacaacggcgcacaggacagcgcacacacccaanctaccacaagagaggcngcgcaaagggagcaacccgcacaggacaggncaaagg

SEQ ID NO: 23943 - DNA, 326 bp, Glycine max
  Clone ID: LIB3106-010-Q1-K1-H6
gttttcttcatatcttccttgtcactgcccgtgtgtcgccgccatggccaccgtcaccacgcaagcctccgccgcaattttccggccatgtacctcgaaatcgaggtttttgaccggctcttccggtaaacttaaccgggaagtgactatgcggccaatggggtgccctccttctgcctctttcaaggttgaagccaagaagggagagtggttacctggcttggcctccccaacttacctcaatggcactcttcctggtgacaatggatttgaccctctggggctagctgaggacccagagaacttgaagtggtacgttcaaaccg

SEQ ID NO: 23944 - DNA, 389 bp, Glycine max
  Clone ID: LIB3106-010-Q1-K1-H7
gggaagtatggacacaaaaaacaagcttggaaaggacatcattctgagaagaatagctcagggcctgaacaaacaggagatgaggagaatcatggctctaatgatcatcatgaacatacccatgaggaagaagatggggatcatttgtcaaaggataaaggtgggcagaggtatataaatcaaggaagatcaagaaaacataaatatcgtgctggaaatggaatgggccatggaagtgcaccattaactcatgctgctgaagcattaaattcacctcttggacccagaatgccagatggaacacgtggcttcgcaactggactaggtcagcctactgatcctgcttggaaatagcaagatttgacacaacactagggatcggatttagc

SEQ ID NO: 23945 - DNA, 358 bp, Glycine max
  Clone ID: LIB3106-010-Q1-K1-H8
gatcgaagtttcacatcagccttatccagtttagggtttcggttccttaccctacctttgacgtatcgaaaccttaaatttgggattaggtctgagcaatctggttggtagaacctttggtcttagagagtcaagttttatgtctggattagacgatcaaattcctactgccttcgatccttttgctgatgcaaatgctgatgactcgggtgctgggtcaaaggagtatgtgcatattcgcgttcagcagcgaaatggtacgaaaagcctgacaaccgttcatggattgaaaaagaattcagctataacaagatactttaagacgttaagaaggagttctgttgcaatggaacagttg

SEQ ID NO: 23946 - DNA, 376 bp, Glycine max
  unsure at all n locations
  Clone ID: LIB3106-010-Q1-K1-H9
gccacgggctgccgcctgaccatgggcctcgtcggggtctacgatttcgagggcagggtcatcggcgacgcctcgctcacaaagcgcccgatgggccgcgtgttgaacccgctgcgcgaaatgggcgtgcaggtgaaatcggaagacggtgaccgtcttcccgttaccttgcgcgggccgaagacgccgacgccgatcacctaccgcgtgccgatggcctacgcacaggtgaagtccgccgtgctgctcgccggcctcaacacgcccggcatcacgacggtcatcgagccgatcatgacgcgcgatcatacggaaaagatgctgcanggctttggcgccaaccttaccgtcgagacggatgcggacggcgtgcgca

SEQ ID NO: 23947 - DNA, 380 bp, Glycine max
  Clone ID: LIB3106-011-Q1-K1-A1
cccacgcgtccgacaagtagttgagaactaagaagaaggaaatggcttcctcaatgatctggtccgcagctgttaccaccgtcaaccgtgccggtgccggcatggttgctccattcaccgggcctaaaatcattgcttggtttcccaacagggaggcccaccattgcctttacttcaatggttggcaccgttggaggagtccattgcttgcaggtttggccaccaattgccaggaagaagttcgggactctttcctacttgccagacctggatgatgcccaattggcaaaggaggtcgaataccttctaaggaagggatggattcctcgcttggaattcgagttggagcacggtttcgtgtaccgtgagcacaacaggtc

SEQ ID NO: 23948 - DNA, 458 bp, Glycine max
  Clone ID: LIB3106-010-Q1-K1-G3
gagaacgtggctggggagtggaaccacacctctggtcaatggaatggagacgctaatgacaaaggtattcaaaccagtgaggattacagattctatgctatttcagctgagtaccctgaattcagcaacaagggtaagacactagtctttcaattttctgttaagcacgaacagaagcttgactgtggtggtggctacatgaagttgctcagtggggatgttgatcagaagaaatttggcggggatactccttacagtattatgtttggcccagatatctgcggttacagtaccaagaaagttcacgctatttttacctacattaccccaaacaattggttaaaaaaggatgtccttgggaaaattgacaacttaattaaggttacacatttaatcttcggtcggattcaacctaaaggattccgattggtaatgttgagaagccaactggtaatctc

SEQ ID NO: 23949 - DNA, 400 bp, Glycine max
  Clone ID: LIB3106-010-Q1-K1-E9
cccacgcgtccgcccacgcgtacgcacaattttagtagacacagaagtcagggtattggccaatggtcaacttgcccaacaaaagctagtttttaggagggttgaagctgattccaattctactgttgaagacagaagggaaggcttttcacagattctgtgaacgcacgttactgctccttatttctccacatgctatgtttcacaacaaattttgagtataggtcgctttcttacactaatgcaactctgatcttgatcatagcatgatatagtctatagttcttcacacaataacttttattggtcaatacaaataccatgctttagaagtgttggtgtggttcatttcttttagaataaaaatattttgggcagtccgtcttttttccctttttta

SEQ ID NO: 23950 - DNA, 346 bp, Glycine max
  Clone ID: LIB3106-010-Q1-K1-F1
cccacgcgtccgcttctgaagagaagtgttggtaattctcgtcgtttgcattgtcgttggcgtctttgccagcttgcgcactgtcttccctctatggacagctattctggccatcctactctatcccttctctttggcattggtgtacgttcttgattatgtatttggttggtcgtagaccaaaaaatgattcagatattcgtgctgtatggctcttacccttgttggggtgtatggtttttgtttgtagtctttgtgtgagactatgttgttggtgacttaaatttatggtggaattgacatcgattgagaacgtttcaagggttacaagtttgagtcttttgac

SEQ ID NO: 23951 - DNA, 418 bp, Glycine max
  Clone ID: LIB3106-010-Q1-K1-F10
gcaggcgtaacaaaagttgcgtagccatactctgattcattagtgaagaaaaatggggaccagcatcgccggcatcccaactacatcgatcactcgcgcaggtcttgtgctcaaacgacctgctggagcctcgtcctttaccgttcttggattgccagcaatggctaaggcagggaaagtgaggtgctccatggatgaaaagccttcaagcagctcaaatatagggatgggggcattcttgttagcagctgcagttgccgcaaccatgtcaagcccagccatggctttggtggatgagagactcagcactgaaggaaccgggcttccctttgggcttagcaacaacctacttggttggatcctgtttggtgtcttcggtcttatatgggggtgggccctttttacacctttttctact

SEQ ID NO: 23952 - DNA, 345 bp, Glycine max
  Clone ID: LIB3106-010-Q1-K1-F11
cccacgcgtccgcccacgcgtccgaccacgcgtccgcattcatagaaataccagcttgagaaccaccagcggtggagacaatgatgctgatggacagactcgtgagcatgctattcttgcttttaccctcgtggtgaagcagatgatctgctgctgtatcaagatggatgccactaccggcaagtactctaaagctacgtatgatgaaatcgcgaacgaagtatgttactacttgaagatggtgggatacaacctaaacaagatggcatttgtgccacactgtggttactggggtgacaacatgattgagaggttcaccaaccttgactggtacaagggaccaac

SEQ ID NO: 23953 - DNA, 384 bp, Glycine max
  Clone ID: LIB3106-010-Q1-K1-F12
ctcataagctttacttaattagcaaatccaaatatggcactttcttcttcatcatcttcaacatccatatttgctttagctttgttcactcttttgcttataggaagttcttcagctcaactctctgagaacttctatgatagtaaatgtcccaaggttttctatgccgtaaaatccgttcttcaatctgctttggctaaagaacctcgccagggagcatctatcgttcgcctcttctttcatgactgctttgtcaatcttggagggccatattggaaggttaaacttggtagaagggattccacgactggatttttcaaccttgctagcagtggtgtgctcccaggacctggttcttccctcagcgaccttatcaaaagattt

SEQ ID NO: 23954 - DNA, 304 bp, Glycine max
  Clone ID: LIB3106-010-Q1-K1-F2
cccacgcgtccggcgactgagagaagagaagagaattgtgatggggggaggacagggtcacggcacaacctacaaaggtgttaccattcatcagccaaagcgctggcacactatcaccggcaagggtttgtgcgcggtcatgtggttttgggtattctacagggcaaagcaagatggtcctgttgtattgggctggagacatccttgggagggtcaccatgatgatcatggcaagggccattagcattccttaggcatgagctccaagaacaggaagaacagaatttgaagtgtctgttgctgt

SEQ ID NO: 23955 - DNA, 136 bp, Glycine max
  Clone ID: LIB3106-010-Q1-K1-F3
cttaaactacattcccatttgtttttcctttttgagatttcatcatcctgtatttttggtttctgttttcggacttcaatggaaattaatggatgagaactaatgaataagctattgtgttgtgttgctttgtttc

SEQ ID NO: 23956 - DNA, 323 bp, Glycine max
  Clone ID: LIB3106-010-Q1-K1-F4
cccacgcgtccgtcttcccccattttttcctctttcttcctcgcctagctagctccagaaaattaggatctgcttcagatctagtgtttccctgtcccaaatcacgagtccattgagtttgattttgtggatgaaaagcatagatagggcttttgcaaaactctccaatgtttcttgaaattatatgaccatgccgtcgaattcgtatgctgcactccttctccgtcgggttcctttactggttctacggtttctaatgaactccttctaaaatccgtgtttaattagatctatctcctaagttaatcctggccttttccaat

SEQ ID NO: 23957 - DNA, 394 bp, Glycine max
  Clone ID: LIB3106-010-Q1-K1-F5
cccacgcgtccgctgagtactggttcgggaacttctcccaagtgtgaggagcatagtgaagaatggcattgcccatggggttttacagttgttgatgatgtggctccaacattcaaaacaattttagaagaaaactacttgtcaacaaaatctccttttgaagatacaacacaaaataggatgttatggtggaagcggagaaagaaccttgatcactgtcttgataaattactgaggaaccttgaagagtcgtggtttggttcatggaaatgcttgcttcttggagaatggttgaactgcaaaaaatttgacttggtgcttaagaatcttgggaatgatttaagatctaaatgcaaattggatgtaaatgaaggtcttcttaaaaattattctt

SEQ ID NO: 23958 - DNA, 338 bp, Glycine max
  Clone ID: LIB3106-010-Q1-K1-F6
caccaaccacaaaagggggaaggtacaaaccaaccccaacaacacccccaaggggcaaccggggaacaaccacccaagaaccctctaacccaacaccctcaggcccaacaacaccatcaaccccatcaaaccctccctcgggaggagggggggactataacacaccaccaacacatggaggtgggagccccccaacaccaaacactgtgagcccaccttcaaacccaaatgagccaggcacccccactaaccccgtcacacccccctacccgacttacccaaaacccctcacagggacacgcaactaccggaacactcacccaggaaacaattgggga

SEQ ID NO: 23959 - DNA, 274 bp, Glycine max
  unsure at all n locations
  Clone ID: LIB3106-010-Q1-K1-F8
aacgcgcagaacgaaccccnatcaaagaggcacaatggctacaatggtggcaccaaggcaccagggggacgggctaaaaacggggccaagtgtagtgctggcgaatcatccactgaaccctatatcagaggacactactaagcacacgcacatgaatctgctgccacatcatacaagacaaaatagcaggcacgacaaaaaggacaaatagggagcactaatccaacacactacgagaagccaaaagctcaaagagcagcagaagacaaggcag

SEQ ID NO: 23960 - DNA, 406 bp, Glycine max
  Clone ID: LIB3106-010-Q1-K1-F9
gcttcccttccccctcttcttagcaaatgtttcaatattccaaggccatgttgcttgatttagttcttgtttcctttgtcctcttgagttctatcagagatgggagtgcagggatcaccagctctttcgttcggccacagtggccaggagttgacattcccgtggatcatgaagtatttgcagttccaaagggttataatgctcctcaacaagtgcacatcacgcaaggtgactatgatggaaaagcagtaatagtctcatgggtgaccccagatgaaccagggactcgccatgtgcaatatggcacatcaaaggataagtttaaaactagtgcagaaggcacagttgcaaactacactttctataactacaagtcttggcctttttttacccccaaatttttttt

SEQ ID NO: 23961 - DNA, 375 bp, Glycine max
  unsure at all n locations
  Clone ID: LIB3106-010-Q1-K1-G1
caaatccatatcacagaaaaccattttggcttctcaaaaccccactcatcatccatatcacaaaaaactattttggcttctgcctttccttttccagggagctcattgacaatggctgaaacaaagtgggtcatgaaggacaaaagatggtctctccatggaatgacagctctagtcacaggaggcacccgaggcatagggcatgccattgttgaagagttagctgagtttggagcaactgttcatatatgtgcacgtaatcaagatgatattgataaatgtttnaaaaagtggaaaaaaaagggcctaaatgtgactggttaagaatggaattaacaatgtcctgcccaccttaaaaaattattggaaatggtg

SEQ ID NO: 23962 - DNA, 401 bp, Glycine max
  Clone ID: LIB3106-010-Q1-K1-G10
aatctcttcgttgtcatttgtctctcacaacctcatcaccaccaccactcccacatggtcacggttccaatctgccaaatatagaaaaccaatacgccaccacattagtaaaattgcatgcagtgaaaacacactcgaaggagaaaagctcccacatcggaggaacgttctacttggcctaggaggattttgcggcgctgctgttatgtctctgaacaacaagaacataccttttgcctctgctgctcccacacccatgttccctctggtgttggattccgctgtgagcacggtggtgaagaggccaagcaagtctaggagcaagaagcagaaggaagaggaggaggaggttctcgtgattgaagggatcgagtttgagggaaacacaaaccccaattttt

SEQ ID NO: 23963 - DNA, 381 bp, Glycine max
  Clone ID: LIB3106-010-Q1-K1-G11
gtattgactacctctgccggcatcatggatcacgaagaagctaggagaaaaaatgttggtggtaaggtactgggtttcttctactagagtttaatttcgattaagaggatgtcaggaatttcaattgagattcatggattgtaatggaggatatgctaggcccctagtaatatcaagcatagcaggagctgttttgtgatgttccttattttgtttgcaaaaccaagttggtaactataacttttattttcttttatcattatttttctttataccaaaatgtactggccaagttgttttaaacagtgagaactttgattagaaagtgggagcatggcgatgtttgagttggtgtgggcgagtcatgatatttcattgaaa

SEQ ID NO: 23964 - DNA, 421 bp, Glycine max
  Clone ID: LIB3106-010-Q1-K1-G12
gatgattggctgacaaactacgtcgattactccaacgtttttctcatggggagtagtgccggaggaaacatagcctacaacgcgggtctacgagcagccacggttgatggtacttataatcagattcccaagatcaaagggcttattttggttcaaccatttttcagtgggacccaaagaaccggttctgagctgaggctagagaacgaacctcatttggcgctgtgtgttaatgacgcgttgtgggagttatcgttgcccgttggagttgaccgtgatcacgagtattgcaatccaacggcagggaatggtcctaagagattggaaatgatcaaacggcgtggatggtgggtgctggttaccggctgtggcggtgacccacttgttgggggggaaaaattttccccggggggtcaggtgc

SEQ ID NO: 23965 - DNA, 418 bp, Glycine max
  Clone ID: LIB3106-010-Q1-K1-G2
ctttgaatgaacccttatcatttagtctcaatggctacaatggtggcacctttgcaccaggtagatgttctaaatacgttgccaattgtagtgctggcgattcatccactgaaccctatatcgttggacactacttattacttgctcatgaatctgctgccacattatacaagacaaaatatcaggctcgtcaaaaaggacaaattgggatcactaatccaacacactactttttgccaaaatctcaaagtgctgcagattacaaggcagcaagtagagctctggacttcttctttggttggtattctgatcccggtttctatggtgactatccggagagtatgaaatcttcaataggttctaaggttccaaaattcacaaaagcttaatcttaaaggcttaaaaattccataaaatt

SEQ ID NO: 23966 - DNA, 300 bp, Glycine max
  unsure at all n locations
  Clone ID: LIB3106-010-Q1-K1-E7
cccacgcatgcgactagaaccagggnaacgacaaggaacgcacaagcnngccgggacatgcaatttagctagcacggcaagggcatgccgcaagacctattgaacctgccagtgaacactggctatggctgcaagcactgagtatatgaaatacgccatgtgagtcggcatgctaactaatgccagcacacatcatcctcctagacgcatagctgaaggctggatcggatcatcacttgctgactcaaaaaactagatagactgatcaaactcgagagaaactaagttgctgcatacaga

SEQ ID NO: 23967 - DNA, 412 bp, Glycine max
  Clone ID: LIB3106-010-Q1-K1-D12
ctcacgcgtacgtgatgtgatgcgatgtactaaataacactaactattttatgtaggtgtactgaagaacctagagcattgtatggctgcatttcttgaactaagttcctcttgtcttatggattttctgatgctctgttaatatactattctgatgcaatgatgtatatattttgcctccaaaaaaatttaaaactctgatcatagatcatataattgatacatatagatcaattggacatttaatgttaatgtatcaagatcaaaaacggtaatttagtatgactcaaaaaatgtacacctatttatatggaacgaggttcgtaacatttgaattctgaatgaaaaacgtttcaatgattcaaccaaaattaaattaattgcgcctcttattaacatatttatttttttt

SEQ ID NO: 23968 - DNA, 468 bp, Glycine max
  Clone ID: LIB3106-010-Q1-K1-D2
agccactctaaagaaaatggcggtgcctctactctcgaagaagatcgtgaagaagagggtgaagaagttcaagaggcctcagagtgacaggaaaatttctgtcaagacaaactggcgcagaccaaagggtatcgattcccgtgttaggagaaagttcaagtgatgcactttgatgccaaacattggttatggttcagacaagaagacccgccactatctccctaatggttttaagaaatttgttgttcacaatgtgaaggacttggaactgctcattgatcaccaccaggcttaacgggcttaaaatggccaacatatatccaccagaaagaaggaaggtatagttgagagaaccgcgcaacttgatgttggtgtgacaaacaaaacagccagattacgcaaccaggaagatgaatagtctaaatgacttaaaaagtcacttatctgtagtgattcagtagttcaata

SEQ ID NO: 23969 - DNA, 325 bp, Glycine max
  Clone ID: LIB3106-010-Q1-K1-D3
gtcgccagtggcagtggcgtggctataatcccctgcggcaacaccggcaccgtcgcactcttccctcaccgaacgagaagaaacctccacgtggcgcgcgcgaagaagcccctcaacggcgacgacgtttccgtttacgctgagctcctcaaagccgaagtttccgttttggaaaataataagcctctcgacgacaacgatgccgctttgaagttcctagagaagatagaccgtcagtttcaacagcccgatttatgggaaggaccccagtgggactggctcggcatcttcatcaagttttcccccatcattggcatcgctgttg

SEQ ID NO: 23970 - DNA, 277 bp, Glycine max
  unsure at all n locations
  Clone ID: LIB3106-010-Q1-K1-D4
gaaagaaaaactctagacggggagttggcccgtgccaaggtaacagcaaacagagtacctgttgtggttgcaaatgaatggaaagatgccaatgataaagtgatgcctgtcaaacaatggcttgaagaacgccgattcttgcanggagaaatgcagcaacttcgtgacaagcttgctatagttgagcgcgctgcanaatatgaagcacagttgaaagaaaaatatcatttacgacttatagtgctagaggagagtttgagaggaaattctaacagta

SEQ ID NO: 23971 - DNA, 466 bp, Glycine max
  Clone ID: LIB3106-010-Q1-K1-D5
aaatgaaaaaaaatcattcacggtcacattttcatcctcgggttcgccacagcaaagagtgaacgcttttggaagggtagaatggtccgatgggaagcacgtggttggaaccccaatttcgattaattggggttgatgcaaggttcatcactcactcgaatagggggtgtgtcttgattggttagtgattatagtatttatatgttactattattattatttaactttttttgcaaacaaaaatgttgggtttatccaggttgacattgatgatagcggggacctcgtgcttgattggtgttggttctgtttgttccctgggagaaatgttgcaaaggggaaaaaatgtttggctcatgtgtttcttttcttcccggtgtacagcgttctaatcattgatgaatatttttcgtcgaccatcttgacattaaagtttatgttcaactactttaaagtgaattcattt

SEQ ID NO: 23972 - DNA, 259 bp, Glycine max
  Clone ID: LIB3106-010-Q1-K1-D6
ttgttggcgaatactcactcacgcgtttgtagttgcaggctctaatcagatcccaaatgatcaactttgtgcttctcattagtcgccaagggaaggtgagattgacaaaatggtactcaccttattctcagaaagaaaggagtaaggtaatccgtgagctcagtggaatgattctttcccgtgcgcccaagcaatgtaattttgtggaatggcgaggacataaagttgtttataaaaggtatgctagtctctatttctg

SEQ ID NO: 23973 - DNA, 461 bp, Glycine max
  Clone ID: LIB3106-010-Q1-K1-D7
cccacgcgtccgcccacgcgtccgcccacgcgtccgctcagaagaagaagagagaggtctctcaacaatggccactgccactgtttcaatttcaactttatgcgctactttcggaacccattgcgccatttcccacaacccaaaacctctattttctcaacctttcaatctcaatcactttccttctaactcttacaagctcgctttctcgcctcgctcacctctttcaccccttcccaaggcctctgaatccgcggtagccgaaaccgaacccggttcggccgagcccgaaccggcccaaatttccccggcccaacctccctcctgggaacccggtctcttcgctgtcgtaatgattggcggacgccaatatattgttcacccggggcgacatcttactgttcagaggttaaaaggtgctaatgttaatgataagattgccttacacaaggttttactgg

SEQ ID NO: 23974 - DNA, 398 bp, Glycine max
  unsure at all n locations
  Clone ID: LIB3106-010-Q1-K1-D8
gagtttttgaaaactattactggcaagaaggagaccctcattgaccttacaattatagaaatcctgtcaaggcacgcatctgatgagttctaccttggggagagagatggtggtgacttctggacttctgatgctggtccactagaggccttcaagaggtttggaaagaagcttcaagagattgaacataagcttatacagaagaacaaggatgagacgttgagaaaccgcactgggccagctaaaatgccttacactctgctctatccttctagtgaggagggattgactttcagaggaattcccaacagtatctctatctaagggctctctcattgaggttgctgtactactctgcctgnttttcaataatgtgaaataggaagaatatgattcct

SEQ ID NO: 23975 - DNA, 377 bp, Glycine max
  Clone ID: LIB3106-010-Q1-K1-D9
tgaaaatatgggcttctcctcctttctgggtcgcgtcctctttgcttccctcttcatcctctcagcatggcagatgtttaatgaatttgatgacaatggtggacccattgtaaaggagttgattcccaagctcactgttgtgaggagaaatttatcctccaagctgggggtagcgataccagatattaatgttcggacagtcattgcctctaccatgttactaaagggggttggaggagttctatttgtgcttggcagtacatttggatcttatcttttgctcttgtatctggggatttctactccaattctgtatgatttctacaactatagatctaatatccctgaatattatttactgctgaatgatttcattc

SEQ ID NO: 23976 - DNA, 326 bp, Glycine max
  Clone ID: LIB3106-010-Q1-K1-E1
ggcttctgcttctgttcccatggctttctcgctgagctctgttatcaacaacaacaagccgtcatccgaagccttcttcaggccactacccctacggcaaccaaagaggaccctcttcaccacaaaggcagtgtcaaactccaaggctcaaatcaatgcatctttgaaggagaaggcagttgcaggactcacagcagcttctgtgacagcatctatggtggttccggaggtggctcatgctgctggatatgagttctccccttccctcaagaactttctgctaagcatctttgctggtgggtttgttctagtagccatatttggag

SEQ ID NO: 23977 - DNA, 159 bp, Glycine max
  Clone ID: LIB3106-010-Q1-K1-E11
cccacgcgtccgcccacgcgtccgatttttaatttattcttacagtatgtacttaataagagaaaataacaaagttcagaggtgtgcttttattcacttgtgtaatttgtatatcttaaattctcaatacatgcaatgcatttaagtggttggcttttt

SEQ ID NO: 23978 - DNA, 420 bp, Glycine max
  Clone ID: LIB3106-010-Q1-K1-E12
cccacgcgtccgaattctctcttatcttctttgttattacctctttccaaagtccaaattttctagttccaccaaaccaaaccaaaccaaaatggcagcagcctcagcctcatccatgatatcaacaccagccttatctccaaccatccaaaagcaccatcatttgaagccatccaacgtgtgcttccaaggtcttagacccctcgcaaggttcaccaaagcctcatcaaccaaagtgagcaccaccaccaaaagggttattccaaagggtggtgttagagctgaactcaactcagcccttgtgataagcctcagcactggcctctccctcttcttgggaaggtttgtgttcttcaacttccaaagggagaacgtggcaaagcaagttgggccccccccttttggggaaaaaagcagaac

SEQ ID NO: 23979 - DNA, 197 bp, Glycine max
  Clone ID: LIB3106-010-Q1-K1-E2
aacaagtgtactgaaccttgatagtattgagaaaaaaaaaaaaaaaaaaaaaaaaaaaaaaaaaaaaaaaaaaaaaaaaaaaaaaaaaaaaaaaaaaaaaaaaaaaaaaaaaaaaaaaataaaaaaaaaaaaaaaaaaaaaaaaaaaaagctaaaaaaaaaaaaataaaagaaagaaaaaaaaaaaagggggactca

SEQ ID NO: 23980 - DNA, 458 bp, Glycine max
  unsure at all n locations
  Clone ID: LIB3106-010-Q1-K1-E4
cccacgcgtccgcccacgcgtccgggaatttcgatgctcagtcatctcttttaccattctcttctctcttgctcttgcaggagagagccatgtccatgcatcgctacctgaggaagattattgggaagctgtttggccaaacactcccattcccactgcactgcgagagcttctaaagcctctccctgcaggtgttgaaatcgatgaactccctaagcaaattgatgatacacagtacccaaaaacattcttctataaagaagaccttcatccaggcaaaacaatgaaagtacaattcaccaaggcgtcctaatcccaaacctatgggggatatacatgggtaacgggtattaaagacacctcttaagaaggatataggtttgaagagatattccttaagaaagaagcgtttganggagaagagaagttttgtgcaaaatccttgggaacagtaattg

SEQ ID NO: 23981 - DNA, 465 bp, Glycine max
  Clone ID: LIB3106-010-Q1-K1-E5
ctcacagaaaccataacaacttcttcagaagacaccaatggatcctcttcaccacatgtgctctcacagcaacaacagccaaattctactcctactacaccaagaactcgttttcagtggagtaatcagtctaacacaggagtagctatgactctcaaccctgctcatgaaagagtcttcatgtctcattatggtgctaactcctttggggttaaaattgagggacagaatcttcatgagtcttcttacttgcgacctcagacacagaacatggttttccaaatgcaacagtcctctcaacactagttccatgcattatcacttgttgtagtgaattattaatgggcagaagtagaaccagaatcttctgtccatttcaataagtacagtgcttgaattgagctttttccccaagttcttatgtgaataccctagattgttggttagttattatgaacttgaaag

SEQ ID NO: 23982 - DNA, 310 bp, Glycine max
  Clone ID: LIB3106-010-Q1-K1-E6
cccacgcgtccgactagaaacagtgtgatgaaaatgaaggtccttgttttcttcgttgctacaattttggtagcatggcaatgccatgcgtacgatatgttccctctccgaatgaacactggctatggtgcccgtactccggaggtgaaatgcgcaagttggaggcttgctgtggaagcacacaacatctttggctttgagaccattcctgaagagtgcgttgaagcaacaaaggaatacatccatggcgaacaatatagatcagactccaaaacagttaaccaacaagcttacttttatgccagagacc

SEQ ID NO: 23983 - DNA, 411 bp, Glycine max
  Clone ID: LIB3106-010-Q1-K1-D11
agaacctatgccttgacaaacctcagtaccaagaaccccggtttgttcgcacttcagtctccaagtcataagtacactcttctctccccattcactggcattggcttttggtagttgaagtcttcctttgttgtcaaattcagaccagtatttgaaaaatagacaagaagagcaagaaaataaagcagcagaaggggtgaagatagggatggcgggcatgtctggatatagttgctgctggcagtgggcggaggtgaaatccatgggaatgggctattggttcccttcctcaactaccaaaaggagtttccggcctgtgcttgtttctgtttctgctatctccgatgataactctcactcttacactagcagtagcagcaaaattttgggggggaaaaaaaaagggaaagc

SEQ ID NO: 23984 - DNA, 462 bp, Glycine max
  unsure at all n locations
  Clone ID: LIB3106-010-Q1-K1-B7
gccaggtaagcacaaccaaagcaacaccccaaatggcttcagcttctgttcccatggcgttgtcactgagctctgttaccaacaacaacaagccttcatccgaagccttcttcaggccactacccctacgccaaccaaagaggaccctcttcaccacgaaggcagtgtcaaactccaagcctcaaatcaatgcatctttgaaggagaaggcagttgccggactcacagcagcttctgtgacagcatctatggtggttccggaggtggctcatgctgctggatatgagttctccccttccctaaagaactttctactcagcatctttgctggtggggttgttctagcagccatatttggagccgttattggggtttccaactttgatccggttaagagaacttaaatcatgcatgctccaatgcttttcattntctctctctctttttcactcttcttctagc

SEQ ID NO: 23985 - DNA, 461 bp, Glycine max
  unsure at all n locations
  Clone ID: LIB3106-010-Q1-K1-B8
aacgcatagtcacatactacactagggacagaactctgaatcgagctggtgtcgtgtcccagttgaatagaattgcatcttgaaagatggcggacgaagagaagccaaatggagaagaacaagtgaaggacaacaacaacaacaacttatacgacgccgatcagcgtctgatcttggagccttgcaagatcaaggcctgtctgatccctctcttccccgaaacttctagaacctactctcggcaactcctccaatggtccagtcaaggttactccctgcgacgcatactcttcatctccattgggatagttgcacttggagctctgttaagacttggtgcttttacgctcttttntctggctgctactggaaatgccattttcgtcttccttctcaaatctttggctgtggctggaggcttcttgggtctggactttgcttttgtgacagccatatataat

SEQ ID NO: 23986 - DNA, 418 bp, Glycine max
  Clone ID: LIB3106-010-Q1-K1-B9
cccacgcgtccgattgactagtatcattaagatggctaattcctacttatgcttgcttgtcttgatccttgtagctctgctcctcacccctcaagggcttgctgatgaatctgattcttactataagccaccagtttacaagaaaccaccagtgtacaagcccaagcccaagccacccattcacaagcccaagccacccgtttacaagcccaagccacccgtttacaagaaacccccttatggtaagtacccaccagttcaagacaacgatcacttctaaaccatgcaacaaggcatgttaatgttaactatctactaaaataaagaggttcagttaacctactacgtacgttgctccttttaattcctaaatcgtaatttaacccaaaaaaaccccttttttttttttgtagggatg

SEQ ID NO: 23987 - DNA, 428 bp, Glycine max
  Clone ID: LIB3106-010-Q1-K1-C1
cccacgcgtccgcccacgcgttcggcaaaagcttcgtggagacttaatatgaaagagtttcatttgtcaagccaaacaaatgatcactaaaatcattaatccttcactttccgtgcctttctttataaacccagaggcattctttcttccttcttttttctgttgaaagttgaaacgtttcttttccttttttgtgttcagttgtgcaaatccaggtagtcatccttcacctttttcctctttttcattatttgaatgtttaagtttctgtactttgtaatggatttgctttgctataatggtgatatgttgaattgtgatgggtctgattttggtctaagtgttggtgtgttgctttgggtaaatctaatggatctttgggtactcttttaaactttagaacctaaattatggatatattattaaat

SEQ ID NO: 23988 - DNA, 398 bp, Glycine max
  Clone ID: LIB3106-010-Q1-K1-C10
cttcattctatgtttgacttaaaacttaaaaagtagataacattcattctgggagtgactcgaatctattttgaggttgtacccgcattttcattatatataagtctatttatttatataaaaaaaaaaaaaaaaaaaaaaaaaaaaaaaaaaaaaaaaaaaaaaaaaaaaaaaaaaaaaaaaaaaaaaaaaaaaaaaaaaaaaaaaaaaaaaaaaaaaaaaaaaaaaaaaaaaaaaaaaggggcgccctttttaaaggctccaagttaacttacccgtccttccaacctcaaacctttttaatagggcccctaaatttaaattaatggcccgttttttaaaaacttcgatacctggaaaacccttggcttacccaaattaaatcggccttttttttt

SEQ ID NO: 23989 - DNA, 358 bp, Glycine max
  Clone ID: LIB3106-010-Q1-K1-C11
aagactgacagccttatggaataaatggtggcatggcttcaatggaaggagtagaggcatctgtcaagaaaggaaagggaaagggcttttaccagtttgtagacatatacagtgctaatgtcgatggttacagtcctatctactacaccaaggactggtctccaaccggtgatgtctacgctggctgtacgactggcttggctatctgggctgtgactctacttggtcttcttgctggtggtgcacttcttgtctacaacacaagtgctttggcgcaataaactttgcaaatcgatgttttaagctcaaacttagtccatgtaactatctaaaaatgaagaattattcatgaaatact

SEQ ID NO: 23990 - DNA, 387 bp, Glycine max
  Clone ID: LIB3106-010-Q1-K1-C12
tccttcaccaccatcaaacaaagcctcatgccccaaggacacattaaagcggggtgcgttgtgctgatctcttaggacttgttaacattattgttggaactcctccttcgagccagtgttgtgcattgatcaagggtttggcggatttggaagctgcactttgcctatgcaccgcaattaagagcaatgtgcttggaatcaacttgaacgtacctgtgacgctcagcgtgatccttagtgcttgtcaaaagactgtccctcctggtttccaatgtccctcctgagataatcaaattaggttcatgagatatctctctcatcagagaaatgtttagatatgcacttaacatgaaattgattgactgcctatgtaagcatttctttttt

SEQ ID NO: 23991 - DNA, 139 bp, Glycine max
  Clone ID: LIB3106-010-Q1-K1-C3
ccaacgcgtccgaaaaaaaaaaaaaaaaaaaaaaaaaaaaaaaaaaaaaaaaaaaaaaaaaagaaaaaaaaaaaaaaaaaaaaaaaaaaaaaaaaaaaaaaaaaaaaaaaaaaaaaaaaaaaaaggaataaaacccaaa

SEQ ID NO: 23992 - DNA, 359 bp, Glycine max
  unsure at all n locations
  Clone ID: LIB3106-010-Q1-K1-C4
gacaaaacanactaaacatgaatcccattggtttctctcttctctccctggtttctctagcacttgtctcaattgtcacagcccaagaaagagcccctcatgggcttgtttacgagaaccctgaagccttttcaccatcagcatataacttcttgcacccgaatgaacgaaagcccgagaccaaagacccttgtgctgcatccaaatgctcaccaatgcctttagcagcacaagtggaagctactgaaattcatgaaagccaaaccttaacaacttaagggagttaggaaccatttgttacctgttgcctaacctgccttaaccttgggggtgcctttggtgtgcctttaactattggg

SEQ ID NO: 23993 - DNA, 428 bp, Glycine max
  unsure at all n locations
  Clone ID: LIB3106-010-Q1-K1-C5
aaaagagggcnntcaaaatgcaaacagccttaaccttcgctgcccccaacgttgtgccattggcacccacaaagagtgtctcccatattaccatctttcccaccaaattgaaagccccgcgctcctcacctcgttactctccgattagggttgcaaccgtggagcccgacacttcaactgtcgactacaactctgcgttctcagtgtttcctgcagaagcatgcgaaactgtaggaggggaagcctgcatggcggagatgtaccctgaaacgaagctacagccagaggctaagactccacgagtcgttacagagaacgttgagagagagtatcttgaatacgatgatcctaaaacggtatttcgaggagaggcttgtgatgatcttggaagaactttctgtgagaccgagtatcagaagggtgtctac

SEQ ID NO: 23994 - DNA, 197 bp, Glycine max
  Clone ID: LIB3106-010-Q1-K1-C6
gtcgcgttgtgttgcgtcatgtcgtgcgctgttcctctgtctgtcgtttttgcggtcagaccaaaccctagctccgcatcgcaaccatgtcgaccaagcaaggtggaaaagctaagcctttgaagaaacccaagtctgataagaaggattacgacaaggtcgacatggctaacatccagaagaataaggaagaggag

SEQ ID NO: 23995 - DNA, 342 bp, Glycine max
  Clone ID: LIB3106-010-Q1-K1-C7
gaaacgccatcggtggccgtgatggaaaattctatgtggtgactgaccccagggatgatgaccctgtgaacccgaaacccggcactcttcgccatgctgtgatccaggataagccattgtggattgtgttcaagagggacatggttattcagctgaaacaagagctgatcatgaacagcttcaagacaattgatggtagaggagtcaatgtgcacattgctaatgaaccatgcttaacatttaagttggtaaccaatgtcataatcaatggttggaaaattaatgattgcaaacttactggaattgctatggtaagaacttcccaaaccaatttgggttgaa

SEQ ID NO: 23996 - DNA, 464 bp, Glycine max
  Clone ID: LIB3106-010-Q1-K1-C8
gttcttttcttgttctccttcttcctttcccaaccaaaacatttcttttgtgttatttactgattcttctcagcattcagcaatcagcatcattattacttttccttgtagccatatcaatttgttttctgtttcaaaaaccaatatgccttatgcctttctctttttctagctttattttcctgtagaagtaagtaatttacagtttgttctattttctcagtgatttataatcagaaaacaagggacagccacacagaagttatcttgaatcagaaaacatgatgctaagaagctcttcaacaccagttcttggatccctcctctcatccttcccagatagtcctaacaacaatattcactcagaaacctgtcatgcacttaaacactttccaccaaccagtgtcccacaaccttatcacaaacttacttgccaccaaacccggtcctttgcatgtggttct

SEQ ID NO: 23997 - DNA, 128 bp, Glycine max
  Clone ID: LIB3106-010-Q1-K1-C9
cgtaaataccaaaaggaaacattgtctgaacaacgttacaaaaaaaaaaagggaaaaaaaaaaaaaaaaaaaaaaagggaaaaaaatataaaagataaaagaattaaatacaaatgggtgggacgttt

SEQ ID NO: 23998 - DNA, 436 bp, Glycine max
  Clone ID: LIB3106-010-Q1-K1-D1
cttcttcggtgagagttagagagagagagagagagagagaaggctctttttttcttttttggtggtttctcttgtttttttttttgtaggtactgaggaagaaagaccaaaactttatccgcttgcttcacttagctcaagagcgtacaattcaggcaaaggccttgaagtcggagtgtgtgttaaggatttcttaggagttgcttctgtcttgactgaagaaatggaggtatatggcaaatctatggttgcaggtcctgcaaatgttatttttctgtcaagtattttgggccaagaaggtccagttcccggtcacaaatgcgactggaaatgtcaaaatgaacatgtttgtggaaacatgtatcgctgcaagctaactgggctgactcacatctgtgataaaaactgtaaccagagaattctgtatgacaaccat

SEQ ID NO: 23999 - DNA, 412 bp, Glycine max
  unsure at all n locations
  Clone ID: LIB3106-010-Q1-K1-D10
aacaaatcaaagccatggccacctccaacttctctattgttctctccgtctgcctagccttctttttggtgctacttaccaaggcacactcgaccgataccgcttctttcaccttcaacaagttcaacccagtccaaccaaacattatgctccaaaaagatgctagtatttcatcctctggggtgttacaactcaccaaagttggcagcaactgcgtgcccacctcgggatctctcggtcgtgccctttacgctgccccaatccagatttgggacagcgaaacctgcaaggtagccagctgggctacatgctttaaattcaacattttcgcacccaacaaatcaaactcagctgacgggctttgccttcttcttggcacncggttttcccgggggggggggtttttttttct

SEQ ID NO: 24000 - DNA, 464 bp, Glycine max
  Clone ID: LIB3106-010-Q1-K1-B6
gtggataactcaatgtataacattcccactggacctagtgactacccgtctgctggaaatgaacctggtgaaaataatgagataaaaggtggaaggcctggtccatacatgcaacctcctccctggacgagccagaaccagaaccagagggctccacttgacgtcaatgttgcttatgtggaagggcgggatgctgcggaaagaggagcctctaatcaacctttgacacaggacttcttcatgtcctcggggaagcggaaacgtgatgaaattgcttctcaatataatgctggtggatatataccttagcaagatggagcttgagatgctgattcttaaatttttgaaattgaagtgtatggaaggggcatctccattgatgcaagtcactctacttctaatggaaaaatgccagcacattcagacaggccagcttctcagattcctcaatttgatggaccaat

SEQ ID NO: 24001 - DNA, 308 bp, Glycine max
  Clone ID: LIB3106-009-Q1-K1-H9
gttctggccttcctagttttatttctctttggggataaatttctgacttcccagcgtgtatggtgtgagtatttggatgtgtacaataagcttgattgagcttttagtttgtaaatcagtctaggttgtacagtgataatggcgatggacactttctctttttatgtaaaactggccttcaatgctctggtggtatataggggttcaaatatagacaagtatggtgagctgtatcagaccataatggacaaagcgctacaatgaggaggacatgagggaggccttcaacgtctttaaccagaacgccg

SEQ ID NO: 24002 - DNA, 343 bp, Glycine max
  Clone ID: LIB3106-010-Q1-K1-A1
ctttcgtttcctttcattttccctcactttctcgctccccaaacgcccctctctctcctccgatggccgaccagctcaccgacgaccagatcgccgagttcaaggaggccttcagcctcttcgacaaggacggcgatggttgcattactaccaaggaacttgggactgttatgaggtcacttggtcaaaacccaactgaggcagaactgcaggatatgataaacgaggttgatgctgatggcaacggaaccatcgatttcccagagttcctcaacctgatggctcgcaagatgaaagacaccgactcagaggaagagcttaaggaggctttccgggtgtttga

SEQ ID NO: 24003 - DNA, 362 bp, Glycine max
  unsure at all n locations
  Clone ID: LIB3106-010-Q1-K1-A10
aaaatggcaacaatcatcgccggcaccccaactacatcaatcactcgcacaggtcatgtgctcaaacgacctgttggggcctcatcctctaccgttcttggattgccagcaatggccaaggcggngagagtgaggtgctccatggaggaaaagccttcaagcagctcaaacctagggatgggggcatccttgttagcagctgcagctgccgcaaccatgtcaagcccagcagccatggctttggttgatgagagactcagcactgaaggaactgggcttccctttgggcttagcaacaaccttcttggttggatcctgtttggtgtctttggtctcatatgggctctcttctttggctacac

SEQ ID NO: 24004 - DNA, 340 bp, Glycine max
  Clone ID: LIB3106-010-Q1-K1-A11
cccacgcgtccggggaattatgtttcttcatttgataaattgtgttgaaagaatattaaaatttgaatatagtttttacactgcttttgtatcttaaaaaaaaaaaaaaaaaaaaaaaaaaaaaaaaaaaaaaaaaaaaaaaaaaaaaaaaaaaaataaaaacaaaaaaaaaaaaaaaaaaaaaaacatacaaaaaaaaaataaaaaaaataacaacacattaataaaaataaaaaggcggcggattttaaaaagtttaaactttaaaatcaatgagctttcccaagctaatgcgcataaaagggccattaattataataaccaggctaatatttaaaaa

SEQ ID NO: 24005 - DNA, 379 bp, Glycine max
  Clone ID: LIB3106-010-Q1-K1-A12
cccacgcgtccgcattacactcacactctttgtgaaaaaggggagtttcttattctgtctagacgcttccattgatcggcgatttcttagacatggcggagcatcacgaacacgaggaagtgaagggtgagtccttgttggagaagatttctgggaagatccacgaccacgattcgtcatcttcgtcggattccgacaacgagaaaaccagcgcttctgactccttgaagtcaaaggttttcaggcttttcggcagagaaaagcccattcaccatgttcttggcggcggaaaaccggccgacgtttttctctggagaaacaagaagatatctgcatcgacactcggagttgcgaccgctatatgggttctgtttgaatt

SEQ ID NO: 24006 - DNA, 427 bp, Glycine max
  Clone ID: LIB3106-010-Q1-K1-A3
cccacgcgtccgcccacgcgtccgatagaacccaatctgaaatatctagctctacctcggaaaccaagcatttgtgtgtattccttttcagggagttaagtggaagatggggttgtcaacagcaaggacaagcataggatcagtttgtgtttgtgccatctcaaagcctctccgccgtcactgccatttcctcccaacctctgtttctcctgtcttctcatgtcttcagaaaaagtgcaaattgaattttcaaaaaccagttcaagatgctgcagactcaaaaatatcatgtagcttagtgaatgtggaagatgggatagatgatgaaacatgtgaattaatcagtggaatggagctttcacttgaagagggtgatgaaaatatccgtgcttatctgttcaaggcacgtaaaaattacaatggaact

SEQ ID NO: 24007 - DNA, 399 bp, Glycine max
  Clone ID: LIB3106-010-Q1-K1-A4
gtcactccttgctcttagccctcctcctcttcgccgccgtggccaccgccgcgatggcgggggccgcgtccgacgccgacgacatcctgatccgtcaggtggtgccagatgttggcgaagccgaagaggaggacaacctgctgaacgccgagcaccacttcgcgagcttcaaggccaagttcgccaagacctacgccaccaaggaggagcacgatcatcgcttcggcgtcttcaagtccaacctccgcagagccaggctgcacgcaaagctcgacccctccgccgtccacggcgtaaccaaatcctccgttctaactccggccgatttccgccgccagttcttcggcctaaagccgttcggattccgggagcaggcccaaagggcgccaatcttcccaa

SEQ ID NO: 24008 - DNA, 151 bp, Glycine max
  unsure at all n locations
  Clone ID: LIB3106-010-Q1-K1-A5
caaaccgaagaagaagccaccagngnacaagccnccagagnacaagccaccaggggacaaaccaccgggggagaagccaaaaccaccggnnaacaagccgaaaccaccggngaacaagccaccaaagaagaagccaccanacaagaaacca

SEQ ID NO: 24009 - DNA, 278 bp, Glycine max
  Clone ID: LIB3106-010-Q1-K1-A6
tcgctcatcactcctcacacaacacacttgcctcttctacctccctccacttctagtgcttcccacatggaggatttaatcatatctccttcttcgtcttcctctttggtctctctaccccatgaaaacccaacaccaacaccaacccttctacaaaaactccaattcctgctacaaagccaacccgattggtgggtctacgccattttctggcaagcctcacacgacgacaatggcaacctctacttatccttcggagagggccatttccaaggcac

SEQ ID NO: 24010 - DNA, 70 bp, Glycine max
  Clone ID: LIB3106-010-Q1-K1-A7
cccacgcgtccggcttggtgtgcagtggaaagagggtggaaaagagtggtaagggggagggcggcgcccc

SEQ ID NO: 24011 - DNA, 455 bp, Glycine max
  Clone ID: LIB3106-010-Q1-K1-A8
aacactcataacacacagcacaaagcagagctcatccttgagttaaaaaatggcagcagcttcttacatggctctctcatccacatccttggctggcaaggccgtgaagctgggcccatcagccccagaagtgggaagggtgagcatgaggaagaccgtcaccaagcaggtctcctcaggaagcccatggtacggcccagaccgagtcaagtacttgggcccattctctggcgagcccccgtcctacctaaccggtgaagatccaagccactacggctgggacactgctgggctttccgcagacccagaaaccttcgccaagaaccgtgaactcgaagtgatccactccaagtgggccatgctcggagccttgggctgcgtcttcccggagttgctgtcccgcaacggggtgaagttcggagaagccgtgtggttcaaggccgggtcccaaatct

SEQ ID NO: 24012 - DNA, 382 bp, Glycine max
  Clone ID: LIB3106-010-Q1-K1-A9
aaaaaatgaccttgtacatgaataattttggaaagatgaaaagaagtgaagaaaaagcgaaaagcccttacgtatgaagtgtatggtaaaaaccttctggaaggaaaggtaaagtgaatgaagctgtgaaagctgtcagggacatggaaagaagaggagttattggaacagccagtgtatattatgaactagcttgttgcctttgcaacaatgggaggtggcaagatgctattctggaggttgacaatattagaagtcttcctcatgccaagcctttggaggttactttcactggcatgattaagtcttccatggatggtggacatattaatgattgtatatgtatatttgaatacatgaaagagcactgtgttcctaatat

SEQ ID NO: 24013 - DNA, 379 bp, Glycine max
  Clone ID: LIB3106-010-Q1-K1-B11
cccacgcgtccgcccacgcgtccgcccacgcgtccgggatcgtggtaataacaacaataacggcgttgttgttgttgtcgtttgggtgcgaacggggacacgctctgaaggtgccgtttagagtaaacgacgtgctccccgtgctgccgcgcgagatctcgtggccggttctgaacaacctgcacagcgccgtcgacctgctcccttatttcgttgggtccctcactcctgccaatgcctccgtcaagtggaaaggggcatgcttcttcgataacaccgccaagattgagttcgcaccctctttggagggtgccactctctatctcaagacagaggctgcacatagctggacctgcatggatttgtatgtttttgcaac

SEQ ID NO: 24014 - DNA, 372 bp, Glycine max
  Clone ID: LIB3106-010-Q1-K1-B12
tggaaggaagtatcgacacatgtgacaaatctgatgatgcagatgctcctatggaggttgcccaccaagatactgttgtggtggctgatgattttttgatcaagatgttgctggcacccttcctatgtcacctgttaatgatgctctaaaggaatttgatgagtgcaacactgatgatgatcaaggcatcaataagggtgatgacaaccaagatatgaacagtgaaactgaaaatttgaatctggctgatggcaacatggcacatgaagattaccagcatccttttaatgatgatgaaaaatctgctgatgaacgtgactctatgacaagttctgaagggcgttttgttgagctcgagtcaatttctcattc

SEQ ID NO: 24015 - DNA, 215 bp, Glycine max
  Clone ID: LIB3106-010-Q1-K1-B2
gctggcgccgtcatttaacacgcactcgttctccatgaatcagaggctgttggtgctgaagccggaccatttgagtggggttggagaataaacgcacgaggttgaagttaccgcgccggcttccgctgttcttgcgccaccgggtttctatctgctgtttgtggtccatcaagaagtttccaagccacgggtttttgggtccagatggtgtgaaa

SEQ ID NO: 24016 - DNA, 255 bp, Glycine max
  Clone ID: LIB3106-010-Q1-K1-B4
cccacgcgtccgcaactccttactattacaagtctccgccaccacctgaaaagccaccgccacctctggcggttccccggcagcgtaagcagtgggaggtgccgtctccagtgacgccggtggatcaacagatttcgaggccggcgccgtcgctgacgccaccttctaggccttttgtgttgcaaacaccaaatacgaaggtttccccagttgagttgccaccggctagttctcagaattttgaggagggttctg

SEQ ID NO: 24017 - DNA, 348 bp, Glycine max
  Clone ID: LIB3106-010-Q1-K1-B5
cccacgcgtccggccatcttaaattccttcttcaagcgatcaaggaaggtgttaatttgaagggctattatgcatggtcattttcggacagttttgaatgggatgctggttacacagttcgattcgggctcatatatgtggattacaagaacaacttgaaaagataccccaagttctctgctttttggttgcaaaagttccttctcaagtgatctgaatttagtgttcctttgacatgtctagtgtttttcttgtttatttccctagatttcatcgtatatcacttgtgttggatgtaatcaagagatcattttatcaaataaataatgccaaatggcatgtcgaagt

SEQ ID NO: 24018 - DNA, 465 bp, Glycine max
  unsure at all n locations
  Clone ID: LIB3106-009-Q1-K1-H8
cccacgcgtccggaacagcagagaaacaaagttagaagtaaagaagatcatggctggtctagcaaccttggctgctgttcaaccagctacgatcaatggccttgctggaagttccctctctggaactaagctctctttcaagccctctcgccacagtgtcaaatccaagaacttcaggagtggtgccgtggtagcaaagtatggtgacaagagtgtgtactttgatttggaggatctgggcaacactacagggcagtgggacttgtatggctcagatgcaccttcaccctacaaccctcttcagagcaagttcttcgagacatttgctgctccattcacaaagaggggattgttactcaagtttctgatattgngaggtggttccacccttgcatacttcagtgcaactgcctcaggtgacattctaccaatcaagaagggaccacaactcccaccaaagctcgg

SEQ ID NO: 24019 - DNA, 352 bp, Glycine max
  Clone ID: LIB3106-009-Q1-K1-G2
tcggatccattcacttccttgcacaagccttaagtgagtttggtgtgatttgaattgaaggaaggggagggggccgttgcaatggccgtgggtcaccttctgcacctgggaagcaatacttgcaggaattctcgaagctttttcagtactatctggataaatccactccccatgccctctacagatggattgggactttcgtgattgcatccatctacggtctgcgtgttggttatttgcaggggttttacattgtctcctacggcctcggaatctaccttctcaatctcttgattggctttctctcccctttggttgatccagagctcgatccctccaacgcccctatgct

SEQ ID NO: 24020 - DNA, 406 bp, Glycine max
  Clone ID: LIB3106-009-Q1-K1-G3
cgaaaatttaacctccttagttggggtagggggttttgcgtttttgcaaaaatacctaatttggggaaattgggtcgacccaccggtcaccgaatgtccatcctccgaaccatggtctcgcagttggtgaagcacgagcgcatcgaaactactgttgccaaggcgaaagagatcagaagactcgcggataatatggtgcagcttggaaaggagggatcccaacatgctgcaagacaagctgctagttttgtgcgaggagatgatgtcattcacaagttgtttacagaactagcttatcggtacaaggatagagctgggggatacaccagattgctttcggacccgttttcgagtgggtgatgctgcaccgatggcctatatcgagtttattgacagagaaaatgag

SEQ ID NO: 24021 - DNA, 384 bp, Glycine max
  Clone ID: LIB3106-009-Q1-K1-G4
cccacgcgtccgtagaaacagtgtgatgaatatgaaggtccttgttttcttcgttgctacgattttggtagcatggcaatgccatgcgtacgatatgttccctctccgaatgaacactggctatggtgcccgtactccggaggtgaaatgcgcaagttggaggcttgctgtggaagcacacaacatctttggctttgagaccattcctgaagagtgcgttgaagcaacaaaggaatacatccatggcgaacaatatagatcagactccaaaacagttaaccaacaagcttacttttatgccaaagacctcgaagtccatcccaaggacacatttgtgttcagtatagatggcaccgtactctctaatattccatactaccaaaa

SEQ ID NO: 24022 - DNA, 380 bp, Glycine max
  Clone ID: LIB3106-009-Q1-K1-G5
gtccgctttaataaataatccccccttgttccatactttaaaaaaaaaaaaaaaaaaaaaaaaaaagaaaagttaaaaaaaaaagaaaaaaaaaaaaaaaaaaaaaaaaaaaaaaaaaaaaaaaaaaaaaaaaaaaaaaaaaaaaaaaaaaaaaaaaaaaaaaaaaaaaaaaaaaaaaaaaaaataaaaaaaaaaaaaaaaaggggccgccccttttaaaaaatcaaattttcctaccccttctttccaacaaaaaattttttttttggggccccaaaaataaaatcaatggccccgattttaaaaactttccaattgaaaaacccttttgtaacccaaattaaatccttttaaaaaaaatccctttttcccccgttggg

SEQ ID NO: 24023 - DNA, 369 bp, Glycine max
  Clone ID: LIB3106-009-Q1-K1-G6
gaaactgacaaaatatatggggtgggagagcttcctggtggtgcacaacatagcaaagaggcgcaacgtgggaacacttgctcgcagtgccacctcgttcggcgtatcataactcatccttgatggtcgaagagatttcaactgtttctgcagccatgggtcctgctcctacctacgatttcgacacttccactccctgcaagacgctcgcaaattcttcaaagacaaagactttgatatttgcggcgttgagatcacaaccgattctctcctcgtaaataaacacccttttactaagagcactgcatattctactcggcaacgcaggcactggtctttcttctaaggaaattgagatatgcgactttt

SEQ ID NO: 24024 - DNA, 215 bp, Glycine max
  Clone ID: LIB3106-009-Q1-K1-G7
cattgatgccatggcttagatacatgtaatatgcgtacgtttgtgggaatacgtgattggtaggtggtgcagattcgataaggtgcacgaggcacacacgggccgttctttgtcgtttggatgattactcttagtggatgaatgggagacaacaactttttatggctaactacgagctacgagcatgatgcctcctactctatggctattgatta

SEQ ID NO: 24025 - DNA, 393 bp, Glycine max
  unsure at all n locations
  Clone ID: LIB3106-009-Q1-K1-G8
tgctaagtcagcatcaatgcctaatctgacagaactagtagatggaggcttagcaggggctgactattgtctcactgggaatgaatttctgagattatgtacaggagcaatacctgggacacgtgactacgataagcagcactgtaaagaccttcatctcttgcctccacaggtagaaaatcctatctatggctggtgaatggattgactagtttgaatgtttgaaggaaaacttgtcacaccagattatgacaagcagtactgtaaagccatcatctaaatgcctttaggtagaaaaatttatggatagctggtgaatagatttagtggtttgagtntgtagtttgttttacagttgcttgtgttaaggtccctgctaaggtttcaatcctt

SEQ ID NO: 24026 - DNA, 422 bp, Glycine max
  unsure at all n locations
  Clone ID: LIB3106-009-Q1-K1-G9
attttggcatccccgtggcttcaagaagagaatctcaatggaggcccaggagctggagcgcgtgttccagatgttcgaccgcaacggcgacgggagaataacgaagaaggagctgaacgactcgctggagaacctgggcatcttcatctctgacaaggacctgagccaaatgatccagaggatcgacgtcaacggcgacggttgcgtggacatggacgagtttggggagctgtatcagaccataatggacgagcgcgacaatgaggaggacatgagggaggccttcaacgtcttcgaccagaaccgccgacggcttcatcaccgtcgacgagttgaggaccgtcttgtcctccctcggcttgaagcanggaagaaccgttcaagactgcaaggccatgatcttcaaggtcgatngtgatgga

SEQ ID NO: 24027 - DNA, 86 bp, Glycine max
  unsure at all n locations
  Clone ID: LIB3106-009-Q1-K1-H1
ctggacatcaatacaatatgcanacgcacgtatctttctatgcaatanatttgtttactaatgtnnggaaaaaaaaaagggagggg

SEQ ID NO: 24028 - DNA, 363 bp, Glycine max
  Clone ID: LIB3106-009-Q1-K1-H10
gcagctttgaacgacgcagaaggttcatccaatctccgaatcctttaatcgcatggcaacgatgtctaggagaaaggtcagagagccaaaggaggaaaacgtgactcttggcccagctgttagagatggcgaacatgtctttggcgtcgctcgcatatttgcctcctttaatgataccttcattcatgtcactgatctgtctgggagggaaacgcttgtccgcatcactggtggaatgaaggttaaggctgacagagatgaatcatctccttatgctgctatgcttgcagctcaagatgttgctgccagatgcaaggaacttggcattactgctcttcatatcaagctccgtgccacgggtgg

SEQ ID NO: 24029 - DNA, 309 bp, Glycine max
  Clone ID: LIB3106-009-Q1-K1-H11
cggtgaaattgtttctggccctttcttggatgtcattctcaaggatatagctttgcttaatgacctaggaatccgctttgttcttgttccggggacacatgtgcagatagacaagcttctgaatgagagagggtgccagcctatgtatgttggtagatataggataactgatgatgaatctggaagctgccatggaagcagctgggggcataagattgatgatagaagcaaaactttctcctggaccttccatatgcaacattcgccgtcatggtgacaatagtcgatggcacgaagttggtgtcagtg

SEQ ID NO: 24030 - DNA, 340 bp, Glycine max
  Clone ID: LIB3106-009-Q1-K1-H12
gaggcgtacgaccacccattctgcccacaacggtgtgcctttgggacaaacaaagagtatctggcgatttggcatcttgcctacgaattcgcaagcatcactctcttaacctcgttactctgcgatcagggttgcaatcggagaccctgaccctatgactgaggactacaactctgcgttctcagtgtttgcagcggaagcatgcgaaactgttggaggggaagcctgcatggcagaaatgtaccctgaagtgaagctacagccagaagctaagacaccacgagttgttacagagaacgttgagagagagtatcctggattccaataatcctaaaccggt

SEQ ID NO: 24031 - DNA, 429 bp, Glycine max
  Clone ID: LIB3106-009-Q1-K1-H3
cttcggtctttttttctttttctcaaccccccttggtttttctattatttggggcctctgggtcttggcgatctgaatccaccggtccaaaatgttcggggcttgtgctgcttgttttcccaggttttagagctccaaaccttcagatccacctcattcgtctccagatcttccttccttgataacgttttcgggttcgagaaggcacttgtttgtttgtcgtacgaaatggagactaaaccgagttcggtgatggttacgctcagttacggcgcgttgacgtgcgccgcggaagttctcgcgactttgctagcttctgctgtcgtcaaagcccacgcttttggccccggatctctaccggctgctattgaccaacacgcctacaaccaaaagagagagaaaaactcagagtcaagacagcaacgtgat

SEQ ID NO: 24032 - DNA, 374 bp, Glycine max
  Clone ID: LIB3106-009-Q1-K1-H4
cgcttgtgctgccttcgtttgcgtttttatcacagaggaattaacatatatatagcaagcgtggcagtcacactctacgaccttagctcttcctctgggttgaagaaacttgatgagtaccttctcccacgcagttacatcaccgggtaccaagctacaaaggatgatcttactgtttatgcagctttgccaactgctccatcagatgaatatggaaatgtttccaggtggtacaagcacattgatgctttgttgataatctctggtgttactggcgagggatctggtgttattgttgagggatctctagttgcaaagccttgtgcaacctcccctgctgcagaggaaacggccgcttcaagtgaagccttttc

SEQ ID NO: 24033 - DNA, 366 bp, Glycine max
  unsure at all n locations
  Clone ID: LIB3106-009-Q1-K1-H5
annnnnnnntnnnattanncataaggttcatccatatctccgaatcctttaatcatatggcatcgttgaccgggggtgtgtccaacgatcacaacaacatcgtcatcccatggcaaacgccgcatctggtatggcagtccatgatgactgcaagttaaggtttttggagctgaagacaaagaggacacaccgtttcatagtttttaagattgaggagcagcagaagcaggtcattgtggagaagcttggtgagccagcccaaggctatgaagatttcactgccagccttcctgctgatgagtgccgntatgctgtttaatgatttgagtatctgactgaaggaaatccccaaaaacaaaaattttt

SEQ ID NO: 24034 - DNA, 285 bp, Glycine max
  Clone ID: LIB3106-009-Q1-K1-H6
atacgcggtgcaattttttctccaaccttttgcctttttcatacacaaagatataaccttgccttaggtacctttaaaatgcgggtgctgccatacctgacttaacagtgagaaatggcagctccttgaggctgaggagaccccatgctcatgttacatcatacaaaccaaaagctaattggaaagatgatggatttcaggaggttctttacacaattcctgcaactgaaactggcccttacaaggccaaaggtggtgttggattggtcatgaatgaagtgctgc

SEQ ID NO: 24035 - DNA, 335 bp, Glycine max
  Clone ID: LIB3106-009-Q1-K1-H7
gctcaattgcctgaattgctataatttctagacatcactcgatcgacgtctccccggtgacgccaattggctcgggggctcctctacccccaccataaccactcatctcgataataccatcgacattaccttactatttatgagcctcctatctgaaaaccctctcacgcttgacaattccacaatgatcaccacgagcttaccactgcatattgacctgactgcctcactgtgctcgaatatcgaactctacgatacgaacgctgcctcatgagcttcaattacaactcgctaccctattcaattaccgatcgttcaaacatatttcaatacag

SEQ ID NO: 24036 - DNA, 388 bp, Glycine max
  unsure at all n locations
  Clone ID: LIB3106-009-Q1-K1-G12
cccacgcgtccgcccacgcgtccgcccacgcgtccgctcaagcattgcatccctgttgatgtgtagtttgttttgtgctttagataaaagttctgccaaatcaagaggggttttaagatcatagtgtgtgttttgcaacaatggctaagttctttgctgctatgatcttggcactctttgccatttccatacttcaaacagtggtaatggctgctaatgaacaaggaggccacttgtatgacaacaagagcaaatatggaagtggaagtgtcaagagttaccaatgcccatcacaatgctcgaggagatgtagccagacccaataccacaagccctgcatgtttttctgtcagaagtgctgcanganatgcctgtgtgtgcccccggg

SEQ ID NO: 24037 - DNA, 429 bp, Glycine max
  Clone ID: LIB3106-009-Q1-K1-E8
cccacgcgtccgcccacgcgtccgaaatcttatactcctctcttgtctgtgtaatcgaaacgacaacattcattcatactcacttccttgcctactacacattcttcatcacttcattcaacatttctccccttagcttgtttcaccaatggctgctgcggttagtgctgcagtctcttttccatccaccaagtctacctctcttccaagcaggacctccctcattgccccagagagagttgtgttcaagaaggcttcattgcaaaacagagatgtttctagcagtggacgggtagtttccatcagagctcaagtcaccactgaggcaccagccaaggttgaaaaagagtccaagaaacaggatgaaagtgtggttgtgaacaagtttaaacccaagaccccttacattgttagatgcctgctcaacac

SEQ ID NO: 24038 - DNA, 459 bp, Glycine max
  Clone ID: LIB3106-009-Q1-K1-E9
cccacgcgtccggttggttgaagcttccgctaccctcatatggattgcttcagctggtcagtgctgctgttaactttggacagtatccatatggaggtttaatcctgaataggccaactattagcaggagattcatgcctgagaaagggtctcctgaatatgatgcgttagctaagaaccctgagaaggagtttttgaagactattactggcaagaaagagaccctcattgaccttacaattatagaaattttatcaaggcacgcatctgatgagttctaccttgggcagagagatggcggtgactactggacttctgatgccgggccattagaggcctttaagaggtttggaaagaatcttgaagagattgaaaagaagcttatagagaagaacaataatgagacattgagaaaccgctatgggccggctaaaatgccttacactttgctctatcctt

SEQ ID NO: 24039 - DNA, 426 bp, Glycine max
  unsure at all n locations
  Clone ID: LIB3106-009-Q1-K1-F1
ctttctccaccatgtgcatgcttcaactctaatctctatctgtcacaccatttcccttctacgccacggacttatccctctccccccatgttcagttgttcctcctattttcttcaatttaaaaacaaaagaaaaaaaattgaccagatcacagtcctataactagtctccaagatcacttcaccagttaggaactctgtaaggggcaaactcgtcactcgcccacaaaacttgaatcaacaacagtactataaataccagcattgtcagaatcccaaactccaatgcaagtagccacacacccctcccaccgatttatttaacttcacacacagacacggtgtttccaccacaccatagcatatagtactagtagattaaacgccaaagaaataaattactcactttcacgtanaccataacgtg

SEQ ID NO: 24040 - DNA, 319 bp, Glycine max
  unsure at all n locations
  Clone ID: LIB3106-009-Q1-K1-F10
acgcgnntccgctttnntttctccttcacatttnnctccattctcacaactatcaagggnttcnntgatctatgtcggggaaggaggctcccggcctaatgattcggaanagttgtctggnnagttgttggtctttcgagaggctcgcnnacggtggcactcttttggacactctactggaagctctctaagaggcctcattagacattgannagatgatgcctaatctaccaagaggccttttaaaaaattattgaatctttggtgnngcgttggtnncttggaatnntgtggtggctttcttgtataaatctcaata

SEQ ID NO: 24041 - DNA, 400 bp, Glycine max
  unsure at all n locations
  Clone ID: LIB3106-009-Q1-K1-F11
tcttaatacatatcactttcttcaccgttcgctctttctttctcccctacacagggcatggctttgcccaatcagcaaaccgtcnattaccccagcttcaagcttgtcatcgtcggcgacggtggcacaggaaagacaaccttcgtgaagaggcatctcactggtgaattcgagaagaaatatgaaccgaccattggtgtggaggttcatccgttggattttttcacgaactgtggaaagattcgcttctattgttgggatactgctgggcaagagaagtttggtggcctcagagatggatattatatccatgggcaatgtgcgattatcatgtttgatgttactgcccgtctaacatacaaaaatgtccctacctggcaccgtgatctttgccgggtct

SEQ ID NO: 24042 - DNA, 424 bp, Glycine max
  Clone ID: LIB3106-009-Q1-K1-F12
ccttaaactgcgcactccaccccactccctccccgccatccgcgccatcaccctcgcccaggacgacctcaagagactcgccgccgacaaggccgtggagtccgtcaagagcggcatggtcctcggcctaggcaccggctccactgctgccttcgtcgtcgccaagcttggcgcccttctcgcctccggccaactctccgacatcgtcggtgtccccacctccaaacgcacggaggagcaggcccgctccctcggcatccccctctccgtcctcgacgacaacccccgcctcgatctcgccatcgacggcgccgacgaggtcgaccccgacctcaacctcgtcaaaggccgcggcggcgccctcctccgcgagaagatggtcgaggcccgcctccgacaagttcgtcgtggtcgtcgacgacac

SEQ ID NO: 24043 - DNA, 279 bp, Glycine max
  unsure at all n locations
  Clone ID: LIB3106-009-Q1-K1-F2
gttgagagcagaatccaccgacttgctcgctattacaggaggactaagaagctcccaccaggctggaagtacgaatcaacaactgctagcactctggttgcttagagaatgtatcaactttcatgggttttgctaccgtgcagtcgccgttgagctagcaatttgcgatatcattttgatgtttatttgaaggctggataggttatgtggcttaattttgttaagaacctatggtttgactgggaaagataatttaactagttaagtcaatttatcana

SEQ ID NO: 24044 - DNA, 362 bp, Glycine max
  Clone ID: LIB3106-009-Q1-K1-F4
gcaatggcttctctggcaagcttagctgttgttcaaccatctactgtcaagggccttgctggaactaagctctctttcaagccctctcgccagagcttcagacccaagaatttcaggagtggtgccgttgtagcaaagtacggtgacaagagtgtgtactttgatttggaggatctaggcaacactactggtcagtgggacttgtacggctccgatgcaccttcaccctacaaccctcttcagagcaagttcttcgagacattcgccgctccattcacaaagaggggattgttactaaagtttttgatcctgggaggtggttccaccctggcatacttgagtgccacagcgtcaggtgacat

SEQ ID NO: 24045 - DNA, 344 bp, Glycine max
  Clone ID: LIB3106-009-Q1-K1-F5
cccacgcgtccgcaatcacttattaacctagaaattgttatccgtttgtttccgatgcaagaaatgttacacagcaacacattcatcattcacctcctttcgtgacaaatcgctcttaccgattaacaaaatctcgtgtaccagagtcaccaccgacatgggttcgggttcggtccactggaacgtattcgacggcgtgaagataatcacggcgacgccggaggcgctcatggcggagatcgactccgcgatctcgaatctggaatactcacgtgccaccgctctcctggaggccgacgagggatacgacgcgcacatggccgacgaagcctacaaggcgggct

SEQ ID NO: 24046 - DNA, 390 bp, Glycine max
  Clone ID: LIB3106-009-Q1-K1-F6
ggggactccaagaaatacgaggggtcctcggagttcgtgaagctgaggtaccacatgggggcggtcctgactaccaacatcaccgtccacaccatctggtacggcaagtggcagcggagccagaagaagatcatccgcgagttcataaattcaatctccgccgcgaactcgccgcacccctccgtggccggatggtggcgcaccgtgcagctctacacggaccaaaccggcgccaacatttcaaaatcggttcgactcggcgaggagaagaacgaccggttctattcccacggcaaatcactgacccggttatcaatacagtctgtgataaagagcgccatcacaggcaaaacgagacccttgccgatcaaccctagaagcggttatacc

SEQ ID NO: 24047 - DNA, 437 bp, Glycine max
  unsure at all n locations
  Clone ID: LIB3106-009-Q1-K1-F7
ctctctctttctctttctcactctcctctgatatttctatattttggtgctctgtggctcgacgatctggatccaacggtccaaaatgttcggggcttgtgctgcttgttttcccaggttttagagctccaaaccttcagatccacctcattcgtctccagatcttccttccttgataacgttttcgggttcgagaaggcacttgtttgtttgtcgtacgaaatggagactaaaccgagttcggtgatggttacgctcagttacggcgcgttgacgtgcgccgcggaagttctcgcgactttgctagcttctgctgtcgtcaaagccacgcttttggccccggatctctaccggctgctattgaccaacacgcctacaaccaaaggagagagaaaaactcagagtcaagacaagcaacgtgatgcanagggcgaaga

SEQ ID NO: 24048 - DNA, 405 bp, Glycine max
  unsure at all n locations
  Clone ID: LIB3106-009-Q1-K1-F8
ctttactctctctttcccctaattccgaccatggaagccacggcctccgcaatgagcttcggccttccctcaacaaaagcccaagcccaagcccaactcctgacccggcccaccaatccattcaccattcccnttcgcagcccagcccaccgccccccgccgcgcctccccaccatccgcgccgcaattccccgcacaaagaaagaggcaacggtggagactgtgcgggagcagctcgagaactgttacctcctcgccggcatcaactacaagggcttcacggtgaagcagttccaggagcttcgaaagacgctcccagaaacaacgaaactgatcgtggcgaagaacacgctcgtttacaaggccgtggaaagcacgccctgggaaacgctgaagccctgcatg

SEQ ID NO: 24049 - DNA, 457 bp, Glycine max
  unsure at all n locations
  Clone ID: LIB3106-009-Q1-K1-F9
tgaagctactgcgaacgctacgaacttagaaatggagagcaatttgaagaaatgacgttaaatctttgagtactgacccccaatcgaattgtttgggattcggaagtgaaggacatcattatatctactaatagcggacaaattggagtattaccaaatcatgcgcctattgccacagccgtagatataggtattttgagaatacgtcttcttaaagaccaatggttaacgatggctctgatgggcggttttgctagaataaacaataatgagatcactgttttagtaaatgatgcggaaaagggtagtgacattgatccacaagaagcacagcanactcttgaaatagcagaagctaatttgaataangcggaaggcaagagacaaacaattgaggcaaatctagctcttagacgagctaggacacgagtagaggctatcaatgtgatttcataac

SEQ ID NO: 24050 - DNA, 285 bp, Glycine max
  Clone ID: LIB3106-009-Q1-K1-G1
gaaaggcaaagcaaaattgtacgttgttgtatcgtaagatgtccattgtatgatatttgggctagtgaagtttgacattttgtatttttagtaactgtcatatagatataattgaacacatggaaatatcgggggaaggaaaaagaactacacttaagtacaaacagaaacatggtatactatcggtgtaacattcgagttatttcattgtgcaattcaagatgacattcatttgtattttgttgaatgtaaatacttttcttcaataaaaggaattcatgctat

SEQ ID NO: 24051 - DNA, 378 bp, Glycine max
  Clone ID: LIB3106-009-Q1-K1-G10
taaaaaaaaaaaaaaaaaaaaaaaaataatatttaaaaaaaaaaaaaaaaaaaaactggaaaggttataaaaaattggtagccacaaaacaacaatcttatatatactataataatatctctacaatctttttataaaaccttttcttttatattctattacatggtccttttcttttttattcttatttatttacttttctttttacaatttttttttcttttttttgtttttcattatttttttattcctttatttttttttcttctacttttatttattacattattcttatctttcaacattcttttatctttatctcctaatctcttctttttctcttttatgttttttatctattatattttttctaccttt

SEQ ID NO: 24052 - DNA, 362 bp, Glycine max
  Clone ID: LIB3106-009-Q1-K1-G11
ctcccccaaatcgtagatctacggttaaattggtgtagtgtggtaagatgggagggggatttagagtgcttcacttagttaggccatttctctcgtttcttcctgaagttcaaactgctgacaggaaagtgccatttagagagaaggtcatatacactgtgatctctcttttcattttcctggtttgtagtcagctccctctatatgggatacactcaacaacaggtgctgatccattctattggatgcgtgttattctcgcttcaaaccgtggaactgtcatggaacttggaatcacctccaattgtgacttctgggctagtaatgcaacttctggctgggtcaaagatcattgaaatgac

SEQ ID NO: 24053 - DNA, 264 bp, Glycine max
  Clone ID: LIB3106-009-Q1-K1-E7
cccacgcgtccgctaaatttttggtgtcatccgtaattgctgatgataacggatttgacagcaataatctcagaaagatactaaaatatcagccttttgtactaaaaaaaaaaaaaaaaaaaaaaaaaaaaaaaaaaaaaaaaaaaaaaaggaaaaaaaaataaaatagacgagcaagcaaacaaaaaccttggctaatagggacactctaaattaaatgcactgaacttaaatttacaacctctgcgactgggaaaactcttg

SEQ ID NO: 24054 - DNA, 392 bp, Glycine max
  Clone ID: LIB3106-009-Q1-K1-D10
cccacgcgtccgcccacgcgtccgcccacgcgtccggcgagctgaagaaacactatgagccaagaaaaagtcaccgcattgtatcagtgaacctagagggtactaaggttcccttatatggggctggatccaccataactgtatcccaaactggtgttgaagttccactcacattgaactttgaaatccgttcgcgtggaaatgtagtgggtaaactggtcaagacaaggcatcgtaaggaaatcacttgccccttggtcctcaactcttctcgatcaaagcctatcaaattcaaaaagaattcatgcacctatgattgatcagtgatcaatgtccattttcatagcttatctgttttgagagtgtaagctaaaattgtataatctgtgttt

SEQ ID NO: 24055 - DNA, 387 bp, Glycine max
  Clone ID: LIB3106-009-Q1-K1-D11
cccactcatccacccactcgtccgttcacgtcttcggcgagctgaagaaacacgagcagcgtagaaatagtcacgggagttgtatcaatgaacctagagggtactaatgttcccttatatggtgctggatccaccataactgtatcccaaactggtgtcgaagttccactcacattgaactttgaaatcccttcgcgtggaaatgtattgcttaaactggacaagacaaggcatcgtaaggaaatcacttgccccttggtcctcaactctactacatcaaagcctatcatattcaaaaagaatgcatgcacctatgattgatcagtgatcaatgtccattttcataacttatcttgttttgagagtgtagcttaaaaaatagtttaa

SEQ ID NO: 24056 - DNA, 452 bp, Glycine max
  unsure at all n locations
  Clone ID: LIB3106-009-Q1-K1-D12
cccacgcgtccggcagaatggcttctactcaatgtttcttgcaccaccatgctctgaccacccctgccagatccccatcacaacgcatcatggttagcaccaagcctaaccagcttgtttgcaaggcacagaagcaagaggatattgatgtcagcccaatctctcgccggttagctctaaccgtgctcattggtgctgctgctgttggctccaaagtccaacctgctgatgcagcttatggggaagctgccaatgtgtttggaaagccaaagacagacacagatttcctgccatacaatggagatggattcaaactatcgattccctcaaagtggaacccaagcaaagaggttgagtacacaggtcaggttgttagatatgaggataactntgattcaaccaccaacgtggttgtcaccatcactccgactgataagaagtctatcactgac

SEQ ID NO: 24057 - DNA, 457 bp, Glycine max
  unsure at all n locations
  Clone ID: LIB3106-009-Q1-K1-D2
ggtgaatgaagatttactttgggatgaagatactaaaatccaaaatgcaagcctgggttgggggtgaagttagttgtgtcttcaaccaacacctgaatttacattctaattttcatccacttgtttgttgttttagtccaaccattttcatctgcttaagtagactgacatcccaatgggcctgttgaaaacaaatttgtggatataacaaatgcagttctgggctttttctgcgaccctctggcatccgatttagtcagtcatcatctatccttggattgcaattaatttatgtatttttacagttgtgtatcacatgatctaggccttgtatcttggcaatatatcangaatgaaactcacgtcatttttattttactgttcagtgacattgctttgtgtttttcttttctttaaaaacactgtgcacatgactgattaatggaatataattctt

SEQ ID NO: 24058 - DNA, 462 bp, Glycine max
  unsure at all n locations
  Clone ID: LIB3106-009-Q1-K1-D3
atttgattaacccgtcaacccattcgaacccatccgtttggacatcttcttgaccgggtggaaaggactgcacaccgcgcatccnctttcttcacttcttcatgcttcgactcttctgcgccttacctccgccgtcgtctgagtcgcgccgccgtgacgccgattggcttcgccggatttctcctatgttcgcctgacgagacagagtgaatcctgaatcgcacttcgaacgtgttctcttcgacatcttcacttaagccttcgatttgtcagataagatgcttccgagggcattattggccaaattcgttctcaaaccctccactgttgtttctccattccagttcaatcagcagagagcattgcatagtaggaacaagaaagccttggagttcattgcaaaaggctggaatgctttgaaggagggttgatagagtcatcgattattccgatcccaagcat

SEQ ID NO: 24059 - DNA, 353 bp, Glycine max
  Clone ID: LIB3106-009-Q1-K1-D4
gaagcagcaaagggaggagcggcattaaaaatgcagatcttcgtgaaaaccctaacgggggagaccataaccctcgaggtcgaaagcagcgacaccattgacaatgtcaaggctaagattcaagacaaggaaggcatccctccggatcagcagcgtttgattttcgccggaaagcaacttgaagatggaaggaccttggccgattacaacatccagaaggaatcaacccttcaccttgtcctcaggcttcgtggtggcatcatcgagccttccctcatggctttggctcgcaaatacaaccaggacaagatgatttgccgcaaatgctatgctcgtctgcacccctaaggctg

SEQ ID NO: 24060 - DNA, 458 bp, Glycine max
  Clone ID: LIB3106-009-Q1-K1-D8
cccacgcgtccgcccacgcgtccgggtgaaactgctattgttggaaacagagttggagtggggcatggtgtaacattaggaggcacggggaaggaaataggtgatcgccatcccaaagtaggtgaaggggcactaattcgagctagtgcaactatacttggaaatataaagattggtgaaggtgccatgattgctgcgggttccctggtgttaaaagatgtccctcctcactgcattgcggcaggaataccagctaaagtcattagtggtctacaggagcatgacccatctttaaccatgaagcatgatgctactaaagattttttcacacatgtagctactaacttcagagatgaaaaacccaatggagcgcagcatccagatagaaatggaatgaacatttgagaggttcggcaacgtagtctcgtttggcatgcattgtcctcaaaggagcatga

SEQ ID NO: 24061 - DNA, 449 bp, Glycine max
  Clone ID: LIB3106-009-Q1-K1-D9
catcatcattaaacatgggtggcagtgttagcaagagtaggaggatgagttctgagaaatatgtgatgaatttgaaggagaaagtgaggctcttgcaagaggagataaaggagatgatgtatgagagggagaaggagacaaggagatatgagagggacataatggtgttcactttcaaggaggcagattcgaagcaagaggggaagaggctgagagaggaagtgaagcaattgaggagtttggtggaagagaaagatgagaagataagagagattgaggttggaatgatggagaagaacagtgagaaagagtgggaattgatgggaactaagctcttggttgagcagatgaaggaggagagagcaaggagagatgaagctgtggagaagtggaagcaactttatcttgcaattaagactgagctagatggactcattcaaagaacatat

SEQ ID NO: 24062 - DNA, 429 bp, Glycine max
  Clone ID: LIB3106-009-Q1-K1-E1
cccacgcgtccggtttgaactatgacagtaggggatgggtaaacgacatggacgtggtggatagtccgggggtatggaggttcaagtgatttggcatctggtgatggttatggaagctatggaaattcacagcttggtagcagtggtggtgcttatggaaattattctttgggacgaactagtgcctatgggtcttctcagaatggttcttctcggaggagaaaccatgcttactaaaacttgatgggtccctgcagctgagttctatgaagcctgaagcccactgcctaaactggaagaccagatcaaccaggttttgacaaactcatggcccaccttgacacctctacctaggggaccaaacatgtggagactattgatattggccatgtccattttaccttatttcacaagcttgataactaatgc

SEQ ID NO: 24063 - DNA, 363 bp, Glycine max
  Clone ID: LIB3106-009-Q1-K1-E11
gaaaaaaaagaagccatagttaactactaactaaagtctaaagatagaaatataactccatcaacctcagcaagagggagagaaagaagaagaagaatgagcagttttcagtttcacttgagagttttgagtttgctgatttcagtttcatacttgctgacgtgtttggggaacaatgacatacctgtccagttgaatgatgatgttcttggcctaattgtgttcaaatcagaccttgatgacccttcttcttatcttgcttcatggaatgaagatgatgccaatccatgttcatggcagttcgtgcagtgcaatcctgagagtggaagagtttctgaggtctcattggatggcttaggacta

SEQ ID NO: 24064 - DNA, 368 bp, Glycine max
  Clone ID: LIB3106-009-Q1-K1-E12
ggaccgaacctacaagctcggactgaaccggttcgcggatctcaccaacgaggaggacagggccaagtacttgggaaccaagatcgatcccaaccggaggctcggcaagaccccgagcaaccgatacgcgccacgtgtcggcgacaaactacctgaatcggttgattggaggaaggaaggtgctgttcctccagtcaaagaccaaggaggctgtgggagctgttgggcattctcagcaatcggtgcagtggaaggaataaataagatagtgacaggtgaactgatttcgttatcagaacaagaattggtggattgtgatacaggatataacgaaggatgcaatggaggacttatggactattcatttg

SEQ ID NO: 24065 - DNA, 401 bp, Glycine max
  Clone ID: LIB3106-009-Q1-K1-E2
gtgagatacacaataattaagtagccaggcttaattgtttaacttaaaaaccatttctgctgcatatggtgtccatttgggaatggtcccactaaaattctattcatctatggctgcctcatcttatgctatgcaatcaatccttgcaaaccctatgatccgcatttccagcgggtctagggagaaccattttggtgttcctgcttatcacatgagaaggaatgttggcctgagagttaggtccatggctgaggaagagcaaccaagtcagcctgcgaccccagttacaccaccaccagcagaacccaaaccacagccagtctctacttctttaccaaaggtgagcaccaagttttctgatgtgttggcgttcagtgggccagcacctgagaggatcaatg

SEQ ID NO: 24066 - DNA, 410 bp, Glycine max
  unsure at all n locations
  Clone ID: LIB3106-009-Q1-K1-E3
gcgcccacgcgtccaattggatcaaggctggggggtggggcccttcggaaggtgcaattccttggccaggctgtgctgctccaattggtgtaaaaactttctcttttcagttttaaacttctccctacactcgtccaaagcctctagttcctattccacgtggcaaaagtagagactctgattctgagccgcttctagaatcttccatcgtgcaagaagtttcattcgacgacgacgacgaagaagaattccttgacgaatttgaatacgatgaagcagcggatggcgatgaatactatgaaggaagaagaggaatacgaagaggaggctggtgtgcccttatgcaggtgatggcggcgcangtggcggaatctccctcgccggaacttggtgggataaaaaagcactag

SEQ ID NO: 24067 - DNA, 335 bp, Glycine max
  Clone ID: LIB3106-009-Q1-K1-E4
atcgatcttaaggctgggggtaggaccaaaaagaccaaaagaacagcaccaaagtccaatggcatgtacctcaaattacttgtcaagctttatcgattccttgttcgaaggacagacagcaatttcaatgctgtgatactcaagcgcttgttcatgagcaaggttaacaagcctccaatttctttgtcaaggttaattaagtatacgaaggggaaggaggataaaattgctgtagtagtggggactgtaactgatgatatcagagtatatgaagttccagcattgaaaattaccagcactcaagtttacagagagagcacgtgcaagaataaaaa

SEQ ID NO: 24068 - DNA, 69 bp, Glycine max
  Clone ID: LIB3106-009-Q1-K1-E5
caaattttaagaaataaccggtgaaaaaaatataattaaaaaaaaaaaaaaaaaaaaaaagagaaaggg

SEQ ID NO: 24069 - DNA, 381 bp, Glycine max
  Clone ID: LIB3106-009-Q1-K1-E6
cccacgcgtccgtagaaacagtgtgatgaaaatgaaggtccttgttttcttcgttgctacgagttttggtagcatggcaatgccatgcgtacgatatgttccctctccgaatgaacactggctatggtgcccgtactccggaggtgaaatgcgcaagttggaggcttgctgtggaagcacacaacatctttggctttgagaccattcctgaagagtgcgttgaagcaacaaaggaatacatccatggcgaacaatatagatcagactccaaaacagttaaccaacaagcttacttttatgccagagacctcgaagtccatcccaaggacacatttgtgttcagtatagatggcaccggactcttttaatattccatactac

SEQ ID NO: 24070 - DNA, 263 bp, Glycine max
  unsure at all n locations
  Clone ID: LIB3106-009-Q1-K1-B3
gcgatcatattctttaccctcttggtcttgggtcttgttcgcttcgcagttaccaaagctcaacgacctgtctatatcctctctntgctctttgggactctaccatcatctggacattttgttccttggtgtgccgctgtaagaattgacatgtaaaacaactagaaacattcgacatctttatctttttgctcgttagattaaccgtacccaagtttttatttatttgaattgcacaagtctgaataatgttacaattttat

SEQ ID NO: 24071 - DNA, 281 bp, Glycine max
  Clone ID: LIB3106-009-Q1-K1-B4
aacccccccttttcaagccagtttttctccataaaccctagattcaacgaacccgccgaccaagctcgaacctcacgtcgcaaaaaaacacttcttttcccctctccgaggttgtcgtgtcggagcatagccatgttgttccctcgaggaaattgatgatttttcataacattggggtctcgttttgcttgtggggtcaccttgaaggagggaaaagtaacgagctttggggctgaatcgtggtgggtctgttgagtatgcatagatctggagctacgatg

SEQ ID NO: 24072 - DNA, 386 bp, Glycine max
  Clone ID: LIB3106-009-Q1-K1-B5
gaccctttcatctcacactcgccaaagcagagggaaacctcgattcagattcaccctcaagcgccacttcttctccttctccttctccttttgccactgaccaaacggttttcgtgactggcaaggatgttccattggagggtgtcatccagttcgagaaaccagcctcttctcctccttttgaaaaatgggggcgtgtggctctgctagctggtgcggatgtgttggccttgtttgtgttttcgacaattggaagatatagtcatggactttctgttttggaccttgagacactgcgcactgctgacccttttattgcggggtggtttttgggtgcttacttccttggaggttttggggaggatggccgcgggatgaacggtctc

SEQ ID NO: 24073 - DNA, 455 bp, Glycine max
  Clone ID: LIB3106-009-Q1-K1-B6
atatgatcctgttgtaaaagctcttgcaaatgatcttgatatacgcttgaaccacagggtgaccaaaatatccgatggttacaacatggtaatggtcacagttgaggatggcagaaactttgttgctgatgctgttattgtaactgtccctattggaatccttaaggccaatttaattgaattttcaccaaaactgcctcattggaaggctgaagcaattaaagatattggtatgggaaatgaaaataagattgccctaagatttgatgcagtgttttggcctaatgtagaagttctgggcatagttgcacccacctcttatgcctgtggttattttctcaatctccacaaggcaacaggccatccaattcttgtgtatatggcagcttgcaagtttgcctatgaccttgaaaagctgtctgatgaatcagctgcaaattttgcaatgcaacagc

SEQ ID NO: 24074 - DNA, 151 bp, Glycine max
  Clone ID: LIB3106-009-Q1-K1-B7
cccacgcgtccgcccacgcgtccgttggaaatggctatgcccctgttcttgactgccacacttcccacattgctgtcaagtttgctgaactcatgaccaagattgacaggcgatctggcaaagagcttgagaaggaacccaagttttggag

SEQ ID NO: 24075 - DNA, 493 bp, Glycine max
  unsure at all n locations
  Clone ID: LIB3106-009-Q1-K1-B8
cgnttccggaaaaacctagtgaaaacccanntaacacaatnatcctctacgtacctnnctccataacccttccatcgtgtcgcgcgagatcactnnnactttcaaccagccgtgcactcggcacctcgatcaaccgcctcttacgacaacctcgtgaaggggcgaagacactttggacccatctgannatcattggtatttaaaatgnngtttcgtttgggaaatgaaaatgatcggaaagaaagatttggattaagggcttaacgggattntggtatttatttttctcaattccttggggccttaatctnntcttcttttgacccaagggatttgcnntagcaatggggaanaatatacctnnctttgtnnttctggaagggtatcccttgacncaattgngnnactgaaatcncnnactatgcannattcttcaatgannaacgtagtannatttcaaaggggaacccaatnnttcatttgnnngtattgg

SEQ ID NO: 24076 - DNA, 424 bp, Glycine max
  Clone ID: LIB3106-009-Q1-K1-B9
cccacgcgtccgcagatctgctccttccgttccccctcagaaatcagttgaagagcatgggtcgtggagttagcagtggtggtggtcaaagttcattgggttatctttttggcagtggagaggcccctgccccaaaaccagcaacaaataatgccccagcccaacctgaagtgcaggctgtaaataatgtgcctcctccaaaagcatctcctcctactaaaacaatagaccctaacaaggctgctggtatcaacagtcattctactgatggccagaacaccggcaacttcatcacggaccgaccctcaaccaaggtccatgctgcccctggtggtggttcttccctaggttatctctttggtgaacctggggaggggaaatgatacctttgttgcaaagcttttgctcgatgatgaatgattta

SEQ ID NO: 24077 - DNA, 421 bp, Glycine max
  Clone ID: LIB3106-009-Q1-K1-C1
cccacgcgtccgcccacgcgtccgcccacgcgttcggaaaacaatggctgttgccaacaatgtgctttgcattgctttcattatcactttaacgtgggcagttgaagctcgaattccggggatttactctggtggtgcatggcaaagtgctcacgccaccttctacggaggatccgacgcttccggcaccatggggggagcgtgtgggtatgggaacctgtacagccaggggtacggtgtgaacacggcggcattgagcacggcactcttcaacagcgggcttagctgcggtgcgtgttttgagataaagtgcgcaaacgacaggcagtggtgccactccggcagtccttccatcttcatcaccgccaccaacttttgccctcccaacttcgctcttcctaacgacaatggcggctggtgc

SEQ ID NO: 24078 - DNA, 405 bp, Glycine max
  Clone ID: LIB3106-009-Q1-K1-C10
ctttgataagagaattgttgattggctggcttctaacttcaagagggatgaaggcgtggagcttttgaaagataaacaagctcttcagcgtctcactgaaacagccgagaaagcaaagatggagctctcaacattgactcaaactaacatcagattgccattcataactgccacggcagatggacccaaacatattgagaccaccatcacatgggctaaatttgaggaattgtgtttagatctttttgacaggctcatgacaccaattgtaaattcattgacggatgcgaaactctcgtttaaggatcttgacgaaatcatacttggtggtggatcaacacgtattcagcttttcaggagctttgaaagaagttgactggcaaggacccaaatgtcactgtcaat

SEQ ID NO: 24079 - DNA, 349 bp, Glycine max
  Clone ID: LIB3106-009-Q1-K1-C11
gggaatttagaatgcttagaataaatgaatgaataaagttgagttccctctaacagttatgttagagtttagttgagttatcatgaataatcatcagtgacactgtaggagcatggatcctctatgtgagttttgtcgggtggtgagagctgtggtttactgtaagtcagattctgctcgtctctgcttgcattgcgatggctgtgtacactctgcaaattctttgtctcgcaggcattcgcgttccctcctatgcgataagtgcaattcccagccggcaatgatccgctgcatgaatcataagttgtcattatgtcaaggttgtgactggaatccaaatgactgttct

SEQ ID NO: 24080 - DNA, 463 bp, Glycine max
  unsure at all n locations
  Clone ID: LIB3106-009-Q1-K1-C12
atccactccaggtgggccatgctcggagccttgggctgcgtcttcccggagttggtgtccggcaacggggtgaagttcggagaagccgtgtggttcaaggccgggtcccagatcttcagcgagggtgggctcgactacttgggcaacccaagcctgatccacgcccagagcatcctcgccatctgggccacacaagttatcctaatgggtgccgttgaaggttaccgtattgctggtggccccctcggtgaggtcactgacccaatctacccaggtggcagcttcgacccattgggccttgctgatgacccagaggcttttgctgagcttaaggtgaaggaactcaagaacggacgattggccatgttctctatgnttggcttctttgttcaggccattgtcaccgganagggtccattggaggaacttngccgatcaccttgctgaccctgtcaacaacaac

SEQ ID NO: 24081 - DNA, 404 bp, Glycine max
  unsure at all n locations
  Clone ID: LIB3106-009-Q1-K1-C2
cccacgcgtncggaaaaagaaaacccactcacacacanctctctgcccctgcacatgcacatgcgccatgctcactaatcactagggtttattcatccatccatggagctaaccgntttctctctcttcttcttcttcttcaccttccaccttccctcctgcttctcaggacaatcgagctccatggaatcagtgcctgatcttcagaacactatgtacgcttccatcgacggttatccttgcgtgcgcctgatgaatctctctggcaccatcggttgttcaaatcctggacgagataaggttgtggctccaattttaaagttcgaaaatgttgacaaaatagctgagccttctgctatattggtttcactggatgagtttccaactctctttactagaatatc

SEQ ID NO: 24082 - DNA, 394 bp, Glycine max
  Clone ID: LIB3106-009-Q1-K1-C4
cccacgcgttcgcccacgcgtccgcaaatggctattccttcactagtaaaccagcctctagcattcagcttctccttcctcctctttcttgctctctgcaccccattggctgctaacaacaccgatttcggaggttcagcctgcctcaaggtttcccccacccacttcgccggctcagtcaccgaagtcataactgctatacgacaagtcgcttccattctctcacgcttcagccctcccttcgccaactttcgcctcgccaccgccctcgccgactgccttgacttgctcgacctctcctccgacgtgctctgctgggccctctccgcctctcagaaccccaaagggaagcataacagtacggggaatctgagttcggatttgaggacatggc

SEQ ID NO: 24083 - DNA, 374 bp, Glycine max
  Clone ID: LIB3106-009-Q1-K1-C5
gtccgatcgagataactggaaccaggtgtgatgaaaatgaaggtccttgttttcttcgttgctacagttttggtagcatggcaatgccatgcgtacgatatgttccctctccgaatgaacactggctatggtgcccgtactccggaggtgaaatgcgcaagttggaggcttgctgtggaagcacacaacatctttggctttgagaccattcctgaagagtgcgttgaagcaacaaaggaatacatccatggcgaacaatatagatcagactccaaaacagttaaccaacaagcttacttttatgccagagacctcgaagtccatcccaaggacacatttgtgttcagtatagatggcaccgtactctctaatat

SEQ ID NO: 24084 - DNA, 396 bp, Glycine max
  Clone ID: LIB3106-009-Q1-K1-C6
cccacgcgtccgcttaaatttcccaatcaattccatccatcgggtctttactctcttaccgagcccacacacactctttctctctctctctttccctgatcatcaaaatcagaaaaaattgggggaatggagaccaacaaccagcaacaacaacaacaaggagctcaagcccaatcgggaccctaccccgtcgccggcgccggcggcagtgcaggtgcaggtgcaggcgctcctccccctttccagcaccttctccagcagcagcagcagcagctccagatgttctggtcttaccagcgtcaagaaatcgagcacgtgaacgactttaagaatcaccagctccctcttgcccgcatcaagaagatcatgaaggccgacgaggatgtccgcatgatc

SEQ ID NO: 24085 - DNA, 462 bp, Glycine max
  Clone ID: LIB3106-009-Q1-K1-C7
cccacgcgtccgcccacgcgtccgcagaaggctagaaaggttgcttcatcagaaggagccggtgctttgcaacaactacaaaattggtgaacctgggaaagtggttctcaccattgacaatcaaagctctaagaagaagaagctcttgtaccgcttaaaggtcaagccttcttctgactgagaatcttatcattgttatgtacatccataaggggggtggagaagagcagtgcctacattggttgcttatgttcttgcattcacttttaccacccaagatgtccaaagcttcaaagatgtggactttgctgcaagcagaggaaagttttaatgaagatcgtgatcatgtgtttcaatcatatatattttttctgcgtttctttaattatctattattgctatcattgctggaggggatcttttgattttgaattcgtattcatatatggaggacataattgc

SEQ ID NO: 24086 - DNA, 222 bp, Glycine max
  Clone ID: LIB3106-009-Q1-K1-B2
gacaaatatggatcctcaggcctttattaggttgtcaataggttctctggggttgcgatgcgactgggattgaactgagcactacaaaatctggaattcaaacactctctttaccttgtgtttgtgagatacggcttcgaggttttcctgttcaaacatcatcagtccccgtgatatcctccacagaagttatacctgatactcagaatgttgcttttagct

SEQ ID NO: 24087 - DNA, 65 bp, Glycine max
  Clone ID: LIB3106-008-Q1-K1-G6
gactagttctagaggttcattttgaggaagaaactaattaataataatcttatcactctggttat

SEQ ID NO: 24088 - DNA, 324 bp, Glycine max
  unsure at all n locations
  Clone ID: LIB3106-008-Q1-K1-G7
gtgcgacttgaagccaggagccgaaggaaagattactggacctgttggtgaagaaatgcttatgccaaaagatcctaatgcaaccgtcatcatgttggcaactggaacaggaattgccccattccgctcatttttatggaaaatgttctttgagaagcatgatgattacaagttcaatggtttggcatggctcttcttgggtgtccncacaagcagctcactactttataaggaggacattgaaaagatgaaggagaaagcacctgacaacttcaggcttgactttgctttaagcagaaagcaaacaaaccaaaaaggttttaa

SEQ ID NO: 24089 - DNA, 186 bp, Glycine max
  Clone ID: LIB3106-008-Q1-K1-G8
catcacttcatctcatcataatgctcggtttcatttaaagaagatgcggatcataaacatctccttcttaataccttaattaactactaacctcaacacctttaacacacttctttctaacttcatctcaaccttcatatactcaatcacactctcaatcttctacatctcctacaacaatctcac

SEQ ID NO: 24090 - DNA, 277 bp, Glycine max
  unsure at all n locations
  Clone ID: LIB3106-008-Q1-K1-H3
cttcactctngaaccccgattcagttccgccagcacaagaagcatggctgcaatatcaataccttctcacatgaaagcttggacatactctgagtatggaaaatccaaggaagttctcaagtttaatcagagtgtggctttgcctgaagtgaaggaagaccaggtcctcatcaaggtcgctgctgcttcccttaaccccattgatcataagagaatggaaggctatttcaagaacagcgacttccctttacctactgctcctggttatgatgttgct

SEQ ID NO: 24091 - DNA, 142 bp, Glycine max
  Clone ID: LIB3106-008-Q1-K1-H4
ggcatatttaaaaaaaaaataaaataatattttaaaaaaaaaaaaaaaaaaaaaaaaaaaggaaaagataaataaaaaaaaatggacagaaaaaacataaaaaaaaaatataaaaaaaaaaaaaaagggccgccctttttaa

SEQ ID NO: 24092 - DNA, 206 bp, Glycine max
  Clone ID: LIB3106-008-Q1-K1-H5
actcttaaattctcagatatgtggagggaagcttttttagatgagcacctacttccttaaatccaaggtaaccacctcactcacaccactatcatctaccaatacagaatcttttgatctcatatcaccaatcttcctcacttcaaacctgatgaaataactaccatcaataattactctaatgagcacttatcactttctccaac

SEQ ID NO: 24093 - DNA, 321 bp, Glycine max
  unsure at all n locations
  Clone ID: LIB3106-008-Q1-K1-H8
attcccnntccgaccgacgcatactactgagtacaccacggccattgatatctgtcagccggttgtgtacttggtgaactattggttggccagcctctattccctggtgagagtggagtacatcagcttgttgaaattatcaaggttttaggaaccccgacaagggaagaaatcaagtgtatgaatcctaattacaccgagttcaaatttccacacattaaagctcatccatggcataagatatttcacaagcgtttacctactgaagctgtggatctcgtcttaaggctactgcaatactctccaaatcttcgatgcaca

SEQ ID NO: 24094 - DNA, 92 bp, Glycine max
  Clone ID: LIB3106-009-Q1-K1-A1
atttgtttggatgtctatgtttaaaaaaatccgtttactatgaaagttacatacatgatagaggaaacggatttgtttggatgtctatgttt

SEQ ID NO: 24095 - DNA, 419 bp, Glycine max
  unsure at all n locations
  Clone ID: LIB3106-009-Q1-K1-A10
gagcgatgttggtgttccgaagtctgaaccagaatcctacgaatgacagaagaggggggggaagaggatgaagatgaagatggtgatgatcaagatgacgacgatgaggatgacgatgatgatgacgaagaggacgaggcaggtgaagaagaggatgaagatggtgctgaggatgaggagaatgaagaggacgaggaagatgaggaagcattgcagcccccaaagaaaagaaagaagtgaatttagtttagtaaagcctcctctttgtattgttgtgtacgaatttggcttctaacttccatgtttttacttttttgggtactaaacttccatgttcttatttaagttattaaggaggcttatgtaggacatgttttaattgatatctatngttaccattgcgtaattagaatgctaca

SEQ ID NO: 24096 - DNA, 379 bp, Glycine max
  Clone ID: LIB3106-009-Q1-K1-A11
agcagagaaatgagaaaggtagaggtagacattgaagatggaagagattgttttcggcacagaccttacccttcttcttcttctaacctcagtttcatgcacagagttcatctacaacaccaacttcaactccaccaacacccttctacatggcaacgccaccatagaatcttccatcctcacccttactatcagttccaccttctctgtgggtcgtgctttctacccttttaagatccccacaaaaccttccaactcttcaacccctttaccattctcagcctcattcattttctccattgcaccattcaaagaccttctccctggccatggctttgtcttcatactgacaccttctgcaggcaccactggggtgaac

SEQ ID NO: 24097 - DNA, 249 bp, Glycine max
  Clone ID: LIB3106-009-Q1-K1-A12
aaaatctaaccggggtcaatgttcttatcaaaaaagagggtccaaaagtcaatccgaagttcgagctgaagccgccaccatatccactgaatggtttggagccggtgatgagccagcagacacttgagtttcattgggggaaacaccacaagacatatgtggaaaatctgaaaaaacaaattgttgggacagagcttgatgggaaatcactagaagagattatagtgacatcatataataagggtgaca

SEQ ID NO: 24098 - DNA, 400 bp, Glycine max
  Clone ID: LIB3106-009-Q1-K1-A3
tcgacgccacgcgtcacgcggacgcgtgggtccaaattcatatttaggatatggtgccacccttcttgccccctgttcagacagaggtgcagccttaagatattatttatccacactgtttcagtgcttggtattcttaaatcttcttttccaatggttattgttcaagtgcaactggatggtagttaaagttggctaaatttgcatccatttttgtatttttgggaggtagtatgattatttaaagttgaggcgttgtccttaggatctaagttgtaggaattgcattttatgtctctcgaatgagttaagtatagatattgttatcagattgatgttctcttgttctagaaatgtatgtgaactgtgaaggcccgcaactattagatttttgtctttg

SEQ ID NO: 24099 - DNA, 381 bp, Glycine max
  Clone ID: LIB3106-009-Q1-K1-A5
agagaagttgctcctcatctcaccgctcttagttcttcttccttccttcaaaactcgaatgagccatttctttgtttttcgttctcttgcagttcctgaggtaaagatacaagcttttctcttctgttcactggatcgggttccaggaattgaagggtaggttcagtaggggttgtgttgatctgcaccaagatgcttaatttgcgttgaaaaattcattcatttgcgagactcggcatcggaaatgaaccagttagttgaaagttcaacgactactcaaagggtatctagagttcaagctccactggttgactctgtttcttgctactgtaaagtagattcaggtctgaaaacagttgttggggcaaggaaaatttgttc

SEQ ID NO: 24100 - DNA, 260 bp, Glycine max
  Clone ID: LIB3106-009-Q1-K1-A6
cccacgcgtccgctcatttacggcaatataaaaggatgattacaacatttgtaattctcaggggaaaaaaaaaaaaaaaaaaaaaaaaaaaaaaaaaaaaaaaaaaaaaaaaaaagggtgaaataaaaaaaaaaaaaaaaggtaaccaacaaaagaaaggaaaggaaaaaaaaagcgtagtgtgaatcttaaaaaaaattctttggctcgcgttaaaaaaaaaaatcaattgggaaaactactggaatcaaaaaaataaa

SEQ ID NO: 24101 - DNA, 354 bp, Glycine max
  unsure at all n locations
  Clone ID: LIB3106-009-Q1-K1-A7
gaaatggcttcctcaatgatctcctcccgagctggtaccaccgtcaaccgtgcccgtgccaacatggttgctccattcaccaanctcaaatccatggctggnttncccacgaggaagaccaacaatgacattacctccattgctagcaacggtggaagagtacaatgcatgcaggtgtggccaccaattggcaagaagaagttcgagactctttcctacttgccagacctcgatgatgcccaattggcaaaggaagtcgaataccttctaaggaaaggatggattccttgcttggaattcgaggttggagcacggtttcgtgtaccgtgagcacaacaggtcacctggatacta

SEQ ID NO: 24102 - DNA, 357 bp, Glycine max
  Clone ID: LIB3106-009-Q1-K1-A8
cccacgcgtccgcccacgcgtccgggaagttctctgtttatgtgcatgcatccaagacaaaggcagttcatgtgagccggtattttgttaatcgggatatacgcagtgaccaggtgatttgggggaaaatttctatggttgatgcagagagacgactattggcaaatgctcttaaggatactgacaaccagcaatttgttctactgtctgatagctgtgtgcctctatatgattttgactatatttacaactatctgatgtatacaaatatcagctttgtagactgctttaaggatccccgtcctcatggcaatggcaggtattcagatcgcatgctaccttaaatttgaggtgaag

SEQ ID NO: 24103 - DNA, 391 bp, Glycine max
  Clone ID: LIB3106-009-Q1-K1-A9
atttgcagaactttgtttcccaacctccattgcctccgcttctacctcgctaccatgatcggtcctgagaagaaccgcaaggagatctgcaaatacctcttccaagagggagtttgctttgcgaagaaggacttcaatttggcgaagcaccctgagattgacgtgccgaatctgcaggtgattaagctgatgcagagtttaaagtctcgcgagtatgtgagggagacttttgcttggatgcactattactggttcctcaccaacgatggaatcgagtttctcagaacttaccttaaccttccttccgaaattgtccctgctactttgaagaaacaggccaagccacctggcaggccctttggccgccccatccggtgatcgccctaggggt

SEQ ID NO: 24104 - DNA, 372 bp, Glycine max
  Clone ID: LIB3106-009-Q1-K1-B1
ggggcttcttccctcttatttgtctattctttggattatgcccgtactcgtttagcaaacgatgcagaggctgcaaagaagggtggcgagaggcagtttaatggcttggttgatgtttacaggaaaaccatcaagtctgatggtgttgctggcctttatcgtgggttcaacatctcatgtgttggaattatagtgtatcgtggtctttactttggaatgtatgattccctgaaaccagtagttttggttggtgggttgcaggatagtttctttgctagtttccttttgggatggggaatcacaattggtgctggtttggcttcttatcccattgacactgttcgaagaagaatgatgatgacttctggagaa

SEQ ID NO: 24105 - DNA, 331 bp, Glycine max
  Clone ID: LIB3106-008-Q1-K1-G3
tttgaaaaacccctcactcttcatcacgtacagtagctagccacatacagatgtcgaccaaatttaaggtgtttcgtgaattcacaagcgatgactcattcctaaaccaagttatccctgaaaacatcaccgaattccaagtgactctgtccctcgctagagactacgatggcaacaactcaaccaacggaaagttcattccttactgggacactgaaaaggtcactcccgaagtgataaaaaaattcaagaaaaaatacgaacccaccggacttaaggttaaaggtcttggcaacattggaaaccaaaaccaacaatttccttttaccat

SEQ ID NO: 24106 - DNA, 443 bp, Glycine max
  Clone ID: LIB3106-009-Q1-K1-B10
cacaattctctgtgaactttctagaatctcgttcttcctttgccttctccttcttcgtcagccctttttctttctctttctttcgcactttcattctctaaaaaaatctaagtccctttggtcttcatcttctgttctgatccaggtatggcttctaaacgcatcttgaaggagctcaaggatttgcagaaggatcctcctacctcatgcagtgcaggccctgtggctgaggacatgtttcactggcaagccacaatcatgggacctgctgatagcccatatgcaggtggtgttttcctagtttcaattcattttcctcctgactatcccttcaagccaccaaaggttgcttttcggactaaggtgttccacccaaacatcaacagcaatggcagtatatgtcttgacattctcaaggagcaatggagccccacccttaacca

SEQ ID NO: 24107 - DNA, 375 bp, Glycine max
  Clone ID: LIB3106-009-Q1-K1-B11
cccacacgtccggaaacagggaggtgaaagtgaacgtccttgcttcattcgttgctgcaaggttggtagcatggcactgccatgcctacgatatgatgaatattcgaatgaacactggctatggtgcccgtacttccgaagtgaaatgcgcaagttggaggcttgctgtggaagcacacaacatgactagctttgagaccattcctgaagagtgcgttgaatccacacatggatacatccatggcgaacaatatagatcagactaccaaacagcttacctacaagcttacttttatgccagagacctcgaagaccaatccaaggacacatttgagtgcagcatagatggctacgtactctactatattccatact

SEQ ID NO: 24108 - DNA, 74 bp, Glycine max
  Clone ID: LIB3106-009-Q1-K1-B12
cccacgcgtccggtagggtgttcttatttggaatgcttgtcctcaactatacccagtttggatcctatggtgat

SEQ ID NO: 24109 - DNA, 54 bp, Glycine max
  Clone ID: LIB3106-008-Q1-K1-C7
tttaattttttatttttttatttatattattttatatttttttatatatttttt

SEQ ID NO: 24110 - DNA, 324 bp, Glycine max
  unsure at all n locations
  Clone ID: LIB3106-008-Q1-K1-C8
aaaaagganaattgnggacgaaagccnncatcacaaccaaagttcgaatccccgttagaagaggtgcctatatttagtgcccgacagagcttcgaaaaagattgcccccaaaggaagataccagtggagagccaaataaacatggatgaaaacccagttgagaaggttgatgaagtggaagccactatgcctattgtagaagtcaagagcctagaaagtttgttccaagaaaatcaagagttggaagatttgtcttctcaaaaggaacacaaagaagtgaagccactgattgctgagttcaataaagttgaagaaagtaatgag

SEQ ID NO: 24111 - DNA, 413 bp, Glycine max
  unsure at all n locations
  Clone ID: LIB3106-008-Q1-K1-D2
ctctnncactcttcttgtatgatgagaagatccagcacagtgaggtggaagtgaagggactgaagcttcacgtggcagagattggaagtggctccaaaacagtggtattcttgcatggattcccagagatctggtacacatggaggcaccaaatgatttctgtggcaaacgctggttatagggctattgcctttgatttcagaggctatggactttctcagcaaccagcagagcctgaaaaggaaaccaatggttgatctgggtcatgaaattgtaggccttttggaatgcttgaacatctncaaagccttcctttgtggaaaggattttggtgccattccaagacatcttactacttgagtgcacccagaaagagtagctggtatcataactttaagcattcctttcatgct

SEQ ID NO: 24112 - DNA, 257 bp, Glycine max
  unsure at all n locations
  Clone ID: LIB3106-008-Q1-K1-D3
ctctcccaaaggaaaggaatgaacagcctgtgaatgttncatagagttgaaaactctcgcaatgaatggctcaccatctgtccctcaggtacctagaggagctgtcagttctagtaacttagttgcctctaccggaaagagtgtgccttctgtgacgggccagatcactcatcaactacccagaggtaatgtggtgcctgttctgctccagcctaataatttttcaaatggagtgccagtttctaatcaaccatcac

SEQ ID NO: 24113 - DNA, 222 bp, Glycine max
  Clone ID: LIB3106-008-Q1-K1-D4
cattcctagtctttcgcttgcttacttaagaccagacatgtctaacacatgcggcagctgctactgcactgacaagactagctgcaccaagggaaacagctatagagctatagtatagactgagaagaggaacatcgagactgttcacatggatgtaccagcagctgagcatgatcataagtgcatatatgcccctaactgcacatgcactgactgaacatg

SEQ ID NO: 24114 - DNA, 250 bp, Glycine max
  Clone ID: LIB3106-008-Q1-K1-D5
gtccgcccacgcgtccgggagcatcgtaaggcataattcaccgcgatgtaaagacaactaacatcctcttagatgataactttgttgctaaggttgcagactttggcctctccaaaactggtcctgctcttgatcagactcatgtgagcactgctgttaaaggtagtttcggttatcttgatcctgaatacttcagaaggcaacagcttacagagaaatcagatgtttattcatttggagtagttttgat

SEQ ID NO: 24115 - DNA, 226 bp, Glycine max
  unsure at all n locations
  Clone ID: LIB3106-008-Q1-K1-D6
cgccccgcgnccggnngnnngnnccccgngttggaaatctctatgtccattatgggttccaggagcatgcttaatcttctctctggtcacagtacaaaaacgtaaaacagacacaacacaagctgagtttttgtgtgtaagtttcatcatcatcatctttgatccaccacacttgaaagtgaaacaactagaaagcgactttcgtgggcccctctttacaactgga

SEQ ID NO: 24116 - DNA, 430 bp, Glycine max
  unsure at all n locations
  Clone ID: LIB3106-008-Q1-K1-D8
cccacgcgtccgcccacgcgtccgcccactgtccgcccacgcgtccgtttgtagatctactcttgaatcttgtttttgtgttgattttaggttctatcaattttcattcataatattcttgtgctgaacctttagatctaaattttgttccaaaatattgattagaaaaaaaaaacacaaaaatctaagtgtaaatcacttaatccatgttgtcttagagtcatgtttagtcatagtaattgtcacattatgttctaagtttgtgttgaattttattttgntaattgaattctaaatacatttggtcatgtattcctgtcattcttagcccatcttttgaattttgagtctaattcatgcatgttatttaattcataacatggtctaaatcaattcctagaagtagtcttggtcttgaactttttttttt

SEQ ID NO: 24117 - DNA, 262 bp, Glycine max
  Clone ID: LIB3106-008-Q1-K1-E1
tggtaaccattcgtgcgatgagataggaaattatccgtgaacgcattgagcaatataatacggaagtaaaaattgtaaatacgggtaccgtacttcaagtaggcgacggtattgctcgtatttatggtcttgatgaagtaatggcgggtgaattagtggaatttgaagagggtactataggcattgctttgaatttggaatccaaaaatgttggtgttgtattaatgggtgatgggttgatgatacaagagggaagttcagt

SEQ ID NO: 24118 - DNA, 352 bp, Glycine max
  unsure at all n locations
  Clone ID: LIB3106-008-Q1-K1-E2
caaatggctagtacatgaaactgagtcgacggttgaaatagtaacatttgttcatcgtttgcataagctgcaaaattgtctataactatcagcctatcaaattctttcgatttttagctagctattataccacaaggtatcagtaaatatgtatttgataacaattattttccgtagtcaaatcatttattcatgttttctaaatgttgtaaagaagtttaattgaatgaaattgcanagtgaaaaactagtgtagacacaagtccgggttatgaaaaaaaaaaaaaaaaaaaaaaaaaaaaaaaaagggccggccgttttaaaggtcccaagttaccgtccccttccttcc

SEQ ID NO: 24119 - DNA, 253 bp, Glycine max
  unsure at all n locations
  Clone ID: LIB3106-008-Q1-K1-E5
tgggtcaaattgattctttctagcaaggagatggtcttcctgagcatggcttttatttggtaggtaatatcgatgaagctactgcgaaagctactaacttagaaatggagagcaatttgaagaaatgactttaaatctttgtgtactgacccccaatcgaattgtttgggattcgcaagtgaaggaaatcattttatctactaatagcggacacatcggagtattaccaaatcatgcgcctattgncacagac

SEQ ID NO: 24120 - DNA, 76 bp, Glycine max
  Clone ID: LIB3106-008-Q1-K1-E6
gacagattttagttatctgatgttgttagtcgtatggctttgactggtttctaatcaatggttccttttctcccac

SEQ ID NO: 24121 - DNA, 252 bp, Glycine max
  Clone ID: LIB3106-008-Q1-K1-E7
ttttgatattcgagttctgtgctttcggacggtatatttggcgagatgggaggacaaagtcctggaaaatggatcagaaacttacttctggggaagaaatcatcatcgaagtccaagtcttctagagagaaagatattaataaaccttcaagttacaaggatgttctggtggcgtcttccgaggcatcaatgtctgcttcaacatccggagctaatgctactaaaggagtgctatcagaaaaaggaagtagt

SEQ ID NO: 24122 - DNA, 323 bp, Glycine max
  unsure at all n locations
  Clone ID: LIB3106-008-Q1-K1-E8
attaaattgcagcaatcttcgtctctgatcctggcttacgttgagcgaggtgttgtcaagtcaaagcgatcaatatggcgacttaaaacaatcactgattttttctgggccattgttaacttcataggcgtgtttttcgcaactatgttctcgatggaaaagtcagatgcgtacagaaaacgttctgtgggtaagaaatgggatggcggtgctcctggaggaggtcctggcggcggtggtggcggtggtagcggtccacgaggcccttctcgtgnnggtctcgacaatgttcgtgggctagatagtataaggggacgtgatca

SEQ ID NO: 24123 - DNA, 215 bp, Glycine max
  Clone ID: LIB3106-008-Q1-K1-F1
tgatgaaaatgaaggtccttgttttcgtcggggctcaattttggtagcatggcaatgccatgcgtacgatatgttccctctccgaatgaacactggctatggtgcccgtactccggaggtgaaatgcgcaagttggaggcttgctgtggaagcacacaacatctttggctttgagaccattcctgaagagtgcgttgaagcaaccaaagaataca

SEQ ID NO: 24124 - DNA, 308 bp, Glycine max
  Clone ID: LIB3106-008-Q1-K1-F2
gaaaatctgtttcatgcgcaagtagcttaaagaaatcacgtggggaagaagtgcagtaatggaaagtttggtggtgaagtggaggacatatcaggtcttgagcagtttagagcggcaatatctttaccaggtgtttctgttgtccattttgaaactgcgtcaaacttgcaatgtaagcagatatcgccattggtgaatacactatgcagtcgtaatccatctattaacttcctcaaggtgaatattcaaacaagccccgcagtcgctgctgctgagaatgttagggttgtaccaaccttcaagatcta

SEQ ID NO: 24125 - DNA, 182 bp, Glycine max
  Clone ID: LIB3106-008-Q1-K1-F3
agaggtcgaagttgaaccagtcgtttagtcactgtaagaattctcgtggcgatggcgacaacaatatcaacgcacatatcctgatgaatgtctagacaaatctgatgctaggcgtaaaggtgattatcagattgactatgtgccagcaccaagagtcactgaagcttgacaaaacaatgatc

SEQ ID NO: 24126 - DNA, 350 bp, Glycine max
  Clone ID: LIB3106-008-Q1-K1-C6
attttggcatggagtgagtgagcttagctattggagggtgcgagtagcccccctctagcttgtcaaggatgcttacttcctctatcttcccaaggaagttaccttccttgcttctcaaggaagcttctcatgtgctaggctataaatagaaacatgtataacatttgctataattttaaagaatgaaaaacttatgagatacaattcaaagtttaactgtttttcctaatctgcttcaatacttatgtcccttctctctcatttttttcctccattgaaacttccttttaaagctcttattcaagggactcttttgggggggaaacctctttttccatggcctattcttc

SEQ ID NO: 24127 - DNA, 233 bp, Glycine max
  Clone ID: LIB3106-008-Q1-K1-F4
attcttcacactccagtagctgcatcaacttcatttgcagtcccaaatgcattggcactcaatgatgtgtctgaagatgttcgtgtctacactgactattagaacaacttcaagatttatattcccgaaaaattgcaagtttgaacaggaaaccgagaatctattgggtttaaatccataactgctttttacccaacacaggcatccaatttcaatgtgaacgttttcatcac

SEQ ID NO: 24128 - DNA, 216 bp, Glycine max
  Clone ID: LIB3106-008-Q1-K1-F5
tcggtgttcacttgatctcatcataagtgggtcggcgtcaattgaagaagatgccgatcagaaacatcgccgtcggaaggcctgaagaggcgactcaccccgacacgttgaaggcggctttggctgagttcatctcaaccttcatcttcgtgttcgccggctcaggctccggcatcgcctacaacaagctcaccgacaacggcgctgccacccctg

SEQ ID NO: 24129 - DNA, 394 bp, Glycine max
  unsure at all n locations
  Clone ID: LIB3106-008-Q1-K1-F6
attcccnntcgacccacccgtccncccactcctccttttaaacaatatagctcatggaggagctattcgtagcagttctatcggtgcttcttgtggcagcgttgatcccactctacctatggaaacgccgtcaagattctcaacctncccctccccaccgcgacgaagctcctcaggctccgcggagagaaaccgtggcgcgcgccgncgtcactcgtcgcatgcgtcggcgacctgccgnctctggagctagcacttcggcagatccacctgcgacgcaagaaggatctggtggtgagagtgatgatgaagctgccggcngaaggtattatgaggctaaagcatcaaagaaaaaggagattaaaaggcaagagaaggaagaaaggcgtcaagc

SEQ ID NO: 24130 - DNA, 176 bp, Glycine max
  Clone ID: LIB3106-008-Q1-K1-F7
ttcttttcttctttttttttttctacagttctcacttgatacacatcatattgtctctgtttaaatttaagaagatgccgatcataaacatctccatctaaattccttaatagactactcaccccaacacttttaatgcttctttggctgaattcatcttaacctttatcttcttc

SEQ ID NO: 24131 - DNA, 282 bp, Glycine max
  unsure at all n locations
  Clone ID: LIB3106-008-Q1-K1-F8
cccacgcgtccgcatataacaaccccatctncctttcttccatcgaagaagaagaaggacgcgcggttaataggagacaactgattcttcacacgccagtagctgcagcagctgcatttgcagtcccaaatgcattggcactcaatgatgtgtctgaggatgttcgtgtctacactgacgatgagaacaagttcaagattgagattcccgaagagtggcaagtgggaacaggagacggagaatctagtgggtttaaatccataactgctttctacccaacac

SEQ ID NO: 24132 - DNA, 202 bp, Glycine max
  Clone ID: LIB3106-008-Q1-K1-G1
tcttcacttcatctcatcataaccatcagcttctatttaaaaaaatgccgatcaaaaacatctccatcgtaatcccttaaaaaacatctaaccttaacactcttacactcatcttcctgacttcattataatcttcatatacacattccactactcaatcttcttcatcgtctacaacaatctcaccctcaacttccctaac

SEQ ID NO: 24133 - DNA, 272 bp, Glycine max
  Clone ID: LIB3106-007-Q1-K1-H4
aaagcagcgctgtgcaacaggattttgtgtttctactttggtggaatgggtttggaggaaggcatcttaaatgcgaactgaaatgaaatcttgttcaattgtagtgtgatatatatactaataacttatctgaagggatataaaaggtgtgtgccccgaggcagattttagccatatttcagtgtatttaaaatgtttttattaaaaaaaaaatattatttttctcttgttatttaagaaaaattatctttatataatatctttatttttta

SEQ ID NO: 24134 - DNA, 305 bp, Glycine max
  Clone ID: LIB3106-007-Q1-K1-H5
gcgcccacgcgtccgctccgaatagaggatgccaagaatgcaacttttgctgccattgaggaaggtattgtacctgggggtggcactgcactggttcatctctccactcatgtcccagcaatcaaggacaagcttgaggatgcagatgagaggctaggagctgacattgtgcaaaaggcactgatagctcctgcagcattgattgctcaaaatgctggaatagaaagtgaagttgttgtggagaaaataaagagtggtgaatgggaagtcggttacaatgccatggcagacaggtatgagaattt

SEQ ID NO: 24135 - DNA, 336 bp, Glycine max
  Clone ID: LIB3106-007-Q1-K1-H6
cccacgcatgcgtccacgcgtgcgtccacgcgtacgtatcacttccctcaccatggccgagtcctgcctcctggcttctccctcctcactcttccacaccaaaaccaaaccctctctctttacacccccctccaaacccctcacactccaattttcatgcctcaactcctccgtctctctctccctcgccgcaccaactcaccgttctccccttgtaactttcgtggcccaaacttccgattgggctcaacaagaagaagaacagagcctcgctgaaaccgaagcgggcctggaaagttgggagcccaacggcgaagacgccggcgatgagagctt

SEQ ID NO: 24136 - DNA, 242 bp, Glycine max
  Clone ID: LIB3106-007-Q1-K1-H8
gggccgaccgacgcgtccgcccacgcgttcggccaccaaaggtttgtgtatagggaacttaatttgatttcgtggcagtggtgatttttgagaagaggcatgagatttcaatgtatgaagaactcaaagataggttgttggagggtgttgcggttttggactttgacatgctttgttctacaatggctttgttagctttacattgtaaatggtgaaagctgtgtgcttgtatatgaataata

SEQ ID NO: 24137 - DNA, 326 bp, Glycine max
  Clone ID: LIB3106-007-Q1-K1-H9
cgcgagcggccgctcgccatctatatactagtttttccggtacatcattatggatgcgattggtgtttctcgtgggtgttcttaattctctcatttcttgaaactctatttattctacatcaaaaacgaaatgacccctcccccagaattctttccgattgtctggcacattaaaaaaagaatggataacttcctaaaaataaagaatactattacacattataaggaggggtcaaatttttattaagattaaagatatagaatatctatctggatatatatatatatagatataatttattaataatagaactttcttttttctt

SEQ ID NO: 24138 - DNA, 358 bp, Glycine max
  Clone ID: LIB3106-008-Q1-K1-A1
tgcttcattcattctggacaacgaaccaatctttcttagaaaatgagggggggcttgtggcaacttgggcaatcgatcactcgccgtcttgcccatggagataagaaggctgttgctcgtcgatgttttgcctcagaagctgagctgaaaaagacagtgtttcatgacttccatgttgctcatggtgggaagatggttccatttgctgggtggagcatgccaatccaatacaaggactcaatcatggactctaccatcaactgtagggagaatggtagcctctttgatgtttcccatatgtgtgggctgagcctcaaagggaggacgctgccccattccttgaaaagctggtcattgc

SEQ ID NO: 24139 - DNA, 216 bp, Glycine max
  unsure at all n locations
  Clone ID: LIB3106-008-Q1-K1-A3
ggtggatttctgcgtagcagactacacaggccccaatgggcccgcagggtactcatgcaagagcccagcaaaggtcacggtggacgacttcgtctactccggccttggcaccgncggcaacacctcaaacatcatcaaagccgcggtgacgccggcgttcgacgcgcaattccccggcgtcaacgggcttggaatctncattgcacgcctagacct

SEQ ID NO: 24140 - DNA, 189 bp, Glycine max
  Clone ID: LIB3106-008-Q1-K1-A5
aatggcttctacccaatgtgtctgggaccaccatgctcttaccacccctgccagtgccagatccccatcactacgcatcttggttagcaccaagcctaaccagcttgtttgcaaggcacagaaacaacaaacaccacaagaggatattgatgtcagcccaatctctcgcggttagctctaactgtgctc

SEQ ID NO: 24141 - DNA, 393 bp, Glycine max
  unsure at all n locations
  Clone ID: LIB3106-008-Q1-K1-A6
gccaagacattattatatgtgaatgcttgggcaattcatagagatcctaaggcttggaaagatccagaagagtttatacccgagaggtttttaaattgcgacatacatctttatggacaagattttgagtttattccattcggtgctggtcgtagattgtgccctggtatgaatatggcatttgctgcattggatcttatactngctaatcttccttattcctttgactgggaatttgcaacagggattgaaaaaggagacctttgttcctgaaatgttgcaagaagtacaccacctttagaaggaatcctttgggtgttgtggccaagtgctttttttaaaatccaaaagtcgtaactactgctgaaaaaaattaatttaaataattaatga

SEQ ID NO: 24142 - DNA, 266 bp, Glycine max
  Clone ID: LIB3106-008-Q1-K1-A7
caacgaaccaaggggggggcagcctcagacgcaggggggggcgcagcacgggcaagcagcgctggagcacgtgcagtgcttcggtcgcaagaagaccgccgtgggcgtgacctactgcaagcgcgggcgcgggctcatcaagatcaacggctgccccattgagctcgtggagccggagatcctccgcttcaaggccttcgagcctatcctgctgttgggtaagagccgcttcggccggcgtcgacatgcgcattcgcgtcaagggt

SEQ ID NO: 24143 - DNA, 387 bp, Glycine max
  unsure at all n locations
  Clone ID: LIB3106-008-Q1-K1-B1
ttctcctcttacanaaatgggtgccgcataaaaaactaagaagacccatgagagcatcaacaacaggctcgctctcgtcatgaagagtggcaaattcaccctcggttacaagaccgatctcaaatctcttaggagctccaaagggaaattgattatcattgctaacaactgcccccctttgaggaagtcagagattgaatactatgctatgttggcaaaggttgnggttcatcattacaatgggaacaatgtggatttgggcactgcatgtggcaaatattacagagtgtgctgccttagcattattgatcctggtgattcggatatcatcaagacacttgctggtgaacaagtaagtattcttgaagttccttgcttggtattttc

SEQ ID NO: 24144 - DNA, 214 bp, Glycine max
  Clone ID: LIB3106-008-Q1-K1-B2
tatggcgaatctagcacacttttccaggagagccctaagaagcgcacacgcgctcgcaaggcaccacgtgcagacgcagctgctggcagcggaacgcgcttttgcgacggaggcggccaaatcgatatgcccgtcggcggatcgcgtgaagtgggactaccgagggcagaggaagataataccgttagggcagtggcttcccaaagtggcccga

SEQ ID NO: 24145 - DNA, 302 bp, Glycine max
  Clone ID: LIB3106-008-Q1-K1-B3
ggcggaggaacctttttagaaggtttaacaggaaccgcctatagatgagacagagatccaagttatgcgtttaacctaattggtttctgttgcttttacaattgcttatgttgtcgaatgggacacccagttgttagtggcactggtttctcctttttgatgtttgatacatcttgttggattcaagtagtttatgttcgtcttatgttattagctcaaaacaatggttgtactgcttttgctaatcaacatgatttcttatttgctcaaaaaaaaaaatggtaattaaaaaaaagggcggg

SEQ ID NO: 24146 - DNA, 324 bp, Glycine max
  Clone ID: LIB3106-008-Q1-K1-B4
gctgcttgttgcagcccttatcctcatggcggaggggcttgctacttactacagaccaattaagaagccaccagtgtacaagcctgcagtgtacaagccaccagtgtacaaaccaccggtttataagccaaaaccaccggtttacaagccgaaaccaccggtttacaagccaccatataagaagccaccatacaagaaaccaccttatggaaagtaccctccagtagaggacaacacccatgcctaaagcaagcaatgaggtctataatctacttaataaataagaggaactgctttgtgttttctagcattgggattaacaac

SEQ ID NO: 24147 - DNA, 373 bp, Glycine max
  Clone ID: LIB3106-008-Q1-K1-B5
acatcttgtagctttagaggatagttaccaacaaaagcgagattttataaatgtatttattgcccaacagttcctgtttcaaaggcagtggcagaaagttcacagctatgcacagagtaagggaatcagcataatgggagacatgccaatatatgttggttatcatagcgcagatgtttgggcaaataagaaacagtttttactgaacaggaagggctttcctcttttagttagtggtgttcctcctgacgcattcagtgaaactggtcagctttggggcaaccccctgtatgatttgaaagccatggagaaagatggatactcatggtgggtacgtcgcatacgacgtgcacaaaatttatttgatgaattt

SEQ ID NO: 24148 - DNA, 257 bp, Glycine max
  unsure at all n locations
  Clone ID: LIB3106-008-Q1-K1-B6
anggccaccgncaccccngcagccgnngctttccctcattcactggcctcaaggcaagcgcaggcaaagtgagtgccgcagttaaagtctcagctccccaagccacaaggttgggcatcaaggcttcgctgaaagacgttggagtcgcttgtgggggcacttgcgnnagtgcagtgctggctagcaacgccatggccattgaagtgttgctgggtggtgatgacgggtctctggctttcgttcccaacaatttctcc

SEQ ID NO: 24149 - DNA, 307 bp, Glycine max
  Clone ID: LIB3106-007-Q1-K1-H3
atgctcttacctataggctagcaaaggagctcctttcagcaggaattagggatacagtcaatgtatatgaagataagcaacagaaatcttgaggccagttgggtctgcactcaaggttatacatggctggctattcattgacaagagtcttggcttggatccaaatgacccaacattccatttgttgttcttttaggctcttcacccacattatgggccttctattggttgtggacatatggcggttactcaagagatttgtcccataaatcagcttttgagcttctggccggggatgcaaatgctg

SEQ ID NO: 24150 - DNA, 311 bp, Glycine max
  unsure at all n locations
  Clone ID: LIB3106-008-Q1-K1-B7
gggaagccatgagcaccaccgagagtgagagatataagggcacagtgaaatggttcaacgaggagaagggtttcggtttcataactcccgaagatggtggctctgatctcttcgttcactacagtgcgatccaaaccgacggcggcttccgcaccttggcggagggtcagtcagtagagttcctcgtcactcaggacgacagcgggcgagccgcggccgtcaacgtgacgaccaccatggttaaatctagtgacagcggtaacggggaaaactctggtggtgatgctgncaatgttgagaaataagtgaga

SEQ ID NO: 24151 - DNA, 164 bp, Glycine max
  Clone ID: LIB3106-008-Q1-K1-B8
taccatggggaaatcgtaccgtgtctttggagtgtgttcttaaattcagtgaatttctgatcgcacctaatatattgtctttcgataggtttgacagaatttttcatcgctctacagttttgttggatgagtattctttgggtagtatttgcttgctatttggc

SEQ ID NO: 24152 - DNA, 372 bp, Glycine max
  unsure at all n locations
  Clone ID: LIB3106-008-Q1-K1-C1
cgctagctaatgtggcttacggcgagggcggcatatcggggcacatgtgatacaatggatcagacgatacatagggatcagcggtttcatgctcgtcgacattatttgctgctgcgccatcatttactctattgtctggtacatcagatctctcatggaaaccttcaagaccgatgggaaagccgcgagaaacctagctcaagatgaccctcttcaggcaattctacattgacgtcattgggtacttgtacttcacccgcatcgtggtctttgctatgaagaccattgccgcttataagtaccagtgggtgagtnatctagctgatgaggccggcagcctaacgtcttatgtcgtcatgttttatatggtta

SEQ ID NO: 24153 - DNA, 245 bp, Glycine max
  Clone ID: LIB3106-008-Q1-K1-C3
aaccgggaccaccaccgacaataaaaggacaacaacgttaaagtgttaaagcatgaaaatgctgccatctgccaccgccggagatgccggacacggcagtgccggtgaccgcatcgtggtggtgggcatgaagatgggactccacagcaccgagttgctcacttgggctctgttcaaagtggctcaacccgtgatgttgtgcttgctcttcatgttctcgggaatgatgaaattgtgaatcgaga

SEQ ID NO: 24154 - DNA, 151 bp, Glycine max
  Clone ID: LIB3106-008-Q1-K1-C5
aagaactactactgacgaaccgcgactcaccaccgacgatcaatggacaacaactataaagtgttaaagcatgtaaatgctggcatcttccaccgccggagatgccggacacagaaatgtcggtgaccgcatcgtggtgatgggcatgtac

SEQ ID NO: 24155 - DNA, 443 bp, Glycine max
  Clone ID: LIB3106-007-Q1-K1-F4
cccacgcgtccgaagaaactgcatccaagttctgtccttttcaaaaaaacaaaacttaggtgtccgattgttagatgcttttagtgcaaatatgtgatcaaaattggaattttacctaggttatgcaataaaggtggatgttagttatagaggtaaaattctaattttaattggaggataatactgattactgaaagaacttaaggtattgtgcttaggttttatttgtggtagaaagaattagttatggtagtcaatcgttgggttacagattaacagtttgagtggccttctgttttgaatttttaaatggtgaagggagcttgatattttgcacatggtgatggattaaagatttaaggattagcttttcttgcttttgtgatttggttattggattttttttaattgaaattgtcaaataaaatatcactactgaatta

SEQ ID NO: 24156 - DNA, 351 bp, Glycine max
  Clone ID: LIB3106-007-Q1-K1-F5
cttgatcgtgaaggaagggagggttgcaggtgttgtgaccaactgggctctgggtgcggtgaaccatgacacgcagtcttgcatggaccccaacgtgatggaggctaaggttgctgtgagctcttgtgggcacgatggacctttttgcgccaccggggttaagaggttgaagagtattggcatgattgatagcgttcctggaatgaaggctttggatatgaatgctgcagaggatgctattgtgaggctcacgagggagattgtgcccggcatgattgtcaccggcatggatgtggcagaaattgatggctccccaaggatggggtcgacgtttggggcgatgatgatatc

SEQ ID NO: 24157 - DNA, 412 bp, Glycine max
  Clone ID: LIB3106-007-Q1-K1-F6
cccacgcgtccggttttcttctaccttgctgagaacaatgtcctttttgagggtgttcttgttaagcctagcatggttacacctggagctgagtccaaggacaaggccagtcctcagacagttgctgattacaccctcaagctccttcacaggagaattccccctgctgtccctggaattatgtttttgtctggtggacagtctgaggttgaagctaccctcaacttgaatgccatgaaccaatctccaaacccgtggcacgtgtcgttctcgtatgccagagcccttcaaaacactgccttgaagacatggggaggccgtccagagaacgtgaaggcggcacaagatgcactccttttccgtgccaagtccaactcgctcgcccagcttgggaagtacaccggtgagggtg

SEQ ID NO: 24158 - DNA, 307 bp, Glycine max
  unsure at all n locations
  Clone ID: LIB3106-007-Q1-K1-F7
cccacgcgtccgtccacgcgtccgtttacgcgtacggaaattgttaacttcggggtgttagcttgtgttctgtacgcggcctgaacntaactattgtcaggatattgggattcatgtcgatgatgaaaatcacgcgcgtttggtgttgacaaatgatgatccactagtggttgagtttctgaaatatgatcccttctggccccagaataatctagtgcttcctacaagtcaatgagagactatataaatgctttggttgtaataaattattgtcagactaaataaaataatcaaagcttatcccttc

SEQ ID NO: 24159 - DNA, 199 bp, Glycine max
  Clone ID: LIB3106-007-Q1-K1-F8
cccacgcgtccgcttatttctctatttaaatttcaaaaccctgtccatttcaacaggtatgacaaattatcaaacgcggcctgatcttacttatctctctgacatgtgcagtcatctgcgtcagcaaaagtactcaaccattttttctcaaaacaatgatgctgtaccagcatcgctgaccgaaccaccaccgttaatg

SEQ ID NO: 24160 - DNA, 361 bp, Glycine max
  unsure at all n locations
  Clone ID: LIB3106-007-Q1-K1-F9
actttcaactttgcagagagctttattagcttgtagtagcagagtggggaggtaggaaacagagcaattgaagttgagacattattaggtgttctagatcctagggtggcatctggaatcacactcttcaatcaacaatgaaattctgggacctattcttcgtggctctcatgccagtcttggagaccctcttgattactctccttggtttattaattgcaacccaacgatttaatctcctgcgaagcgttgaagcaaggaattatntaaataatgtaagttcttgcttattttttattttctctaaatccatttaggaacttatctggaaaggatcatccaaaattatgttgtgcttacc

SEQ ID NO: 24161 - DNA, 276 bp, Glycine max
  Clone ID: LIB3106-007-Q1-K1-G1
cagagagagagagatccatccatcaattaattttcaatggccgatcagctcaccgacgaacagatctctgagttcaaagaaggctttagcctcttcgacaaggacggcgatggttgtattaccaccaaggaacttgggactgggatgccgtcgcttgggcagaacccaacttgagctgagctgcaggacatgataaatgaggttgatgctgattggaatggtaccattgatttcccagaattcctcaatctcatggcgcgcaagatgaaagacact

SEQ ID NO: 24162 - DNA, 465 bp, Glycine max
  unsure at all n locations
  Clone ID: LIB3106-007-Q1-K1-G10
tcgaccacgcgtncgggctaatgtgattggtgtttccgtacactacaggagggcaccggagcacccggttcccgtggcccacgaagattcgtggagtgccctcaaatgggtcgcttctcacgtgggcgaaaacggtgttgaagagtggctgaagaaccatgcagattttgaaaaagtgttcttcgccggcgacagcgccggcgccaacattgcgagctatttgggcattcgggtcgggttagaagggttacccgggttgaagctcgaaggggttgttttggtgcatccttatttctggggtacggagccgctcgagtgtgaggtggagcangctgaaggcgctgccaaggtgcaccagctgtggcgggttacgtgccccaccacaacgggatccgacgacccgattatcaaccccggtcacgatccgaaatctggcaagctggcctctgggagagtgcttgtttt

SEQ ID NO: 24163 - DNA, 237 bp, Glycine max
  Clone ID: LIB3106-007-Q1-K1-G11
ggctaatgttattgatgttaccaaacactatttgatttcaccgaaacacccacttcccgtggtccaggaagatttaatgagtgccctgaaattcgtcactattcacatattccaaaaccgtcttgaatagtgtcttaaaaaccattcacaccatgaaaaaatgttcttctccaccaacagctccgacgccaacatttcaagctatatgtgcattctcttcggcgttacaatatttac

SEQ ID NO: 24164 - DNA, 143 bp, Glycine max
  unsure at all n locations
  Clone ID: LIB3106-007-Q1-K1-G12
cccacgcgtncggacaagaacaagatggaggcagaacttaatttcttactaagaaattttgtgattgtacatttaaattggaataatttcttaggtcaaagaatatttaacaatgtcaaagtatattgtctcctgattagatt

SEQ ID NO: 24165 - DNA, 259 bp, Glycine max
  unsure at all n locations
  Clone ID: LIB3106-007-Q1-K1-G2
atggctgcctcatccacaatcaacaacttcttctctttcttcttacccacaaaaccaccacgggcctgttcaccggaggtgaagggcagcaccaccaccaccacttctatgaacccttcttcttagacccacaaacccttcttgcagcccctaatttgccaatacaacccttctncttcttncccttcttncctgtcttcttcttctgaattggccctctgtatatgcccctccatggcgtactccaacacgctctttt

SEQ ID NO: 24166 - DNA, 381 bp, Glycine max
  unsure at all n locations
  Clone ID: LIB3106-007-Q1-K1-G3
gcgcccacgcgttcgcaaagttagaagtaaagattatcatggcttctctagcaaccttggctgctgttcagccaactacnatcaatggccttgctggaagttccctctctggaactaagctctctttcaagccctctcgccacagtgtcaaatccaagaacttcaggagtggtgccgtggtagcaaagtatggtgacaagagtgtgtactttgatttggaggatctgggcaacactacagggcagtgggacttgtatggctcagatgcaccttcaccctacaaccctcttcagagcaagttcttcgagacatttgctgctccattcacaaagaggggattggtactcaagtttctgatattgggaggtggttccacccttg

SEQ ID NO: 24167 - DNA, 56 bp, Glycine max
  Clone ID: LIB3106-007-Q1-K1-G4
ggggccgaccacgcgtcctaaaaaaaaaaaaaaaaaaaaaattttatatttttaac

SEQ ID NO: 24168 - DNA, 447 bp, Glycine max
  Clone ID: LIB3106-007-Q1-K1-G5
catcatccatggactggttctcttggctattcagaaccactcttgaaccttcctgaatctgggactatggcctcacctttgcccgcaacgagctccaattggaagatgcttgctacttcaaccacgagtttcttcagagcatgggaatctcaattgccaagcacaggctagagattctcaagcttgtgaagaaacaagaaggaggaggagcagcacggcccaataagaagctctctggggtcatcaaaaagtgcctaaggaagtgcatgaacaagtttgttgtttctcatgatcatcatgcaatcaaacacatgccatgctccatggtgaatgtgtcagtgccgtcaccactaccaacaccaccacatgagattagttggtaccatcaagggaaattaaaagggtcacttgtgaggaagcaacaacaaaggagtgaggaacttaatg

SEQ ID NO: 24169 - DNA, 434 bp, Glycine max
  Clone ID: LIB3106-007-Q1-K1-G6
cgattttcttttctcaacctgtttcttcttatgtttcaatagggtttctatattgtttctgttttttttcctcagggccttttttcccccagaaattcataaattcgtggaagttcgaggctcgatttgtgcattgaattggtgccgcatttactctacgaattgaacaaggtggcatgatgcgatgagatgatgttctatgagggtattctcagtgtaacactctgaatttgaagtaaaatgttcagtccaagcatggattctgcaagggatgcgagtggtgtggcagggaccgtgctaattcccatgcggcttgtgtggccgtacgggggaagaagtgtgtatctaagtggttctttcacgcgggggtctgaacttctacaaatgtcgcctgtggaaggctgcccaactgtgtttcaagtattcatagcttg

SEQ ID NO: 24170 - DNA, 367 bp, Glycine max
  unsure at all n locations
  Clone ID: LIB3106-007-Q1-K1-H1
cccacgcgtncgcaacaagtgtttctggaaccatggcatccaccactctatcccctacaacggcttctcagctatgctcaagaaagagtgggattttcagtccctcacaggcacttcttgtgaagccagtgaagaggcagatgatggggaagagcaagggaatgagaattgcatgccaagccaccagcattcctgctgatagagtccctgacatgggcaaaagacagctcatgaatctgcttcttcttggtgccatttcactcccctctgctggaatggctattccctacacctacttttttgtccctccaggttcaggttcttcagctggtggtactgttgccaaagatgctgttggaaatgatgt

SEQ ID NO: 24171 - DNA, 401 bp, Glycine max
  Clone ID: LIB3106-007-Q1-K1-H10
gcgcccacgcgtccgctccgaatagaggatgccattaatgcaactttcacttacattgatgacggtttcgcaacccttaacactccttcttctccttcctcttcatcttccttcccctctctcattcaagacaggcctgtttttgctgcccctgcccccatcatcaccccaactgtgagagaggatatggcaaaggaatacgagaaagctattgaagaacttcagaaattgttgagggagaagagtgaactcaaagcgacagctgctgaaaaagtggagcagataacagcttttctagggacatcatcatctgatggcatcccatcatcagaagcctcagacaggatcaaagctggtttcattcacttcaagaggagaaatacgacaagaattcaactttt

SEQ ID NO: 24172 - DNA, 209 bp, Glycine max
  unsure at all n locations
  Clone ID: LIB3106-007-Q1-K1-H12
gcgtgaccccacgcgtnttcccacgcgnnctttttactttttctttccatggccncntcctgcgtcctcgcttttttctcctcactctgtcgcaccaaaaccaaaccctctctctttacaccccccttcaaacccctcacactccaatttttatgcctcaactcctccgtcttttttttcctttccgcaccaactcaccgctcttccct

SEQ ID NO: 24173 - DNA, 184 bp, Glycine max
  Clone ID: LIB3106-007-Q1-K1-H2
gcgcccacgcgttcgggcgaagaaggtattgacgtctatgatgaaaatgaaattggtgaaaacattactgcttcttctttgtgtgaaactcttctgttatgcagtgattggtgctcctcaaacttgtgctgcttacaatgaggataaatgccgcgattcaaatgaatggaaaggggagtttttt

SEQ ID NO: 24174 - DNA, 406 bp, Glycine max
  Clone ID: LIB3106-007-Q1-K1-F3
agtttgttgtgagctataagctagcttatcgttaggtgaatatgaagttgaatgttttcttgtgggctgcaggagttttggtagcatggccatgccatggcgcacgctaccaaaggttccctctccgaatgaaaactggctatcgagagcgttcttccgaggtaaaatgcgcaagttctaggcttgctgtggaagcacacaacatacgagcctttaaaaccattcctgaagagtgcgttgaaccaacaaaggactacattaatggcgaacaatctagatcagactcttaaacagttaaccaacaagctttcttttatgctagggaacgcgacatccatcacaacgacatatttatattcggcatatataacacccgactctctaatattccatactatgaaaaaca

SEQ ID NO: 24175 - DNA, 273 bp, Glycine max
  Clone ID: LIB3106-007-Q1-K1-D5
aaaaaaggagaccaaaaggaaaattttgatttacagtgttccaagatggacaagagggtgcgactgataccatgcggggcgatcactagaattacaaatcttatcatttcgttcttcgaccttcacttctttcttgctctaccaatcatcttccttctcctttacccttagaatgcatgtcctctctcttaatgggtctagggagtatgagattctataatgaatatttgacacacaatcccaattttaaagacccctttctttacaatgctt

SEQ ID NO: 24176 - DNA, 414 bp, Glycine max
  Clone ID: LIB3106-007-Q1-K1-D6
gttgatagatggcataaaaagagtaaagtatactttgatagtgacagtgacgagggtgaaagaaatgatgttacagggaatgcaggtataactaccggtgcggttacgttggaggagcaagaagctctggctttgaaattgttaaattccatgcactcatagaatatgcgtaattcagctgtaacattttgtgacagcaaaaacgggtggaaagagagcaattcctgaaacattataggagttctgttaacaaaaaattttgatctcccaatttttttgtcatctctttcaagaaaggtagacatagaatcaatttacttaattttatttattttaactaaaaaaatgggagtaacggacatccttatgtgtaccaaacacgatgtttaatattattgagatatcataagttgt

SEQ ID NO: 24177 - DNA, 449 bp, Glycine max
  Clone ID: LIB3106-007-Q1-K1-D7
gagatgctcaaccgcatcaagaaacaaggccttgatatcacccctcgtattctcagtatcgctcgtcttctccctgatgcggtaggaactacctgtggccaacgtctagagagggtatatgatactgaatattgtgacattctcagagttcctttcagaacagaaaagggaattgttcgcaaatggatctcaagattcgaagtctggccatacctagagacttacactgaggatgtcgccctggaacttgccaaggagttgcaagccaagccagatctgattgttggaaactacagtgatggaaaccattgtgcctctttgttagcacataaattaggagtaactcagtgtaccattgctcatgctctagaaaagaccaagtaccctgaatctgacatttactggaaaaaaatttgaagagaaatatcaatttctaatgccaatttact

SEQ ID NO: 24178 - DNA, 405 bp, Glycine max
  Clone ID: LIB3106-007-Q1-K1-D8
cacgcacagtactgcactgaacgaaccgtatttgttccgattcagccatggtggagaacagtctcttctaggatatatgtagggtcaaaaaattaaaccccgatgacaaaaaattattctataaagtcactcgcattgaagcaagaagtgaaaagtttgacatgtttatgcacctggacattaattccgagatatatccgttaaaggttggtcagaagttcgctcttgtgctagtttcaacacttaatcctgatggaactccagacactggatattatacccagatcagactacaatcactggccaacaattgtgaatatgtcatgtatgggaagctctacaggataacagacggttcatggcgttaaaaagcggacatgaatatttcattttgagggcttctga

SEQ ID NO: 24179 - DNA, 229 bp, Glycine max
  Clone ID: LIB3106-007-Q1-K1-D9
cacacacataactgaactaaaccaatcttattcaacccgcaacagacattcaaccgagccgggtatcacacactcgcgcactcatatatatcttctatccctgcaacaacatagttgttctcttcactctcacaatgcgaatactaattgaactctctctcatcaccatccacctctacttctacctctatatcaccctctgcaacgacctcaccaactacgatcacct

SEQ ID NO: 24180 - DNA, 431 bp, Glycine max
  unsure at all n locations
  Clone ID: LIB3106-007-Q1-K1-E1
gccacgcgtttcgccacgcgttcgattcaattaaactagtgggtgggataatgcattcccgggtccgaagtacgacggcgaggtgttacataataaagcacgtgagttgctgcaggatacgcgattgagccagacactgaccaattttgtgataccaaccttcgaccttaagaaacttcacccagttatattctcaaactttcagctgaagacagttcctagctttgatgcgaagctgtcagatatatgcattgggacctcagcagcaccaacttatctttcaccctattactttgagaatgatggcactgaattcaatttggntgatggtggcgttgcagcaactaatccggccatggctgctgtcaatgaagtgataaagcaacagaagctgggaaagaatctcgacatcagtttttaaaagtcaaatg

SEQ ID NO: 24181 - DNA, 221 bp, Glycine max
  unsure at all n locations
  Clone ID: LIB3106-007-Q1-K1-E10
cccacgccttcggcaggctttatgtatttgatccttatggtttcaactcgttgtcattagggtgggctcctctctttacatgtggccattcctgactgggtacctgagagatgttttgtttatttaggaattaatataaaatgatatcttgtctgtcnnaaaaaaaaaaaaaaaaaaaaaaaaaaaaaaaaaaaaaaaaaaaataaaaaannaaaagggcg

SEQ ID NO: 24182 - DNA, 391 bp, Glycine max
  Clone ID: LIB3106-007-Q1-K1-E11
cgaattttatcactggattaataattagcacatagttttttggaagagttgtgaaaatgggacttggagctttttggagtggcatctatgcccgtgatcaaagtactaataatcactgcagttggcttgcttcttgcactggataacgtaaatttgttgggaaaagatgcaaggatacaagtgaatcatcttgtgcattatgtgttcaatcctgcactggtgggtggcaatttggcggacacgattacttttgagaatgttgttttattgtggttcatgcccgtcaatatcctccttacgtttataataggttctgccttaggatggatccttatcaaattaacaagggctcccaaacacttggaagggctaatattgggtgtctgttctg

SEQ ID NO: 24183 - DNA, 388 bp, Glycine max
  Clone ID: LIB3106-007-Q1-K1-E12
cgagataactagaaacagtgtgatgaaaatgaaggtccttgttttcttcgttgctacaatggtgggagcatggcaatgccatgcgtacgatatgttccctctccgaatgaacactggctatggtgcccgtactccggaggtgaaatgcgcaagttggaggcttgctgtggaagcacacaacatctttggctttgagaccattcctgaagagtgcgttgaagcaacaaaggaatacatccatggcgaacaatatagatcagactccaaaacagttaaccaacaagcttacttttatgccagagacctcgaagtccattccaaggacacatttgtgttcagtatagatggcaccgtactctctaatatttcatactacaaaaaacatgga

SEQ ID NO: 24184 - DNA, 416 bp, Glycine max
  Clone ID: LIB3106-007-Q1-K1-E3
ggcttttccttgctattatatgcttggatccacttgatcactgtgaatctctataattaagcatttgcagatttctgaggatgggttactattgctataaacgcaattatagtactcatacatcagatgttattgtgatgttggcggtggccttgatgcttcttggcataccttggctctttacgcgtgaacaagtggtggtagttgaagaaaagaagacgaattggtcagctttgatcacaccaatactagtactactcatcttgcttttgctgtcactgattggaactcccaggagggtttatgcaaagccaacgtgctatcggtgtaagcatgtctgctactgttactgctagtgtcagtccaacacctgctagtgttcagtgctctatgattatctcatatctttggtcact

SEQ ID NO: 24185 - DNA, 452 bp, Glycine max
  Clone ID: LIB3106-007-Q1-K1-E6
gcaactcaagctgaacaagctgttttagattaagaacaggaaagcaatgacacagcggctgcaaaccattgagctgtgccggattagacagagggagagagatgaaaagcttattaaaagaaagaggtagctcccgatttaacgagtttggagcaaatgtaaagagcgggaacatttgacacgacaagatacaattctgcaaatgagagaacaatggaaggtggcagaactttttggttcactattgatcctttggttgctccattccttttttgatgccttattatatttaatcactacagcaaggataaccccattcttagctaaaaacttgaatgttcctatctatgaattattttacctgtctaacggtagcgttttggtgcggttatggattccactaccatttgttaaacaattattatgcctgcatggttagatagaaaatgatg

SEQ ID NO: 24186 - DNA, 245 bp, Glycine max
  unsure at all n locations
  Clone ID: LIB3106-007-Q1-K1-E7
ctcaatcaaccattgcaataacattctactcctctctcttaaccccacccctctgcggtctgataaccagctaccgggcgctcccatctcatcaagcaaaactcctacctatacttctncaacccgaatcccttcaagttcttcataacaatcatatcatcagccaacaaccagaccaccaagtcaccaacaaaagtcaattcttcaccaatcctgttcaccccaccagaactttacccaaacac

SEQ ID NO: 24187 - DNA, 331 bp, Glycine max
  unsure at all n locations
  Clone ID: LIB3106-007-Q1-K1-E8
cttcttacagtatttggttgaaagtttcaattatgtttcctttcagacaaaacgggcaagggataaaaacgactatggtggttatacataacaatctntttaatatcaacagcatcaccaattttggatgcatcgttcactaaagcttatgctttatatgcaattcaatccatgcacttactttttcaaccaccaaaatctccatccaattgattaattctaccaaagcttatttttgtaaactaaaaattttaaatatttcaaatttaataagaaaaatcacattaccaacctttttaccttgctaacaagcataccatgttaattttta

SEQ ID NO: 24188 - DNA, 375 bp, Glycine max
  unsure at all n locations
  Clone ID: LIB3106-007-Q1-K1-E9
ctagctagttcacagcttcagtttgtttttgttgatcctgtgaacttatggctggggggggggttctgttggatacagtgggccancatgtttgggatgagggttaggattgcattagctgaaaagggtgttgagtatgaatacaaggaagaaaatctcaggaacaagagtcctttgcttttgcaaatgaacccaattcacaagaaaattccagttctgatccataatggcaaaccaatttgtgaatctgcaattatagtgcagtacattgatgaggtctggaatgataaagctccaatcttgccctctgacccttatgagagagctcaagccagattctgggtagattacattgacaaaaaggtgtatgacact

SEQ ID NO: 24189 - DNA, 202 bp, Glycine max
  Clone ID: LIB3106-007-Q1-K1-F1
gcggttagggttcacaacctttccttttccttttgcttgcgaatctgaatcaaataatcaatcatgcattcattattcatcatgtgggcggcgaaaaaaatcacgctcaaaagatccgaccgcgaggctttctaggtggaggaagccgtggcgcttgaatctcacaccataaagcacatgatcgaggacgactgcgccgaca

SEQ ID NO: 24190 - DNA, 416 bp, Glycine max
  unsure at all n locations
  Clone ID: LIB3106-007-Q1-K1-F10
cgatgatggcggggactacactcacactggcaccacctagatgggcggggcggccaactcggcggtgcttttggcgggaaattcatccagggcttagaggtttgggaatgtacaaaaatggtgggggcattgaattgaatgtttctgcctgggatgataagccctttgaaatgcttccgagcggtaacaaggcttacttggatgagcaggatgtggtgacgtttcttgatcctcctaaggacttaatccctttcgacccatcttcctataatcccgctgcatacctatggaaaaaaattgaagatattcctcaggaaaggcgacatcgacttctncgattgttgaaacctagacttgtatcaattgcttggcagaatgctggtacacgattcgatgatcccaagttagtaaagaaa

SEQ ID NO: 24191 - DNA, 185 bp, Glycine max
  Clone ID: LIB3106-007-Q1-K1-F11
cgaccacgcgtccgcagattttaactctctctcggccaaagttacactttgatcgacctctatctcacatagcgtttgttaatggctactatttcatttaacacaaaaactttctttaacaattccacttggaatccccacattgttaaactcatctgcccagaggaaggcatcgtctatcacac

SEQ ID NO: 24192 - DNA, 129 bp, Glycine max
  Clone ID: LIB3106-007-Q1-K1-F12
aatatgcaatataactggttctttccgcattctcaaaataaaaaccaaaaatgggtgtgggcgcaaatacaagggcggggccttcttaaaaaccacctttacgtacccaagctttctatcaagtacttt

SEQ ID NO: 24193 - DNA, 408 bp, Glycine max
  Clone ID: LIB3106-007-Q1-K1-D4
ataaccaacaaacttggtcaggttttaacttttcgaacaaactaactagctaggggagaaaaagagaaacatgcgcttgcctttacatcaccaccaaccttaacctagatggagttgacaccaaccccgtcttttctgaagccaccactgctgtctctacaatcattggcaaacctgagaagtttgtaatggtcatattgaagtcatcagtaccaatatcatttgagggtaacaaggaaccagcagcatatgctgagatagtttcaatgggtggcataaatacagaagtgaagaggaagcttattgctaccattggaaccattttgcagtccaacctgtctatcccaaaaacacgattttttcttaaagtcttttgatgtagtgcgtttcgtaccaacttcaaaatgt

SEQ ID NO: 24194 - DNA, 74 bp, Glycine max
  unsure at all n locations
  Clone ID: LIB3106-007-Q1-K1-F2
tcgggnaaaaaaaaaaaaaaaaaaaaaaaaaatttttaattaaaaaaaaaaaaaaaaaaaaaagagaggngggg

SEQ ID NO: 24195 - DNA, 263 bp, Glycine max
  Clone ID: LIB3106-007-Q1-K1-B8
acgatcccatgaaggaaccttctctggttacagcaaacactgttctttcaatcttgggcatggagtacccggatgataaaatatcatgctacatttctgatgatggagcctcaatgtgtacatttgagtccttatcacaaactgcagagtttgctagaaagtgggtaccgttgtgtaagaaattttccatagaacctcggtcacctgacatgtacttcagcgagaagatcgactacctaaaggacagagtgcactccaccttt

SEQ ID NO: 24196 - DNA, 204 bp, Glycine max
  Clone ID: LIB3106-007-Q1-K1-B9
cccacgcgtacggatccattccacctaattcattctgccacgccttctttaattggtctgagttgattcatggctatagcactttcctccactgcattgtcaagccttacaaacagagaaattcgtcaaaagggtttcccagacagaacacccacatgcttgagtttgaccagaaaaacaagtgcatatgctacaaaaggggtc

SEQ ID NO: 24197 - DNA, 325 bp, Glycine max
  Clone ID: LIB3106-007-Q1-K1-C1
gaaaagagtgagagagagagaggagtgggatatcgagaaaccctagtggagccggaagtggaagtgagagagagtaaatgacgatccattctgtggtgatacagaagctgcttagcaccaatgctcaagtgggtcgacgtgttgccgctcaccatttgaaggagttcacctatggcttccgcaacaaaatggtcatcatcgactccgacaagaccctcatttgcatgcgcagtgcctgcaacttcatggccgtcctcgcccgccacaacggccgcttgatgttcatcaacaccaaccctctcttcgacgaaatcttcgacctcat

SEQ ID NO: 24198 - DNA, 326 bp, Glycine max
  unsure at all n locations
  Clone ID: LIB3106-007-Q1-K1-C10
cttcggagccaaaaagaccttcttaatgccggtggttagacttaccaccgtacctttgattcccaggggaccctacagtttttgctgtcggcttaaccaaggagcttgtttgtggggaaaagtcaccggtaataaattatatatcgtctcctacgtctaagttctcatatgcttgttttcctagaagagcctaattcatctttcttgttagggcctatgggatgaatcaacaatatcatgcctttgtgtnnaaaagaaccaggatcacttgctccaactggattgtatctcggtggcaccaaatatatgttcatccagggtgaacc

SEQ ID NO: 24199 - DNA, 374 bp, Glycine max
  Clone ID: LIB3106-007-Q1-K1-C11
cactgaggaggcacaccttcaggagcagtcatggttctcaaaaccgagctgtgccgattcagcggtgccaagatctacccagggaaaggcatcagatttgttcgtggtgattctcaggttttcctgtttgctaactcaaaatgtaagaggtatttccacaacaggttgaagccgtcaaagctcacgtggactgcaatgtaccgaaagcagcataagaaggatattgctcaagaagctgtgaagaagagaagacgtgctaccaaaaaaccttactctaggtctattgttggtgctactttagaagttatccagaaaaagagaaccgagaagccagaagttcgagatgcatctagggaagcacagcttcgtgaaat

SEQ ID NO: 24200 - DNA, 376 bp, Glycine max
  Clone ID: LIB3106-007-Q1-K1-C12
gtccttccttgtctgttatcactgtgtaagcagtgatcgattctgcgaactgcgattcgcagcgccaattcaaaagcggtcgttcgtcggagatggagacgctaccgacgacgacgacaaagcgaggaggagcgagatcgaagcccgttcagacctcgaaatcgtctctcgttatggccttcttctcctgcgtcgcgtggctctacgtcgccggaaggttatggcaagacgcagagaatcgcaatttactcgctagtcttctgaaaaagaattcagctcagaggcctaaggttcttacagtggaagataagttaatggtgcttgggtgcagggatctggagaggaggattgtggaagctgaaatggaattgacatt

SEQ ID NO: 24201 - DNA, 401 bp, Glycine max
  unsure at all n locations
  Clone ID: LIB3106-007-Q1-K1-C2
cggacgcgtgggcggacgcgtgggttggaatcggaggagggacaacaccattaacaggccgagatggcgtttgatggcccaggaatcaccctctctcgactcagacaaaaccgccactgctgggtccctctccttcccttttctcttctcttctcttctctttctttcgctttttcctttcttcattcttcctttctattctctccgcagattctgcatcattgaaggccccgaaactgtacaggattttgccaagatggagcttcaagaaattcaggacaacattcgaagtcggaggaacaaaatcttcttacacatggaagaggttcgcaggcttaggatacaacaaagaattaaaaacgcttgacttggaattntaagcgaagagcaagagaatgaaa

SEQ ID NO: 24202 - DNA, 259 bp, Glycine max
  Clone ID: LIB3106-007-Q1-K1-C3
ctcaattacatttgtttttgaagcaggtggtgggatttgatcttgcacatgatgaaagtcgaccaggaaggcgttcaactaagcacatgcctacttcagctgagtggacaaatgaattgaatccagcatactcttattacctttattactgctatgcaaacttgtatacactcaacatgctgcgatgaatctaaaggaatgaccacaataaagtttcggtcttattgtggagaggcacgtgatagtgatcatttggctg

SEQ ID NO: 24203 - DNA, 390 bp, Glycine max
  Clone ID: LIB3106-007-Q1-K1-C4
cccacgcgtccgacgaaaagaagtgtttattcttggaattctttatctacccaggtggcacacaacccttgaaaacgcaagttcttgatcaaatggttttcaaatgtaaattgatttcgattgggtaaggaaattatagtttatgggaagaaattataattaattgaaattacaaaggatggcataaatacgaagagttggttagagattctccaaccaatctgattataattcaagctagtcgattagggagatacataacatgagataaggcttagattagaagaattacatcatattcttagtttctggaagaattatttaaaacaaaaaatcctaacaactattacagaaatatcatttaccaacttggtatgaaaatgcattaaa

SEQ ID NO: 24204 - DNA, 313 bp, Glycine max
  Clone ID: LIB3106-007-Q1-K1-C6
catacatatacatggacaccgtcttttctttattcgttgctattccctcactcacgggcctgaaatcaagcgcaggcgaaatgaataccccacctaaagtctcagctccccaagccacattgttgggcatcaacgcttccctcaaagacattgtaatcgctgttgttgccactgtcgctagtgcaatgctttctaacaacgccatagccatttaaatgtttctgcgaggtgatgacagtttctattctttcgttcccaacaatatatacaatatctttgtgcagaagatcttttttacaaacaaaacatgttt

SEQ ID NO: 24205 - DNA, 376 bp, Glycine max
  Clone ID: LIB3106-007-Q1-K1-C7
ggattgaatcagacatctagtgagggtgcttacctacagtggcctagtgctgcagtgatgtgtgctcattcatatgaccaatttaaacatggtgttttccaggctccatttggtcaacagccgttgagctttgactattcacagaactattagatgacatttagggggagaatattcaatttggatgcaaaaagttatgttagcttttttagaatttcatgttaagttcatttgtcagttctgtcatagacccttattgtagggatatggctttggttttcagttttgatggttatagtaaatcgttgcgtacttttaatgtgacagtttataaaatagtgaattgtagtgtatcactggatttgcaatatatgat

SEQ ID NO: 24206 - DNA, 354 bp, Glycine max
  unsure at all n locations
  Clone ID: LIB3106-007-Q1-K1-C8
ccacgcgacgcgntcttcagacacacaatttgaaatttcagtatggacaacaccactaacacacccgtattgcgttctatggcgcgaggagtcaccctctctcgactcaaacaaaaccgccactgctgcggccctctccttccctatactctgatcttctcttctctttctttcgctctttacattcttcattcttccttcctattctctccgcacattctgcataattgaaagccccgaaactgtacaggattttgccacgatggagcttcaagaaattcacgacaacattcgaagtcagaggaacaaaatcttcttacacatggaaatacgttcgcaggcttatgatacaac

SEQ ID NO: 24207 - DNA, 412 bp, Glycine max
  unsure at all n locations
  Clone ID: LIB3106-007-Q1-K1-C9
cccacgcgtccgaccacgcgtnnctttcacgcttncgcccacgcgtncggtttcaggcggagcgcgcattcacaaatgaggttgaaaagggccctgccggaagaagataaataccgtctttcattttccggcgatctctttttttcttccatcaccgttttgcggctatccctaatccttaacagaaatgacgacatcaaggcgccttgcggacaggaaggtggagaagtttgagaaaaacatcaccaaaagaggatttgtgccagacacaaccactaaaaaggggaaagactaccctgttggcccagtgctgctcggtttcttcgactttgttgacattggatcatcttctcttcagataatcaggacagcaacgagtggaggcatggcttaaatggaggcttattttgga

SEQ ID NO: 24208 - DNA, 105 bp, Glycine max
  unsure at all n locations
  Clone ID: LIB3106-007-Q1-K1-D1
gctattacctctttttccaaactctaaaaatttttagttccacaaaaccaaaccaaaatgggggcagcctcngtctcatccaccatgatatcaacaccaacctta

SEQ ID NO: 24209 - DNA, 397 bp, Glycine max
  Clone ID: LIB3106-007-Q1-K1-D10
cggggcggccacgcgttcgactaggagctcttcttcattgggtcttcattttcatgcacacacttgcataattttggaagccaagaatttttggagggtggcatcaacaagaaattcttggaatggagatcaccaatgtcagcgagtatgaagctattgcaaagcagaagttgccaaaaatggtgtttgactactacgcatctggtgcagaggaccagtggactctgcaggagaacagaaatgccttttccagaattttgtttcggccacgtattcttattgatgtgagcaagatagacatcacaactactgtcctgggctttaaaatatccatgccaatcatgcttgccccaacagccatgcagaaaatggctcatcctgagggagaatattcaac

SEQ ID NO: 24210 - DNA, 424 bp, Glycine max
  unsure at all n locations
  Clone ID: LIB3106-007-Q1-K1-D11
cccacgcgtccgcccacgcgtccggtagttcttcatcatagtcttaaacattaaaccttaggaaaactcaacaatgctagacatcaaaggctacctcgtactcttcttcctatggttcatatcaaccattctgatacgttccatcttcaagaaaccacagcgtctaagactcccaccgggtcctccaatttcaatacccttgctgggacacgcgccatatctncgttcactgctccaccaagcattgtacaagctatcactgcgctatggacccttgatccacgtcatgatcggttcgaagcacgtggtggtggcgtcgtctgcggagacggccaagcagatcctcaaaacctcggaggaggcattctgcaaccgtcccttaatgatagcgagcgagagcctaacctacggcgcggcggactac

SEQ ID NO: 24211 - DNA, 365 bp, Glycine max
  unsure at all n locations
  Clone ID: LIB3106-007-Q1-K1-D12
gctncagatacctaaagcaggcaaaatctattcattcaatgaaggtaattatcacttgggggatgagaagctaaagaaatatattgatgatctcaaggacccaggtccaagcggcaagccttattctgcacggtacattggtagcttggtaggagatttccacaggacactgctatatggtggcatttacgggtaccccacggacaagaaaagcaagaatgggaaactaaggctcctgtatgaatgtgctcctatgagcttcattgtagaacaagctggtgtgaaagggtcagatggccatcaaagaatactcgacattcaaccaacagagattcatcaacgtgtgccactgtacattgggagcg

SEQ ID NO: 24212 - DNA, 389 bp, Glycine max
  Clone ID: LIB3106-007-Q1-K1-D2
gaaaatgaaagtccttgctttctttgttgctatagttctagcagcatggcattgccatggctcagagcatgaccatgaccatggccacacctaccaaattttccctctgagaatgaaaactggccatggtggccactacattccggaggtatcatgccaaagttggaggcttggtgtggaagcacacaacgtcattgactggaaaaccgttcctcaagattgcgagggatatattgggaactacatgcttggcgaacaatatagatcagactccaaaatagttaaccaacaagcttatttctatgctaaaacctctcatatcactgccaaaaccgcatgggtgttcgacatagatgagactacacttctctaatcttccttactatgct

SEQ ID NO: 24213 - DNA, 419 bp, Glycine max
  unsure at all n locations
  Clone ID: LIB3106-007-Q1-K1-D3
cttttctaacatccttcttattctttttatacactgcagattctagaggagcgtgaatttgacgacttgagtggccatgacattataagccactccagaagctcccaccctccaacccccattgtccacaagcacactaaatccaatcacaacaaccacaagaaaaagagatcagattccgaggaagatggctccgtctcttgcaacaagtgcagacctcactcccgcgacaaaatcttcatccttcccttggatcactcctccaccaacaactctcacaaaccctcttncttactcgccagccccaacggtattttcaggtcccttgtttccaagctcacccgcaagagtcccatgtcttcttcttcatcccaagaccctctccaccctccagagaggaacaatgganaatggcagtc

SEQ ID NO: 24214 - DNA, 155 bp, Glycine max
  Clone ID: LIB3106-007-Q1-K1-B7
atcgaccacgcgtccggcgtccgatcaccttatgctgatcaactttttatactagcacacagcaacactgtatggggaccaggatcctctacgcgtgtttaagttccagaattatttcccagacacgccgccttctttttgtgttataagtgatc

SEQ ID NO: 24215 - DNA, 272 bp, Glycine max
  unsure at all n locations
  Clone ID: LIB3106-007-Q1-K1-A11
agaaatttgcgccatcgtccacagtagcgttttagacttctctcttattataagagctaaggtagtttaggtgtcaaggcataaatcantatcatcactttaaatttcattagaaaccttcaaaatgtcacggaagggtttgattgagcaagacctgattaagttggatgtaacaaaattgcatccacttttcttcaaaaatcatatctcggctggctactattaatatcggcactataggtcacgtggcccatggcaagtccacagttgtg

SEQ ID NO: 24216 - DNA, 441 bp, Glycine max
  Clone ID: LIB3106-007-Q1-K1-A12
attcacctgaggcttccaaagcaatggctttccttgcagcatccactgctgctgggtcccggggcatgtcagaaatgcttggaaaccccatcaacttcagtggtgccacaaggccagctccatctgcttctagtcctgcctccttcaagactgtggctcttttctccaaaaagaaggctacaccaacacctccaaaaaaagctgctgctgctgctcctgccaatgatgagcttgccaagtggtatggtcctgacagaaggatcttcttgcctgagggtctcttggaccgatccgaaatcccagagtacttgaccggagaagtccctggagactatggttatgacccatttggtcttagcaagaagccagaagactttgccaaatatcaggcatttgagttgattcatgccagattggcaatgcttggtgctgctggattca

SEQ ID NO: 24217 - DNA, 279 bp, Glycine max
  unsure at all n locations
  Clone ID: LIB3106-007-Q1-K1-A2
cccacgcgtccgctttttcccattcattctctttcaactctctcttcaattccatcatggcgaaccaagccgagtcctctgatgctaagggaacgaanagagactttagcacggcgatcctggaacgcaagaaggcgccaaaccggcttgtcgtcgacgaggctgtgaatgatgacaattacgtcgtggtgcttcatcccgacactatggagaaactccagctcttacgtggtgacactattctgcttaagggaaagaaaaggaaggatacaatttgta

SEQ ID NO: 24218 - DNA, 201 bp, Glycine max
  Clone ID: LIB3106-007-Q1-K1-A3
ccgaccttctatcactgcgtcacgctctaactttcacacttattatcaccctaatcctcggtgttctggctcagtcttgagagtccattgacacaactaatgtctaagaactctaaatcctggaactcgaggtcgcacgccaaactcaccttaaggattgaactgacagactacactacactcttgacttatacaatccat

SEQ ID NO: 24219 - DNA, 316 bp, Glycine max
  unsure at all n locations
  Clone ID: LIB3106-007-Q1-K1-A4
ncgnccacgcgtntcgnccacgccgttcgnccacgtcgttcggagaaaaagaaaaaaggaaagaagaggtataagtggatgtagagtacgttttaagtgtgagtctctttttacttcgtgtacacttctgccaaaaaaatggttgttgtttacttgtaacattttcatcatcatccttgcttgaactgtaactcaaaccctagctggttttgttagcttgagttctttgtaaatcatcacttcagtttagtgtttcaaatttaaataataacttatatgatgattcccttagtttgctttgctgcnnnnnanaaaa

SEQ ID NO: 24220 - DNA, 340 bp, Glycine max
  unsure at all n locations
  Clone ID: LIB3106-007-Q1-K1-A6
ctcatttggttttgttgcttgctttgatcttcactgtagttgccggcgctggagcccaaggcccatgcacctctcccgcgccttccacaccccagtcttcaccacctcccatccagtcttctccgccacctgttccttcctcacctcctccggctcagtctccaccaccagcttgcactcccccaccagccccactcagctctcctccccctgcctcccctcctccttcatcttcaccacccgcatctccttcccctgcctctcctcctccggcatatccaccacccgcatctcctccccctgcctcccctacttcggcatgtncttccccagccactcc

SEQ ID NO: 24221 - DNA, 104 bp, Glycine max
  Clone ID: LIB3106-007-Q1-K1-A8
tccacgcgttcgctctgatcgtgtctctacgtgttatcatatatccaattacatgggctctgtctcagttttcaggagctttaggctctgagaaagacttaccc

SEQ ID NO: 24222 - DNA, 408 bp, Glycine max
  Clone ID: LIB3106-007-Q1-K1-A9
aggcagaggacagcattttcatttttcaactttttagaagaagagacggggaaaaggaaaaagaggcaagatccggtacgaggaggtcatctccagaatggtcgccaagtaacgccgattcgattctctctttgcagtgttcttatctctttctacgctattattgctttctcgagtttgccttttcagtggaccaaccaatagattggttaatcgtcctgtgttttaattttatggtttgcggctaaccgagggaggttttaggaaacggtggctgctcaatttgccctatttgcttttgggttttatttgcattattatgagatctgattctgagctaatctatatttgcatgcttgaattcacaccaagtatttgggtatctaatcctttaattcttggttgatc

SEQ ID NO: 24223 - DNA, 404 bp, Glycine max
  unsure at all n locations
  Clone ID: LIB3106-007-Q1-K1-B1
gggagaggagagcattttcatttttcaacttgagagaagaagagaaggggaaaaggaaaagaaggcaagatccgctacgaggatttcatctccagaatggtcgccaagtaacgccgattcgattctctctttccagtgttcttttctctttctccgctattattgctttctcgtgtttgccttttcagtggaccaaccaatagattggttaatcgtcctgtgttttaaatttatggttcgtggctaaaccgaggagggtttaggaaacggtggctgctcaattgcccctattgctttttcgttttatttgtttaatatgagatctgattctgagctagtctatatttgcatgctgtaattcaaaccaagtatttgngtatctaatcctttatttcttggttgat

SEQ ID NO: 24224 - DNA, 393 bp, Glycine max
  unsure at all n locations
  Clone ID: LIB3106-007-Q1-K1-B10
cgggtcgcccacgcgtccggatgttttctacctatatggctcagcaaaggagctccttccagcangaattaaggatacaggcaatgtatatgaagatgaagcaacagaaatctttgggccagttgggtctgcaactcaaaggttatacatggctgtctattcattggagaagagtcttggcttggatccaaatgacccaatcattccatttgttgttcttttaggctcttcagccacattatgggccttctattggttgcggacatatggaggttactcaggagatatgtcccctaaatcagcatttgagcttttggccgaggatgcaaatgctgcacttattgatgtccgttctgaggaaatgcgagaaaaatatggcattcctgatcttcg

SEQ ID NO: 24225 - DNA, 430 bp, Glycine max
  Clone ID: LIB3106-007-Q1-K1-B11
cccacgcgttcggtgaaagagaatccgaggcgaagagaagagaaaaattaagatggaggggaaggagcaggatgtgtcgctgggagcgaacaagttcccggagagacagccgattgggacggcggcgcagagccaagacgacggcaaggactaccaggagccggcgccggcgccactggttgacccgacggagtttacgtcatggtccttttacagagcagggatagcagagtttgtggccacttttctgtttctatacatcactgtcttaaccgtcatgggagtcgccggggctaagtctaagtgcagtaccgttgggattcaaggaatcgcttgggccttcggtggcatgatcttcgccctcgtttactgcaccgctggcatctcagggggacacataaacccggcggtgacatttgggctgtttttg

SEQ ID NO: 24226 - DNA, 426 bp, Glycine max
  Clone ID: LIB3106-007-Q1-K1-B12
accgcccggaatccggtcgccacgcgtcgaagaaaatctaattttctgagcagccaacactctcttctgtctctcgaaaattctggcttgagagaaaatctgatcatgtcgcggcagcgtatgtcgaccatcaccttctgtgtgacatcgaaggtaaccacctcactcacgctgctatcatcggccaagacggcagcgtttgggctcagagtaccgacttccctcagttcaaacctgaggagataactgccatcatgaatgactttaatgagcctggatcacttgctccaactggattgtatctcggtggcaccaaatatatggtcatccagggtgaacccggtgctgtcattcgagggaagaagggtcctggtggtgttactgtgaagaagaccggtgcggccttgatcattggcatttatgatg

SEQ ID NO: 24227 - DNA, 320 bp, Glycine max
  Clone ID: LIB3106-007-Q1-K1-B2
ttcaaatgttcttctccatgcagcttctttgcttctacaagcacccaccaccactgtttgtgcacaatattaatgaaggcatttttaagtacaagaggtttttcacaaacccttcttcttcttctcgtggcatagttcatgcagtgaaggaagattcacaatcacagcaatatgaggtagacccagataaagccagagaagcactcaaaaagcttgatgagcaaatccagtctctctccaataaaaaacaagtctccactccaaaactcagagtttcggacatgaagctttccacagagcaagccagtcgcaatgatgag

SEQ ID NO: 24228 - DNA, 374 bp, Glycine max
  unsure at all n locations
  Clone ID: LIB3106-007-Q1-K1-B3
acgagatgatggagttgaagaacgtggcatttgtgaatgtagctttgttgcttttcctgttagggttcagtgcaaccactgcagatgctacntccttagacccacgttccttcattactcaggtgctccccaacaattactatgtaaaaatcaaatccacagccactgcatgttgtgatctttgtctttgcacaaaatcaaaccctccccagtgccaatgtgtagatgggagcgagacatgctgccactcatgttgcaaaaatcgcatctgcaataagaaatttcctccgacgtgtttttgtggagatataaccaacttctgctatgacaaatgtaactcaactgaaccaattaaagctcactagctaggaata

SEQ ID NO: 24229 - DNA, 434 bp, Glycine max
  Clone ID: LIB3106-007-Q1-K1-B4
atgctgaagatcttgaaagtggtttcgcgttatatgttgaatctaaatacaagaagatatatgaggatgatataaatccttttgctgcattctcaaaaaaggaaagggatcaaagatacaaggagttgggattcagggacagaattacacttagcagtggacgttttctccttggcaacaagtatgcccgaactttcgcattcttttataccattggattgcatatcttggtcttcacctgtctctaccgaatgtctgctctcagttatcttagcaatggcccagaggaattccttgttggagagaaaaacgttgatcttccgcgtggaccctagtggatatgcaactcaggtttcagcttgtgatttctcaaattgaacattacatgtggtcgaaatgcaacctcttttcaatggtcattttcaactcaattt

SEQ ID NO: 24230 - DNA, 330 bp, Glycine max
  Clone ID: LIB3106-007-Q1-K1-B5
aagtcatagtatcctcctttcagtgacaatgttttgttaaaggatcttttgagctgtggggccttcagtttggccttgcatcctctttctccgtatgaacatcaaccattatcaatgacctcatcttggttccctaagttaaagatgtggccaccattctccattggaagctataggggccatgcttagaggtcgtgtgtatctgcaatgaagaggcctagccaccttcatcaccatatgatatttataaagatatatatgaaactatgaactgcgtttatgcatgtcggaaaatcttcttttaataagagttggaaatcctcttgttat

SEQ ID NO: 24231 - DNA, 454 bp, Glycine max
  unsure at all n locations
  Clone ID: LIB3106-007-Q1-K1-B6
aaacactatagcaatagaaacatttgcttttgaaaaacccctcactcttcatcaggacactagctagccacatacagtgtcgaccaaatttaaggtgtttcgtgaattcacaagcgatgactcattcctaaaccaagttatccctgaaaacatcaccgaattccaagtgactctgtccctcgctagagactacgatggcaacaactcaaccaacggaaagttcattccttactgggacactgaaaaggtcactcccgaagtgataaaaaaattcaagaaaaaatacgaacccaccgcactgagggttaaggttcttgtcagcattggaaacaaaaacaaacaatttcctttcaccattggctcggactcgaacagcgaagcatgggtctncgaggccactgcttcgctgaagagcatcattaaaacctacaaccttgatggcatcgatgtcagc

SEQ ID NO: 24232 - DNA, 378 bp, Glycine max
  Clone ID: LIB3106-007-Q1-K1-A10
ggtgctcaaggagcatgaacacaaaagattatcgcgtgcaaatggtgatcaaagtgaaagggatttgatggatattctgttagatgtttatcatgatgctcatgcagagttcaagatcacaatggctcatattaaagccttctttatggatctcttcattgcaggcacacacacctcagcagaagcaacacagtgggcaatggccgagctcctcaaccaccctgaagcatttcaaaaggtgagaaaggagatagagttagtcactggcaatgttaggcttgttgatgaatccgatatcacaaacttgccatatttgcaagcagttgtgaaggaaacactaagactcttacccgccgcaccaatcacgacaagagagtg

SEQ ID NO: 24233 - DNA, 412 bp, Glycine max
  Clone ID: LIB3106-006-Q1-K2-F4
ttctcttcttcctcttcaatgtctatagcaagaccccatttggtatgaattatgaccatggctttaagttcactttttttctccactcgtttcattcccacaccctttgttacttccactagaaacataccttcttctccacgcacttgtgccagttgcattccccacaaaagagactttccactccctgcagtggcttcagtcccttaccaacccatcaactttgactacctgcaagaggaattcagtggacatggagtcacctttgaaggagttgaagacagttgtattgccaagatggagctgaaaaatggaagcattgtgaccatgatgctgccaagtggattgatcacctcatacaaggcccctatgtggcatggtggcaagttggagttgcttcataccaatgtgt

SEQ ID NO: 24234 - DNA, 413 bp, Glycine max
  Clone ID: LIB3106-006-Q1-K2-F5
cccacgcgtccgcccacgcgttcgctctagcgtattggcctgtagctatgccatatcaggtgcagcgtgttcggagctcaatgggaaggtcacttccgtggcctatgttgcatgctctggctacaagttgccattgatcaaagctgaggccagagttcctaaagccaaaagaatctgaaggaggaaggagaggtgcccttgttctcttggcagctacccttttcacctctgcagcttccaattcttctgccaatgctgggatcattgaagattaccttgagaggagcaaggccaacaaggaattgaatgacaagaagaggttagctactactggagcaaactttgcaagagcatacaccgtggaattcggtagttgcaagttccctgagaacttcactggttgccaagatctt

SEQ ID NO: 24235 - DNA, 271 bp, Glycine max
  Clone ID: LIB3106-006-Q1-K2-F6
tatggatgggaaatgcctcactggcgcggtttgcatgcggaaaacccgacatctcagcgttttaatcaatcctgaagagtgcgttgaaacaccaaatgaatatatccctcgcgaacaatatttatcttactcacaagagacttaacacacatgattactcttatgccacagaccttgaaatacattccaaggacacatttctgttgagtatacatggcaccgaactatctaatatttcatactaccaaaaacatggatatggggtggagaa

SEQ ID NO: 24236 - DNA, 404 bp, Glycine max
  Clone ID: LIB3106-006-Q1-K2-F8
agttattgggagttgcagcattcttgagactgcaggtcaaggagcactcgttcccctctaccagacattgaagtctgccattacttccaaggaatcagaatcttcaagttccaataaaattatttggctgcattttggggttaacagtgccgcaacgaggtttgctatcgagcgtcaagctgtcaacgaggctaccttccgctgccctgatgaaatgggatggaagccccagaaagtccctattgttccttcagatggtgcaattacacgaatacgggagactacccttcttcctgtggaggagatcaccaaggccttggcaaataagggctatgatgttatgacatctgatgatgcaggaaggtttgtgtgcaactacgtttactatcattcgcttcgctttg

SEQ ID NO: 24237 - DNA, 418 bp, Glycine max
  unsure at all n locations
  Clone ID: LIB3106-006-Q1-K2-F9
gggggggggacccacgcntccgagcatctctcaccttttccttggcgacgccgtgagaaacgaagggggtggggaatataaacagagtggggtggtaggcacacgcacaaacgcaaagtcagaatctccaatcttcaatcggagacaaagctagctcgaacgaacgaagtagagtagtgtgctacgaaaaaagaggcggtgcattgcacgtggttctcgtggacctgcttccaccagatccacctccaatcactcacttggatctcaactttctagattcttctatagtggggcgaactcctcgtacaccgtggtggatcatacttatgatgctgttgtcgtacgagctggtggcgcgggattgagagctgctattggactttcaaaacacgggttcaatactgcttgtattaccaag

SEQ ID NO: 24238 - DNA, 411 bp, Glycine max
  Clone ID: LIB3106-006-Q1-K2-G1
cccacgcgtccgcccacgcgttcggggaagccagatagctttagtggggggtttcgggttccatcctaccgtggaagctctttcttggaccccaagggaagaggtgcttccacaggttatgacaatgcagttgctttgcctgctggtggaagaggagatgaggaagaacttgccaaggaaaacaataaaagtgcctcatcatccaagggcaaaatcaccttgagtgtcaccaagaccaagcctgagacgggtgaggttatcggtgtgttcgagagtgttcaaccatctgacactgatttgggagcaaaggctccaaaggatgtcaagatccagggcatctggtatgctcagcttgagtcatagagtgttttgttttctgttttgtttgttggctcagattttgttagtaac

SEQ ID NO: 24239 - DNA, 99 bp, Glycine max
  Clone ID: LIB3106-006-Q1-K2-G10
ttttcatcttccaaccccccattctttttcttgtcctaaacttatactaaaaagggtgtttgatagctttctccgattttatgatcttggatatgcaca

SEQ ID NO: 24240 - DNA, 404 bp, Glycine max
  Clone ID: LIB3106-006-Q1-K2-G2
cccacgcgtccgcccacgcgttcgcccacgcgtccgcccacgcgtccgaggtgatgatcttaagccatgaccgagagagaggtcgagtaagtctttccactaagaagttagagcccacacctggagacatgattcgcaatccaaagcttgtctttgagaaggcggaggagatggctcagacattcagacagagaatagcccaagcagaagctatggctcgtgcagacatgctaaggttccagcctgagagtggattgactatcagcggtgatgggatcctgggaccatttacttcagacttgcctgaagagggactggatttgagtgaggtaccaccagctgaagaatcatgattcagaattgcgtgctcttttctttctgtttgcttacatttttataatatt

SEQ ID NO: 24241 - DNA, 412 bp, Glycine max
  Clone ID: LIB3106-006-Q1-K2-G5
cccacgcgtccggttccaactcatcaagggttaatgttgccgccaagatggcaatgcctacttccaaaggggtgcttgaactgaacaacacagaccccaggctgaacccttctgtgaggttcaactatctagcaagtgaagatgacatggaagaatgcgtcaagatgacaaaactacttgagagaattgcaaggtcaaaatctattgcatttttcctaggcgagtcaaagcaagaaaaactgacatcaactgacgttgatctaagaaacttctgcaagaaaaatgtgagaacaatctatcactatcatggggtttgcacggttggatcagtggttgatgagcaaaacaaggtttatggaataaagggattgagaatattggatggctcaactttttcagagtcaccaggcac

SEQ ID NO: 24242 - DNA, 383 bp, Glycine max
  unsure at all n locations
  Clone ID: LIB3106-006-Q1-K2-G6
cttncgaaagagacagaaagttgagagtagaaagttcacggtttttgggaatgggggctttggcatcgggcacagaaaaatacatccatgattccatggtgtaggatgctaagaggaaagacgggaacctcagcacctataaaggggaggatcttcttgtatgtaacgttgcttgaaaaagtgcatttacaaattgcatttgcaaccatttatctgaagtgtgcagcaaatataaagacataggtccttggatactggtatttatatgcctccagaatatgaaacaaagacccttaagtttctcacaagaacatgaatttgattgtacagagaacaaggcggagaatcccaattttggaaaggtctgtgttattggatcttat

SEQ ID NO: 24243 - DNA, 117 bp, Glycine max
  Clone ID: LIB3106-006-Q1-K2-G7
aaaaaaaaaaggccgaagggatattttacaatatataaaaattttaattttaatataaataatttatgctcaggaaaattataaaattaattaaatttattattttatataatttat

SEQ ID NO: 24244 - DNA, 391 bp, Glycine max
  Clone ID: LIB3106-006-Q1-K2-H1
gtttttgcattaattgctatttcatttattttattgattagtgtacctggggtatgtgcttctcctgaaggttggtcgaataacaaaaatgttgtattttccggtacatcattatggattggattagtgtttctcgtgggtattcttaattctctcatttcttgaagctctatttattctagatcaaaaacgaaatgacccctcccccagaattctttcggattgtcgggcacattaaaaaaggaatggataagttcctaaaaataaagaaaactataacacattataaggaggggtcaaatattaattaagataaaagatatagaatatctatctgtatatatatatatatagatataatttattaataattagaactttcttttttctt

SEQ ID NO: 24245 - DNA, 412 bp, Glycine max
  Clone ID: LIB3106-006-Q1-K2-H2
cccacgcgtccgtgttgatcgagataactagaaacagtgtgatgaaaatgaaggggcttgttttcttcgttgctacaattttggtagcatggcaatgccatgcgtacgatatgttccctctccgaatgaacactggctatggtgcccgtactccggaggtgaaatgcgcaagttggaggcttgctgtggaagcacacaacatctttggctttgagaccattcctgaagagtgcgttgaagcaacaaaggaatacatccatggcgaacaatatagatcagactccaaaacagttaaccaacaagcttacttttatgccagagacctcgaagtccatcccaaggacacatttgtgttcagtatagatggcaccgtactctctaatattccatactacaaaaaacatggatatgg

SEQ ID NO: 24246 - DNA, 412 bp, Glycine max
  unsure at all n locations
  Clone ID: LIB3106-006-Q1-K2-H4
gtgaggttgtaacaaccaatcctactgttggtagcaacgtcgaagagcgggtctacaagaatatacgatttgaggtctgggatcttggtggacaagaaagactgaggacatcatgggcaacatattaccgaggaactcatgctgttattgcggtgatagacagcagtgatagagccaggatctctatcataaaggatgaactttttaggttgctggggcatgaagatttacaacattctgtcattcttgtctttgctaataaacaagatatcaaggatgctatgactcctgctgagatcactgatgcactctcacttcacagcatcaaggatcatgattggcatatacaagcttgctgtgctctctcangagaagggctgtatgatggtcttggatggattgcccagcgagt

SEQ ID NO: 24247 - DNA, 414 bp, Glycine max
  Clone ID: LIB3106-006-Q1-K2-H5
cccacgcgtccgcccacgcgtccgcaaggctctactctactgcttcaccgtctgctctagaaaattcagtggtgatacatggcttcggctactctctctgtagccaaaccagcccttcaggcaaatgggaaaggcttctctgaattctctggcctccgcagctcatcaggcttccttcccttttctagaaaatcttcagaggatttccattctgtcattgccttccagacctatgcagttggaagcagtggaggatacaagaagggtgtgacagaagcaaaactgaaggttgccataaacggatttggaaggattggaaggaacttcttgaggtgctggcacggtcgcaaagactcccctcttgatgtcattgccatcaacgacaccggtggcgtgaaacaagcctctcacctt

SEQ ID NO: 24248 - DNA, 202 bp, Glycine max
  Clone ID: LIB3106-006-Q1-K2-H6
ccatggggctcgctaccataggatacctctccttatcaaaaccggctttgctgggcagcctgaacaggttaaaaggctcagagttactgttgcctccctatctcacctcattacagcctctgaaaccatatacaaaaatggcggcttgccagcaggagagtatattgataatgaaccagctatagcaaactgtgtgacattt

SEQ ID NO: 24249 - DNA, 191 bp, Glycine max
  unsure at all n locations
  Clone ID: LIB3106-006-Q1-K2-H7
acccactcttccnaaaactancaattcattaactattataaacacgtatatatcacagcatcgctcattttatatacccttctctccttcatattcactcttctactctttcatcttctcatttcacatttctatcatttctttaacctttaattttttttatcttttttcttcatatcccttttcttttc

SEQ ID NO: 24250 - DNA, 385 bp, Glycine max
  unsure at all n locations
  Clone ID: LIB3106-007-Q1-K1-A1
ccgcccgaancccgggcgccacgcgtccgctctactgttttctcttaccataatcatcaatggcttccttatccctctcctctcccccaggtctctcgtccgcacaccacagcgcctccacgcgccttattctacgcacccctaactcccttaaactgcgcactccaccccactccctccccgccatccgcgccatcaccctcacccaggacgacctcaagagactcgccgccgacaaggccgtggagtccgtcaagagcggcatggtcctcggcctaagcaccggctccactgctgccttcgtcgtcgccaagcttggcgcccttctcgccttcggccaactcttcgacatcgtcggtgtccccacctccaaacgcacggagga

SEQ ID NO: 24251 - DNA, 409 bp, Glycine max
  Clone ID: LIB3106-006-Q1-K2-F3
cccacgcgtccgatttgcgcattattggagagccaaagcttccatcagtgtttcttcaagtcatctgttgggttctgggggaatacggaacagcagatggaaagtattctgcttcttatatcagtgggaagttatgtgacattgcagaggcatattccaatgatgaaaatgttaaggcttatgcaatttcagcactgttgaaaatttatgcatttgaagtagcagctgggaggaaagtggatatcctatctgagtgccaatcgttgattgaagaatcattggcatcacactctacagatttgcagcaacgtgcttatgaattgcaagctcttataggtttggatgtacaagctgttgaaacaataatgccacgagatgcaagttgtgaagacattgaggttgataagaa

SEQ ID NO: 24252 - DNA, 404 bp, Glycine max
  Clone ID: LIB3106-006-Q1-K2-E10
agacacataaaaaattttgatggaagaacaagagtgccaagtggcggaaggtaaggaaactccaactcctcctgttcgagtctatgctgatgggatttatgatctctttcacttcggccatgcccgttctctcgagcaagccaaaaaactgttttcaaacacttatcttcttgttggatgctgcaatgatgagatcacacataattataaaggcaaaactgtcatgactgagaaggaacgctatgagtctctttgccactgcatgtgggttgatgaagttattccagatgcgccatgggtaatctttcgggagttccttgacaagcatcaaattgactatgtggcacatgatagtctttcttatgcttatgcaagtggagctggaaaggatgtgtatgaatatt

SEQ ID NO: 24253 - DNA, 405 bp, Glycine max
  Clone ID: LIB3106-006-Q1-K2-E11
agctacttcaccacttcaaactcaccacaccaccattattcaggtctcagtctctaacctttcactctgccttactcactctctactttgctcatcatcgtagatgaaccaacacttctagtctctcttactttataaccatgtaaaaatgagtcacctaatgaaaaattagtagcttcttgttgtgctttttattttgtttgtgttgagataaatttgtttgtttgtttggtattgttttgtgttttatgaattatttgatgggtgaagaaggagaagtggtgagaaagcaaggacaaaggggtgttggtggagataagtggtacttgtatagctgcttacaagactgtaaatattggtgctgtttaatacacgagactagttctctttcgatggtcccttttg

SEQ ID NO: 24254 - DNA, 408 bp, Glycine max
  Clone ID: LIB3106-006-Q1-K2-E12
gagctataagctagtttatcgtgaggagaatatgaagttgttgggtttgggttgttgctgcagtagttttggtagcatggccatgccatggcgcaggctaccaaaggttccctctccgaatgaaaactggctatggtgagcgttcttcggaggtaaaatgcgcaagttttaggcttgctgtggaagcacacaacatccgagcctttaaaaccattcctgaagagtgcgttgaaccaacaaaggactacattaatggcgaacaatttagatcagactctaaaacagttaaccaacaagctttcttttatgctagtgaacgcgaagtccatcacaacgacatatttatattcggcatagataacaccgtactctctaatatcccatactatgaaaaacatggatatgggg

SEQ ID NO: 24255 - DNA, 404 bp, Glycine max
  unsure at all n locations
  Clone ID: LIB3106-006-Q1-K2-E2
ggagcgatccgagaaaaactctgtaaacatgttggtttaccaggacctcgttacaggtgatgagcttctctctgactccttccgttacaaggaaattgagaatggaatgctgtgggaagttgaggggaagtgggttgttaaaggagcagttgatgtagacattggtgcanacccttctgctgagggtggaggagaagatgagggagttgatgatgcagctgttaaggttgttgacattgttgacacattcagacttcaggagcaacccgcattcgataagaagcagtttgttaccttcatgaagaggtttatcaagaatttgactcccaagctcgatgcagagcaacaggagttgtttaagaagcacatcgagggagcaactaaatacctgctctctaagatta

SEQ ID NO: 24256 - DNA, 408 bp, Glycine max
  Clone ID: LIB3106-006-Q1-K2-E3
ggagaagtctttggaggtcaaagaacattgattcctcttcatgctatgggggaaaatgttattgatagaacttctctaagcactccttgggaaatgattaggctctatgggaaagaggtgaaccttgttgatactcctggaccgccacctttcgttgaagaagtaacaaagcgtgcagcttggaaaaatgcaggtccacgtcctcgcccacttcctccacctccagctaggccaaaatcatacaacatagaaggttggtggggttgggtagctgagagtgataatgagcctgatagtacagttatagaactgaggaccaatgcccataaattactatgggaggctattgactatgtgatctgtgttgaggctgatgtattcatccctggatttgaccgtgacgggaag

SEQ ID NO: 24257 - DNA, 412 bp, Glycine max
  Clone ID: LIB3106-006-Q1-K2-E4
cccacgcgtccgcccacgcgtccgcgcatagtgtggtagcagcagcagagcttgtatacgtcgccgcttcagcgtagcaacatgatcattcccgagaagaaccgtaaagagatctgcaaatacctcttccaagagggagtttgctttgcgaagaaggacttcaatctggcgaagcacccggagattgatgtgccgaatctgcaggtgataaagctgatgcagagcttcaaatccagagagtacgtgagggaaacatttgcgtggatgcactattactggttcctcaccaacgatggaattgagttccttaggacttacctcaaccttccatccgaaattgtccctgccactctcaagaagcaggccaagcccgccggaagaccattcggtggcccacccggtgatcgcccca

SEQ ID NO: 24258 - DNA, 412 bp, Glycine max
  Clone ID: LIB3106-006-Q1-K2-E5
tccggtagttgagaactaagaagaaggaaatggcttcctcaatgatctcctcccgagctggtaccaccgtcaaccgtgccggtgccggcatggttgctccattcaccggcctcaaatccatggctggcttccccacgaggaagaccaacaatgacattacctccattgcttgcaaccggggaagagtacaatgcatgcaggtgtggccaccaattggcaagaagaagttcgagactctttcctacttgccagaccttgatgatgcccaattggcaaaggaagtcgaataccttctaaggaaaggatggattccttgcttggaattcgagttggagcacggtttcgtgtaccgtgagcacaacaggtcacctggatactatgatggacgctactggaccatgtggaaactgcc

SEQ ID NO: 24259 - DNA, 270 bp, Glycine max
  Clone ID: LIB3106-006-Q1-K2-E6
cccacgcttgcggttcggattgcggcgacttgagcggttcgttgcccgcgacgtgggtgagaagtccactgaaccttattatttaaaggaaggagagtggatcgattcctcaacagcaccatacatttataaaagctctttcccttccctcatatcgctcttattcttccaatctttttttttttattttgttacctttcttcctctgtctataattcaacacaacaattaatattactaatgttttttcgatgccatttaatcgtattt

SEQ ID NO: 24260 - DNA, 402 bp, Glycine max
  Clone ID: LIB3106-006-Q1-K2-E7
cagtttggcaattaatagaatgcacagcagatctgtctctagaggtcggggaagggatagatcgcctgaaacaagaagtgctgatggtatggatactgatggtgacacacctagcaaaaaacagcgtctgagtagatcactgtcacggtccaggtcagtgtcacgcccaccacatgaagttgtgcctggagaaggcttcaaggattctgctcaaaaggtcaaggcaatcaaacttgcaaagaaatctgtcaagaagagaaacaaggatgcccgtcgtggagaagctgatagagtcatacctaatctgaagcccaagcacttgttttctgggaagcgttccaatggaaaaactgagagacgctaggacaggggatgctgtttaatgcattttagaggacacct

SEQ ID NO: 24261 - DNA, 400 bp, Glycine max
  Clone ID: LIB3106-006-Q1-K2-E8
tctagagaaacaaagattagtgttcccacattacatggcctcctggcccttggggcaccaccaccatcaccaaccttttgtggtgactatacacccgtcgcaaccgccgcattgtcagccgcaacccgaagttcctcgtctgagctccgatatggagaccgataaggatatgtcagctactgtcattgaagggaatgatgccgttactggccacataatcttcaccacaattggaggcaaaaatggggaacctaaacagaccatcatttacatggcagaacgtgttgttggcactggatcatttggagttgttttccatgcaaagtgcttgtatactgtgataggcagtggttattaaaaaggttttgcaagacaggcggtacaaaaatcgggaattgca

SEQ ID NO: 24262 - DNA, 401 bp, Glycine max
  Clone ID: LIB3106-006-Q1-K2-E9
gattccgattgttgtgatccgtacaacacagcacaacaccatgggtggcgccaaccccatccccaagtggttgtttctctctctgactctgatcctcagtctctctgtctccgtcggcgcccgccacttcgtcctcgtcctctcccaggaagactacaaggacgacccccccgccgatcccgactccgccgccgagtgggacgagttcggcgacggagactcccacaaatccgaggacgacctcgaccccggctcatggcgccccatcttcgagccccccgccggagatccccaacccctccccgaatccgacgccgcctaccactccgccgtccacaagctcatgtccggcgaccccgacctgatccaggacggcgccgccgagatcggcgccttggccg

SEQ ID NO: 24263 - DNA, 399 bp, Glycine max
  Clone ID: LIB3106-006-Q1-K2-F1
aagttaaaagccttttcctttcctacaactccaaacacaagggcatcgtgatccatggctgcctccgtctccactgtcggagctgtcaacagagctcttttgaacctgaatggttctggagctggagcttcagctcccagttcagccttctttgggaccaccttgaaaaacgttattgcctcaagggtccccaacagcaaggtttccggtggaagcttcaagattgttgctgtagaagagaagaaagagattgaagagacccatcagaccgacaaggacagatggaagggtcttgcctatgatatctcagacgaccaacaagacatcacaagaggaaagggtttggttgactcccttttccaagctccacaggatgctggaactcactatgcagtcatg

SEQ ID NO: 24264 - DNA, 407 bp, Glycine max
  Clone ID: LIB3106-006-Q1-K2-F10
cagcttcagatcttctccatcctctgaatcaagttttgactttgtttggagagtttctcaactgcactttccttccaaaatgagccggccaatggaggaagatgctgcgggtaaaaatgaggaagaggagttcaacaccggaccactatctgtactcatgatgagtgttaaaaataatactcaggtactgataaattgtcggaacaacaaaaagcttctgggtcgtgtaagggcttttgacaggcactgcaacatggttcttgaaaatgtcagggagatgtggactgaggtgccgaagactggtaaaggaaagaaaaaggcccagccagtcaacaaggatagattcatcagcaaaatgtttctacgtggagactctgtcatcattgttcttagaaaccccaaatgag

SEQ ID NO: 24265 - DNA, 404 bp, Glycine max
  Clone ID: LIB3106-006-Q1-K2-F11
ccaccgtcaaacttgtcattctatatgctttgcagggtccatgggatatggctctgtcgttggatcttcctcccaagggtggcttcagttttgatctatgccgaagaaacgcaatgcttcaaaacaagggcctcaaagccccaacctttctcaaaactggcaccactattgtcggtttagttttccaggatggtgtcattcttggtgctgatactagggcaactgaaggacctatagtggctgataaaaactgtgagaaaattcattatatggcacccaacatatattgctgtggagcaggcacagctgctgatacagaggctgtaacagacatggttagctcacagctgcaattacatcgctaccatactggtcgagaatcaagagttgttacagcgctgacc

SEQ ID NO: 24266 - DNA, 255 bp, Glycine max
  Clone ID: LIB3106-006-Q1-K2-F12
tgttcatccccgtgcaacacgtcgtttcaaacgtggccgtgggggcttgggtgagttcaagagtaacccccggattaccaaacatggccttatagatttattacatgatatattgaaaattaaggaataagtgtataaaaacggaatattgtaaattaagaaaaatttagacgggcttatatattctttttccctactatatacaatatagtgtatctagttacttcttcctaatcaaaattatatttttacttg

SEQ ID NO: 24267 - DNA, 407 bp, Glycine max
  Clone ID: LIB3106-006-Q1-K2-F2
cccacgcgtccggtttgttgttgtaactcgttcttcttcttttgttgttgggtgtgtgtgtttgttttttctctcacctgaaaatgtcttgctgcggtggtaactgtggttgcggaagctcctgcaagtgcggcaacggctgcggaggctgcaagatgtacccaaacttgagctacactgagtcaaccaccaccgagaccttggtcatgggagtggcacctgttaaggctcaatttgagggtgctgaaatgggtgtgcccgctgagaacgatggctgcaaatgtggaccaaactgctcctgcaacccctgcacttgcaagtgaggtgttgggagagcaagcttcaagcagagatagcccttaattaggaataatgataaactattaatgtgtagctaaaaacttatg

SEQ ID NO: 24268 - DNA, 407 bp, Glycine max
  Clone ID: LIB3106-006-Q1-K2-E1
cccacgcgtccgcccacgcgttcgaaacaaacccactaagatggcttccgttgtatccttcctagtgctgcttcttgcagcccttatcctcatgcctcaagggcttgctacttactacaaaccaattaagaagccaccagtgtacaagcctccagtgtacaagccaccagtgtacaaaccaccggtttataagccaaaaccaccggtttacaagccgaaaccaccggtttacaagccaccatataagaagccaccatacaagaaaccaccttatggaaagtaccctccagtagaggacaacacccatgcctaaagcaagcaatgaggtctattatctacttaataaataagaggaactgctttgtgttttctagcattgtgatttacaacttcgtagcaatgcatat

SEQ ID NO: 24269 - DNA, 405 bp, Glycine max
  Clone ID: LIB3106-006-Q1-K2-C2
gtaaaaaggaaaggggaaggatgcaaggcaaggaaggagagtggatcgggtcctcagcagcaccagacatttataaaagctctttcccttccctcaaatcgctcatactcttccaatctttttttttttttttttttttacctttctccctcgctcaataatacaaaacaaaaaagaagaagaagaaggttttcgcgatggcatcgaaacggatcttgaaggaactcaaggatctccagaaggatcctcctacctcttgcagcgccggtcctgttgctgaagacatgtttcactggcaagcaacaattatgggtcctccagacagtccttatgctggaggtgttttcctagtcactattcatttccctccagattatcccttcaagccacccaaggttgcattca

SEQ ID NO: 24270 - DNA, 404 bp, Glycine max
  Clone ID: LIB3106-006-Q1-K2-C3
gtgcaaagcctctattttttcttgtgaatttgaaggacgatgagttccagagagggggcagccacaacgaagaagggtggaagagggaaacccaagaccacaaagtccgttttcccgttcctccaaagccggccttcagttccccgtcggccgcgtcgctcgctacctcaaggccggtcgctatgcccagcgcgttggttccggttcccctgtttacctatctgcggttctcgaataccttgccgctgaggttttggagcttgccggcaacgctgcgagggacaacaagaagacgaggatcgttcctaggcacattcaacttgcggtgaggaacgatgaggagttgagcaagctgatggggtctgtgaccattgccaatggtggtgttctgcctaacattcacc

SEQ ID NO: 24271 - DNA, 407 bp, Glycine max
  Clone ID: LIB3106-006-Q1-K2-C4
cggacgcgtggggaaataattattttctgcataacttttggagctatggcttgagaagattgccatcaatctgtttactgccactgtgcaggtattcgatgtagccatacggaggatcaacattctcatcaatcttctcatattcaacggtccatttgataataacacccccatgatcggtgtcaatagcttgaaaataattaataagtaagaaataattggcttggccttagaatatatagtgcttgtctagttatcactataatcggtgtgatgtttgacgatcgagaaagatgcttacctagatcgttcgttttgcatggaataaatttggaagtgtgttaaattacttgaaggggagacaaatagggtttgtccttcttcaaaacaaaacatttgggggcggc

SEQ ID NO: 24272 - DNA, 408 bp, Glycine max
  Clone ID: LIB3106-006-Q1-K2-C5
gcaagatgtacccagacttgagctacactgagtcaaccaccaccgagacgttggggatgggagtggcacctgttaaggctcaatttgagggtgctgaaatgggtgtgcccgctgagaacgatggctgcaaatgtggaccaaactgctcctgcaacccctgcacttgcaagtgaggtgttgggagagcaagcttcaagcagagatagcccttaattaggaataatgataaactattaatgtgtagctaaaaacttatgtattatgtctgtgatggttttcgtgcactctggtgttttgtgttaaacaaacatccttagaataaagtggtcatgtcttgcctttcagcaagttcaagtgttttggacttgtgatgggtgtgttaagctcatggttgcttctttttttttt

SEQ ID NO: 24273 - DNA, 318 bp, Glycine max
  Clone ID: LIB3106-006-Q1-K2-C6
cttcttcttcttctcttaaaagttattaagagcttttgcttttctttctgggcgcggttcccaattaagtagttcttccttttctcaaagcaaaaaaaatgttcatcgagagtttcaaggttgagagtcctaacgtgaagtacacaaagactgagattcagtccgggtccaactatgaaaccactgaacttgttcacgagaacaataatggcacttatcagtgggttgtcaagcccaaaactgtcaaatatgaatttaaaaccaacacccatgtccctaaactaggggtaatgcttgtggggtgggggggaaacaatg

SEQ ID NO: 24274 - DNA, 400 bp, Glycine max
  Clone ID: LIB3106-006-Q1-K2-C7
aaccaaacactcttcttcatattcttcttcttcttgttcttggtctatcggggacgagcatcatggcctcgagagcagtgctattgttggctatgtgtgtgcttccggccatggttgtggccattcgcccagcaaagaaccctttttgcgtgaagggtcgcgtctactgtgacccttgccgtgctggttttgagacctcagcaaccacctacattgccggtgctgagattatgttgcaatgcaagagcagggttagcaacgaggttgtgtacaccaagaaggggtacactgactcaactggagcatacacaatgtacgtggacgaggatcacgcagatcaaatatgcagtgccaagcttgtaagcagccctcaccctcaatgcaaggaagtcaccccggg

SEQ ID NO: 24275 - DNA, 401 bp, Glycine max
  Clone ID: LIB3106-006-Q1-K2-C8
ctttttctctctctccattccgtgttttcagctccggtaacctgctccttgtccgccgccgttgctatctccgccgtgaccttccatccctcaacgccccacagatcttcaatttgattgcttgggtcaacaatttctgtcattctcaatcatggcaactagacttcagtttgaaaataattgtgaagttggagtcttctctaaactcaccaatgcttactgtttggttgcgattggaggttctgaaagcttctacagtgtatttgaagctgagttagcagatgttatccctgtggtcaagacatccattggtggtactcgtatcattggtcgtctttgtgctggaaacaagaatgggcttctcttgccccataccaccacagaccaagagcttcaacaat

SEQ ID NO: 24276 - DNA, 395 bp, Glycine max
  Clone ID: LIB3106-006-Q1-K2-C9
ataaactggaaggagtaggtgttgttggcattctgacctaaagcgttgtggctttctgcttcgtttgtatcttctgctgcgtaaagaggatccctttctgattcttccgtaaatttcgtctctgaaactagggctaatacttcatctaccgatctctatattctggatgaaggtttgcttttgatccggcttgggagttttgatcgacttgattttaactccaacttttaagaaatgtcattccgcagcatagttcgtgatgtaagggatagtttcgggagcttatctaggcgtagttttgatgtcagacttactgggcatcatagaggaaaatctcaaggatcagtgcaggatttgcatgaccagcctctagtaattcaaaatagccgctgggc

SEQ ID NO: 24277 - DNA, 388 bp, Glycine max
  Clone ID: LIB3106-006-Q1-K2-D1
accccgctgaactcatcacttactggaagccttgttgtgagtaagagaagaggctggctgcaccgagcacaccaacttgatacctctgattctttctttgcttagaattccacagaatatggagactgttcttttcaatcactccccacctttggaattcaagggtttgagcaaggaggaggaagactcattgctagggcaagtggaaatatggaggtacatgacatgcttcacggactccgtggccttgaaagctgtcatagagcttcgtatagcggacatactagaccgttatggtaaaccactatccttgtcgcaaattgtggagaacatagaaaacgcaccctccccagatgccttttttttccagagagtcctgagagtgatg

SEQ ID NO: 24278 - DNA, 400 bp, Glycine max
  Clone ID: LIB3106-006-Q1-K2-D10
cccacgcgtccgcccacgcgtccgaaagcagataccgcttccaaggagaaaagtaaggcatccactgtggcgatcaatgccgagattcgtcgaaccaaggctaggttgttggaggaggttcccaagttgcagagattggctatgaaaaaggtaaaggggctttcatcacaagaatttgctgcccgtaatgatttggctcttgcattgccggataggattcaagctatcccagatgggacccctgcagcatccaaacaaagtggaagttgggcagcttcagcctcacgtcctggaattaaatttgattcagatgggaaattcgatgatgaatacttccaacaaactgaagaatcaagtggattcaggaaagagtacgaaatgcgtataatgaaacaggatc

SEQ ID NO: 24279 - DNA, 406 bp, Glycine max
  Clone ID: LIB3106-006-Q1-K2-D11
cccacgcgtccggaatggcacgcatcaaggaggatccatctctgaaacagattttggaggagatagagactggcggtcctgctgctatgatgaggtactggaataatgaggaggttttgcagaagttgggacaagccatgggtcttgccaattcgggagatgcaggtgcctctgctgaaaattctggggcagatgagaccgaagatttgggaaatgaagatgaatcaattgttcatcatactgctagtgttggtgatgtggagggcttgaaaaatgcactagcctctggtgctgacaaggatgaagaagattcagagggaagaactgctttgcattttgcctgtggatatggcgaggtaaaatgtgctcaagttctcctcgaggctggagcaaaagtggatgcttt

SEQ ID NO: 24280 - DNA, 405 bp, Glycine max
  Clone ID: LIB3106-006-Q1-K2-D12
gaatttcctgtatatattcagttgtacttgtatcatatattggggctgtgtttcacaggtatagagaatatggtaaaaaaaataatcaacatacgttttgggattttttaattttttttgtaattcttaatcttttaatcttagatactaaaccaaatttaatgtagccttatagctgatacttgttgaatagaattagctgatgcatctcagttatgattatttagaggaccttgggagcgtttcatgtgttagaaatgttgacagatatcaacacaactgcagtgatttcagttttaaaagtttaagttctcagttgaaaaatatatttgtttcctttatggcctttttctgttcaacatatcattaatacattattatttggaattcttcctaaatatattt

SEQ ID NO: 24281 - DNA, 354 bp, Glycine max
  Clone ID: LIB3106-006-Q1-K2-D2
ggtggtcaaggaggaggaagtggaggagggtatggtgctggtggagatcatggtgctgctggctatggtggtggagctggaggtggagctggtggaggctatggtgccggtggagaacatggcattggctatggaggaggtggtggaagtggtggagggagtggaggaggttatggtgatggaggagctcatggaggtggatacggtggcggcgcggttgccggtggtggaggagggtttggggctggtggagcacatggtggtggttttggaggaggtggtggaagtggtggtggccatggtggctattgttcccttagaacttctctctaatgcttactagatgtgcaagtg

SEQ ID NO: 24282 - DNA, 216 bp, Glycine max
  Clone ID: LIB3106-006-Q1-K2-D4
gaccacgcgtccgccacgcgtccggaataccccctcttttgctgcatcagaggagttgtaaaggaagagcatggctgcacaagctcttgtatcatcatcttctcttaccttctcagcggaggctgcaagacaaagtcttggaccaagatcactccaatctccatttggcttctccagaaaagccttctttcttgttaaggcagctgctaccccccc

SEQ ID NO: 24283 - DNA, 406 bp, Glycine max
  Clone ID: LIB3106-006-Q1-K2-D5
agcgaatcagattgagatggggtcgtttggtcggagaagcatgtccacgggggcgaaagcggtggaggaaatcaccggcactggcaacaccaagatccgcaaatcttccagcgagctctgcaccttcctcggcatccctcgccaatctcgttccgaaatcgctctcattctctccaagttcatcaaactctataatttcaagagtcccggcattaagaaggacaagatttgggagcagaatttgcagacactgttgcgtggcagaaacaatgttggttttcctgagattgcgaagatactgtctccggaattcggtcatggcgcgattaatgtgaaggacagtagtattggggattcttccggggacgccaccaaggggaaaggccctaaaaaaaaagggaagtcc

SEQ ID NO: 24284 - DNA, 267 bp, Glycine max
  Clone ID: LIB3106-006-Q1-K2-D7
aactattgtaattttctaacttctttaattttttaccacaaactcatctccgggctccgtgttatttcacatcctttactcaacaaacaacagccaataaatcatataaaaaaaattaccatcttttgtcggatccgaaccaaatgtatactctaaatcaaattatctacttaatcctcattttactatatatgtcatacttgtttcaaatctatctaaaatatacacttaaccttggctgttacaaaaactttcttctttagaatt

SEQ ID NO: 24285 - DNA, 162 bp, Glycine max
  Clone ID: LIB3106-006-Q1-K2-D8
gtgatggcttacttatgccgaattcaccaaatctcgtttgtattcgaacggcacataatttttgttccacattagctaggatttgaaaacttgctatgggaaaattgaactacttaaaaagaaaaaaaaaataaaaacatagcaagatataaactggccgtg

SEQ ID NO: 24286 - DNA, 398 bp, Glycine max
  Clone ID: LIB3106-006-Q1-K2-C12
gaaagagagaaaacaaagggcggtggtgagtgcttctgcttcagcatcggcagagaatggcggctactgtgtcttctgcttggtcaaagcccggcgcgtgggccctagattccgaggaacacgaagccgagctccttcaacagaacaacaacaaccccaacgacaagccactcgccgacttcccctcccttgccgccgccgccgccaccaagcccaagaagaagaaggcccagacctactccctcgccgaattcaccgccaagcccgactccgccttcgccgaccaagatcccgtcgtcctccccaccggcccccgccagcgcaccgtcgaggagctcgaccgcacccgtctcggtggcggcttccgcaactatggcgaccgccccaacaggaataac

SEQ ID NO: 24287 - DNA, 130 bp, Glycine max
  Clone ID: LIB3106-006-Q1-K2-A4
aaaaaaaaaaaaaaaaaaaaatttaaaatttaaaaaaaaaaaaaaaatacggtaacgttaaaattaaaaaaaatattaaaaataattaaataaattaatttaaaaaatataatttttaaattatattccc

SEQ ID NO: 24288 - DNA, 411 bp, Glycine max
  Clone ID: LIB3106-006-Q1-K2-A5
ggcttattcatggcaggtgatgcatggtttctaaatactccggaccaatgacttggcttcatacttgcagatcatggttttgatgtatgggtaggaaatgtgcgtggaacacggtggagccatgggcatatatctttattagagaagaaaaagcaattttgggattggagttggcaggaattagccctgtatgatgttgcagaaatgatcaattacattaattcagtaacaaactcaaagatatttgtagttgggcattcacaggggacaattatatcttttgctgccttcactcaaccggagatagtagaaaaggttgaggctgcagcccttctttctccaatatcatacttggatcatatcagtgcacctcttgtacttagaatggttaagatgcacattgatcagatg

SEQ ID NO: 24289 - DNA, 409 bp, Glycine max
  Clone ID: LIB3106-006-Q1-K2-A6
gatcgagataactagaaacagtgtgatgaaaatgaaggtccttgttttcgtcgttgctacaattttggtagcatggcaatgccatgcgtacgatatgttccctctccgaatgaacactggctatggtgcccgtactccggaggtgaaatgcgcaagttggaggcttgctgtggaagcacacaacatctttggctttgagaccattcctgaagagtgcgttgaagcaacaaaggaatacatccatggcgaacaatatagatcagactccaaaacagttaaccaacaagcttacttttatgccagagacctcgaagtccatcccaaggacacatttgtgttcagtatagatggcaccgtactctctaatattccatactacaaaaaacatggatatggggtggagaaattt

SEQ ID NO: 24290 - DNA, 153 bp, Glycine max
  Clone ID: LIB3106-006-Q1-K2-A9
gagaggtggtgtttcttaaaaaaataattcttggggccaatgggcccatcggtaaatggtcccagggagaaatcaatcttttggatcaaattagaactttttcttaacaaaggtgaagcaaatatatgtggcttaacagaccattagtggggc

SEQ ID NO: 24291 - DNA, 364 bp, Glycine max
  unsure at all n locations
  Clone ID: LIB3106-006-Q1-K2-B1
cgcgtncgcccacgcgtncgcccacgcgttcgaaaccaacaactctgtcgtcgtctcgcttcgggccccacgtcgtggtgtcgtcggatttggggcaggaggaggacaccttcagtgacggagacggccccagcttctcccccgaccttaagctctttgtcgggaatctttcgttcaacgtcgacagcgcgcagctcgcggagctctttgagagtgccgggaatgtggaggtggttgaggtgatttatgataagactactgggaggagcagggggtttgggtttgtcaccatgtcttcggttgaggaagctgaagcggctgctcancagtttaatggctatgaacttgatggaagagcattgag

SEQ ID NO: 24292 - DNA, 407 bp, Glycine max
  Clone ID: LIB3106-006-Q1-K2-B10
cccacgcgtccggagggatcgtgatcgcgaaagggctcaggctggaactggtgctaaaggcaagcagaaagatgatggattgacccctgaacagcgcagggaaagagatgcaaaggcgctgcaggagaaggccgcaaagaaagcggcacagggtgcaggagggaataatgcagctggaagcaaaaaataggcaataattcaatgagtagtttgagtttgccgtttgttgattgtggacatggaatttgtggaaattttatgttgcattattcatggagtatgatgtgtttattaatgtaacttgcgacggaagaacaaataagttgtgcttctttgaaagatgttgtcgctgggggcagaatcaataacttgtatctttgtttggaataatagtatttggcaattat

SEQ ID NO: 24293 - DNA, 227 bp, Glycine max
  Clone ID: LIB3106-006-Q1-K2-B11
gcaatttatgtttcttcaactccctgttaaagctagtgcagctgaagggggtggcttgcaatggtgtgttttttctgctctcaagtgagccatttcctttttccctccttggcccttgcatatatattatgtataacataagatgacagcctcacttagtacaaaaatagattactgtttggcttggtcaatggcaattgaagtttcctgtgtcctgtgttagtgtt

SEQ ID NO: 24294 - DNA, 407 bp, Glycine max
  Clone ID: LIB3106-006-Q1-K2-B12
acaaaacaaaaaccattcaattcaaagatagtaggctgccaggcgaccgcgcaccgccaccgcactttctccgatcctcacaattttgcctccggcatgtctccggccgccggagtcagcgtccccctcctgggggattccaaaggaacgccgccgccggctttcgtccccggcgcggtgttcaacgtggccaccagcatagtcggcgccggaatcatgtcgattccggcgatcatgaaggttctcggcgtagttcccgctttcgcgatgattctcgtggtggccgtgctggcggaactgtccgtggacttcctgatgcggttcacgcactccggcgaaacgacgacgtacgctggcgtcatgagggaggcgttcggatcgggtggagcattggccgcgcaagtttg

SEQ ID NO: 24295 - DNA, 401 bp, Glycine max
  Clone ID: LIB3106-006-Q1-K2-B2
cccacgcgtccgagtagttgagaactaagaaggagaagcaaatggcttgctcaatgatctcttccccagctgttaccactgtcaaccgtgccggtgccggcatggttgctccattcactggcctcaagtccatggctggcttccccaccaggaagaccaacaatgacattacctccattgctagcaacggtggaagagtgcaatgcatgcaggtgtggccaccagttggcaagaagaagtttgagactctttcctacctgccagaccttgatgatgcacaattggcaaaggaagtagaataccttcttaggaagggatggattccttgcttggaattcgagttggagcacggttttctgtaccgtgagcacaacaagtcaccaggatactacgatggacgc

SEQ ID NO: 24296 - DNA, 411 bp, Glycine max
  Clone ID: LIB3106-006-Q1-K2-B5
ctttcttttttcccgcagtcatgggcaaggtcaagatcggaatcaacggatttggaagaattggccgtttggtggccagggtggctctgcagagagacgatgttgaactcgttgccgttaacgatcctttcattaccaccgattacatgacatacatgtttaaatacgacagtgttcacgggcactggaagcatcacgatgtcaccgttaaggatgagaagacccttctcttcggtgacaagccagtcactgtttttggacacaggaaccctgaagagatcccatggaagtcgactggagctgacatcattgttgagtccaccggagttttcaccgataaggataaggctgccgcacatttgaagggtggtgcaaagaaggttattatttctgcccccagtaaggatgccc

SEQ ID NO: 24297 - DNA, 342 bp, Glycine max
  Clone ID: LIB3106-006-Q1-K2-B6
aacttaagttcattccttgtgttttgctttcttcctcaaaaccaaacatgtcgaacacatgcggcaactgcgactgcgctgacaagactagctgcaccaagggaaacagctatggtgttattgtagagactgagaagagttacatcgagactgttgtcatggatgttccagcagctgagcatgatgggaagtgcaagtgtggcactaactgcacttgcacggactgcacctgtggccattaaggaatatgtatgaaaatgtaattgccatgtgtttggcaatacaaatatccaaataatgtaatcttcgtatgaataaatgtgtgtgctgttatcctacttc

SEQ ID NO: 24298 - DNA, 383 bp, Glycine max
  Clone ID: LIB3106-006-Q1-K2-B7
cggacgcgtgggcggacgcgtgggttcctccctttcactctcgtagacatcacaaaccttccctccattcatcccacgcatggctgccatgaactctagcgtattggcctgtagctatgccatatcaggtgcagcgtgttcggagctcaatgggaaggtcacttccgtggcctatgttgcatgctctggctacaagttgccattgatcaaagctgaggccagagttcctaaagccaaagaatctgaaggaggaaggagaggtgcccttgttctcttggcagctacccttttcacctctgcagcttccaattcttctgccaatgctgggatcattgaagattaccttgagaggagcaaggccaacaaggaattgaatgacaaga

SEQ ID NO: 24299 - DNA, 386 bp, Glycine max
  unsure at all n locations
  Clone ID: LIB3106-006-Q1-K2-B8
gttctagatcgcgagcggccccccttttttcatgttattcttcataacttgttaaagtactttctccctgtcttatttgttttgcgctgagttaagttcaatcggattttgcatacagctatataattatgctttagttaagtttgattgcttctgcttttgtcttnnnnnanannannnnnnnnnanaaaaaaaaaaaaaaaaaaaaaaaaaaaaaaaaaaaaaaaaaaaaaaaaaaaaaaaaaaaaaaaaaaaagggaggacaaaataaaaataaaaaaaataaaaaaaattaggggggggccgttttaaaggatcaaagtttacttccccgtgcttgcaaggnaatatttttttattagggcccccaaaataaaattcagggg

SEQ ID NO: 24300 - DNA, 398 bp, Glycine max
  Clone ID: LIB3106-006-Q1-K2-B9
ctttcgaaagattttatccaattgaaattttaaaaatgactgggataaacttaagaattcaattattgaaattgaataagtaaacaatttaattggattggtcgaatggtatcaaaaaaatggagtactaactcccatttcttatttattattgaattaaccgatcaacttgctttgttatcgaacatttctttttgatttcaaaaattttccggaaaaaatttgaatctatttttatatgcgaatcaatcctactacttctggtcctgaggtttctgcgcttgaaaaaaaaaaatctgggacgtatcgcccaaataattggtccggtactagatgtagcttttcccccaggtaagatgcctaatatttacaacgctctgatagttaagggtcgagat

SEQ ID NO: 24301 - DNA, 406 bp, Glycine max
  Clone ID: LIB3106-006-Q1-K2-C1
cccacgcgtccgctccacccaacaaaccacctctccttcctctcccccagagtttgtgatcaaaattcaaattccaaattcctcagattcgcaaaaatccctttctgcgtcgtcgcattgtatgagcctcgaattccgatcccgataggcatggccggagcggcgttatcgccgccgacgagttcgaagtcggtgacgcagacggtgaacgggtcgcacaagttcgtgatcgagggatactccctggcgaaagggatgggagtggggaagcacattgcgagcgacgtgttcacggtgggagggttccactgggcgatctacttctaccccgatggcaagaatcccgaggacaattccgcctacgtctccgtcttcatcgcgttggcgagcgaaggcaccgacgtca

SEQ ID NO: 24302 - DNA, 404 bp, Glycine max
  Clone ID: LIB3106-006-Q1-K2-C11
gagagatccatccatcaattccaatggccgatcagctcaccgacgaacagatctccgagttcaaggaagccttcagcctcttcgacaaggacggggatggttgtattaccaccaaggaacttgggaccgtgatgcggtcacttggccagaacccaactgaggcagagctgcaggacatgataaatgaggttgatgctgatgggaatggtaccattgatttcccagaattcctgaatctcatggctcgcaagatgaaagacactgattcagaggaggagctgaaggaggctttccgcgtgtttgacaaggatcagaatggcttcatctctgcagcggagctccgccatgtgatgaccaatctcggtgagaagctgaccgacgaggaagtcgatgagatgattcgc

SEQ ID NO: 24303 - DNA, 405 bp, Glycine max
  Clone ID: LIB3106-006-Q1-K2-A2
aatgtttgatatccccatggccatggatgcttctaaatctagaaaatctggtcagctaaataatgccccttcacggactggatcatttgcaggtgctgctgcttcacattctggacctatcttgccaaattccactcctcgttctatttataccacatctggtaacatatcttctggaggcagcatgacgactgcttcagtctcaatgaaaaagaccaactctggtccactgaataaacatggggagcctgtgaagaagtcatctggaccgcaatctggtggagtcacacgccaaaattctggtccgattccaccagttgtaggaagaacaggtcttattacatctggtcctctaaattcatctggggcaccaaggaaagtatctggtccattagaatttacagg

SEQ ID NO: 24304 - DNA, 255 bp, Glycine max
  Clone ID: LIB3106-006-Q1-K1-G4
tgttcatccccgtgcaacacgtcgtttcaaacgtggccgtggcagcttctgtgagttcaagagtaacccccggattaccaaacatggccttatagatttattacatgatatattgaaaattaaggaataagtgtataaaaacggaatattgtaaattaagaaaaatttagacggtcttatatattctttttccctactatatacaatatagtgtatctagttacttcttcctaatcaaaattatatttttacttg

SEQ ID NO: 24305 - DNA, 444 bp, Glycine max
  Clone ID: LIB3106-006-Q1-K1-G6
caaagagacagaaagttgagagagaagtgttcacgtctttgagaaatgggtgcttgggcggcggtcacagaaaaatccatccatgaattcatggtcaaggatgctaagggcagagacgtgaacctcagcacctacaaagggaaggttcttcttgtagttaacgtcgcttcaaaatgtggatttacaaattccaattacacccagttaactgagctttacagcaaatataaagacagaggtcttgagatactggcatttccatgcaaccagtttctgaaacaagagcccgggagtagccaggaggcagaggaatttgcctgtacaaggtacaaggctgagtatcccatttttggaaaggtacgtgtcaatggacctgatacagcacctgtctacaaattccttaaagcaaataaaacaggatttctgggtagtaggataaagtgg

SEQ ID NO: 24306 - DNA, 420 bp, Glycine max
  unsure at all n locations
  Clone ID: LIB3106-006-Q1-K1-G7
cccacgcgtccgcccacgcgtccggggaagccagatagctttagtggggagtttctagttggatcgtaccgtggaagctctttcttggaccccaagggaagaggtgcttccacaggttatgacaatgcagttgctttgcctgctggtggaagaggagatgaggaagaacttgccaaggaaaacaataaaagtgcctcatcatccaagggcaaaannaccttgagtgtcaccaagaccaagcctgagacgggtgaagttatcggtgtgttcgagagtgttcaaccatctgacactgatttgggagcaaaggctccaaaggatgtcaagatccaaggcatctggtatgctcagcttgagtcatagagtggtttggtttctggtttggttgttggctcagatttttgtaggaacttcatgcat

SEQ ID NO: 24307 - DNA, 439 bp, Glycine max
  Clone ID: LIB3106-006-Q1-K1-G8
cccacgcgtccgcccacgcgttcgcccactcgtccgcccacgcgtccgaggtgatgatcttgagccatgaccgagagagaggtcgagtaagtctttccactaagaagttagagcccacacctggagacatgattcgcaatccaaagcttgtctttgagaaggcggaggagatggctcagacattcagacagagaatagcccaagcagaagctatggctcgtgcagacatgctaaggttccagcctgagagtggattgactatcagcggtgatgggatcctgggaccatttacttcagacttgcctgaagagggactggatttgagtgaagtaccaccagctgaagaatcatgattcagaattgcgtgctcttttctttctgtttgcttacatttttataatattgtttggaactaactatcaattgttgccgaacgatg

SEQ ID NO: 24308 - DNA, 435 bp, Glycine max
  Clone ID: LIB3106-006-Q1-K1-H10
gtgaggttgtaacaaccaatcctactgttggtagcaacgtcgaagagctcgtctacaagagtataggatttgaggtctgggatcttggtggacaagaaagactgaggacatcatgggcaacatattaccgaggaactcatgctgttattgcggtgatagacagcagtgatagagccaggatctctatcataaaggatgaactttttaggttgctggggcatgaagatttacaacattctgtcattcttgtctttgctaataaacaagatatcaaggatgctatgactcctgctgagatcactgatgcactctcacttcacagcatcaaggatcatgattggcatatacaagcttgctgtgctctctcaggagaagggctgtatgatggtcttggatggattgcccagcgagtaactggcaaagccccaacatgat

SEQ ID NO: 24309 - DNA, 450 bp, Glycine max
  Clone ID: LIB3106-006-Q1-K1-H11
cccacgcgtccgcccacgcgtccgcaaggctctactctactgcttcaccttctgctctagagaatgtcagtggtgatacatggcttcggctactctctctgtagccaaaccagcccttcaggcaaatgggaaaggcttctctgaattctctggcctccgcagctcatcaggcttccttcccttttctagaaaatcttcagaggatttccattctgtcattgccttccagacctatgcagttggaagcagtggaggatacaagaagggtgtgacagaagcaaaactgaaggttgccataaacggatttggaaggattggaaggaacttcttgaggtgctggcacggtcgcaaagactcccctcttgatgtcattgccatcaacgacaccggtggcgtgaaacaagcctctcaccttctcaagtacgattcgatcctcggaaccttcgatgc

SEQ ID NO: 24310 - DNA, 435 bp, Glycine max
  Clone ID: LIB3106-006-Q1-K1-H12
tccggtttgttgtgagctataagctagtttatcgtgaggagaatatgaagttgtttgttttcttgggtggtgcagtagttttggtagcatggccatgccatggcgcaggctaccaaaggttccctctccgaatgaaaactggctatggtgagcgttcttcggaggtaaaatgcgcaagttttaggcttgctgtggaagcacacaacatccgagcctttaaaaccattcctgaagagtgcgttgaaccaacaaaggactacattaatggcgaacaatttaaatcagactctaaaacagttaaccaacaagctttcttttatgctagtgaacgcgaagtccatcacaacgacatatttatattcggcatagataacaccgtactctctaatatcccatactatgaaaaacatggatatggggtggaggaatttaatg

SEQ ID NO: 24311 - DNA, 54 bp, Glycine max
  Clone ID: LIB3106-006-Q1-K1-H2
taaatccatcatcttagtaactctttttaaatatgcatatatcaaatcatttct

SEQ ID NO: 24312 - DNA, 248 bp, Glycine max
  Clone ID: LIB3106-006-Q1-K1-H3
cccacgcgtccggtcttatggtggttacctatgcacccagagacgaggaagggcagagtgggcgacgaaatgcttcggggagttcaaaataaacgtagatccggggattccctatatatgtcaacctttcgaactgctgctgaatccaccggcagtcaatatacaacctttcgaactgaaacatcttaatagccatatgaaaagaaagcaagcccatttagtttttcagtttttattagaatttccaa

SEQ ID NO: 24313 - DNA, 408 bp, Glycine max
  Clone ID: LIB3106-006-Q1-K1-H5
cccactcgtcctggaaatgtccttttattacaaggactggttttcactggcaagcgttacctaatgatcttgtaaagagaggagttgctgttaaggacccatctgctccccatggagttcgtcttttgattgatgactatccttatgcttctgatgggctagagatatgggatgccatcaagtcctgggtgcaagaatatgtctcattctactacaagtcatatgaggaacttcaaaaagaccctgaactccaagcttggtggaaagaacttgtagaggtgggtcatggtgatttgaaagataagccatggtgtcaaaagatgcatactcgttaaaaagttgttgaagcttccgctatcctcatatggatggttcagcccttcatgctttttttaactttggacagta

SEQ ID NO: 24314 - DNA, 444 bp, Glycine max
  Clone ID: LIB3106-006-Q1-K1-H6
gtggattcatgtatctaagcctccataaaatgcctttattaagaaaattcatgaagatttggcaagtgttgcagaagaattaggctttaaagtgaatctgaagcataagaaaattaacatttccaatccccgagtagcttgggagcatgaacagttttcaaggctgagagttactgcggccaccctctctgaactctctacagcacctgaatttctagagaagactggtggcttggttgatggaaggcattttgtcaatgaagcggctattgtcagaagtgtgaaattaattgctgagagtcttgcgaggcatatctatggacatcaaggaaagaacattcagatctttgcagacaacaagtacttggctgtcaatccttcttatgttcgatcattgttagatgttttgtcccaaacgccctgagtaactccatttttctcaaa

SEQ ID NO: 24315 - DNA, 447 bp, Glycine max
  Clone ID: LIB3106-006-Q1-K1-H7
gtttttgcattaattgctatttcatttattttattgattagtgtacctgttgtatttgctgctcctgaaggttggtcgaataacaaaaatgttgtattttccggtacatcattatggattggattagtgtttctcgtgggtattcttaattctctcatttcttgaagctctatttattctagatcaaaaacgaaatgaccccctcccccagaattctttcggattgtcgggcacattaaaaaaggaatggataagttcctaaaaataaagaaaactataacacattataaggaggggtcaaatattaattaagataaaagatatagaatatctatctgtatatatatatatatagatataatttattaataattagaactttcttttttcttaaaaaaaaaaaaagtaaataaaaagatttgatagaatcggaatttcaattcgatt

SEQ ID NO: 24316 - DNA, 430 bp, Glycine max
  unsure at all n locations
  Clone ID: LIB3106-006-Q1-K1-H8
cccacgcgtccgtgttgatcgagataactataaacagtgtgatgaaaatgaaggtccttgggttcttcgttgctacaattttggtagcatggcaatgccatgcgtacgatatgttccctctccgaatgaacactggctatggtgcccgtactccggaggtgaaatgcgcaagttggaggcttgctgtggaagcacacaacatctttggctttgagaccattcctgaagagtgcgttgaagcaacaaatgaatacatccatggcgaacaatatagatcagactccaaaacagttaaccaacaagcttacttttatgccagagacctcgaagtccatcccaaggacacatttgtgttcagtatagatggcaccgtactctctaatattccatactacaaaaaacatggatatggngtggagaaatttaactc

SEQ ID NO: 24317 - DNA, 405 bp, Glycine max
  Clone ID: LIB3106-006-Q1-K2-A1
cccacgcgtccgaatccgggtactatgcaatgcaaacatctctgagcattgcaatcccaagaaggatgcatcatttcctgaaatcaacttggtaaatggggagacaagaggtcttatcggtgggtaccctccatgtaaccgaacaattttggccttctttgcagggcaaatgcatggtagaattaggccagtgcttttccagcattgggagggcaaagacaaggatgtgctagtttatgagaaactcccagacggagttccataccatgagacaatgaagaagagcaagtattgcatttgtccaagtgggtttgaagtggcaagtccaagaattgttgaggcaatctatgcacaatgtgtgcctgtgataatatcacaacaatatgtgcttccttttagtgatgt

SEQ ID NO: 24318 - DNA, 405 bp, Glycine max
  Clone ID: LIB3106-006-Q1-K2-A10
cccacgcgtccgcggtcgcgtgggttccgttcgaacccttctggcgcggatcctgtgtccgttgccagcaagagtctactactgttacccctgtcgcagaagaagacccgcgcttcgcgtgcgtcgaacccgaaccccgattcaaaggcccggacatttggaacaagagctggtatccaaaagctgcagatcatgtgaatacagaaaaaacatggtatgttgttgatgctacagacaaagttcttggaagactagcatcgacgattgctattcacatccgagggaaaaacttggcaacctacacacccagtgtggacatgggtgcgtttgtaattgtggtaaatgcagaaaaggttgctgtatctgggaaaaagaggacccaaaagctttacaggaggcactctg

SEQ ID NO: 24319 - DNA, 407 bp, Glycine max
  Clone ID: LIB3106-006-Q1-K2-A11
ggaaatggcttcctcaatgatctcctccccagctgttaccaccggcaagggtgccggtgccggcatggttgctccattcaccggcctcaaatccatggctggcttccccacgaggaagaccaacaatgacattacctccattgctagcaacggtggaagagtacaatgcatgcaggtgtggccaccaattggcaagaagaagttcgagactctttcctacttgccagacctcgatgatgcccaattggcaaaggaagtcgaataccttctaaggaaaggatggattccttgcttggaattcgagttggagcacggtttcgtgtaccgtgagcacaacaggtcacctggatactatgatggacgctactggaccatgtggaagctgcctatgtttggctgcactgatg

SEQ ID NO: 24320 - DNA, 295 bp, Glycine max
  Clone ID: LIB3106-006-Q1-K1-G3
acttttatcttgtcccatatcttctttcttctgtggacggggtccttatatataccttcagccaccgctgatgatgatcatgtgtactacactgactgtgataatctttaatacggtgtcatatattacgcgttgccagtgataagaagaaatggcggtggtatacaagttgaataatcatgaatctaaacttgccctctgactgtggtgcaatctggcaacgagctctttgaggggctaccgaatatgattgcatttcgttcagcaggagtctttttcattacctaatggccat

SEQ ID NO: 24321 - DNA, 262 bp, Glycine max
  Clone ID: LIB3106-006-Q1-K2-A12
gatacaggcaaatactgccaagtgtccgtgactgtgttttcctgcttttggaaaattggcttgtaattgatttttggacatgtgtgtcataatgtttctgtttttagtttttacctacgggatgtagtcactttggaattgtattggacaacattcagttgccatctaatctcgtttaagctaagtttgttgtgctaattaaactgacctcccttcttggttttgaaatgagaggatttgaatatagtattacagaactggc

SEQ ID NO: 24322 - DNA, 419 bp, Glycine max
  Clone ID: LIB3106-006-Q1-K1-E8
ggagcgatccgagaaaaactctgtaaacatgttggtttaccaggacctccttacaggtgaggagcttctctctgactccttccgttacaaggaaattgagaatggaatgctgtgggaagttgaggggaagtgggttgttaaaggagcagttgatgtatacattggtgcaaacccttctgctgagggtggaggagaagatgagggagttgatgatgcagctgttaaggttgttgacattgttgacacattcagacttcaagagcaacccgcattcgataagaagcagtttgttaccttcatgaagaggtttatcaagaatttgactcccaagctcgatgcagagcaacaggagttgtttaagaagcacatcgagggagcaactaaatacctgctctctaagattaaagatttccaaattt

SEQ ID NO: 24323 - DNA, 448 bp, Glycine max
  Clone ID: LIB3106-006-Q1-K1-E9
ggagaagtctttggaggtcaaagaacattgattcctcttcatgctatgtttgaaaatgtgggtgggggaacttctctaagcactccttgggaaatgattaggctctatgggaaagaggtgaaccttgttgatactcctggaccgccacctttcgttgaagaagtaacaaagcgtgcagcttggaaaaatgcaggtccacgttctcgcccactttctccacctccagctaggccaaaatcatacaacatataaagttggtggggttgggtagctgagagtgataatgagcctgatagtacagttatagaactgaggaccaatgcccataaattactatgggaggctattgactatgtgatctgtgttgaggctgatgtattcatccctggatttgaccgtgacgggaaggggcatccaaattttgctagcttggtgatggggcacaggc

SEQ ID NO: 24324 - DNA, 315 bp, Glycine max
  Clone ID: LIB3106-006-Q1-K1-F1
gattccgattgttgtgatccgtacaacacagcacaacaccatggctggccccaacggcatgcccaagtggttgtttctctctctgactctgatcctcagtctctctgtctccgtcggcgcccgccacttcgtcctcgtcctctcccaggaagactacaaggacgacccccccgccgatcccgactccgccgccgagtgggacgagttcggcgacggagactcccacaaatccgaggacgacctcgaccccggctcatggcgccccatcttcgagccccccgtcggagatccccaaccccttcccgaaattcgacg

SEQ ID NO: 24325 - DNA, 442 bp, Glycine max
  Clone ID: LIB3106-006-Q1-K1-F10
ttctcttcttcctcttcaatgtctatagcaagaccccatttggtatgaattatgaccatggctttaagttcactttttttctccactcgtttcattcccacaccctttgttacttccactagaaacataccttcttctccacgcacttgtgccagttgcattccccacaaaagagactttccactccctgcagtggcttcagtcccttaccaacccatcaactttgactacctgcaagaggaattcagtggacatggagtcacctttgaaggagttgaagacagttgtattgccaagatggagctgaaaaatggaagcattgtgaccatgatgctgccaagtggattgatcacctcatacaaggcccctatgtggcatggtggcaagttggagttgcttcataccaatgtgtcagagggagagtatggtgatgccatcattc

SEQ ID NO: 24326 - DNA, 398 bp, Glycine max
  Clone ID: LIB3106-006-Q1-K1-F11
tctattgtattggcctgtagctatgccatatcagagacagcgtgttcagagctcaatgggaacgtcactctcgtggcctatgttccatgctctggctacaagttgccattgatcaaagctgaggccagagttcctaaagccaaagaatctgaaggaggaaggagaggtgcccttgttctcttggcagctacccttttcacctctgcagcttccaattcttctgccaatgctgggatcattgaagattaccttgagaggagcaaggccaacaaggaattgaatgacaagaaaaggttagctactactggagcaaactttgcatgagcatacaccgtggaattcggtagttgcaagttccctgagaacttcactggttgccaaaatctttgccaaacaaa

SEQ ID NO: 24327 - DNA, 411 bp, Glycine max
  Clone ID: LIB3106-006-Q1-K1-F12
ggcactgcgttggactcgtttggcaccgtcacgcgttcgttgttcgaaccgttcgaatgggaactgctgtgtggtgtctggtagtagttgcagagagagggggacatggtttgctaaaagggataagatgatgaagcttgcaggatattccctggccgtttcatttgctcccataagttccaatgtcgttaaaagcaatggcagattcacattaggtatatctcataggaacacgtgcagctataggctgttttctactcatgcccagaaacaacaattacaggagaaacctggtgtggttgccagatactaccttcctccttggtttagtgttgcttcaatgatggactggacagaccatcactacaggactttagtgcgcctcatattaaaacatgcttggcttgacac

SEQ ID NO: 24328 - DNA, 443 bp, Glycine max
  Clone ID: LIB3106-006-Q1-K1-F3
agttattgggagttgcagcattcttgagactgcaggtcaaggagcactcattcccgtctggcagacattgaagtctgccattacttccaaggaatcagaatcttcaagttccaataaaattatttggctgcattttggggttaacagtgccgcaacgaggtttgctatcgagcgtcaagctgtcaacgaggctaccttccgctgccctgatgaaatgggatggaagccccagaaagtccctattgttccttcagatggtgcaattacacgaatacgggagactacccttcttcctgtggaggagatcaccaaggccttggcaaataagggctatgatgttatgacatctgatgatgcaagaaggtttgtgtgcaactacgtttactatcattcgcttcgctttgcggagcagaatgggactaaatccctttttgtgcacgtgc

SEQ ID NO: 24329 - DNA, 409 bp, Glycine max
  Clone ID: LIB3106-006-Q1-K1-F4
ggacttaagctagtttatcggagagaatatgaagttgttgttttcttgggggggggagttttggtagcatgagcctgccatggcgcagctccaaatgtccctctccaatgaaaactgctatggtgagcgttcttcgtgaggtaaaatgcgcaagttttatgcttgctgtggaagcacacaacatccgagcctttaaaaccattcctgaaagtgcgttgaaccaacaaaggactacattaatggcgaacaatttagatcagactctaaaacagttaaccaacaagctttcttttatgctagtgaacgcgaagtccatcacaacgacatatttatattcggcatatataacaccggactctctaatatcccatactatgaaaaacatggatatggggtggaggaatttaat

SEQ ID NO: 24330 - DNA, 363 bp, Glycine max
  Clone ID: LIB3106-006-Q1-K1-F5
cagcttcagatcttctccatcctctgaatcaagttttgactttatttgaagagtgggcagctgcactttccttccaaaatgagccggccaatggaggaagatgctgcgggtaaaaatgaggaagaggagttcaacaccggaccactatctgtactcatgatgagtgttaaaaataatactcaggtactgataaattgtcggaacaacaaaaagcttctgggtcgtgtaagggcttttgacaggcactgcaacatggttcttgaaaatgtcagggagatgtggactgaggtgccgaagactggtaaaggaaagaaaaaggcccagccagtcaacaaggatagattcatcagcaaaatgtttcta

SEQ ID NO: 24331 - DNA, 404 bp, Glycine max
  Clone ID: LIB3106-006-Q1-K1-F6
ccaccgtcaaacttgtcattctatatgctttgcagggtccattgaatatgtctctggcgggggatcttcctcccaagggtggcttcagttttgatctatgccgaagaaacgcaatgcttcaaaacaagggcctcaaagccccaacctttctcaaaactggcaccactattgtcggtttagttttccaggatggtgtcattcttggtgctgatactagggcaactgaaggacctatagtggctgataaaaactgtgagaaaattcattatatggcacccaacatatattgctgtggagcaggcacagctgctgatacagaggctgtaacagacatggttagcttacagctgcaattacatcgctaccatactggtcgagaatcaagagttgttacagcgctgacc

SEQ ID NO: 24332 - DNA, 436 bp, Glycine max
  Clone ID: LIB3106-006-Q1-K1-F7
tgcaattgaagttaaaagccttagccttccctacaactccaaacacaaagacatcatcatgcatggctgcctccgtctccactgtcggagctgtcaacagagctcttttgaacctgaatggttctggagctggagcttcagctcccagttcagccttctttgggaccagcttgaagaaggttattgcctcaagggtccccaacagcaaggtttccggtggaagcttcaagattgttgctgtagaagagaagaaagagattgaagagacccagcagaccgacaaggacagatggaagggtcttgcctatgatatctcagacgaccaacaagacatcacaagaggaaagggtttggttgactcccttttccaagctccacaggatgctggaactcactatgcagtcatgagctcctacgagtacctcagcactggact

SEQ ID NO: 24333 - DNA, 446 bp, Glycine max
  Clone ID: LIB3106-006-Q1-K1-F8
cccacgcgtccggtttgttgttgtaactcgttcttcttcttttgttgttctgtgtttgtgtgtggtttttctctcacctgaaaatgtcttgctgcggtggtaactgtggttgcggaagctcctgcaagtgcggcaacggctgcggaggctgcaagatgtacccagacttgagctacactgagtcaaccaccaccgagaccttggtcatgggagtggcacctgttaaggctcaatttgagggtgctgaaatgggtgtgcccgctgagaacgatggctgcaaatgtggaccaaactgctcctgcaacccctgcacttgcaagtgaggtgttgggagagcaagcttcaagcagagatagcccttaattaggaataatgataaactattaatgtgtagctaaaaacttatgtattatgtctgtgatggttttcgtgcactctggtgtttt

SEQ ID NO: 24334 - DNA, 441 bp, Glycine max
  Clone ID: LIB3106-006-Q1-K1-F9
cccacgcgtccgatttgcgcattattggagagccaaagcttccatcagtgtttcttcaaggcatctgttgggttctgggggaatacggaacagcagatggaaagtattctgcttcttatatcagtgggaagttatgtgacattgcagaggcatattccaatgatgaaaatgttaaggcttatgcaatttcagcactgttgaaaatttatgcatttgaagtagcagctgggaggaaagtggatatcctatctgagtgccaatcgttgattgaagaatcattggcatcacactctacagatttgcagcaacgtgcttatgaattgcaagctcttataggtttggatgtacaagctgttgaaacaataatgccacgagatgcaagttgtgaagacattgaggttgataagaatctttctttcctcaatgggtatgttcagcagt

SEQ ID NO: 24335 - DNA, 443 bp, Glycine max
  Clone ID: LIB3106-006-Q1-K1-G11
cccacgcgtccggttccaactcatcaagggttaatgttgccgccaagatagcaatgcctggttccaaaggggtgcttgaactgaacaacacagaccccaggctgaacccttctgtgaggttcaactatctagcaagtgaagatgacatggaagaatgcgtcaagatgacaaaactacttgagagaattgcaaggtcaaaatctattgcatttttcctaggcgagtcaaagcaagaaaaactgacatcaactgacgttgatctaagaaacttctgcaagaaaaatgtgagaacaatctatcactatcatggggtttgcacggttggatcagtggttgatgagcaaaacaaggtttatggaataaagggattgagaatattggatggctcaactttttcagagtcaccaggcacaaacccaatggccaccattctgatgctagga

SEQ ID NO: 24336 - DNA, 451 bp, Glycine max
  Clone ID: LIB3106-006-Q1-K1-G12
tgttgatcgagataactagaaacagtgtgatgaaaatgaaggtccttgttttcttcgttggtacagttttggtagcatggcaatgccatgcgtacgatatgttccctctccgaatgaacactggctatggtgcccgtactccggaggtgaaatgcgcaagttggaggcttgctgtggaagcacacaacatctttggctttgagaccattcctgaagagtgcgttgaagcaacaaaggaatacatccatggcgaacaatatagatcagactccaaaacagttaaccaacaagcttacttttatgccagagacctcgaagtccatcccaaggacacatttgtgttcagtatagatggcaccgtactctctaatatttcatactacaaaaaacatggatatggggtggagaaatttaactcgaccttgtatgatgaatgggttaacaagggcaa

SEQ ID NO: 24337 - DNA, 449 bp, Glycine max
  Clone ID: LIB3106-006-Q1-K1-E7
cccacgcgtccgcccacgcgtccgaaacaaacccactaagatggcttcctttgtatccttgctagtgctgcttcttgcagcccttatcctcatgcctcaagggcttgctacttactacaaaccaattaagaagccaccagtgtacaagcctccagtgtacaagccaccagtgtacaaaccaccggtttataagccaaaaccaccggtttacaagccgaaaccaccggtttacaagccaccatataagaagccaccatacaagaaaccaccttatggaaagtaccctccagtagaggacaacacccatgcctaaagcaagcaatgaggtctattatctacttaataaataagaggaactgctttgtgttttctagcattgtgatttacaacttcgtagcaatgcatattcttgactcttgcatgcacttcaatcccttcgagcattaatg

SEQ ID NO: 24338 - DNA, 448 bp, Glycine max
  Clone ID: LIB3106-006-Q1-K1-D11
agcgaatcagattgagatggggtcgtttggtcggagaagcatgtccactgtggcgaaagcggtggaggaaatcaccggcactggcaacaccaagatccgcaaatcttccagcgagctctgcaccttcctcggcatccctcgccaatctcgttccgaaatcgctctcattctctccaagttcatcaaactctataatttcaagagtcccggcattaagaaggacaagatttgggagcagaatttgcagacactgttgcgtggcagaaacaatgttggttttcctgagattgcgaagatactgtctccggaattcggtcatggcgcgattaatgtgaaggacagtagtattggggattcttccggggacgccaccaaggggaaaggccctaaaaaaaaagggaaagcctctaagaagtaagataggacttgcacatgctttgaaatcacc

SEQ ID NO: 24339 - DNA, 186 bp, Glycine max
  Clone ID: LIB3106-006-Q1-K1-D2
ctacccaccctcctcttatttctctactctttccttttaaatctcctactcatctctatctaagcagtttaatattacatttaccatcttttaaccactcattccaatactaaatctaattaaattatcatctttattccactataaaccccatttttcaatcatcaaacttttaaaatccttcca

SEQ ID NO: 24340 - DNA, 161 bp, Glycine max
  Clone ID: LIB3106-006-Q1-K1-D3
gtcattgcttacttatgcctaattcaccaaatcccgtttgtattcgtacgtcacggaatggttgttccacattagctaggatttgaaaacttgctatgggaaaactgaacttcttaaaaaaaataaaataataaaaactagcaagaaataaaatgaccatt

SEQ ID NO: 24341 - DNA, 441 bp, Glycine max
  Clone ID: LIB3106-006-Q1-K1-D4
gaaagagagaaaacaaagggcggtggtgagtgcttctgcttcatcatcatcagagaatgggggctactgtgtcttctgcttggtcaaagcccggcgcgtgggccctagattccgaggaacacgaagccgagctccttcaacagaacaacaacaaccccaacgacaagccactcgccgacttcccctcccttgccgccgccgccgccaccaagcccaagaagaagaaggcccatacctactccctcgccgaattcaccgccaagcccgactccgccttcgccgaccaagatcccgtcgttcttcccaccggcccccgccagcgcaccgccgaggagctcgaccgcacccgtctcggtggcggcttccgcaactatggcgaccgccccaacaggaataactcctccggcggcgacgagtcttccaattcccgctggggttcat

SEQ ID NO: 24342 - DNA, 447 bp, Glycine max
  Clone ID: LIB3106-006-Q1-K1-D5
cccactcgtccgcccactcgtccgaaagcagataccgcttccaaggagaaaagtaaggcatccactgtggcgatcaatgccgagattcgtcgaaccaaggctaggttgttggaggaggttcccaagttgcagagattggctatgaaaaaggtaaaggggctttcatcacaagaatttgctgcccgtaatgatttggctcttgcattgccggataggattcaagctatcccagatgggacccctgcagcatccaaacaaagtggaagttgggcagcttcagcctcacgtcctggaattaaatttgattcagatgggaaattcgatgatgaatacttccaacaaactgaagaatcaagtggattcaggaaagagtacgaaatgcgtaaaatgaaacaagatcaaggtttggatatgatcgcagaaggattggatactttgaaaaacatg

SEQ ID NO: 24343 - DNA, 433 bp, Glycine max
  Clone ID: LIB3106-006-Q1-K1-D6
cccacgcgtccggaatggcacgcatcaaggaggatccatctctgaaacatattttggaggagatagagactggcggtcctgctgctatgatgaggtactggaataatgaggaggttttgcagaagttgggacaagccatgggtcttgccaattcgggagatgcaggtgcctctgctgaaaattctggggcagatgagaccgaagatttgggaaatgaagatgaatcaattgttcatcatactgctagtgttggtgatgtggagggcttgaaaaatgcactagcctctggtgctgacaaggatgaagaagattcagagggaagaactgctttgcattttgcctgtggatatggcgaggtaaaatgtgctcaagttctcctcgaggctgaagcaaaagtggatgctttggataaaaataagaacactgctcttca

SEQ ID NO: 24344 - DNA, 358 bp, Glycine max
  Clone ID: LIB3106-006-Q1-K1-D7
accccgctgaactcatcacttactggaagccttgttgtgagtaagagaaaaggcttcctggaccgagcacaccaacttgatacctctgattctttctttgcttagaattccacagaatatggagactgttcttttcaatcactccccacctttggaattcaagggtttgagcaaggaggaggaagactcattgctagggcaagtggaaatatggaggtacatgacatgcttcacggactccgtggccttgaaagctgtcatagagcttcgtatagcggacatactagaccgttatggtaaaccactatccttgtcgcaaattgtggagaacatagaagacgcaccctccccagatgcc

SEQ ID NO: 24345 - DNA, 182 bp, Glycine max
  Clone ID: LIB3106-006-Q1-K1-D8
ggtggtcaaggaggaggaagtggaggagggtatggtgctggtggagatcatggtgctgctgactgtggtggtggagctggaggtggagctggtggaggctatggtgccggtggagaacatggcattggctatggaggaggtggtggaagtggtggagggagtggaggaggttatggtgatgg

SEQ ID NO: 24346 - DNA, 432 bp, Glycine max
  Clone ID: LIB3106-006-Q1-K1-E10
cccacgcgtccgcccacgcgtccgcgcatagtgtggtagcagcagcagagcttgtatacggcgccgcttcagcgtagcaacatgatcattcccgagaagaaccgtaaagagatctgcaaatacctcttccaagagggagtttgctttgcgaagaaggacttcaatctggcgaagcacccggagattgatgtgccgaatctgcaggtgataaagctgatgcagagcttcaaatccagagagtacgtgagggaaacatttgcgtggatgcactattactggttcctcaccaacgatggaattgagttccttaggacttacctcaaccttccatccgaaattgtccctgccactctcaagaagcaggccaagcccgccggaagaccattcggtggcccacccggtgatcgccccatgggcccacctcgctttgac

SEQ ID NO: 24347 - DNA, 429 bp, Glycine max
  Clone ID: LIB3106-006-Q1-K1-E11
tccggtagttgagaactaagaagaaggaaatggcttcctcaatgatctcctccccagctgttaccgccgggaaccgtgccggtgccggcatggttgctccattcaccggcctcaaatccatggctggcttccccacgaggaagaccaacaatgacattacctccattgctagcaacggtggaagagtacaatgcatgcaggtgtggccaccaattggcaagaagaagttcgagactctttcctacttgccagacctcgatgatgcccaattggcaaaggaagtcgaataccttctaaggaaaggatggattccttgcttggaattcgagttggagcacggtttcgtgtaccgtgagcacaacatgtcacctggatactatgatggacgctactggaccatgtggaagctgcctatgtttggctgcactg

SEQ ID NO: 24348 - DNA, 411 bp, Glycine max
  Clone ID: LIB3106-006-Q1-K1-E12
cccacgcttgcggttaggatagcggcgacttgagcggttcgctgcccgcgacgttgtgaggggtggactgaaccttatcatttaaaggaaggagagtggatcgattcctcaacagctccaaacatttataaaagctctttcccttccctcaaatcgctcatactcttccaatctttttttttctttttttttacctttctccctcgctcaataatacaaaacaaaaaagaataacaagaaggttttcgcgatggcatcgaaacggatcttgaaggaactcaaggatcttcataaggatcctcctaccttttgcagagccgagcctgttgctgaatacatgtctcactggcaagcaacaactatgggtccttcagacagaccttatgctggaggtgttttcctattcactat

SEQ ID NO: 24349 - DNA, 446 bp, Glycine max
  Clone ID: LIB3106-006-Q1-K1-E2
cagtttggcaattaaaagaatgcacagcctatctgtctctagaggtcctaaaagggggaggtcgcctgaaacaagaagtgctgatggtattgatactgatggtgacacacctatcaaaaaacatcgtccgagtagatcactgtcacggtccaggtcagtgtcacgcccaccacatgaagttgtgcctggagaatgcttcaaggattctgctcaaaaggtcaaggcaatcaaacttgcaaagaaatctgtcaagaaaagaaacaaggatgcccgtcgtggagaagctgatagagtcatacctaatctgaagcccaagcacttgttttctgggaagcgttccaatggaaaaactgaaagacgctaggacaggggatgcttgttaatgcaatttaaaggacacctgttggcattttttaaggctgccaaaaaaaattgttattaaatgt

SEQ ID NO: 24350 - DNA, 307 bp, Glycine max
  Clone ID: LIB3106-006-Q1-K1-E3
tccactcacaaatacaagcgttcccacattacatggcctccttgcccttgaagcggggcggggatctccaaccggcggctgctactttactcccgtcgtatccgccccagcgtttgacgaatcccgaacttcctttccagagctccgacttggatgaccgataaagatttgtcatctactgtctttgatgggaatgatgcctatactcgcctcataatctccaccacaattgcaggcaaaaatggtgaacctatacaaaccatcacttacattgtaaaacttgttgtttggcacatggatcatttgg

SEQ ID NO: 24351 - DNA, 438 bp, Glycine max
  Clone ID: LIB3106-006-Q1-K1-E4
gaatttcctgtatatattcagttgtacttgtatcatatattgtagctgtgtttcacaggtgtagagaatatggtaaaaaaaataatcaacatacgttttgggattttttaattttttttgtaattcttaatcttttaatcttagatactaaaccaaatttaatgtagccttatagctgatacttgttgaatagaattagctgatgcatctcagttatgattatttagaggaccttgggagcgtttcatgtgttagaaatgttgacagatatcaacacaactgcagtgatttcagttttaaaagtttaagttctcagttgaaaaatatatttgtttcctttatggcctttttctgttcaacatatcattaatacattattatttggaattcttcctaaatatatttggccatacaattgcaatgtgctttgatctttaa

SEQ ID NO: 24352 - DNA, 445 bp, Glycine max
  Clone ID: LIB3106-006-Q1-K1-E5
agacacataaaaaatagtgatggaagaacaagagtgccaagttgtggaaaataaggggacgggcaactcctcctgttcgagtctatgctgatgggatttatgatctctttcacttcggccatgcccgttctctcgagcaagccaaaaaactgtttccaaacacttatctccttgttggatgctgcaatgatgagatcacacataagtataaaggcaaaactgtcatgactgagaaggaacgctatgagtctcttcgccactgcaggtgggttgatgaagttattccagatgcgccatgggtaatctctcgggagttccttgacaagcatcaaattgactatgtggcacatgatagtcttccttatgctgatgcaagtggagctggaaaggatgtgtatgaatatgttaagtccgttggaaaatttaaggaaacaaaacgaactga

SEQ ID NO: 24353 - DNA, 438 bp, Glycine max
  Clone ID: LIB3106-006-Q1-K1-E6
agctacttcaccactccaaacccaccacaccaccattattcatatctcattctctggccgggcactctgccttactcactctctactttgctcatcatcgtagatgaaccaacacttctagtctctcttactttataaccatgtaaaaatgagtcacctaatgaaaaattagtagcttcttgttgtgctttttattttgcttgtgttgagataaatttgtttgtttgcttggtattgttttgtgttttatgaattatttgatgggtgaagaaggagaagtggtgagaaagcaaggacaaaggggtgttggtggagataagtggtacttgtatagctgcttacaagactggaaatattgggggctgttaatacacgaaacctagttctctttcatggtcccttttgagtgaaaaaccttgtcttcttaactttcttttc

SEQ ID NO: 24354 - DNA, 447 bp, Glycine max
  Clone ID: LIB3106-006-Q1-K1-D10
cccacgcgtccggaataccccctcttttgctgcatcagaggagttgtaaattaagagcatggctgggcaagctcttgtatcatcatcttctcttaccttctcagcggaggctgcaagacaaagtcttggaccaagatcactccaatctccatttggcttctccagaaaagcctcctttcttgttaaggcagctgctaccccccctgtcaagcaaggatcagacaggcctttgtggtttgcatcaaagcaaagtctttcttacttggatggcagccttccgggtgactatggatttgaccctctgggactttcagaccctgaaggaacaggagggttcattgagccgaaatggctagcatatggtgagataatcaatggtcgttatgcaaatgtgggtgcagttggtgcaatagcacctgaaattctaagcaaggctggtctgatccc

SEQ ID NO: 24355 - DNA, 422 bp, Glycine max
  Clone ID: LIB3106-006-Q1-K1-B5
cccacgcgtccggagggatcgtgatcgcgaaagggctcaggctagaactggtgctaaaggcaagcagaaagatgatggattgacccctgaacagcgcagggaaagagatgcaaaggcgctgcaggagaaggccgcaaagaaagcggcacagggtgcaggagggaataatgcagctggaagcaaaaaataggcaataattcaatgagtagtttgagtttgccgtttgttgattgtggacatggaatttgtggaaattttatgttgcattattcatggagtatgatgtgtttattaatgtaacttgcgacggaagaacaaataagttgtgcttctttgaaagatgttgtcgctgggggcagaatcaataacttgtatctttgtttggaataatagtatttggcaattatattgtgttctctccc

SEQ ID NO: 24356 - DNA, 227 bp, Glycine max
  Clone ID: LIB3106-006-Q1-K1-B6
gcaatttatgtttcttcaactccctgttaaagctagtgcagcttaaggttttggctggcagtggtgtgttttttctgctctcaagtgagccatttcctttttccctccttggcccttgcatatatattatgtataacataagatgacagcctcacttagtacaaaaatagattactgtttggcttggtcaatggcaattgaagtttcctgtgtcctgtgttagtgtt

SEQ ID NO: 24357 - DNA, 343 bp, Glycine max
  Clone ID: LIB3106-006-Q1-K1-B7
cccacgcgtccgcccacgcgtccgaaaccaacaactctgtcgtcgtctcgcttcgttcccgacgtcgtggtgtcgtcggatttggggcaggaggaggacaccttcagtgacggagacggccccagcttctcccccgaccttaagctctttgtcgggaatcttccgttcaacgtcgacagcgcgcagctcgcggagctctttgagagtgccgggaatgtggaggcggttgaggtgatttatgataagactactgggaggagcagggggtttgggtttgtcaccatgtcttctgttgaggaagctgaagcggctgctcagcagttcaatggctatgaacttgatg

SEQ ID NO: 24358 - DNA, 399 bp, Glycine max
  Clone ID: LIB3106-006-Q1-K1-B8
cccacgcgtacgagtagttgagaactaagaaggagaagcaaatggcttcctcaatgatctgttccgcagctgttaccactgtcaaccgtgccggtgccggcatggttgctccattcactggcctcaagtccatggctggcttccccaccaggaagaccaacaatgacattacctccattgctagcaacggtggaagagtgcaatgcatgcaggtgtggccaccagttggcaagaagaagtttgagactctttcctacctgccagaccttgatgatgcacaattggcaaaggaagtagaataccttcttaggaagggatggattccttgcttggaattcgagttggagcacggtttcgtgtaccgtgagcacaacaggtcaccaagatactacgatggac

SEQ ID NO: 24359 - DNA, 354 bp, Glycine max
  Clone ID: LIB3106-006-Q1-K1-B9
cccacgcgtccgtgttctgttgcaagctgtatgattgatactaaaattgacggatctgaagctacgggagtgaatcaaaaggatctactacaaccaaatctaatgaaaggaatcactgctgatgaaaatactgctgcccatgatattaccactttacgtgtaattaatgtaagatattgtggttatgcggtcgttgtgaaagttgagggaagagttaatgaaaatgttgactctccatctcaacaaaatattgaattgtttgatcagccaaagggtggtgccaacgcactcaatattaacagtctgagattacttcttcacaactcaacttcaccagataacaataaaccattg

SEQ ID NO: 24360 - DNA, 320 bp, Glycine max
  Clone ID: LIB3106-006-Q1-K1-C1
ctttcgaaagattttatccaattgaaattttaaaaatgactgggataaacttaagaattcaattattgaaattgaataagtaaacaatttaattggattggtcgaatggtatcaaaaaaatggagtactaactcccatttcttatttattattgaattaaccgatcaacttgctttgttatcgaacatttctttttgatttcaaaaattttccggaaaaaatttgaatctatttttatatgcgaatcaatcctactacttctggtcctgaggtttctgcgcttgaaaaaaaaaaatctgggacgtatcgcccaaataatt

SEQ ID NO: 24361 - DNA, 370 bp, Glycine max
  Clone ID: LIB3106-006-Q1-K1-C10
cggacgcgtggggaaataattattttctgcataacttttggagctatggcttgagaagatggccatcaatctgtttactgccactgtgcaggtattcgatgtagccatacggaggatcaacattctcatcaatcttctcatattcaacggtccatttgataataacacccccatgatcggcgtcaatagcttgaaaataattaataagtaagaaataattggcttggccttagaatatatagtgcttgtctagttatcagtataatcggtgtgatgtttgacgatcgagaaagatgcttacctagatcgttcgttttgcatggaataaatttggaagtgtgttccttttcttaatagagtggcaataagg

SEQ ID NO: 24362 - DNA, 447 bp, Glycine max
  unsure at all n locations
  Clone ID: LIB3106-006-Q1-K1-C11
gcaagatgtacccagacttgagctacactgagtcaaccaccaccgagaccttggtcatgggagtggcacctgttaaggctcaatttgagggtgctgaaatgggtgtgcccgctgagaacgatggctgcaaatgtggaccaaactgctcctgcaacccctgcacttgcaagtgaggtgttgggagagcaagcttcaagcagagatagcccttaattaggaataatgataaactattaatgtgtagctaaaaacttatgtattatgtctgtgatggttttcgtgcactctggtgttttgtgttaaacaaacatccttagaataaagtggtcatgtcttgcctttcagcaagttcaagtgttttggacttgtgatgggtgtgttaagctcatggntgcttcttttttttttttttaatggttgggaattggtcgcttctgtataaagttc

SEQ ID NO: 24363 - DNA, 409 bp, Glycine max
  Clone ID: LIB3106-006-Q1-K1-C12
cttcttcttcttctcttaaaagttattaagagcttttgcttttctttctgcgcgcttttgggaaggagagtagttcttccttttctcaaagcaaaaaaaatgttcatcgagagtttcaaggttgagagtcctaacgtgaagtacacagagactgagattcagtccgtgtacaactatgaaaccactgaacttgttcacgagaacaataatggcacttatcagtgggttgtcaagcccaaaactgtcaaatatgaatttaaaaccaacacccatgtccctaaactaggggtaatgcttgtggggtgggggggaaacaatggctcaaccctcactggtggtgttattgctaaccgagagggtattttatgggcaacaaaggacaatattcaacaagccaattactttgggt

SEQ ID NO: 24364 - DNA, 344 bp, Glycine max
  Clone ID: LIB3106-006-Q1-K1-C2
aaccaaacactcttcttcatatccttatacttattgctcttggtctatctgagaggggcgggatggcctcaagagcagtgctattgttgactatgtgtgtgcttccggccatggttgtggccattcacccagcaaagaaccctttttgcgtgaagggtcacgtctactgtgacccttgccgtgctggttttgagacctcaacaaccacctacattgccgatgctgaaattatgttgcaatgcaagagcacggttagcaacaatgttgtgtacaccaagaaagggtacactgactcaactggagcatacacaatgtacgtggacgaagatcacgcaaatcaaata

SEQ ID NO: 24365 - DNA, 356 bp, Glycine max
  Clone ID: LIB3106-006-Q1-K1-C3
ctttttctctctctccattccgtgttttcagctccggtaacctctccttctccggcgccggtgctatctccgccgtgaccttccatccctcaacgccccacagatcttcaatttgattgcttgggtcaacaatttctgtcattctcaatcatggcaactagacttcagtttgaaaataattgtgaagttggagtcttctctaaactcaccaatgcttactgtttggttgcgattggaggttctgaaagcttctacagtgtatttgaagctgagttagcagatgttatccctgtggtcaagacatccattggtggtactcgtatcattggtcggctttgtgctggaaacaagaatgg

SEQ ID NO: 24366 - DNA, 432 bp, Glycine max
  Clone ID: LIB3106-006-Q1-K1-C4
acaaaacaaaaaccattcaattcaaagatagtaggctgccaggcaccgcacaccgcgaccggactttctccgatcctcacaattttgcctccggcatgtctccggccgccggagtcagcgtccccctcctgggggattccaaaggaacgccgccgccggcttccgtccccggcgcggtgttcaacgtggccaccagcatagtcggcgccggaatcatgtcgattccggcgatcatgaaggttctcggcgtagttcccgctttcgcgatgattctcgtggtggccgtgctggcggaactgtccgtggacttcctgatgcggttcacgcactccggcgaaacgacgacgtacgctggcgtcatgagggaggcgttcggatcgggtggagcattggccgcgcaagtttgcgtcatcatcaccaacgttgggggtt

SEQ ID NO: 24367 - DNA, 60 bp, Glycine max
  Clone ID: LIB3106-006-Q1-K1-C5
aaaaaaaaaaaaaaaaaaaaaaaaattaaaaaaaaaaaaaaaaaaaaaaaaaaaaagggg

SEQ ID NO: 24368 - DNA, 437 bp, Glycine max
  Clone ID: LIB3106-006-Q1-K1-C6
gagagatccatccatcaattccaatggccgatcagctcaccgacgaacagatctgggagttcaaggaagccttcagcctcttcgacaaggacggggatggttgtattaccaccaaggaacttgggaccgtgatgcggtcacttggccagaacccaactgaggcagagctgcaggacatgataaatgaggttgatgctgatgggaatggtaccattgatttcccagaattcctgaatctcatggctcgcaagatgaaagacactgattcagaggaggagctgaaggaggctttccgcgtgtttgacaaggatcagaatggcttcatctctgcagcggagctccgccatgtgatgaccaatctcggtgagaagctgaccgacgaagaagtcgatgaaatgattcgcgaggctgacgttgatggtgatggtcagatcaac

SEQ ID NO: 24369 - DNA, 333 bp, Glycine max
  Clone ID: LIB3106-006-Q1-K1-C7
cccacgcgttcgctccacccaacaaaccacctctccttcctctcccccaaaattttaaagggaaggtcaaattccacattcctgagattcgcaaaaatccctttctgcgtcgtcgcattgtatgagcctcgaattccgatcccgattggcatggccggagcggcgttatcgccgccgacgagttcgaagtcggtgacgcagactgtgaacgggtcgcacaagttcgtgatcgagggatactccctggcaaaagggatgtgagcggggaagcacattgcgagcgacgtgttcacggtgggagggttccactgggcgatctacttttaccccgat

SEQ ID NO: 24370 - DNA, 405 bp, Glycine max
  Clone ID: LIB3106-006-Q1-K1-C8
gtaaaaaggaaaggggaaggaagcaaggcatggaaggagagtggatcgattcctcagcagggccagacatttataaaagctctttcccttccctcaaatcgctcatactcttccaatctttttttttttttttttttttacctttctccctcgctcaataatacaaaacaaaaaagaagaagaagaaggttttcgcgatggcatcgaaacggatcttgaaggaactcaaggatctccagaaggatcctcctacctcttgcagcgccggtcctgttgctgaaaacatgtttcactggcaagcaacaattatgggtcctccagacagtccttatgctggaagtgttttcctagtcactattcatttcccttcagattatcccttcaagccacccaaagttgcattca

SEQ ID NO: 24371 - DNA, 398 bp, Glycine max
  Clone ID: LIB3106-006-Q1-K1-C9
gtgcaaagcctctattttttcttgtgaatttgaaggacgatgagttccacagaggtcgcggccacggcgaataagggtggaagagggaaacccaagaccacaaagtccgttttcccgttcctccaaagccggccttcagttccccgtcggccgcgtcgctcgctacctcaaggccggtcgctatgcccagcgcgttggttccggttcccctgtttacctatctgcggttctcgaataccttgccgctgaggttttggagcttgccggctacgctgcgagggacaacaagaagacgaggatcgttcctaggcacattcaacttgcggtgaggaacgatgaggagttgagcaagctgatggggtctgtgaccattgccaatgggggtgttctgcctaaca

SEQ ID NO: 24372 - DNA, 264 bp, Glycine max
  unsure at all n locations
  Clone ID: LIB3106-006-Q1-K1-B4
gatacaggcaaatactgccaagtgtccgtgactgtgttttcctccttttagaaaattggggggtaattgatttttggacatgtgtgtcataatgtttctgtttttagtttttacctacgggatgtagtcactttggaattgtattggacaacattcagttgccatctaatctcgtttaagctaagtttgttgtgctaattaaactgacctcccttcttggttttgaaatgagaggatttgaatatagtattacagaactggcnt

SEQ ID NO: 24373 - DNA, 358 bp, Glycine max
  Clone ID: LIB3106-006-Q1-K1-D1
ataaactggaaggagtatgtgttgttggcattctgacctaaagcttgtgtctttctgctgggtttgtatcttctgctgcgttaagaggatccctttctgattcttccgtaaatttcgtctctgaaactagggctaatacttcatctaccgatctctatattctggatgaaggtttgcttttgatccggcttgggagttttgatcgacttgattttaactccaacttttaagaaatgtcattccgcagcatagttcgtgatgtaagggatagtttccggagcttatctaggcgtatttttgatgtcagacttactgtgcattatagaggaaaatctctaggatcagtgcaggatttgca

SEQ ID NO: 24374 - DNA, 265 bp, Glycine max
  Clone ID: LIB3106-005-Q1-K2-H9
ctcccttttgtttttctttctaatataaccaaagattctatgcgtgcgggattgtgatttttctttgtattttcttctttttgagccttctgttgtgttactgttatgctttacaattcaaattaactgtatgtacctgagatatagagggagagtggttatataattcttttccaatgaattggtgggttgtgaatcaaaaaaaaaaaaaaaaaaaaaaaaaaaaaaaaaaaaatagaaaaaaaaatataagaaacttaaggaa

SEQ ID NO: 24375 - DNA, 302 bp, Glycine max
  Clone ID: LIB3106-006-Q1-K1-A1
gcgtccgcccacgctttctaatcctggtactatgcaatgcaaacatgtctgatcatttcaatcccatgagggatgcatcatttcctgaaatcaacttggttaatggggagacaagaggtcttatcggtgggttccctccatgtaaccgaacaattttggccttctttgcatggcaaatgcatggtataattaggccagttgcttttccagcattgggagggcaaagacaaggatgtgctattttatgagaaactcccagacggagttccataccatgagacaatgaagaaaatcaagtattg

SEQ ID NO: 24376 - DNA, 414 bp, Glycine max
  Clone ID: LIB3106-006-Q1-K1-A11
ggcttattcatggcaggtgatgcatggtttctaaatactccggaccaatcacttggcttggtacgtgcagatcatggttttgatgtatgggtaggaaatgtgcgtggaacacggtggagccatgggcatatatctttattagagaagaaaaagcaattttgggattggagttggcaggaattagccctgtatgatgttgcagaaatgatcaattacattaattcagtaacaaactcaaagatatttgtagttgggcattcacaggggacaattatatcttttgctgccttcactcaaccggagatagtagaaaaggttgaggctgcagcccttctttctccaatatcatacttggatcatatcagtgcacctcttgtacttagaatggttaagatgcacattgatcagatgatt

SEQ ID NO: 24377 - DNA, 449 bp, Glycine max
  Clone ID: LIB3106-006-Q1-K1-A12
gatcgagataactagaaacagtgtgatgaaaatgaaggtccttgttttcttcgttgctacggttggggtagcatggcaatgccatgcgtacgatatgttccctctccgaatgaacactggctatggtgcccgtactccggaggtgaaatgcgcaagttggaggcttgctgtggaagcacacaacatctttggctttgagaccattcctgaagagtgcgttgaagcaacaaaggaatacatccatggcgaacaatatagatcagactccaaaacagttaaccaacaagcttacttttatgccagagacctcgaagtccatcccaaggacacatttgtgttcagtatagatggcaccgtactctctaatattccatactacaaaaaacatggatatggggtggagaaatttaactcgaccttgtatgatgaatgggttaacaagggcaatg

SEQ ID NO: 24378 - DNA, 133 bp, Glycine max
  Clone ID: LIB3106-006-Q1-K1-A2
ttttgtcgggccgcgtaccgccactcattcaattcttttctatcatttcaactatctctaaccattttaatcccaaagaggaggcatcattttctgaaattcaactccctaaatttttaaacaaaatgtctta

SEQ ID NO: 24379 - DNA, 394 bp, Glycine max
  Clone ID: LIB3106-006-Q1-K1-A5
cccacgcgtccgcggacgcttgggttccgttcgaacccttctgccggcaacatcgggtgggcgttgccagcaagagtctactactgttacccctgtcgcaaaataagacccgcgcttcgcgtgcgtctaaccctaacccctattcaaatgcccgtacatttggaacaagagctggtatccaaaagctgcagatcatgtgaatacagaaaaaacatggtatgttgttgatgctacagacaaagttcttggaagactagcatcgacgattgctattcacatccgagggaaaaacttggcacctacacacccagtgtgtacattggtgcgtttgtaatttgtgttaattcaaaaaaggttgctgtttctgggaaaaaaatgacccaaaatctttaca

SEQ ID NO: 24380 - DNA, 434 bp, Glycine max
  Clone ID: LIB3106-006-Q1-K1-A6
ggaaatggcttcctcaatgatctcctccccagctgttaccaccgtcaaccgtgccggtgccggcatggttgctccattcaccggcctcaaatccatggctggcttccccacgaggaagaccaacaatgacattacctccattgctagcaacggtggaagagtacaatgcatgcaggtgtggccaccaattggcaagaagaagttcgagactctttcctacttgccagacctcgatgatgcccaattggcaaaggaagtcgaataccttctaaggaaaggatggattccttgcttggaattcgagttggagcacggtttcgtgtaccgtgagcacaacaggtcacctggatactatgatggacgctactggaccatgtggaagctgcctatgtttggctgcactgatgcttctcaggtgttgaaggagcttcaag

SEQ ID NO: 24381 - DNA, 383 bp, Glycine max
  Clone ID: LIB3106-006-Q1-K1-A7
cccacgcgtccgaatccgggtactatgcaatgcaaacatctctgagcatttcaatcccaagaaggatgcatcatttcctgaaatcaacttggtaaatggggagacaagaggtcttatcggtgggtaccctccatgtaaccgaacaattttggccttctttgcagggcaaatgcatggtagaattaggccagtgcttttccagcattgggagggcaaagacaaggatgtgctagtttatgagaaactcccagacggagttccataccatgagacaatgaaaaagagcaagtattgcatttgtccaagtgggtttgaagtggcaagtccaagaattgttgaggcaatctatgcacaatgtgtgcctgtgataatatcacaacaat

SEQ ID NO: 24382 - DNA, 370 bp, Glycine max
  Clone ID: LIB3106-006-Q1-K1-A8
aatgtttgatatccccatggccatggatgcttctaaatctagaaaatctggtcagctaaagaatgccccttcacggactggatcatttgcaggtgctgctgcttcacattctggacctatcttgccaaattccactcctcgttctatttataccacatctggtaacatatcttctggaggcagcatgacgactgcttcagtctcaatgaaaaagaccaactctggtccactgaataaacatggggagcctgtgaagaagtcatctggaccgcaatctggtggagtcacacgccaaaattctggtccgattccaccagttgtaggaaagaacaggtcttattacatctggtcctctaaaatcatctggggc

SEQ ID NO: 24383 - DNA, 330 bp, Glycine max
  Clone ID: LIB3106-006-Q1-K1-A9
cgagacatgagcataaatggataccctttatattatctatctttatattatctataaagggggaagggatccgatgtgaatctatttgtttagctttctatcggtatgtatataggtgaataatccaacatgcctttttgtgaagtaaaaaaactaccctcgatccatgcctgaagagggtggataatcagctagaaaaatcaatgaattcatgaggcaacccttctgcgtttgatcatgataaatttttttgtcaataaaaggatcaaagcgttgggggatcaaatgggaaagttcctttgtcggcaaatggcagactagaaacatgac

SEQ ID NO: 24384 - DNA, 315 bp, Glycine max
  Clone ID: LIB3106-006-Q1-K1-B1
gagaggtggtgtttctcagagaaataattctgggggcgaatggtcccatcgtagagtgtaccaaggaagaaatcaatctctgggatcagataagaacttttcctcaacaaaggtaaagcaaatatatgtggctaaacagaccattagtggggcatcaacagtgtcatgaggagcgagaaaaatcagctggatttgaaaaaactcaggaaaggctttgttattaatttttgatctggcagaaaataaaagttttgattaaagcttctacttgggaggttgattgttgatttttgctggctacaacaaattccatac

SEQ ID NO: 24385 - DNA, 450 bp, Glycine max
  Clone ID: LIB3106-006-Q1-K1-B10
cggacgcgtgggttcaccaccaaaaagaaaataatggcaatggccagtgcaacaactctagccacaatcactgttgtggcggctagccccagtgttggcagcagaaggagtgggaagaggaatgtgaacttcatcagagggttgaattcttttggagggttgaaggctcagaacaatgtgacattactaggccttcctgtgtgcactgagcagtgctttgcaaggtggtgagctcattgaaatatccatcatcatcatcacgtaaggggagaggtggaggtgctgccttttcaacatgcaatgctgctggtgagattttccagattgcagccatcatgaatggccttgtgcttgttggggtggcaatagggtttgtccttcttcgagtcgaagcgtttgtggaagagtctgagtgagaattgcatcaacttttaatcagtttttcatata

SEQ ID NO: 24386 - DNA, 442 bp, Glycine max
  Clone ID: LIB3106-006-Q1-K1-B11
ctttcttttttcccgcagtcatgggcaaggtcaagatcggaatcaacggatttggaagaattggccgtttggtggccagggtggctctgcagagagacgatgttgaactcgttgccgttaacgatcctttcattaccaccgattacatgacatacatgtttaaatacgacagtgttcacgggcactggaagcatcacgatgtcaccgttaaggatgagaagacccttctcttcggtgacaagccagtcactgtttttggacacaggaaccctgaagagatcccatggaagtcgactggagctgacatcattgttgagtccaccggagttttcaccgataaggataaggctgccgcacatttgaagggtggtgcaaagaaggttattatttctgcccccagtaaggatgcccccatgtttgttgttggtgttaacgagcacga

SEQ ID NO: 24387 - DNA, 342 bp, Glycine max; identical to SEQ ID NO: 24297
  Clone ID: LIB3106-006-Q1-K1-B12

SEQ ID NO: 24388 - DNA, 344 bp, Glycine max
  Clone ID: LIB3106-006-Q1-K1-B2
cggacgcgtgggcggacgcgtgggttcctccctttcactctcgtagacatcacaaaccttgcctccattcatcccacgcatggctgccatgaactctagcgtattggcctgtagctatgccatatcaggtgcagcgtgttcggagctcaatgggaaggtcacttccgtggcctatgttgcatgctctggctacaagttgccattgatcaaagctgaggccagagttcctaaagccaaagaatctgaaggaggaaggagaggtgcccttgttctcttggcagctacccttttcacctctgcagcttccaattcttctgccaatgctgggatcattgaagattacc

SEQ ID NO: 24389 - DNA, 319 bp, Glycine max
  Clone ID: LIB3106-006-Q1-K1-B3
gttctagatcgcgagcggccccccttttttcatgttattcttcataacttgttaaagtactttctccctgtcttatttgttttgcgctgagttaagttcaatcggattttgcatacagctatataattatgctttagttaagtttgattgcttctgcttttgtcttaaaaaaaaaaaaaaaagatatgaatacaaaaagccattgaaaaaagatgaagacaaaaattaataaaaccaaagaatctgaaagaagaaggaagaggtgcccttgttatatttggaattaaccattttcgggggcggcgcttttaaaggttcc

SEQ ID NO: 24390 - DNA, 416 bp, Glycine max
  Clone ID: LIB3106-005-Q1-K2-H7
cccacgcgtccgcggagctgtctgtgcaaatttgcgttgttcttcgcggggcacctcgctcactgaacgggaaggatggccgacaaggctgttacaatccgaacccgaaagttcatgaccaacaggcttctttccaggaagcagtttgtcgttgatgtccttcatccagggagggcaaatgtttccaaggctgaacttaaggagaagctggctaggatgtatgaagtgaaagaccctaatactgtatttgtcttcaaattccgaacacattttggaggtggcaaatccactggatttggtttgatttatgatacagtggagaatgccaagaagtatgagcccaaatacaggcttatcaggaacggccttgacaccaaggtagaaaagtcaaggaagcaaatgaaggagagaaagaa

SEQ ID NO: 24391 - DNA, 420 bp, Glycine max
  Clone ID: LIB3106-005-Q1-K2-G3
ctgcagagtgcagagccttctctcctctattttggcttccaacctttttgctccattgattctcagcaacaaaccaatctctatattttgcttagacaatgagggggagcttgtggcaacttgggcaatcgatcactcgccgtcttgcccatggagataagaaggctgttgctcgccgatgttttgcctcagaagctgagctgaaaaagacagtgtttcatgacttccatgttgctcatggtgggaagatggttccatttgctggatggagcatgccaatccaatacaaggactcaatcatggactctaccatcaactgtaggcagaatggtagcctttttgatgtttcccatatgtgtgggctgagcctcaaggggaaggatgctgtcccattccttgaaaagctagtcattgctgatg

SEQ ID NO: 24392 - DNA, 424 bp, Glycine max
  Clone ID: LIB3106-005-Q1-K2-G4
gcgaagaggttctcggatatgcctccaaggtggtgctcaccaaggatacaaccacaattggtggtgatggaagtacccaggaagcagtgaacaagagagttgcacaaattaggaacctaattgaggctgctgagcaagagtatgagaaagaaaagctgaatgagagaattgctaaattgtctggtggtgtggctgtgatacaggttggcgcacaaactgagacagagctcaaggaaaagaaattgagagttgaagacgctcttaatgctacaaaggcagctgtagaggaaggtattgttgttggtggtggttgcactcttctgagacttgcatcaaaggtggatgcaatcaaggatagccttgataatgatgaagaaaaagttggagctgatattgtgaaaagagctcttagttaccctttgaa

SEQ ID NO: 24393 - DNA, 419 bp, Glycine max
  Clone ID: LIB3106-005-Q1-K2-G5
ccgttctttaccttcctgaacgacaccgagaccagacacggtttggggcacagttaaggtggtagcagtagcattgttaggccatatctccttttttctctgccttgtattgaggtaaaactcacaaatattataactttgatctggggaagcaatggcatggagaggacatctttcgaaaaacataaaagaacttcggtttttgatgtgccagtcatctcctccaagctcacctgcaagggcttttgtggagaggaattataaggaactaaagacattgaacccaaaattgccaatattaattcgtgagtgcagtggagttgaacctcaattatgggcaagatatgatttgggtgttgagaaaggcatcaaattggaaggcttgtccgaagcacagatctttaaggcacttgaagatt

SEQ ID NO: 24394 - DNA, 410 bp, Glycine max
  Clone ID: LIB3106-005-Q1-K2-G6
agaaaaaaaaaacccttagccaacacaaccatcatggccacctctgctattcagcaagcagcattcactggtcaaactgctctgaagcagctcaatgagttcgtccgcaagaccggtggcgccggcaaaggtcgcactaacatgcgccgcaccgtcaagagtgctcctcagagcatttggtatggccctgaccgtcccaagtacttgggtccattctcggagcagattccatcatacctgaccggagaattccctggtgactacggatgggacactgctggattatcagctgacccggaaaccttcgccaggaaccgggagctggaggtgattcacagcagatgggcaatgcttggtgcccttggctgcaccttcccagagatccttgagaagaatggtgtcaaattcgg

SEQ ID NO: 24395 - DNA, 414 bp, Glycine max
  Clone ID: LIB3106-005-Q1-K2-G7
atttgcaaatgtcgaatttcctgagcaatactaatccgaaccctaataagtccttcggggtgaatcagcctcccactgattccgtgtccagtcttagcttcagtcccaaagccaacttcctcgtcgccacttcttgggacaatcaggttcgttgttgggaggtagcacggaatggagtaaatgttgccactgttcccaaggcttctataacgcacgatcatccggttttgtgctctacatggaaggatgatggcacgactgtattctctggtggatgtgataagcaagtgaagatgtggcctctgttatctggaggccaaccaatgactgttgccatgcatgatgcacccatcaaagaacttgcttggattcctgaaatgaaccttttagtcacaggaagctgggacaagacta

SEQ ID NO: 24396 - DNA, 417 bp, Glycine max
  Clone ID: LIB3106-005-Q1-K2-G8
cccacgcgtccgcccacgcgtccgaggaaagaatggggagtgccaggtgatttcttgggatcattgcctggaagagagacttatgttcttgacaaaaatggggtggttcagctcgtctacaacaatcagttccaaccagaaaagcatattggtgagaccctgaaaatacttcagagtctttgagacattctgattcttttgttggctatcttagctggcctgattcagagtcagacaagtatgtaactatgaattgtaagtttgtaaccactgtaattatgtagctgattttggagcctttgatcacattcacatgggggtgatgatatgtattctcctatagagagcaaacatttataacctctccggatggaataatgccttcatttgccacaaatacaatcagattatatctgt

SEQ ID NO: 24397 - DNA, 396 bp, Glycine max
  Clone ID: LIB3106-005-Q1-K2-G9
aatccctctttcttcctcttcctcagtagtgcgattttcgattctcgggtctgcaactatgcctaaccctaaggtcttcttcgacatgaccatcggcggtcaacctgccggccgcatcgtgatggagctctatgccgacgtgactcccagcaccgccgagaacttccgcgcgctctgcaccggcgagaagggcgccgggcggagcggcaagcccctccactacaaaggctcgtccttccaccgcgtgatcccgaacttcatgtgccaaggcggcgacttcaccgacggaaacggcaccggaggcgagtcgatctacggcgccaagttcgccgacgagaacttcgtgaagaagcacactggtcccggcatcctcttcatggcgaacgccggtcccgg

SEQ ID NO: 24398 - DNA, 354 bp, Glycine max
  Clone ID: LIB3106-005-Q1-K2-H10
attgaattcaaaaacttaagttcattccttgtgttttgctttcttcgtcaaaaccagacatgtcgaacacatgcggcaactgcgactgcgctgacaagactagctgcaccaagggaaacagctatggtgttattgtagagactgagaagagttacatcgagactgttgtcatggatgttccagcagctgagcatgatgggaagtgcaagtgtggcactaactgcacttgcacggactgcacctgtggccattaaggaatatgtatgaaaatgtaattgccatgtgtttggcaatacaaatatccaaataatgtaatcttcgtatgaataaatgtgtgtgctgttatcctacttc

SEQ ID NO: 24399 - DNA, 407 bp, Glycine max
  Clone ID: LIB3106-005-Q1-K2-H12
aaccaaggaagatattcttagccttccctgcttccagaatcaagaaattattgcaatcaaggctccaaaagctagttgcatcgaggtccctgatcctgatgaggaattaggttttcggcaaaggcagtacaaaatgattgttcgaagtgccattggaccaataaatttgtatctcttgagcaaggacgacagcaagtttgaggatgatagtgccaaacggatgaaattaatggatccatcatggaatagtgatcccatcagaaagaggggtgtgggattattagaaagccaacatgatgaaaaaaatccttctgagcatttcagtttgcagggttcacaagcatttggaattcaagaaattactcccacggattttgaaatggaagatgactattggtttcaatcag

SEQ ID NO: 24400 - DNA, 410 bp, Glycine max
  Clone ID: LIB3106-005-Q1-K2-H2
cccacgcgtccgcccacgcgtccgaaatctaagccttcaccgcgtaggtcgagggttcaaaagggagcactaggaccacattttaatactggtgtagcacgtgctgctgagacttcgaggaatgttcagttcccattggtgttggattcagttgtgagcatagtggtgaagaggccaaaaaagtcgaggagcaagaaggagaaggaagaggaagaggaggttcttgtgattgaaggggttgagtatgacagcaacataccagtgaaatttgatgtgcttattaatgatgaagatgataagcagattcagccagaagattcggagtatgcaggaagctttgtgactgtgcctcattcgcataagcacaaaaataagaagattatcacttgtttgaggctgggactgacaga

SEQ ID NO: 24401 - DNA, 425 bp, Glycine max
  unsure at all n locations
  Clone ID: LIB3106-005-Q1-K2-H3
aatttaagaaagaaataattcatacagagtacataattatactttggtttgcgtttgcggtgaagtcaatggatcctcagttgtggcacaaagttgctgcgatttcaggagtggcagcacttggattgggaacctatggtgcccacgtcttcaagccccaaaaccctgcttacaaagatgtttggcacacagcttcgctttaccatttggttcacactgctgccttagttgccgccccaattacaaaacaccccaatgtttttggaggccttctgaccgctggtatcttggtcttctctgggacgtgttatactgtcgcatttcttgaagacagaaaatattcaaccatggctccatttggcggctttgcatttatagcagcttgnggtagcttgtttttctgatgacttcgactctattttggt

SEQ ID NO: 24402 - DNA, 393 bp, Glycine max
  Clone ID: LIB3106-005-Q1-K2-H4
gtaatcagagttagtaaatctggatggatgactgatgatgagtttgcaagagagatgattgctggtgtaaatccaaatgtaattcgtcgtcttcaagagttcccaccaaaaagcactcttgatcccgcaacctatggtgatcaaactagtaccataacaaaacaacagttggagattaacttgggtggggtcacagtagaagaggcaattagtgctcacagattattcatattagattaccatgatgcattcttcccgtatttgacgaagataaacagcctacctattgcaaaagcttatgccacaaggacaatcctgttcttgaaagacgatggatctttaaagccacttgctatcgaattaagcaagcctgcaacagtgagtaaagtggtg

SEQ ID NO: 24403 - DNA, 401 bp, Glycine max
  Clone ID: LIB3106-005-Q1-K2-H5
cccacgcgtccgcaagcagcctccaattcgtgccactctcttcaaaatggccgttacgttctcaaatctccacacagaatcaggtctcaagtccctcgacgacttcctctctgggaaggtctacgtttctggggatcagttcacaaaggacgacatcaaagtgtatggtgctgttttggagaagccaggtgactcttttcccaatgctgccaagtggtacgaggttgtctcatctcagcttgctgcaagcttccccggcaatgctcaaggggtgagattcagtggcaaagcttctgctccagcggaggctgctcctgcgaaaccggatgcttctgctgctgaagatgatgatgaccttgatctctttggcgatgagactgaggaagacaaaaaggcagcag

SEQ ID NO: 24404 - DNA, 419 bp, Glycine max
  Clone ID: LIB3106-005-Q1-K2-H6
gtttaagtacagttgatatagttgatgcacaatcaaaatatggtttttggggatgggatttgtggcgtcaacctatgggtttcattgtttttctaatctcgtccctagcagaatgtgaaagattaccttttgatttaccggaagcggaagaagaactagtagcgggttatcaaaccgaatactcgggtatcaaatttggtttattttatgttgcttcctatttaaacctattcatttcttccttatttgtaacagttctttactttggtggttcaaatatctctattccatacatattcgtttctgacttttttgaaataaatcaaacatatggagtttttgtaacgataattggtatctttattacactagctaaaacttatttattcttattcctttctatcgcaacaagatggact

SEQ ID NO: 24405 - DNA, 404 bp, Glycine max
  Clone ID: LIB3106-005-Q1-K2-G12
gtttaatggttagggtttcgtagggccgtcatcggaatgttccagaaggcccttccgtctctctttgccctttccaattccgttatacgacggcgtttcgtgccaaccatgcgttgaattgttttttttttttctttttccttcagtggcggcagttctggtatggaaatgtatgatgtttctgaaactagaaatgcagatgcttatttgattgaaggcactgatttaaacttacatctgacaagcccaaatattcaacaatttcaagccatgtttaatgatggagcccctgaatttgttgctgatcagaacttgtattaccctgctgccaccaattatgggtattactgtacaggatttgaatcacccggagaatgggaggaccaccataggatttttggtgt

SEQ ID NO: 24406 - DNA, 418 bp, Glycine max
  Clone ID: LIB3106-005-Q1-K2-E6
agtttgttgtgagctataagctagtttatcgtgaggagaatatgaagttgtttgttgtctttgttgctgcagtagttttggtagcatggccatgccatggcgcaggctaccaaaggttccctctccgaatgaaaactggctatggtgagcgttcttcggaggtaaaatgcgcaagttttaggcttgctgtggaagcacacaacatccgagcctttaaaaccattcctgaagagtgcgttgaaccaacaaaggactacattaatggcgaacaatttagatcagactctaaaacagttaaccaacaagctttcttttatgctagtgaacgcgaagtccatcacaacgacatatttatattcggcatagataacaccgtactctctaatatcccatactatgaaaaacatggatatggggt

SEQ ID NO: 24407 - DNA, 419 bp, Glycine max
  Clone ID: LIB3106-005-Q1-K2-E7
attggaaagtgaagttctcaatgcccttatggctcagaaccaaatatatgtaacattggtccacttcaattgttaggaaggcattttcctgataaagacaagggcttcaaggtgagtgggtcaaatctttggaaaaatgactcaaaatgtatccaatggctagaccaatgggaaccttcctcagtcatatatgtgaattatggaagtattactgtgatgtccgaggatcatttgaaagaatttgcttggggactagcaaatagcaatttaccatttttgtggataaaaaggccagatttggtaatgggtgagtccacacaattgccacaagacttcttagatgaggttaaagatagaggatacataacaagttggtgcccccaagagcaagtgctgtctcatccatcagttggggtttt

SEQ ID NO: 24408 - DNA, 409 bp, Glycine max
  Clone ID: LIB3106-005-Q1-K2-E8
tcaggagctttacagacattgcttgagaagggtgccaagtacctagtagggcagggggggcctctaactgggtgcttgacattgtccatgtacctggctccaccagatgatagggatgacattggatgtgtgaaaagtgtcaacaaccaaagctactaccacaaccttgtgctgcaagacaaattacaagaattcaggaaacagtaccctcaagctgtcatactttatgctgattactatgatgcctaccgcactgtcatgaagaatccaagcaaattcggattcaaagagaccttcaacgtttgctgtggatcgggagaaccaccttacaacttcactgtgtttgccacatgtggcacacctaatgccactgtgtgctcaagcccttctcagtacatcaattgggatg

SEQ ID NO: 24409 - DNA, 298 bp, Glycine max
  Clone ID: LIB3106-005-Q1-K2-E9
gctgctgtgacagcatctatggtggttccggaggtggctcatgctgctggatatgagttctccccttccctaaagaactttctactcagcatctttgctggtggggttgttctagcagccatatttggagccgttattggggtttccaactttgatccggttaagagaacttaaatcatgcatgctccaatgcttttcattttctctctctctttttcactcttcttctagcttcttgtttcatgcaagttatatgcaactggttctgttatatgcatactatctatatcccagctgc

SEQ ID NO: 24410 - DNA, 383 bp, Glycine max
  Clone ID: LIB3106-005-Q1-K2-F11
caagcttcaatttgctttgtgctcactcatctatctattataaccaggcactcttctgcatattcttcttcttcttgttcttgttctatctgtgacgagcatcatggcctcgagagcagtgctattgttggctatgtgtgtgcttccggccatggttgtggccattcgcccagcaaagaaccctttttgcgtgaagggtcgcgtctactgtgacccttgccgtgctggttttgagacctcagcaaccacctacattgccggtgctgagattatgttgcaatgcaagagcagggttagcaacgaggttgtgtacaccaagaaggggtacactgactcaactggagcatacacaatgtacgtggaccaagatcacgcagatcaaa

SEQ ID NO: 24411 - DNA, 287 bp, Glycine max
  Clone ID: LIB3106-005-Q1-K2-F12
ctgaaacgttttttgctcttcttctcttgaccctttggtgcatagtagcaaaagggggtggttgcataaagcagaaaagttggtaaatggcatggtatatctttaacagttgagcctttttgggttgaatattctgaaaaagttaagttgaaggtgaaaagttgaaagtttagcacttgggagtttagttgttgttgttgttagaaaagggtaaaaagggttgaaagaattaagattattatatgcccactgtgtgggtctctttgaagagatctctacattgcaaa

SEQ ID NO: 24412 - DNA, 343 bp, Glycine max
  Clone ID: LIB3106-005-Q1-K2-F2
aattccgggtcgagcacgcgtgcgacctgactctctctattacagtcttggatgcgcacgctctgtcatgaaccgtataacgagaccaggcatacctgaccactttcacaaatacctaaaacccggtgcgctcggccgcatacgggactctagcatcagcgccagatctcaccgccttaactagcctcctccgccaccagatctctatccagagctctgcctattcgtagccgctgcctgactccaaccaggctgaggccaccggcaccgccgacgataccggctacccgttcttactcgctaggatctacggcccgcgctgaccgcagcgggagaagctcat

SEQ ID NO: 24413 - DNA, 420 bp, Glycine max
  Clone ID: LIB3106-005-Q1-K2-F3
ggtttacagagaagcgaagaggcgcagccgtagcagtaactcgtggaattgctagcagtggcgaggatcaaggtttacgagctgaggcagaagacgaaggctgatctgttgaatcagctgaaggacctcaaggccgagcttgccttgcttcgtgttgctaaggtcaccggcggtgcacctaacaagctctctaagatcaaggtggtgaggttgaacattgcccaggttttgacggtgatttctcagaagcagaaggccgcgttgagggatgcctacaagaacaagaagtacttgcctctcgatctccgccctaagaagaccagggccattcgcaggaggcttactaagcaccaggcatcattgaagacagagagggagaagaagaaagagttatatttcccactgaggaaatatgctatc

SEQ ID NO: 24414 - DNA, 422 bp, Glycine max
  Clone ID: LIB3106-005-Q1-K2-F4
gcggccaagatccaggacaaagagggcatccccccagatcagcagaggctgatttttgccggtaaacagcttgaggatggaagaacccttgctgattacaacattcagaaggaatccacccttcacttggtgcttcgtttgagaggtggtatgcagattttcgttaaaactttgaccggaaagaccataaccttggaggtggagagttcagataccatagacaatgtgaaagctaagattcaggacaaggaaggtatcccaccagaccaacagaggcttatctttgccgggaaacagcttgaagatggaagaacccttgctgactataacatccagaaggaatctaccctgcacttggtgttgcggcttcgtggtggcatgcaaatctttgttaagactttgactggaaaaaccataacttt

SEQ ID NO: 24415 - DNA, 387 bp, Glycine max
  Clone ID: LIB3106-005-Q1-K2-F5
cccacgcgtccggtaacattgggttgtgatttgtgagggaagaaggggtagaaagaggcaggagaaggaaataatcatcaaccatggcagggagattgacgaacgcagcatcgaggatcttaggcggaaacggcgtcgtttaccgatccgtagcttcctctcttcgcctccgctccggcatgggcctccccgtcggcaaacactatgttcccgacaaaccccttcccatgaatgaggaactcctgtgggacaacggcactgcatttcccgaaccgtgtatagatcgtattgctgacactgtcggaaagtatgaagcattggcctggctgtgtgggggattgagttttttcgcgtcgctgggattgttggctgtgtggaatgacaaag

SEQ ID NO: 24416 - DNA, 419 bp, Glycine max
  Clone ID: LIB3106-005-Q1-K2-F7
cccacgcgtccgcccacgcgtccgagaaaacctaatttctcaaatttgatttcgcacgaaattttcctcactaaaatgtctggtcgtggaaagggtggcaagggtttgggaaagggaggtgccaagaggcacaggaaggttctgcgcgataacattcaaggaatcacgaaacctgcgattcgtaggttagcgagaagaggtggcgtgaaaaggatcagtggtttgatctacgaggaaaccagaggagttctgaagatattcttggagaacgtgattcgtgatgctgtgacctacactgagcacgctaggaggaagacagtgactgctatggacgtggtttatgctcttaagaggcagggaaggaccctctacggttttggaggctgaacaattctttttttggctgtgctcctatgtgc

SEQ ID NO: 24417 - DNA, 403 bp, Glycine max
  Clone ID: LIB3106-005-Q1-K2-F8
caaaactcaagcattgcatccctcttgatttgtagtttgttttgtgcttgagataaaagttctgccaaatcaagaggggttttaagatcatagtgtgtgttttgcaacaatggctaagttctttgctgctatgatcttggcactctttgccatttccatacttcaaacagtggtaatggctgctaatgaacaaggaggccacttgtatgacaacaagagcaaatatggaagtggaagtgtcaagagttaccaatgcccatcacaatgctcgaggagatgtagccagacccaataccacaagccctgcatgtttttctgtcagaagtgctgcaggaaatgcctgtgtgtgcccccggggtattatggtaataaagctgtgtgcccttgctacaacaactggaag

SEQ ID NO: 24418 - DNA, 403 bp, Glycine max
  Clone ID: LIB3106-005-Q1-K2-F9
gtttgttgtgagctataagctagtttatcgtgaggagaatatgaaggtgtttgtttgctttgttgctgcagtagttttggtagcatggccatgccatggcgcaggctaccaaaggttccctctccgaatgaaaactggctatggtgagcgttcttcggaggtaaaatgcgcaagttttaggcttgctgtggaagcacacaacatccgagcctttaaaaccattcctgaagagtgcgttgaaccaacaaaggactacattaatggcgaacaatttagatcagactctaaaacagttaaccaacaagctttcttttatgctagtgaacgcgaagtccatcacaacgacatatttatattcggcatagataacaccgtactctctaatatcccatactattaaaaa

SEQ ID NO: 24419 - DNA, 416 bp, Glycine max
  Clone ID: LIB3106-005-Q1-K2-G1
agaagagagatggatccagacgcgttggcaaaggcattcgtggagcactactacagcgccttcgagaccaacaggaacggcttagcgaatctctaccaggagggttccatgctcactttcgaagggcagaagatccaaggcgcttccaacatcgttgccaagctcacctccctcccttttcagcagtgccaccactcaatctccaccgtcgactgccagccctccggcgtcaacgccggcatgctcgtcttcgtcagcggaaaccttcagctcgccggcgaacagcacactctcaagttcagccagatgttccatttgataccaacacctcagggaagctattatgtgttgaatgacatattccgtttaaactatgcatgaagatgtcatatgaccggaaaggccatagaagaagt

SEQ ID NO: 24420 - DNA, 383 bp, Glycine max
  Clone ID: LIB3106-005-Q1-K2-G10
ctcgttcttcttcttttgttgttctgtgtttgtgtttgttttttcggtcacctgaagatgtcttgctgcggtggtaactgtggttgcggaagctcctgcaagtgcggcaacggctgcggaggctgcaagatgtacccagacttgagctacactgagtcaaccaccaccgagaccttggtcatgggagtggcacctgttaaggctcaatttgagggtgctgaaatgggtgtgcccgctgagaacgatggctgcaaatgtggaccaaactgctcctgcaacccctgcacttgcaagtgaggtgttgggagagcaagcttcaagcagagatagcccttaattaggaataatgaataactattaatgtgtagctaaaaacttatgta

SEQ ID NO: 24421 - DNA, 391 bp, Glycine max
  Clone ID: LIB3106-005-Q1-K2-G11
cccacgcgtccgggcaaaaccgccttcgtcttttactcccaaaattgcgtttccaagagtgagggacagtggaattggaactgtaaagtgtcaagttaaaacccaagtgaaagcgggtatcctgggactgggtctgggtctgttccacttccttaacttcgtcgaacccggttcatgtctccaactgcaattccacgaaccccccaatgccctctctttgcccacatgggccattcacgtgtccagtgtcgctgaatggattatagctatggctttggtgtggcaatacggagaaaaatctggatacccagcttggaagggcctttcttggggaatggtacctctacttggtggagctttttgtgcgtgcacattgcatttcttttataac

SEQ ID NO: 24422 - DNA, 407 bp, Glycine max
  Clone ID: LIB3106-005-Q1-K2-E5
cattatcagtttcttttccatcacattacaggacagctccgtgcttacctcgcctcgggtggaaagaggaagtttcatatagaatgatagcatacttttttatatacgatagcctgtgctttccacactgatggcaagttgatttaaaataataactattgcatagtatgatagaaactggatcagaaaaggaagaaagacaaaatttcttattgattgagtgtatctctacaaacaaatcccttggatattcaagagatacaggcctctatcccttaaataactaactgacctatcataaaattagtaatgaagaacaactgaagcatcgtcaattggagcaaatgcagctcaacctcaaaatctgtatcttttgtggttgatttaatggaacattctttacagtg

SEQ ID NO: 24423 - DNA, 331 bp, Glycine max
  Clone ID: LIB3106-005-Q1-K2-D12
tctgaactagtagcaaggcttgctgatttcatccaatatgattggtgccgatctaggaggagtagcatgagcattgaggatgatggttcaaactccaatgaatcatcaagttacagattaactgtaattggaacaactggtttcaccatccaaccaggatacgagagtggcggggagagtgtgcagcaagcaagtgtatctgttggtttcccaactgtacaaagtgtgactgatgttattgagatggaaccggtcatgactgagaggagagtgaggtttgctattgaagatgagcctgagagtgatgcaaggtctgagacaggagtgcaaa

SEQ ID NO: 24424 - DNA, 422 bp, Glycine max
  Clone ID: LIB3106-005-Q1-K2-D2
aacagtgagaagcccagtgattttgtttaccttccgagagatgaagcatttgggatcgtttctaggttttcctcggccggttcttcctctgcgagggtaaggtaaggcagaacctccaagaacggggcgtgcatacttttcacccttatctggatcgcccaagtcattgtagacatcataatcatagatcctatcccattccttgcgctcaccagttccatcccctcttacattcttcaattcttcttctctgtacttgacaagtggagccggtgtctcgcttggaagatatgtattgttggcaaagaaaatgcgatcagtcttgtagtgttttgaattgtaaacccaggagttacatatgaagtgaatggttccatggtttggaatgtcttcgagaattaaagacttgaggtagaaccgga

SEQ ID NO: 24425 - DNA, 312 bp, Glycine max
  Clone ID: LIB3106-005-Q1-K2-D3
cccacgcgtccgtggaacttctcatgatgcataacaggacatattgtgctgagattggtcacaatgtatccacaaggaagaggaaggacatagttgagagagctgctcagcttgatgttgtcttgacgaacaagacggccagactacgtagccaggaggatgagtagatccaatacatgggagagttatttatgttttgtagtgagcttctgttgacacccttgatggtagattttgattttttgttatttccaaaactttgttgcatgccatacaattttatatgttgcttattgtctatttgctgttgct

SEQ ID NO: 24426 - DNA, 425 bp, Glycine max
  Clone ID: LIB3106-005-Q1-K2-D4
cacccatcatcaatctttatttaacacttgcctcctcttttttccaaccatctcttggtgcttcgttcttttcttcttcaattcatatcatatcaattagatttgttttcagagtttgctagtgagataccatggacaactacaacagcaatgacttttggaaattcagtgaccagttgaggcttgaatctggtttggccaatctgtctctgaatgattattccatttggagcaacagctacagctccaagaggcctgatcagaggaggaactttgatgtcaagggcagtgatttcaacaactcatcaaagccttttgatgatgatttcaatgatggctggaagatcaccaattccaatggaccccttttctctatgcctcacaacaacaacactcacactcttgaagttggaggcttcaacaag

SEQ ID NO: 24427 - DNA, 424 bp, Glycine max
  Clone ID: LIB3106-005-Q1-K2-D5
aaacacaaaaagttctgttctttttcccacccaattcagttttctcaaatggctcgtgggaagcaaacggctcgcaagtccaccggcggcaaggcgccacgtaagcagctggccaccaaggcggctcgtaagtctgctccggctaccggcggcgtgaagaagccgcacagattccgtccgggaaccgtagcgctccgcgagatccggaagtaccagaagagcacggaacttctgatccggaagctcccgttccagcgattggtccgcgagatcgcgcaggacttcaagaccgaccttcgatttcagagctccgccgtctccgccctccaggaagccgccgaggcctacttggttggtctcttcgaagacaccaatctctgcgctattcacgccaagcgtgtcactatcatgcccaaggatattc

SEQ ID NO: 24428 - DNA, 423 bp, Glycine max
  Clone ID: LIB3106-005-Q1-K2-D6
aacagagatcggagcgtggaacctctctctctctctctctctctgcggagagaccggaggatctcagttctctgatcagatccatccgacgtcgtttcagtgataatggctccgttcagcggcgatgagacggcaccgtttttcggcttccttggagccgcagctgccctcgtcttctcctgtatgggagctgcctatggcacagcgaagagtggcgttggcgtggcttcgatgggtgtgatgagaccagagctggtgatgaagtctattgtccctgttgttatggctggagttttgggtatttatggccttattattgctgttattatcagtactggcattaatcccaaggccaaatcttattacctctttgatggttatgcacatctctcctctggtcttgcctgtgggctggctggcctc

SEQ ID NO: 24429 - DNA, 404 bp, Glycine max
  Clone ID: LIB3106-005-Q1-K2-D7
tgttgttacaactggccgaaagattatcggagccacaaacccagctcaatctgagcctggaactattcgtggtgactttgctattgacattggaaggaatgttatccatggaagtgattcagttgagagtgctaacaaggaaattgcattgtggttccctgagggccctgctaactggcaaagctcccagcactcttggatctatgagtaatacaaatgcctcaagttgatcttgaaattggccttaggttgatccagattatctacatgttttctgtttttgtccattgttggacttttgctaagagtttggtaccgtggtttgcatgtagagtctatttatgtcatttctgttgaaacatgctcacagtttgataaattaaatcccaaactagttttgcttt

SEQ ID NO: 24430 - DNA, 418 bp, Glycine max
  Clone ID: LIB3106-005-Q1-K2-D8
cccacgcgtccgcccacgcgtccgcccacgcgtccgcaccgagtagcagcgaatgtcggagcgaggtcgcggaggatcggcagggaacaagttccgcatgtcactgggtctgccggtggcggcgacggtgaactgcgccgacaacaccggcgcgaagaatctctacatcatatcagtgaaggggatcaagggaaggctgaaccggttgccgtcagcttgcgtgggtgacatggttatggccaccgtcaagaagggaaagcctgatctccgtaaaaaggtgctccccgctgtcatcgtccgtcagcgcaagccgtggcgccgaaaggacggtgtttacatgtacttcgaagataatgctggggtcatagtgaatcccaagggtgaaatgaaaggttctgctatcactggtcctattggg

SEQ ID NO: 24431 - DNA, 126 bp, Glycine max
  Clone ID: LIB3106-005-Q1-K2-D9
ggtatgctgatatgcactattcaaataggagcattagctatgtttgttaatgtcacgttatgttatgtgggtaagtcacctaagacactccacgtacctacgttgttgtctcttaccggctttaat

SEQ ID NO: 24432 - DNA, 431 bp, Glycine max
  Clone ID: LIB3106-005-Q1-K2-E1
gcgcagttctgctacaacctccacacaaagatgctgcaattgatatcttaataaagtctggagaaaaggatcttgtgaaccagttgaccggcatacataagaaggggctttgatgataaaatgctttatgaaagaggtcacatctattgtttatccactgcgtttgttcacaagtttgcattgtataacagcaacagttgggattggtttctgttacgcaggctgatacttgcttcatttcttccccttgtaggagacacattattcttgagaacagtatgctaacctctatttgttttgctaaacccattttccttatagattcagcttaatattgataaattgttaaacccattttcctaatacaaattaatgaaacttctgttctttgatataatgagtcgaataaaatggttaaaatatttttccct

SEQ ID NO: 24433 - DNA, 380 bp, Glycine max
  Clone ID: LIB3106-005-Q1-K2-E10
cccacgcgtccgcccacgcgtccgcccacgcgtccgagcggatagaggacttgactggttaatcggattgcttcatgccgtgcctaaattgcagcatacttgacgcaaattttgctcagctaacgcattgtatatgttttccttatttgcgttgttgttaatgttaactgtcttctggctggtgcaaagttttgtttagttttggtagtggcttaatggtgtgtctgattgagaagtggtactatctaatttctcactttcttgtttttcactttttctcctccttttttccgtctcatgttatttgccttgagtgtgagtaaaagcctgacggcattcattcaacctggattggtaatgaagttgatcttgatgtatgc

SEQ ID NO: 24434 - DNA, 398 bp, Glycine max
  unsure at all n locations
  Clone ID: LIB3106-005-Q1-K2-E11
gccacctccgaatatagcccagccctatacaaccaaaccctaacacacacccatggattcattgcatgctagcctcaaggttgcatttttggctgcagtgctctgcatggttgtggtgagtgcacccatggcacatgcagctatcacgtgcgggcaggtgacgagtagcctggccaattgcatcggttacctccagaagggaggaacgccgtcgtcgggatgctgcaacggagtgaagagcctcaatgccgccgccaagaccaccgccgaccgccagacggcgtgcaactgcctcaagtcggccgccagccaaatctccggcttcaacgccaacaacgccgnctcgctccccggcaaatgcggagtctccattccctacaagatcagcaccttcacca

SEQ ID NO: 24435 - DNA, 395 bp, Glycine max
  Clone ID: LIB3106-005-Q1-K2-E12
tttcgtttttccccttctcctctcaaaatcctttctttttcccgcaggccatcaaaggagtctcagaaaaacgacgatctcgaacccgttcaccgttggatcgtcgtgaaatttgagtatcatgttcgcaacacaattccgagaattctcaccgttgggaattttgatatcacgtctgaactgagagaaacacccttcgcattgtagcctttttctttcccgcagaaacccagagctgtcttggtaaaactacgatcccggtttagttaaccgttggattattgtgaaatttggatatgttgttcgaaattcaattccgcacacttacaccgttgggatttgcgagataatattcgtggaaggagaaaaaggaatcgcatgaagacagcacaagt

SEQ ID NO: 24436 - DNA, 417 bp, Glycine max
  Clone ID: LIB3106-005-Q1-K2-E2
gttatttgattggtgtgcatccatgttaagctagtggcgatcggatccagctacagggtacaacgtacagatcaaggaaggaagatgttgggtgttataaggcacaagagtattcgccccgccttctccgcaatcagacacttctcttctgcagctaaagagattactgtcagggatgctctcaactccgcactcgatgaggaaatgtcagctgatcctaaagtcttcttgatgggtgaagaggttggggaatatcagggtgcatacaagatatccaaggggctgctcgacaagtatggccccgagagggttctcgatactccaatcactgaggctgggtttgctgggattggagttggcgctgcttactatggtctaaggcctgttgtggagtttatgacttttaacttctccatg

SEQ ID NO: 24437 - DNA, 356 bp, Glycine max
  unsure at all n locations
  Clone ID: LIB3106-005-Q1-K2-E3
cccacgcgtccggcggatttggtggaggtggaggtggtggcggaggtggtggaggaaggaggttcgggtagctgatttggcnaanaaacannatgatgttttggtgcaggaggttgatttggcgttataagtagtgatacacttattttttcaaaataataacattactatcacagatgctcttatctacttactttatgacgaaatttcaactgatcctaaaatcttcttattgcattaagaggtttatgaatatcaacttgcatacaacattttcacatttttgctcatacaagtatggccatgtgagggttctcgattctccaataactgaagatgaattttctggaattgct

SEQ ID NO: 24438 - DNA, 368 bp, Glycine max
  Clone ID: LIB3106-005-Q1-K2-D11
agtaacccttcttttctctctctctctctcgtgttctgagctgctagaagcaatggggaggaaaagaagccatgcttctttcaccatgtttgcaatgcttgttggattgctctctcagagccttgtcattcctgtaatatccaccactgttgcagatcagaagaactactacaccccagatccacatgctggaagtccccccacaggctcacacaatagtagtcctccatctcatggccatgggagctctccaccctcacatcacaatagtccaagtactccatcaacaccctcaggtggaaactgtggatcatcacccccacaacatcatgatccaacaccctcaacttcatcaacaccatcaaacc

SEQ ID NO: 24439 - DNA, 407 bp, Glycine max
  unsure at all n locations
  Clone ID: LIB3106-005-Q1-K2-B8
cggacgcgtgggcggacgcgtgggaaaagcccagggaagaagaaaactaggtcgcatgttaacacttgtaggttgggtttcatatntngggtttccaatcttcaagtgttaatatgcgacctatatgttgttttccgggggctttttaaacgctttttttttttcatatgtggactctttcttatttccgggagttttgtgttggattttgttggcgttcctgttttttttttaaatggtattttgtttgatctgtttctctacttgttcatttcctttgtttttatagttgggggtggggggtttattttatgctttctttatttttatttattaatttttttgtgattattttttttttttattttttttttgttgttcttatgattttttttgttatttttttt

SEQ ID NO: 24440 - DNA, 404 bp, Glycine max
  Clone ID: LIB3106-005-Q1-K2-B9
cccacgcgtccgattattgtcctcatagtgagtagaaggcagagagactagagcggggatagcaatctcatctcattcatttcaatggcaactcaaggtcaagtcattacctgcaaagctgcggtggcctgggaacccaacaagcccttaactgtccaagacgttcaggtggctccgcctcaggccggcgaggtccgtgtccaaatcctcttcaccgctctctgccacaccgatgcttacacttggggcggcaaggatcccgaaggtctcttcccctgtattcttggccatgaagctgcagggattgtggagagtgttggagaaggtgttactaatgttcagcctggggatcatgtcattccctgttatcaagctgaatgtggggagtgcaagacttgcaaatc

SEQ ID NO: 24441 - DNA, 428 bp, Glycine max
  Clone ID: LIB3106-005-Q1-K2-C1
gcggcgcacacggactccactctcctcacaatcctgcaccaaaacaatgtcaatgggcttgaggttctgaaggaaggggaagggtgggtggcggtgcctccgcttcccggagggctcgtgatcaacgtcggcgatctgctccacattttgtcaaacgggttgtacccgagtgtgctgcatcgagttcgggtgaaccgaacccggcagaggttctcggttgcttatctatatgggcccccaacaaacgtccaaatcagtccacaagtaaaattggtaggcccaacaaggcccgttctttatcgatcagtgacttggaacgagtaccttggcaccaaagcaaagctttttaataaggctctttcagctgttaggctttcttcatctattaacggtttgtttgatgtaaacgaggataagagtaacgactt

SEQ ID NO: 24442 - DNA, 376 bp, Glycine max
  Clone ID: LIB3106-005-Q1-K2-C10
cggacgcgtgggttcagccacagtttcggaggagaagaaaatagtcggtcgagatgggccgtacgaagcaaactgctcgtaagtccacaggaggaaaggctcctaggaagcagcttgcaaccaaggctgcacgtaagtctgcaccaactactggtggtgtgaagaagccacatcgttaccgtcctggtaccgttgctcttcgtgagattaggaaataccagaagagtaccgagcttttgatcaggaagctccccttccagaggctggttcgtgaaattgctcaagacttcaagactgatctgcgtttccagagccacgccgtgcttgcattgcaagaagctgctgaagcataccttgttgggctctttgaggacac

SEQ ID NO: 24443 - DNA, 381 bp, Glycine max
  Clone ID: LIB3106-005-Q1-K2-C11
gttcagatgtgtatgtttgggatactgatagtgggactttggtgaggattgtccatgatgctcatgttggtaatacttatgctttggcacggagccatacaggggacttcctttttactggaggtgaagacggtgcaattcacatgtatgagattgttaatgatggctatgagtctaaagcttggcatgttgctgtttgggttcctcactcggctgctgtgtattctcttgcctttgagtttccatggcttgtttccgcatcaagtgatggcaagctggctctaattgatgtgagaaagctgttgaagattagcaagcgagctctggggaagagagtctcaaaggtaaagcatttgggtggagacatagtagagccttcac

SEQ ID NO: 24444 - DNA, 334 bp, Glycine max
  Clone ID: LIB3106-005-Q1-K2-C12
cccacgcgtccggaagggaaaaagtttgccctacatcttgttccttgtggtattctgaatgaggatactctctgtgtaattgggaatggggttgtagtgcacctgccggggttgtttaaagagattgacggtcttgaatcaaatggggtctcttgcaagggaaggatattgatatctgatcgcgctcacctgttgtttgattttcatcaagtagtggatgggctaagagaagccgagcttgctaaatctttcattggcaccaccaagagaggcattggaccctgctactccagcaaggttaaccgtaatggcatccgagtgggtgatttgaggc

SEQ ID NO: 24445 - DNA, 424 bp, Glycine max
  Clone ID: LIB3106-005-Q1-K2-C2
aataatcccaatcatcaagataggaaaagaatggaggccatttgttccaagcaccttatgacatcgcttgtcataattcttgcttctagtttgaccttatcacagggtgccaagaaaggcagtgacagtgaaaggccataccaagaagcgagcacggtgttcattagaacatcttgcagctccacgacctatccaagactctgctacagctccttagtgaagcatgcagacttgatccaaacaaaccgtgtggttctgacaggcacagccctgaatgtgacccttgcgtctgccaagtcgacctcggcaatgatgtcgacgctggcaaagaggcaaggcctgaagccaagagaggttgcagcgatgaaggactgtgtggaggagttggcggactctgttgatgagctcagaaggtctatttctg

SEQ ID NO: 24446 - DNA, 431 bp, Glycine max
  Clone ID: LIB3106-005-Q1-K2-C3
cccacgcgtccgcacactcacacttttatcatctctgtctctgcgctcttcttcttcgtcttcttgttcttcttttacactctcttcttctttttcttctccctcctcctttgcctttttttgtagcttccccttgcgctctgccacttcatcattgaaggtacaaacaattcagaagaagaagcgcgtggtgaaggcagtggaagaagatacccagcaagaactcaacgctgctgatgactctgaacaaccatcaacctccgaagcaccacccgttgtggttcccgtttccccatcagatactctcaccatgttctttcaggcagagggaacagtgagtgaaacagctattccagctttgaccaaagctttagaggagacagaaggtgttacagatttgaaggttcagcttgctgaaggacttgcaattt

SEQ ID NO: 24447 - DNA, 425 bp, Glycine max
  Clone ID: LIB3106-005-Q1-K2-C4
cccacgcgtacggctccctttctctccgatcaatccaaacccttttcttgttcttcagagattccagttctccgccgcttcgccctcgaggtcctcggcaaaaacggctgcctcgtggagggcgtcctccacctccccggcaacccccccgtcaagctcgattcccaagatctcctccagattggggacaaggagttctactttctcctgcccgttcgcagcatccttgttgggcccgtcggcccgaggcattaccctaaccacgccgcacccgggcccgtcgtgccgcactataataattaccatttgggccccggcccggtgaagaaggcgccgcgacgggagtactacgaggaagagtttgatgatgaggatgatgttggtgggaggaagatgcggagggatgggtatgatggatatggcta

SEQ ID NO: 24448 - DNA, 422 bp, Glycine max
  Clone ID: LIB3106-005-Q1-K2-C5
caagacagcaccttgttggaaactgcaaaggttcaagtagatacctatgggccaacgttatttgctaaacttgctgagaagaaaaatcttggcgatttgatagccaatgcagcaggcggtggtgcaccagttgctgttgcagctgcccctgttgctgcctcaggtggtggtggtgctgctgctgccgccccagctgctgaggagaaaaagaaggaggaacctgaagaagagagtgatgatgatatgggatttggcttgttcgattagggacattctcaatatgatttggttaaattttgtggttctttacctttaagtttactttatggatattgtaggttttatttttgtgctggttatttatatctgtataagacttgattttgtagttttatgaacttcggaatgtgggtttatgtcca

SEQ ID NO: 24449 - DNA, 425 bp, Glycine max
  Clone ID: LIB3106-005-Q1-K2-C7
cccacgcgtccggcagatcaatctctctctctctctcaaccataatagtcatgggttggaaggaggattttgagcagtatgctgagaaagcaaagactttgccaccgactcaatcaaacgaagacttgcttatcctttatggattgtacaaacaggccaccgttggacctgtcaacaccagccgtcctggaatgttcaacatgagggacagagctaaatgggatgcatggaaggctgttgaagggaaatccaaggacgaagcaatgggtgattacatcattaaggtgaaacagctgctggaagcagctggcttgcctgcttgataacattgtcatgccttgctttctgattctgtgctagaagttcacaacagtttggaaataaacaattgcagtgtttgaagcttttattatcataatcatatt

SEQ ID NO: 24450 - DNA, 420 bp, Glycine max
  Clone ID: LIB3106-005-Q1-K2-C8
attaaagaccacttgtgacgggaaaattgatcaaagtacaccctattggggtgaaggggaaagtcacgttcaaagcggatgctatgagtgtggctattatgtcatgcattggatgtggaacataatcagaggggagttgaagactgattggaccatgtggtttggtgatggcacgccactagacatcgagaccatgacaacattacagaaaaaatgggcagcatgctttttaagagttagaagcatcgaatgtagaaagctttagatgacatgccaacaaccactttggtgtttttcatgcatttgtttaagttttagaaacaatttttactgctgtaatgactattatttgcagggaaaatagatatttgttcatttcattttggtatgcactcaaacattgagacaatgcattgtatt

SEQ ID NO: 24451 - DNA, 417 bp, Glycine max
  Clone ID: LIB3106-005-Q1-K2-C9
caacaaggaccttggttgggatgaacactggatcttctgggtgggagcattcatcggggcagctcttgcagcactctaccaccaggtcgtaatcagggccattcccttcaagtccaagtgattcaatcaaacggttcatgcttaatcaagttgggaacaacaacaacaacaaaaatcaagccaatgtttgtgggttttggtttcatttcattaagatgatctgtttatctcttttcttctttttaaaatttaaagtctttgtattttgtatgtaaagatgtaaaattatgattattaggtggtgcatgtgtcgcgtcatgggccaatgttatcctctgcttttaagttggaagaggcccaactcatgtgtgatgtacggctgtgaatgcgtaatttaatttgcaaaatccaaaatta

SEQ ID NO: 24452 - DNA, 441 bp, Glycine max
  Clone ID: LIB3106-005-Q1-K2-D1
gattcccggtcgacccagcgtgcggagccctagatcactagactacacacttcgcatggcggttgttgctcaaacccctgacatcggcggcgagcggcagtccggccaagacgttcgcacccaaaacgttgtggcatgccaagccgttgccaacatcgtcaaaagctctttaggccccgttggcctcgacaagatgctcgtcgacgacattggcgacgtcaccatcaccaacgacggcgccacgattctcaagatgctggaagtggagcatcctgctgccaaggttttggttgaactcgccgagcttcaggatcgagaagtcggagacggcactacttctgtcgtcattgtagctgctgagcttctcaaaagggcaaatgaccttgtcaggaacaagattcatcctacctcgattatcagtggatatagacttgctatgcg

SEQ ID NO: 24453 - DNA, 386 bp, Glycine max
  Clone ID: LIB3106-005-Q1-K2-D10
ggtcctttcatcaacggtagtgagatatctgcagctgacctatcacggggaccaaaggtataccatttggagattgctttggggcattataagaaatggacagtgcctgattcacttacctctttgaagtcttatatgaaggccattttctcgagggaatcgttcgttaaaacaagtgcacaaccacaggatgtcattgaaggttggcgtcctaaagtggaaggctaatattcactgatcacgcactatcatttctatgagactctgaggactataccccaacaaatagcaatccatcaagagttctagacctatatcgttttgtattatataaccttatttatttattcactatgcactatggaataattatttattaagaatag

SEQ ID NO: 24454 - DNA, 425 bp, Glycine max
  Clone ID: LIB3106-005-Q1-K2-B7
tgaggtcctatctcgacgtactatcattacagagccttctttgtcatctgtactctcgaatataacaaaagaaagtcgaagaggttttgcatctcaactactttcaattattgaagtccgtgatatggaggaaaacaaagaacttgagaggagtttacatgctgaagatgacgagtcactctcattacctggaagaagaagtgggaatgaggaatggcgcaaatctagattagaaatgggttctgataagctaagttcctctgcttgcccagttcgtttgtgcgtagatgagcacgtgacaaggatttataatgcattccgtcctatcctttatcaatttgttggggaagaattaacaaagtcggaagctgttgaagtactcaggattactaaaggaattcttttggatcttagcaagtccccct

SEQ ID NO: 24455 - DNA, 445 bp, Glycine max
  Clone ID: LIB3106-005-Q1-K2-A3
cggacgacccacgcgacccacgcaacacccccccaaaacaagccccaattatggctctgaatctttgtatctcaccgaactgtggatgggtttcatctcctgcttccttagatagtgcatcttctttgagatcttcacttggttcttgttttggtaacataaacattgctagtgtgagtttaagcactagtagaagtttgagtttgaggaggagtgggagtgttagtgtaagatctagtttggaaactgcggggcccacagttacagtgggacaggtcactgaggttaacaaggataccttctggccgatcgttaaggctgccggggataaaaccgttgtccttgacatgtacacacaatggtgtggcccttgcaaagtgatggctccaaagtttcaagaattatctgaaaagtatctggatgttgtctttctaaagcttgattg

SEQ ID NO: 24456 - DNA, 440 bp, Glycine max
  Clone ID: LIB3106-005-Q1-K2-A4
cggggggacccacgcgtgcggaaagagcacgaggaaagggggacttcatttatagccgtttctttgcaatacgcctcgttcttcgtcttgagttagcaaatgcaatgcaaccaacaattttggaaaagctctgtgcggttttgaatgtcaacaaaagaagtgtggatcgggacttggatgtgtatcgtaacttgctttccaaattggttcaagctaaagagcttctaaaggaatatgttgacagggagaagaagaaaagagaagaaagggctgaaccacaaaagtctaatgaggccattacacaacaacaacagttttctagcctttagttatggggttcctttggaatgatcaccttgtgaagatttggtcttgacttgcttttttttttctgttggtctttggcatggtaatcagagtggggcacttctatcatcatg

SEQ ID NO: 24457 - DNA, 441 bp, Glycine max
  Clone ID: LIB3106-005-Q1-K2-A5
cggggggagccacgcgtccgcccacgcgtccgaaggaacacaaatttatattagatctgaaagaaaagagaagagtggtaggtttgtgggagaagaagaagatgaagaagatgaggcagttgtcctcttcacttgaaatcaaattcaagaccgctttgccttccttttcagtacattccatttcgaatggaaacagtgctttgctattttcatttttaaaatagacattgggcttcttcttgttcctcttttttccttccaattccgatttggtcctaatgcctattttaaaatgaaaacaatgatacactgcttttgtttgaaactattgttaaggaagataacgccgacgagttcttcaatttgattttagctgacgaggacttttttattcatccacagtctctgaatctgtacgactaaacaagcaaagaaaaacac

SEQ ID NO: 24458 - DNA, 422 bp, Glycine max
  Clone ID: LIB3106-005-Q1-K2-A7
gtagcatggcaatgccatgcgtacgatatgttccctctccgaatgaacactggctatggtgcccgtactccggaggtgaaatgcgcaagttggaggcttgctgtggaagcacacaacatctttggctttgagaccattcctgaagagtgcgttgaagcaacaaaggaatacatccatggcgaacaatatagatcagactccaaaacagttaaccaacaagcttacttttatgccagagacctcgaagtccatcccaaggacacatttgtgttcagtatagatggcaccgtactctctaatattccatactacaaaaaacatggatatggggtggagaaatttaactcgaccttgtatgatgaatgggttaacaagggcaatgcaccggcactgcccgagactcttaagaattacaacaagct

SEQ ID NO: 24459 - DNA, 412 bp, Glycine max
  Clone ID: LIB3106-005-Q1-K2-A8
cattgcactgtttcccttttctcttctcacatcgtcattcacacaccctcttctcttggatctcatcgccctcacaaacccttatatttacaccggcccactttcctatttgcaccatttcgttcagatcatagcgccgttcgagatcagaaaccggaaaaaataggtttttgattcgtggggttggttccaaatggcgtcattcacgatcccttgccccaagtgcgttgttgttccttttgctcatttgggactgaactctcagacccagcaacggaacgcgctggggttgaagaaatcgctctcatttggatctttgagtagtgattcggcgccaaatgggattcagtgccttaacaagaagcaatcttctgtctggaagcttcaagcacaaccaaaagaggctgttact

SEQ ID NO: 24460 - DNA, 399 bp, Glycine max
  Clone ID: LIB3106-005-Q1-K2-A9
cccacgcgtccgtccatatcctcttctcatgcaattcctccaatacgcacttatcgccttcaaccctctccttttcctttccacctcccattttcgaatttaaagcgttcaggtttggttaagaatcggcttattgctcgttgcacttctatgtccgatgaatttggttctgttaatgggttgcaattctcgcccaataagctttttgtggaggaggctattggggctgaatatggggaaggctttgagacttttagggcagatggaccactaaaagttgacgtggactatttgaatgagaaattgcaagatggttttcttcagcgcatacgctatgctatgaaaccagatgaagcttatggtctgatcttctcttgggacaatgtggtggctggtaca

SEQ ID NO: 24461 - DNA, 427 bp, Glycine max
  Clone ID: LIB3106-005-Q1-K2-B1
acagtttgctattggacggtatggaaatggcttcaagaccagtagtatgaggcttggtgcagatgtcatagtcttcagttgccatctaaataataggattttgactcaaagcattggacttctgtcatatacatatttgataaaaacacagcttgacagaatagtagtacccatggtgaattatgagtttgatacatcaactggatcattgaaaatattaaatggcaatgagcattttgtgtctaatttatccttgctgttgcgttggtcaccatattcatcagaagcagatcttctgaaacaatttgatgacattggatctcatggtactaaagttattatctataatttgtggtgcaatgatgatgcaaatttggagctagactttgatacagatcctacggatattcgtattgctggggatgtc

SEQ ID NO: 24462 - DNA, 333 bp, Glycine max
  Clone ID: LIB3106-005-Q1-K2-B10
tcgcccacgcgtccgcccacgcgtccggttctaatgttcttctcttgcaacctctgattcggtaaccttcagttgtgctatttaacagagtgtgcttaagaaatagtaattttgtatatttactgtaaataagatcagtatgagtgaggaagaaccagcgaatgaagtttctaagattgattcaaatggaaagagcttgcaaaagataattttggatgaaattactgagaaagaggatttggaaactgatggaggaaaagtcttggaaaacaatggaatcaaagagttgaaagaaaatattgtaaaagaaattgaatataagaaaactgatag

SEQ ID NO: 24463 - DNA, 388 bp, Glycine max
  Clone ID: LIB3106-005-Q1-K2-B11
aaacactatagcaatagaaacatttgcttttgaaaaacccctcactgttcatcactgcactagctagccacatacaatgtcgaccaaatttaaggtgtttcgtgaattcacaagcgatgactcattcctaaaccaagttatccctgaaaacatcaccgaattccaagtgactctgtccctcgctagagactacgatggcaacaactcaaccaacggaaagttcattccttactgggacactgaaaaggtcactcccgaagtgataaaaaaattcaagaaaaaatacgaacccaccgcactgagggttaaggttcttgtcagcattggaaacaaaaacaaacaatttcctttcaccattggctcggactcgaacagcgaagcatgggtc

SEQ ID NO: 24464 - DNA, 411 bp, Glycine max
  Clone ID: LIB3106-005-Q1-K2-B12
gcagaactttgtttcccaatttccattgcctccgcttccacctcgcgaccatgatcagtcccggagaagaaccgcaaggagatctgcaaatacctcttccaagagggagtttgcttcgcgaagaaggacttcaatttggccaagcaccctgagatcgacgtgccgaatctgcaggtgattaagctgatgcagagtttcaagtctcgcgagtacgtgagagaaacttttgcttggatgcactattactggttcctcaccaacgatggcatcgagtttctcagaacttaccttaaccttccttccgaaattgtccctgctactttgaagaagcaagccaagccacctggcaggccctttggaagcccatccggtgatcgccctaaaggtccaccacgctttgaaggggaacgt

SEQ ID NO: 24465 - DNA, 421 bp, Glycine max
  Clone ID: LIB3106-005-Q1-K2-B2
gcgcccacacgtccgagcagatctttcaagtaatggcacaaattaacaacatggcacaagggatacaaggccttaatcccaattccaatttccataaaccccaagttcctaaatcttcaagttttcttgtttttggatctaaaaaactgaaaaattcagcaaattctatgttggttttgaaaaaagattcaatttttatgcaaaagttttgttcctttaggatttcagcatcagtggctacagcctgcatgcttcacggtgcaagcagccggcccgcaaccgcccgcaaatcctctggcctttccggaaccgtccgcattcccggcgacaagtcgatctcccaccggtccttcatgttcggcggtctcgcgagcggtgaaacgcgcatcaccggccttctggaaggcgaggacgtcatcaa

SEQ ID NO: 24466 - DNA, 410 bp, Glycine max
  unsure at all n locations
  Clone ID: LIB3106-005-Q1-K2-B3
tatgcgaagtgagggtgaaattggattacatgcatttgtctcttacggagaggctccaaccagctgaatcttcgaaacattccaatataataaacttgaactccagaagaaaaatggggtaggcaacagggcacctactaagtgtttataacaccacagatccatgcctgctgcagttctgtctgctcttcttttgtcggacacaggcttgattggatccaaccagacattacataacatgacgtcggtagctattaacggaattagctcgttagttacacctttagttctttgctagtgtcgcctctgcataatgatgatatctatnccttttattactgatatttagtctttattttatattctcctaaaatattagatgttacacacgtgtatgattcatctaatgt

SEQ ID NO: 24467 - DNA, 148 bp, Glycine max
  Clone ID: LIB3106-005-Q1-K2-B4
cccacgcgtccgtttttatttatttcgtaagcctttaatttttgttgctgctgctacgtgctgctgtaaattagactgagtatgtttttcaagtaaaattagggtttttggattatatgaaatgatatactgtccgagtctttgatat

SEQ ID NO: 24468 - DNA, 420 bp, Glycine max
  Clone ID: LIB3106-005-Q1-K2-B5
ctactgtactatcaagaggattagcatctaaatgtgcaaatgtcgtagcaggcgcaggatcgggttcactcaaggaagaggtgaactccagagatggtaggattgaacacctgaacagccatttgaacgagcttcacgtggaacatgtacaactgattgctggaatggaggaggcacacaaacatgtggaagaactaaaatcaaaagccaagcaacttgaggaagaggtcgagaggcaaagaaccgtgatcttagaaggagcagaagagaaacgcgaggccataaggcagctatgtttctcactcgagcactatagagatggctataatatgcttcggcagcatgttatggggcacagacgagttccagttttggctgcctagttaataaatttgaaacgtgatcttgtatattggtttg

SEQ ID NO: 24469 - DNA, 420 bp, Glycine max
  Clone ID: LIB3106-005-Q1-K2-B6
aacagatttttggttatggtcattcgcgatttattaaacctatgtgaaatcacaaagggaaaagataacaaagctgttattgcaagtaatatcatgtatgttgttgggcagtatccacggtttttaagagctcattggaagttccttaaaactgttgtgaataaattgtttgagtttatgcatgagacacatcctggagttcaggatatggcctgtgacacatttctgaaaatagtccagaagtgcaagcgtaaatttgtaatcacccaggtgggcgaaaacgagccatttgtgtctgagcttctgacaggtcttcccatcactattgcagatcttgaaccccatcagatacattccttctatgaatctgttggtcacatgattcaggcagagtctgatgcacagaagagagatgaatat

SEQ ID NO: 24470 - DNA, 419 bp, Glycine max
  Clone ID: LIB3106-005-Q1-K2-A2
attactatgaccttcataagggaggatgatgatgatcaagttgatgatgatgatgatgatgatcatgtggatggtggtggatcacaaaacagtgccagcaacatcactgaaattgtgaccaccccagaaggggaaaacttaggagaatggctgagtctaggcctcaaaggagacatcaacatgccagcagaagaacaaaactcatcatcaaggcctctccacagcaacaacaacaaggtattctcatgcaacttctgcatgagaaagttttacagttcacaagccttagggggtcaccagaatgcacacaagagggagagagaagctgctagaagctaccaccaatctcatcatcacagaattgggttttcttacactacttctctggcaactaggtcactgggaattaagcctcactc

SEQ ID NO: 24471 - DNA, 401 bp, Glycine max
  Clone ID: LIB3106-005-Q1-K1-G9
attcccgctggagccacgcgtgcgaatccctctttcttcctcttcctcagtagtgcgattttcgattctcttctctgcaacgatgcctaacgctaaggtcttcttcgacatgaccatcggcggtcaacctgccggccgcatcgtgatggagctctatgccgacgtgactcccagcaccgccgagaacttccgcgcgctctgcaccggcgagaagggcgccgggcggagcggcaagcccctccactacaaaggctcgtccttccaccgcgtgatcccgaacttcatgtgccaaggcggcgacttcaccgccggaaacggcaccggaggcgagtcgatctacggcgccaagttcgccgacgagaacttcgtgaaaaagcacactggtcccggcattctcttca

SEQ ID NO: 24472 - DNA, 348 bp, Glycine max
  Clone ID: LIB3106-005-Q1-K1-H10
aatttaaaaacttaagttcatgccttgtgtttcgctttcttcctcaaaaccggagatgtttaagacatgcggcaactgcgactgcgctgacaagactagctgcaccaagggaaacagctatggtgttattgtagagactgagaagagttacatcgagactgttgtcatggatgttccagcagctgagcatgatgggaagtgcaagtgtggcactaactgcacttgcacggactgcacctgtggccattaaggaatatgtatgaaaatgtaattgccatgtgtttggcaatacacatatccaaatgatgtaatcttcgcatgaataaatgtgtgtgctgttatcctact

SEQ ID NO: 24473 - DNA, 358 bp, Glycine max
  Clone ID: LIB3106-005-Q1-K1-H11
aagcaatctatggtgtcacctattatggcaaaggacgaatgccaggctttggtaaagagtgcatgccacggggtcagtgcacatttggagctcgtttggaagatgaagatatccagatattggccgagtttgtcaagttacaggctgatcaagggtggccaagtatagagactaaagaagaatgatttaatacatatttggttcaatttaatgaatttatttaagaaaaaaaacaattgcttatttgtttcaattttttagggaacttttggaaaataaatgattatttatgtagaatttagctgaaccaaacatgctattaactttcgtttcattaatatataaatgtttgatttgc

SEQ ID NO: 24474 - DNA, 326 bp, Glycine max
  Clone ID: LIB3106-005-Q1-K1-H12
aaccaaggaagatattcttagccttccctgcttccagaatcaagaaatgattgcaatcaaggctccaaaagctagttgcatcgaggtccctgatcctgatgaggaattaggttttcggcaaaggcagtacaaaatgattgttcgaagtgccattggaccaataaatttgtatctcttgagcaaggactacagcaagtttgaggatgatagtgccaaacggatgaaattaatggatccatcatggaatagtgatcccatcagaaagaggggtgtgggattattagaaagccaacatgatgaaaaaaatccttttgagcattttaatt

SEQ ID NO: 24475 - DNA, 436 bp, Glycine max
  Clone ID: LIB3106-005-Q1-K1-H2
cccacgcgtccgcccacgcgtccgaaatctaagccttcaccgcgtaggtcgagggttcaaaaggtagcactaggaccacattttaatactggtgtagcacgtgctgctgagacttcgaggaatgttcagttcccattggtgttggattcagttgtgagcatagtggtgaagaggccaaaaaagtcgaggagcaagaaggagaaggaagaggaagaggaggttcttgtgattgaaggggttgagtatgacagcaacataccagtgaaatttgatgtgcttattaatgatgaagatgataagcagattcagccagaagattcggagtatgcaggaagctttgtgactgtgcctcattcgcataagcacaaaaataagaagattatcacttgtttgaggctgggactgacagatttgttggaagaattggaagcagaag

SEQ ID NO: 24476 - DNA, 433 bp, Glycine max
  Clone ID: LIB3106-005-Q1-K1-H3
aatttaagaaagaaataattcatacagagtacataattatactttggtttgcgtttgcggtgaagtcaatggatcctcagttgtggcacaaagttgctgcgatttcaggagtggcagcacttggattgggaacctatggtgcccacgtcttcaagccccaaaaccctgcttacaaagatgtttggcacacagcttcgctttaccatttggttcacactgctgccttagttgccgccccaattacaaaacaccccaatgtttttggaggccttctgaccgctggtatcttggtcttctctgggacgtgttatactgtcgcatttcttgaagacagaaaatattcaaccatggctccatttggcggctttgcatttatagcagcttggggtagcttgtttttctgatgacttcgactctattttggtctgtgctg

SEQ ID NO: 24477 - DNA, 428 bp, Glycine max
  Clone ID: LIB3106-005-Q1-K1-H4
gtaatcagagttagtaaatctggatggatgactgatgatgagtttgcaagagagatgattgctggtgtaaatccaaatgtaattcgtcgtcttcaagagttcccaccaaaaagcactcttgatcccgcaacctatggtgatcaaactagtaccataacaaaacaacagttggagattaacttgggtggggtcacagtagaagaggcaattagtgctcacagattattcatattagattaccatgatgcattcttcccgtatttgacgaagataaacagcctacctattgcaaaagcttatgccacaaggacaatcctgttcttgaaagacgatggatctttaaagccacttgctatcgaattaagcaagcctgcaacagtgagtaaagtggtgttgcctgcaacagaaggtgttgagagtacaatttg

SEQ ID NO: 24478 - DNA, 429 bp, Glycine max
  Clone ID: LIB3106-005-Q1-K1-H5
cccacgcgtccgcaagcagcctccaattcgtgccactctcttcaaaatggccgttacgttctcaaatctccacacagaatcaggtctcaagtccctcgacgacttcctctctgggaaggtctacgtttctggggatcagttcacaaaggacgacatcaaagtgtatggtgctgttttggagaagccaggtgactcttttcccaatgctgccaagtggtacgaggttgtctcatctcagcttgctgcaagcttccccggcaatgctcaaggggtgagattcagtggcaaagcttctgctccagcggaggctgctcctgcgaaaccggatgcttctgctgctgaagatgatgatgaccttgatctctttggcgatgagactgaggaagacaaaaaggcagcagaggaaagggaggctgctaagaagtctac

SEQ ID NO: 24479 - DNA, 425 bp, Glycine max
  Clone ID: LIB3106-005-Q1-K1-H6
gtttaagtacagttgatatagttgatgcacaatcaaaatatggtttttggggatggaatttgtggcgtcaacctatgggtttcattgtttttctaatctcgtccctagcagaatgtgaaagattaccttttgatttaccggaagcggaagaagaactagtagcgggttatcaaaccgaatactcgggtatcaaatttggtttattttatgttgcttcctatttaaacctattcatttcttccttatttgtaacagttctttactttggtggttcaaatatctctattccatacatattcgtttctgacttttttgaaataaatcaaacatatggagtttttgtaacgataattggtatctttattacactagctaaaacttatttattcttattcctttctatcgcaacaagatggactttgcct

SEQ ID NO: 24480 - DNA, 439 bp, Glycine max
  unsure at all n locations
  Clone ID: LIB3106-005-Q1-K1-H7
cccacgcgtccgcgtgagctgtctgtgcaaatnnttgcgttgttcttcgcggcgagcacctcgantnncactgaacggtaagtgatggcggacaagggctgttacaatnccgaacctcgaaagttcatgaaccaacaggcttctttccaggaagcagtttgtcgttgatgtccttcatccagggagggcaaatgtttccaaggctgaacttaaggagaagctggctaggatgtatgaagtgaaagaccctaatactgtatttgtcttcaaattccgaacacattttggaggtggcaaatccactggatttggtttgatttatgatacagtggagaatgccaagaagtatgagcccaaatacaggcttatcaggaacggccttgacaccaaggtagaaaagtcaaggaagcaaatgaaggagagaaagaatagagctaag

SEQ ID NO: 24481 - DNA, 429 bp, Glycine max
  Clone ID: LIB3106-005-Q1-K1-H8
acgcccacgcgtacgggtatgacttaggtggttaaaatattggacaaaatgagtgtcaacgacagtatatttgttggggtgtctgctttttgtctcctgcctcctacatttcaccaccccctttatccttatctcctctcttcttcatttgttctgctcttcccctctatttaaagctcacacaaagggatcatataccttggttgcactttggtaaggtgagagaataggaaaaagggaaatatggcatttgcaggaacaactcagaagtgcatggcttgtgacaaaacagtttatctggttgataagttgacagcagataaccgagtgtaccataaggcttgcttcagatgccaccactgcaaaggaacactcaagcttagcaactataactcttttgagggggttctttactgcaggccacacttc

SEQ ID NO: 24482 - DNA, 319 bp, Glycine max
  Clone ID: LIB3106-005-Q1-K1-H9
ctcccttttgtttttctttctaatataaccaaagattctatgcgtgcaagattgtgagttttctttggattttcgtctttttgagccttctgttgtgttactgttatgctttacaattcaaattaactgtatgtacctgagatatagagggagagtggttatataattcttttccaatgaattggtgggttgtgaatcaaaaaaaaaaaaaaaaaaaaaaaaaaaaaaaaaaaataaaaaaataaaaaaaaaaaaaaaaaaaaaaaaaaaaaaaacaaaaagataaaataaaaaaaattcgagaaaaaaaactggatta

SEQ ID NO: 24483 - DNA, 73 bp, Glycine max
  Clone ID: LIB3106-005-Q1-K2-A1
aaaaaaaaaaaaaaaaaaaaaaaaaaaaaaaaaaaaaaaaaaaaaaaaaaaaaaaggggggccattagtaaaa

SEQ ID NO: 24484 - DNA, 417 bp, Glycine max
  Clone ID: LIB3106-005-Q1-K2-A10
cccacgcgtccggagctccagcagttttcaactgtgtggttgaaatgggcaaaggaagtaaggttaagtatgagctggacaagacaagtggacttataaaggttgatcgtattctttactcatcagtagtctacccacacaactatggttttatcccaagaaccatttgtgaagacagtgatcctatggacgtgctggttctaatgcaggaacccgtgcttcctggttccttccttcgtgctcgtgctattggactaatgcctatgattgaccagggtgagagggatgacaagatcatagcagtttgtgctgatgaccctgagttccgccattacacagacatcaaggagcttccttcacatcggcttgctgaaatcagaagattctttgaggactaccagaagaatgagaaccaaa

SEQ ID NO: 24485 - DNA, 398 bp, Glycine max
  Clone ID: LIB3106-005-Q1-K2-A11
gaaagaatggctgccaacacattgatgagttctgccatctcagcctgcccatctctcctttcctcctcaaaatccagatttgccgcagcagttcctctttccagctttgttgtcaccaatgcctcttcttctcgcttttccatgagtgctgattggatgcctggccagcctagacccccctaccttgatggttcagcacctggtgactttggattcgaccctcttcgtcttggtgaagtaccagagaatcttgagaggttcaaagagtcagaactcattcactgcagatgggccatgcttgctgttccagggattttggttccagaggcattgggcttaggcaactgggtaaaggctcaagaatgggctgcagttcctggtggccaagcaacctacct

SEQ ID NO: 24486 - DNA, 368 bp, Glycine max
  Clone ID: LIB3106-005-Q1-K2-A12
atttttgcccaggtctgaagatgaaagggagatgtgctcaagaacaatctattgcgcaaatatcgacaagaagcttactcaagcagatgtcaaacacttcttcgaatctatttgcggagaggttcatcgcttgaggcttcttggggattaccatcattcaactcgaattgcatttgttgagttcgcactggcggagagtgcaattgcagctctgagctgtagcggtgtgatcttgggttcactgcctataagggttagtccatcaaagacaccagtgcgccctcgtgctcctcgttcccccatgcactgaatcatcctttctcgtgtttctgctgctgctgcaactcggagatatatttacatatata

SEQ ID NO: 24487 - DNA, 417 bp, Glycine max; identical to SEQ ID NO: 24396
  Clone ID: LIB3106-005-Q1-K1-G8

SEQ ID NO: 24488 - DNA, 426 bp, Glycine max
  Clone ID: LIB3106-005-Q1-K1-F5
cccacgcgtccggtaacattgggttgtgatttgtgagggaagaaggggtggaaagagggacgagaaggaaataggcatcaaccatggcagggagattgacgaacgcagcatcgaggatcttaggcggaaacggcgtcgtttaccgatccgtagcttcctctcttcgcctccgctccggcatgggcctccccgtcggcaaacactatgttcccgacaaaccccttcccatgaatgaggaactcctgtgggacaacggcactgcatttcccgaaccgtgtatagatcgtattgctgacactgtcggaaagtatgaagcattggcctggctgtgtgggggattgagttttttcgcgtcgctgggattgttggctgtgtggaatgacaaagcctccaagacaccgtttgcacccaaagtatatccatatg

SEQ ID NO: 24489 - DNA, 314 bp, Glycine max
  Clone ID: LIB3106-005-Q1-K1-F6
cccacgcgtccgcccacgcgtccgcgcccttttttttttttttttttttttttttttgttttttttttttttttgtttttttttttttttttttttttttttttttttttttttttttttttttttttttttttttttttttttttttttttttttttttttttttttttttttcttttttttacttaattttatttatttttcattaattataatcattttatatttgaaatatttttctttatacaacttttttaattttttctatttttccattttaaacatcttttaaaatggggaattattttcttatt

SEQ ID NO: 24490 - DNA, 429 bp, Glycine max
  Clone ID: LIB3106-005-Q1-K1-F7
cccacgcgtccgcccacgcgtccgagaaaacctaatttctcaaatttgaggtctcacgaaattttcctcactaaagatgtctggtcgtggaaagggtggcaagggtttgggaaagggaggtgccaagaggcacaggaaggttctgcgcgataacattcaaggaatcacgaaacctgcgattcgtaggttagcgagaagaggtggcgtgaaaaggatcagtggtttgatctacgaggaaaccagaggagttctgaagatattcttggagaacgtgattcgtgatgctgtgacctacactgagcacgctaggaggaagacagtgactgctatggacgtggtttatgctcttaagaggcagggaaggaccctctacggttttggaggctgaacaattctttttttggctgtgctcctatgtgcttgttctct

SEQ ID NO: 24491 - DNA, 415 bp, Glycine max
  Clone ID: LIB3106-005-Q1-K1-F8
actcagcattgcatccctcttgatttgtagtttgttttgtgcttgagataaaggttctgccaaatcaaggggggttttaagatcatagtgtgtgttttgcaacaatggctaagttctttgctgctatgatcttggcactctttgccatttccatacttcaaacagtggtaatggctgctaatgaacaaggaggccacttgtatgacaacaagagcaaatatggaagtggaagtgtcaagagttaccaatgcccatcacaatgctcgaggagatgtaaccagacccaataccacaagccctgcatgtttttctgtcagaagtgctgcaggaaatgcctgtgtgtgcccccggggtattatggtaataaagctgtgtgcccttgctacaacaactggaagaccaaggaaggatgacc

SEQ ID NO: 24492 - DNA, 438 bp, Glycine max
  Clone ID: LIB3106-005-Q1-K1-F9
ccacgcgtgcggtttgttgtgagctataagctagtttatcgtgaggagaatatgaagttgtttgtttggtttgttgctgcagtagttttggtagcatggccatgccatggcgcaggctaccaaaggttccctctccgaatgaaaactggctatggtgagcgttcttcggaggtaaaatgcgcaagttttaggcttgctgtggaagcacacaacatccgagcctttaaaaccattcctgaagagtgcgttgaaccaacaaaggactacattaatggcgaacaatttagatcagactctaaaacagttaaccaacaagctttcttttatgctagtgaacgcgaagtccatcacaacgacatatttatattcggcatatataacaccgtactctttaaatatccatactatgaaaaacattgatattgggtggaagaattt

SEQ ID NO: 24493 - DNA, 436 bp, Glycine max
  Clone ID: LIB3106-005-Q1-K1-G1
agaagagagatggatccagacgcgttggcaaaggcattcgtggagcactactacagcgccttcgagaccaacaggaacggcttagcgaatctctaccaggagggttccatgctcactttcgaagggcagaagatccaaggcgcttccaacatcgttgccaagctcacctccctcccttttcagcagtgccaccactcaatctccaccgtcgactgccagccctccggcgtcaacgccggcatgctcgtcttcgtcagcggaaaccttcagctcgccggcgaacagcacactctcaagttcagccagatgttccatttgataccaacacctcagggaagctattatgtgttgaatgacatattccgtttaaactatgcatgaagatgtcatatgaccggaaaggccatagaagaagtttgcctatagcaagctgttt

SEQ ID NO: 24494 - DNA, 417 bp, Glycine max
  Clone ID: LIB3106-005-Q1-K1-G10
ttcccggtgggacgccacgcgtgcgctcgttcttcttcttttgttgttctgtgtttgtgtttgttttttctctcacctgaaggggtcttgcggcggtggtaactgtggttgcggaagctcctgcaagtgcggcaacggctgcggaggctgcaagatgtacccagacttgagctacactgagtcaaccaccaccgagaccttggtcatgggagtggcacctgttaaggctcaatttgagggtgctgaaatgggtgtgcccgctgagaacgatggctgcaaatgtggaccaaactgctcctgcaacccctgcacttgcaagtgaggtgttgggagagcaagcttcaagcagagatagcccttaattaggaataatgataaactattaatgtgtagctaaaaacttatggattatgtctg

SEQ ID NO: 24495 - DNA, 388 bp, Glycine max
  Clone ID: LIB3106-005-Q1-K1-G11
cccacgcgtccgggcaaaaccgccttcgtcttttactcccaaaattccgtttccaagagtgagggacagtggaattggaactgtaaagtgtcaagttaaaacccaagtgaaagcgggtatcctgggactgggtctgggtctgttccacttccttaacttcgtcgaacccggttcatgtctccaactgcaattccacgaaccccccaatgccctctctttgcccacatgggccattcacgtgtccagtgtcgctgaatggattatagctatggctttggtgtggcaatacggagaaaaatctggatacccagcttggaagggcctttcttggggaatggtacctctacttggtggagctttttgtgcgtgcacatggcatttcttttat

SEQ ID NO: 24496 - DNA, 400 bp, Glycine max
  Clone ID: LIB3106-005-Q1-K1-G12
gtttaatggttagggtttcgtagggccgtcatcggaatgttccagaaggcccttccgtctctctttgccctttccaattccgttatacgacggcgtttcgtgccaaccatgcgttgaattgttttttttttttctttttccttcagtggcggcagttctggtatggaaatgtatgatgtttctgaaactagaaatgcagatgcttatttgattgaaggcactgatttaaacttacatctgacaagcccaaatattcaacaatttcaagccatgtttaatgatggagcccctgaatttgttgctgatcagaacttgtattaccctgctgccaccaattatgggtattactgtacaggatttgaatcacccggagaatgggaagaccaccataggatttttg

SEQ ID NO: 24497 - DNA, 320 bp, Glycine max
  Clone ID: LIB3106-005-Q1-K1-G2
tccacgcgtccgaaaaaaaaaaaaaaataaaaaaataaaaaaaaaaaaaaaaaaaaaagaaaaaaagaaaaaataaaaaaaaaaaaaaaaaaaaaaaaaaaaaaaaaaaataaaaaataaaaaaaaaaaaaaaaaaaaaaaaaaaaaaaaaaaaagtgggacctttttaaaaaatcaaattttaattaaaattttttgaaaaaaaaaattttttttttatgctaactaaaataaatttaattgccttttttttaaaaaatatataaattgtaaaaaccttgattttactaaattaaattcctttaaataaaatacctttt

SEQ ID NO: 24498 - DNA, 431 bp, Glycine max
  unsure at all n locations
  Clone ID: LIB3106-005-Q1-K1-G3
tgcanatgcagagccttctctcctctattttggcttccaacctttttgctccattgattctcagcaacaaaccaatctctatattttgcttagacaatgagggggagcttgtggcaacttgggcaatcgatcactcgccgtcttgcccatggagataagaaggctgttgctcgccgatgttttgcctcagaagctgagctgaaaaagacagtgtttcatgacttccatgttgctcatggtgggaagatggttccatttgctggatggagcatgccaatccaatacaaggactcaatcatggactctaccatcaactgtaggcagaatggtagcctttttgatgtttcccatatgtgtgggctgagcctcaaggggaaggatgctgtcccattccttgaaaagctagtcattgctgatgttgccgggcttgc

SEQ ID NO: 24499 - DNA, 438 bp, Glycine max
  Clone ID: LIB3106-005-Q1-K1-G4
aagaggttctcggatatgcctccaaggtggtgctcaccaaggatacaaccacaattggtggtgatggaagtacccaggaagcagtgaacaagagagttgcacaaattaggaacctaattgaggctgctgagcaagagtatgagaaagaaaagctgaatgagagaattgctaaattgtctggtggtgtggctgtgatacaggttggcgcacaaactgagacagagctcaaggaaaagaaattgagagttgaagacgctcttaatgctacaaaggcagctgtagaggaaggtattgttgttggtggtggttgcactcttctgagacttgcatcaaaggtggatgcaatcaaggatagccttgataatgatgaagaaaaagttggagctgatattgtgaaaagagctcttagttaccctttgaaattaattgccaagaatg

SEQ ID NO: 24500 - DNA, 429 bp, Glycine max
  Clone ID: LIB3106-005-Q1-K1-G5
ccgttctttaccttcctgaacgacaccgagaccagacacggtttggggcacagttaaggtggtagcagtagcattgttaggccatatctccttttttctctgccttgtattgaggtaaaactcacaaatattataactttgatctggggaagcaatggcatggagaggacatctttcgaaaaacataaaagaacttcggtttttgatgtgccagtcatctcctccaagctcacctgcaagggcttttgtggagaggaattataaggaactaaagacattgaacccaaaattgccaatattaattcgtgagtgcagtggagttgaacctcaattatgggcaagatatgatttgggtgttgagaaaggcatcaaattggaaggcttgtccgaagcacagatctttaaggcacttgaagatttgtcaaaagc

SEQ ID NO: 24501 - DNA, 426 bp, Glycine max
  Clone ID: LIB3106-005-Q1-K1-G6
agaaaaaaaaaacccttagccaacacaaccatcatggccacctctgctaggcagcaagcagcattcactggtcaaactgctctgaagcagctcaatgagttcgtccgcaagaccggtggcgccggcaaaggtcgcactaacatgcgccgcaccgtcaagagtgctcctcagagcatttggtatggccctgaccgtcccaagtacttgggtccattctcggagcagattccatcatacctgaccggagaattccctggtgactacggatgggacactgctggattatcagctgacccggaaaccttcgccaggaaccgggagctggaggtgattcacagcagatgggcaatgcttggtgcccttggctgcaccttcccagagatccttgagaagaatggtgtcaaattcggcgaggccgtgtggttc

SEQ ID NO: 24502 - DNA, 428 bp, Glycine max
  Clone ID: LIB3106-005-Q1-K1-G7
attgcaaatgtcgaatttcctgagcaatactaatccgaaccctaataagtccttcgaggtgaatcagcctcccactgattccgtgtccagtcttagcttcagtcccaaagccaacttcctcgtcgccacttcttgggacaatcaggttcgttgttgggaggtagcacggaatggagtaaatgttgccactgttcccaaggcttctataacgcacgatcatccggttttgtgctctacatggaaggatgatggcacgactgtattctctggtggatgtgataagcaagtgaagatgtggcctctgttatctggaggccaaccaatgactgttgccatgcatgatgcacccatcaaagaacttgcttggattcctgaaatgaaccttttagtcacaggaagctgggacaagactatgaagtaatgtgcta

SEQ ID NO: 24503 - DNA, 439 bp, Glycine max
  Clone ID: LIB3106-005-Q1-K1-F4
gcggccaagatccaggacaaagagggcatccccccagatcagcagaggctgatttttgccggtaaacagcttgaggatggaagaacccttgctgattacaacattcagaaggaatccacccttcacttggtgcttcgtttgagaggtggtatgcagattttcgttaaaactttgaccggaaagaccataaccttggaggtggagagttcagataccatagacaatgtgaaagctaagattcaggacaaggaaggtatcccaccagaccaacagaggcttatctttgccgggaaacagcttgaagatggaagaacccttgctgactataacatccagaaggaatctaccctgcacttggtgttgcggcttcgtggtggcatgcaaatctttgttaagactttgactggaaaaaccataactttggaggttgaaagttctg

SEQ ID NO: 24504 - DNA, 129 bp, Glycine max
  Clone ID: LIB3106-005-Q1-K1-D9
gcgggtatgctgatatgcactattcaaataggagcattagctatgtttgttaatgtcactttatgttatgtgggtaagtcacctaagacactccacgtacctacgttgttgtctcttaccggctttaat

SEQ ID NO: 24505 - DNA, 437 bp, Glycine max
  Clone ID: LIB3106-005-Q1-K1-E1
gcgcagttctgctacaacctccacacaaagatgctgcaattgatatcttaataaagtctggagaaaaggatcttgtgaaccagttgaccggcatacataagaaggggctttgatgataaaatgctttatgaaagaggtcacatctattgtttatccactgcgtttgttcacaagtttgcattgtataacagcaacagttgggattggtttctgttacgcaggctgatacttgcttcatttcttccccttgtaggagacacattattcttgagaacagtatgctaacctctatttgttttgctaaacccattttccttatagattcagcttaatattgataaattgttaaacccattttcctaatacaaattaatgaaacttctgttctttgatataatgagtcgaataaaatggttaaaatatttttccctttttat

SEQ ID NO: 24506 - DNA, 415 bp, Glycine max
  Clone ID: LIB3106-005-Q1-K1-E10
gcgcccacgcgtccgcccacgcgtccggccacgcgtccgagcggatagaagacttgactggttaatcggagtgcttcgtgccgtgcctaaattgcagcatacttgacgcaaattttgctcagctaacgcattgtatatgttttccttatttgcgttgttgttaatgttaactgtcttctggctggtgcaaagttttgtttagttttggtagtggcttaatggtgtgtctgattgagaagtggtactatctaatttctcactttcttgtttttcactttttctcctccttttttccgtctcatgttatttgccttgagtgtgagtaaaagcctgacggcattcattcaacctggattgtaaatgaaggtgatcttgatgtatgcttcagttgtcttaatctgatgtattccaatca

SEQ ID NO: 24507 - DNA, 393 bp, Glycine max
  Clone ID: LIB3106-005-Q1-K1-E11
gcgaatatagcccaagccctatacaaccaaaccctaacacacacccatttgattcagtttgcatggctagcgctcaaggttgcatttttggctgcagtgctctgcatggttgtggtgagtgcacccatggcacatgcagctatcacgtgcgggcaggtgacgagtagcctggccaattgcatcggttacctccagaagggaggaacgccgtcgtcgggatgctgcaacggagtgaagagcctcaatgccgccgccaagaccaccgccgaccgccagacggcgtgcaactgcctcaagtcggccgccagccaaatctccggcttcaacgccaacaacgccggcttgctccccggcaaatgcggagtcttcattccctacaagatcagcaccttc

SEQ ID NO: 24508 - DNA, 395 bp, Glycine max
  Clone ID: LIB3106-005-Q1-K1-E12
tttcgtttttccccttctcctctcaaaatcctttctttttcccgcagcccatcaaacgagtctcagaggaacgacgatctcgaacccgttcaccgttggatcgtcgtgaaatttgagtatcatgttcgcaacacaattccgagaattctcaccgttgggaattttgatatcacgtctgaactgagagaaacacccttcgcattgtagcctttttctttcccgcagaaacccagagctgtcttggtaaaactacgatcccggtttagttaaccgttggattattgtgaaatttggatatgttgttcgaaattcaattccgcacacttacaccgttgggatttgcgagataatattcgtggaaggagaaaaaggaatcgcatgaagacagcacaagt

SEQ ID NO: 24509 - DNA, 434 bp, Glycine max
  Clone ID: LIB3106-005-Q1-K1-E2
gtatttgattggtgtgcatccatgttaagctagtggcgatcggatccagctacagggtacaacgtacagatcaaggaaggaagatgttgggtgttataaggcacaagagtattcgccccgccttctccgcaatcagacacttctcttctgcagctaaagagattactgtcagggatgctctcaactccgcactcgatgaggaaatgtcagctgatcctaaagtcttcttgatgggtgaagaggttggggaatatcagggtgcatacaagatatccaaggggctgctcgacaagtatggccccgagagggttctcgatactccaatcactgaggctgggtttgctgggattggagttggcgctgcttactatggtctaaggcctgttgtggagtttatgacttttaacttctccatgcaggcaatagatcatatt

SEQ ID NO: 24510 - DNA, 407 bp, Glycine max
  Clone ID: LIB3106-005-Q1-K1-E5
cattatcagtttcttttccatcacattacaggacagctccgtgcttacctcgcctcggttggaaagaggaagtttcatatagaatgatagcatacttttttatatacgatagcctgtgctttccacactgatggcaagttgatttaaaataataactattgcatagtatgatagaaactggatcagaaaaggaagaaagacaaaatttcttattgattgagtgtatctctacaaacaaatcccttggatattcaagagatacaggcctctatcccttaaataactaactgacctatcataaaattagtaatgaagaacaactgaagcatcgtcaattggagcaaatgcagctcaacctcaaaatctgtatcttttgtggttgatttaatggaacattctttacagtg

SEQ ID NO: 24511 - DNA, 429 bp, Glycine max
  Clone ID: LIB3106-005-Q1-K1-E6
agtttgttgtgagctataagctagtttatcgtgaggagaatatgaagttggttgttgtctttgttgctgcagtagttttggtagcatggccatgccatggcgcaggctaccaaaggttccctctccgaatgaaaactggctatggtgagcgttcttcggaggtaaaatgcgcaagttttaggcttgctgtggaagcacacaacatccgagcctttaaaaccattcctgaagagtgcgttgaaccaacaaaggactacattaatggcgaacaatttagatcagactctaaaacagttaaccaacaagctttcttttatgctagtgaacgcgaagtccatcacaacgacatatttatattcggcatagataacaccgtactctctaatatcccatactatgaaaaacatggatatggggtggaggaattta

SEQ ID NO: 24512 - DNA, 521 bp, Glycine max
  unsure at all n locations
  Clone ID: LIB3106-005-Q1-K1-E7
cgtctcgtattggaatnagtgaagttctcaaatgggcccttatgnngctcagaacnncaaatatatataacatgggggtccacntttcaattgttgaggaagggcatttnntcctgataaagacccaagggcttcaagggtganngtgggtcaaatnnctttggaaaaatgactttcaaaatgtatcccaatggcttagaccaatngggaacccttccttcagtcnattatatgtgaattanntggaagtattaccctgtgatnngtccgaggatcaatttgaaangaattntgcttggggacttagnncaaatagcaatttaccaaatttttgtggatanaaaaggccagaaatttggtannatgggtgaaagtccacacaannttgccacaagaacttcnnttagatgaaaggttaaagaaaatagaggataccattaacaagnnttggtgcnnccccaagaaagcaanngtgctgtcttcaatcnccatcagttngnngggttttccctaacttcatt

SEQ ID NO: 24513 - DNA, 424 bp, Glycine max
  Clone ID: LIB3106-005-Q1-K1-E8
tcaggagctttacagacattgcttgagaagggtgccaagtacctagtagggcagggggtgcctctaactgggtgcttgacattgtccatgtacctggctccaccagatgatagggatgacattggatgtgtgaaaagtgtcaacaaccaaagctactaccacaaccttgtgctgcaagacaaattacaagaattcaggaaacagtaccctcaagctgtcatactttatgctgattactatgatgcctaccgcactgtcatgaagaatccaagcaaattcggattcaaagagaccttcaacgtttgctgtggatcgggagaaccaccttacaacttcactgtgtttgccacatgtggcacacctaatgccactgtgtgctcaagcccttctcagtacatcaattgggatggtgttcacctcactg

SEQ ID NO: 24514 - DNA, 298 bp, Glycine max
  Clone ID: LIB3106-005-Q1-K1-E9
gctgctgtgacagcatctatggtggttccggaggtggctcatgctgctggatatgaggtctccccttgcctaaagaactttctactcagcatctttgctggtggggttgttctagcagccatatttggagccgttattggggtttccaactttgatccggttaagagaacttaaatcatgcatgctccaatgcttttcattttctctctctctttttcactcttcttctagcttcttgtttcatgcaagttatatgcaactggttctgttatatgcatactatctatatcccagctgc

SEQ ID NO: 24515 - DNA, 388 bp, Glycine max
  Clone ID: LIB3106-005-Q1-K1-F11
gcgcaagcttcaatttgctttgtgctcactcatctatctattataaccaaacactcttctgcatattcttgttcttcttgttcttgttctatctgtgacgagcatcatggcctcgagagcagtgctattgttggctatgtgtgtgcttccggccatggttgtggccattcgcccagcaaagaaccctttttgcgtgaagggtcgcgtctactgtgacccttgccgtgctggttttgagacctcagcaaccacctacattgccggtgctgagattatgttgcaatgcaagagcagggttagcaacgaggttgtgtacaccaagaaagggtacactgactcaactggagcatacacaatgtacgtggaccaagatcacgcagatcaaata

SEQ ID NO: 24516 - DNA, 428 bp, Glycine max
  Clone ID: LIB3106-005-Q1-K1-F2
agtagatctctctataagccttggattggacgcttgtgatgaaccgtatacgagaccaggcatacctgacgactttcacagagtcctaaaacccggggcgctcggccgcatacgggactctagcatcagggcctgatctcaccgcctcaactacctactacaggcaccagatctctatccagagctatgcctatccgtagccgttggctgactccaaccaggctgaggccaccggcacagccgacgataccggctacccgtgtcttactagataggatctacggcacgagctgaccgcagctggagaagctcatgtgacgcaagtgcatactcttcagacgcgtcaatcccggcgacgactcgtacgatctagtaattgacgatcttatcggcgggaatcgaatccggagtctctctcaaagaagaga

SEQ ID NO: 24517 - DNA, 433 bp, Glycine max
  Clone ID: LIB3106-005-Q1-K1-F3
ggtttacagagaagcgaagaggcgcagccgtagcagtaactcgtggaattgctagcagtggcgaggatcaaggtttacgagctgaggcagaagacgaaggctgatctgttgaatcagctgaaggacctcaaggccgagcttgccttgcttcgtgttgctaaggtcaccggcggtgcacctaacaagctctctaagatcaaggtggtgaggttgaacattgcccaggttttgacggtgatttctcagaagcagaaggccgcgttgagggatgcctacaagaacaagaagtacttgcctctcgatctccgccctaagaagaccagggccattcgcaggaggcttactaagcaccaggcatcattgaagacagagagggagaagaagaaagagttatatttcccactgaggaaatatgctatcaaggtgtaacttt

SEQ ID NO: 24518 - DNA, 428 bp, Glycine max
  unsure at all n locations
  Clone ID: LIB3106-005-Q1-K1-D8
cccacgcgtccgcccacgcgtccgcccacgcgtccgcaccgagtagcaacaatgtcggagcgaggtcgcggaggatcggcagggaacaagttccgcatgtcactgggtctgccggtggcggcgacggtgaactgcgccgacaacaccggcgcgaagaatctctacatcatatcagtgaaggggatcaagggaaggctgaaccggttgccgtcagcttgcgtgggtgacatggttatggccaccgtcaagaagggaaagcctgatctccgtaaaaaggtgctccccgctgtcatcgtccgtcagcgcaagccgtggcgccgaaaggacggtgtttacatgtacttcgaagataatgctggggtcatagtgaatcccaagggtgaaatgaaaggttctgctatcactggtcctattgngaaggagtgtgc

SEQ ID NO: 24519 - DNA, 434 bp, Glycine max
  Clone ID: LIB3106-005-Q1-K1-C4
cccacgcgtccggctccctttctctccgatcaatccaaacccttttcttgttcttcagaattccagttctccgccgcttcgccctcgaggtcctcggcaaaaacggctgcctcgtggagggcgtcctccacctccccggcaacccccccgtcaagctcgattcccaagatctcctccagattggggacaaggagttctactttctcctgcccgttcgcagcatccttgttgggcccgtcggcccgaggcattaccctaaccacgccgcacccgggcccgtcgtgccgcactataataattaccatttgggccccggcccggtgaagaaggcgccgcgacgggagtactacgaggaagagtttgatgatgaggatgatgttggtgggaggaagatgcggagggatgggtatgatggatatggctacgctggtggc

SEQ ID NO: 24520 - DNA, 426 bp, Glycine max
  Clone ID: LIB3106-005-Q1-K1-C5
caagatcagcaccttgttggaaactgcaaaggttcaagtagatacctatgggccaacgttatttgctaaacttggggagaagaaaaatcttggcgatttgatagccaatgcagcaggcggtggtgcaccagttgctgttgcagctgcccctgttgctgcctcaggtggtggtggtgctgctgctgccgccccagctgctgaggagaaaaagaaggaggaacctgaagaagagagtgatgatgatatgggatttggcttgttcgattagggacattctcaatatgatttggttaaattttgtggttctttacctttaagtttactttatggatattgtaggttttatttttgtgctggttatttatatctgtataagacttgattttgtagttttatgaacttcggaatgtgggtttatgtccattt

SEQ ID NO: 24521 - DNA, 430 bp, Glycine max
  Clone ID: LIB3106-005-Q1-K1-C7
cccacgcgtccggcagatcaatctctctctctctctcaaccataatagtcatgggttggaaggaggattttgagcagtatgctgagaaagcaaagactttgccaccgactcaatcaaacgaagacttgcttatcctttatggattgtacaaacaggccaccgttggacctgtcaacaccagccgtcctggaatgttcaacatgagggacagagctaaatgggatgcatggaaggctgttgaagggaaatccaaggacgaagcaatgggtgattacatcattaaggtgaaacagctgctggaagcagctggcttgcctgcttgataacattgtcatgccttgctttctgattctgtgctagaagttcacaacagtttggaaataaacaattgcagtgtttgaagcttttattatcataatcatatttattt

SEQ ID NO: 24522 - DNA, 429 bp, Glycine max
  Clone ID: LIB3106-005-Q1-K1-C8
attaaagaccacttgtgacgggaaaattgatcaaagtacaccctagtggagtgaagggaagagtcacgttcaaagcggaggctatgagtgtggctattatgtcatgcattggatgtggaacataatcagaggggagttgaagactgattggaccatgtggtttggtgatggcacgccactagacatcgagaccatgacaacattacagaaaaaatgggcagcatgctttttaagagttagaagcatcgaatgtagaaagctttagatgacatgccaacaaccactttggtgtttttcatgcatttgtttaagttttagaaacaatttttactgctgtaatgactattatttgcagggaaaatagatatttgttcatttcattttggtatgcactcaaacattgagacaatgcattgtatttgcattcgg

SEQ ID NO: 24523 - DNA, 420 bp, Glycine max
  Clone ID: LIB3106-005-Q1-K1-C9
caacaaggaccttggttgggatgaacactggatcttctgggtgggaccattcatcggggcagctcttgcagcactctaccaccaggtcgtaatcagggccattcccttcaagtccaagtgattcaatcaaacggttcatgcttaatcaagttgggaacaacaacaacaacaaaaatcaagccaatgtttgtgggttttggtttcatttcattaagatgatctgtttatctcttttcttctttttaaaatttaaagtctttgtattttgtatgtaaagatgtaaaattatgattattaggtggtgcatgtgtcgcgtcatgggccaatgttatcctctgcttttaagttggaagaggcccaactcatgtgtgatgtacggctgtgaatggggaatttaatttgccaaatcaaaaattaccc

SEQ ID NO: 24524 - DNA, 434 bp, Glycine max
  Clone ID: LIB3106-005-Q1-K1-D1
gaagccctagactcactagactacacacttcgcaatggcggttgttgctcaaacccctgacatcgccggcgagcggcagtccggccaagacgttcgcacccaaaacgttgtggcatgccaagccgttgccaacatcgtcaaaagctctttaggccccgttggcctcgacaagatgctcgtcgacgacattggcgacgtcaccatcaccaacgacggcgccacgattctcaagatgctggaagtggagcatcctgctgccaaggttttggttgaactcgccgagcttcaggatcgagaagtcggagacggcactacttctgtcgtcattgtagctgctgagcttctcaaaagggcaaatgaccttgtcaggaacaagattcatcctacctcgattatcagtggatatagacttgctatgcgagaggcttgtaaat

SEQ ID NO: 24525 - DNA, 397 bp, Glycine max
  unsure at all n locations
  Clone ID: LIB3106-005-Q1-K1-D10
tcccggtcgagccagcgtgcgggtcctttcatcaacggtagtgagatatctgcagctgacctatcacttggaccaaaggtataccatggggagattgctttggggcattataagaaatggacagtgcctgattcacttacctctttgaagtcttatatgaaggccattttctcgagggaatcgttcgttaaaacaagtgcacaaccacaggatgtcattgaaggttggcgtcctaaagtggaaggctaatattcactgatcacgcactatcatttctatgagactctgaagactataccccaacaaatagcaatccatcaagagttctagacctatatcngtttgtattatataaccttatttatttattcactatgcactatggaataattattta

SEQ ID NO: 24526 - DNA, 403 bp, Glycine max
  Clone ID: LIB3106-005-Q1-K1-D11
agtaacccttcttttctctctctctctctcgtgttctgagctgctagaagcaatggggaggaaaagaagccatgcttctttcaccatgtttgcaatgcttgttggattgctctctcagagccttgtcattcctgtaatatccaccactgttgcagatcagaagaactactacaccccagatccacatgctggaagtccccccacaggctcacacaatagtagtcctccatctcatggccatgggagctctccaccctcacatcacaatagtccaagtactccatcaacaccctcaggtggaaactgtggatcatcacccccacaacatcatgatccaacaccctcaacttcatcaacaccatcaaacccttcctcaggtggatactatggaagtagcccttca

SEQ ID NO: 24527 - DNA, 359 bp, Glycine max
  Clone ID: LIB3106-005-Q1-K1-D12
tctgaactagtagcaaggcttgctgatttcatccaatatgattggtaccgatctaggaggagtagcgtgagcattgaggatgatggttcaaactccaatgaatcatcaagttacagattaactgtaattggaacaactggtttcaccatccaaccaggatacgagagtggcggggagagtgtgcagcaagcaagtgtatctgttggtttcccaactgtacaaagtgtgactgatgttattgagatggaaccggtcatgactgagaggagagtgaggtttgctattgaagatgagcctgagagtgatgcaaggtctgagacaggaatgcaaatgcaggaagagttggaagatctttatgc

SEQ ID NO: 24528 - DNA, 434 bp, Glycine max
  Clone ID: LIB3106-005-Q1-K1-D2
aacagtgagaagcccagtgattttgtttaccttccgagagatgaagcatttgggatcgtttctaggttttcctcttccggttcttcctctgcgagggtaaggtaaggcagaacctccaagaacggggcgtgcatacttttcacccttatctggatcgcccaagtcattgtagacatcataatcatagatcctatcccattccttgcgctcaccagttccatcccctcttacattcttcaattcttcttctctgtacttgacaagtggagccggtgtctcgcttggaagatatgtattgttggcaaagaaaatgcgatcagtcttgtagtgttttgaattgtaaacccaggagttacatatgaagtgaatggctccatggtttggaatgtcttcgagaattaaagacttgaggtagaaccggaagaggaaaaact

SEQ ID NO: 24529 - DNA, 312 bp, Glycine max
  Clone ID: LIB3106-005-Q1-K1-D3
cccacgcgtccgtggaacttctcatgatgcataacaggacatattgtgctgagattgctcacaatgtatccacaaggaagaggaaggacatagttgagagagctgctcagcttgatgttgtcttgacgaacaagacggccagactacgtagccaggaggatgagtagatccaatacatgggagagttatttatgttttgtagtgagcttctgttgacacccttgatggtagattttgattttttgttatttccaaaactttgttgcatgccatacaattttatatgttgcttattgtctatttgctgttgct

SEQ ID NO: 24530 - DNA, 433 bp, Glycine max
  Clone ID: LIB3106-005-Q1-K1-D4
cacccatcatcaatctttatttaacacttgcctcctcttttttccaaccatctcttgctgcttcgttcttttcttcttcaattcatatcatatcaattagatttgttttcagagtttgctagtgagataccatggacaactacaacagcaatgacttttggaaattcagtgaccagttgaggcttgaatctggtttggccaatctgtctctgaatgattattccatttggagcaacagctacagctccaagaggcctgatcagaggaggaactttgatgtcaagggcagtgatttcaacaactcatcaaagccttttgatgatgatttcaatgatggctggaagatcaccaattccaatggaccccttttctctatgcctcacaacaacaacactcacactcttgaagttggaggcttcaacaagggaggaat

SEQ ID NO: 24531 - DNA, 428 bp, Glycine max
  Clone ID: LIB3106-005-Q1-K1-D5
aaacacaaaaagttctgttctttttcccacccaattcagttttctcaaatggctcgtgcgaagcaaacggctcgcaagtccaccggcggcaaggcgccacgtaagcagctggccaccaaggcggctcgtaagtctgctccggctaccggcggcgtgaagaagccgcacagattccgtccgggaaccgtagcgctccgcgagatccggaagtaccagaagagcacggaacttctgatccggaagctcccgttccagcgattggtccgcgagatcgcgcaggacttcaagaccgaccttcgatttcagagctccgccgtctccgccctccaggaagccgccgaggcctacttggttggtctcttcgaagacaccaatctctgcgctattcacgccaagcgtgtcactatcatgcccaaggatattcaact

SEQ ID NO: 24532 - DNA, 428 bp, Glycine max
  Clone ID: LIB3106-005-Q1-K1-D6
aacagagatcggagcgtggaacctctctctctctctctctctctgcggaaaccggaagatctcagttctctgatcagatccatccgacgtcgtttcagtgataatggctccgttcagcggcgatgagacggcaccgtttttcggcttccttggagccgcagctgccctcgtcttctcctgtatgggagctgcctatggcacagcgaagagtggcgttggcgtggcttcgatgggtgtgatgagaccagagctggtgatgaagtctattgtccctgttgttatggctggagttttgggtatttatggccttattattgctgttattatcagtactggcattaatcccaaggccaaatcttattacctctttgatggttatgcacatctctcctctggtcttgcctgtgggctggctggcctctctgctg

SEQ ID NO: 24533 - DNA, 404 bp, Glycine max; identical to SEQ ID NO: 24429
  Clone ID: LIB3106-005-Q1-K1-D7

SEQ ID NO: 24534 - DNA, 434 bp, Glycine max
  Clone ID: LIB3106-005-Q1-K1-C3
cccacgcgtccgcacactcacacttttatcatctctgtctctgcgctcttcttcttcgtcttctggttcttcttttacactctcttcttctttttcttctccctcctcctttgcctttttttgtagcttccccttgcgctctgccacttcatcattgaaggtacaaacaattcagaagaagaagcgcgtggtgaaggcagtggaagaagatacccagcaagaactcaacgctgctgatgactctgaacaaccatcaacctccgaagcaccacccgttgtggttcccgtttccccatcagatactctcaccatgttctttcaggcagagggaacagtgagtgaaacagctattccagctttgaccaaagctttagaggagacagaaggtgttacagatttgaaggttcagcttgctgaaggacttgcaattttag

SEQ ID NO: 24535 - DNA, 433 bp, Glycine max
  Clone ID: LIB3106-005-Q1-K1-B1
acagtttgctattggacggtatggaaatggcttcaagaccagtagtatgaggcttggtgcagatgtcatagtcttcagttgccatctaaataataggattttgactcaaagcattggacttctgtcatatacatatttgataaaaacacagcttgacagaatagtagtacccatggtgaattatgagtttgatacatcaactggatcattgaaaatattaaatggcaatgagcattttgtgtctaatttatccttgctgttgcgttggtcaccatattcatcagaagcagatcttctgaaacaatttgatgacattggatctcatggtactaaagttattatctataatttgtggtgcaatgatgatgcaaatttggagctagactttgatacagatcctacggatattcgtattgctggggatgtcaagcag

SEQ ID NO: 24536 - DNA, 391 bp, Glycine max
  Clone ID: LIB3106-005-Q1-K1-B11
aaacactatagcaatagaaacatttgcttttgaaaaacccctcactcttcatcactagactagctagcgcacatacaatgtcgaccaaatttaaggtgtttcgtgaattcacaagcgatgactcattcctaaaccaagttatccctgaaaacatcaccgaattccaagtgactctgtccctcgctagagactacgatggcaacaactcaaccaacggaaagttcattccttactgggacactgaaaaggtcactcccgaagtgataaaaaaattcaagaaaaaatacgaacccaccgcactgagggttaaggttcttgtcagcattggaaacaaaaacaaacaatttcctttcaccattggctcggactcgaacagcgaagcatgggtctt

SEQ ID NO: 24537 - DNA, 401 bp, Glycine max
  unsure at all n locations
  Clone ID: LIB3106-005-Q1-K1-B12
tcccggtcgacnacgcgtgcggcagaactttgtttcccaatttccattgcctccgcttccacctcgcaaccatgatcatcccggagaagaaccgcaaggagatctgcaaatacctcttccaagagggagtttgcttcgcgaagaaggacttcaatttggccaagcaccctgagatcgacgtgccgaatctgcaggtgattaagctgatgcagagtttcaagtctcgcgagtacgtgagagaaacttttgcttggatgcactattactggttcctcaccaacgatggcatcgagtttctcagaacttaccttaaccttccttccgaaattgtccctgctactttgaagaagcaagccaagccacctggcaagccctttggaggcccattcggtgatcgccct

SEQ ID NO: 24538 - DNA, 433 bp, Glycine max
  Clone ID: LIB3106-005-Q1-K1-B2
cccacgcgtccgagcagatctttcaagaatggcacaaattaacaacatggcacaagggatacaaacccttaatcccaattccaatttccataaaccccaagttcctaaatcttcaagttttcttgtttttggatctaaaaaactgaaaaattcagcaaattctatgttggttttgaaaaaagattcaatttttatgcaaaagttttgttcctttaggatttcagcatcagtggctacagcctgcatgcttcacggtgcaagcagccggcccgcaaccgcccgcaaatcctctggcctttccggaaccgtccgcattcccggcgacaagtcgatctcccaccggtccttcatgttcggcggtctcgcgagcggtgaaacgcgcatcaccggccttctggaaggcgaggacgtcatcaatacgggcaaggccatg

SEQ ID NO: 24539 - DNA, 435 bp, Glycine max
  Clone ID: LIB3106-005-Q1-K1-B3
gcaaattgcaagaagatattcaaaggctccgttaactatgcttggaccacggttcctgcatatgcgagtggggtgattggattcatgctttgctctacggagggtccaccagtgaacttcaaacatccaataaataaattgaatccagagaaaaatggggtggcaaagggacctactaagttttataacccacagatccatgctgctgcattctgtctgccttcttttgtggacaaggttgattgatccaacagacattcataaatgactcggtagcattaacgaattgctgttagttaccctttgtttttgctgtgtcgctctgcatatttatgatattatccttttattatgacatttagttgtattctatattccctaaaatattagatgttacacacgtgtatgattcatctaatgtaaggtttgcaccta

SEQ ID NO: 24540 - DNA, 147 bp, Glycine max
  Clone ID: LIB3106-005-Q1-K1-B4
cccacgcgtccgtttttatttatttcgtaagcctttaatttttgttgctgctgctactgctgctgtaaattagactgagtatgtttttcaagtaaaattagggtttttggattatatgaaatgatatactgtccgagtctttgatat

SEQ ID NO: 24541 - DNA, 428 bp, Glycine max
  Clone ID: LIB3106-005-Q1-K1-B5
ctactgtactatcaagaggattagcatctaaatgtgcaaatgtcgtagcgggcgcaggatcgggttcactcaaggaagaggtgaactccagagatggtaggattgaacacctgaacagccatttgaacgagcttcacgtggaacatgtacaactgattgctggaatggaggaggcacacaaacatgtggaagaactaaaatcaaaagccaagcaacttgaggaagaggtcgagaggcaaagaaccgtgatcttagaaggagcagaagagaaacgcgaggccataaggcagctatgtttctcactcgagcactatagagatggctataatatgcttcggcagcatgttatggggcacagacgagttccagttttggctgcctagttaataaatttgaaacgtgatcttgtatattgttttggtgctatc

SEQ ID NO: 24542 - DNA, 427 bp, Glycine max
  Clone ID: LIB3106-005-Q1-K1-B6
aacagatttttggttatggtcattcgcgatttattaaacctatgtgaaatgacaaagggaaaagataacaaagctgttattgcaagtaatatcatgtatgttgttgggcagtatccacggtttttaagagctcattggaagttccttaaaactgttgtgaataaattgtttgagtttatgcatgagacacatcctggagttcaggatatggcctgtgacacatttctgaaaatagtccagaagtgcaagcgtaaatttgtaatcacccaggtgggcgaaaacgagccatttgtgtctgagcttctgacaggtcttcccatcactattgcagatcttgaaccccatcagatacattccttctatgaatctgttggtcacatgattcaggcagagtctgatgcacagaagagagatgaatatcttcagc

SEQ ID NO: 24543 - DNA, 430 bp, Glycine max
  Clone ID: LIB3106-005-Q1-K1-B7
tgaggtcctatctcgacgtactatcattacagagccttctttgtcatctttactctcgaatataacaaaagaaagtcgaagaggttttgcatctcaactactttcaattattgaagtccgtgatatggaggaaaacaaagaacttgagaggagtttacatgctgaagatgacgagtcactctcattacctggaagaagaagtgggaatgaggaatggcgcaaatctagattagaaatgggttctgataagctaagttcctctgcttgcccagttcgtttgtgcgtagatgagcacgtgacaaggatttataatgcattccgtcctatcctttatcaatttgttggggaagaattaacaaagtcggaagctgttgaagtactcaggattactaaaggaattcttttggatcttagcaagtccccctataaa

SEQ ID NO: 24544 - DNA, 385 bp, Glycine max
  Clone ID: LIB3106-005-Q1-K1-B9
cccacgcgtccgattattgtcctcatagtgagtagaaggcagagagactagagcggggatagcaatcgcatctcattcatttcaatggcaactcaaggtcaagtcattacctgcaaagctgcggtggcctgggaacccaacaagcccttaactgtccaagacgttcaggtggctccgcctcaggccggcgaggtccgtgtccaaatcctcttcaccgctctctgccacaccgatgcttacacttggggcggcaaggatcccgaaggtctcttcccctgtattcttggccatgaagctgcagggattgtggagagtgttggagaaggtgttactaatgttcagcctggggatcatgtcattccctgttatcaagctgaatgtgggg

SEQ ID NO: 24545 - DNA, 435 bp, Glycine max
  Clone ID: LIB3106-005-Q1-K1-C1
gcggcgcacacggactccactctcctcacaatcctgcaccaaaacaatgtcaatgggcttgaggttctgaaggaaggggaagggtgggtggcggtgcctccgcttcccggagggctcgtgatcaacgtcggcgatctgctccacattttgtcaaacgggttgtacccgagtgtgctgcatcgagttcgggtgaaccgaacccggcagaggttctcggttgcttatctatatgggcccccaacaaacgtccaaatcagtccacaagtaaaattggtaggcccaacaaggcccgttctttatcgatcagtgacttggaacgagtaccttggcaccaaagcaaagctttttaataaggctctttcagctgttaggctttcttcatctattaacggtttgtttgatgtaaacgaggataagagtaacgactttcaagtg

SEQ ID NO: 24546 - DNA, 376 bp, Glycine max
  Clone ID: LIB3106-005-Q1-K1-C10
cggacgcgtgggttcagccacagtttcggaggagaagaaaatagtcgttcgagatgggccgtacgaagcaaactgctcgtaagtccacaggaggaaaggctcctaggaagcagcttgcaaccaaggctgcacgtaagtctgcaccaactactggtggtgtgaagaagccacatcgttaccgtcctggtaccgttgctcttcgtgagattaggaaataccagaagagtaccgagcttttgatcaggaagctccccttccagaggctggttcgtgaaattgctcaggacttcaagactgatctgcgtttccagagccacgccgtgcttgcattgcaagaagctgctgaagcataccttgttgggctctttgaggacac

SEQ ID NO: 24547 - DNA, 394 bp, Glycine max
  Clone ID: LIB3106-005-Q1-K1-C11
gttcagatgtgtatgtttgggatactgatagtgggactttggtgaccattgtccatggtgctcatgttggtaatacttatgctttggcacggagccatacaggggacttcctttttactggaggtgaagacggtgcaattcacatgtatgagattgttaatgatggctatgagtctaaagcttggcatgttgctgtttgggttcctcactcggctgctgtgtattctcttgcctttgagtttccatggcttgtttccgcatcaagtgatggcaagctggctctaattgatgtgagaaagctgttgaagattagcaagcgagctctggggaagagagtctcaaaggtaaagcatttgggtggagacatagtagagccttcacagaggatgttgca

SEQ ID NO: 24548 - DNA, 399 bp, Glycine max
  unsure at all n locations
  Clone ID: LIB3106-005-Q1-K1-C12
tcgcccacgccgtccggaaggggaaaaagtttgctccttacatcttnggttccttctggtattctgagatgaggatacgtctctnngtgtaattgggaatgggnngttgtagtgcatcctgctcggnnggttgtttaannagagatttgacggtnncttgaattcaaattnggggtctcttgcaagnggaagggattattgatatnnctgatcgcgctttcacctgttgtttgatttntcatcnnaagtagtggaatgggccttatagagaagccgagccttgctttaaatcnntttcattggcacnnncaccaagagaaggggcatttgactccttgcttactccaagcaagggttaactcgtaattggcattccgagttgggttgatttggaggcac

SEQ ID NO: 24549 - DNA, 438 bp, Glycine max
  Clone ID: LIB3106-005-Q1-K1-C2
gcgaataatcccaatcatcaagataggaaaagaatggaggccatttgttccaagcaccttatgacatgccttgtcataattcttgcttctagtttgaccttatcacagggtgccaagaaaggcagtgacagtgaaaggccataccaagaagcgagcacggtgttcattagaacatcttgcagctccacgacctatccaagactctgctacagctccttagtgaagcatgcagacttgatccaaacaaaccgtgtggttctgacaggcacagccctgaatgtgacccttgcgtctgccaagtcgacctcggcaatgatgtcgacgctggcaaagaggcaaggcctgaagccaagagaggttgcagcgatgaaggactgtgtggaagagttggcggactctgttgatgagctcagaaggtctatttctgagatggctcaa

SEQ ID NO: 24550 - DNA, 394 bp, Glycine max
  Clone ID: LIB3106-005-Q1-K1-A9
cccacgcgtccgtccatatcctcttctcatgcaattcctccaatacacacttatcgggttcaaccctgtccttttcctttccacctcccattttcgaatttaaagcgttcaggtttggttaagaatcggcttattgctcgttgcacttctatgtccgatgaatttggttctgttaatgggttgcaattctcgcccaataagctttttgtggaggaggctattggggctgaatatggggaaggctttgagacttttagggcagatggaccactaaaagttgacgtggactatttgaatgagaaattgcaagatggttttcttcagcgcatacgctatgctatgaaaccagatgaagcttatggtctgatcttctcttgggacaatggggtggctg

SEQ ID NO: 24551 - DNA, 123 bp, Glycine max
  Clone ID: LIB3106-004-Q1-K1-G5
cacacgcatactcctcaatcattcatatacatattcacctacactaatccatcagtttctataaactgaatcagtctccttaacacatgcgcaggggcctttcattactccacaactaaagtc

SEQ ID NO: 24552 - DNA, 312 bp, Glycine max
  Clone ID: LIB3106-004-Q1-K1-G7
acgcaacgatggagttgcgtttatcaattctgttcctgaggtcacttactatgtcattatatcggatacgtttcgagcaatattgcatagtgcggatggtcttgctgatgaatgcttcttagaatcagtagcaaaggctcttctacccgtatgagtgttctctgctccagcagacagcctgtggcataagaactttgtggttgcagacaccatatcaaattgcatgaagatattcaaaggctccgttaactatgctcgcaccacggttcctacatatgcaagtgtcgtgattgcattcatccttcgctctac

SEQ ID NO: 24553 - DNA, 502 bp, Glycine max
  Clone ID: LIB3106-004-Q1-K1-G9
actcttaggatccccatccgtagcctcttaatattcagcaccatcaacagccatatcaacatcttattcaacgcgaacaccttttagatctcgtttatcttcctcagtaacccggctagtcattaaaattttaataccgatctcacaaaggtttttattggtaacagaaataatataacgcgttgccgctgtcacatctctagcaactgtaatttcgctggctgtatcagtaaacccctgaatataatcctgcgtttgcgtccctggtctgaattctgccttaacattctgaaagtttagtgaaccatcctgattcataacctgaacgtcatcaaaatataaatctttcaatgaaaagtctggatcaacttcaccatcataaacggctaaaagaattctgatcctgttaattgaaattatgttatcttccatttcaacaggtgtatgacgctttgaagaaccgcccttacttccatttatcatatttttgatcataactttt

SEQ ID NO: 24554 - DNA, 306 bp, Glycine max
  Clone ID: LIB3106-004-Q1-K1-H10
ctcacctacttattcgcttttcgctctatttcttaaattattaaccctattatatcactcttacatttttctttaaaataatctccatcctataccctcactatttcatcattttactctttatcatattactctaattcctccacttacttccatatattctactattatctattaccatattactattcaacctactacctcaatttcataattccaatataacccttcacatcttcatttactctcatcttactttctccaaaatattttaataactcctttttaatctctttatcattatta

SEQ ID NO: 24555 - DNA, 107 bp, Glycine max
  Clone ID: LIB3106-004-Q1-K1-H11
tcttccacccactcctccccttactcttactttcataattacacaacaatcttctttctcgcgttatgggttaatcctagattttctaactccacccattcacacta

SEQ ID NO: 24556 - DNA, 463 bp, Glycine max
  Clone ID: LIB3106-004-Q1-K1-H12
ggctcagttcaaaacgatgggtggatccttgaaactattgactacaaagatgcctcggagcctgaggtgttgagaatcaggggttttaaatttaacaaaattgagcagctggaaacgaaatactccgagcctggcaaatttcacttgaaggcttgaacatgcatctgtgtaaagaagttttaatcctcatgctacattcattattattctttgtctcttttttaacctgtctttctactctttggctctcatgttctaagcagtgggatcagaagttttgcagagtttctctcctctcccctcccccccaaccttttaggtgtttgatggggataaatgctgatgtactattttgttcataagttttgcccccacttcgattagagaaactatttatgcattcctagctcaatgtctaaagaatctgaatccatttgtaatggtgtgatagaaacttgagcag

SEQ ID NO: 24557 - DNA, 365 bp, Glycine max
  Clone ID: LIB3106-004-Q1-K1-H2
agaaagagaagcattagcaaaagcatgatgaactagtctaagcagaaatggcctcttcagggatggcgtctgtggccctcaaacgcggcccctttcactgttgagaagtcctcagttagaggccttccctccctctcaaggaactcctcttcattcagagttgtggccagtggtggcaagaagatcaagactgacaagccttatggaattaatggtggcatggctttgagggaaggagttgatgcatctggcatgaaaggaaagggaaagggcgtttaccagtttgtagacaaatacggtgctaatgtcgatggttacagtcctatctacgacaccaaagactggtcttcaaccggtgatgtcta

SEQ ID NO: 24558 - DNA, 373 bp, Glycine max
  Clone ID: LIB3106-004-Q1-K1-H9
tccctatccgtctgatcttaatcatcccataaacctttactttacttacttatttcatctatcatctaacttttctgttttaggtctcttattaaattttctaactccaccatatcacactcatatttttccaccatcttatctccatacaattccttcactatctcaacctataactctatatcacatttcactaattcctcaacttcctccctcatattctcctttcatctattaccatataactcttaaaccatccaaccatttttcatcatactaatatacccctactatccttcaatcactctctctttactttctccaattcctcttaatatctccttattcacctcttttactctattaaaaatct

SEQ ID NO: 24559 - DNA, 347 bp, Glycine max
  Clone ID: LIB3106-005-Q1-K1-A10
tcgcccacgcgtccggagctccagcagttttcaactgtgtggttgaaattggcaaaggaagtaaggttaagtatgagctggacaagacaagtggacttataaaggttgatcgtattctttactcatcagtagtctacccacacaactatggttttatcccaagaaccatttgtgaagacagtgatcctatggacgtgctggttctaatgcaggaacccgtgcttcctggttccttccttcgtgctcgtgctattggactaatgcctatgattgaccaaggtgagaaggatgacaagatcatagcagtttgtgctgatgaccctgagttccggcattacacagacatt

SEQ ID NO: 24560 - DNA, 375 bp, Glycine max
  Clone ID: LIB3106-005-Q1-K1-A11
gaaagaatggctgccaacacattgatgagttctgccatctcagccttcccatctctcgtttcctcctgaaaatccagatttgccgcagcagttcctctttccagctttgttgtcaccaatgcctcttcttctcgcttttccatgagtgctgattggatgcctggccagcctagacccccctaccttgatggttcagcacctggtgactttggattcgaccctcttcgtcttggtgaagtaccagagaatcttgagaggttcaaagagtcagaactcattcactgcagatgggccatgcttgctgttccagggattttggttccagaggcattgggcttaggcaactgggtaaaggctcaggaatgggctgcaatt

SEQ ID NO: 24561 - DNA, 337 bp, Glycine max
  unsure at all n locations
  Clone ID: LIB3106-005-Q1-K1-A12
catttttgcccaggtctgaagatgaaagggagatgtgctcaagaacaatctattgcaganatatcgacgagaaagcttacttcaaccgaagtcaaacccttctttcaatctaattgccgaaaaggtcattggttgaagcttcttggggaataccattattcaacttcaattggatttggtgaagtcccacttgccgaaaatgccattgccacttttaacctgaaccgggtgaacctggggtcaactgccattaagggtaagtccttcaagacccccatgcgcccttgggcctcttggtcccccaatgccctgaataatccttcttcgggttcctgct

SEQ ID NO: 24562 - DNA, 437 bp, Glycine max
  Clone ID: LIB3106-005-Q1-K1-A2
gcgattactatgaccttcataagggaggatgatgatgatcaagttgatgatgatgatgatcatgatcgtgtggatggtggtggatcacaaaacagtgccagcaacatcactgaaattgtgaccaccccagaaggggaaaacttaggagaatggctgagtctaggcctcaaaggagacatcaacatgccagcagaagaacaaaactcatcatcaaggcctctccacagcaacaacaacaaggtattctcatgcaacttctgcatgagaaagttttacagttcacaagccttagggggtcaccagaatgcacacaagagggagagagaagctgctagaagctaccaccaatctcatcatcacagaattgggttttcttacactacttctctggcaactaggtcactgggaattaagcctcactctcttgtgcacaggcc

SEQ ID NO: 24563 - DNA, 432 bp, Glycine max
  Clone ID: LIB3106-005-Q1-K1-A3
ttggaacacccccccaaaacaagccccaattatggctctgaatctttgtatctcaccgaactgtaaatgggtttcatctcctgcttccttagatagtgcatcttctttgagatcttcacttggttcttgttttggtaacataaacattgctagtgtgagtttaagcactagtagaagtttgagtttgaggaggagtgggagtgttagtgtaagatctagtttggaaactgcggggcccacagttacagtgggacaggtcactgaggttaacaaggataccttctggccgatcgttaaggctgccggggataaaaccgttgtccttgacatgtacacacaatggtgtggcccttgcaaagtgatggctccaaagtttcaagaattatctgaaaagtatctggatgttgtctttctaaagcttgattgcaacca

SEQ ID NO: 24564 - DNA, 435 bp, Glycine max
  Clone ID: LIB3106-005-Q1-K1-A4
gcggaaagagcaggaggaaagggggacttcagttatagccgtttctttgcaataggcctcggtcgtcgtcttgagttagcaaatgcaatggaaccaacaattttggaaaagctctgtgcggttttgaatgtcaacaaaagaagtgtggatcgggacttggatgtgtatcgtaacttgctttccaaattggttcaagctaaagagcttctaaaggaatatgttgacagggagaagaagaaaagagaagaaagggctgaaccacaaaagtctaatgaggccattacacaacaacaacagttttctagcctttagttatggggttcctttggaatgatcaccttgtgaagatttggtcttgacttgcttttttttttctgttggtctttggcatggtaatcagagtggggcacttctatcatcatggttttgcctact

SEQ ID NO: 24565 - DNA, 429 bp, Glycine max
  Clone ID: LIB3106-005-Q1-K1-A7
gtagcatggcaatgccatgcgtacgatatgttccctctccgaatgaacactggctatggtgcccgtactccggaggtgaaatgcgcaagttggaggcttgctgtggaagcacacaacatctttggctttgagaccattcctgaagagtgcgttgaagcaacaaaggaatacatccatggcgaacaatatagatcagactccaaaacagttaaccaacaagcttacttttatgccagagacctcgaagtccatcccaaggacacatttgtgttcagtatagatggcaccgtactctctaatattccatactacaaaaaacatggatatggggtggagaaatttaactcgaccttgtatgatgaatgggttaacaagggcaatgcaccggcactgcccgagactcttaagaattacaacaagctggtgtct

SEQ ID NO: 24566 - DNA, 434 bp, Glycine max
  unsure at all n locations
  Clone ID: LIB3106-005-Q1-K1-A8
cgcattgcactgtttncccttttctcttctcaccatcgtcattcacaccaccctgttctctgggatctcatcgccctcacaaacccttatatttacaccggcccactttcctatttgcaccatttcgttcagatcatagcgccgttcgagatcagaaaccggaaaaaataggtttttgattcgtggggttggttccaaatggcgtcattcacgatcccttgccccaagtgcgttgttgttccttttgctcatttgggactgaactctcagacccagcaacggaacgcgctggggttgaagaaatcgctctcatttggatctttgagtagtgattcggcgccaaatgggattcagtgccttaacaagaagcaatcttctgtctggaagcttcaagcacaaccaaaagaggctgttactgttgaaaattctgcacc

SEQ ID NO: 24567 - DNA, 332 bp, Glycine max
  Clone ID: LIB3106-004-Q1-K1-G4
tcttattctttcatgttccaaactaaaatggcatctaactctctccattactccatccaacaccacgaatgttcactcaccaaacgccaggacccctcagacaccccaccccccacatcacttttcctcaaaccccctacaccccccatacaccacaacatcactctctcgcacactccttcaaactcatatatcacctattccatctctcaaaccacaccttcctccaccacctcccaaaccaccccgtccttcgacctcctccgccaccatctctccaccaataactttcagctggccgatgaggagacgcgtcgtcttctcatcgtgct

SEQ ID NO: 24568 - DNA, 290 bp, Glycine max
  Clone ID: LIB3106-004-Q1-K1-E1
gtaagactatattgtatatgctaactcagactgaatatccatatataggatgattactatcatctcttagctcatgttatctgacatctttctaccaatgaatgcatattatctaccatacattcactttaataatgccagaatacgcaagactgtcagaacaaaccaagccaaagttgggtacattgagcctgctactgatttcaactatgaccacaaacatcttggtactggccctcaaacacttctcgaaattgctgaaggtcgtcacccaattttcaagacactct

SEQ ID NO: 24569 - DNA, 339 bp, Glycine max
  Clone ID: LIB3106-004-Q1-K1-E11
tctttatgtcctgctggatataacagggaccgagtgcttattcatccaccggacgtttactatatcagtcttgggctaattgatgaggatgcaatccccaaatatgaactcacaaaccatgatggtcggccacttgctaaataatacagcactgtactaatgctgcaacaccttgcaaagcaaacagcatactcaatgcttctaaccctaaaaaaagacgccgtttatgctctccctaataagctaccaactgctgctatagtacctgacatgacaccattccctgcaaacctttacatttctacactcacaccaccaatttaatgatatatttaaaaa

SEQ ID NO: 24570 - DNA, 401 bp, Glycine max
  Clone ID: LIB3106-004-Q1-K1-E12
tcgggccaccataaaccctataagagcatcaggatccagaaaccctgacggctgcggaccacgccgaattgaacggcggctatggaggaaacaacgattaagaggaagaggaggatctcactctcgaagaagagcccgtggagaagctcctggaaccgttcacaaaggatcatgctccactctatcgtcacgcacgccgtggatatgtttcccgaattcgtcgatagcgtgcgcctgcttgctgacgtggaccctgcgcacaggaaaatcttcgtccatggcacttggctgggacgccactgccgatactctaaccgacgtgttctggaaatacagcgagatcgaggattgcaaggccgtcacctacaaggtctccggtaaatcaaagggttacgccttta

SEQ ID NO: 24571 - DNA, 300 bp, Glycine max
  Clone ID: LIB3106-004-Q1-K1-E5
tccacctctacccagctcgtcctcccacacttccacccactcatccactaacacgtttacattactcaaccacctagccataaaaaaccgtaacgtttacaaacaacaactactgctggcatccaacccacttactcttacaaacttatttacacaccatcaacaacaacatcttcaacattttctaccatcactcattcaactatccattattaacccttcctcctacctacaacaacaacaactactatcatctaccccactcattcttaccaattcacctacataccatccacaaca

SEQ ID NO: 24572 - DNA, 351 bp, Glycine max
  Clone ID: LIB3106-004-Q1-K1-E8
gtacaagcctattccatatccagttcccgtgtataagcctataccaaatccgcttccgttttcagctatgattggtgtgggctagctgttttctcaatgagaaagccttcatctctgcaaagcgcacttttgcgctttggggttcccttgttgcttgttatcaccttctgttatgctacttctactgctgcatcaacaactcaagtttcatggaatgaatagctgccaaagacaaacctaaatgggcatgatgaataagcaaaattcggatcttttcatcataaaccaatattcatgatacatattccaattccagtatataaacctttaccaaaatcatttccagtgtat

SEQ ID NO: 24573 - DNA, 368 bp, Glycine max
  unsure at all n locations
  Clone ID: LIB3106-004-Q1-K1-F1
ggaatttcgatgctcagtcatctcttttaccattctcttctctcttgctcttgcaggagagagccatgtccgtgcatggctacctgaggaagattgttgggaagctgtttggccaaacactcccattcccactgcactgcgagagcttctaaagcctctccctgcaggtgttgaaatcgatgaactccctaagcaaattgatgatacacagtacccaaaaacattcttctataaagaagaccttcatccaggcaaaacaatgaaagtacaattcaccaagcgtncctatgcacaaccttatggtgtatatacatggntaacggatattaaagacacctctaaagaaagatatagttttgaagagatat

SEQ ID NO: 24574 - DNA, 460 bp, Glycine max
  Clone ID: LIB3106-004-Q1-K1-F10
cactctttaagatcccctccggacgcacgtataacacacgacctcacgaaactttaacaaacatcttcaatctaacgggaacctttactgcaattggccatctatcaaccattatcagcagcttcctctctttgacttatacaaatagttatcaccaaactaacaactaattccttctaaaatcatatcactcctgacacatctcaatacctctcaccaatactcacaacaatatgaatttctctgcctttggctacatcatcataattacccaagatcaaactattaattggatcatacatgcatcatctcgtatcatcggcattagtgaacgaatcatgcttcggcgttaaaaaacaatgttattcaatcgtttatcatattctgaaaatgttgatcttgattacactccatttcataaaaaattaacggcgcaccatttccattaaacccataacat

SEQ ID NO: 24575 - DNA, 461 bp, Glycine max
  unsure at all n locations
  Clone ID: LIB3106-004-Q1-K1-F11
tcttaattcatagtctcttggtccttacttccttcttctgctcaataagtgtgggccacggtaattaattaccacccgcttgtagacatagctcttctccctctgttctctattctctacactgtgaaaccaagatgaaggtagcatttgcagctgctctacttatatgccttgtcctcagctcctccttgttcgaggtgtcaatggctggttctgctttctgatcctccaagcgctcgaagaggcgttctagagctgggatgaatgacaggtgcatgaagttctgcgggatttgctgcaacaagtgcaactgtgtgccatcttggacttatggcaacaagcattagtgcccttgctacagagacatgacgaactncagggcaaagaccaatgcccttgatattcattttttcaccatcacacatagctttaaacctttgattcatcactaccgtgcatgt

SEQ ID NO: 24576 - DNA, 467 bp, Glycine max
  Clone ID: LIB3106-004-Q1-K1-F12
cccacgcgtccgcccacgcgtccgctagatattgaagcgtcttcagacttttattcaaaggagtgtaattcaacactttctcttttggatgagcttcgccacttgcaagttaaaaattgtgttaaaacaaaagctgctgaagatacagatgttgagtcagaaaaaatctcttgctcccaaactcaactccaagaaatggggaatactgatcctggcagagagaacatgtctttgcatgtgaaccgaacaaaagattggatgcagaagacatcagcacatgtaaataagctgttgagtgcaacatttccacatatctgtattcacccttcacaaaaggtgagaaagggacttgttgatgctataaaaggactcttgtcagagtgcttctacacactgggggaaagtagactgatgcttatggagtgcttatgtgccttggtcgttgatgtatctaatgatgtgtcttc

SEQ ID NO: 24577 - DNA, 296 bp, Glycine max
  Clone ID: LIB3106-004-Q1-K1-F4
ccactcgtgcgatttactgaagtgttcttgactggtttgcagaaagctacttcattttgccatggtttataatactcgagagtgctgtgaatataataacaatgtccagatagaaattgtgaagttagaatgtttattgtagggttagagtccatatataaaattgtgaattaagaatctttattgaaagatcataggcactcacaatctattgttttcattttggatataacatatttaatattttttaatggccacaagatataattaaatttttattgtataatatttattta

SEQ ID NO: 24578 - DNA, 467 bp, Glycine max
  Clone ID: LIB3106-004-Q1-K1-F7
ctccatttctcactcgccgtcgtctcttccgtctagggtttctcctcttcacaaaaatggttgccggaaaaggaactaagaagacccatgagagcatcaacaacaggctcgctctcgtcatgaagagtggcaaattcaccctcggttacaagaccgttctcaaatctcttaggagctccaaagggaaattgattatcattgctaacaactgcccccctttgaggaagtcagagattgaatactatgctatgttggcaaaggttggggttcatcattacaatgggaacaatgtggatttgggcactgcatgtggcaaatattacagagtgtgctgccttagcattattgatcctggtgattcggatatcatcaagacactgcctggtgaacagtaaagtattcttgaagttccttggcttgtattttctggtttaagttgtgattaaaactttgaagaatatcttgtt

SEQ ID NO: 24579 - DNA, 397 bp, Glycine max
  Clone ID: LIB3106-004-Q1-K1-F9
atcccctgctgactgacgcatcacacaccacacctgaaactttagcatttatcaacaatctccagggtaacttttctggaatttgcgattaatcaaccagtattaacagctcgctctccttgacttattcaaataactatcggcaaactaactgctaattgcttctaaaagcatgtgacgcctgacacatctcaatacctctcaccaattctcacaacaatatgaatttagcttcctttggctacatcatcattattacccaagatcaaactattaaatggatcatacatgcacattctcgtattatcggcattagtgaacagtttcatgcttgtgcgttaaaaaacaatgttattcgatcgcttatctatacattaaaattttgatcttgattaca

SEQ ID NO: 24580 - DNA, 294 bp, Glycine max
  Clone ID: LIB3106-004-Q1-K1-G1
cgtcgcagtagtcatgggtaaggttcatggatcacttgtatcgtgctggtaaggttagagggcaaaccccgagggtgggcaagcaggataagaagaagaagccacgtggccgcgcccacaagaggatgcagtacaatcgccgattcgtcaccgccgtggtgggattcggcaagaagaggggacccaactcgtctgagaagtgaggccgaggcttgaggaatatgttgctactctatttgatttatctctgttgttttttattaatttttaatctgtatgttttgattgtgttct

SEQ ID NO: 24581 - DNA, 472 bp, Glycine max
  Clone ID: LIB3106-004-Q1-K1-G10
ctctatatattcagcaccatcaacatccatatcaacatcatattcaacgccaacacctgttagatctcgtttatcttactgagtaaccgggctaggcattaaaattttaataccgatctcacaaaggtttttattggtaacagaaataatataacgcgttgccgctgtcatatcgctagcaactgtaatttcgctggctgtatcagtaaacccctgaatataatcctgcgtttgcgtccctggtctgaattctgccttaacattctgaaagtttaatgaaccatcctgattcataaccggaacgtcatcaaaatataaatctttcaatgaaaagtctggatcaacttcaccatcataaacggctaaaagaattctgatcctgttaattgaaattatgttatcttccatttcaacaagtgtatgatgctgtgaagaaccgcccttactgccaattatcatatttttgatcata

SEQ ID NO: 24582 - DNA, 382 bp, Glycine max
  Clone ID: LIB3106-004-Q1-K1-G12
accactcgttcgcccacgcgtccgacaactccaactatatgtgcaactacttgtgcacgggaacctgtactacatgcttcgctgcacgctatcataccactaacatgaactaccacatgcactacgttattcactattgatgctactctaaagtcatccttaatattattatgatgcttatcactactcttatggacacttacttctacgccatttttcaaaacggactccacttctataggacgaatgctttcgttctcgtgaatgcaagtgcatatctcactatatgggtcacctatagcgaatgctatgaccgtctatgtacaacatgtatcctagataccctaacgtgctacccaacttattacccttcttaatcatc

SEQ ID NO: 24583 - DNA, 178 bp, Glycine max
  unsure at all n locations
  Clone ID: LIB3106-004-Q1-K1-D8
ttctctcacctgaaaatgtcttgctgctttggtttctgtccttgcggaagctcctacaagggcaacgtcttctttttaaactgcgagatgtacccacacttgatctacacctagtcaaccaccacctanacctttctcatggtactctcagttaatgctcaattctagagtgctgaaa

SEQ ID NO: 24584 - DNA, 164 bp, Glycine max
  Clone ID: LIB3106-004-Q1-K1-B3
ttaatgtaaactcttatattatgatcattctaaactaaattttctttgatgcacattcacttgcctttatcaaaaacttaccatacttcatcctctactatcaactccaatttcatttccaaatacctccttcaataccaaccacttctacattcaacttacct

SEQ ID NO: 24585 - DNA, 351 bp, Glycine max
  Clone ID: LIB3106-004-Q1-K1-B4
gcgcccacgcgtacggttaccacaggagaccaagaatggtatctaccacctagaaaaggattccgatctcctaatggcaacgtaaaaattatacagttgcgtacagacattaggataacgggaattccaaaccccactgcccaccccatgttatcttgaatatagacaacaacagttaaacctatcagtgatgacattgcaacaatagcatagtaccagctgaagtagctctctttgattcctgcatttttgtccctcttactcaactgatcaacaccaaaggccaaggaggatgatcttatgccttcagcttcaatggacatgagggcaaaaaaggaatgcagaatcaaa

SEQ ID NO: 24586 - DNA, 443 bp, Glycine max
  Clone ID: LIB3106-004-Q1-K1-B5
gaagaacaagcaacagagaactaacaacgacatacaaatcacttcatcaatcatatattgcccacgtatacgcactgctaactgagcctgtgccggcatcgtatctatactcacacaactcacatacactcatatatctcacattattataacatacatttacataacctatacttctaaccaccaatgccgaatgcatcaaatatacatgatccaacaagctaccacaaccaacatgcaaacattataatacttgtacctccatcaaccttcacacttcttaaaccatctaccttacgacaataggaacgtacggaacattagctcacaccaactaccacagcacgacatctacaacctcgattgctactaatacccactttatactcttacattcatacaactctatcattcgaccacctatcttcatttgcactcaactt

SEQ ID NO: 24587 - DNA, 200 bp, Glycine max
  Clone ID: LIB3106-004-Q1-K1-B6
agtcgtgcgcccacgcgtccggaacaccatgatgaagcgctctgtcatgatgcacgctgagaaaaccggaaacagtgcctagctcaaccttatacccgtggttggcggcaatgtgggattgattttcaccaagggtgacctgaatgaggtcagtgaggaggctgctaagtacatggttggagctactgctcacgttggtt

SEQ ID NO: 24588 - DNA, 409 bp, Glycine max
  Clone ID: LIB3106-004-Q1-K1-B7
gcccagcccatctgttgagcctagcccatctgccaaggtctgtgagccacatgctgttattgctggcttcagtgactaaacaacagatgactcaatgaggatccacattttttttgtttcttttttaaggaaaaaattcggttacagtttcttaggtgttgttctctagtcagaattggagttttatttcgacaatttacgtaataaaagttttcattaaaggtttatacagattgtcgaagtgaggcttaattttcatagaagaacagcacaaattaaaaactagctaagtcttctccttaatatttattttctttaattctcttcattgctggcttggtttggagacacttgcaacatgtttacattttatccacctgttacttgtattgaaatttattaatgtatt

SEQ ID NO: 24589 - DNA, 145 bp, Glycine max
  Clone ID: LIB3106-004-Q1-K1-B8
tcaaaatcactcaagcccagattcaaccatatatacttttaacccaatgctatgatgtttcaaaattgagatcgttaaatataacagttactgcagcccacaataaccctctacaataacattatctcatatctattatcaacac

SEQ ID NO: 24590 - DNA, 384 bp, Glycine max
  Clone ID: LIB3106-004-Q1-K1-B9
aaaactttttgtcaattcatttcttagggttagactctgcttctttctccaacggcacacgcaaaaaaacatggcaaaggagagaacaattggtgtggctctagatttctccaaaagcagcaagaatgctctgaaatgggcatttgacaacttagccgataaaggtgacaccatttatgtcattcacatcaacccaaactctctatactagtcccgcaacaagctatgggcaaaatctggttctcgtgagtatcaattttgtgccaattttatttatttgggtttctatattctatattgtatatttgtctgtgaacatttcttttatatctattgatctgagtcgatctgatctgatccgattttattttgcttaatgtaatt

SEQ ID NO: 24591 - DNA, 355 bp, Glycine max
  Clone ID: LIB3106-004-Q1-K1-C1
tccctatcgaccaggcgtccgaatataaaaaaaaaaaaaaaaaaaaaaaaaaaaaaaaaattaaaaataaaaaaaaaaaaaaaaaaaaaaaaaaagaaaaagttaaaaaaaaaaagaaaaaccaaaaaaaaaaaaaaaaaaaaaaaaaaaaaaaaaaaaaaaaaaaaaaaaaaaaaaaaaaaaaaaaatcccccccttaaaaaaacccaaaattaccaaacccttatatcaaaacaaaaaaattctaaaaactacccccaaatataaataaaataccacaaataaaaaaactctcccccataaaaaccctaaaaaaccccaaaaaaaaccacttccaaaaaaaccccatttcccc

SEQ ID NO: 24592 - DNA, 381 bp, Glycine max
  Clone ID: LIB3106-004-Q1-K1-C10
actctatagatcccccgctgacgcaaccatacactttaaccttcatcctctcaccttctgtttcatctaaacaacggctattgcacagcttcggctattttctaaccggaatcagtcatagtgatagcgatgaacaatctacctacatcatatctgctattgaatactatcctaataaataccatgaaattgattataatctaaacattgatcaccgttccacttcaatcatgcatactcacatattgccagcaccttaaaacctcaatatcgaatcttattcgctatttgttcataacgcttagcacataaacaatgcacgtttcatgtgataaagttgaatacacaattctctatgaaatgcacatgctaaaacacaat

SEQ ID NO: 24593 - DNA, 414 bp, Glycine max
  Clone ID: LIB3106-004-Q1-K1-C11
aatcctgagagcatgccttgctctagctgaacatgcatcatcgatcttgcctgcgaataagaacatatcatttaggaataaggagagatgaggaaactcttcagccaactatatatttgaacaagttacccgagaaatttccagaaggatcgaaagtttttgtggttgatcctattctggcaacaggtggcactatagtggcagctgtaagcctcttaaaggaacgtggacttggcaacaagcagattaaagcgatatctgctgactctgaccctccagatcttcaaaagctgatcgaacagttccctgggcttcatgtgtataactggaataattgacccccaacttaatgaaatagggctcataattcctggccttggacatgctcaggaccgtagctttggtacatataca

SEQ ID NO: 24594 - DNA, 443 bp, Glycine max
  Clone ID: LIB3106-004-Q1-K1-C12
cccactcgttcgtccacgcgtccgttttgctctttcttcaagccaacctcttcgcaactgggtgttcctttcttgctctcactctcaccatgattacagtaagcgtaagatggcaaaaggagattttcaaagatgtagaacttgacactacccagtctccttatgtttttaaatgccaattgtatgatttgactggtgtgcctcccgaaagacaaaaaattatggtcaagggtggtcttttgaaggatgatgctgattggtcaacagtaggggtgaaagagggtcaaaagctaatgatgatgggtacagctgatgaagttgtaaagactcctgagaagggaactgtttttgttgaagatcttcctgaagaagaacaagtagttgctgctgggcatactgctggtcatttcaacttgtgaaacacatgttatatgaattcaaca

SEQ ID NO: 24595 - DNA, 273 bp, Glycine max
  unsure at all n locations
  Clone ID: LIB3106-004-Q1-K1-C3
tacttgacaaggtggaaactccatgcactatcattcaaaccaaaaaggatgcacttgtgccacacaacgtagcgctctacatgaagaacaaaattaaagggaaagttactttagagatcatagatacacttggccatttcccccatttaactgcacaccttaagttcgttcaagtgctcaaggctgctctagcttcataaaacgaggaataaatatataaaacatgttantttaatattttcttaacgcatacttttatggtgaatttcctct

SEQ ID NO: 24596 - DNA, 134 bp, Glycine max
  Clone ID: LIB3106-004-Q1-K1-C4
cctccccctggttccgttactactgtcttcccaagtgcttccaaaatcccgggaacgattacaacaacattttcggcttgaactttaacctaaatctccaaaataaaaatgaaaatgaagggaaggaaggaaaa

SEQ ID NO: 24597 - DNA, 274 bp, Glycine max
  Clone ID: LIB3106-004-Q1-K1-C5
ataatcaactgtcaacaatcttccactataccttttaaacgtgcatcaaaaaataattttagtaatgttatacataaaaaggcttgaaagatatcaaatcctgaatagactacaacctctaaagcggatgaaatgtactcctatggatcagatcattacttcactgtaatattcaatgaaattattacaaaccataataaatctaacaaaaatacaaaatcaatttccatattatacattctaaacaaatatataaacttccattatacaaaac

SEQ ID NO: 24598 - DNA, 391 bp, Glycine max
  Clone ID: LIB3106-004-Q1-K1-C8
cccacgcgtccgcaaattttttggtttggggatagatagagtgatacgcgtcacattttcataatagtaaaggaatggcagcggcggcggcagtgactgtgctactcccacctaggattccgaccaccaccaacgttacccgctgctctgctttgccttctctccctcctcgcgtctccaacaccaaaaccactttgttctcaccttccctcaacaacttttcagtgtcccgaaaatcttctctgcttcagaccagagcttcttcagaggaatcatcctcagtagatgccaatgaggtgttcacaagattgaaagaaaagtgggatgctcttgaaaacaagtccacagtacttctttatgggggaggggctataggtgctatttggctatc

SEQ ID NO: 24599 - DNA, 454 bp, Glycine max
  Clone ID: LIB3106-004-Q1-K1-C9
aacttgcatagactattgattaagaaagctattgtcattgatttgctagctccaacaatggcttctagcagattatcattcgttttagtacttgtgcttgtaaccttttcatccatgatcattgactcaagggttgcagaggcacgtaccctgccaaaatcagccttattgccttccaaagttgatatacctactgttgttcctcttccactggtggcaccactgccaaatttgcctgttactctacctccagtgcctgaactacctgcagtacctaaagtaccaattcctgaagtaatagttaataacgccaaaataatcccttgagtacctatgatctatccagtcactactacttattttgtcacttgctaaattaacttgctgctgccatcccaaggtggatctggttctgttggggttcaatttctgacattcaattacatgctatgct

SEQ ID NO: 24600 - DNA, 52 bp, Glycine max
  Clone ID: LIB3106-004-Q1-K1-D1
gagactcttacggagaatatgaagttggttgctgcattagttgctgcagcat

SEQ ID NO: 24601 - DNA, 469 bp, Glycine max
  unsure at all n locations
  Clone ID: LIB3106-004-Q1-K1-D12
cccacgcgtccggttttcttcagaaatttgccatcgttgagagaagcgtgagagccttaggcgttcaagatgagagctaagtggaagaagaagcgcatgaggaggttgaagaggaagcgccgaaagatgagacaaagatctaagtaggtgcttgagcaggagttgagatgagctttccatctgctaccagcctcatgacattttaggctgttatggctcttatgatcttgaggtctagtcgctaggggagcttcactcttgacttagtttgctttactggtcctggtcctggtccaagactattgagtgtgggttaagttgtgatgtttagtgttttgtggtatctaattatgtactggtntttatactttttggttgaatagctatatattagtatcgagacttncatgaaaaattgatcctattgtatgcttgaagtgacctctaatcgttagctcatatataatgc

SEQ ID NO: 24602 - DNA, 169 bp, Glycine max
  unsure at all n locations
  Clone ID: LIB3106-004-Q1-K1-D3
nccgaaatggcttctgcttctgttcccatggctttctcgctgagcttctgttatcaccaacaacaagccttcagccaaagccttcttcaggccactacccctacggcaaccaaagaggaccttctttaccacaaaggcagtgtcaaactccaaggctcaaatcaatgca

SEQ ID NO: 24603 - DNA, 275 bp, Glycine max
  Clone ID: LIB3106-004-Q1-K1-D4
aatatcacttctacttcagttgccatcacatacaatctgatttatgttctacacaacaacaaacattcagccacgttcactttcataccactaccactacatcatccaaaaatcaccctctacaccacaaattctctctcaaactctaatactcaaatcaattcatcttttaactataacgcaacctcatcactcacatcaactattgttacaccatatatactacatccatatcttcctcatactcctaaataagaattcttcccttccctaaa

SEQ ID NO: 24604 - DNA, 305 bp, Glycine max
  Clone ID: LIB3106-004-Q1-K1-B2
tccacgcgtacggtgaaatccctgatcctgaattctcgtaatcctactgtctgtcacgaccatccactacaacgactccgacatacccaaaaaaccgaaactctcttccttggaaatcgaatcagaattcggccaccacgactcctccgtcgcccgcattaacaacggcagcttcaggtgctgcccggcctccatcctctccgctcaacgccgctggcagctccagtaccttcgccagcccgaccacttctacttcaacgacctcaaatccgacgtcctccaatcccgaaccttaatcaaggacc

SEQ ID NO: 24605 - DNA, 391 bp, Glycine max
  Clone ID: LIB3106-003-Q1-K1-G4
ttcccggcggacgcacgcgtacgcccactctttctcctacgcgttcttgaatatttacctcatctgcaacgtatcaatgggagactgcttcatatagaactctgacccaaaaaactactgtcctgattctcgcacatgccgtacctgtctgaatacacatgtactgatcaagaaaaatgaccttatgtgctgctatcactgcttccttaacaataccaaggaaatactcttcatcaagtacatctaaaagagcacttgtcaactactgaccaatatccaattctgccactactatatttttaaaaccttatgtttgaagaaacttgagactgtattttttaatctaagtaactatcatactttatttgtgatactattacacactctatat

SEQ ID NO: 24606 - DNA, 213 bp, Glycine max
  unsure at all n locations
  Clone ID: LIB3106-003-Q1-K1-G7
ccctcacttccaccaattctttcttttattttaacctcatcttcttctactcaaaggcagatttctacataaggaactctcgcccaatnatctaccttcctaatccactcactttccctgtcatgtgttaattcacacttactcatcattacaacttccctcatttttctcattcacaacttacaaaacacaaccatataaactccctaaatc

SEQ ID NO: 24607 - DNA, 271 bp, Glycine max
  unsure at all n locations
  Clone ID: LIB3106-003-Q1-K1-G8
accacactctttacccttcataccctcttttttaactatcatnaacctcaattatggaagttttattaaaaaactaatatcccctatatatccttcttcaaattactctcaactgtaactattttaactctccaatttatattcttaaatttatttcataatatttttctttacaatatatctatcataacttttcctaattcaatcactccttatctaacttacatattttatattatttatatttacttttactaccatattttacttc

SEQ ID NO: 24608 - DNA, 426 bp, Glycine max
  Clone ID: LIB3106-003-Q1-K1-H10
aaaagaaccgttgatatagaacataatatggagattattaaagaacttgaaagttggagtggatgcacgctatgttataaggccgttggcggtagaaatggctacaaagttgcattggagacattggataaacatcagtttgagaacccattggagcggcttggtttatttatcaaggaagacttcaccacagatcttgatgaggaggttttgaacggaggctttgaagaaggggaaatttttaactgaatgcaccttcatgcagttctgccagctctaagtgtttatatcccttttagacatggaaacagacaattattgtaaatgcacatattgtttggaatcaagtctttcgactatatctgccttattaccctcttgtctgggaattagattactacacaacgcttgcaattttgttttaac

SEQ ID NO: 24609 - DNA, 346 bp, Glycine max
  unsure at all n locations
  Clone ID: LIB3106-003-Q1-K1-H12
cccacgcgtccggcactctgcaactccctccaatttagtttgagccttanaggcattgttgtttggttggatagatgtctgatctgaagatgagtgcgtcgaggttcattaagtgcgtcaccgtcggcgacggcgctgtcggcaaaacctgcttgttgatttcctacaccagcaacacttttcccacggactacgtgcccacggtttttgacaatttcagtgctaatgttgtggtggatggaagcaccgtaaacttggcatttggggatactgctggtcaggaagattataataggcttagacccttgagctatcgaggagcttgatgttttatacttgccttttc

SEQ ID NO: 24610 - DNA, 195 bp, Glycine max
  Clone ID: LIB3106-003-Q1-K1-H2
tccgtttctctctttccttaggagggtggatggtttggaaaaatggattcttgccattttgaagggggaaaaaaaacccttggaaagggaaattgtaggtgtccctttccttgaattttaaaacccaaagaagcaaaaggctggagttacctgaaggggatttgagcaaattcctttgcttggggaaattgaaaa

SEQ ID NO: 24611 - DNA, 204 bp, Glycine max
  Clone ID: LIB3106-003-Q1-K1-H6
agcccacgcgtccggcactctgcaactacctcttttatagaacgggcaaagacacgatgcaggaagcgacgaatgtgatgataatcggtgccggaacttctggtatcgccaccgccggttgcttaacgaagcaatcaataccttacataatgctcgagagagaagactgtttcgcttcacttgggcaaaaatacacctacgatc

SEQ ID NO: 24612 - DNA, 166 bp, Glycine max
  Clone ID: LIB3106-003-Q1-K1-H7
ccgggccgacccacacaacgcccactctttccttttctcatacgatcttttatatatttaaccaaaggttcacgagggggtcatgaataaactgtgtgaggaaagaaaaaaagataaactacttacttaaaattcaagaaccaacaaaagcacggcctttatacaa

SEQ ID NO: 24613 - DNA, 397 bp, Glycine max
  unsure at all n locations
  Clone ID: LIB3106-003-Q1-K1-H8
gctatctttctccctttatctataacttttcaactacttttctaaattctaacctatgctgcttttacaattgggacgactccaacntttcttactcttacccaaaaaactactatcctccttctcacacttgcccttgttttttaaatacacatttacttatcactactttttgtcttatacccttcatgcattactcccttatcaattccaatgaaattgtcttcatcaactataccttaaatatcatttttctactacaaaccaatattatattctttcactaacatttctttatgatgttattttttaataaactttaaactttttttcttcatctaattaattcttaaacataatttttaatccttacaatactcttatttaaattctcttt

SEQ ID NO: 24614 - DNA, 470 bp, Glycine max
  unsure at all n locations
  Clone ID: LIB3106-004-Q1-K1-A10
cttctattctctgagaaagttcttcctgaatcttgaaggttcttcaacaccctggttaaggaattgaagagcatggaaagtgaccagaaagtccaaatagcttcttggagtgaggtcatgtcaggtgctggggtggagtttcatcaaggggctcctaatttgggacaaggtggtggtggtggccttcagagacaacctagtatgaccaagaacaattgtctttgttctccaaccacacattctggttcgtttcgttgccggcttcaccgctcccctagccttcagaggaccaaaagcatggaatcagagtccctcatggatcacgcatcaaaagtccatgcttcaattgttgatgctgttgctgatgccaacatggatccagtgcattgatcttctgatgaattgaatgttaaaatgtcattaagctgccatatgttttacttgtgtgtangcgtggcatgtttactttc

SEQ ID NO: 24615 - DNA, 463 bp, Glycine max
  Clone ID: LIB3106-004-Q1-K1-A11
cccacgcgttctaccgtgttgcctctctgctatctacagccaaaatgcctttcgagaggggcgttgatatcgggagggttgcccaaatcaactactgcaaggaatatggcaggctcgtcgtcattgtctacgtcattgaccagaacagagctcttgtcgatgcccctgatatggtgaggtcccaagtcaatttcaaaaggctttccctaaccgatattaagattgacattaagagggtccctaagaagaaagatcttgtcaaagccatggaggatgctgatgttaagaccaagtgggagaagagttcatggggcaggaaactcattgtcagaaagagaagggcatccctcaatgattttgataggttcaagataatgttggccaagatcaagaaggcagcggttgtaaggcaagagcttgctaagctgacatagagcgcttaagcatagcttcacattatagt

SEQ ID NO: 24616 - DNA, 199 bp, Glycine max
  Clone ID: LIB3106-004-Q1-K1-A12
tcttcctaaaaaaaaatataaaaaaaaaatttaaaaatttataaaaaaaaattataaaaaaaagattaaggaataaatttaaatagaataaagactaaaaaataaaaaataaaaattataaactaaattaatatcaaaattctacattatacattaataaaaaaaattactaatataacacaaatatattaaaaatatc

SEQ ID NO: 24617 - DNA, 155 bp, Glycine max
  Clone ID: LIB3106-004-Q1-K1-A2
cccgtgtcgacccagacgtgcgcccactcgtcctaccacgcgttcgattcattctagttctttattcctactagccacgttgactcggatcctggattcgttctcaattatctggtagtaaggaatagcttaaaggcacattacaatgaatgcat

SEQ ID NO: 24618 - DNA, 154 bp, Glycine max
  Clone ID: LIB3106-004-Q1-K1-A3
catgatctcgattcccattccatggcttccattgaatcatcccctttcaagaaaattcagattcagagtggttacactacatatgactgatatgtggatggaaaagaggatgctcctggaattgttgtgattcaggagtggtggggtgtgaatt

SEQ ID NO: 24619 - DNA, 222 bp, Glycine max
  Clone ID: LIB3106-004-Q1-K1-A4
aaacagagcaaagagagagtgtgtgaaaagtgaaacaatttacagaacaacaatggcgacacttaatgttcctgcacctgttccaaccgttgcggaggattgtgagcagctccgaaaagccttctcaggttggggaactaacgaggagctgattgtatcgatcttggctcataggaatgctgctcataggaagcttatcagagaaacttatgcccataccta

SEQ ID NO: 24620 - DNA, 189 bp, Glycine max
  Clone ID: LIB3106-004-Q1-K1-A6
aataatggaaacagaagtggttgaagatattgtgatttttggagctggaattgctggccttacagcatcctgaggacttcacaagttgggtatgagaagtttgatgctagaatcttcatacactttgagtgtcactggtttttgctcgtcaatattgtaaaatgcttgcaaggcattgcatactttttt

SEQ ID NO: 24621 - DNA, 319 bp, Glycine max
  Clone ID: LIB3106-004-Q1-K1-A9
actcatacttttgtcctctttgatgctgcattagcgttgttagcatggccattccatgaccgatactgccaaaatttccctgctccaaatgaaaactggctattgtgacccttcttctcatgtaaaatgcacatgtcttacgcttgctgcgtaagcccacaacatcctatcctttaaaaccattccttgatagcgcttttaaccaacatattactacattaatctctaacaattaatatcacactcttaaacatttaaccaacaatctttcttttatgctacttaactcctaattcatcacatctacatatttatattc

SEQ ID NO: 24622 - DNA, 173 bp, Glycine max
  Clone ID: LIB3106-004-Q1-K1-B1
tggctttttaagttgctgtttaggatttttcatcttattagtatacaggctgaaggtttaagattttactttcaactgagtgtcttcttttctgagtggccattaatgtaaactcttatattatgagcattttaagttgaattttgtttggtgcacatgcacttgccttgatc

SEQ ID NO: 24623 - DNA, 423 bp, Glycine max
  Clone ID: LIB3106-004-Q1-K1-B10
cccacgcgtccgcccactcgtcctgatgtatctcgatcttcttcttttgttgtggtgcgcgtgtgcttgttttgggtctcacctgaaactgtcttgctgcggtggtcactgttgttgccgaagctcctgcccgtgccgcaacggctcctgaggctgcacgctgcacccacacttcagctaccctgaccgaaccaccaccgacacctcggtcatggtagtggcacctgttaacgctcaatttcacggcgctgaaacgggagtgcccgctgagaacgacggctgccactgtggaccatactgcatctgcaacacctgcactagcaactgaactgttaccagagcacagctacacgcatagctagccctaaattcgcaataatgatcaactcataatcgtgtaatcataacctatgcattatgtat

SEQ ID NO: 24624 - DNA, 325 bp, Glycine max
  Clone ID: LIB3106-004-Q1-K1-B11
cccacgcgtccggttattcgaatgtgctactccttttaaggcataagagtcttgggttggctgtctttctcttacatattcgtatatgctaaatgttcatgggttcacaagtacaggtgtaatttgtggtaaagttctggaagattgcttatgtaattatactgaataatcatatccggtagcgtaaccgcaatattattaacaccgcgctacgatatgaaggatccgatgtctcattcttactcatcctacaatctagatcatccatagtgaaacatacgttccactgactacccttcttttatcgcctttcctactgttaaaa

SEQ ID NO: 24625 - DNA, 469 bp, Glycine max
  Clone ID: LIB3106-004-Q1-K1-B12
tacgattcgttttgccccttttgttgccctaatttcaaccatgcctcgccgtagctccggtggaagatctgcccgtcctgctcctcggtcagctcctcgtcctgctccagttcaccatgctcctcctccagcccctgctcagagtggcggtggatctatgcttggtggcattggttcaaccatatctcaaggtatggcttttggcaccggaagtgcagtggcacacagggctgtggatgcagtcatgggtcctcgtaccattcaacatgaaacagatgttacagaggctgctgctgctgcccctgcacccactgcaaatacttttggtggcgatgcatgcagcattcatacaaaggcattccatgattgcctgaacggctatgggaatgacattagcaagtgccagttttacatggatatgcttgcagaatgcacaaagaactctggagccacgttgagcatgtaactg

SEQ ID NO: 24626 - DNA, 202 bp, Glycine max
  Clone ID: LIB3106-003-Q1-K1-G2
ccaaaaaaactacggtccctggttctcgcacttgccgtgtgtgtggggaaccacatggactgatcaggaagtatggccttatgtgctgcatgcagtgcttccgtagcaatgccaaggaaattggcttcatcaagtatcgctaaaagagcagttgtcaactactgaccaatattgtgttctggcactaggatgttttgaggat

SEQ ID NO: 24627 - DNA, 261 bp, Glycine max
  Clone ID: LIB3106-003-Q1-K1-C3
atgtctatcttatctattgcctcaccaacgtacacgatgatcaatttcaatctcaattaatcgacagccattgacatgttctttgacggctcacgcgagaagaagagggaaagggaaagtggttatgagcatggatgcaagaatgggagcgacgggcaccaaattggagctgacgagctatttctaatccaaccgacaggttagacctgtgactgtcttgagcctcaaagaaaggctcatcgagacccagatcaaaactga

SEQ ID NO: 24628 - DNA, 398 bp, Glycine max
  unsure at all n locations
  Clone ID: LIB3106-003-Q1-K1-C5
caccattaatgtcnaacaaatttaccatttcaagtccaaggccgacgccggggcctccaaaacctaccgtcagcaagccggtaccatccgcaagaacggctacatcgtcatcaaaggccgcccctgcaaggttgtggaagtttcgacttccaaaactgtaaagcacggtcacgctaagtgtcactttgttggaattgatattttcactgccaagaaacttgaggatattgtgccctcttctcacaactgcgatgttcctcatgtgaatcgtactgattaccagctcattgatattgctgaggatggatttttgagtctgcttactgaaaatggtaacactaaggatgacctcaagcttcccactgatgagagtctgctcactcaaataaaggtatgat

SEQ ID NO: 24629 - DNA, 336 bp, Glycine max
  unsure at all n locations
  Clone ID: LIB3106-003-Q1-K1-C7
tacaccgaactattatacatctattaangacattcttttatcgacctcacagttctcctttgctaagtttatcacaaaggggcgggccgcttcccacattttttccccttttactgtcttaatatacatgacttactcccccaccccttatactcatctttcacatttccttcacttttatcaacctttaaaaacccaactcacacatattttgtcacctttttcttcttagactcatgaaacgtataattaccttccagtccatgataattcaactttcacccatgaagtattataccctctactgaacacatgtgattcttcctttcctatctt

SEQ ID NO: 24630 - DNA, 257 bp, Glycine max
  Clone ID: LIB3106-003-Q1-K1-C8
ataacctactccaccaccacttataccatcttacacatttccttcatttctcatcaacctgacaaaatccaacccatcaaaactttcccacctttttcttcttatcctcataattctcataaccaccttccctacccttacatttcaaatttctaccatcaaactttatacccttcaatcaacacttgtaattctctcctacctatctcctatcctctcacatccccatacctttttcacacctaaataccaccata

SEQ ID NO: 24631 - DNA, 276 bp, Glycine max
  unsure at all n locations
  Clone ID: LIB3106-003-Q1-K1-C9
taaactccttntcctccccaatgtttcaactagtctatataaaatataaatatcacgtttcacattttttatctaaacttattgaaatttatcaaccactcctttactcgtacattctaaacatatactgtttcaatcttcttaaagttttctttttattatatatgaaaaaacgaaataaaacttgcttctttaatttctattttcactgattacactcacctcctctctatttaggacaatttcttcatttaagataaaacaattcctacaact

SEQ ID NO: 24632 - DNA, 350 bp, Glycine max
  unsure at all n locations
  Clone ID: LIB3106-003-Q1-K1-D10
tcttctctttnctcctttttttttccccccctaaccccctcccncacgaagatttttttaatagtccgcccccccccccccccccctntncccttctttcttttctcccttcttcctccccctctcccctttccctccaccaccacattctctttttttcctccccccatctcccccctctcccccctttttcttntccttcccctcccccctctctctcccccctctttcccctctctcccctctcccccctttcctctccccccttctccccctctttctcctccctccctcactcctccttctctctcccccctccctctccctttttctttccactctcctccctc

SEQ ID NO: 24633 - DNA, 398 bp, Glycine max
  Clone ID: LIB3106-003-Q1-K1-D12
cccacgcgtccgctagaaacagtgtgatgaaaatgaaggtccttgttttcttcggtgctgcaattttggtagcatggcaatgccatgcgtacgatatgttccctctccgaatgaacactggctatggtgcccgtactccggaggtgaaatgcgcaagttggaggcttgctgtggaagcacacaacatctttggctttgagaccattcctgaagagtgcgttgaagcaacaaaggaatacatccatggcgaacaatatagatcagactccaaaacagttaaccaacaagcttacttttatgccagagacctcgaagtccatcccaaggacacatttgtgttcagtatagatggcaccgtactctctaatattccatactacaaaaaacatggatatggg

SEQ ID NO: 24634 - DNA, 280 bp, Glycine max
  Clone ID: LIB3106-003-Q1-K1-D3
tgctacaagatttacccatacttaaactacacctagtcaaccaccaccgataccttggtcatgggagtggcaccaattaaggctcaattcaagagtgcttaatatgatgttcccactcagaacgatcgctgctaattttgatctaactgcacctacaacccctgcacttgcaagtgaagtgttggaaagctaaatcttcaaacatatatcgcccttagaaataatgataaaaactatatgtaatttcaaaacttcaaaaatatgtaatatgtattatgtt

SEQ ID NO: 24635 - DNA, 97 bp, Glycine max
  Clone ID: LIB3106-003-Q1-K1-D8
ttttactttatctacacctaaataaccaccacccacacctttatcatcttattttcaccattctcatctcaattccataattcttaaattcctttct

SEQ ID NO: 24636 - DNA, 262 bp, Glycine max
  Clone ID: LIB3106-003-Q1-K1-E10
cttctctctctttcccctttctttctttcttcttcctccccccccttttttttttacctctcttcccccctcacccaccccctttcctccctcttctttctttttcttctctctctctcttcttttttcctttcctccttcttccctctttctttctttttcctcttttctttttctctctttcctctcttccctctctcttttcttctctctcttttctttcccttcctcctttcttcttcttctttttcttccccttttc

SEQ ID NO: 24637 - DNA, 127 bp, Glycine max
  Clone ID: LIB3106-003-Q1-K1-E12
gcacctcgcatgagaactgagttggtaccattagagaggctaccagattatctgttaaatagactgaagttggataaatagtcaggataaaagaccaagaggtattatgaaacagacacctctgctt

SEQ ID NO: 24638 - DNA, 446 bp, Glycine max
  unsure at all n locations
  Clone ID: LIB3106-003-Q1-K1-E6
cccactcntccgcagaaatagttacactcatagtagtgaacaacaacagcaacaacaacagcaactttgcaatgtgttgtattgtttcttaatgcacttttttttggcatcaaagaggttaaatccatggattctgattatggtattcccagggaactctcagatcttcaaaagattcggtcgttgtaccagccagagcttcctccttgtctccagggaaccactgtgagggttgaatttggtgatgcaaccaccactgctgaccccactgatgcactcaccattagcagggcgtttcctaacacctatggacaccctttggctcactttctcanggcaactgccaaagtccctgatgctcaaatcataactgagttcccttctattaaggtggggattgtcttttgtgggagacaatctcctggagggcattatgtcatttgggg

SEQ ID NO: 24639 - DNA, 297 bp, Glycine max
  Clone ID: LIB3106-003-Q1-K1-E7
atcatcaaacaagttaaatccatggattctgattatggtattcccagggaactctcatatcttcaaaagattcggtcgttgtaccagccatatctttctccttgtctccagggaaccactgtgagggttgaatttggtgatgcaaccaccactgctgaccccactgatgcactcaccattatcatggcgtttcctaacacctatggacaccctttggctcactttctcagggcaactgccaaaatccctgatgctcatatcataactgaattccctcctattaaggttcagattgtt

SEQ ID NO: 24640 - DNA, 364 bp, Glycine max
  unsure at all n locations
  Clone ID: LIB3106-003-Q1-K1-E8
cttacacanatatctnatctctcttaaaaaaaaacaacaaccccnccaggaccggctccctaacaatttatgatatcccccattanccctctattctttcttattaaatactattataccataccctctttttctcatatatccataaaactattatatcttctacttattacttcattatacctaccagatcttcttacttatctacataaaacacctgtcatttcttaatttactaatacaaccaccactcctaaccactctacttcacttaccatcatctaactttttactacacctatgttcaccctttttctcactttataagccccacttccaaattcccttatactcacatcataac

SEQ ID NO: 24641 - DNA, 425 bp, Glycine max
  unsure at all n locations
  Clone ID: LIB3106-003-Q1-K1-F1
aaaacaagcagtgtcacgcagctgaatcatattcactccaaaaaattaaaaaaagctcagagagagagaatgggggggagacaaatcccagaccctgggaactttaanaaatacggcgttcctttctactccgttgcgtggattccccaacacgttgtcaaatcgcgccaaatcgaaaccgccggtaactacctgctgttcgccggcggcggcggagcaggccacagcggtatccccaatgctttggttattgcgcacttcgatgtcgcgtcgaattctctctctgatcaaccggtgtgtaagctaggaactgattctgaattgccttataggatggcacttaactctaatggtgatggccttatttgtgcaatggaaacgcccatggtttgcaaatggtttgactgggatcaaaacaagagctc

SEQ ID NO: 24642 - DNA, 454 bp, Glycine max
  Clone ID: LIB3106-003-Q1-K1-F11
attcccggcggacccacacaccgacctccatttcctttatgtttatggttttttcgtgcaacagtaaagaccaagcagagacagcttttaaaaattgcgggtatttattaacatcaatgtttcatgcattatctgcccctagcttttgtttaagctatcccgttaaccttcattatcctccttctttatttcaaaaaacatgtttttctattcactgttctttttcacacacaaaataattatctaaaattgaatatactccttgtctcattattgacttgtgcaatccttgtaacaaataccatgtcacaattcacaatgtttgatttgaaataattcatagcctttctccagcacaacgtattcacatgaacacaattcattcaaaatccctcattcgaatatgtcctatttttcaaaaaccaatttttccttccatatcccctaacataca

SEQ ID NO: 24643 - DNA, 86 bp, Glycine max
  unsure at all n locations
  Clone ID: LIB3106-003-Q1-K1-F12
ccgtccatcctcgttactctctaccccttgtttttaaatcccctgcnactcancacatacgtacttcttcaccatcggcggataaa

SEQ ID NO: 24644 - DNA, 380 bp, Glycine max
  unsure at all n locations
  Clone ID: LIB3106-003-Q1-K1-F5
cttcttcnttccccggttgacatccattaatatgtgcgaatgcccacnataaccatattttcctaccgagtcaactccatgacgatgactcattgagttgcactgctaccgacccaaaccttaactacaagccggtgatcggaatcctgacccaccccggctacagtgcctctggcctgctcatcaacgccaccggtgtttcttacatctccgcctcctacgttaaattcgtggagtccagtggtgctagagttattccccttatctacaatgagtcacctgaaaaccttaacaagaagctcgatttggtcaatggaatgctcttcactggtaggtgggctgttttctgtccatatttagatacttttggaaacattttt

SEQ ID NO: 24645 - DNA, 153 bp, Glycine max
  Clone ID: LIB3106-003-Q1-K1-F6
aacggcaactactcggatagttctaaaacttcttgtttaacatggcttgtcatgtttgccatgacatatgtatttgtcatggttattcttctaatccgtgtcacagtgtaaaagaaatgactttcaatataacttatcccattaataagcttt

SEQ ID NO: 24646 - DNA, 331 bp, Glycine max
  unsure at all n locations
  Clone ID: LIB3106-003-Q1-K1-G1
tcatttttggaacgcctcttatacctgacctcttaggtatcattgcaggacatctgtactacttttttacagtgttgcatccactagcaggtggaaagaacattttgaagactccaatgtgggtacataaattaattgcaagatggagaattggagtgcaaccaattagccgtgggccggctgctaataaccctcagcaagagaggggttcgggagttgctttcangggaagatcctatcgacttggtggatagatgcaattacctgatcagctggttcatcttcacttattggttatagacatgacaccactgacaaatgaagctggaca

SEQ ID NO: 24647 - DNA, 444 bp, Glycine max
  Clone ID: LIB3106-003-Q1-K1-C2
cactattatacaactataataataacggctgcatagatagcacacttagccattagtatgcaacgaaaaccgcaacactttgatttttctcttatctccttttctcttctataaatatggctcatctgagccacaagaccttggtttatcttccagaaatgaggcctgaacatgaagctgaggaaggccaacccagaaaaagtcttggttctttttcttcttggcctcatcgtttggagaatgttttccccgtttatgccatgggaacttccaaccctgcagtcttggattcttcacttcacacttctgattgtcttgatcctatttgggatgctgtcagagaagaagccaagttagaggcagaaaaggagccaattttgagtagcttcttctatgccactattctgtctcatgattgcttggagcaagcattggcttttgctc

SEQ ID NO: 24648 - DNA, 399 bp, Glycine max
  unsure at all n locations
  Clone ID: LIB3106-003-Q1-K1-A10
ggaatttccggggggacggacgcgtncgaagaataataagaagaagcaagagatagagaggagagaatatggcgaccacacgcggttggtttggcactatgttgagcacctccttccttaanaggcaggcatcantgaacatgacaagcttcaaggctaacgctgctgtctttggtgtaaaaagaggacgaggaggtcgtgtgagggccatggcaacttacaaggtgaagctgataactccagagggagagcaagaatttgaatgcccacatgatatatacattcttgatcaggcagaggaaaatggcattgatcttccctactcatgcagggctggttcttgctctgcatgtgctgccaaagttgtgagtggcaaactggaccagtcagatggtagct

SEQ ID NO: 24649 - DNA, 360 bp, Glycine max
  unsure at all n locations
  Clone ID: LIB3106-003-Q1-K1-A11
acctcgccacctcatgattgatgatatgcgctctatgtgaggtctagagatggtggagagctcatacactnacctttcaccatgaagatgaaaccatcgacgtgggaactgtcaagaaaatcaaatgttgagagatacaggtgttgccagcggaaatagatcgaaaagtatcagaggtgatgaagttctgttccgagatggcaaatcacgcccattcgactaaattgttttctgcacacgcttgaagaaatcaactgaaaagtggcttcagggggtgatgatcctctaaatataatgagaatggcttttccaaagttcagagttccaaaattattggaaagggcgaaaccgttttgtttt

SEQ ID NO: 24650 - DNA, 418 bp, Glycine max
  Clone ID: LIB3106-003-Q1-K1-A12
ttttcctttctccctccttcttttttctttttttttgggcctctttttataatttaaattaaaaaaaagaagtttttttttaatttttgacccaatataaaaaaatataattttttttttattttttttttttttctttttcttttttttttttatttttttttttttttctttctttccctctttttctttttttttctttctttcttcttttttcctttttttttcccctctttttcttcttctcttttttatctcttttttctcttcttttcctttcttctctttttctctttcctccttttttctctccccttttttttttcccttcttttttctcttctttttttttttctcttttttttttctttcccttttcttttttttttcttttttcctttctcctttttttcttttt

SEQ ID NO: 24651 - DNA, 307 bp, Glycine max
  unsure at all n locations
  Clone ID: LIB3106-003-Q1-K1-A2
cgcgaccgaatttatccattcaccacanagtttcttcaatggtccagcctcaaccagagtcccacgccgccagtggctcacacgagccagtgctcaaaatcccaaagctccaccaaaacggcgacgtttccgcaaccgctccctttctccgcgtcaagaagctctccgacaaggccgttttgccctctaaggcttcccctctctccgccggttacgatctctctagcgcggtggagacgaaggtcccggcgagagggaaggctctggtggccactgacatcagcatcgcgattccagaaggcacata

SEQ ID NO: 24652 - DNA, 333 bp, Glycine max
  unsure at all n locations
  Clone ID: LIB3106-003-Q1-K1-A3
cccacgcgtccgaaaaccctgaaaaaagaactcagncattgttggtttactttccattgagggaggcgaaagctttgttttttgtgcgatcattttccattgggtggaagaaagtctcaacctttagtcgaaagagcaaggatctgagtgagtgagcgatcatgtgtggtggtgcgattatctccgacttcattccagcgggtcccgccggcggtgcgcatcgcgtgaccgccgacatcctgtggccgaatttgaggaagcggttctcgaagttcctgctggacgatgatttcgaggcagggttcagagaattcgaggatgactcggaaatcg

SEQ ID NO: 24653 - DNA, 163 bp, Glycine max
  Clone ID: LIB3106-003-Q1-K1-A4
taaaaaattgaaaaaaccccaccaactgagaagcctcatagtggccaaatccaatggcagtgactctgctgatgttcctgaccgtttgatttcagcactttgctacttttaccctttctttgatggcatacagtatggaaaatatgtaatcacacagttctac

SEQ ID NO: 24654 - DNA, 245 bp, Glycine max
  Clone ID: LIB3106-003-Q1-K1-A5
cttcaactgctccattctcaccttcggtccccacgccgtctactatcctgccacgcgctcatctgaatatgatacactcggaacctctatcaaagtcgctgctgcttatctagcaacggcattagtgaagattatttggctagctacttctatcaaggtttcggagagagatagatatgatccggatcaggagtttgtgaaggcattaacaggctgaatagatgtcgttgggctttataccgtct

SEQ ID NO: 24655 - DNA, 398 bp, Glycine max
  Clone ID: LIB3106-003-Q1-K1-A6
attcccggtcgaccacgcgtacgacacgcgtccggaccacccaaaaacctactagttccatggtgggctatggaaccacctgccggcaaagggttcatcacagaggttcatccattgtttccatcaaggttaacccttcatttgtaagctgccgtggaggttatgctacatggtttagcagcaaaaggagcgaccccaacctgctcactggtgctcttgttggtggacctgatgcatatgatgactttgctgatgaaagagataactatgagcagacagagccagcaacatataacaatgctcctcttattggtattctggcaagactaggtggaggtcatggtggctataaccagcttcttccagttgttgttccagctcctaagcctgctgttacc

SEQ ID NO: 24656 - DNA, 353 bp, Glycine max
  unsure at all n locations
  Clone ID: LIB3106-003-Q1-K1-A9
aaattctccagccatgacagtttcttctttatctgcttcctccaaacttatactagtgncgccatgcttcatggtttggcctgatctccacaccctttcgttncttcaccaacacccacaaactatcccctctttcctccttcttcctccaccactaccaccaccttcccgtgccgtcccctcaccgtccgcgccgcccgcggcaagttcgagcgcaagaagccccacgtgaacatcggcaccatctgccacgtggaccactgcaagaccacccttaccgccgtcctcaccattgtccttgccgccctcggcaacaactcccccaaaaaatacgaacagatccaccccccccc

SEQ ID NO: 24657 - DNA, 356 bp, Glycine max
  Clone ID: LIB3106-003-Q1-K1-B1
acgcccactcgtccggttccagacagtgtcgaataataagaagaagaagatggcattgggtagtccggctcttcccctgagatacgtggctcacgttctggcacttgttgccagcatcttggtcgtgctctgggtcctcaattttaggggtggcttggcttgggattcttataacaaggccctcatcttcaatcttcatccagttcttattgtcattggcttactagtccttgggggtgaagctattataagctacaaagcattacccctgaagaaggaagtgaagaaattgattcaccttgttttccatgccgtcgcattaatacttgtaataatttggaatttattctgccttt

SEQ ID NO: 24658 - DNA, 273 bp, Glycine max
  unsure at all n locations
  Clone ID: LIB3106-003-Q1-K1-B11
ctaatggaggctttgctgctaagcagagaccacttactaaactctgagaagcaccacganaatgttgatatagtgccaaaacaaaagcctcaaacactggattccctgttttcaaacatgaaagaacaaacaattttatttttgtcaattcaaaataatgttttgcaacccaatttacgttgaaataataagctcccattgataaaaagcccatcttccaactaaatttctcacaccattgtcaatttcattatatcacccttttaacctata

SEQ ID NO: 24659 - DNA, 364 bp, Glycine max
  Clone ID: LIB3106-003-Q1-K1-B2
acgcagatttggttattctctatttgtgtgctcaatatggagggaatcttttcgttgattacggggagaccgtaatgtaggggagtcggatcttcctcaactgctgaacaggttatcgaaggaattgatgccagcaacctcactgcaatcatcacaggaagagccagtgtcatatggttggagacagcacgtgttctggcaattttaaaggcccatgtcataattgctgccagaaacatggagtctgcaaaggaagctaaacaactcatacttgaagaagacgaatcatctcgtgtggacataatgaagcgtgacctatgctcattgaaatctttcagaacctttgttgacaactttattactc

SEQ ID NO: 24660 - DNA, 214 bp, Glycine max
  unsure at all n locations
  Clone ID: LIB3106-003-Q1-K1-B3
attgatcatctactangaangaatctcatttaaaatcttacagttttaaaggtttcaaatttatttttttagccactatgaaatcctacttacatagataatgtacacgtcattttatcggaagacttgactgtgcatccaagaaaatatttcatctgctacggaattatccctaatattgttcactgtcatttgctccaaacaatctcatttc

SEQ ID NO: 24661 - DNA, 371 bp, Glycine max
  Clone ID: LIB3106-003-Q1-K1-B6
caataatcatgtaccacctgaagtgtctgttcccagaggcggatgataccgggacagatttattgatggatttgttggccctctgacaagtgttgctccaatgtttccctgttatgagaatacatcagagtgggatgattttggagaggtcataaatccagatgattatgtaattaaggatgaagacatggaccagacagcaatgcatggaggtgatataaatggaaaactagatgaaggtgctgcaagtttgatactcgatacaaatccatcaaaagttgtatctgacgaaaggactgtgcaagtgaggtgctcattggtttacatggattttgaaggacgttcagatggaatatccattaaaaatattc

SEQ ID NO: 24662 - DNA, 170 bp, Glycine max
  Clone ID: LIB3106-003-Q1-K1-B8
atttcctattcgcttctattataattggaatttatagttttgtattacacccaattaatgtttacagctgctgtattttatttttacctgctgtcctataatacacatgtaacacctttattattgttataacttattttcttctcctttcatcatctattttctctcct

SEQ ID NO: 24663 - DNA, 409 bp, Glycine max
  unsure at all n locations
  Clone ID: LIB3106-003-Q1-K1-C12
cccacgcgtccggatcgagataactagaaacagtgtgatgaaaatgaaggtccttggtgggttcgttgctacaattgtgggagcatggcaatgccatgcgtacgatatgttccctctccgaatgaacactggctatggtgcccgtactccggaggtgaaatgcgcaagttggaggcttgctgtggaagcacacaacatctttggctttgagaccattcctgaagagtgcgttgaagcaacaaaggaatacatccatggcgaacaatatagatcagactccaaaacagttaaccaacaagcttacttttatgccagagacctcgaagtccatcccaaggacacatttgtgttcagtatagatggcaccgtactctctaatattccatactacanaaaacatggatattgg

SEQ ID NO: 24664 - DNA, 463 bp, Glycine max
  Clone ID: LIB3106-004-Q1-K1-G11
aagcaagcctgccctaaaaattgaacagggcagagagcaagggcaagcgagtgaacatgggaacctctgcgaacgctgtcgcaggtggtcgtggcggcgcccctgtccccaaagacgtcgactacgctaattacttctgcacctatgctttcctctaccaccagaaggagatgctctccgaccgcgttcgcatggacgcttacttcgacgccatttttcaaaacaaacgccacttcgctggcaagactgtttcggatgtggggactggaagtggcattcttgctatatggtcggcacaagcgggtgcgaggaaggtgtatgcagtggaagcaaccaagatgtcagaacatgcgcgtgcacttgtcaaagcgaataatctccaggatgtagttgaggtcattgagggatcgatggaggaaattaccttgccagagaaagttgatgtgatcatctctgaatggat

SEQ ID NO: 24665 - DNA, 354 bp, Glycine max
  Clone ID: LIB3106-004-Q1-K1-H1
aaacagtgtgatgaaaatgaaggtccttgatttcttcgttgctacaattttggtagcatggcaatgccatgcgtacgagatgttccctctacgaatgaacagtggctatggtgcccgtactccggaggtgaaatgcgcaagttggaggcttgctgtggaagcacacaacatctttggctttgagaccattcctgaagagtgcgttgaagcaacaaaggaatacatccatggcgaacaatatagatcagactccaaaacagttaaccaacaagcttacttttatgccagagacctcgaagtcattccaaggacacatttgtgttcagtatagatggcaccgtactctctaatatt

SEQ ID NO: 24666 - DNA, 404 bp, Glycine max
  Clone ID: LIB3106-005-Q1-K1-E4
tccacgcgtccgcttcaacaaagaatatctggagatggatgtgatgtgatcaaacaagaataacaacttctttaactgttttctcaaaaatgttctcaaagctacactcacaacactcacaacagcctcaaccttttcaattctctcgggaatgtcaatcctctaaagaggatgatatcccaagcacttgtgatcaaaataatgagaccacaagtgaaataatgcggcgccctagaggacgcccatccggttccaaaaacaggcccaagccgcctctcataataacgtgcgagcccgagcccgtcatgagcccgttcattctagaaatcccgggcggaagcggcgtcgttgaggccctagcccgcttcagccgcagaaagaacaccggcctttgcgttttaacc

SEQ ID NO: 24667 - DNA, 385 bp, Glycine max
  unsure at all n locations
  Clone ID: LIB3106-005-Q1-K2-E4
cccacgcgtccgcttcaacaaagaatatctggagatggatgtgatgtgatcaaacaanaataacaacttctttaactgttttctcaaaaatgttctcaaagctacactcacaacactcacaacagcctcaaccttttcaattctctcgggaatgtcaatcctctaaagaggatgatatcccaagcacttgtgatcaaaataatgagaccacaagtgaaataatgcggcgccctagaggacgcccatccggttccaaaaacaggcccaagccgcctctcataataacgtgcgagcccgagcccgtcatgagcccgttcattctagaaatcccgggcggaagcggcgtcgttgaggccctagcccgcttcagccgcagaaagaacac

SEQ ID NO: 24668 - DNA, 387 bp, Glycine max
  unsure at all n locations
  Clone ID: LIB3106-005-Q1-K2-F6
cccacgcgtccgcccacgcgtccgcgcccttttttttttttttttttttgtttttttgtttttttttttttttttttttttttttttttttttttttttttttttttttttttttttttttttttttttttttttttttttttttttttttttttttttttttttttttttttttttaagggaaataaaattaatttaaattataataaataaaaaaattttaaatggaaaaatattttttttatgaaaatagtataattttttgaattgnaatttaaaaaaattggggagaggggaaaaatttatgaataattgaatttaaaaaatatggtaattattaattttaaaaggtagtataaatttataattttaaaaaaaaagtttttt

SEQ ID NO: 24669 - DNA, 358 bp, Glycine max; identical to SEQ ID NO: 24473
  Clone ID: LIB3106-005-Q1-K2-H11

SEQ ID NO: 24670 - DNA, 398 bp, Glycine max
  Clone ID: LIB3106-005-Q1-K2-H8
cccacgcgtccggttaggacttaggtggttaaaatattggacaaaatgattgtcaacgacagtatatttgttggggtgtctgctttttgtctcctgcctcctacatttcaccaccccctttatccttatctcctctcttcttcatttgttctgctcttcccctctatttaaagctcacacaaagggatcatataccttggttgcactttggtaaggtgagagaataggaaaaagggaaatatggcatttgcaggaacaactcagaagtgcatggcttgtgacaaaacagtttatctggttgataagttgacagcagataaccgagtgtaccataaggcttgcttcagatgccaccactgcaaaggaacactcaagcttagcaactataactcttttga

SEQ ID NO: 24671 - DNA, 285 bp, Glycine max
  unsure at all n locations
  Clone ID: LIB3106-006-Q1-K2-A3
gaannnccggggggaccgacgcgtccgagaacatgagcataaatggataccctttatattatctatctttatattaggtatcgagggtaaagatatccgatgtgaatctatttgtttagttttctatcggtatgtatataggtgaataatccaacatgcctttttgtgaagtaaaaaaactaccctcgatccatgcctcaaaagggttgataataagtaaaaaaaatcaatgaattcatgataaaacccttctgcgtgtttttattataaatttttttgtcaata

SEQ ID NO: 24672 - DNA, 301 bp, Glycine max
  Clone ID: LIB3106-007-Q1-K1-A7
gcgctcaagcgttcgcttttacccattcattctctttcaactttatcttcaattccatcatgggggaccaagcccagtcatctgatgctaagggaaccaatagagactttaacacggcgatcctggaacgcaagaaggcgccaaacctgcttgtcgtcgacgaggctgataatgatgacacattacgcccggtgcataatccccacactatagagaaactacagctcttacagcgtgacactattctgctcaagggaaagaaaaagaaggatacaatttgtatcgcgcttgcggatgatac

SEQ ID NO: 24673 - DNA, 448 bp, Glycine max
  Clone ID: LIB3106-009-Q1-K1-C8
gacggagacggcggaggatggcggcggagagaggacgacgagggcgtggggggtggtggttcaggggaagggcgtcgggtgcggcccggtttgttatcttttaaagaccgttcgggtcgggtcaggacccggttcgggaatggggatttgttcgacccatttttgtttggtgaaagtgaaggacttcagggaaacggtgcagtcgcagctaaaaaattgttggcttttgcagagccagtgccagtggaataactataaatgaatcaatgaaaatattcaatattgtacatttttttctcattgagtaatttttttttggtgccacggttgttgcaattattatagccaatagattttcgactgtgaaaatgtacagagtgaaataccttttaagggaagttcgtcttcttcaaactgtcaaatattattattatttttgcattactat

SEQ ID NO: 24674 - DNA, 452 bp, Glycine max
  unsure at all n locations
  Clone ID: LIB3106-009-Q1-K1-D7
cccactctttcttccacgcgtccgttcattttttcttattaaaaaaaaaaaaaagagaaagagtttaataaaaaattaaaaaaaatataaaattatatttatttaaaatatttaataaaaaatatttaaaaaaaaaaaaaatttaaaattaatttaaaaaaaaaaaaaaaaaaaaaaataataaaaaaaaaaaatttgggctctccttttttaaaaattcaattttttttactttttttttcaaattttttatttttttttttttcccctttaatttatttctttcccccggttttttaaatttcngaacgaaaaaatcctttctttttcaaaattttttatttttttaaaaaatttttcttttttcaatttttttatttattaaaaaatcttatccttttttttttttaaatattttcccctttttttttttttatttttctctctttttt

SEQ ID NO: 24675 - DNA, 284 bp, Glycine max
  Clone ID: LIB3106-009-Q1-K1-F3
aaaaaaaaaaaaaaaaaaaaaaaaaaaaaaattaaaaaaaaaaaaaaaaaaaaaaaaaaaagagaaaagggcaaccaatataaaggaatcacaaacttacatacacatacatgcaacgtcgtcccttttatatagtccaacttaaattcacttcactgcccgtcattttacaacctcttgactcgcaaaaccctatctttacccaccttaatcacctcgcagcacatcccaaatttccccagcttgcctaatatagaagaggcccaaaccaatcgcctttccca

SEQ ID NO: 24676 - DNA, 447 bp, Glycine max
  unsure at all n locations
  Clone ID: LIB3106-009-Q1-K1-H2
tacaaatagtaaatcgaggtccccatttaatgataaactttccttccatttttgttcctcgagtaggcctagtatttccggcaattgcaatggcttctttatttcttcatgttcaaaaaaacaagattttttagatacagaaaacaaagtaaaattctggggttttttattccccaattataatactaaattcaaaaaaaggagagtaatgagtataatctttcgctcagacgatgtactgatatattctatggcggaggttcgaagaacaagcaatttattttgggccgttttcactttgttaggttcattggggttattgttcgttgcaatttccagttatcttggtatggatttgttctttatttctgagaaaaatagtganttttcttttatntccgactttatttatttccatttattccacaaagggccacgatggctttt

SEQ ID NO: 24677 - DNA, 403 bp, Glycine max
  Clone ID: LIB3106-010-Q1-K1-B10
aggcctactcgttctgtaacaagcataagcattgaggaaacgtccattagttattgtaaagtgcgaacgctgcttttgaatgtgattctacgtttacctttcatcactggaacagcattacgtgatcaaatatatttcgagctatctcatgaacctctgctatcaacaattgacttgttatccactctactctcatctaaaaatgccagcttcactttggactctatgctttgtaaaccgaagcaccattttaacttgaacgtatttgatcagacttagacactgcaagccagatactcctcatctagacgcacacaactgggctcatcttgttcctaaaataacgggctaaatagtgcggtctattcttcaagtggctctacatgatcacattaaatttttt

SEQ ID NO: 24678 - DNA, 369 bp, Glycine max
  Clone ID: LIB3106-010-Q1-K1-E3
cccacgcgtccgcccacgcgtccgtatgttttgatcctctaaagtgcagacagagggtgcagtttgaagtgcaagtgggaaacattgacaagaaattcaagaactggttataacaaatccctagtttgttatccatctgaaacccatttatcaacactactttttactgttgaaagcttaccttgcacttcgaaggatcttgatccataataaatatagccgtgagtgtgggatcaaccgatcaaccgtgtattctgtgatggacttacacagattgatagattactatttgtgactagaatatcgtttattgcgtgtaaactctgattaggtagaagtcaaaaaccttggattatatcaatttattcc

SEQ ID NO: 24679 - DNA, 425 bp, Glycine max
  unsure at all n locations
  Clone ID: LIB3106-014-Q1-K1-D9
cgtttcgaattcggctcgaccacgcgtccgccaatatagcccaagccctatacaacctaaccctaacacacacccatttgattcagtgtccatggctagcctcaaggttgcatttttggctgcagtgctctgcatggttgtggtgagtgcacccatggcacatgcagctatcacgtgcgggcaggtgacgagtagcctggccaattgcatcggttacctccagaagggaggaacgccgtcgtcgggatgctgcaacggagtgaagagcctcaatgccgccgccaagaccaccgccgaccgccagacggcgtgcaactgcctcaagtcggccgccagccaaatctccggcttcaacgccaacaacgccgnctcgctccccggcaaatgcggagtctccatcccctacaagatcagcaccttcacca

SEQ ID NO: 24680 - DNA, 355 bp, Glycine max
  Clone ID: LIB3106-014-Q1-K1-F6
cccacgcgtccgcccacgcgtccgtgcttacccatatttgcatatccgcaataaggaatgcccctggggtcccgatggactatttgaaacgaagcaccatgaagagcattagtggtttaatgaaggtatttgtggcactggtgggcattcgttttgtcaatgttcaacgaatagtgataatgatgattattgtgatttttgaaatgtgatctagaacttgcacttggcaacgttagtttgtcatgtgtttatctcatgttcgtttgtatggttgaaacaaaataaatttgtcaaacaatatgatgcttctttttatgcctattcttgttcagtaagatttttaaagatataattt

SEQ ID NO: 24681 - DNA, 227 bp, Glycine max
  Clone ID: LIB3106-015-Q1-K1-C4
tattgtaacacctaaattcaattcacaaaccatctttttacaacaactttactgataaaaccttaactttacccaacttaatacactttcattacatactcctatctccaattcacataatatcaaagactccctcacctatctttcttcccaacattttctcattcttaatggctaatttaactcaccctttacctactcattaaacacttaaaattttaatttac

SEQ ID NO: 24682 - DNA, 359 bp, Glycine max
  Clone ID: LIB3106-018-Q1-K1-A1
cccacgcgtccggctagggccgccctttatttttgtagtctgcacctaattatcttataggtcttcacgaagaatatgtatgtatctttcccgttttctgggtgaaatgaagaactgaaaggatctatcgatccatcccatattcaaccacacatagaacgagggaattgaattgggttagggttttgggaaagatgaaaaagaggcatgtggtccttaagcgagattacgccacgtcatcaccagcggtggggaatattcgatacggtgagtgccataagaatcatgctgcgaacactggaagttatgctgtggatggctgcatggaattcatggccagtgcccgtgaaagaacaaat

SEQ ID NO: 24683 - DNA, 317 bp, Glycine max
  Clone ID: LIB3106-018-Q1-K1-A2
gcttaccttacctgaagatggcttcggtgtcctttgccgtgggacttttaccttacgctgcagttcgatttcccgtattgagcaacgccaactcactgaaactcagttcctcagctagcatctctactccaattcttcagcaaaagctctgctctcttctttcccccctccctctaagccctcgccctcgccctctcaccattgtatccgctaagggctacaaaatgaaaacccacaaggcatctgcaaagcggtttagggtgaccggacgaggcaaaatagtgcgtaggagagctggcaagcagcatttgctcgtc

SEQ ID NO: 24684 - DNA, 216 bp, Glycine max
  Clone ID: LIB3106-018-Q1-K1-A3
cccatgcttacaatgaggacgcttctctgtccttttaagatcgtccaattccaaaggcgggtgacctgtgcataaacgggagcgggcaagacgctctcttcaaagagctccacggtcattttcaccgagctcactaacgcgcattagctcgccgcaacctaaaacgcctacttgcttgctataacagcaaccgctaatgttaccgcatataatagc

SEQ ID NO: 24685 - DNA, 299 bp, Glycine max
  Clone ID: LIB3106-018-Q1-K1-A4
gaagaccacgcgaccgccactcctacgatgtttgtgaatcactcagtaatgattactttaagaacaacatttaaagactaattggggacattcaataatatgattacattactttatcattaactgtctaagatgacattgccagatccgaatacaagaggagatcttataaatcgcattgctggaatgttgaatcctatcaatacagcatatttgaacagatatgatccactactttatactgtaaagagtatttcaaccctcatgcaatacactgatatataactaaatcgaaattt

SEQ ID NO: 24686 - DNA, 245 bp, Glycine max
  unsure at all n locations
  Clone ID: LIB3106-018-Q1-K1-A6
ccggnccggacggcccgactcgacccactcatcctatccttctaaagcgccagcgttctcccttcatattacttttaccttactctgcagttttatttacccgtggtgagcaatttccctcctactttaactctaatacccactaacttttttactccaaatcttcaacaaacgctctaatcttttctcacctcccttcctttaaaacctctccacttctccttttaccaatgaatacactcatc

SEQ ID NO: 24687 - DNA, 446 bp, Glycine max
  Clone ID: LIB3106-018-Q1-K1-A7
acccacccctcctacttttcacaccaccgacacaaaaggactctgctcatactgcccctgctttggcttctctgatccacgtgccatgccactggccaatacttctgtgttgacatacctcaaaggagcgaacaccactgcaagctacccctgcaagccacctgctaatgtcacttcagatgactttgtgtacactggcttaactgaagctgcaaatgtcacaaacataatcaatgctgctgtgaccccagcttttgttgctcaattcccaggtctcaatggccttgaactatctgcagcaaggttggaccttggtcctagtggtgttatcccactccacactcatcccggtgccaatgaactactcattgtgcttcaaggacacatccttgctggattcatatcttcaggtaacatagtttatcagaaggtgctgaaaaaaggag

SEQ ID NO: 24688 - DNA, 380 bp, Glycine max
  Clone ID: LIB3106-018-Q1-K1-A8
aagagctttgggaattactgaagaaggataacacttttgtgtacatgtgtggactaaaaggaatggaaaagggaattgatgacattatggtgtcattggctgccaaagatggcattgattggactgagtacaagaggcaattgaagaaagcagagcaatggaatgtcgaagtctattaatttctgttcacttgcacaaatatcatctcctactttatgctgcagcaagtctatcaaccctcctgcttgtgtagatatatgacgaccctgaattttctttgcgattttatactgttcatgaacaacttcattgccagtttactagtactaatttttgaaggaatgaatgccattaatagatgaaatcaacttcacttgggt

SEQ ID NO: 24689 - DNA, 368 bp, Glycine max
  Clone ID: LIB3106-018-Q1-K1-B1
cccacgcgtccgcccacgcgtccgaaatcaaggaactcagctatgactaccagagaaatgcttcaaaagatgaaggtaaaagttggtttgggttcatcagaccctgactcagggaaaggaaagagcaagatgtcaaagaacataactcatggttatcatttggtgaaaggaaaatcatatcatgacatggaggattacgttgtggctcaatttaagcaaatagataacaatgaattgggtttgtttgcaatattcgacggccatgcgggtcagaacgtacctaattacttgcggtcccatttgtttgataatatcttacatgagcctgacttctggaaagaacctgcagatgctgtgaagagagcata

SEQ ID NO: 24690 - DNA, 356 bp, Glycine max
  Clone ID: LIB3106-018-Q1-K1-B2
cccacgcgtccggggatagtgtacaagaggtaaacctcatttaaacctcattacgttcggaacattattgtaacaacaaaaaggaataataatttattctttttctttttcacaacaaaaaaaaaaaaaaaaaaaaaaaaaaaaaaaaaaaaaaaaaaaaaaaaacaaaaaaaaaaaaaacaaaatattccaagccttctgatgactatgactctggtttcaacaagccatcgtatgagtcttctggcggtggctatgaaggtggttacaacaaaacatcttattctagtgatgagccagcttctggtggtggctatgaaggtgggtacaagaaaacaggttattcttggtgggca

SEQ ID NO: 24691 - DNA, 301 bp, Glycine max
  unsure at all n locations
  Clone ID: LIB3106-018-Q1-K1-B3
gcgcgagataactagaaacagtgtgatgaaaatgaaggtccttgttttcttcgttgctacaaggttngtagcatggcaatgccatgcgtacgatatgttccctctccgaatgaacactggctatggtgcccgtactccggaggtgaaatgcgcaagttggaggcttgctgtggaagcacacaacatctttggctttgagaccattcctgaagagtgcgttgaagcaacaaaggaatacatccatggcgaacaatatagatcagactccaaaacagttaaccaacaagcttacttttatgcc

SEQ ID NO: 24692 - DNA, 293 bp, Glycine max
  Clone ID: LIB3106-018-Q1-K1-B4
gcgccgactcttgtgctttttaactgattccggaatgaattaattaattttcttccctaaaaggaataaaagtaacccatcaccattggcagaagaactaatctagctttctcagaacttctttccaccattgattgtaaacatttactaacaacttttaacacttacatgtactactacaagtgctcaacacatatttgcttacaacaaaatcctagtacacaataacttaatattaaatacttgcatgtgcaacaacacttattatatccccaaacatttaatatcacctt

SEQ ID NO: 24693 - DNA, 316 bp, Glycine max
  Clone ID: LIB3106-018-Q1-K1-B6
cccatttccataatcactttttcctactttcttctccatccatcccttgactaattaatggtccctcacaactaccaatggccgaagagaaacaccacaagcaccgcctcttccaccaccacaaggacgaggataataagccagtagaaaccgatactggttacgacaacacatcatattccaagccttctgatgactatgactctggtttcaacaagccatcgtatgagtcttctggcggtggctatgaaggtggttacaacaaaacatcttattctagtgatgagccagcttctggtggtggctatgaaagggg

SEQ ID NO: 24694 - DNA, 399 bp, Glycine max
  unsure at all n locations
  Clone ID: LIB3106-018-Q1-K1-B7
gcgtccntncaacagtggaggagacataatttaactgttgtctatcagaattatttgcgaatgggtgtgtggaacattggaagtgtacctttangctggctgactttctataacaagacagagttgttggatagacagtggcatgttcttggccttggttatagttcgaatgtcgatcgaaatgagattgagcaggctgccgctatacactatgatgggcttaggaagccgtggctggatattgcaatgggcagatataaaagttattggaccaaatttttgaattttgacaacatttttttgcaacagtgcaatctccaggcatagttcaaaattcaaagttacctttacctgacatgaccgggattctgcaattgtttaaagttctccatatctctg

SEQ ID NO: 24695 - DNA, 425 bp, Glycine max
  Clone ID: LIB3106-018-Q1-K1-B8
cccacgcgtccgcccttctccttctctctctctttttcgcctcattccattttcatctatgaatggctccagtagcagcagcatcttcagattcaatcaagccaagagatgtttgcatcgttggtgttgcacgtacaccaatgggtggatttcttggtactctgtcatctctatctgccaccaagctaggctctatagctattgaagctgctcttaaaagggccaatgttgatccatcccttgtggaagaagtattttttgggaatgttcttagtgctaatttggggcaagctcctgcaagacaagctgctcttggagcaggaatatccaattcagttatctgcactaccgttaacaaagtttgtgcatcaggaatgaaagctgcaatgcttgctgcacagagtattcaattaggcacaaacgat

SEQ ID NO: 24696 - DNA, 412 bp, Glycine max
  unsure at all n locations
  Clone ID: LIB3106-018-Q1-K1-C1
tgcntcantgggggagacagaatttaactgttgtctatcagaattatttgcaaatgggggggtggaacattggaagtgtacctttaggctggctgactttctataacaagacagagttgttggatagacagtggcatgttcttggccttggttatagttcgaatgtcgatcgaaatgagattgagcaggctgccgttatacactatgatgggcttaggaagccgtggctggatattgcaatgggcagatataaaagttattggaccaaatttttgaattttgacaacatttttttgcaacagtgcaatctccaggcatagttcaaaattcanagttccctctacctgacatgaccgggattctgcaattgttaaaaggtctccatatctctgacctccccaaaatttccatg

SEQ ID NO: 24697 - DNA, 328 bp, Glycine max
  Clone ID: LIB3106-018-Q1-K1-C2
ctcactacaagctgcagctaccttcatgcaacccaccaaggtgggcatggccactcgcagcctcaaatctacacaatgcatttctaaggcttttggcttggaacccgctgcagctaaactcatttgctcccttaagcccgatctcaaagattttgctcaaaaatgtgtcgacgccaccaaaattgcaggattcgcccttgccacctcagctctcgttgtttctggagcgagtgcagaaggtgttccaaagaggctaaccttcgacgaaatccagagcaagacatacttggaagtgaaaggaactgggactgctaatcagtgcccaacc

SEQ ID NO: 24698 - DNA, 245 bp, Glycine max
  Clone ID: LIB3106-018-Q1-K1-C3
ccctcctccggataggcaccaagctttcttaggaccaattagctgagtgacggtcttaagggatgatgaacttaccttgcattttgaatcctctcacacgcctaggatttcctgcaattgcaatggtttctatatgaccgcctgcacataaaaacaacactacttctatacatattactacgattacgattggggttaaattatttctcaattattatacgaaaatctaatgaaggagtgttgtg

SEQ ID NO: 24699 - DNA, 287 bp, Glycine max
  unsure at all n locations
  Clone ID: LIB3106-018-Q1-K1-C4
cccacgcgtccgggaacatgaagcatataatgttgttctgcagcatgtgaaagccaactgaggagttgctgcagcatgcctagatttgtgggttttagtttgaagttattgtatgagtctatttttgcctctatcatagggatattgatggtttagtacaattatacccgttctcattgttgctgagtgaatgcttttttaattactattggttttctgtgtttttaagactgacctgttgagttattaattgcttacacttcatgatagtccanacaaaaaaacac

SEQ ID NO: 24700 - DNA, 329 bp, Glycine max
  Clone ID: LIB3106-018-Q1-K1-C5
tatgacaataatatactttccgtacctatagctaatcgaaatactctgggtatctggggctcccaagttaatgcgggcccttattttgagtacctcttcaaattagccatttagatgaatgaataattttgcttttagaatttattgatagtaaaacttatctaagaactgtaaaaggttgagatatattcacataatggttagtgacaatgacgtctacaatcaggggaaactagcatggtatgaatattggtgatagtctaacggggcatttatctatatacttttactgcaacaaagcaatttccaggcattatttaaaaattaaa

SEQ ID NO: 24701 - DNA, 360 bp, Glycine max
  Clone ID: LIB3106-018-Q1-K1-C6
gcgtccgcccactcctccgggaacatgaagcatataatgttgttctgcagcatgtgaaagccaacttgtgagttgctgcagcatgcctagatttgtgggttttagtttgaagttattgtatgagtctatttttgcctctatcatagggatattgatggtttagtacaattatacccgttctcattgttgctgagtgaatgcttttttaattactattggttttctgtgtttttaagactgacctgttgagttattaattgcttacacttcatgatagtcgaaaaaaaaaaatgtttaagtgcaagtatctggcaatttatttatgtctcctaccatttttaatggatttatatatttttt

SEQ ID NO: 24702 - DNA, 283 bp, Glycine max
  Clone ID: LIB3106-018-Q1-K1-C7
cccacgcgtccgggaggcccaagcttccgtagcactaatagtcggtgtgactgggttgagggggctgagcctagccgaaacattgaagaaacccaattgtctcggaggcccatggaaagtttacggcgcagcccgcaggcccccgcctagttggttctctccttccatggtcgaccacttcatcacctttgacgctgaggactcttccgacacacgcgccaagctttcccccatcgcccacgaggtcacgcacctcttctgggtcacctttcagattcacgca

SEQ ID NO: 24703 - DNA, 342 bp, Glycine max
  Clone ID: LIB3106-018-Q1-K1-C8
cttgattcgaaaaggaaggaacttgagacttgtttctctcagagatggcgttgcctaaggttgatttcgaggttggaactgatggggttgctgtcatcactatgtgcaacccaaccgtcaatgctttggccattccaattatcatggggttgaagaacagatttgatgaggcagctaggaggaatgatgtgaaagctatagttttgactggcaaaggtggcagattttctggtggctttgatatcagtgttatgcagaaggttcaccagactggggattcctcgcatctccctgatgtgtccgtggaactagtagtcaattcaattgaagattcgaagaaac

SEQ ID NO: 24704 - DNA, 350 bp, Glycine max
  Clone ID: LIB3106-018-Q1-K1-D1
ggggcataccaggtctttgtccaacctatatttgggtttgtggaaaagtggagcaaaggaaattggacagaaagccaatttataaatggcgagcatactttgaacattcctctatgtggaagctacaatgtgaacttctttagggtagtgtggaggactgcatatgtgattatcactgccgttgtagctatgttactcccattcttcaatgactttttggcccttattggtgcactctctttctggccattgacggtttacttccctatagagatgtacattaaagaagtcaaatatgcaaagaattttcttcacctggaacttggctaagaatattgaagtggggttgg

SEQ ID NO: 24705 - DNA, 367 bp, Glycine max
  Clone ID: LIB3106-018-Q1-K1-D2
gcgcggacgcgtgggtgcccaacatgatatgtgaatttgaacttgggtgtggtgtattgcggtggctttagacaagaagatggatagcgatgctgcaacttcctgttgccggttgatgattgtctcttttgaggggatggttttgttccggctagatctagtttctattactgctctataaaactgattctggtttgtttccgtttttatgtataacctgttggtagggaagacaatataaaactgctattatttgaagctctaaatgtttgatccaaaacaaaaaaaacccccaaaatggcgtgccgtcttcaaggaaacaaagtcccccccctccttggattaaaataaaaaatctctttttttt

SEQ ID NO: 24706 - DNA, 273 bp, Glycine max
  Clone ID: LIB3106-018-Q1-K1-D3
cggacgcgtgggttagagagagagcaaaacatattattttcattttcatctttttttgagtatcaacaaatggcaaccactgtgatgaccactctcccccaattcagtggtcttagaccccaattctcagctgcccctgtgaagaacttggttgctgtgcaacccatgagtcgcaaggggaagggtgcattgggagctcgatgtgactacattggttcatacactaatctgattatggtgggcttctacaaaccctgatgctgtttgctggaa

SEQ ID NO: 24707 - DNA, 280 bp, Glycine max
  Clone ID: LIB3106-018-Q1-K1-D4
gcgcccacgcgtacggtgaagagcatcaatgttagagggcacaagtatggcttggtctatgctggaatcggttgcgttatgtggagaagcacacaagacttgcctgaagaactcatctttcacatcaactatcttggggctgatcaacccaccttcacccttaacttctacaaaggttctagccaagtcattgctcaatactaccaactgattcgccttggttctgagggatatagaaacgtgatcgataactgcacggacatcatgctggggctgaaag

SEQ ID NO: 24708 - DNA, 267 bp, Glycine max
  Clone ID: LIB3106-018-Q1-K1-D5
cccacgcgtccgggagggttccgagaagtttaagaagagcaatgaagcaatgagtggcgaagaaaaaaaagaggatccaatggagcatgaaatggaatcactcacccctgccaccgtcttttgcattaggctcaagcaacccaagtccaatttgctctacaaaatgagtgtccctgaaatttgtcgcaatttcagtgctgtttcctggtgtggaaaactgaatgctatagcttgtgcttctgaaacgtgtgcaaggattccaagctc

SEQ ID NO: 24709 - DNA, 168 bp, Glycine max
  Clone ID: LIB3106-018-Q1-K1-D6
agttctcctgttatcagctggcaaaaagaataaggtgctggtgagaatagcttgagagtgtttattggataggatatgctttggagactatcatttgatctggttttgttgtattcttaagaaacttttgattttcttgctacacggaagcttcgaagttacctatgg

SEQ ID NO: 24710 - DNA, 278 bp, Glycine max
  Clone ID: LIB3106-018-Q1-K1-D7
cccacgcgtccgcccacgcgtccgcccacgcgtccgccttctcacatccaagatcttgtggcagcaaatcaaacatggcatccatgactatgcttcagaccatgattcctaagaatgcaccgaacctccctcctcgtgttggtgcttcttccaacaacactactaagatctcatttggtggctcaggtagggtactgtggaccgggattcagaggaacaggaataataggtcttcttcgattgtagttgctgcagttggagatgtttcatctgatggc

SEQ ID NO: 24711 - DNA, 256 bp, Glycine max
  Clone ID: LIB3106-018-Q1-K1-D8
ttccactcgttcgaataaaattattacaactttatacttcttataaaaaaaaatggcataatgtaaatattcggtgctccctattctaaatctaaccttttaccctctttcctttcaatcctcaaaacctttttaactttatacctaaatttcatcctcatcattccttattttctactttgtttcttatttatatctttcttttccattcttttttttcttatccttaccatttttctctttttctattatttct

SEQ ID NO: 24712 - DNA, 264 bp, Glycine max
  Clone ID: LIB3106-018-Q1-K1-E3
gcctttggtggctttcacactgaaagaccacacccactttgacgaattccaaatctcagagtttttaaggcgctttgggtggatagtgccagcatacaccatgcccccagatgctcaacatgtcacagtgcttcgtgttgtcatcagggaggacttctcaaggaccctcgcggagcgtctcgtgtccgatgtggagaaggtgctgcatgagcttgattcacttcctgcaagggtcatcagcagcaccactgtgacactcaatgc

SEQ ID NO: 24713 - DNA, 287 bp, Glycine max
  Clone ID: LIB3106-018-Q1-K1-E5
cccacgcgtccgcccacgcgtccggaaaaagaaaaaaaggtgaggaagaaatggaggaaaaggaagagaagaagaaggaatgagtgccacagtgactctaactctaaacctatgtcgttcttccatcgttgcttcttgtccacattataaccacaaaccaaaccctaatttcaatgccttgtttagcttctctttgtccctgtctctgtctcaccacagacgcatcgctatctgcaagaaaccattttcctcaagacggacgtggcttcatggacatatgaaaagag

SEQ ID NO: 24714 - DNA, 379 bp, Glycine max
  Clone ID: LIB3106-018-Q1-K1-E6
atcttgctctttttctcaacaaaaaggggttcaattctagctagttctattacgtcgtccgcgaccatgaacatggcgatcgcgcttctgttcatggttttcgcagtttcatcagctttagacatgtcaataatatcacacgacaacgctcatgcggatagggccacgaggcgcaccgacgaggaggtgatgtcaatgttcgaggagtggctggtgaaacacgacaaggtgtacaacgcgctcggtgagaaggagaagaggtttcaaatcttcaagcacaatctgcgcattatcgatgaacgaaactctctgaaccgaacctacaagttgggactcaacgtgttcgctgatctcaccaatgcggagtacagagccatgt

SEQ ID NO: 24715 - DNA, 299 bp, Glycine max
  Clone ID: LIB3106-018-Q1-K1-E7
aaacaaagaaaaaaaaaacccttagccaacacaaccatcatggccacctctggtattcagcaatcagcattcactggtcaaactgctctgaagcagctcaatgagttcgtccgcaagaccggtggcgccggcaaaggtcgcactaacatgcgccgcaccgtcaagagtgctcctcagagcatttggtatggccctgaccgtcccaagtacttgggtccattctcggagcagattccatcatacctgaccggagaattccctggtgactacggatgggacactgctggattatcagctga

SEQ ID NO: 24716 - DNA, 284 bp, Glycine max
  Clone ID: LIB3106-018-Q1-K1-F1
caaaactagagctaccttcccttcaaaccttgcactcttctctccttttccaatcaaggggataatatgtcttagagatattccgaaaccatggctcacgccaatcctatgatttttgttgttggaattctaggtaaccttgtctccttctgttgctttctagcaccagtaccaacattctatcgagtttgtaagaagaaaaccacggaaggtttccaatcacttccttacgtggctgcactcttcacttcaatgctttggatattttatgcttacataaagac

SEQ ID NO: 24717 - DNA, 431 bp, Glycine max
  Clone ID: LIB3106-018-Q1-K1-F2
gctagtttatcgtgaggagaatatgaagttgtttgttttctttgttgctgcagtagtttgggtagcatggccatgccatggcgcaggctaccaaaggttccctctccgaatgaaaactggctatggtgagcgttcttcggaggtaaaatgcgcaagttttaggcttgctgtggaagcacacaacatccgagcctttaaaaccattcctgaagagtgcgttgaaccaacaaaggactacattaatggcgaacaatttagatcagactctaaaacagttaaccaacaagctttcttttatgctagtgaacgcgaagtccatcacaacgacatatttatattcggcatagataacaccgtactctctaatatcccatactatgaaaaacatggatatggggtggaggaatttaatgaaaccttatatgatgaat

SEQ ID NO: 24718 - DNA, 292 bp, Glycine max
  Clone ID: LIB3106-018-Q1-K1-F3
gctaacatccccttttcttcttctcacttctctccacaagttttttttttttccacatttggtctgtctgtctttgatctgcacacacaacatccctctaaaacattgagggataaaataaaaaacatgaagaaatttgtactcaggttagatttgccagatgacaaggcaaagcagaaggccctgaaaacagtttcaacactttcagggattgatgccatctctatggatatgaaggagaagaaactaacagtgataggaacagttgatccaatgaatggggtgagcaaac

SEQ ID NO: 24719 - DNA, 321 bp, Glycine max
  unsure at all n locations
  Clone ID: LIB3106-018-Q1-K1-F4
gcgcccacgcgtccgcccacgcgtccggttttacttaatctacaatggctgcttcaacaatggctctctgttcatcatcattggctggccaagctatcaagcttgccccctccacccctgagcttggtgttggaagggttagcatgaggaaaacagcctccaaaactgtttcctcaggaagcccatggtacggcccaaaccgtgtcaagtacttgggcccattctcaggtgagcccncatcctatctcactggtgaattcccaggtgaactattggtgggaaactgctgggctttctgctgacccagagactttttgcaaa

SEQ ID NO: 24720 - DNA, 308 bp, Glycine max
  Clone ID: LIB3106-018-Q1-K1-F5
cccacgcgtccgcaagtagttgagaactaagaaggagaagcaaatggcttccgcaatgaggtcttccccagctgttaccactgtcaaccgtgccggtgccggcatggttgctccattcactggcctcaagtccatggctggcttccccaccagaaagaccaacaatgacattacctccattgctagcaacggtggaagagtgcaatgcatgcaggtgtggccaccagttggcaagaagaagtttgagactctttcctacctgccagaccttgatgatgcacaattggcaaaggaagtagaataccttc

SEQ ID NO: 24721 - DNA, 181 bp, Glycine max
  Clone ID: LIB3106-018-Q1-K1-F6
ggggatagatagagtgatacgcgtcacattttcataataataaaaaaatggcagcggcggcggcagtgacggtgctactcccacctaggattccgaccaccaccaacgttacccgctgctctgctttgccttctctccctcctcgcgtctccaacaccaaaaccactttgttcttaacctt

SEQ ID NO: 24722 - DNA, 163 bp, Glycine max
  unsure at all n locations
  Clone ID: LIB3106-018-Q1-K1-F8
ccacgcgtccgcatagaataatcanaaagagaagcattagcaaaatcaataggaactagtgtaaacagaaatggccggttcaataatagcatttttggccctcaaacctgccccttttacttgttaaaaatccttaattaaaagcctttccttccttttaaag

SEQ ID NO: 24723 - DNA, 390 bp, Glycine max
  Clone ID: LIB3106-018-Q1-K1-G1
cttttctatttctaaaacagcgtttgcttttgtgtttggtcttagacgcagcacgcccccggcactgtttcaaccctggaattgtgtcttcttcgctttctggttttgattaggttttgttccatttgaaacaatattcatcgatccatcgccaaacatgccttctagtcacttgcttcttgaggaacctattaggatggtctccatccttgaaccatccaagcctagttttttctctgcaatgacaaagattgttggtacccttgggcctaaatctagatccgtcgaaactatttcttggtgtcttaaaggttgcatgtctggtgcttggtttgactttttattggcttgaccttgattcccaccagaaaattttgaaaaatttgaagg

SEQ ID NO: 24724 - DNA, 336 bp, Glycine max
  Clone ID: LIB3106-018-Q1-K1-G4
acgcgtccggcttaccttacctgaagatggcttcggtgtcctttgccgtgggacttttaccttacgcggcagttcgatttcccgtgttgagcaacgccaactcactgaaactcagttcctcagctagcatctctactccaattcttcagcaaaagctctgctctcttctttcccccctccctctaagccctcgccctcgccctctcaccattgtatccgctaagggctacaaaatgaaaacccacaaggcatctgcaaagcggtttatggtgaccggacgaggcaaaatagtgcgtatgagagctggcaagcagcatttgctcgtcaagaaaaata

SEQ ID NO: 24725 - DNA, 172 bp, Glycine max
  Clone ID: LIB3106-018-Q1-K1-G5
cgaccacgcgttctccactctttattcttattgttgtacacatagagagaacatacaattaagggcaacccagtgatttccgcaagccccccaaagaacctcaaggctcacttcaccgctccgtctacctttcgtacacgtactgattagcgcacctctctccacccatctt

SEQ ID NO: 24726 - DNA, 238 bp, Glycine max
  Clone ID: LIB3106-018-Q1-K1-G8
cttgggttgggagtatctaggtctgtgttcccagaagatcttaaagtgtcaggaaagaagatatttgagcgctcaagacaagtttctgctcttatggaataaactttttgttatctcatgcattttggccgtctctatagatccactatttttttatctcccagtcattaatgattcatttcattgtcttggcatagaccgaaagttggcaacaatagttacaaccttaaggacattg

SEQ ID NO: 24727 - DNA, 327 bp, Glycine max
  Clone ID: LIB3106-018-Q1-K1-H3
acgaaattccattctatgttgttcctgatggttataaacgatctcggctatcaaggccaacatgacaagttgagaattgggaatcatttcataatgaggtttcggggactgaacatgttgagagaatccgtaagaggaagaacaatgacggtgtggatgtgaggggggatgctatagttaaaaggcaatctgctagtccttctgaagatagattggcaagacacagcagccttggtactggtggtttgtctgttgaagctgtatctgatagacaagagttgagaaatgttgaatgcaatcatttttcaaacagtgggcaagatgagt

SEQ ID NO: 24728 - DNA, 304 bp, Glycine max
  unsure at all n locations
  Clone ID: LIB3106-018-Q1-K1-H5
gggccgacggacgcgtacnnccacgcgttcgcccacgcgtctttattccatgtggagctgccttaaaaaagagagccagtgtataagacgggggtgaccccaccatacaaaggctaatcaagctacgaagttcaatcacacattcatatcaaatgtacaacattccaactgcatggatgcttgattctggaataatgagcgagataaagcatgcttacatgactctggtcaatacatacatgaaaagactgacaatggagcttgaatccattcggaattcagacagaaaatccattcaagattc

SEQ ID NO: 24729 - DNA, 359 bp, Glycine max
  Clone ID: LIB3106-018-Q1-K1-H6
caacctccatggctgatgccaccaagtatgttcccatcgctggtaccaacgggtcttccgttctcaaaaccagaaaaacggtggctgctgcatactctttcatactcgccttcgtcgctttcactgttttcttagccttttccccttcttcaaacgcttcttcaccttggttcaccaacatattctctcccacatccaccaccgacggctcctacaagcctcaaattcctaacattttctctctccttttcccaaacactacttcaccctccaattcttctgatcccctgcataacaacactcactcttttagatctaccaatgccacttctttatctccttatccaaaaacagcctta

SEQ ID NO: 24730 - DNA, 339 bp, Glycine max
  Clone ID: LIB3106-018-Q1-K1-H7
gccgacccacgcatccttaacctccattgctgatgccatcaattatcttcccatctctagttccaacgtgtcttccattctcaaagggagaaaaacggcgtctacttcatactctttcatactcgccttcgactctttcactgttttcttaaccttttccccttcttcaaacgcttctttaccttgattcaccaacatattctctcccacatacaccaccgacgagctcctacaagcctcaaattcctaacattttctctcttctttttccaaacactacttcacccctccaattcttttgatccccttcttaacaacactcactctttaatatctacc

SEQ ID NO: 24731 - DNA, 189 bp, Glycine max
  Clone ID: LIB3106-018-Q1-K1-H8
cgttttcgttctcgttctggttaataaactttggcgaagaggtttacagcgggcaaccgaagatgcagaacgaggaaggacagatcactgagctttacattcctaggaagtgcttcgccacaaacagattgattaccgctaaggaccatgcttcgggtcagatcaacattgggcatgtggatgagaatg

SEQ ID NO: 24732 - DNA, 386 bp, Glycine max
  Clone ID: LIB3106-019-Q1-K1-B8
tagggtttgtagtgtagcaggaacaagcagcaatggcgccgaaggtaacacgcaagggtagcagaaaccccgaattgataaggggaattggaaagtactcgaggtcgcagatgtaccacaagaggggcatttgggctatcaaggccaaaaatggtggcgttttacctcgccacgaccctaaacccaaacctgaaacacccgctgaaaaaccacccaaattttaccctgctgatgatatcaagaagccccttgtcaacaagcacaaacccaaacccgctaagctcagggctagcattactccgggaacagtgttgattcttcttgctggtagatttaagggaaagagggtagtctttttgaagcagcttccttctggattgcttctt

SEQ ID NO: 24733 - DNA, 387 bp, Glycine max
  Clone ID: LIB3106-019-Q1-K1-E2
aagcaacaacctcaacttaacgcattgtgtgcatgatggaggagatgaaagtttctcggcgggtggagtggtggcagaacatgatgttccccgttcggagggtttggtttgtcgttgccaagcgcctcggcattcgcaaaactgggttactgaagctaagtaatgatgtgagggcatgcgaatatgaggacattcaagtgatgtgggagatactaaacagaaacgaatcagagtttggtcgttcttctagcactaggaaaggcaacaacaagaaggggcattgctggaaattattgaggtgggcaaagtgtgctccatgcatgtgccgcacatgatcatgattgctgtgtacgtgagaagaaaaaaatccaacctatgtgttggtgt

SEQ ID NO: 24734 - DNA, 425 bp, Glycine max
  Clone ID: LIB3106-019-Q1-K1-E6
cccacgcgtcctcaggggtaaaattttaaaaaaaaaaaaaaaaaaaaaaaaaaaaagaaaaaaaaaaaaaaaaaaaaaaaaaaaaaaaaaaaaaaaaaaaaaaaaaaaaaaaaaaaaaaaaaaaaaaaaaaaaaaaaaaaaaaaaaaaaaaaaaaaaaaaaaaattaaaaaataaaaaaaaaaaaaaaaaaaaaaaaaaatgggttcctttaaacttttatttttttataaatattataaaaaatatatttaaaaaaaaaaatctttttttttttttttttaacaaattttataataatatatttcttcttctaaaaatatttttcctttataaaaaaaatcttttttttattcccattttttattttataaaatccctatattatatttttcttttaatatataatattttttttttttttaaa

SEQ ID NO: 24735 - DNA, 86 bp, Glycine max
  Clone ID: LIB3106-019-Q1-K1-G12
aaatggtcattctattggcttttaacttgcctgttgtgatacacctgggattgtaagcctgctggattttaagagttctttgtttt

SEQ ID NO: 24736 - DNA, 329 bp, Glycine max
  Clone ID: LIB3106-020-Q1-K1-A8
ggcgagccacgcgtccgcccacgcgtccgataaaaaataagttatcccttttatcttcgcatcataacactctgggcatagcggactcataatgatgatttcacaaatttccacccacacccctcactgctttttcctttcccacaccccttcctatcgttgccaatagagtgagtcccttcactgtatagaaattaaacatggccaacaaagcttcattttcaaaccaccagacaataaaactgctttttgtgaaccttcaattcaagacaatttaatggtatgcagggaagcgctacttaaagcttctgttttcaactaatgcattc

SEQ ID NO: 24737 - DNA, 389 bp, Glycine max
  Clone ID: LIB3106-021-Q1-K1-B1
cccacgcgtccgagaactagaatgataatttttgacaaatccttaatcactagaaagcagagtccttagctaagaggtggggtcgctgcttgttatcagcttgtgtgatgatacttctactgctgcagcaacaattcatgttttatggaatgaatagtctgtctatacaaacctagatgggaatgatgacatagcgaacttctgcatctttcatcctaacccaatgttcatgaagcatattccaattccagtatataaacctgtaccaaatgacaactccatgtgataaacttattccaaatgctgtctcaattacagaggacatgaacgattccatgtccagggtataagcctattaaaaagccagttccagtgtacaagcctatacc

SEQ ID NO: 24738 - DNA, 82 bp, Glycine max
  Clone ID: LIB3106-021-Q1-K1-C1
cccacgcgtccgaaaaaaaaaaaaaaaaaataaaaaaaaaaaaaaaaaaaaaaaaaaaaagagaaaaaaaaataaaggagag

SEQ ID NO: 24739 - DNA, 467 bp, Glycine max
  Clone ID: LIB3106-021-Q1-K1-F4
tagaaacagtgtgatgaacatgaaggtccttgctttcttcgttgctacaattttggtagcatggcaatgccatgcgtacgatatgttccctctccgaatgaacactggctatggtgcccgtactccggaggtgaaatgcgcaagttggaggcttgctgtggaagcacacaacatctttggctttgagaccattcctgaagagtgcgttgaagcaacaaaggaatacatccatggcgaacaatatagatcagactccaaaacagttaaccaacaagcttacttttatgccagagacctcgaagtccataccaaggacacatttgcgttcagtatacatggcaccgtactgtctaatattccatactacaaaaaacatggatatggggtggagaaatttaactcgaccttgtatgatgaatggggtaacaagggccatgcaccggcactgtccgagactcttaagaatt

SEQ ID NO: 24740 - DNA, 326 bp, Glycine max
  Clone ID: LIB3106-021-Q1-K1-H5
accacgcgtacatccatacacgctatagcttttgctcatgcactatctactaactaccgagtactcttaaatatcgtggtggatacatccattgtatcttatacatgacctgcactacaataatccatatcactagctaaaaaatactatcactatattcggattattacattaatacatgtaaatcatcactgggcttatctattaactattgttttatatagtgaatgtccagaatgatatataatcactctaacttgtggacccttagctggacgaaactgtaattccctacatgctctacgatatatctactactatttact

SEQ ID NO: 24741 - DNA, 358 bp, Glycine max
  Clone ID: LIB3106-022-Q1-K1-A1
cccacgcgtccggataagccatggtggcaaaagatgcaaactcgtgaagagttggttgaagcttccgctatcctcatatggattgcttcagcccttcatgctgctgttaactttggacagtatccatatggaggtttaatcctaaacaggccaactattagcaggagattcatgcctgaaaaggggtctcctgaatatgatgcgttggctaagaaccctgagaaggagtttttgaagactattactggcaagaaggagaccctcattgaccttacagttatagaaatcttgtcaaggcacgcatctgatgagttctaccttgggcagagagatggtggtgactactggacttctgatg

SEQ ID NO: 24742 - DNA, 449 bp, Glycine max
  Clone ID: LIB3106-022-Q1-K1-A2
ctcttttagcgctgcctctcttaaggcttatttcgcagagttccacgcaactctgattttggtgttcgctggtgttggatcagccatcgcttacaacgagcttacaaaagatgcatccttggatccaacggggctggtggcagtagctgtggcacatgcatttgcactgtttgtaggtgtctccgtcgccgccaacatctcaggtggccatttgaacccagctgtcacttttggattggccattggaggcaacatcactctcatcactggtttcttatactggattgcccaattgttgggttctatagtcgcatgcctactactcaatttgatcaccgctaagagcattccaagccactcgccggctaatggtgtgaacgatttgcaagctgtagtgtttgagattgctatcacatttgggttgtttacactgtgtatgcaactgcagt

SEQ ID NO: 24743 - DNA, 391 bp, Glycine max
  Clone ID: LIB3106-022-Q1-K1-A3
cttgcggggcttgatgctgagctatttcgtctataaaaatgaagcataggtttttgaagtagcttttttttttctctcttttttaaaccctaacctgtgggatgttgggttttgaaaggagaggagccttacataattttggccaggctctgctgcatgtattttgttactcatgcgctggctgccacctctaaaagatgtgtgtgacgaaagtgtcgcactacaaaaaagaagagtcatatgaccatgtgaaatgtatgtattggccctgcgcttaaacaatgagcatttagatcatgccttgtttctgattactgcacatatgcatgatagagctccctttagtcgaatttccttaagaatgtgaatcaatgaacaattgtgtggactg

SEQ ID NO: 24744 - DNA, 293 bp, Glycine max
  Clone ID: LIB3106-022-Q1-K1-A5
cgctttctctccctctagtggaggatggtgtgggtgtggatgtaagatgccctcaacgacgttgacaaggaggaggacatcatcgttgagtcgagcagcagtggaaacctcgttgtagaagtcgatgtggtcgggcagtggggaaccttcttgctcttcttgccctttagtggtgccttctcggtccatgaccgtgacattgtaggcggcacgaagggcgggaatgacagctcgtggatggcaatcggcttcaccttcgacgtcttggaatagtcgaactgaaactcgaacgg

SEQ ID NO: 24745 - DNA, 232 bp, Glycine max
  Clone ID: LIB3106-022-Q1-K1-A7
accacgcgtacgcccacgcggacgaacgcttctaggcttctcgtgagggcttcagatgagccggccccggcgggacctgccacggacacacccccagctgaagctgtagccaaaccaaaaccaccgccaactggtcccaagagaggtgctaaggagaagattctcaggaaggaatgctactggcacaaatgcactggttcagggggtgcaggtgatcatgaccccaacactc

SEQ ID NO: 24746 - DNA, 269 bp, Glycine max
  Clone ID: LIB3106-022-Q1-K1-A8
cccttgtgaacatgactgcacacctaatatcaatggaggtgaaccacataaacacttcccaccataattttattggtggaagcaaaacattataaattgcctctcaacacaccaaggcttctatggtttctatacctgtttctcggcagaaagaggttctggaatctgaccaaggatcagtctctgaaagaaatgtgaaaactccggccattcttgcgagacaagctatattagtagttactgaaccgcgtgtccatccttcatcaaat

SEQ ID NO: 24747 - DNA, 413 bp, Glycine max
  Clone ID: LIB3106-022-Q1-K1-B1
cccacgcgtccgcccacgcgtccggttacgttctgcttcgcgtggaccaacaagaagtgtgggttttcattcaatggccagcgctcagctctcagcaatatcttcgtcgatctctacggcgtcgtttgaagggcttcgaccttcggctgttcagtttgcttccgcgggcagaattagaattggcaatctctcccaaaggtctttccggggcttggttgtcaaagccgccaccgttgttgcccccaaatacaccgcgattaagcctctgggagacagagtgctgataaaaattaaggaagcagaggagaaaactgagggtgggattttgcttccatcaactgctcaaacgaagcctcaagggggtgaggtggttgcttgtggaaaaggaaagacaattgggaagaacaatgtag

SEQ ID NO: 24748 - DNA, 433 bp, Glycine max
  Clone ID: LIB3106-022-Q1-K1-B2
cccacgcgtccgcatgtctcctgcccactgaagtcgaacccctaatggcttctcaagttcttcttcaacaggcactgtttgcccccaagctaagtttcccttcttcttctcgtaacgtcgcgttaatttctagggttccttccaccccaatttcatggcgttgcactcctctcattgctaagcctagtttcgctgtgagagctgactccaacgtcgaaggcgctggtgaagccaccgaggatgttccttcgtataatgttgatgaagtttcggaaggcgaaggagaacaagtttcggattctgaagctccaaaatctcccagaaaaccccgagtcaagctcggagacgtcatggggatactgaatcagagggcaattgaggcatccgagaagcaaaggccaactccagacattaggactggggaattgtcgaa

SEQ ID NO: 24749 - DNA, 271 bp, Glycine max
  Clone ID: LIB3106-022-Q1-K1-B3
agagttcttttagtcaatgtatacggctcatgacacagcaaacataactcgaacaaatcacataatgtggacaatgggaaccgattttaagtatcaatatgcacatacatgggtccgacagctggacaagcttattcattatgtaaacatggatggacgcgtcaatgctctgtactctacaccatccatatatactgatgcaaaatatgcttcaaatgagtcctggcccatcaagactgatgattttttttcctatgcagatcgagcaaat

SEQ ID NO: 24750 - DNA, 418 bp, Glycine max
  unsure at all n locations
  Clone ID: LIB3106-022-Q1-K1-B5
cccantnnttcnnngactcattggcagacgcttgggcaaaccatttacaattcaaaaacagggctcttaatatttgtcttgtgctcaccttatactccattattattctcttaacaacagtactaccctacactgtttcatccacctcaacactgaaaaaacaccaagttccacgcataatgtgcgatgagtgcaagcttccacctacacctactgctgctaaaccaatatagtgtccaccaccacccgtggttgttgaatgtacaccgacggcaaaaccacctatcagaggcggaggtattgactgcttactgcccaacttttcggaaacaccagacggaccccattacctactatcgacaccgggccttacgtcgacaggaacgctagaacttgatgacattacaacagctcaaca

SEQ ID NO: 24751 - DNA, 419 bp, Glycine max
  Clone ID: LIB3106-022-Q1-K1-B6
atcagccatcgctgtatggtgattgaactgcagcgattccctttcttgtggaagcgcatggatgaagctctagggaactttttacgagaaggccttgaagccttggagaacatgattgcacacttaatagcaatggagttgaactacataaacacttcccaccataattttattggtggaagcaaagcattagaaattgcctcgcaacagaccaagtcttctatggtttctatacctgtttctcggcagaaggaggttctggaatctgacaagggatcagtctctgaaagaagtgtgaagtctcgggccattcttgcgagacaagctaatggagtagttactgaaccgggtgtccatgctgcatcagatgctgaaaaagttgtatcctctggaaacaccgtggatcaaagtgggtatct

SEQ ID NO: 24752 - DNA, 372 bp, Glycine max
  Clone ID: LIB3106-022-Q1-K1-B7
cacagtggaaaatgctaaaaagtatgagcccaaatacaggcttatcaggaacggccttgacactaaggtagaaaagtcaaggaagcaaatgaaggagagaaagaatagagctaagaagattcgcggagtaaagaagaccaaggcttccgatgctgccaaggctggaaaaaagaaataagttttgagacaccctgttactcctaaggttaaattggttttggtgctttgtaatagttatttttatcttatgctagatttatagaatgagatgtcttggcgcaagtgttgatccttgttttaatttatgttcgatcgcttataacttcagaaggttgagtacattgaacaattgagaaactcgggttttatttt

SEQ ID NO: 24753 - DNA, 420 bp, Glycine max
  Clone ID: LIB3106-022-Q1-K1-B8
gccaaggtcctctgagttctctttgcctacacactgtgcattcaagttccataatggcaggggccatagcaacaacaatggctatgatcaactcaaagtgcatcaacacaacagggtcatcacacaagttgcacaaccccaagctcccaccctgaaaacccaccctctaccttttctcccttcagaacctcccaaagggcctaacctcccacgtgtcaacttccacagcaggcactgccatcgcaggcgcaatattctcctcactcgcaaactgcgacgcagccttagctgcatcgcaaattgctgaattagccgaaggtgataaccgcgggctggcattgttgttgccgttgattccagccatagcgtgggtgctgttcaacattctgcaaccagcacttaccaactgaaccgcatgcg

SEQ ID NO: 24754 - DNA, 257 bp, Glycine max
  Clone ID: LIB3106-022-Q1-K1-C1
cccacgcgtacagccacgcgttcggcataaagctgacctacagcacgggtgccgacttatctgccctggagaaaggtagcgcagctacttcattgcatcatgagcacacactgcctataatgggtccagagaggctgcaagaaataagatcatatctgacattaaaaactatggaggagatgattcggccatttgctatgcccgcagaagactttcctgcagcaacaccttgaacattctctggctatttctctaaa

SEQ ID NO: 24755 - DNA, 198 bp, Glycine max
  Clone ID: LIB3106-022-Q1-K1-C2
accaacataaatttactttgttattatagtgattaacagaaatatgtgactaaattgcaggtaggtgtctgaagatatagcatatatctttttttctaaaagcagataaaatagacaatgaattgcaggtttaacagattaagcagctgctcaaacagttacacaatccttgaccctgaattaacattccagggtttt

SEQ ID NO: 24756 - DNA, 375 bp, Glycine max
  unsure at all n locations
  Clone ID: LIB3106-022-Q1-K1-C3
attctacaacaatcctcaatgtgaatttacctctaaggaccccactgggtttaagagtgcatggaatcagtggaccacatcaattaatgctggcaagttctttgttggacttccttcctcacatgcagcagctagaacaggttttgtgtcatcacatgctctcataaatcatttgctgcctatagttaggtcacctaaatatggtggtgttatgctttgggataggtatcacgatttgcaatctcgatatagtggtaaaattagtggaagcgtttaagtgctccacttattaaatagaagttttaaggattctaggaattatttcaaataactggtgtaaaatatccncaatttaaaatatagtaatttaatttc

SEQ ID NO: 24757 - DNA, 397 bp, Glycine max
  unsure at all n locations
  Clone ID: LIB3106-022-Q1-K1-C4
ccacgcgtncgaccctggacacagggatttcatcaagaacatgatcactgcgacatcccaagctgactgtgctggtcttatcattgattccactactggggggtctgaagctgggatgtcaaaggatggacagactcgtgaacatgctctgctttcattcaccctcggggtgaaacaaatgatttgctgccgtaacaagatggatgctactacaccaaagtactgcaaggccaggtgtgatgaaattgggaaggaagtttcttcctatttgaagaaagtaggatacaaccccgacaagattccttttgatcctatatctggttttgagggagacaacatgatcgagaggtccacataccttgactggatcaagggtactactctgctagatgcactt

SEQ ID NO: 24758 - DNA, 423 bp, Glycine max
  unsure at all n locations
  Clone ID: LIB3106-022-Q1-K1-C5
gaggagctggngggnatggngaaggaggagcacatggnggnggatatggaagnggnggaggagctggtgatggtggtggtgcaagaggagagcatggtggtggttatggtggtggcctccactccctaagttgcctccactcaagccacttgcacctcttcccaaacttcctccaaagcactttttccatcaccccaaatggttcccagtaccaccttcttcctctcatccttaggctttatatattaatattgcagaggtagatgattactcttgttgggtctgcaaaatatgcatgcattttttctgtcttctttattgtgctttccgtatgatcaagtatattgaggaagtctatttgttgctaataaagccttggaaggatagggcatgtgatgagccggggtgagaatataataaaat

SEQ ID NO: 24759 - DNA, 354 bp, Glycine max
  Clone ID: LIB3106-022-Q1-K1-C6
ctttttctcaacaaaaaggggttcaattctagctagttctattacgtcgtccgcgaccatgaacatggcgatcgcgcttctgttcatggttttcgcagtttcatcagctttagacatgtcaataatatcacacgacaacgctcatgcggatagggccacgaggcgcaccgacgaggaggtgatgtcaatgttcgaggagtggctggtgaaacacgacaaggtgtacaacgcgctcggtgagaaggagaagaggtttcaaatcttcaagcacaatctgcgcattatcgatgaacgaaactctctgaaccgaacctacaagttgggactcaacgtgttcgctgatctcaccaatgc

SEQ ID NO: 24760 - DNA, 353 bp, Glycine max
  Clone ID: LIB3106-022-Q1-K1-C7
aaattgcataaagagatcgggccatacaaatgaacggatggggtcaagcctaaaaaggccatcatcacactggctaaagcttccaacagaaactggctcaatttgcacttcaaagaaaacaagctaaaaccaaatctctatctagagaaagacccaatggcaggaatcatggacatcatgaggaacatgtatgaggatggggaccaagagataagaaaaccattgcaaaagcatggactgacgctagatcttgaaaaacagctgaccctttaagtagctaccgttgaactaccagaaagaggatcagggcttaattactttttctaaggaaaaagatttgctctatttaatta

SEQ ID NO: 24761 - DNA, 420 bp, Glycine max
  Clone ID: LIB3106-022-Q1-K1-C8
ctctgggaagaggcagtgcagtggttctactactgtgcttcttgctgcttcactctcagatggctcgtgctgccacctacacagttggagattctgggggttggacctttaacactgttgcctggcccaaaggaaagctctttcgggctggtgacacacttgctttcaattatagccctgggactcacaatgtggtggccgtgaacaaggctggatatgatagctgcaagactccaagaggagccaaagtgtataagtcagggacggatcacatcagacttgccaagggacagaactacttcatctgcaattatgttggtcactgcgagtctgggatgaaaattgccatcaacgctgcctgagtttaataatatggctaacttcccatacatattgtatgtaatgcaaattgcacccttt

SEQ ID NO: 24762 - DNA, 316 bp, Glycine max
  Clone ID: LIB3106-022-Q1-K1-D2
cgttcagaccccctcaacaggacttccttggagaacttcgtcgccaaatgcacagtgctaatcctagtttcaccacatgatggttggcttggattgtttaataaagtttttggatgatcgtggatttgctgaatgctttaagaacactttgatgctcagctacttattgtttgtgtttttgtgacttgttttgtcaaactcattactaatatatgtatcttgaaaatcagattcagaatatcaacctcgcctgtgtatgtgtaaattggggtgtcgctcattcaagaattggatttaaagatttattctgtatctt

SEQ ID NO: 24763 - DNA, 430 bp, Glycine max
  unsure at all n locations
  Clone ID: LIB3106-022-Q1-K1-D3
cccacgcgtccgcccacgcgtccgcccacgcgtgcgcaaaaatggcacctgcaacactgtggctgtctctcctcctcctgttctcactcagcatcgccgtaaccgttagatcgagcgactacgactacgattgtgtgtacactgcatacgttagaaccggttcggtgttgaagggcggaacggactctaagatcgggctgaagctgtacgacaagtacggctactacatctacattaaaaacctcgaagcatggggcggcttgatgggcaagggctacgactacttcgagcgcggcaacctcgacatcttcagcggaaggggaccctgtcttgacggacccgtctgtgccgttaacgttacttctgacggatcgggttctcaccacggctggtaccttaacacgtncaggtcacctcactgggccccacc

SEQ ID NO: 24764 - DNA, 321 bp, Glycine max
  unsure at all n locations
  Clone ID: LIB3106-022-Q1-K1-D4
gaacaaacaangaagccggcggaagggaagncngatgatcaggcggaaactggcactgaacgacacagcctaggcgaggcacgaagaggggccattggccctatgtgaggtcgaataagctactcaaggccgttgccttattctggcaggatctttcttcgatcaaacagcagcactaccagcacgcgatcctttgcattcccaataattcaacctgaatggaatagcaccccggtcacgatggcaaaagccgacaggagtcactaccggaagcaacggcggtggaaagatagctttctttgctgtaaactctgagagatt

SEQ ID NO: 24765 - DNA, 225 bp, Glycine max
  Clone ID: LIB3106-022-Q1-K1-D5
cataacccttagatctagctactacgactacaattgtgtgtacactgcatacgttagaaccggttcggtgttgaagggcggaacggactctaagatcgggctgaagctgtacgacaagtacggctactacatctacattaaaaacctcgaagcatggggcggcttgattggcaaaggcttctactacttcgagcgcggcaacctcgacatcttcagcggaagggg

SEQ ID NO: 24766 - DNA, 424 bp, Glycine max
  Clone ID: LIB3106-022-Q1-K1-D6
cagattagtaccacaaaaatggagaaatagaataactgaatatcgtatagctcaaaataaagatttaaccaaatgcaattcatatgaaaaaagccaattaattctttacaaagaacaacaagtaaacgcattaaaaaaaaaaattagaaaacaatatagatacgatcttttatcctataattttatcaattatgcagataagaaagactcatatatttatggatatagatccctatttcaagtaaaaaaaaaccaagtgatttcttctaattacaacacgtataaaaaagaattattggatatcataaataatctctttatcaagaattatatatcggaagatgcgattctagatatggaaaaaaatatgtatagaaagtattttgattggatgggaatcaatgagaaatactaatcgtccata

SEQ ID NO: 24767 - DNA, 454 bp, Glycine max
  Clone ID: LIB3106-022-Q1-K1-D7
ccacgcgtccgagagctaacaagagattcaagaccggcatggctaatgaagaggaacagaaaaaccacctcttgggcatcaaagatctcggtcacaagactctccttcagagtgatgcactctatcagtatatacttgaaaccagtgtctatccaagagagcacgagtgcttgaaagagatacgcaagatgactgcaaaacacccactgaacatcatggcaacaccagcagacgaaggacaacttctgagcatgcttgttaagctcacgaattcaaagaacgccttggaaattggtgtattcactggttactctctgctctccactgccctggctcttccccctgatggaaagatcttggctttggatgtgaatcgcgaatactatgagttaggattgccaataattcaaaaagctggagtggctcacaagattgattcagagaggacctgctc

SEQ ID NO: 24768 - DNA, 181 bp, Glycine max
  Clone ID: LIB3106-022-Q1-K1-D8
gtgaatcaaagctcacagcaaatacagcccaccccacaagacgcgtgagcacaatgagaaagacacacatgggtgagaagtgaatgtgtcatctcgcagcatggatacaatcatacagacattcacgccagctgctataaaagaaatggcaaccacaaaaccgaagggtgcccatgaaagc

SEQ ID NO: 24769 - DNA, 429 bp, Glycine max
  Clone ID: LIB3106-022-Q1-K1-E1
cccacgcgtccgcccacgcgtccggcaaggaagcgcggccgacggagaagccttggatttcgagcctgaggacgatgacttgatggacgaggacggcgcccccgacgccgacgccgacgcttctccacctcaacctaagctcaaatccgccatcacccccgccgccacttcctctctctccgccccgaagaagaccaagggccgcggattccgccaggacactgacgccaaccgcaacactcgcctctccggcaccgacttcgactctctcaccgccgagggcggccctggccctcagagatccattgagggatggatcattctggtcaccggcgtgcacgaggaagcgcaagaggacgatttgcaaaatgcctttggtgaatatggagagattaagaaccgcatttgaatctcgatcgccgcactggt

SEQ ID NO: 24770 - DNA, 267 bp, Glycine max
  Clone ID: LIB3106-022-Q1-K1-E2
ttttctccttatcactatgataaatgacacacaataactttgggtggatatctcatatcacaaaacagattcacttcccaagtcatttgatcaaaaaccagatgaagaaaataagaaaaaaaaaccatcagttgctcataaacccatctaagacaaaaaacccgtacaagagtccaaagatgaagtttctgctccaacaccagctacctcaccgtccgagattgtgctcaaagtgttcatgcattgcgagggttgccctcccaaggt

SEQ ID NO: 24771 - DNA, 131 bp, Glycine max
  Clone ID: LIB3106-022-Q1-K1-E3
gattgtccctctaaacccccatgtgatgatgcatgtattgtagaaattgcaaagagttatgggcttttctgttgtattaaaaactacttgtgtatccaatttcaaacttactaagttattgatttcttctc

SEQ ID NO: 24772 - DNA, 289 bp, Glycine max
  Clone ID: LIB3106-022-Q1-K1-E4
acggtccgcccttttttttttttttttttttttttttttttttttttttaacctttttttttagaattttttttaatttggtaggacatatttttttttttttttttttttaatttaactatttttttaattaaaaatgttataaacatcctctattattaaatggaagattttaaaaactaatataaaaaaaaaaacaaatctcaatgacaatttattttaatcaaaaaaaagaaaaaaaataaaaacctaatagaaaatgtttttataaacatttatattggtatca

SEQ ID NO: 24773 - DNA, 317 bp, Glycine max
  Clone ID: LIB3106-022-Q1-K1-E6
ccccctaaccttatctttttatcatatactcaaccctgttttagtgaccgattataacacgggtgggagactaataaaagaaaccatattaacaacccatatcatatgataaaaaaccatatgaagaaaataagaaataaaaaccagcagcatctcaaaatccaatcgaagaaaaataaccagacctagattccaatttcttattttttaatacataaataaaaaaaaaaccgccgagattgtgctcaaattgttcattcattttgtgttttactcattaaaatgttttttttcttcctaaatttattcccaatttg

SEQ ID NO: 24774 - DNA, 249 bp, Glycine max
  Clone ID: LIB3106-022-Q1-K1-E8
gaatatgcgggattgatctatgaaacgttttgtcaggagtcattatgagcgtattatttatgtatttattttgaccttatttttaagaaagacaatgaggcgagagtacaaagtattagtggaagagtggaatcagtgatctagtgttatgatggaatgtgtgatagacatcctctattagtaaatggaagaatacaatttttattagagttccaatgacaatgctgagtgccactttctcgtgattca

SEQ ID NO: 24775 - DNA, 304 bp, Glycine max
  unsure at all n locations
  Clone ID: LIB3106-022-Q1-K1-F1
cagccacatgaagacatgaagcgnctcagaattgtgattcacgcttctcttttgaagaaagagatagtggcattagccacatgatgacattaaaagtctcagaattgtaattcacgcatctcttttcaagaaagagatagacattattattgtcctgaaatgatcgtaaatcatctttctcatataatatccttataaacatttttcctttcctaatttcaggttaaagataacaaaaaattgaatcattcgacaaaaaaacaaaacaggcaaattaaaatcaaaaaaaatgattcatggacac

SEQ ID NO: 24776 - DNA, 407 bp, Glycine max
  Clone ID: LIB3106-022-Q1-K1-F10
gccatcagcctaacttaattagcaaattcaaatttggcactttcttcttcatcatcttcaaggtccatatttgctttagctttgttcactcttttgcttataggaagttcttcagctcaactctctgagaacttctatgatagtaaatgtcccaaggttttctatgccgtaaaatccgttcttcaatctgctttggctaaagaacctctccagggagcatctatcgttcgcctcttctttcatgactgctttgtcaatcttggagggccatattggaaggttaaacttggtataagggattccacgactggatttttcaaccttgctagcaatggtatgctcccaggacctggttctttcctcagcgaccttatcaaaagatttgaattttggtaaaattttcccct

SEQ ID NO: 24777 - DNA, 178 bp, Glycine max
  Clone ID: LIB3106-022-Q1-K1-F2
gaattattgaacgtacgtacgtaattccagatttgtgatgataattactaagattagtggttcattttcacagttatgggttgctattgttaatttgttttctttctaatgtcgatttgtaccccacaaatttaaataagttcaagtatgtactatatgcatgcttcattttgcgttc

SEQ ID NO: 24778 - DNA, 356 bp, Glycine max
  Clone ID: LIB3106-022-Q1-K1-F3
accacgcgttcgtccactcgttcgtccacacgtacgaaaatattaagatgatcagcattggagcacttgttgtactctttgcatttctctctcctcagttgtgcctatgcacaagacacaacaacccttgtgcctgcaatcataacttttggtgactcagccgtggatgtagggaataatgactatcttcccacccttttcaaggctgattaccctccttatgggagggactttgctaaccaccaacctactgggaggttttgcaatggcaaattagctactgattttactgctgacactttgggttttaagacctatgctccagcatatcttagcccacaggcatcagggaaaaa

SEQ ID NO: 24779 - DNA, 459 bp, Glycine max
  unsure at all n locations
  Clone ID: LIB3106-022-Q1-K1-F4
gattgagcangctctgggcggggatggaatcatatccactgaagatctgatccatgatatcatcactcttagacctcactttaagggggctatcaacttcgtgggggcatttaatcccaaagctccatattgtggcttaacaaaacttatagaccatgataaagcgggaagtgacactcgaaaccgggagacaacatctacatgcctaccaagaaaacagaagcgagcctatctaactgacaaagcagatgtttatagcttcaaggtggttgcactggaaactgtcagcggaaagagcctttctaattatatgccaaacgaagattatgactaccttcttgactgggcatatatcttgcaagagagaaggaatcttctgcagctggttgatccaaatttgggttcacaatatttaactgaggacgccatggggtgctaaatgtgctctcttattactaa

SEQ ID NO: 24780 - DNA, 291 bp, Glycine max
  Clone ID: LIB3106-022-Q1-K1-F5
ctcggttacttcctcttttcgcatcagcaatttgaattctgtttttgttggtgagacaaatggattcagagtttcaactgttcctggtgctcatgttggtttcattagaaagactgtagaatgtaaggaatcacgaattgggaagcaaccaattcctgtgccatccaatgtcacagtcaaattggaaggacaggatatacaagtgaaaggtcctttgggagaacttgcattaagttatcctcgagaagtgttggttgagagggaagagtcagggactctaagggttaaaaa

SEQ ID NO: 24781 - DNA, 348 bp, Glycine max
  Clone ID: LIB3106-022-Q1-K1-F7
cccactcgtccgcccacgcgtccgggtttgtaagagaaagaaaaaagaggcgcaagatgagtggtagggtttctgggaaggtgaagtggttcaacgatcagaaggggtttggattcataacccctgacgatggcagcgaggaactcttcgttcaccaatctcagatcaaatctgacggtttccgaagcctagctgaaggagagtccgttgagttcgctattgaatctgaatctgacggacgcgccaaggcttgtgatgtcactggccccgacggcgccagcgttcgcgccgtccgcggcaagttcgagcgcatgaagccccacgtgaacatcggcaccatcggccacg

SEQ ID NO: 24782 - DNA, 453 bp, Glycine max
  Clone ID: LIB3106-022-Q1-K1-F8
gaaaatttgtcttggtatagctaaagctttggcttatcttcatgaagagtccagaataaaaatcatacatagggatgttaaggcaagtaatgtattgctcgacaaggattttaatgctaaagtctcagattttggtttggcaaaacttattgaagatgagaaaacccacattagcactcgagttgcaggaaccattggttacatggctcctgagtatgcaatgcgtggctatctaactgacaaagcagatgtttatagctttggggtggttgcactggaaactgtcagtggaaagagcaatacaaatttcaggccaaacgaggattttgtttaccttcttgattgggcatatgttttgcaagagagagggagtcttctggagctggttgatccaaatttgggttcagaatatttaactgaggaggccatggggtgctaaatgtggctctctta

SEQ ID NO: 24783 - DNA, 411 bp, Glycine max
  Clone ID: LIB3106-022-Q1-K1-G2
cccactcgtcctaatctcctaagaccaaatcccagtggattcgtattcctctccttcgaacggcacatttgccgcgaatggaacaatacccgctgattccacattcgccaaggccaccgcgccgtatggagaaccctccgtcggcgaacggctacagcagccggaaacccatctcattgcggccgtcgatgtaccattctgcggtgactacggctctgcgggaggctcggaccaagatttttgagcggcttctggaccctccgagggacgctcctccgcacagtgaattgctcaccagaaccccgtcgcagagcatgaccagcatcttgtacaacttctactctgatttcgtgctcaaggtacaggatacggatccctggaatgaaatccaaattgggaagccgctcaaga

SEQ ID NO: 24784 - DNA, 445 bp, Glycine max
  Clone ID: LIB3106-022-Q1-K1-G4
gcgtctactaactgaattgcgaaattcattgatccggaggtcatcggttgagagcgaattccgggcccttgatccatcggcggaacgtgtaaccaatttcacatatccaaccctcatatacagcatctggttatcataccgcaactctaccgtgtaccttctgaaaagtcaaaaacaacccttctatgtatctcacttacaaacgtactctacgtacttcccattatataagaaatattggaaaaaaaaggatttactgctgatacaactgacagaattgaaacttttgttaaagaaaaaggatctcctttcggattatgctctagatgaaaccaccaacatcgtgctgcctcaaatcacaaagcgagcttatcaagcatcgaaagagcctcaaatattattcatagctccggaaaataccacgcattgataagtggttttgact

SEQ ID NO: 24785 - DNA, 465 bp, Glycine max
  Clone ID: LIB3106-022-Q1-K1-G6
gacccacccgtccgcccacgcgtccggccaagcatgctactactatactagtgttatgcatatccctcggtaatggatcaacggttgagatcgaattccaccccttgatccaacggtggaaaggtaaccgcgttcacgaagccaacccatgaatccatcatcatcttcttagacccttacacaaccctgacctctctcaaaatccagattcaacccttctctctctctcacttacaagcgtaatcaacgaacttgcctctttctgttttttattttttattttttcgtattttcggtattagaaaaggaaataataacgagagagctctagaggcgcttgcgtaacggtaattgcgaaagaagatgcaaccaacatcgaacggctctgactcgaaagcgacggagcagcggacgccgccgcctcagccagtggccgtgccgccgcatggatgccgatcaataccc

SEQ ID NO: 24786 - DNA, 476 bp, Glycine max
  Clone ID: LIB3106-022-Q1-K1-G8
acgcgcggggaattttatcaatgcgactttgatattgctggtactcctactccatctgaaattatgggtccggactttgaggttgttaggattttgactgaactacttgatgagctggacatcggggaatatgagataaagttgaatcatagaaagttactggatagcatgatgcaaatatgtggtgtacctcctgaaaagtttagaacaatatgttcaagcattgacaagttagacaaacagtcttttcaacagataagaaaagaaatggtggaagaaaaaggattaactgctgagacagctgacagaattgaaacttttgttaaagaaaaaggatctcctttagcattattatctaaatttaaacaagaaggtagtgatttctcaaaacacaaaggagcttctgaagcattgaaagagctggaaattttatttatagctctggaaaataaaaccattgataagggtttttgact

SEQ ID NO: 24787 - DNA, 469 bp, Glycine max
  Clone ID: LIB3106-022-Q1-K1-H1
gacccacccgtccgctgattatcattgcagggaacctcaacccaaattttagtctttttaattttaattattattattattatttctgccacaactttaggggtgcattgcaaatggcttccgttgttgcaagcttgccgccaccattgctgctccctgctagaaaatcacatatgggcaacttcccaagttcccctgtttctcttctttcagggagatggaatcgtgtttcttttgttgtgaaggcttctggagaaagttctgaatcttcaactacccttactgtttttaagtctgttcagaatatttgggatcaacctgaggaccgactgggacttattggtttgggatttgcagccgtagcagcgttttgggcatcaacaaatttgattgcggccattgacaaattgccacttttcccaactgtactggaattagtggaatattttactccgtgtgtttacttatc

SEQ ID NO: 24788 - DNA, 348 bp, Glycine max
  Clone ID: LIB3106-022-Q1-K1-H2
cgtactgtatgagttgagaagaggataaatgagattgttaacaggctaaacaagacaaaaggggaataggaaacctgatttgaaagctgagcgataagcaattaatgcaactgagagagctgagagaaaacaacaactgacagaaaaaaaacgtccggaggaatagggaaggctcgaaaaggagaaacaaacagagcttatgagctacaagggtttgacggatgcataaaatatgacatgcaacaaacaaattgaattgcgaagcaaatcattacaggaacaggaggaggatttcatagaatcatttattgggttatggacagatgactggaggtcaacttactacct

SEQ ID NO: 24789 - DNA, 286 bp, Glycine max
  Clone ID: LIB3106-022-Q1-K1-H3
cttctctctgttccaaaaccccaccttccttaaacttaaacccccaaccatcgcgacgccgcgctggggctacgttcgggtgcggtgcggtggaccgcgttcccagcgtagcccattgatgaaaggccgaatcctgagcatcgaatcaatccaagccatccaaaccttaaaacgccttcaccgaaccaaccctccgaacctctcctacctcgtcttcaacaccctcacgcgcctcatcaaatccgacctccttgctactctgcgggagctcctacgccagcagcac

SEQ ID NO: 24790 - DNA, 358 bp, Glycine max
  Clone ID: LIB3106-022-Q1-K1-H4
accaggcgtccaatcgtacccaaccataccctaacagtcacgaactcgtccgtgcatcttgggatgcatcggacaggggaggacttagcttgaataacatatctatactcacatctgttgtgctccaaccataaccaccaatctctacaaaactggcacatgtgaataggaaatataactaactaaatacatcctaccaaacttagacaatactaattcatcacttacactgagtataaccgcaatactacagaagcaaccatctgcagggttggaaatacgatcaagccgaccgctggcaactagtaaacttcttaaaggcactagacgattgggtaagaccacgacagtctatgaa

SEQ ID NO: 24791 - DNA, 446 bp, Glycine max
  Clone ID: LIB3106-022-Q1-K1-H6
atttggtcccgaatcgcacctcaccacaacctctctttctggtctccgtccgtgcaacctgggaagcaatggcatggagaggaaatcttttgaaaaacataaaagaacttcagtttttgatgtgccaatcatcacctgcaagctcacccacaagggcttttgtggaaaggaattataaggaactaaagacattgaacccaaaattgcccatattaatccgtgagtgcagctgagttgaaccccaattatgggcaagatatgatttgggtgttgagaaaggcatcaaattgcaatgcttgtcagaagcgcagatctttaaggcacttgaagatttggtaaaagcaagacagtctatgaaagcttgatatcgctgcttatgcactgtctgaagtggaataaatgctctctagctgctcttgttattgcaaatagcttttggttaaaat

SEQ ID NO: 24792 - DNA, 400 bp, Glycine max
  unsure at all n locations
  Clone ID: LIB3106-022-Q1-K1-H7
gccaagngaaagagagaagaaaagtcaaagacaatgtcagggatcattcacaagattgaggagacccttcatgtgggaggccacaagaaggaggaggagcacaagggtgagcagcaccatggtggagaatacaaaggggagcatcatggtgaacacagtactgaatacaaaggagagcatcatgttggtgagcacaagccggagcaccatggaggagaagagcacaaagaggggttcctagacaagatcaaggacaagatccacggcgaggagggtggcaccgctgagggcgagaagaagaagaagaagaaggagaagaagaagcatgaacatggccatgacagcagcagcagcagtgacagtgattagattatctcccactgctgcatcacctatatat

SEQ ID NO: 24793 - DNA, 463 bp, Glycine max
  Clone ID: LIB3106-022-Q1-K1-H8
cccacgcgtccgcgcctctccctccattctttaacagtcaccaacttctttctctctctctgtctccctcgcacacaaatggcctgagcttccttctccaatctctccacacaacacttgttctctcactacaaccacccctctctacaaacctgcaccatcacaatcccccatggaactctcatcttcttcccttccaagctcaaacattgcactttcatcacgtccaccgctcatttcttccccactacagtcacagccatctccagggttggtcctaggatcgggccgcccttggccatctcctcagctggggatggtggcaggtcgtcggggagaggcggcggcggcgaaagtggcggcggcggtgatgaagaggaggaagagagggaccgcaatcgggaagaggtgatggtggcgctggcggaggctggcagtcgctggagagttcccggagatttgc

SEQ ID NO: 24794 - DNA, 226 bp, Glycine max
  Clone ID: LIB3106-023-Q1-K1-A4
tacacacgttcgaacttacatagagtatccaacagcttactcaatgttctggcactgggcagttccgactctctagcgcaccatcgccactgtggtagctacattcactgttctcaagatcatgacatggctagaggacctgcaactccatcagtggctttaattgcattgctcgcttcctttcgtaaattcactatatgcttctatgacacccattttgcactaa

SEQ ID NO: 24795 - DNA, 473 bp, Glycine max
  unsure at all n locations
  Clone ID: LIB3106-026-Q1-K1-E9
cccacgcgtccgaaaaaaaaaaaaaaaaaataaaaaaaaaaaaaaaaaaaaaaaaaaaaaagaaaaatttataaaaaaaagaaaaaaaaaaaaaaaaaaaaaaaaaaaaaaaaaaaaaaaaaaaataataaaaaaaatataaaaaaaatatttttaaataataaaaaattataaataatatttggctcatttttttaattttcatattttttttccaaaatatttatattaataacttttttatttgtgaacattatataaaatttatttcctcttttttaataaaataatatctttaaaatattttttttttctttcaatatttaaatgggtatttatccattttttttattatttgtatttttacaattaccactttccttcggcttttaaaataactactagtgcaattggtcctacccttttttttttttttnntttttttttttttcttttttttaattatttttttt

SEQ ID NO: 24796 - DNA, 232 bp, Glycine max
  unsure at all n locations
  Clone ID: LIB3106-026-Q1-K1-H10
cgtccgcccacgcgtccgcccacgcgtccgtacaaattgttaatgaacaaaatatattgttaagccgcgggatgataattttgggatacttggancaccaaaattatagtggtaatgttttcaaggcttggttctgaagacagctttgaccaatttgtgtgtaatcaattttctttacatctgaaagtgaaaatactgtccaacgatgaaacaagcaacaagcattgccatc

SEQ ID NO: 24797 - DNA, 253 bp, Glycine max
  unsure at all n locations
  Clone ID: LIB3106-026-Q1-K1-H6
gaagatttttggcatgctgttttgaccaaacattcccattccaagtttattgcgagatctgggaaatcctgcccctgcaagtgttgaaatcgatgatcaccctatgcaaattgaagaaacacagtacccgaaaaccttcttctataaagaagaccttcatccaggcaaaacaatgaaagtacaattcagcaagcctncctttcaacaaccatggggtgttggtacatggttaaaaggaaattaaagacacttc

SEQ ID NO: 24798 - DNA, 398 bp, Glycine max
  unsure at all n locations
  Clone ID: LIB3106-028-Q1-K1-C12
tcttcctctccacatcgtccgtttttttttttttttttttttttttttttttattaagggtnttttgaaaatttaaaaaaatttaattttttttttaatnaaaaaaaaaaaatatttttaaaataataaaaaaattttttaaaaaaatttaaatttttaattattaaaaaaaaattttataattatattaatattatatataatttttttatattttttttattaaaatattataaaaataaattttttttatatttttgatattttttaataattttaaaaaaaattaaaattttaaatattttgttattttattttttttatatatattattaattatttttttttattaatttttttttttttttttttttatttttttttataattattttttt

SEQ ID NO: 24799 - DNA, 156 bp, Glycine max
  Clone ID: LIB3106-028-Q1-K1-G5
tccactcttccgaaactacttaaaaattttcaaagacatgactaccactaagtcattcgtataatctataccggtaacttatactatccataaaataatactcaatcctatctcttattcattatatctaaagccactgtctctactcacttattc

SEQ ID NO: 24800 - DNA, 188 bp, Glycine max
  Clone ID: LIB3106-030-Q1-K1-C10
tagaagaattataaaataaataatactaaaaaaacaaataaaaaaaaaaacataattacttaggagacaacaaaacatgtgtcaatgataacagtaaccctttcaaagaaagaacttgatacatcatctgtagggtatcagcctccattaccagctgaccaggtgaaggctgccacaaattttgatta

SEQ ID NO: 24801 - DNA, 405 bp, Glycine max
  Clone ID: LIB3106-031-Q1-K1-D2
cacgcgtccgcccacgcctccgataacttatcacattattcatgcagcagcaacaacaccactctatcaacgcgtgagcttcaagccgaagcttcagactttcccttcaaaatctcaactttgccccttggggaccctttctgcagactaggaatggcttctgtttctgggtttaggttgagacccctgagggctgtgggtggttcttcatcatcttctgcatcaggtgatgatggatttgtcacactgatagagtatgtggcgaaggaaggaatgaatgtgaaagatgatttggtggtgttgcttgatcacattcaatatgcttgcaagagaattgcagcacttgtggcttcttctttcaattacagccttggcaaacaaactggtcatggttctgttggttct

SEQ ID NO: 24802 - DNA, 257 bp, Glycine max
  Clone ID: LIB3106-034-Q1-K1-F4
gttatgactcggatctgggaatcacgtttttgagttggtgtatattcccccggattcaaaccttttcagttttaggagaaccatccccttcgcaaaccatgacaaaagggtatctaaaattcttaattatgcatctacggctctattgttttcaattcttaactgagtctaagagaatcattccctttgtacgttaattatgcttgccaatgattaagagaattctaaactctgagttcttgtcaacgtcgctgaaa

SEQ ID NO: 24803 - DNA, 431 bp, Glycine max
  Clone ID: LIB3106-034-Q1-K1-G6
taaaaaaaaaaataacaaaataacttgaaaaatttaaataaaaaaaaaaaaaataaggggatgaggcaaatttagaaagcgatgaaaatgccatacgttcaaaaaaattcactatattaatgaaacactggctatcgttcccgtactccataggtgaaatgcgcatgtttgtatgcttgctgtggtagcacacaccatctttgtctgtaagaccattactgatgtgtgcgttgaatcaacaaataattacatgcatctccaacaatatacatcatactccttttcttttaaccaacatgcttacttttatgccagtgacctcgaatttcattccatggacacatttttgttcaatatagatgtcaccgtactctctaatatcccatactacaaaaaacattgattatgggtggacaaatttatcttctcct

SEQ ID NO: 24804 - DNA, 436 bp, Glycine max
  Clone ID: LIB3106-035-Q1-K1-C11
ctttttctctctctacactcacccatggacgactcccacaacaggaagcgacggcgccacgactcccactcccactccccaaagcacccccgactttgttctaactcctacgacactcacccacttgactcgccccagtttcaactctcccgcgtcgacccggaccttctcaacatgctcaatgatgccgagaacgtcacggagcgtgaccctaccatgcagggtcttgactctgttattaagagcttcgaggaagaaatactttctccgcttccgaacccgaatctagcgtccgaagcagaggtgtttaatccgaacctagggtacttgttggaagcatccgacgacgagctagggttgccgccggcggtagcgcccggcgaggatgcgacaaatccccaaacacttgattcgggccggcgtgcatctgacggag

SEQ ID NO: 24805 - DNA, 441 bp, Glycine max
  Clone ID: LIB3106-039-Q1-K1-A3
cagcccggcgcacgcgtccggcaaacctcgtccacgccgattctcaattctcgcatccctcacccgaaggattcgccgcacgaacccgaaatccttcaccggagcccgcgcacgcgctcgctcacgctctccgcgtcgtcgagttcgctctcgccggtcgaagcttcgccgagcagaatgacgcgggcgctgtcggagacggatctctccgcgcgctccaaaacgtcttcgttcggctcctctctgttttccttcaccgagtcggacgaaggagacggagttggcggcggcggcggtgatggatgggacaacggtgacggcggagggtcggggttttgggattcgaataatgggaatgatagcacggacttgtattaccggacgatgattgaagcgaatccagggaaccctctgtttcttggcaactacgcgaggtacttg

SEQ ID NO: 24806 - DNA, 146 bp, Glycine max
  Clone ID: LIB3106-039-Q1-K1-C4
ctggcaaaatgggaaaatcggggggttgtttcagactggctgagcatttgtattggtgataggagtagctgtatgcagaaaaataaaagaaaatgaattacttgacattgtgtaaaaaaacatgacaaagccaactatgtattacc

SEQ ID NO: 24807 - DNA, 335 bp, Glycine max
  Clone ID: LIB3106-039-Q1-K1-C9
cccacacatactataaaaaatcttttttttctcattctacactacgtctcaagcgggcatatattcacagaattgcgttcttcacaaaaataccatactctcttacatctaagtcacactcatgcagacagattaacaataactaataccaataaccaccttcacaacaaatcagcacttgaaagctataacttagcatgactcactactttttaacaaattacaatcccaaaccatctcatcaacaaaattatattatacacttaataccataattatccaattgatttcctttacatctttcactaccattattctcataaataactttataa

SEQ ID NO: 24808 - DNA, 302 bp, Glycine max
  Clone ID: LIB3106-039-Q1-K1-D5
gagacccttcctatataattgtaccacttactttttcaatgtactaggcactctcaggacggatgttttcaaaccggggcggcttacatatactattctctatcaactaactaccgccaattcatacaacaacgtaatacactcgactttaacatatatggtaagcacgaacataaccttgactgtggtagtagctacaagaacttcatcaccgcgcacttcgatcacacgaaacagggcgaaccaactccttacagttttatgcatgctctacatatctgcggctacagaaccaatgaaca

SEQ ID NO: 24809 - DNA, 183 bp, Glycine max
  Clone ID: LIB3106-039-Q1-K1-F5
gttgttccaactgtgtttcttgcttactttttagtatgtaatgtaatcaatgtcatgatggataggttctctctaaagatccaacaagttcagcatatgctaatttgatcactattttcggctgcaatttggtttgctattatgattaatggaaaatgggacttctctacgtattgaatttgg

SEQ ID NO: 24810 - DNA, 85 bp, Glycine max
  Clone ID: LIB3106-040-Q1-K1-C1
acacgcgttcgaccactcgttcaatcaatattaattttacccctcctaatacctcatgggacatggcattaacactcgtgggtgt

SEQ ID NO: 24811 - DNA, 438 bp, Glycine max
  Clone ID: LIB3106-041-Q1-K1-F6
cgtccgcccacgcgtccgcccacgcgtccgaagcaaatggcttcctgaatgatctcttccccagcgtggaccactgtcagccgtgccggtgccggcatggttgctccattcactggcctcaagtccatggctggcttccccaccaggaagaccaacaatgacattacctccattgctagcaacggtggaagagtgcaatgcatgcaggtgtggccaccagttggcaagaagaagtttgagactctttcctacctgccagaccttgatgatgcacaattggcaaaggaagtagaataccttcttaggaagggatggattccttgcttggaattcgagttggagcacggtttcgtgtaccgtgagcacaacaggtcaccaggatactacgatggacgctactggaccatgtggaagctgcctatgtttggttgcactgat

SEQ ID NO: 24812 - DNA, 359 bp, Glycine max
  unsure at all n locations
  Clone ID: LIB3106-041-Q1-K1-H11
cccactctttctcccactcctccggctgctaacacggaagactgtaaaatcaaagggcggggtcttacaggggggcatgacatcaaccatancctttnttcattaattttttctctttcttttctcatttgtatttttgtgtagtgttgtgttgggcatttggtattacgatatgatacgtgcactgttatgtgagcctcaaaatcaaacagtggcacttcacttttatgctttaatcttatacatccaaccccatctttcaaaaacccatcatccttacaaatatacacatagttcagggtccgctatcacattaaaattataaaaagtgacatacataggtaacgtgaaaaatttaa

SEQ ID NO: 24813 - DNA, 442 bp, Glycine max
  Clone ID: LIB3106-043-Q1-K1-D12
taataaggttgtatatggtttggtgggatttgtctagagtctttagaaaagatatgcatgggtgagtccgacaacgagtcaggaggtcacacggggaacgcgagcgggagcaacgagttgtccggttgcagggagcaagacaggttcctcccaatagcaaacgtgagcaggatcatgaagaaggcgttgccggcgaacgcgaagatatcgaaggaggcgaaggagacggtgcaggagtgcgtgtcggagttcatcagcttcataacaggagaggctttcgataagtgccagaaggagaagaggaagacgatcaacggcgacgatcttctctgggccatgactaccctgggcttcgaggactacgtggatcctctcaagatttacctgcacaagtatagggagatggagggggagaaaaccgctatgatgggaaggccacatg

SEQ ID NO: 24814 - DNA, 349 bp, Glycine max
  Clone ID: LIB3106-045-Q1-K1-A9
gagcagtgacgctttccagcttctagggatggctgagaggggaatgttgcctgagttcttcagcaagaggtctcgctacggaacacctctcataggaatactcttctcagcctccggcgtgattttattgtcatggctgagctttcaagaaattgtagctgcagaaaatttcttgtactgctttggaatgattttggagttcattgcgttcattctgttgcggatcaaacaccccgacgcatcccgaccttacaagataccggggggaactgctggagcaattatcatgtgtatccctccgacaatattgattggtgtggtgttgtttttctccacccttaaagtaatg

SEQ ID NO: 24815 - DNA, 437 bp, Glycine max
  unsure at all n locations
  Clone ID: LIB3106-045-Q1-K1-H2
aaaaagccttgtctctcgtgccgattctgcaggacaattgccttgacccaacctaattgcaatgattgttgaagatgagtacgttggatgcaacaagggctgaacttgggcttattgttttatatttgggcaaggctgaagcaagggacaaaatatgcagggcaatacaatatggttgcaaatttttgagtaacggggaacctggtactgctgataatgtcgacaaaacaaccagcttggcacgaaaagtgttgcgtctttttaagtttgtcaatgacctacatgctttgataagtacaacaccacatggcacttccctccccctaattgtgttgggaaagtccaagaatgcactactctccactntcttgtttcttgatcaatttgtgtggcttggcagaacatgcatctaccagtataaagagcgcactgaacta

SEQ ID NO: 24816 - DNA, 417 bp, Glycine max
  Clone ID: LIB3106-046-Q1-K1-E7
cacggtcactgatttgtgcaaatgatgtctttgcagaggaccaagtggtttccttttttcattgtccttgattccttcacatgtagtctctcccttgctatgtccagtaaccagttggagcagtttgcttcggaggaagaagtgtttcaactattccaagcgtggcagaaggagcataagcgtgaatatggcaaccaagaggagaaggcacagaggttccagatattccaaagtaatttgaggtacatcaaccagatgaatgcgaagaggaagtcacctacgacgcaacatcgtttgggtctgaacaagtttgctgatatgagtcctgaggagtgtatgaaaacctacttgaaagaaatagagatgccctactccaacttggagagtaggaagaagctgcacaagggtgatgatgct

SEQ ID NO: 24817 - DNA, 253 bp, Glycine max
  Clone ID: LIB3106-046-Q1-K1-G11
aaaaaaaaaaaaaaaaaaaaaaaaaaaataaaaaaaaaaaaaaaaaaaaaaaaggaaagggcggccgatttaaaggggtccagcgttacatacgcttccatgcttacgttactcctgcttccatagcgttacctcatttcaattcactgcccgacttttttcaatggcctgactggtaaaaccctgtcgttgcccaacttaatccccttgcaggacatacccctttggccagcttgcgtatttcccaagctgc

SEQ ID NO: 24818 - DNA, 308 bp, Glycine max
  Clone ID: LIB3106-047-Q1-K1-B10
tacgaatttctaatagatgaagctattcttgactcatgcagtggctgcttacatggtcgtacgctaggaggaatatctttgagccgtgactatgaaacgaccggtggttctggtacctgattacctgatatgcttagaatcgaaagatggtgatgcacaagcccgtgaacgaagttttggagctgcacgagagcacataggtgcatggatttgagaaccgtgacaaggtgaagcttatgcgagatttgctgcaaatggctatctgaaatgctgccgagatcatctgatccaatataatgtcttgatga

SEQ ID NO: 24819 - DNA, 155 bp, Glycine max
  Clone ID: LIB3106-047-Q1-K1-B7
tctgtccttaattcccgggtctactccactcttcctaaaaaaaaaaaaataaaaaaaaaaaaaaaaaaaataaaaaaaaaaaaaaaaaaaaataaaaataaagttcattttaaaaatattaaaaataaaaaattaaaatacaataataattaaaa

SEQ ID NO: 24820 - DNA, 359 bp, Glycine max
  unsure at all n locations
  Clone ID: LIB3106-047-Q1-K1-E8
gacggtagcagataaacctaaagacgaacctcgcaaattccctcaacactggagtcactaagtgggactcggtggaaattcattctgggactcagctaagctgaccaaccatgattcaaaatggttgcattgtatcccaagggtgtgcccctctgaattctaggtcacgcaaccatgtcatacctagtacctctgtctttcgttgcgcttctcgaatgcctcccaaggttgccgtctctaacatccggagcttttggggacataatttggaantttcaatcctggtgccaagaggaatgacattgtcaaacacgttcactgcatcaagcctacgtgtaagtgagggtcaaaattttctc

SEQ ID NO: 24821 - DNA, 101 bp, Glycine max
  Clone ID: LIB3106-047-Q1-K1-F6
taactatctaaaaatgaagaattattcatgaagtactttgtggatacgtgttccttctgttctataaatgtgtggatgtgaaaaatcttgtgttgttaatc

SEQ ID NO: 24822 - DNA, 377 bp, Glycine max
  unsure at all n locations
  Clone ID: LIB3106-047-Q1-K1-G8
tagaggatcactcttcttccatcctttcctctctctctctccctctgcatttcccaagttatttggattttttgcggatagggctggatttgtcaatgctcagagcagatattagaagatggcagacgctgaggatattcaaccccttgtttgcgacaatggaactggaatggtgaaggcaggatttgcaggagacgatgccccacgtgcagtgtttcctagcattgttggtcgtcctcgtcacactggtgtgatggttggtatgggcccagaaagatgcatatgttggtgatgaggcacaatctaaacgtggtattctgactctcaagtttcccattgagcatggtatngtaggcaactgggatgatatggaaaag

SEQ ID NO: 24823 - DNA, 195 bp, Glycine max
  Clone ID: LIB3106-048-Q1-K1-E2
taatttcgcaaaatcaaccaaagacagagaaaaaatccaaagagtaaaaggaacagaagagaaagcttgaagctatggggaacaccatgggaaggagtaaaaagaccaaggtgatgaaggtggatggagaaacgttcaagctgaagactccagcgagagcaaacgacgtcttaaaggactaccttcggtcacggg

SEQ ID NO: 24824 - DNA, 318 bp, Glycine max
  unsure at all n locations
  Clone ID: LIB3106-049-Q1-K1-G6
tgcacttccatacatttgcatggatattacgtatcagtatacgttgctcgtcgatggatttggcctggatccttggaaagagattatagtancaaatgaaattgaataccaaggtgctcttgtggaaggagcatggcctctaggcagtgccatagaagccatatcttcattgcccaaatttaataaattgatgtattttatataacacttaaagagaagtgggcttcctttaattactaaataaaatgaagctcgatgtatatcanataaaaaataaattttttattaaataatattttaaataattaattttataat

SEQ ID NO: 24825 - DNA, 312 bp, Glycine max
  unsure at all n locations
  Clone ID: LIB3106-049-Q1-K1-H12
cgcttctgattattcctcttcccattctattgttcccaaatggacgctnncggaaagacgaagaatttctctctatgaagaaaggtccacatccctaagaagaaaccgttttcaaggtccgtcaaggccggtctccaattccccgtcggaagaattggccgttatttgaagaaaggaacgtacgcccagcgtgtcagtacccgtgctcccgtttacttggccgcagttctcgagtaacctaactgctgacgtgcttgagttggcttggaatgctgcacgtgacaacaacaagaacaggattattccgagaca

SEQ ID NO: 24826 - DNA, 143 bp, Glycine max
  Clone ID: LIB3106-050-Q1-K1-B1
cccacgcgtccgaagaggtggtctgtcgttttatgtttttggatcacaatactggtcaaggatgtggtgagttttcttgagcacagtgtacaaatactctactgggagccactctaccaagagttattggatcttaaaatagt

SEQ ID NO: 24827 - DNA, 421 bp, Glycine max
  Clone ID: LIB3106-050-Q1-K1-C7
taatagaataatagaggatcatgggttgctttggcttctgcaaaggagatgatagtgtcacagttgctgacagaggacctttcatgcaaagcactcctactgggaaccccagttatcatggaagacacgcagcagtaactgctcctcggactataaatgttcaacctattgctgtcccttcaattacagtagatgagttgaagcctttgacagataattttggctcaaaatgtttcattggtgagggtgcatatgggaaagtatatcaagccacatggaaaaatgggcgtgcagttgtaatcataaagttagattccagtaatcagccagagcatgaatttctttctcaggtctccatcgtatcaaggctaaagcatgaaaacgttgatgagcttgttaactattgtgttgatggtccttt

SEQ ID NO: 24828 - DNA, 311 bp, Glycine max
  Clone ID: LIB3106-051-Q1-K1-A5
atgaatgtgcatcatgatagaaactcaaatggacattttatacgaacgcgactcaatccaaaagctggctaggttatcaatctaaccgagagtgcataaacaactgacactgatttgttagcacttgcattaaatgagtaaagagccatgacatcttgcttatagatagagctatagatgtcgttgccaagtcgagtgttcgtcgggctagatcttgatacaaacaccatgcattgtgaatactaatggtcgcatcgaccaaacttactagcgctaatagcagtactgtctaggtcatgtatcatatcgag

SEQ ID NO: 24829 - DNA, 391 bp, Glycine max
  Clone ID: LIB3106-051-Q1-K1-E6
cccacgcgtccgcacggctaataaatacggccggcacactttcactgcgtcaagaaaggaagaaacataccgaatgagagcatcaaactcttcttcttcgatttccattgcgaagcgttactttttcttcttctttctcttcattttcttcgctcttcgatcttcgtccggggactgctccgaataccaccaccaccactcgccgatggccacgatcggaggcttacacgactcccaaggctctcaaaacagcgtcgaaaccgaagcccttgctcgattcgccgtagacgaacacaacaagaagcagaattcgcttctggagtttgctagggtggttagggcacaggaacaggttgttgctggtaccctgcatcaccttactcttgaggct

SEQ ID NO: 24830 - DNA, 373 bp, Glycine max
  Clone ID: LIB3106-052-Q1-K1-C6
cccacgcgtccgaaggagttgtaaattaaaagcatggctgcacaagctcttgtatcaggggcatctcttaccttctcagccgaggctacaagacaaagtcttggaccaagatcactccaatctccatttggcttctcaagaaaagcctcctttcttgttaaggcagctgctactccccctgtcaagcaaggatcagacagacctttgtggtttgcatcaaagcaaagtctttcctacttggatggcagccttccgggtgactatggatttgaccctctgggactttcggaccctgaaggaacaagagggttcattgagccgaaatggctagcatatggtgagataatcaatggtcggtatgcaatgttgggtg

SEQ ID NO: 24831 - DNA, 260 bp, Glycine max
  Clone ID: LIB3106-054-Q1-K1-C6
aaaaaaacccaacccccccttttaaaaaatcaaaatttacttaccctttcattcaaaataaaattttttttatagttccaccaaaattaaattcattgcccctcttttaaaaaccttttaattaaaaaaaccctgccttaaccaaaataaattcctttaaaaaaaatcccttttttccaaatttgcaaaaaaaaaaaaaggcccaaaccaattcctttttaaaaaattttcccaatctaaattgtaaatggaacccccct

SEQ ID NO: 24832 - DNA, 444 bp, Glycine max
  Clone ID: LIB3106-054-Q1-K1-G11
tacacctgtttctttctctgaaatggtgggaaaacgtgagagttcaaaacgctgagttgggggttccacaacactgggctcaagtgtacttaagtcgtgagttgttcaggtcctcaagatgcttgcactgacagattctcctctacttattgctaaaacatttgaagcaactaaaataccaacaagcacacgaggcactgtggtatgtgctgcaaaaggtccaagaccaagatatccccgagtttggaagacccataaaaaaattgggaccatttccaaggctgccaagcttgttaagtctattaaggaactgtctaatgtcaaagaggaagtttatggagctcttgattcctatgttgcttgggaattagagttccctttaattacagtgaaaaaggcactcaagaccctagaattcgaacaagactggaagcgggtaataca

SEQ ID NO: 24833 - DNA, 89 bp, Glycine max
  Clone ID: LIB3106-055-Q1-K1-B4
ccagcacactgtccgtcagatgctaggaggacgcccgactaccgaatacttcataggaccacgatgcatgatccatcggactagcttct

SEQ ID NO: 24834 - DNA, 81 bp, Glycine max
  Clone ID: LIB3106-055-Q1-K1-G1
cacactggctgcctgtactagagtatgatcatatacaatggtaaatggttgtgcagttttggtaatgagaatgactttggt

SEQ ID NO: 24835 - DNA, 167 bp, Glycine max
  Clone ID: LIB3106-056-Q1-K1-B8
gtgagccacacacacaatccattccctttctgcactacggcaatgaccacccaagcttccgccttcttcgtaaccgttccgtccgtcgcaacccctttccgtctccaccgtaatcccttccttgttctagcccaatcgtaacctatcagataaatccttttaaatta

SEQ ID NO: 24836 - DNA, 404 bp, Glycine max
  unsure at all n locations
  Clone ID: LIB3106-057-Q1-K1-B12
tagaaacagtgtgatgaaaatgaaggtccttgttttcttcgttgctacaattttggtagcatggcaatgccatgcgtacgatatgttccctctccgaatgaacactggctatggtgcccgtactccggaggtgaaatgcgcaagttggaggcttgctgtggaagcacacaacatctttggctttgagaccattcctgaagagtgcgttgaagcaacaaaggaatacatccatggcgaacaatatagatcagactccaaaacagttaaccaacaagcttacttttatgccagagacctcgaagtccattccaaggacacatttgtgttcagtatagatggcaccgtactctctaatattccatactacaaanaacatggatatggggtggagaaatttaactcga

SEQ ID NO: 24837 - DNA, 420 bp, Glycine max
  Clone ID: LIB3106-057-Q1-K1-E11
tagtgtcgtctgctactatgagcatttattatctaatcatactttctctccttctttccaggattctttcaactgcaagttcgtcttcttcttcttcctccctctatcttgggaagggcttctcccatctcacattgtctcccacttatcacattcacaaaaccatttactaatcctatgcatttatctacgatgctgataccacgtgaagccgtgtacatgtctatcgttttaaccaacatttatatctccttctcattgtccaataccttgattcgttcctttacacttttctttcattaagttctaacttctcttattcattttattctttattatctttttttcttctattgtctttttttttattttcttattttttattatttttattctttttttctttttttcatttatttt

SEQ ID NO: 24838 - DNA, 450 bp, Glycine max
  unsure at all n locations
  Clone ID: LIB3106-057-Q1-K1-H11
tagccacaatgcagatattcgtgaaaaccctaacggggaagacgataaccctagaggtagagtcatcggacacaatcgacaatgtgaaggcgaagatccaggacaaggagggcatcccgccggaccagcagcgcctgatcttcgccggtaagcagctggaggacggccgcaccctcgccgactacaacatccagaaggagtccacgcttcacctcgtcctccgcctccgcggcggcgccaagaagcgcaagaagaagacctacaccaagcccaagaagatcaagcacaagcacaagaaagtcaagctcgccctcctccagttctacaaggtcgacgactccggcaaggtccagaggctccgcagggaatgccccaacgccgagtgcggcgccgggactttcatggccaaccacttcgatcgccactattgcngcatgtgtggtttgacct

SEQ ID NO: 24839 - DNA, 375 bp, Glycine max
  Clone ID: LIB3106-058-Q1-K1-B3
cacggagaagctgatgaaccagatcatggatttgaagttcacgtcgaaatcgctgcagcggggatcgcgtaagtgcgagaaggaggagaaatcggagaagctgaaggtgaagaaggcgatcgagaaaggcaacatggacggagcgcggatctacgcggagaacgcgatccgtaagcgcacggagcagatgaactacctccggcttgcctcgcgcctggacgccgtcgtggcccgcctcgacacgcaagcgaagatgacgacgatcagcaagtcgatgggcaacatcgtcaaatcgctggagtcgtcgctggccactgggaacctccagaagatgtcggagaccatggactcgttcgagaagcagttcgtgaacat

SEQ ID NO: 24840 - DNA, 343 bp, Glycine max
  Clone ID: LIB3106-058-Q1-K1-D2
acacaagcaacaactcaatctcacacttagtgttgttactatggaatcacccgttcaaaccagggattctgcaagggaaggttgctctactcactggtggaacctgcggaatcggattcgaaacttccacccaattcagtaaacatggagcctctgttgcgctcatgggtcgccgcaaacaagtccttcagtgcgctgtcttcgctctacaatccctcgtcattcccgctgctgagcttgagggggatgtacggaaacaagaagatgccgcaagggtggtggaatccacgttcaagcattgtggaacgattgatatactcgtccatgctgcagctgggaactt

SEQ ID NO: 24841 - DNA, 421 bp, Glycine max
  unsure at all n locations
  Clone ID: LIB3106-058-Q1-K1-F10
cccacgcgtccgaagcccctcagcgagacagtcgccgccgccttcttcaataaccgtcgcagtcctctttcggcaaaaaaaagaaaacccttcttctcactcatattcttacgcacacaaaacaagaaacacaacacagcaccaacctcggcagcacaacgtgctaacaattcaaagaaacaaaaacacagacacaaacaatggctggtcgattccgcgagctgatgaagaaatacggaaaagtcgcactcggggttcacttgagcgtctccaccgtttccatcacgggtctatatgtcgccatcagaaacaacgtcgacgtggaagccatcctcgagaagctccacatgggcaccgtttccgaggaacaaaaccctaaccctaacccctncgacgacgtcgcttgcgccgccaagaaccg

SEQ ID NO: 24842 - DNA, 376 bp, Glycine max
  Clone ID: LIB3106-058-Q1-K1-G6
aagctagtttatcgtgaggagtatatgaagttgctcgatttctttgttgctgcggagctggggtagcatggccatgccatggctcaagctaccaaaggttccctcttcgaatgaaaactgtctatggtgagcgttcttcggaggtaaaatgcgcaagttttaggcttgctgtggaagcacacaacatacgagcctttaaaaccattcctgaagagtgcgttgaaccaactaatgactacattaatggcgaacaatttacatcagactctaaaacagttaaccaacaagctttcttttatgctagtgaacgcgaagtccatcacaactaacatagttatattcggcatagatgacaccgtactctctaatatccata

SEQ ID NO: 24843 - DNA, 428 bp, Glycine max
  Clone ID: LIB3106-058-Q1-K1-G9
aagaagtgcctgtgaggatgcagatgatggttaagagcatgggattgagaattgcatgccaggccaccaggatttccgctgatagagtccctgacatgggcaaaagacagctcatgaatcttcttcttcttggtgccatttcactccccactgctggaatgcttattccctacacctacttctttgtccctccaggttcaggttcttcagctggcggtactgttgccaaggatgccgttggaaatgatgtaattgccgagaattggctcaaggcacatggacctggtgaccgaacccttacacaaggattgaagggagatcctacctatcttgttgtggagaaagacagaacccttgcaacatttgcaattaatgccgtgtgcactcatcttggatgtgtcctgccatggaatcaagcggagaacaag

SEQ ID NO: 24844 - DNA, 325 bp, Glycine max
  Clone ID: LIB3106-058-Q1-K1-H6
gcaggacacaacagggaaaacggcaccggcttcgtagaataaaacagccatggtgcacgagcctttaggggaactatgggaagacattgaagaagccgcgtacgtcgtacgagaaggatgcgtttggacgcagagttgaagctggttgatgagaactgtcttcggtgcaagagagagctgtggagggtgcactacgcgctcagtcgtatacgaaacaacgcgcggaacctactgactgtatactagaagaaccagggccggatcttcgagggagaggcgctgctcctaaggatgttccgatacggtcgtactcgatgagacacag

SEQ ID NO: 24845 - DNA, 452 bp, Glycine max
  unsure at all n locations
  Clone ID: LIB3106-059-Q1-K1-H10
gatcgagataactagaaacagtttgatgaaaatgaaggtccttgttttcttcggtgctacagttttggtagcatggcaatgccatgcgtacgatatgttccctctccgaatgaacactggctatggtgcccgtactccggaggtgaaatgcgcaagttggaggcttgctgtggaagcacacaacatctttggctttgagaccattcctgaagagtgcgttgaagcaacaaaggaatacatccatggcgaacaatatagatcagactccaaaacagttaaccaacaagcttacttttatgccagagacctcgaagtccatcccaaggacacatttgtgttcagtatagatggcaccgtactctctaatattccatactacaaaaaacatggatatggngtggagaaatttaactcgaccttgtatgatgaatgggttacaaggggcatgcacc

SEQ ID NO: 24846 - DNA, 89 bp, Glycine max
  unsure at all n locations
  Clone ID: LIB3106-060-Q1-K1-A2
ncacgcgtccgtccacgcgtncgcggacgcgtgggttcactttcaaatcagcttcctgtgtgtgtccctggtggatttgagaataacct

SEQ ID NO: 24847 - DNA, 404 bp, Glycine max
  Clone ID: LIB3106-061-Q1-K1-A2
taattttcgaaatgggaaaaaacgaaaaataacttttccaaattcatgacaaccgaatcacacaaaaactattttatatgctgtttttctgtttgaaggatcacacaaactagtaaccagaaaaatggcagaaacaaagttgagctccttcaaagacaaaagatggtcactccatggcatgacagctctagtgacaggaggcacacgaggcatatggtacgcaatagctgaagagttagcagaatttggggcagctgtgcatatttgtgcacgtaaacaacaagatattgataaatgtttagaagaatggaataagaaaggacttcccataacagggtcggcatgtgatgtactatctcgtgaccaacgtgaaaatttaatgaaaaatgttgcttcaatcttta

SEQ ID NO: 24848 - DNA, 326 bp, Glycine max
  Clone ID: LIB3106-061-Q1-K1-F7
tgctgctcatcctccgtaacctccgagctctgcaccgaagaacgaatccatggggaagacacatggaatgggatctgctcgcaagctcaagtcccaccgcatgaggcaaaggtgggctgacaagtcatacaagaaatcacatcttggaaatgaatggaagaaaccttttgctggttcatcccatgccaagggaattgtccttgaaaagataggtattgaggctaagcagcccaactctgccattcgtaagtgtgccagggttcaacttatcaagaatgggaagaagattgccgcttttgtccctaatgacggttgcttgaactaca

SEQ ID NO: 24849 - DNA, 397 bp, Glycine max
  Clone ID: LIB3106-061-Q1-K1-G6
cccacgcgtccgtacgaatttccagaatacaaattcacactctctttggctctggtgttgtgttgtgttgaggtacttgagaagagaaaatggtgtcgtcgcaggttgtgaatacgtacccgttgtcgagctacacgttcggcacgaaggagcccaagatggagaaggatacctccgtcgcggatcgtctcgctcgcatgaaagtcaactatatgaaggagggaatgaggaccagtgtggaaggaattttactggtacaagagcacaatcatcctcatatacttcttctgcaaattggaaacacattctgcaaactcccaggtggtcgtctcaaaccaggagagaatgaaaatgagggcttgaagagaaagttgactagcaagcttggtgctaattc

SEQ ID NO: 24850 - DNA, 293 bp, Glycine max
  Clone ID: LIB3106-061-Q1-K1-G7
aagctatatagccatggcctctaagtgtgaaagttggatgattttgggtttggtgattgctatttcgttctcaagcatgcatatggacatggcattcgcagcaaggaatctcctgcagacagaattgatccctgagctgcagccagtagtgccacctgtcatacagcctagagagatagacatctctgacttgccgccactgctaccagtaccatcaccaccaattacccttcccatcccctaagcacttggatttggattcataaataatcactcatctccactctccattt

SEQ ID NO: 24851 - DNA, 350 bp, Glycine max
  Clone ID: LIB3106-062-Q1-K1-C11
tcgcggacgcgtgggtgccggcatgcgaaatggacgctctttgcagatgggcgctggtttggcctgacgatctggggtctgaccgcaggtatgcaagcttttagagctgatgcgttgcaactttggaccaacgacgctaccgtactggcttcgcatggaggccccgtttgcggggatatgtgaaaagctgcaggtcggatgccgtacgctgcgctgcgccgctactgggctgtgtggggtgcaggctgggcgctcatgtgatgtggggctgctttgcatgccaagaaagtgctgtgtaacaggccaatgctggcaatgaaaaatgaattggtaaatgacttaaaattgtg

SEQ ID NO: 24852 - DNA, 390 bp, Glycine max
  Clone ID: LIB3106-062-Q1-K1-D2
cccacgcgtccgcccacgcgtccgtacattgcaaaaatggcatcattcaccatgacagcttccatccttggcagcccagccgtcaccaaccggtcggcagtagcaacgcagaggagatcactcgtagtgaatgctgccaaagctgttgaagcagaaaaggtcagttatgacaatgacatggatggtagcaatggaaggaggaacttgatgttcgccgcggcggcggctgctgtttgctctgttgctgggatggcagtggcagatgagcctaaaccaggaaccccagaagccaagaaaaagtatgctccgatttgtgtcaccatgccaactgctaggatttgtcgcaattgagggactttggtttttattttacttctgatgattggaaat

SEQ ID NO: 24853 - DNA, 428 bp, Glycine max
  Clone ID: LIB3106-063-Q1-K1-B8
aagcccaccattttccatttccatgtatctgtgtactttctattcttagaagaaagaagaaaactcacttttgtagagttcgagttcttattctcatggctattaccggcgaaattttccgacagagcataaaggaaatgcttgaggagtctccttccggtgcgccggaacttcaagttctcgccgttgacgacagcctcgttgatcggaaggtgatagagcggttgttgaggatttcttcctgcaaagtgacggttgtggagagtggaacgcgtgctcttcagtatctggggttggacggagggaacagttctctcgggtttgatagtgttaaggttaatctcataatgacggattattccatgccggggatgactggatatgaattactcaagaaaatcaagcaggagtcttctgtgtttagagag

SEQ ID NO: 24854 - DNA, 409 bp, Glycine max
  Clone ID: LIB3106-064-Q1-K1-A7
tattgataggatcacctctcctcctcgtgcaaacatcacttattcaattgaagcaggagtgtctgctggcattgacatgttcatggttccaaagcattacacagaattcatagatgttctaaccatgttggtgaaaaataagcacattcccatgagtcgaattgatgatgcggtgagaagaattctgtgggttaagttcatgatgggtatttttgagaatccttttgctgattacagtttggccaaatatttgggaatccaggaacacagaaatttggctagggaagcagtaaggaaatcaatggtccttctgaaaaatggtgaatctgctgacaagcctttactgcctcttcctaaaaaggcgccaaaaatacttgtggctggaagccatgctgataatctaggatat

SEQ ID NO: 24855 - DNA, 329 bp, Glycine max
  Clone ID: LIB3106-064-Q1-K1-C7
attcgggttactcagtccacagcaaactttttcataagtgaagctaggaaatccacaaacacacctgatgctcaaaaagtgcgagataatctcatctacaattacaaacctacttttggtggaacggctgggaaaggatatgatcaagtgtatctctttgaataattctatctgtaggaggtgtccttgaatttgattttatgcacaataaattatgaactggggatgtagtttgaagaaataaaaatttgtgcacagtgatgtttgtaagatgcttaatttcagggcaatgctctgcttatcaatgtgttatatcttgttattgcccc

SEQ ID NO: 24856 - DNA, 404 bp, Glycine max
  Clone ID: LIB3106-065-P1-K1-B4
taactagaaacagtgtgatgaaaatgaaggtccttgttttcttcgttgctacaattttggtagcatggcaatgccatgcgtacgatatgttccctctccgaatgaacactggctatggtgcccgtactccggaggtgaaatgcgcaagttggaggcttgctgtggaagcacacaacatctttggctttgagaccattcctgaagagtgcgttgaagcaacaaaggaatacatccatggcgaacaatatagatcagactccaaaacagttaaccaacaagcttacttttatgccagagacctcgaagtccattccaaggacacatttgtgttcagtatagatggcaccgtactctctaatattccatactacaaaaaacatggatatggggtggagaaatttaac

SEQ ID NO: 24857 - DNA, 427 bp, Glycine max
  unsure at all n locations
  Clone ID: LIB3106-065-P1-K1-D3
gacccacgcgtncgnccacgcgtccgcccacgcgtccgnaaaaaaaaaaaaaaaaaaaaaaataaaaaaaaaaaaaaaaaaaaaaaaaaaaaaaaaaaaaaaaaaaaaaaaaaaaaaaaaaaaaaaaaaaaaaaggggggggccgtttaaagggaccaaagttaactaccccggcctggcaacgaaaaagttttttaaaggggcacccaaaataaaatcaacgggccgcggtttaaaaacgcgggaacgggaaaaacccgggcgtacccaaattaaatggcttggaaaaaaatccccttttgccaagtgggcgaaaaaccaaaaaggcccgaaccaatggcctttccaaaaagtggccaaccctaaagggcaaagggaaccccccctgaaccggccaataaaccccgccggttggggggttaacccc

SEQ ID NO: 24858 - DNA, 422 bp, Glycine max
  Clone ID: LIB3106-067-P1-K1-G8
cccacgcgtccggttgctgctcatcctccgtaacctccgagctctgcaccgaagaacgaagccatggggaagacacatggaatgggatctgctcgcaagctcaagtcccaccgcaggaggcaaaggtgggctgacaagtcatacaagaaatcacatcttggaaatgaatggaagaaaccttttgctggttcatcccatgccaagggaattgtccttgaaaagataggtattgaggctaagcagcccaactctgccattcgtaagtgtgccagggttcaacttatcaagaatgggaagaagattgccgcttttgtccctaatgacggttgcttgaactacattgaagagaatgacgaagtcttgattgctggatttggacgaaaaggtcatgctgtgggagatattcctggtgtcaggtttaa

SEQ ID NO: 24859 - DNA, 401 bp, Glycine max
  Clone ID: LIB3106-068-P1-K1-D4
cccacgcgtccgaaacagtttctagtttctgggctatagtactagggtttcttcttcgcgtggcttcctccgctaacacatacagtagtacttttctgcaacttaatctattctcaccagatcaatccaaacagttttgttcatgagaattagctctctctaacctaacttgtttcttctatattttaggatgcgtttgcttctatattgttgatcatgaaccgtcacgaccaatttcagaaacgtatgcttttcttaattcaccttaaacggataacatttttgttcgtcttcatcgcattgctggaattttgcaacattctcttcaacttgtattccaattccgattctctactgtcaggaaatcatgcattcacggctttttttttttttttttttta

SEQ ID NO: 24860 - DNA, 357 bp, Glycine max
  Clone ID: LIB3106-070-P1-K1-C10
tataacgctttctcaactcgcaatttattttgtgtgttgaaagaaatgacgatagggaaggacgcagaagtataagatgaagacgaagggtagagtaagtgataaagagtattggctgacatcttgtaaataaggcaaccctaaatgaaccttgcttgggttattgaaccttgatgttcccattaattgattagctccaacctgctactgttaccaataatgaatctattgtcattgcttgaatcggacatgagtgaacgagctttgtgggattgcgtattgttagaaagtcctcaagatgatatccagagtctatacgaatcttttagatttggcctccactaatgtcctgtcaat

SEQ ID NO: 24861 - DNA, 296 bp, Glycine max
  Clone ID: LIB3106-070-P1-K1-E1
aaacaacaatatggctcatgttattgaattataaaattataaattaataatatggctggctcctgctaaaaatgccatcatctgataaatccatttcccacacaatacacaactaacttttaagcacttttatcaagaacaacataacaaactccatttggaataggaggggaaatagcttttttattttcactagatttaatggtaaataattagaccccgaactttaaaatacacaggctacatccgtgagcaataataataatttaagtgtatactactactaggcactacta

SEQ ID NO: 24862 - DNA, 278 bp, Glycine max
  Clone ID: LIB3106-071-P1-K1-A3
aacacacgttcgcatggtcttgcattaggattgatcattttatcttgtatggtatatggggactcaggggcttcatcacctgatacataactttagccaccactacgtacaatactgacggtgatattcatcaaaatctgggcacatactttagctcgaacggctgtcgacaattgccgacgaatctaactcagatgcagtgctaactatactggcctcatgtgtcatcacacggactctctataggagtggatattgagcaagattacaaggcatca

SEQ ID NO: 24863 - DNA, 288 bp, Glycine max
  Clone ID: LIB3106-071-P1-K1-B1
aagccaccgaatagtttgatgcattgtcatttggcattgaatgaagccttttcctgtatgtacatttattgctgttaaaaattcatggtaattgattagtggaggcactgatagctgctaattctgcgacatatactcgaagccaaagcttgaggcatgtcaccctctgctgatggttgcacagctgactataacctgtcgatatctgcttaatgtgtagatctcagtcggttccataactaacctaatatgtggcgcaagatactactgcctatctaatcttatttc

SEQ ID NO: 24864 - DNA, 172 bp, Glycine max
  Clone ID: LIB3106-071-P1-K1-C11
acgtaaatgctgactctgacattattattatatttttccggatcaaattttgctcaggaacaggtcttaattaaataatcgcctctaatgtggaagactctcagaaaagcttgctgcaaattctaatacaaatacacaatgagtttcactaccttcacaaacatattcacat

SEQ ID NO: 24865 - DNA, 447 bp, Glycine max
  Clone ID: LIB3106-071-P1-K1-E2
cccacgcgtccgcccacgcgtccgtacagtttcggagtgttgctcttggagctgctcacaggaaaggctcctacacatgccctcttgaatgaggaaggagtggaccttccaagatgggtgcaatcagttgttagagaagagtggagttctgaggtgtttgatattgaactccttaggtatcagaattctgaagaggagatggttcagttgttgcaacttgcagtggattgtgttgttccataccctgataaccgtccttcaatgtctcaagtgattcaacgcatacaagagttacgtaggcctagcatgaaagaggctactcaagaccaaatccaacaacttgatttgatcaatgatatagatgatgcgtcttctagatgagtttgttatgggtttgtgtacaaggataaacttctacatggtcattattgtcttggacaatctcta

SEQ ID NO: 24866 - DNA, 452 bp, Glycine max
  Clone ID: LIB3106-071-P1-K1-F5
tagcttccaaaccctaacacttctcttccttttcgatcatcacctctccacaatgccgccgaagttcgacccctcccagatagtcgacgtcttcgtccgcgttaccggcggcgaagtcggcgcggcgagttccctggccccgaagatcggtcccctcggtctctcccccaagaagatcggagaagacatcgccaaagaaaccgccaaggactggaagggcctccgcgtcaccgtcaagctcaccgttcagaatcgtcaggcgaaggtcacggtggtccccttcgtcgccgccctcgttatcaaggccctcaaggagcccgagcgcgaccgcaagaagaccaagaacatcaagcacaacggcaacatctcgctcgatgacgtcatcgagatcgctagggttatgaggccgaggtccatggccaaggacctcaacggctccattaaagagattc

SEQ ID NO: 24867 - DNA, 87 bp, Glycine max
  Clone ID: LIB3106-072-P1-K1-F3
cccacgcgtccgtacaaacaccttgatcattacaatgcatctagcaatggcggccaacgctgagaattgaccgctatcggaacgacc

SEQ ID NO: 24868 - DNA, 422 bp, Glycine max
  Clone ID: LIB3106-072-P1-K1-G9
tagaaacagtgtgatgaaaatgtaaggtcctggtttcttcggtggtaccaatgtggtagccttggcattccattcctaccatatggtcccttttcgaatggacacttgctattgtgccccgtactccggaggtgaaatgcgcaagttggaggcttgctgtggaagcacacaacatctttggctttgagaccattcctgaaaagtgcgttgaagcaacaaaggaatacatccatggcgaacaatatagatcagactccaaaacagttaaccaacaagcttacttatatgccagagacctcgaagtccatcccaaggacacattttgtgttcagtataaatggcaccgtactctctaaatatccatactacaaaaaacatggatatggcgtggagaaattaactcgaccttgtatgatgaatgg

SEQ ID NO: 24869 - DNA, 455 bp, Glycine max
  Clone ID: LIB3106-073-Q1-K1-F2
taaaagtttatcttccggaatgtaatttggagaaagatttttggaagacagagcttaaggagtttagtgccaaaaatggatatgatctcaacagaaacagagatagtcctctactcttggatgtgcttgaaggattcttgaagctcgagaatttatcccaagcaagagcaagcggtaggagatttaccacctcagaagctgatcctttacccaactccgaatcacggaatccccgaaggcattcttcctcatctgttgctggtggcttacctccacttggaagggccgttccttcatctcaggcatctgatagaagaggaggatcctccatgtctgcttataggaaggatgattacaattggcgatatgacagggatgaacttcctgaggacataattcaagcttcaagtgctttggaaaatcttcaattggacagaaaagctcggaatctaaca

SEQ ID NO: 24870 - DNA, 261 bp, Glycine max
  Clone ID: LIB3106-073-Q1-K1-G7
cccacgcgtccgcccacgcgtccgcccacgtttccgaaaaaaaaaaaaaaaaaaaaagaaagaaaaaaaaaaaaaaaaaaaaaaaaaaaaaaaaaaaaaaaaaaaaaaaaaaaaaaaaaaaaaaaaaaaaaaaaaaaaaaagaaaaaaattaaaatatataaaaaacttaaataaaataaaataaaaaataaaaaaatgtcccctatatttaaaataatttaatttaattgaccaaattttaaaacagtaaaaactgtaaa

SEQ ID NO: 24871 - DNA, 241 bp, Glycine max
  Clone ID: LIB3106-074-Q1-K1-F8
aagatggtgatgaaggagaggattatgatttgaagtttgcactattatgttactttctgtgtggtttttcttctcgtgctctgtgtatcgttgtactttccgtggaacttgccttgttccggtacttatggagctttatgtgaagtgtggtgaaaacatttatttgaaattgcttggtgaaatttagagttttaaatgtattaataaagacgaatgatcctgtaacaagtccaaacataat

SEQ ID NO: 24872 - DNA, 449 bp, Glycine max
  unsure at all n locations
  Clone ID: LIB3106-075-Q1-K1-F12
tttccgcagaagaacaaggaggttaatctaagaaggagaagcaaatggctngcgctatgatctctgccccagctggggccactgtaaacctctgccggtgccggcatggttgctccattcactggcctcaagtccatggctggcttccccaccaggaagaccaacaatgacattacctccattgctagcaacggtggaagagtgcaatgcatgcaggtgtggccaccagttggcaagaagaagtttgagactctntcctacctgccagaccttgatgatgcacaattggcaaaggaagtagaataccttcttaggaagggatggattccttgcttggaattcgagttggagcacggtttcgtgtaccgtgagcacaacaggtcaccaggatactacgatggacgctactggaccatgtggaagctgcctatgtttgggtgcactgatgc

SEQ ID NO: 24873 - DNA, 395 bp, Glycine max
  Clone ID: LIB3106-075-Q1-K2-H4
cccacgcgagataactggaaacagtgggatgaaaatgaaggtccttgttttcttcgttgctacaattttggtagcatggcaatgccatgcgtacgatatgttccctctccgaatgaacactggctatggtgcccgtactccggaagtgaaatgcgcaagttggaagcttgctgtggaagcacacaacatctttggctttgagaccattcctgaagagtgcgttgaagcaacaaaggaatacatccatggcgaacaatatagatcagactcaaaacagttaaccaacaagcttacttttatgccagagacctcgaagtccatcccaaggacacatttgtgttcagtatagatggcaccgtactctctaatattccatactacaaaaaacatggata

SEQ ID NO: 24874 - DNA, 446 bp, Glycine max
  Clone ID: LIB3106-076-Q1-K1-B8
acgtccacgcatgcgagcagctgcagcagcaatttctcccaaacgaggtggaaaggctccggcgcttgcctctaagaagaagcctgagaaggtcacgaatccgttgttcgagaagcgtccgaagcagttcggaatcggaggggcgttgcctccgaagagagacttgactaggttcgtgaagtggccaaagaatgttcaaattcagaggaagaagaggattctgaagcagaggttgaaggttcccccagctttgaaccagtttaccaaaactcttgacaaaaacctagcaacaagtctgttcaagttgcttctgaagtacaggcccgaggacaaagctgaaaagaaggagaggctcttgaaaagggctcaggcagaggctgaaggcaaaactgttgaagctaataagcctattgttgtgaagtatggtctcaaccatgttacctacc

SEQ ID NO: 24875 - DNA, 430 bp, Glycine max
  unsure at all n locations
  Clone ID: LIB3106-076-Q1-K1-C3
cccacgcgtccgcccacgcgtccgcgttgttgttgttctaaaacgtccacacattctccgtggccaggacaacaatggctccgaagaaaggtgtgaaaggttccgttgtagcagcgaagaagaaggttcaggagaaggtgacgaatcctttgttcgagaagcgtccgaagcagttcgggatcggaggcgcgctgccgccgaagcgggacctgacgcggttcgtgaagtggccgaagaacgtccaaatccaacgcaagaagcgcatcctcaagcagaggctcaaggtccctcctgcactcaaccagttcaccaaaaccctagacaagaatctcgccacgaatctatttaagatgctgctcaagtacaggccggaggacaaggcggagaagaaggagcggctcttgaagagggctcangctgaggccgatgg

SEQ ID NO: 24876 - DNA, 445 bp, Glycine max
  Clone ID: LIB3106-076-Q1-K1-F7
cccacgcgtccgaagctagtttatcgtgaggagaatatgaagttgtttgttttctttgtggctgcagtagttttggtagcatggccatgccatggcgcaggctaccaaaggttccctctccgaatgaaaactggctatggtgagcgttcttcggaggtaaaatgcgcaagttttaggcttgctgtggaagcacacaacatccgagcctttaaaaccattcctgaagagtgcgttgaaccaacaaaggactacattaatggcgaacaatttagatcagactctaaaacagttaaccaacaagctttcttttatgctagtgaacgcgaagtccatcacaacgacatatttatattcggcatagataacaccgtactctctaatatcccatactatgaaaaacatggatatggggtggaggaatttaatgaaaccttatatgatgaat

SEQ ID NO: 24877 - DNA, 217 bp, Glycine max
  Clone ID: LIB3106-077-P1-K1-C6
tatacacgttcgttgaggtgtaatctatcttatcgattgcagagtaagcccttgatgggggactttcctgcgacaaccaagatgcttgcatcgctcttcaacgctactttctgtcagagaggtggtcgacggatgaatacatcctatatggagcgtacattgtggcactatcacccgataagagaagttgcgtaagcaaacaccaatcatgccttta

SEQ ID NO: 24878 - DNA, 200 bp, Glycine max
  Clone ID: LIB3106-077-P1-K1-D2
cccacgcgtccgcccacgcgtccggtggggtttgggtaatatgcaccagatcatagatttaaaccttgttattgtaaaaaaagaaaatggaaaaaaaaaagtcttgaatttctcacttctagttctagtattgttgttgttgttgttatatgatgtatggttgaataaatgtgatttggtgtttgtactttgtagagttt

SEQ ID NO: 24879 - DNA, 427 bp, Glycine max
  Clone ID: LIB3106-077-P1-K1-G8
tatcgatactccaatatagactacaacataactggcggtagaaggtatcccatacctgacaaatcagcacctatttacataacaatcggagatggaggaaatctagaaggtcttgcctcaagttatttggatccacagccagaatattctgcattcagagaagcgagctatggacacgccacactggagataaaaaacaggacccatgctatctaccactggtatcgcaatgatgacggaaagaaagtcccagctgactctctcgtattgcataaccagtattggggaagcaatggaagaaaacagaatgaggttattgatgaagttgtcaatgttaaatgaagttggagcactctaaatcgtaaatatggtgttttgaaaagaataaaaatgtgcctatatattgtaatgtatgtagttcaatagt

SEQ ID NO: 24880 - DNA, 287 bp, Glycine max
  Clone ID: LIB3106-078-P1-K1-A4
aagcatttgaaatacttaaatgtagcttctacttctccctatcatcaatgtagtagaaaggtcattaagatttgttggtccgaagctataccatcgaaagagaaaagggctgggatgaaaactgtggagtacctttactcgtttctttctattgctttctaacttgtacggctcgattaatgaagctacagcagttaagaatttaaaaaaaaaaaaaaaaaaataaataaaaaaaaaaaaaaaaataaaaaaaaaaattaaaagggtggccgttctaaatgaatcca

SEQ ID NO: 24881 - DNA, 278 bp, Glycine max
  Clone ID: LIB3106-079-P1-K1-C10
cccacgcgtccgaatccatcatcaaaccaagcatggttgaaacaatcactggattcaacagggcaagctaggattcagtgggtccaaaagaactacatgatttacaactactgcactgacactaagcgtttcccacagggccttcctcccgagtgcacaatcgcatgaaaacaaaactatttcatattataaacctctcatacctcatgaattcattttttttttcttgtcttgtgtaaattaataaaaacactatagggctcctcggtttatacttt

SEQ ID NO: 24882 - DNA, 68 bp, Glycine max
  Clone ID: LIB3106-079-P1-K1-C8
aaaaaaaaaaaaaaaaaaaaaaaaatattttaaaaaaaaaaaaaaaaaaaaaaagggggggactatat

SEQ ID NO: 24883 - DNA, 471 bp, Glycine max
  Clone ID: LIB3106-079-P1-K1-D9
ctcggctgcttgaagatgagcacaagttgctttctggcgtggaggacaaaatcaactctctttgcaatgagctcaagtttatacacatcttcctcaagaattctgagggcaagcgcagtcacgagatggtgaaagaagtggtgagccagatcagagatgtcaccctcaaagctgaagatgtggttgacacctacctttccaacatcgcccaacaaaaacagagaagcaaactgagcaagttattccacctcaaagaacatgtcatggtgcttcaccaagtcaactctgacatagagaagatcaggactcggatcgatgagatctataagaacagggacagatatggcattggagaaggtgatttccgaagcgaagaagctgctgcagaagcagaaccactcctcaaaagaaggagggaggtggaggaaagagatgtggtgggcttagtgcatgactcaagccatgtaattc

SEQ ID NO: 24884 - DNA, 233 bp, Glycine max
  unsure at all n locations
  Clone ID: LIB3106-079-P1-K1-E10
cagcagtaccaggacgccactgctgttgtctaaggggagtacgaggatgaggagggaggcnatggtgaagcagacgaccatatgtgaagagactaaaatgtgaagatgcctgtgtcttacttatgctatgtgatgcgtaagtgtgtttgctctgcactccaacgtgaagaagattgtaattactaatagtgtatgtacggtttgcgggataatacttttgatggtagtgagag

SEQ ID NO: 24885 - DNA, 348 bp, Glycine max
  Clone ID: LIB3106-079-P1-K1-F7
cccacgcgtccgcaacgctgcgaaagacattggagctgacaccccagcagctgagcggatacaacggcacggacccatcgaagccgatctacgtggcggtgaagggccgcgtctacgacgtcaccaccggaaaatccttttacggccccggcggcccctacgccatgttcgccggcaaagacgccagcagagccctggcgaagatgagcaagaacgacgacgacatcttcccctccctcgacggcctctccgacaaggagatcggcgttctcaactactgggagaacaaattccaagctaagtaccctgtcgttgctcggggttctaattaatcatatgataacctaa

SEQ ID NO: 24886 - DNA, 243 bp, Glycine max
  Clone ID: LIB3106-079-P1-K1-G1
aaaaaacagccggaagaaaaatatgttaaaacatatattaaatataaattttttttaaaaaaaaaaaaaaaaaaacccgcatttaaaaaaaaaaaggtaaaaaaaatactaaatataaaaataattataattatttattaataattattaaattaaaataactaatattttatataaaaataaatataaaatataaaaattaatataaaaaatataaaaataataaaaaataaataatatatt

SEQ ID NO: 24887 - DNA, 388 bp, Glycine max
  Clone ID: LIB3106-085-Q1-K1-F7
cccacgcgtccgattcgttgttgttgttctaaaacgtccacacattctccgtcggcacaacaacaatggctccgaagaaaggtgtgaaaggttccgttgtagcagcgaagaagaaggttcaggagaaggtgacgaatcctttgttcgagaagcgtccgaagcagttcgggatcggaggcgcgctgccgccgaagcgggacctgacgcggttcgtgaagtggccgaagaacgtccaaatccaacgcaagaagcgcatcctcaagcagaggctcaaggtccctcctgcactcaaccagttcaccaaaaccctagacaagaatctcgccacgaatctatttaagatgctgctcaagtacaggccggaggacaaggcggagaagaaggagcg

SEQ ID NO: 24888 - DNA, 334 bp, Glycine max
  Clone ID: LIB3106-086-Q1-K1-H4
taattttgaggaggcaattctggtcattcccatcagtattccgttttcagatttcagtttcggtatgtttttttgggggtcgtttgggtactttggtaccaactttcccgtgccgaaaactttcgggaccctacccatttggggtctttccagagtaagaacttaaacccgggaaaaaaaaaaggacctttgcaccttgcactttgcgggtgtttttggaaatatcaacctgcatctgtcagagtggttttgttattttttagtgccatcactctctattagccattttgggaagttaattttccttgtgggatcattttgatttcacttatgc

SEQ ID NO: 24889 - DNA, 108 bp, Glycine max
  Clone ID: LIB3106-087-Q1-K1-B2
taatgtcactttatgttatgtgggtaagtcacctaagacactccacgtacctacgttgttgtctcttaccggctttaataaatcttctgcccttgttccatatttact

SEQ ID NO: 24890 - DNA, 455 bp, Glycine max
  Clone ID: LIB3106-088-Q1-K1-B1
cccacgcgtccgaagcagcagagggaggagcggcattaaaaatgcagatcttcgtgaaaacggtaacggggaagaccataaccgtcgaggtcgaaagcagcgacaccattgacaatgtcaaggctaagattcaagacaaggaaggcatccctccggatcagcagcgtttgattttcgccggaaagcaacttgaagatggaaggaccttggccgattacaacatccagaaggaatcaacccttcaccttgtcctcaggcttcgtggtggcatcatcgagccttccctcatggctttggctcgcaaatacaaccaggacaagatgatttgccgcaaatgctatgctcgtctgcaccctagggctgtgaactgccgtaagaagaagtgcggtcatagtaaccagttgaggcctaagaagaagatcaagtaaattctgggtgggatattgttggtctct

SEQ ID NO: 24891 - DNA, 295 bp, Glycine max
  Clone ID: LIB3106-088-Q1-K1-E10
tatgctgagcatacgcttcacgagaggactacgcgaactagcctacctggccggagcctcccatctagctcaggacgaagtaggcaatgcgtctcaagccagacgactttacagagacatcagcggactggttcatacgatctactatggtaacggagtcttagcgttcacgagacacctatatatgccggaattcactctgtgtaaagatcactgtatacggctgtgacgatcatgatcaggagctgatgacattgctattacatggctagaacgaacatgttctgcaaagctt

SEQ ID NO: 24892 - DNA, 444 bp, Glycine max
  Clone ID: LIB3106-089-Q1-K1-F8
tagctatcagcgtctcctttgctgctactaatatcagaactgaacttcatccaaaaaccaggaatgagacaacatttttttatataaaccaaaataatttcagtttcagctgttgctcatttatcttatggtagttttctgggttccccactcagacttagatgttgagtcgtacactttcaaccccaacaactcaaagcctcaaggcaacaagaacaaatgcaatgctttatccaactcatagattattgtctcttaagaacccagtatcaaataccagaggattttcatcaaaagagaatatttttatcagaggtcaccaaatcaatataaaacaattttttggccttatctcgggtcgtgcgccacgaaacaaagcaggaagttgttccccaaggtgtggcctgccactgacaggagaaaatgtggaagaggttttggatg

SEQ ID NO: 24893 - DNA, 206 bp, Glycine max
  Clone ID: LIB3106-089-Q1-K1-G9
tacaatcgttcgggaacgcgtcagatacattttagatctcttcctacaatggcaacctactggctcctgatgctccactcgattacaataaatagccgtacactgactgcctcctagaccatgatcctacgtctgatgtaccattttgacagcaccttaatcgtcgactcctcgctcacaaatcgccctataggccgcatgtttaa

SEQ ID NO: 24894 - DNA, 188 bp, Glycine max
  Clone ID: LIB3106-091-Q1-K1-A5
taacaatgttggaaataaagttttggggtccaaaggaagtaatgcttcggtacaccagttttaggtgcaaatagcaccagacaaggttcctgaaatgactctttggggaagtaaattggaacctggtcatttatgactttgaaaatttagtttgaaccttttaaaatggcctaataggtgatatatat

SEQ ID NO: 24895 - DNA, 476 bp, Glycine max
  Clone ID: LIB3106-091-Q1-K1-A7
cggtcccgaatcgccggatccacccagcgcgtccgctcagaatggtaactcaatgcactatgggaccctggttggggaagtgaaagctaatttgaagaaaggtattggagcgaatgaattgctgtcccatctttcagcacatcctgcacctgctcaagaaaagatgagtgctctggttgaagctctattcgagggaactgagaaaggttttgctaaagaagctgataagaagaagaactactttgctgctgctgttaccgaagagggatcccagctgttattgcttcatgctattgaagaattttcttgcaagtctacttccaatgctttgaatgaggttgccctggttctaaaggcactctatgatgctgatgtgttggaggaagagcacatagtgcagtggtatcaaaagggactgaagggcgataacaagaactctaagattttgaagaatgctcaacctttcattgattggc

SEQ ID NO: 24896 - DNA, 310 bp, Glycine max
  Clone ID: LIB3106-091-Q1-K1-D11
ctttcttaatggagaactgagcgttttcttagtaacattgctaatatctatgtgaaagcgcatttttaaaaaaaaaaaaaaaaaaaaaaaaaaaaaaaaaaaaaaaaaaaaaaaaaaaaaaaaaaaaaaaaaaaaaaaacaaaaaaaaaactcccaaagcactatcatacatattaaccccagagagcgactcttgtgaatgcaaaaatacaaaaatatttcaaattataaaaaaaccaaaggatcttcctgtttgcacaccacacaacgagaaagcaaaacccctaaactatctaattccataaactac

SEQ ID NO: 24897 - DNA, 439 bp, Glycine max
  Clone ID: LIB3106-091-Q1-K1-F9
cccacgcgtccgaccacgcgtccgtttgtattacaagggaagaagaacttagctgcaagcgaaggaaggatcaaagagaatggctcaagcaatggcatcaatgactagcttacgtggttcctctcaggctgtgttggaaggtagccttggctccacacgcttgaatgtggggagtggaagcagggtggcctcagtcacacgtgcagggttcacagttagagcacagcaacaacaagtgaatggtggtgaggtacaaagtagccgtagggcagtgctttcacttgttgctgctggtttgaccactggctcttttgttcaagctgtgcttgctgatgccaaacctatcaaagttggaccacctcccccaccttctggcggattacctggaacattgaactcagatgaaccaagagaccttaagctgccattgaaagataaa

SEQ ID NO: 24898 - DNA, 286 bp, Glycine max
  Clone ID: LIB3106-092-Q1-K1-B10
aagaaaaaaataaaataaaaaaattttatagaataaaaagacatacttgttggtgggtgggttggcataagaagttatgtgatgaccttcaatgtctacatgttggaacgttgtgtgttgcttgcaacacatgatattatgtattgatccccctcttcatgcgagatgtaatgcattttatatctaccataactctgctgtttgataactttttttgtccaatataattaaaataaaagtgtaacaattcaattttataaaaggagttgcccaaaattaaattgcc

SEQ ID NO: 24899 - DNA, 391 bp, Glycine max
  Clone ID: LIB3106-092-Q1-K1-E5
cccacgcgtccgattcgctcgcattgcttcgtctcacaacagcagctgcagcagcaatggcggccaaacgaggtggaaaggctccggctcttgccgctaagaagaagcctgagaaggtcacgaatccgttgttcgagaagcgtccgaagcagttcggaatcggaggggcgttgcctccgaagagagacttgactaggttcgtgaagtggccaaagaatgttcaaattcagaggaagaagaggattctgaagcagaggttgaaggttcccccagctttgaaccagtttaccaaaactcttgacaaaaacctagcaacaagtctgttcaagttgcttctgaagtacaggcccgaggacaaagcttaaaagaaagagaggctcttgaaaagggc

SEQ ID NO: 24900 - DNA, 277 bp, Glycine max
  Clone ID: LIB3106-093-Q1-K1-D1
cccacgcgtccgcccacgcgtccgaagcctgtcatgttaaacaaggcactttctactaaattgtgtgactcaagttcgacacaaagtgcagaaatggagaaaaaggaaatatgtgtcttcctttcctgggagtgatagggtttatcgccatggtgtttcaattcaaaagtttgaagtttctttgtctttgatttcatgtttaattttgttagcctgattgatatcatatctattttcttatttaacaattgaaataatacgtgctgcctttctttct

SEQ ID NO: 24901 - DNA, 164 bp, Glycine max
  Clone ID: LIB3106-093-Q1-K1-D10
aaaaagaaaaaaaaaaaatttaaaaaaaaattttaaattaaaaaaaaaaaaaaaaaaaaaaaagagaaggataaaaaaaaggacggacggtctgccgctctaaagcttccatccttacgcacgcgtccatgcaacctccttaattgttttatatagcctccttt

SEQ ID NO: 24902 - DNA, 338 bp, Glycine max
  unsure at all n locations
  Clone ID: LIB3106-093-Q1-K1-D5
tagcatcgcactcaacaagcccatgctggcattgccctcttcgtctcgaaccgcaacccctatcagagccatgaactcctccacctcctccgtcaggacctctctctcctccaacttcgtcgctccttacactggaatcaacagcgcctatagcctcttctccggccacaagctccgactctcctccctcaatccggggtcgtttcgcggctccaactccaaacgaggcgtcgttaccatggttattccttttcaaagaggaagtgcatgggagcaacctncaccggacttagcttcttactcgtacaaaaatcgaattggttatttgggcatgtctc

SEQ ID NO: 24903 - DNA, 415 bp, Glycine max
  Clone ID: LIB3106-094-Q1-K1-A3
atttgatgcagggcatagtgctgatgttcttgctgatgaatgcttcttagaatcagtaggaaaggctcttcgacccggaggagtgttctctgctccagcagacagcctgtggcataagaactttgtggttgcagacaccatagcaaattgcaagaagatattcaaaggctccgttaactatgcttggaccacggttcctacatatgcaaggcatttcttatctaactatatgtttacttttctaaattttatatattaagagaagcttttggtaacaagtgtttctttgtttttgtttaccagtggggtgattggattcatgctttgctctacggagggtccaccagtgaacttcaaacatccaataaataaattgaatccagagaaaaatggggtggcaaagggacctactaag

SEQ ID NO: 24904 - DNA, 453 bp, Glycine max
  Clone ID: LIB3106-094-Q1-K1-C2
caaggctggagcgacatacctgaagttggcaagttgtcatttgaagttggaaagcaagcatgaagctgcacaggcccatgtcgatgctgcacattgctacaaaaagactaatataaacgagtctgtatcttgcttagaccgagctgtaaatcttttctgtgacattggaagactctctatggctgctagatatttaaaggaaattgctgaattgtacgagggtgaacagaatattgagcaggctcttgtttactatgaaaaatcagctgatttttttcaaaatgaagaagtgacaacttctgcgaaccaatgcaaacaaaaagttgcccagtttgctgctcagctagaacaatatcagaagtcgattgacatttatgaagagatggctcgccaatccctcaacaataatttgctgaagtatggagttaaaggacaccttcttaatgctggcat

SEQ ID NO: 24905 - DNA, 434 bp, Glycine max
  Clone ID: LIB3106-094-Q1-K1-G4
ctcacgcgtgcggctcatcatgttattgcttttcttatctttggaagcactgcctcaaatggcgggctctgtgacgaccactctggcgcaattcagcggtcttagaccccaattctcagctgcccctgtgaagaacttggttgctgtgcaacccatgagtcgcaaggggaagggtgcattgggagctcgatgtgactacattggttcatccactaatctgattatggtggcttctacaaccctgatgctgattgctggaaggtttggattggctccatcagcaaacaggaaagccactgcagggctaaagctggaggtgagggactcaagcttgcagactggtgaccctgctggcttcacccttgctgacaccttggcctgtggatctgttggccacatcattggcgttggagttgttcttggtcttaagaaca

SEQ ID NO: 24906 - DNA, 424 bp, Glycine max
  unsure at all n locations
  Clone ID: LIB3106-095-Q1-K1-E10
cccacgcgtccgaaacagtgtgattaatttgaaggtccttgttttcttcgttgctgacgggtttggtagcatggcaatgccatgcgtacgatatgttccctctccgaatgaacactggctatggtgcccgtactccggaggtgaaatgcgcaagttggaggcttgctgtggaagcacacaacatctttggctttgagaccattcctgaagagtgcgttgaagcaacaaaggaatacatccatggcgaacaatatagatcagactccaaaacagttaaccaacaagcttacttttatgccagagacctcgaagtccatcccaaggacacatttgtgttcagtatagatggcaccgtactctctaatattccatactacanaaaacatggatatggggtggagaaatttaactcgaccttgtatga

SEQ ID NO: 24907 - DNA, 303 bp, Glycine max
  unsure at all n locations
  Clone ID: LIB3106-095-Q1-K1-G3
accacccatccntcattcttatcaaactttagtttttcccaacacaatactctgtcgtcggcgggttcatacaatactatagattgtcacatataccttcatatccacatgataatacctactgtgctcctcatcacagctccctaattataaatcacacgatacatccttccataaatggcacacctaaccaaatttcgaaccacaattacctccctaagaattcttcaaaatacctattgcatacaaccaaacctaaacttatttacatctctcatgaccacgatctatgcactgttaccc

SEQ ID NO: 24908 - DNA, 259 bp, Glycine max
  unsure at all n locations
  Clone ID: LIB3106-095-Q1-K1-H4
agaggtgatttcagtgagtgatcgggttcacttgatctcatcataatcgcagcgtgatggaagaagatgccgatcagaaacatcgccgtcggaaggcctgaagaggcgactcaccccgacacgttgaaggcggctttggctgattcatctcaccttatcttcggttcgccggctcggctccggcatcgctacaacagctcccgacnacgggcttgccccctgcggcctatcttcgcttcattgccatgcattcgccctt

SEQ ID NO: 24909 - DNA, 327 bp, Glycine max
  Clone ID: LIB3106-095-Q1-K1-H5
taaaaaaaaaaattagaaaacaatatagatacgatcttttatcctataattttatcaatgatgcagataagaaagactcatatatttatggatatagatccctatttcaagtaaaaaaaaaccaagtgatttcttctaattacaacacgtataaaaaagaattattggatatcatagataatctctttatcaagaattatatatcggaagatgcgattctagatatggaaaaaaatatgtatagaaagtattttgattggatgggaatcaatagagaaatactaaatcgttccatattgaattcagaattttggttctttttaaaaa

SEQ ID NO: 24910 - DNA, 435 bp, Glycine max
  Clone ID: LIB3106-096-Q1-K1-A1
aagtagttgagaactaagaaggagaagcaaatggcttcctcaatgatctcttccccagctgtggccactgtcaaccgtgccggtgccggcatggttgctccattcactggcctcaagtccatggctggcttccccaccagaaagaccaacaatgacattacctccattgctagcaacggtggaagagtgcaatgcatgcaggtgtggccaccatttggcaagaagaagtttgagactctttcctacctgccagaccttgatgatgcacaattggcaaaggaagtagaataccttcttaggaagggatggattccttgcttggaattcgagttggagcacggtttcgtgtaccgtgagcacaacaggtcaccaggatactacgatggacgctactggaccatgtggaagctgcctatgtttggttgcactgatgct

SEQ ID NO: 24911 - DNA, 243 bp, Glycine max
  Clone ID: LIB3106-096-Q1-K1-H2
tacacacacaaaaccggttcctctcttaaccctctgaaagccaaaagagaaaaaaaaaatgcagccccaccagaaccctcccggactggattccgacccgcagctcccgcagatcaaaatccaccaccctgcctccgcacgccaccatcacccttgctccgccggcgccgcgacccccaccctcaccgacggctcgcgtcgcaaaatcggcgtggccgtcgacctatccgacgagagcgccta

SEQ ID NO: 24912 - DNA, 118 bp, Glycine max
  Clone ID: LIB3106-097-Q1-K1-E6
cccactcgttcgcccactcgtccttccactcgttcgcccactcgtccggtaatatgctctgccttaccttatcttgttgaaatctttgaatatatcatggtatcatggtcctgctgtt

SEQ ID NO: 24913 - DNA, 75 bp, Glycine max
  Clone ID: LIB3106-099-Q1-K1-C11
cttatttcctcacgatgtaaaacttaatctcatacttgtacttcagcatcaataaacataccccttatatttgag

SEQ ID NO: 24914 - DNA, 443 bp, Glycine max
  unsure at all n locations
  Clone ID: LIB3106-099-Q1-K1-C7
tagaaacagtgtgatgaaaatgaaggtccttgttttcttcgttgctacaattttggtagcatggcaatgccatgcgtacgatatgttccctctccgaatgaacactggctatggtgcccgtactccggaagtgaaatgcgcaagttggaagcttgctgtggaagcacacaacatctttggctttgagaccattcctgaagagtgcgttgaagcaacaaaggaatacatccatggcgaacaatatagatcagactccaaaacagttaaccaacaagctttactttatgccagagacctcgaagtccatcccaaggacacnattgtgttcagtatagatggcaccgtactctctaatattccatactacaaaaaacatggatatgggggtggagaaaattaactgaccttggatgatgaatgggttaacaagggcaatgcaccgg

SEQ ID NO: 24915 - DNA, 432 bp, Glycine max
  Clone ID: LIB3106-099-Q1-K1-E1
aagccaagtgaaagtgagaaaaaataaaaatcaaagagcataatgtcagggatcattcacaagattggggagacccttcatgtgggagggcacaagaaggaggaggagcataagggtgagcaccatgctggagaatacaaaggggagcaccatcgtgaacacagtagtgagtacaaaggagagcatcatggtgaacacaaagctggagagtaccatggtgagcacaagccagagcacaaagaggggttcctagacaaagtcaaggacaagatccatggtgagggcggcgccgccgagggcgagaagaagaagaaggagaagaagaagaaggagcatggccatgagcatggccatgacagcagcagcagcagtgacagtgattaaactgctgcatcacctatatatttaaaggtttatgggaccatagtagcg

SEQ ID NO: 24916 - DNA, 450 bp, Glycine max
  Clone ID: LIB3106-099-Q1-K1-E2
aaacagtgtgatgaaaatgaaggtccttggtttcttcgttgctacaattttggtagcatggcaatgccatgcgtacgatatgttccctctccgaatgaacactggctatggtgcccgtactccggaggtgaaatgcgcaagttggaagcttgctgtggaagcacacaacatctttggctttgagaccattcctgaagagtgcgttgaagcaacaaaggaatacatccatggcgaacaatatagatcagactccaaacagttaaccaacaagcttacttttatgccagagacctcgaagtccatcccaaggacacatttgtgttcagtatagatggcaccgtactctctaatattccatactacaaaaaacatggatatggggtggagaaattaactcgaccttgtgatgaatgggttaacaagggcaatgcaccggcactgcccgagact

SEQ ID NO: 24917 - DNA, 353 bp, Glycine max
  Clone ID: LIB3106-099-Q1-K1-H2
tatccatgtaacaacatagaagacacgtcgttttgtatcttcattttggttcctgcaataatggatttgatgttccctctgaaaccccactgtgttattctcaaggcaccactctcttcttctctcttgttcccttttcctctcaggtttcgggctgtcaccgctttcaagcatgccaatattcaatgcgagcttgaaggcagacccaatggtgctctctctggtgacttcgaccctcgcttcattgacaggcaaaaagcactggaagcagcgatgaatgatataaacaacaactttggaaagggcagtgttacaagactgggcagtgctggtggagctttggttgaaacttt

SEQ ID NO: 24918 - DNA, 85 bp, Glycine max
  Clone ID: LIB3106-100-Q1-K1-F1
cccacgcgtccgaaaaagataaaataactgataagttcaatatgaataaaaaaaaaaatgtgtcagttacaaaaaaaaataggat

SEQ ID NO: 24919 - DNA, 360 bp, Glycine max
  unsure at all n locations
  Clone ID: LIB3106-100-Q1-K1-G10
cccacgcgtccgtaccaatcgccctgttggttacaagtgtggaccttacactctgccttgaaagagttgaggttgttgctgaaaacaaagatgacagggcgtaagtgcactatggctgttggctactacaaactgtgactacatgtttgttgtatcgtcttgtaactttctagtgaataagagctagctgctcactagtgtaccctataataaaacatgtactttcggtgtnnaaaaaaaaaaataaaaaaaaacaaaaaaaaaaaaaataaaaaaaataaaaaataaaaaaaaaaaaataaagaataaatttttacaaaaaaatatgggggggccgttttaaaggttcaaagtttactt

SEQ ID NO: 24920 - DNA, 401 bp, Glycine max
  Clone ID: LIB3106-101-Q1-K1-A4
aagtagttgagaactaagaagaaggaaatggcttcctcaatgatctcctccccagctgttaccaccgtcaaccgtgccggtgccggcatggttgctccattcaccggcctcaaatccatggctggcttccccacgaggaagaccaacaatgacattacctccattgctagcaacggtggaagagtacaatgcatgcaggtgtggccaccaattggcaagaagaagttcgagactctttcctacttgccagacctcgatgatgcccaattggcaaaggaagtcgaataccttctaaggaaaggatggattccttgcttggaattcgagttggagcacggtttcgtgtaccgtgagcacaacaggtcacctggatactatgatggacgctactggaccatgtg

SEQ ID NO: 24921 - DNA, 513 bp, Glycine max
  Clone ID: LIB3106-101-Q1-K1-D2
aaaaaaaaaaaaaaataaaaaataataaaaaatatttttatttaaatattataataatattataatggtgaataaaaaaaaaaggatggggtaataaaaatataataataaaaaaaaaataattaataatattttttaaataaataaataaaaaaaaaaaataggggccccccttttaaaaaaatcaaattttatttccccttctttccaaatataaattttttttttatgtccccaaaaattaaattaactccccctttttaaaaaactttttatttaaaaaacccttccttttcccaaataaaatcccttttaaaaaaatccctttttcccaattttcttaaaaaaaaaaaagcccctacccattccccctttaaaaaatttttccacttttattttaaaattgaccccccctttttatcccccttttaaacccccttgttttttgtttttacccccaatttaacctcttttatttttcacacccttttaacccccttttttttttttttt

SEQ ID NO: 24922 - DNA, 289 bp, Glycine max
  Clone ID: LIB3106-102-Q1-K1-B2
aggaaaaaaaattgcgaagcctggaaacgaagcgtttagatttagaagaacagaagatgcagcttcgtcgatcttgcttcttctttcatcattcggcatcgcgttagggtttgcagattttcaatttcccttcttttcgctacgtttcttgcttggaatctcgctattcctccgttgttccgtttccgcaactcatcatttcgaaagatatcgcttcacaaggaggaagagcatgtaataaaggaaaaaatggaggtggaggtgccaatctcgcttgattcgaataatc

SEQ ID NO: 24923 - DNA, 428 bp, Glycine max
  Clone ID: LIB3106-102-Q1-K1-C1
aaccagtccaatttcctttcctttcctttctctccattggacactgcctcttgtctctctgaattggcttttcttcccttttgctttattggggcagcctctctgcaatccacagataacttagattacttccacatgctcatctcatcattcccagcttttcatctgagtgggagatgagaagaactggccgagctttaaaaaaaaaaaaaactgctcttgttttttctctgaatttcggtgtgatggagttcccttcccctactatgcgagtttggacccttttcttgttcctgctacttctgaagagtgatgttgtgcaatcggcttctgattccttgattggtcttggaagctatgacattaccggtcctgcagctgatgttaacatgatggggtatgccaacactgagcaaattgcatctggg

SEQ ID NO: 24924 - DNA, 190 bp, Glycine max
  Clone ID: LIB3106-102-Q1-K1-F2
cattataggtatagtgttaagattatatagttcattgtgtatattcttattattgtattctataatttttgtttaattatttatattttcatatattttataaaaacgcagactacaaaaaaaaaaaacttgcaaaatacacgaaaacaacataaactaagttaacaagatcttaaactagattactatc

SEQ ID NO: 24925 - DNA, 446 bp, Glycine max
  unsure at all n locations
  Clone ID: LIB3106-102-Q1-K1-G9
ttcggctttgatttctctctcctcgactcgatcccaattccactagggattcaattccgatgcgattccgagcttgttagatccacgacaaggtttcgtttcccagattcttttgtaaaaaaaaattcttcctctgcccaacaggtaagttgtaaaaaaatggaccatgacaagactgggtgccaagctcctcctgaaggtcctatattgtgcatcaacaactgtgggttttttggaagtgcagctaccatgaacatgtgttctaaatgccacaaagacatattgctgaaacaggagcaggccaagcttgcagcatcatccattgggaatattatgaatgggtcatcaagcagcactgaaaaggaacctgttgttgctgctgctgctaatattgatatcccagntattccagtagagcctaaaactgtctctgtgcaacctttatt

SEQ ID NO: 24926 - DNA, 379 bp, Glycine max
  Clone ID: LIB3106-103-Q1-K1-D2
tatagcccaagccctatacaaccaaaccctaacacacacccatttgattcagtttccatggctagcctcaaggttgcatttttggctgcagtgctctgcatggttgtggtgagtgcacccatggcacatgcagctatcacgtgcgggcaggtgacgagtagcctggccaattgcatcggttacctccagaagggaggaacgccgtcgtcgggatgctgcaacggagtgaagagcctcaatgccgccgccaagaccaccgtcgaccgccagacggcgtgcaactgcctcaagtcggccgccagccaaatctccggcttcaacgccaacaacgccgtctcgctccccggcaaatgcggagtctccatcccctacaagatca

SEQ ID NO: 24927 - DNA, 372 bp, Glycine max
  Clone ID: LIB3106-103-Q1-K1-D5
cagcagttagttcagttatggttgcagagattcctttcaaacacaaaagaacctcagattttggttcctaattgacaaccatggcgggtgcgtgcagagcacccatttgccatcttcctccgcagaagcccaaaaccagaatccagaattctcacagcagaagagctcaacttccaaataggcgtttgttcctcttctctctgcctctctctagtttccttctccttcctgttccaagctttggtgatggtaacaatgcaatcattattgataaacttcaaagtgggccatcttcatttgctgccacaatgtatgacccagtaagtgcggctgaaagagaagcaagtgctttggtttcagagagagtgtctc

SEQ ID NO: 24928 - DNA, 378 bp, Glycine max
  Clone ID: LIB3106-104-Q1-K1-C12
atcttatataaccctcgattcaagttgagaaattcggcaaccaaatctcagatttagtttaataatgtacatttaaaattattattttttgattgatccatgtacattagacattagttatacaataagaatcagttgcccttgtcgtaaaaaaaaaaaaaaaaaaaaaaaaaaaaaaaagggcggacgaataaaaaagaaacaaagcttacgaacgcgtgcatgcaacaaaataggggcggctatttttagaggttaacaagctatcgaccgcgcgcatgcaaagaaatacctttcttataaagccctgtaattaaataacttggtcgccgtttaacaaattcgtgtttgggaaaaccgtgtcataaccaaaattaa

SEQ ID NO: 24929 - DNA, 329 bp, Glycine max
  Clone ID: LIB3106-104-Q1-K1-C5
gcgactacgcgtacatcgacacctgccgttctagatcgtgcgcgctcactctcgaggatccaacgctgacgggacgctctgcatagtcgacgcgcgtgtgctacttatattcagctggaccctacacatttaactaacactggtgcctcgggtaaacaactggcgtgactgcagaaaactctggcggtacccaacttaattgtcttgcagtacatgcatctttaagcagccctcgtcataacgaagaggcaaccaccgatcggcctttataacaaatgggaagcctccatggtcaatgggacacgccctgaagaactgcataaatctcg

SEQ ID NO: 24930 - DNA, 450 bp, Glycine max
  Clone ID: LIB3106-104-Q1-K1-C8
aacggaggcagcttttaaatgaatcaaatgagtttgtgggagataaagttgcctatgcacttgaacaaggtctaaaaggtattgcatgcattggggagactctcgaacagcgtgaagctggtacaacaacggctgttgtttctgagcaaacaaaagcaattgcagctaaaatatcaaattgggacaatgtcgttttggcctacgagccagtttgggccattggaacaggaaaggttgctactcctgctcaggctcaagaggtccatgctgatttgaggaaatgggttcatgacaatgtgagtgctgaagttgctgcatctgtaagaattatctatggaggttctgtaaatggaggaaactgcaaagaattggccgcacagcccgatgttgatggatttttggttggtggtgcctccctgaagccggagttcgtggacatcataaatgctg

SEQ ID NO: 24931 - DNA, 429 bp, Glycine max
  Clone ID: LIB3106-105-Q1-K1-C6
tagaaacagtgtgatgaaaatgaaggtccttgttttcttcgctgctacaattttggtagcatggcaatgccatgcgtacgatatgttccctctccgtatgaacactggctatggtgcccgtactccggaggtgaaatgcgcaagttggaggcttgctgtggaagcacacaacatctttggctttgagaccattcctgaagagtgcgttgaagcaacaaaggaatacatccatggcgaacaatatacatcagactccaaaacagttaaccaacaagcttacttttatgccagagacctcgaagtccatcccaaggacacatttgtgttcagtatagatggcaccgaactctctaatattgcatactacacataacatggatatggcgtggagaaatttaactcgaccttgtatgatgaatgggttaacaa

SEQ ID NO: 24932 - DNA, 449 bp, Glycine max
  Clone ID: LIB3106-105-Q1-K1-H6
tatagcccaagccctatacaaccaaaccctaacacacacccatttgattcagtttccatggctagcctcaaggttgcatttttggctgcagtgctctgcatggttgtggtgagtgcacccatggcacatgcagctatcacgtgcgggcaggtgacgagtagcctggccaattgcatcggttacctccagaagggaggaacgccgtcgtcgggatgctgcaacggagtgaagagcctcaatgccgccgccaagaccaccggcgaccgccagacggcgtgcaactgcctcaagtcggccgccagccaaatctccggcttcaacgccaacaacgccgtctcgctccccggcaaatgcggagtctccatcccctacaagatcagcaccttcaccaactgcgctaccatcaaggtttgaagagaaagtcatgggcgcacgaaaccggaaactac

SEQ ID NO: 24933 - DNA, 83 bp, Glycine max
  Clone ID: LIB3106-106-Q1-K1-F7
accacgcgtccgcccacgcgtccgaaaaaaaaaaaaaaaaaaaaaaaaaaaaaaaaaaaacaggcaaggtgaaaagaaccaag

SEQ ID NO: 24934 - DNA, 364 bp, Glycine max
  Clone ID: LIB3106-107-Q1-K1-D7
gctgctcatcctccgtaacctccgagctctgcaccgaagaacgaagccatggggaagacacatggaatgggatctgctcgcaagctcaagtcccaccgcaggaggcaaaggtgggctgacaagtcatacaagaaatcacatcttggaaatgaatggaagaaaccttttgctggttcatcccatgccaagggaattgtccttgaaaagataggtattgaggctaagcagcccaactctgccattcgtaagtgtgccagggttcaacttatcaagaatgggaagaagattgccgcttttgtccctaatgaccgttgcttgaactacattgaagaaaatgacgaaatcttgattgctggatttggac

SEQ ID NO: 24935 - DNA, 371 bp, Glycine max
  Clone ID: LIB3106-107-Q1-K1-F2
aaaaaaaaaataatattaattaaattatttttttttttttaaaaaaaaaataaaattaaaggggatattaaaaaaaaaaaatgggggataaaataaataaatataaaattatataaaaaaaaaaaaaactccccaaaaaaaaaaaaaagggggggggcttttttaaggattcaatttttttttccctttttttggaagatttatttttttttttggggcccctaaattaaattatttggcccgttttttaaaacgttgggttttgaaaaacccttggttttccaaattttattttttttgaaaaaattccttttttccaagtttgggttaaaaaaaaaaagggcccaactcttttttttttcaaaaatttt

SEQ ID NO: 24936 - DNA, 416 bp, Glycine max
  Clone ID: LIB3106-107-Q1-K1-G11
tagcaagttaacaacacttttgtcttcgttccattatctagttctcaattctcttcagcctttgcctctgaaagaaatgggtagtcttgaagcggaaagaacaacagtaggattggcagcaagagacccttcagggattctctccccatacacctacaatctaagaaacacaggccctgatgatgtttacattaaagttcactactgtggagtttgccattctgatctccaccagattaaaaatgatcttggcatgtccaactatcccatggtcccaggacatgaagtggttggtgaggtactggaagtgggatcaaacgttagcaggttcagagtgggagagttggtgggagttggactcctcgtaggttgcttgaaaaactgccagccatgccaacaagacattgagaattact

SEQ ID NO: 24937 - DNA, 324 bp, Glycine max
  Clone ID: LIB3106-108-Q1-K1-C1
tagtttcatactttttttcttcttcttgaaatggctctccaggctgcttctcttggtcctgcgttctttctcggggcttaaagagggaaagagtggtgcgtctctcaaggactccaccttgttcggtctttcattttcagaacctatcaaagctaacttcagctcttctgcattgaggtgcaagagggaattcgaacaaaagctctgtgctgtgagggccgaaacagtggctacagcctctccagcagttaccaagtctacaccagaaggcaagaaaaccttgaggaagggcagtgctgtgataactggggcttcatctggact

SEQ ID NO: 24938 - DNA, 437 bp, Glycine max
  Clone ID: LIB3106-109-Q1-K1-A6
tagccattggagctgccatttctcctgtctcttcttatgatggcaaccaatatgacatcacaatcctcatttggaaggatccaaaagtggggaattggtggatgagttttggtgacaacacattggtagggtattggcccgcagagctattcacacacttagcagaccacgccacgatggtggagtggggaggagaggttgtgaactcacgaaccaacggccaacacacctttacccaaatgggctctgggcacttcgcagaagatggtttcggaaaagcaagctacttccggaaccttcagactgtagacacggataacaatctgagttctgtgcagggcatctcaaccttagccgaaaatacaaactgttacgacattaagagctactacagcaacgaatggggcacctacttctactacggtgggcctgggaac

SEQ ID NO: 24939 - DNA, 425 bp, Glycine max
  Clone ID: LIB3106-109-Q1-K1-B6
aacggatattaaagacacctctaaagaaggatatagttttgaagagatatgcatcaagaaagaagcgtttgagggagaagagaagttttgtgcaaaatccttgggaacagtaattggttttgccatttcaaagctgggaaagaacattcaagtactttcaagttcctttgtcaataagcaagagcaatacactgtggaaggagtgcagaatcttggagacaaagcagtgatgtgtcatgggctaaatttcagaactgcagtattttactgccataaagtccgtgaaacaacagctttcatggttccattggtggctggtgatggaaccaaaactcatgcacttgctgtttgccactcagatacttctggaatgaatcatcacatgcttcatgaactcatgggagttgatcctggaactaaccctg

SEQ ID NO: 24940 - DNA, 432 bp, Glycine max
  Clone ID: LIB3106-109-Q1-K1-E6
aagcagctatgaagtgggatgaagatgttcttggacttggatatgacctggatctcttcaatgttgttgctgtcccagattctaacatgggagccatggaaaacaagagcttgaatattttcaattcaaagcttgtattggcctctccagaaactgcaactgatgcagattatgctgcaatattgggagttattggccatgagtatttcacacaactggactggcaacagagtgacatgtcgcgattggttccagcttagcctgaaggaaggtctcactgtttttcgtgatcaggaattttcatctgacatgggaagtcgtactgtaaagcggattgctgatgtttcaaaacttagaaattaccagtttccacaggatgcacgtcccatggcccatccagtgcgaccacactcttacatcaagatggacaac

SEQ ID NO: 24941 - DNA, 397 bp, Glycine max
  Clone ID: LIB3106-109-Q1-K1-G12
gctaaaatgggtttctattttggtaataggagattcgatcaatataaatatatatatatagatatatatatatatatatatatatatgattatatacgttatgtacataactttcctgaaaattattctcttttttgtgcttgcaggacactaatgactatcatttattcagtgaatatgacatgaactctgtcgaggaacaattggagggagagaattcagtggatcctggtgaactctcatgggaaaatcactcttattcatatctcactaaagaaagcaccacccttttgagcaattcttcatctttggaagagatcaacactggctttgatatgacaagtctcaaacaagatgcttctccacagaaaccgaaatcttgcattctgtcttttga

SEQ ID NO: 24942 - DNA, 216 bp, Glycine max
  Clone ID: LIB3106-110-Q1-K1-D12
cacggacttgcgtactcaacttaggggtgctgctggggccattgcttctgatgaaaagatcgtcttgctgggtgccatgcaggctttttttgaccgttcaacgtacacctatgtgtttctatggactcctgcattgagcctaaatgatgaatagattctggatgagactcatattgtaacatttatgttggcttcaaagatgagaagctcgcttga

SEQ ID NO: 24943 - DNA, 399 bp, Glycine max
  Clone ID: LIB3106-111-Q1-K1-B11
taaaaaccttcccttctcttctcacccccacactcccatctcacacacccctcgcatccaacaatgtctctcaccattccctccaacctctccaagcccgccgtccttcgccccaaactaagcccaaagctaaggtccgccgccacaaccaccatcgtctgcagcaccaccaacaacaacaacaacaacaacgtgtcctccgacctgaaggcgttctccgccgcgctggccctctcctccatcctcctctccgtccctcttcccgtcggcgccgacatctcggggctcaccccatgcaaggagtcgaagcatttcgcgaagcgtgagaagcagtcgataaagaagctggagtcgtcgctgaagctctacgaggcgggcatggcccccgcactggccatt

SEQ ID NO: 24944 - DNA, 316 bp, Glycine max
  unsure at all n locations
  Clone ID: LIB3106-113-Q1-K1-F11
cctgcacccggaataacancgagacggaccgcatatgagcctctccaaacaggacttattgctattgggtcggggatccccataggacgtggccaacgagaattaattattggagacagacaaacgggtaaaacagcagtatccacagatactattttcaatcaacagggacaaaacgtaatttgtgcttatgtagctattgggcaaaaagcatcttttgtggctcaagtggtgaataccctacaagaaaaaggggcaataggaataaactatttgggttagctgaaaacagcggtttcttcagcttcattacaat

SEQ ID NO: 24945 - DNA, 243 bp, Glycine max
  Clone ID: LIB3106-113-Q1-K1-G9
gtacttaaactacattcccatttgtttttgctgtttgagatttcatcatcctgtatttttggtttctgttttcggacttcaatggaaattaatggatgagaactaatgaattaaaaaaaaaaaaaaaaaaaaaaaaaaaaaaaaggcaaacaatataaaagaacaaaagaaaaaaacacaatgcaagccacctcttaaatcattgggggcgggctttaaaagactagcttggtcacctttttt

SEQ ID NO: 24946 - DNA, 290 bp, Glycine max
  Clone ID: LIB3106-114-Q1-K1-B7
cccacgcgtccggcgttcaaataggggcactagcttcactttatgttgcttcagctgtgtgtgaacaagtcatgtaagagacttgactatgttgttttctctttcgaggctttaataaaatatgcgcccttgttccattcaaaaaaataacataatgatcccttctcaaatgtacttatttgtattaccctttctttatcatggaggaaacaaaaaacccaaaaatttaatggggcgggggttttagaggatccaacttaacatacgcgtgcttggaaaaaaatagtttt

SEQ ID NO: 24947 - DNA, 246 bp, Glycine max
  Clone ID: LIB3106-114-Q1-K1-B8
catggctgcacaagctcttgtatcatcatcttctcttaccttctcagcggaggctgcaagacaaagtcttggaccaagatcactccaatctccatttggcttctccagaaaagcctactttcttgttaaggcagctgctaccccccctgtcaagcaaggatcagacaggcctttgtggtttgcatcaaagcaaagtctttcttacttggatggcagccttccgggtgactatggatttgaccctct

SEQ ID NO: 24948 - DNA, 361 bp, Glycine max
  Clone ID: LIB3106-114-Q1-K1-F12
tagactcgtacgttctcaactacggttctttaattttgatacaataatcgggtggctttcggggggggactggtggatacaggggccctcacatgcacaaacaaggttactcattgcgctccctgaaaagcgtgtggcgcgttaaacccgggcacgaaacctcaagaacccgagtcctacgctgttccacatgtaccccgatcacatcactctttaagatttcgcgcattatgacagactccgtctcgaatcttccttcatatcaacacaccaaggtgaggtgtgaacggaacaaactccgatcttgcacattgaccatcacgaaatagctttttcccctctcagagttccctacatttgc

SEQ ID NO: 24949 - DNA, 428 bp, Glycine max
  Clone ID: LIB3106-115-Q1-K1-B8
gtacaagatatctctgaaacattacccgatttaggctccttgccaacagtatctgacatccatttcagaactctcattgatgtcttgtcagaacgcacaaataaatctgaagttttgaatctggacttgcttaatgtcacccaaatgtcacaacgcagaagagacggccatgcatctatttactatatcggaccagacagcacagcctctatgcagcggcaagactgtagccattggtgcctacctggtgttcctgattcatggaacgagattctttatgcacttcttctcaagtgggaggacttttttgaatggagacagaatgcaacataaatttctcaagtttcaccataattggtctatagagtttgcagagaatggtctaagttatacatacaagtctttccctacccttgctgaatgagaag

SEQ ID NO: 24950 - DNA, 404 bp, Glycine max
  Clone ID: LIB3106-115-Q1-K1-E1
gcaagcttggatccatggtagcgtgcatcatttcttgagactgacatagagatggacgtggatcattaggtggcagaaactgctgctgatacagatgcataagacaatgcaactgaccatttcatatgctatgctagagtcgatgatgaactgtatgatctagatggaaaacaggcagtgccaatatctgacggtacatcataaccaagatctttactaagggatgcagctaaggctgtacatagcatgatccagagaaatacacactccttcaactactatgtcatcgccaagggcatgaaattcgggtagatattgatttaggcttggagggatcattgagtatgcttagatgttactttagtaagtcatctaggaagcaaagcattatgcactgcagatta

SEQ ID NO: 24951 - DNA, 496 bp, Glycine max
  Clone ID: LIB3106-115-Q1-K1-G5
tagagagagagcaaaacatattattttcattttcatctttttttgagtatcaacaaatggcaaccactgtgatgaccactctcccccaattcagtggtcttagaccccaattctcagctgcccctgtgaagaacttggttgctgtgcaacccatgagtcgcaaggggaagggtgcattgggagctcgatgtgactacattggttcatccactaatctgattatggtggcttctacaaccctgatgctgtttgctggaaggtttggattggctccatcagcaaacaggaaagccactgcagggctaaagctggaggtgagggactcaggcttgcagactggtgaccctgctggcttcacccttgctgacaccttggcctgtggatctgttggccacatcattggggttggggttgttcttggtctcaagaacattggtgccctgtaaaaagcaactatataagtttagtgcttgatgcatctgtaatcaatggtatt

SEQ ID NO: 24952 - DNA, 493 bp, Glycine max
  Clone ID: LIB3106-115-Q1-K1-H10
tagaaacccaacaacacgaatgaagaagatgattctaaccctcttcttcaatatcattttatctgtcctctccctctcccacgcctccgtggtggatttctgcgtagcagactacacaggccccaatggccccgcagggtactcatgcaagagcccagcaaaggtcacggtggacgacttcgtctactccggccttggcaccgtcggcaacacctcaaacatcatcaaagccgcggtgacgccggcgttcgacgcgcaattccccggcgtcaacgggcttggaatctccattgcacgcctagacctagcaaccggtggagtcatccctcttcacacgcaccctggtgcctcagagctgctggtggttgtgcagggaacaatctgcaccggcttcgttgcttcggacaacactgtgtacctcaaaaccctaaaaaagggtgatgtcatggtgtaccctcagggcttggtgcactttcagatcaacgatggagag

SEQ ID NO: 24953 - DNA, 380 bp, Glycine max
  Clone ID: LIB3106-116-Q1-K1-D12
taaatataaaaataatatatataaggtacaaatcgtaaatcgaggtacccattttatgataaactttccttccatttttgttcctctagtaggcctagtatttccggcaattgcaatggcttctttatttcttcatgttcaaaaaaacaagattttttagatacagaaaacaaagtaaaattctggggttttttattccccaattataatactaaattcaaaaaaaggagagtaatgagtataatctttcgctcagacgatgtactgatatattctatggcggaggttcgaagaacaagcaatttattttgggccgtcttcactctgttaggttcattggcgttatcgttcgttgcaatttccaagttatctggtatgga

SEQ ID NO: 24954 - DNA, 135 bp, Glycine max
  Clone ID: LIB3106-116-Q1-K1-E11
acgtaacctaacagattctctccttttacacaggatttttagagcacttaatgcatgggaggcaccatgggaatgtctgtcaccagtggcttcacatacaatacacttgtaaagaaaccctgtgctattaatact

SEQ ID NO: 24955 - DNA, 662 bp, Glycine max
  unsure at all n locations
  Clone ID: LIB3106-015-Q1-K1-B6.R2
ggggggggggggggggggggggcggggggggggggggggggggcngcgggcgcggccggcaccccggcggcgccggnccgcgcgccgccgggcgccgggggggggggggggggggggggggggggggggggggggggggggggggggggggggggggggcgggggcggccggaggggggggcgcgcgcgcgggcgggcgcgcccggggggggggcggggcgcccgggggggggcccggaccggggggcggggcggccgggggggcgggggggggggggcgggggggcggggggggggggggggggggggggcgggcggggaagggggggngcggggcggggggggggggaggggcggggggcggggggggggggggggggcgggggggcagagcgggggggggggggggggggagaggggggggcgggggggcgggggggggggccggcgcgcgcggagggggggcggcgggggggggcggggggggggggcggggggggggggggggggagggcgggggcggcgccgccggacgggggggggcgggggcgggggcgggcgggggggggggaggggggagggggggggcggggggggggggggcgggaggggggagcggggggggggggggagagggggaggggggggcgggcaggaggggg

SEQ ID NO: 24956 - DNA, 505 bp, Glycine max
  Clone ID: LIB3106-032-Q1-K1-B6.R2
gggggggggggggggggggggggggggcggggggcggggggggggggggcgggggggggggggggggggggggggggggggggggggggggggggggggggggggcggggggggggggggggggggggggggggggggggggggggggggcgggggggggggggggggggggggggggggggggggggggggggggggggggggggggggggggggggggggggggggggggggggcgggggggggggggggggggggggggggggggggggggggggggggggggggggggggccggggcggggggggggggggggggggggggggggggcgggggggggggggggggggggggggggcgggggggggggggggggggggggggggggggggggggggggggggggggggggggggggggggggggggcgggggggggggcgggggggggggggggggggggggggggcgggggggcttttttttgggggggggggtggggagg

SEQ ID NO: 24957 - DNA, 163 bp, Glycine max
  unsure at all n locations
  Clone ID: LIB3106-064-Q1-K1-F8.R1
cccccccccccccccccccgcccgccccgcctgcccccccccccccccccccccgcccccacgcacgcccgccccccgcgccccccccacgcccggccggccccaccgccccccgcccntccccccccacaccggcctcccccccccccccccgccccccccc

SEQ ID NO: 24958 - DNA, 868 bp, Glycine max
  unsure at all n locations
  Clone ID: LIB3106-115-Q1-K1-D4.R2
gggggggggggggggggggggggggggggngggggggggggngggggggggggggnggggggggggggngggggggggggggggggggggggggggggggggnngnnggggggggggggggggggggggggggggggggggggggggggggggggggggggnngggggggggggggggggggggggggggggggggggnggggggggggggggggggggggggnggggggggggggggggggggggggggggggggggggggggggggggggggggggggggggggggggggggggngggggggggggggggggggggggggggngggggggggggggggggggggggggcgggggggggggggggcggggggggggggggggggggggggggggggggggggggggggggggggggngggggggggggggggggggggggggggggggcgggggggggggggggggggcgggggggggggggggggcgcgggggcggggggggggggggggggggggggggggggggggggggggcgcgggggggggggggcgggggggggggggggggggggggaggggggccgggggggggcggggggggggggggcggggggggcggggggcggcggggggggggggggggggggcgcgggcgggcggggcgggggggcggccgggcggggggcggggggcgggggggggggggggggggggggggggggggggggggcggggggggagggggggggggggggcggggggcgggggggggnnggggcggtttttctgtgtgggggggggggcncgggggcccgggggggggggccgccgggaggggggggggttgggggggggggggggggggg

SEQ ID NO: 24959 - DNA, 724 bp, Glycine max
  unsure at all n locations
  Clone ID: LIB3106-050-Q1-K1-H12.F2
gggggggggggggggggggggnngggggnggggggggggggggggggggggggggggnnnnnggggggngnngggggcgggggggggggggggggggggggggggggggggggggggggcggggngggggggggggggggagngggggggggggggggggggggggggggggggggggggggggggggggggggggggggggggggggggggggggggggggggggggggggggggggggggggggggcggggggggggcgggggggggggggggggggggggggggggggggggggggggggnggggggggggcggggggggggggggggcggggggggcggggcgggccgcggcgggggggggcgggggggggggcggggggggggggggggggccggcccggcgggggggggcggggggggggggggggggggggcgggcgcgggggcgggcgggcgggggcgggggcggggggcgggggggggggcgggggaggggggggggagcggggggggggggggggcgggtgggggggggcggcggagggcggggggggcggggcgggggggggggccgggggggcggggggggggcgggggagggggcgggggccagtgggggggggggtcgggcgggcggggggggggggaggggggggggggggggggggggggggggggggggggggggggggggggggggggggggggtgtggggggggg

SEQ ID NO: 24960 - DNA, 358 bp, Glycine max
  Clone ID: LIB3106-006-Q1-K2-D11.F3
cagttactctccagaatatggatggtaaaactccaatcgatgttgcgaagctaaacaatcaaaatgaagtcctaaagctacttgagaaagagcttttctgtagttgtaatgcatgatgccatgctgtcaccaacaagcaaagggggaaactgaggggaagaaggcatggtgacttcgttattttctcttttggtttcttccagccatttagtgtgttaaactaaattgattagcgttgttggatgagttaccatagaatttgttatctatggtcttgtaatgcatttattgttacactgcatgattttgaagattagtgccgtcatgattttattaatgtttcaattttacttataat

SEQ ID NO: 24961 - DNA, 414 bp, Glycine max
  unsure at all n locations
  Clone ID: LIB3106-006-Q1-K2-D11.R3
ttcttcaccaagactccattttgctccagcctcgcggggnaacttgagcacattttacctcgccatatccacaggcgaaatgcaaagcagttcttccctctgaatcttcttcatccttgtcagcaccagaggctagtgcatttttcaagccctccacatcaccaacactagcagtatgatgaacaattgattcatcttcatttcccaaatcttcggtctcatctgccccagaattttcagcagaggcacctgcatctcccgaattggcaagacccatggcttgtcccaacttctgcaaaacctcctcattattccagtacctcatcatagcagcaggaccgccagtctctatctcctccaaaatatgtttcagagatggatcctccttgatgcgtgccattccggacgcgtggg

SEQ ID NO: 24962 - DNA, 251 bp, Glycine max
  Clone ID: LIB3106-049-Q1-K1-H12.F4
acctcagcagctaggtactcgagaactgcggccaagtaaacgggagcaccggtaccgacacgctgggcgtaccttcctttcttcaaataacggccaattcttccgacggggaattggagaccggccttgacggaccttgaaaccggcttcttcttagggccgccgccctttcttcctccggcgcccttcttgatctttccgccagcgtccatttgggaaccctagaatgggaagaggaataatcagaagcg

SEQ ID NO: 24963 - DNA, 297 bp, Glycine max
  Clone ID: LIB3106-049-Q1-K1-H12.R4
aggagttggggaaattgcttgctggtgtcaccattgctcatggtggtgttcttccaaacattaaccctgttttgctacctaagaagactcaggttgctaaggaaccaaaatctccatccaaggctaccaagtctccaaagaaagcttagatgtttttattttattttaatatatgtatatcagtgtttagatgctttttatgtaaaagaaaatagtatctgttggaaacactgtaattcttatcgtcttgcatgtaggagtttgctaaataatgaaaatatcttattattttgggtc

SEQ ID NO: 24964 - DNA, 125 bp, Glycine max
  Clone ID: LIB3106-070-P1-K1-A1.F3
tggtctctgtcttccttagggtacagaatgttattgcattcacggcaaaatttcatggcactcatcttgccaacgatgagaagggagtaggaaacctactcgatgctccttttcccacgcgtccg

SEQ ID NO: 24965 - DNA, 576 bp, Glycine max
  unsure at all n locations
  Clone ID: LIB3106-096-Q1-K1-A12.F3
gtgtttggtgagcaggattgttggtggctgcggatggtgttttgttactaagttttctttttgttgaagcctataggttattagggaaaaaaggtgtttacttggtagtcatattaattgtcattggcaaatactgcctaagacactgtgaaggtctggttgttagaaatttggcatgtatttgatttttttggatcctttatttctcgttttatttctggttgtgcagccactttgggaattgtattggacaactttctgttgccatctaatctagttgaagctagcttatcgtgtcaaaaaaaaaaaaaaaaaaaaaaaaaaaaaaaaaaaaaaaaaaaaaaaaaaaaaaaaaaaaaaaaaaaaaaaaaaaaaaaaaaaaaaaaaaaaaaaaaaaaaaaaaaaaaanaggggggggcccttttaagggaccaaagtttacttcccggggcttggaaggtaaaagttttttttaggggcccccaaaataaaataccggggccgcggtttaaaaagggggggagggggaaaacccgggggtacccaaattaaatggctttgaaaaaaatccccttt

SEQ ID NO: 24966 - DNA, 398 bp, Glycine max
  Clone ID: LIB3106-096-Q1-K1-A12.R3
cttggcggtgatggcacacaagttagtgtcctcaaagagcccacaaggtatgcctcagcagcctcttgcaatgcaagcacagcatggctctggaaacgcagatcagtcttgaaatcctgggcaatttcacgaaccaacctctggaaaggaagcttcctgattaggagctcagtgctcttctggtatttcctaatctcacgaagagcaacagttccagggcgataacgatgaggcttcttcacaccaccagttgttggtgcagacttacgtgcagccttggttgcaagctgcttcctgggagcttttcctccagttgacttacgagcagtttgctttgtacgggccatctcgaagtatttcggtctctgcttccaaaacgcacttgctgaatcttgaat

SEQ ID NO: 24967 - DNA, 304 bp, Glycine max
  Clone ID: LIB3106-097-Q1-K1-G9.F3
tctgggtattgcgaacttgagggtggaaacattattataaaatgaaaaggaagtgcgtcgccgtttgcattgaatcaaaaaaaaaaaaaaaaaaaaaaaaaaaaaaaaaaaaaaaaaaaaaaaaaaaaaaaaaaaaaaaaaaaaaaagaaaaccttataaaagggagggcgggcccctttacggggtccctactttccttcccgcttgcttttctctgttcctattttttttatggggtgcccctaaatttattcccctgggccaccctttttaaacccgtggggtttcgcaatttccttgggt

SEQ ID NO: 24968 - DNA, 440 bp, Glycine max
  Clone ID: LIB3106-097-Q1-K1-G9.R3
attaaacaacaacagccattacaatgtgaagatccatctagcaacatatgattcgatactaataagagtaagagcctaccataatgtcctaactaaccaccgaaaccgtaaagggtcctgccctgtcttttgagggcataaacaacgtccatggcagtgacggttttgcggcgagcgtgctcggtgtaagtaacagcgtcgcgaatgacgttttcgaggaagatcttgagaacgccacgtgtctcttcgtagatgagaccgctgatacgcttgacgccgccacgcctcgccaagcgccgaatcgcaggcttggtgatcccctggatgttgtccctcagaaccttacggtgcctcttcgctcctccctttcccaaacccttgcctccctttcctcttcctgacatcgtggctcgccttcggagttgaaaaggttgtactct

SEQ ID NO: 24969 - DNA, 548 bp, Glycine max
  unsure at all n locations
  Clone ID: LIB3106-110-Q1-K1-B8.R3
taatctaggccttcttaggagatttagtagccttggatggagacttaggctccttggcagccctctccgtcttcttaggcaacaaacagggttaatgttntggaagcacaccaccatgtgcaatggtgacaccagcaagcaatttccccaactcctcatcgttcctcacagccaatagcacatgtctcggaataatcctgttcttcttgttgtcacgtgcagcattcccagccaactcaagcacctcagcagctaggtactcgagaactgcggccaagtaaacgggagcaccggtaccgacacgctgggcgtaccttcctttcttcaaataacggccaattcttccgacggggaattggagaccggccttgacggaccttgaaaccggcttcttcttagggccgccgccctttcttcctccggcgcccttcttgatctttccgccagcgtccatttcggaaccctagaaattagcagtggctgaataaggtgaggagatggggaatgagaaaggttaatgtgttcggacgccgtggcggacgcgtggg

SEQ ID NO: 24970 - DNA, 260 bp, Glycine max
  Clone ID: 04-LIB3106-024-Q1-K1-H8
ccgggccgacccacacgaccgcccactcttccactcaatcaccatcttttttccatccaccatcacaaaatctaccttgacgggttataactcccatatggcgataataacacacttctttcacattacttatacataaaaaattacccaaccctcctttttatactaacaccctaaccatttcaactttttaacctccaatacaccattaacaattccaatcctttcctttcatactaaaaacatctaaaacactaaac

SEQ ID NO: 24971 - DNA, 278 bp, Glycine max
  Clone ID: 07-LIB3106-024-Q1-K1-G1
tattgaaatttaaggttttttcttcccacaaaccaaataaaagttggggggacgtcccttaattatggccaaagaaggtcttggacttgaaataactgagctaaggttgggtctacctgatgcggagcatcaagtaagtgtggtcaatacgaaaaatgagaagaagagggcattctcggaaattgatgatggtgttggagatgaaaatagctcctccggcggaggcgacccgaaaatggagacgaataagagtcaagtggtggggtggcctccggtgt

SEQ ID NO: 24972 - DNA, 320 bp, Glycine max
  Clone ID: 08-LIB3106-024-Q1-K1-G7
atcaatataactattaaccaagtgtagtattttaacctacgctatttcatcgatgcggcgggttttttaacgggggggggccaccccaactatatgatccctctcctaattaacacttgctatgaaacccgcacttcctaggttaaatacccacatttcaacctttctttgtaaccacacaacatcattggctttcaaaccacttctaaaaagtccttcttttcatcaaaccaatacatccattgcgaacaatatttatcatactccaaaacatttcactcccaagctttacttttatgccaaacacctaaaagaccatt

SEQ ID NO: 24973 - DNA, 290 bp, Glycine max
  unsure at all n locations
  Clone ID: 09-LIB3106-024-Q1-K1-G2
ataaccgttcgaccgacgcgtccgnccagtcgttccatagattaaaagcactcaatagttaatgaaagcagctcaagcatattggggggggttacatctgggatggcggcatccancaccacanccatgtcaagcccaaccatatccttggtgcatgaccgactcagcactgaatgaacccgcctacctttcagccttagcaacaaccttacacattggatcctggtccgcgtcttctgactcacctaagctctctattttgcctacacttcctctcttaaagatgatga

SEQ ID NO: 24974 - DNA, 270 bp, Glycine max
  Clone ID: 10-LIB3106-024-Q1-K1-G8
atcaatatatctattaaccaagtgagataatttaacctactctatttcttcaaagcggggggtttcttagcatgggggggccaccccaactatatgttccctatactaattaacaccttctatgaaacccgtacttcctagtttaaatacccacatatcaacttttctttgtacccacacaacattattggctttcaaaccactcctaaaaattccttcttatcatcaaaccaatacattcatttcgaacaacatttttcatacttcaaa

SEQ ID NO: 24975 - DNA, 357 bp, Glycine max
  Clone ID: 12-LIB3106-024-Q1-K1-G9
ctcactctacctctttagcgcctgctattatctaaactatcgcaaggaacatatctggttgggttttttcaatgtaggtgcagcagttctttcagcaattccttcccttctcccatgctcataaatgatccatactacaatgaaaactacctctgctcaacgttatattctttcccaaagcacaagatttagacttgctgagcaatctcacctcttctcttcctttaaaaccattcctgaagagtgcgttgaaccaacaaaggactacattaatggcgaacaatttaaatcagactctaaaacagttaaccaacaagctttcttttctgctttttaacgcgaactacattacaacca

SEQ ID NO: 24976 - DNA, 358 bp, Glycine max
  Clone ID: 14-LIB3106-024-Q1-K1-F7
gggagtgtttgagtttgacaagtttgctgttggtacagaggctattgcaaagaagctggctgacctcagtggaaagggggtgaccacaattattggaggaggagattctgttgcagctgtggagaaagtaggagttgctagtgtcatgagccacatatctactggtggtggtgccagtttggagttattggaaggcaaagagcttccaggagtccttgctcttgatgaagccgtcccagtcgctgtgtaagacacttttcatcttggaaaattttcccatcctcaggtgtcagtgttgtcaatcttgtaaaagagcatatgttgtaggacccttcgaagtcttgtagtgtaaaattta

SEQ ID NO: 24977 - DNA, 392 bp, Glycine max
  unsure at all n locations
  Clone ID: 15-LIB3106-024-Q1-K1-F2
tcccggtcgccgacgcgtacgcccacgcgtacgaccagtttttctcaggcctgagcacattcgggatgagaaagtgaaggtggtggaatcanagctccgtggggatgatgatgaggttgttcttggacaatatgaaggctataaagatgacccaaccgtacctgatgagtctaacaccccaacatttgcaactgttgttctgcgaatacacaatgaaagatgggaaggtgttcctttcatactaaaagcagggaaggcactaaattctagaaaggcagagataagggttcaattcaaggatgtccctggtgatattttcaagtgtaaaaagcaggggagaaatgagtttgttatccgcctacagccttcagaagctatttacatgaagctta

SEQ ID NO: 24978 - DNA, 425 bp, Glycine max
  Clone ID: 16-LIB3106-024-Q1-K1-F8
gggagtgtttgagtttgacaagtttgctgttggtacagaggctattgcaaagaagcgggctgacctcagtggaaagggggtgaccacaattattggaggaggagattctgttgcagctgtggagaaagtaggagttgctagtgtcatgagccacatatctactggtggtggtgccagtttggagttattggaaggcaaagagcttccaggagtccttgctcttgatgaagccgtcccagtcgctgtgtaagacacttttcatcttggaaaattttcccatcctcaggtgtcagtgttgtcaatcttgtaaaagagcatatgttgtaggacccttcgaagtctgttagtgtaaattttatcttgcttgagttattattggcttcacacataaattgcgtgtaactgtaaaccctggctgagagcca

SEQ ID NO: 24979 - DNA, 294 bp, Glycine max
  Clone ID: 18-LIB3106-024-Q1-K1-F9
ctagttctagatcgcgagcgccttcgagtatgaaaactaaagcagttaacttatctgctggtgatttttgaatttatttgtttcggtgctttcagttatttatgctatgctccgatggacatgtatgatttaaactacaagttaaatgaccccagctcgaggtcacattctttcccagaaaaaaagaagaagaagaaggaaacaatatattctattctctttgtaaaaaaaaaaaaaaggagaggtacaagatattctatgaaaaacctaaagttcatccgctcccacaacaag

SEQ ID NO: 24980 - DNA, 429 bp, Glycine max
  Clone ID: 19-LIB3106-024-Q1-K1-E1
gtgagcaacttcaaaacaccatagtgagaaatgacttccaagggtgcaattctctggcgggtcaatgttctcttgttgactgtggttagttccacatatgttccatgcaacccaccccccaaaactcccaaacacccacctgtcccaaagccaccttccccaaagcaagtttcttgccccaaggacactgttaagtttggtgtgtgtgctgatgtgttaagtttgattaacgtgcaactagggaagccaccaaaaaccccatgctgcagcctcattcacggtcttgcttatcttgaagctgcagtgtgcctttgcactgctctcaaggctaatgtgttgggcatcaacctcaatgttccagtgaacttgagcttgcttctcaactactgtggaaagggtgttcccaaggcattcgtctgctactaaatc

SEQ ID NO: 24981 - DNA, 401 bp, Glycine max
  unsure at all n locations
  Clone ID: 20-LIB3106-024-Q1-K1-E7
cccacgcgtncgaccagtttctcttaggcctgagcacattcgggatgagaaagtgaaggtgcttgaatcagtgctccctattaatgatgatgaggttgttcttggacaatatgaaggctataaagatgacccaaccgtacctgatgagtctaacaccccaacatttgcaactgttgttctgcgaatacacaatgaaagatgggaaggtgttcctttcatactaaaagcagggaaggcactaaattctagaaaggcagagataagggttcaattcaaggatgtccctggtgatattttcaagtgtaaaaagcaggggagaaatgagtttgttatccgcctacagccttcagaagctatttacatgaagcttacggtcaagcaacctggactggagatgtcta

SEQ ID NO: 24982 - DNA, 426 bp, Glycine max
  Clone ID: 21-LIB3106-024-Q1-K1-E2
gtgagcaacttcaaaacaccatagtgagaaatgacttccaagggtgcaattctcttgtggggcaatgttctcttgttcgactgtggttagttccacatatgttccatgcaacccaccccccaaaactcccaaacacccacctgtcccaaagccaccttccccaaagcaagtttcttgccccaaggacactgttaagtttggtgtgtgtgctgatgtgttaggtttgattaacgtgcaactagggaagccaccaaaaaccccatgctgcagcctcattcagggtcttgctgatcttgaagctgcagtgtgcctttgcactgctctcaaggctaatgtgttgggcatcaacctcaatgttccagtgaactagagctcgcttctcaactactgtggaaagggtgttcccaagggattcgtctgctacta

SEQ ID NO: 24983 - DNA, 197 bp, Glycine max
  Clone ID: 22-LIB3106-024-Q1-K1-E8
tattaatgatcatcataatcttctttaacaatataaacactataaatattacccaaccctacctcattactctaacaccccaacattttcaactgttcttcttccaatacacaattaaatatttcaatgttttcctttcatactaaaatcattaaaagcacttaattctataaacccaaaaattaattttcaattca

SEQ ID NO: 24984 - DNA, 367 bp, Glycine max
  Clone ID: 23-LIB3106-024-Q1-K1-E3
cgcaacagagagtagaaaagatggcgcggttgatcacagtggtgtggtgcgcggtggcggtgctactgtgcgccgcggcgggcgcgtcgtgggtggaggaggcggcgaacccgatacgaatggtggcgggggtggaggcggaggtggttcgggtgatagggcagtgccggcgcgcgctgaagtttgctaggttcatgagcaggttcgggaagagttaccgaagcgaggaagagatgagggagaggtacgagatattctcgcaaaacctcaggttcatccgctcccacaacaagaaccgcttgccctacactctctctgataatcattctgctgattggacttgggaggagttcaaaagacacagact

SEQ ID NO: 24985 - DNA, 299 bp, Glycine max
  Clone ID: 24-LIB3106-024-Q1-K1-E9
gtcgtacggtcaatttttaagtaccaaaaaaaaaaattttaatattgtagaaggggttgaaacgggggggcctatggaatgggatgggagctatgattatgatgtctacaatgacttgggcaacccggatagcggtgataaatatgcacgccccgttcttggtggttcagccttaccttaccctcgcagaggaagaaccggaagaggaaaaactagaaaagatcccaacagtgagaagccgagcgattttgtttaccttccaagagatgaagcatttggtcacttgaagtcatcagatt

SEQ ID NO: 24986 - DNA, 379 bp, Glycine max
  Clone ID: 25-LIB3106-024-Q1-K1-D1
gcagcagagggaggagcggcattaaaaatgcagatcttcgtgaaaaccctaacgggggaggccataaccctcgagggcgaaagcagcgacaccattgacaatgtcaaggctaagattcaagacaaggaaggcatccctccggatcagcagcgtttgattttcgccggaaagcaacttgaagatggaaggaccttggccgattacaacatccagaaggaatcaacccttcaccttgtcctcaggcttcgcggtggcatcatcgagccttccctcatggctttggctcgcaaatacaaccaggacaagatgatttgccgcaaatgctatgctcgtctgcaccctagggctgtgaactgccgtaagaagaatgcggtcatag

SEQ ID NO: 24987 - DNA, 378 bp, Glycine max
  Clone ID: 27-LIB3106-024-Q1-K1-D2
gcagcagagggaggagcggcattaaaaatgcagatcttcgtgaaaaccctaacgggggagaccataaccctcgagggcgaaagcagcgacaccattgacaatgtcaaggctaagattcaagacaaggaaggcatccctccggatcagcagcgtttgattttcgccggaaagcaacttgaagatggaaggaccttggccgattacaacatccagaaggaatcaacccttcaccttgtcctcaggcttcgtggtggcatcatcgagccttccctcatggctttggctcgcaaatacaaccaggacaagatgatttgccgcaaatgctatgctcgtctgcaccctagggctgtgaactgccgtaagaagaagtgcggtcat

SEQ ID NO: 24988 - DNA, 278 bp, Glycine max
  Clone ID: 28-LIB3106-024-Q1-K1-D8
cccacgcgtccgataaattagggtgttgaaattcaaagccatatccgtcattaaccaaatgtgtgtttctccgattgcggcggtggactccttcaattccttcttcgattcaacaaaccgatggaattacgatactctcaaaaacttccgtcaaatttctccggtcgttcagaatcacctcaagcaggatgattttactctgtgcttcacccaggatgctgcagctgttgaggcttaccttcatgtcctcttgaacatcggcggaccttttactacag

SEQ ID NO: 24989 - DNA, 427 bp, Glycine max
  Clone ID: 29-LIB3106-024-Q1-K1-D3
gttcaattacaacctaggaactctcacatcttcttactcttaattttctcttcagaccacgtcagataatggcaagcactcctagcattccatcacacataaaagcttgggcttattctgaatatgggaacacagaagagattctcaaatttgaatctaacatacctataccagacatcaaggaagaccaagtgctcatcaaggttgtggctgcagcccttaacccaatagattataagagggctcatgggtttttgaagaacactgattctccctttcctactgttccggggtacgatgttgctggtgtggtggtcaaagtgggaagtcaagtgagtaaattcaaggttggggatggggtttatggtgacatcaatgaggatcctgtgaataatccaaaggccattgggtctttggcagagtacac

SEQ ID NO: 24990 - DNA, 190 bp, Glycine max
  Clone ID: 30-LIB3106-024-Q1-K1-D9
aacaccaacttaactttcttccggggatcttcaatgtggttgtgtgcacaccaattccacacacacaataattctttcaaatccaacagctttcccgttttaccctccaaaaaacccctctccatttcctgcaaggcctcccctcctcttcccgcactcaacttctacggcgagagggtcggcgagtcct

SEQ ID NO: 24991 - DNA, 395 bp, Glycine max
  Clone ID: 31-LIB3106-024-Q1-K1-C1
cgaactggagaaagaggtaatagactccatggctgagttatgccccataacaacggtgggcccactagtcccggcatcgttactcggccaagacgaaaacatcgaaggagacgtgggaatcgaaatgtggaagccacaggactcgtgcatggagtggctaaaccagcaacctccttcttcggttatctacgtttcctttgggagcattattgtgcttaccgctaaacaattggagagcatagcgagggctcttaggaacagtgaaaaaccttttctttgggtggttaagcgtcgagatggagaagaagcgcttccacttccagaagggtttgttgaagagaccaaagagaagggcatggtggtgccgtggtgcccgcaaacgaaggtgctgagtc

SEQ ID NO: 24992 - DNA, 122 bp, Glycine max
  Clone ID: 32-LIB3106-024-Q1-K1-C7
ttccaaccaccaccaaccctacccactcctcatctaacccttctctccctccttttttctccaacaccaaaaccactttcttctcaccttccctcaacaacttttcagattccctaatatct

SEQ ID NO: 24993 - DNA, 445 bp, Glycine max
  Clone ID: 33-LIB3106-024-Q1-K1-C2
cgaactggagaaagaggtaatagactccatggctgagttatgccccataacaacggtgggcccactagtccctgcggcgttactcggccaagacgaaaacatcgaaggagacgtgggaatcgaaatgtggaagccacaggactcgtgcatggagtggctaaaccagcaacctccttcttcggttatctacgtttcctttgggagcattattgtgcttaccgctaaacaattggagagcatagcgagggctcttaggaacagtgaaaaaccttttctttgggtggttaagcgtcgagatggagaagaagcgcttccacttccagaagggtttgttgaagagaccaaagagaagggcatggtggtgccgtggtgcccgcaaacgaaggtgctgagtcacccttcggtggcgtgtttcttaacgcactgtggttggaattcgatgctg

SEQ ID NO: 24994 - DNA, 414 bp, Glycine max
  unsure at all n locations
  Clone ID: 34-LIB3106-024-Q1-K1-C8
cagctttctgtcgcanattgatgatatttgggtgttgatgcgcttctgtcatttggttgagatgcangatgaaaatggcacgtggtttggcctctcttaacgaggcgaggattcagcacaagctctgagaatcttgttgcttctgtgctctttgagagattgccagtggtcattcccaaaattgatcctgtggtttatgcatttcaagaattctcgtttcgatggcgacaacaatatcaacgcagataccctgatgaatttcttgacaaatctgatgcaagggggaaaggtgattatcagattgactatgtgccagcaccacgaatcactgaagccgaccaaagtaatgaccgaaggtcattacaaagagctcttgacagaagactttaccttcttctctatggtaatgcatat

SEQ ID NO: 24995 - DNA, 448 bp, Glycine max
  unsure at all n locations
  Clone ID: 35-LIB3106-024-Q1-K1-C3
accatactccctgaagatcaacctcaatggcatctcttggcgtgcgaccagttcttgccggtccattaacttccatctgcgacccacctcctcttttcgatggcaccaccaggttgtacatcagttattcttgcccctatgcacaacgtgtgtggatcgctaggaactacaaggggctacaagataagatcaatttggtccctattaaccttcaagacaggccagcttggtataaggagaaagtctaccctgaaaataaggtgccatccttggagcacaatggcaaggtgttgggagaaagtcttgatttgatcaaatatgtagatgcaaactntgaagggacacctttgtttcccagtgatcctgccaagaaagagttcggtgagcaattgatatcccatgttgatacattcagcaaagacctgttcgtttcattgaaagggatgct

SEQ ID NO: 24996 - DNA, 411 bp, Glycine max
  Clone ID: 36-LIB3106-024-Q1-K1-C9
gtttttgcaaaattgcttccaaagccaccatatcaactagcaaatgggtcttctaaccagcgagctgagtccatgccatggcttgggctgagtgcttcttcacctcgaatctgagagcagctatagtttatatgtaatttttaagcattatttttgttgtgaaaatgctaactagtcagaagcttttttgccagaatttcttgactaagtttctggttatattttttttcctgactaaatagcattattacttcttttttctcttttttttcgccgataaaaaaacctcttttttttttctttaaatgtttttcagatgatttatgggcttcttgctaggcctgtatttgtcatagtaatgttggctctgctgggccgtatcatagatctaactattgggtagttgatgct

SEQ ID NO: 24997 - DNA, 384 bp, Glycine max
  Clone ID: 37-LIB3106-024-Q1-K1-B1
gaaaaatacactattatttacaattgttaaatacactcgatagttcttcaattcacggggtgcatttaaaaagcgggcgatgctcaccaatcatatcctccactccacccttgtccttcacatcaccttcttctccttcagcttctacctcgacttccaacattttttcaatacactctattcttccaatccttattccatatctcaccacaattccacagcttaccactaaactttttgacctactcactacattttatcatcacttattaaccttccttacatattctatcatcctttaatctttaaattttatacatttttcactcaattgacacttatttttttatcttttctccctacatcttaagccttcaatttacc

SEQ ID NO: 24998 - DNA, 441 bp, Glycine max
  unsure at all n locations
  Clone ID: 38-LIB3106-024-Q1-K1-B7
gaatcataaaaaaaaaacctgtttttggcgaaccacttttaaagaaacagtactatgagagctgccctggttgcaagggtgatagagccaangagctggaaaaggatgtctccattcgaaatctcgtccatatatggattgtggtgttgtgcggtgctcttcctgtttcttctctctatcctttcctttatttcatggtgaaggattttaatattgcagaaggggaggaagatatcagtgcctatgctggctatattgggtctgcattcatgcttggtagatgtttgacatctatgttgtggggaatgatagctgatcgctatggtagaaaacctgttgtgattataagtgttatttctgttgtcattttcaacatactattcggccttagtacaagtttttggatggctgttattacaagactttttctggatgtttaaa

SEQ ID NO: 24999 - DNA, 414 bp, Glycine max
  Clone ID: 40-LIB3106-024-Q1-K1-B8
acggagtggcggagatccgggcctcctactggatatgacagcacttatggtgctggtaatcgaggtggatttggtggatcttctgctgagccccctgctgcagtgagacagtgtgatgagaattgtgatgatacatgtgacaactctagaatctacatctcaaacctaccaccagatgtgactattgaagaattgaagggaactttttggaggcattggacaagttggaagaataaagcagaagaggggctataaagatcagtggccttggaacataaagatttacactgatgataatggaaacaataagggtgatgcttgccttgcttatgaagacccttctgcagcacattctgctggcggtttttacaataattatgatttgaggggttacaaaatcagtgttgcaatggc

SEQ ID NO: 25000 - DNA, 275 bp, Glycine max
  Clone ID: 41-LIB3106-024-Q1-K1-B3
cccacacgtccggttgataactaacacggataagcaaatggctaccgcaatgatcgcgtgggcagctgttacgactgccgaccgtgccgatccacgtatgcatgctccattcactggccttaagtcgatggctggctttaccaccagaaagaccaaccatgacatatcctccattgctaccaacgcagtacgagtgctctgcatgcacgagtggacaccagtactcatgaagaagtatgagactctttactaactgccagaccttgatgatccac

SEQ ID NO: 25001 - DNA, 453 bp, Glycine max
  Clone ID: 42-LIB3106-024-Q1-K1-B9
gagggagattgtgcccggcatgattgtcaccggcatggaggtggcagaaattgatggctggccggggatgggtccgacgtttggggcgatgatgatatcaaggcagaaggcggctcatttggcgttgaaggcgttggggaggaacaatgcaattgatggaacgtgtggagttggaagggaagaaccccagcttattttcgcttctgcagacactgaggaaattgttgatgcttaaacttactttcaaattagctagatatatagcttttcttttcttttctttctgtttggtccctacttaattatgattttaattttggaataaatgaacaacatgtgaattatgaaggagacaatacttgttgttacattgtatttggacagcacgtgccacttatagcgggggaaaccatatattatcaaggatgggagagatagacgccacttaatttt

SEQ ID NO: 25002 - DNA, 258 bp, Glycine max
  Clone ID: 43-LIB3106-024-Q1-K1-A1
cccacacatcccctcactctctcactctcttttatacaaactctaaacctctactccgtaggccatctactaaacattctattacatatattcaaaactttcattccctaaactaatcaatcccaatatacaaactctactaacctaacacaatacacttttaattcctctaaaaaaaaaatccctctctctcttttattatcccaacctttcaactcactcccttcaactttaaaccttttttacaacataacctaa

SEQ ID NO: 25003 - DNA, 254 bp, Glycine max
  Clone ID: 45-LIB3106-024-Q1-K1-A2
cccacacattccctcactctctctctctacttttatacaaacactaaacctctaccccgggagccatctccaaaccatgtctgcttatcatatattacaactttctctccctaaactcatcactccacaataaacaatccctactaaacctacaaaatacactctaatttccttttaaaaaaactccaacgccctctttaaatgacccaaccttaccactccctccctgcaccttttaaacctctttataacat

SEQ ID NO: 25004 - DNA, 401 bp, Glycine max
  unsure at all n locations
  Clone ID: 46-LIB3106-024-Q1-K1-A8
ctctattcatgataacaacanaaagctagtggctgaaactcctatggtaattcctctcctgatgagagcattgagatgcggagcaattgaaacgaggagcaatgccgcagctgcgcttttcactttatcagctctcgactcaaacaaggaactcatagggaaatctggagttttgaagccgttaattgacctcttggaagaagggcatcccttagccatgaaggatgttgcttcagcaatttttaacatatgtgtaatgcatgagaacaaggcaagagccgagaaggacggcgcagtgagggtgattttggcaaagataaataagcagattcatgttgctgagttactagctattcttgcactgctttcaagtcaccagagggctgttcatgacatgggag

SEQ ID NO: 25005 - DNA, 436 bp, Glycine max
  Clone ID: 49-LIB3106-024-Q1-K1-H4
ttaacccctcttctccctgaagaaaaaaaccaagtcctctgttcgtgttcctcgttgcacatggcttccccaaacccaaaagagatcgttgcagagattcctacctatatcagagtcttcagcgacggcaccgtggaaaggccaagagaaacaccctttgtgccaccctcaattgataaccctatggtcaacccagtggctcctggggcgcctagtttggctgaattggggtgttccaagattattgtgtgtgtggctagcgaggataaactaagggatagaggggtttggtactatgaagctgtgaagaagagtgggtggaaaggggatctggagttgtttgaggagaatggtgaggatcatgtttatcatatcttccatcccgaatctgagaatgccacgaagttgatcaaacgcttgggtttgtttctgaatg

SEQ ID NO: 25006 - DNA, 254 bp, Glycine max
  Clone ID: 50-LIB3106-024-Q1-K1-H10
gaagaaccgggccgaccgacgcggccgccgacccttcctcccactcgtccgcccacttgtccgaaaaaaaagtggctagaaaagtgctggcagcttatttggaagtggggctactcagattgttgaatggttccacttctatgtccaattatgaattctgatgtgtttcatgcatgcgatacactttaacgtcgtgctgtcttaggatgttatatgttttgtacatggatctacgctcgattgattttgaacct

SEQ ID NO: 25007 - DNA, 216 bp, Glycine max
  Clone ID: 51-LIB3106-024-Q1-K1-H5
cccactcttcctctccatcaaaaataattttataccctatgttaatccacatctctgcgcgtgtttttcccaatccgaggaagacaacacatctcagaatctctaccttatcatacaccttcatccacaactctatctaatatataacataacctcacattctcctaaccttaattgttaaccctatcatcaactcatttactacttgtgccccta

SEQ ID NO: 25008 - DNA, 144 bp, Glycine max
  Clone ID: 52-LIB3106-024-Q1-K1-H11
acctacgctattgcacctaacttcgcggagcttttttaaaaagtggtgactacacttatattattactaaattctcttacatctacatataaagtctcagttgctattatcatgatctacatatctacttcttttattctcaat

SEQ ID NO: 25009 - DNA, 260 bp, Glycine max
  Clone ID: 53-LIB3106-024-Q1-K1-H6
gctgccacaacctcaaaggaccactaattgattattgtgtcttaaacaatctccctcggggagaacattcacatgtgggacgggaaaaaagaaaataagaacaacgcaggttatccatacgtccacaatgattgctctgacattaaggctccttcgtgctttcaagcgaaaaatgttcccacaaccctcatctcttgtactgcatgaaccacaactgcttttcagaggctcagacgtacagtgtttgacgacttctactc

SEQ ID NO: 25010 - DNA, 435 bp, Glycine max
  Clone ID: 55-LIB3106-024-Q1-K1-G4
acaattactactttctctctctttgtaacttgtaagcatggagtcctcaaagatctatgcggacctcttcctttgcatgctcttcctctcctccgccactcccattctcggttgtggctactgtggcaaaccccccaaaaagcacaagcctggtaaaacaccaaagacacccacagtacccgttgttaagccaccagtcacaatccctcccattgttaagccaccagtcacaatccctcccattgttaatccaccagtcacaatccctcccattgttaatccaccagtcacaatccctcccattgttaatccaccagtgacagttccacccgttgtgcttccaccaatagtgaagcccccgggttttctccctccaattcttaacccaccaagtacaccaacaccgtcgccggggaagggagggaacactccatg

SEQ ID NO: 25011 - DNA, 426 bp, Glycine max
  Clone ID: 56-LIB3106-024-Q1-K1-G10
cagctctcccctctctctcgcagtcccatccatctgaagcaagcaatacagcaaaggaccgaagcccaaataaaacacagagttcattttatttatttatttgtttattcatttatttttagaaaaagtggagagccatatggaatttgacgagcacgaggaccaagagcaagaagaggaggaggaggaggaggaaatgggattctcagtggcggcggcggcgagttacgactcgctgggaaacgccgcggtgaggtctaaaattagcggcggcgatggtgttgcggccaccgtgaattccggtcgcaaagggacggtgagatacagagaatgtcagaagaaccatgccgtcagcatcggcggccacgccgtcgacggatgctgcgagttcttggctgccggagaggaaggcacgctggaagccgt

SEQ ID NO: 25012 - DNA, 212 bp, Glycine max
  Clone ID: 58-LIB3106-024-Q1-K1-G11
gtcagtatgtaagtgtttcaccttcgatccagctccttaacattgtaaacacaacttcacgggggttctctctaaactggggtctacaacgccttcactatgaaactctgttgcttctgcctataaagcttgtgtggctttggaaacgagcgacgtatctacttatttagtacccagttagcagccattgctactcttgcagcgaataggaa

SEQ ID NO: 25013 - DNA, 278 bp, Glycine max
  Clone ID: 59-LIB3106-024-Q1-K1-G6
acctaatcaatcagtcatacgaatttccagaatacaaattcacactctctttggctctggtgttgtgttgtgttgaggtacttgagaagagaaaatggtgtcgtcgcaggttgtgaatacgtacccgttgtcgagctacacgttcggcacgaaggagcccaagatggagaaggataccttcgtcgcggatcgtcttgctcgcatgaaagtcaactatattaaggagggaatgaggaccagtgtgggaggaattttactggtacaagagcacaatcatt

SEQ ID NO: 25014 - DNA, 418 bp, Glycine max
  unsure at all n locations
  Clone ID: 60-LIB3106-024-Q1-K1-G12
ccncccacgcgtccgcccacgcgttcttccacgcgtccgantagttgaaaagtgggaaggataagcaaatgggttgctcaatgatctcttccccagctgttaccactgtcaaccgtgccggtgccggcatggttgctccattcactggcctcaagtccatggctggcttccccaccagaaagaccaacaatgacattacctccattgctagcaacggtggaagagtgcaatgcatgcaggtgtggccaccagttggcaagaagaagtttgagactctttcctacctgccagaccttgatgatgcacaattggcaaaggaagtagaataccttcttaggaagggatggattccttgcttggaattcgagttggagcacggtttcgtgtaccgtgagcacaacaggtcaccaagatacta

SEQ ID NO: 25015 - DNA, 203 bp, Glycine max
  Clone ID: 62-LIB3106-024-Q1-K1-F10
ctccatctataaccaattatgcccttttctttctgctcttaataggtggaattttcaaaccgggggtttttaccctattccccccccccccatttcaatctgcctcctccactctctgcctactcaaaaagcctctcactacctccttttttggcactgcacaagtggaaattctaaaacttcgagttatgatgattgctaat

SEQ ID NO: 25016 - DNA, 385 bp, Glycine max
  Clone ID: 63-LIB3106-024-Q1-K1-F5
ctagttctagatcgcgatctagaaccaatgatgttcttttctttctggtgtggatagggggaatagatagggtgtgggaaataagaacagcaacttctctttactgtgtgtgaaaaaaatggccacactcacacttttatcatctctgtctctgcgctcttcttcttcttcttcttcttcttcttttacactctcttcttctttttcttctccctcctcctttgcctttttttgtagcttccccttgcgctctgccacttcatcattgaaggtacaaacaattcataagaagaagcgcgtggtgaaggcagtggaagaagatacccagcaagaactcaacgctgctgatgactctgaacaaccatcaacctccgaagcaccaccc

SEQ ID NO: 25017 - DNA, 408 bp, Glycine max
  Clone ID: 64-LIB3106-024-Q1-K1-F11
gtccgccaaaatcgcattatctccaactttatctgcaacagccaactttttcgttcgtcgatcacggagatggcggcaaaccttcagatattaacgggattgccccccgcgccatttcaatcttcctcctccactctctgcgtactcaagaagcctctcactacctccttcttcggcactgcacgagtggaagttctgaaacttcgagtgatgaggattgcgaagcctgcgcgcggtggaggtgctctcggtgctcgcatgaacctctttgacaggttcgccagagttgtgaagtcgtacgcaaacgctgtcttaagctcgtttgaagatccggagaaaatattggagcaagctgtgcttgaaatgaacgacgacttgaccaaaatgcgtcaagctactgcacaagtg

SEQ ID NO: 25018 - DNA, 257 bp, Glycine max
  Clone ID: 65-LIB3106-024-Q1-K1-F6
cccaaacttacaaatatccgaaggcttatgtattcagaatcctgctccctgttatccgagggctagtttccttgatctgcctggaatagagaattttaggtctacaatatttgtctctaccttttaccccctaacaaaaaaataaagagccctgaagctctcataattaagggcgttcattctaaaggattcaatctttacttacacgtgcatgccagctcatagctcttataatacgtcacctaagtacaatttac

SEQ ID NO: 25019 - DNA, 355 bp, Glycine max
  Clone ID: 67-LIB3106-024-Q1-K1-E4
cccacgcgtccgcccacgcgttcgcccacgcgttcgccggcgttcgacgcgcaattgcccggcgtcaacgggcttggaatctccattgcacgcctagacctagcagccggtggagtcatccctcttcacacgcaccctggtgcctcagagctgctggtggttgtgcagggaacaatctgcaccggcttcgttgcttcggacaacactgtgtacctcaaaaccctaaaaaagggtgatgtcatggtgtaccctcaaggcttgttgcacttccagatcaacgattgagagtctcaggctttggcttttgtgagcttcagcagtgctaaccctggccctcaaattctggacttttctt

SEQ ID NO: 25020 - DNA, 421 bp, Glycine max
  unsure at all n locations
  Clone ID: 68-LIB3106-024-Q1-K1-E10
aaaaaaaaaaaaaaaaaaaaaaaaaaaaaattnttttttaaaaaaaaataaaatttttttgaaaagaaaaaaaaaaaaaaggagggggaaaaaaaaaaaaaaaaaaaaaaaaaaaaaaaaaaaaaaaaaagggccgccccctttaaaaaaccaaacttaacttccccttccatccaactaaaaattttttataaagggcccccaaaatcaaattcattgcccccggttaaacaacatagaaactgaaaaaaccttgccttaaccaaattaaatccctttaaaaaaaatccccttttccccagctggctaaataccaaaaagcccccaaccaatcccctttccaaaaatttccccaccctaaatgccaaaagaaacccccccttaaccgccccataaaccccgccggttgtgttgtttaccc

SEQ ID NO: 25021 - DNA, 417 bp, Glycine max
  Clone ID: 69-LIB3106-024-Q1-K1-E5
cccacgcgtccggtttgttgtgagctataagctagtttatcgtgaggagaatatgaagtggtttgttttctttgttgctgcagtagttttggtagcatggccatgccatggcgcaggctaccaaaggttccctctccgaatgaaaactggctatggtgagcgttcttcggaggtaaaatgcgcaagttttaggcttgctgtggaagcacacaacatccgagcctttaaaaccattcctgaagagtgcgttgaaccaacaaaggactacattaatggcgaacaatttagatcagactctaaaacagttaaccaacaagctttcttttatgctagtgaacgcgaagtccatcacaacgacatatttatattcggcatagataacaccgtactctctaatatcccatactatgaaaaaca

SEQ ID NO: 25022 - DNA, 150 bp, Glycine max
  Clone ID: 71-LIB3106-024-Q1-K1-E6
ctcacacttactgctagctaagctctttaatctaaaaaatccagagctgactatgacgtggacggtttcaatggaagggggagcaccatagtcaccatggccatgccatatgtcaactctacaaatgtcatgtcatcaaaagaaaaccct

SEQ ID NO: 25023 - DNA, 397 bp, Glycine max
  Clone ID: 72-LIB3106-024-Q1-K1-E12
ggaacggccggaccgacgcgtgcgaacacaccactataccaatagaaacatgtgcttttctaaaacccctcactcttcatcactgcaggagctattcacatgcaagtggcgaccaaatataaagagtttcacgaatatcacaagcgattactcattcctaaaccacgttatccctgaaaacatcaccgaattccaagtgactctgtccctcgctagagactacgatggcaacaactcaaccaacggaaagttcattccttactgcgacactgaaaaggtcactcccgaagtgataaaataattcaagaaaaaatacgaacccacctcactgagggttaacgttcttgtcaccattgtaaacacaaacaaacaatttcctttcaccactggctcggac

SEQ ID NO: 25024 - DNA, 425 bp, Glycine max
  Clone ID: 73-LIB3106-024-Q1-K1-D4
gcaatcttggcatcttgatggttatgatttttgggtcattggtcatggtttcggccagtggacagatgctagcagaaaaacatataatctagtggatgccctgactagacacactgcacaggtgtatccaaaatcctggactactatattggtgtctttggataaccaaggcatgtggaacttgaggtctgcaatatgggaaagacaatatcttgggcaacagttctatcttagagtgtggaatgcacagaaaagccttgctaatgaatatgacattcccaataatgttctgctttgtggcaaagctgttggacatcacccttagtatatatatcggtgtattttctggtcatgaaggcttgactacacaactagaattatttttcctttttcttaagaaagaaaaggacaatgtgggagaagtc

SEQ ID NO: 25025 - DNA, 366 bp, Glycine max
  Clone ID: 74-LIB3106-024-Q1-K1-D10
gcgacacctcccatgattgcatatcagaacgagcaccagttatttatacacgccttggttaagagagcggaaagcgagcaacaggaggctaaaagagtaaacaggatctatagaggatgacatgggtcggtgagacaacaactacctgtttgagagaagacagctgtcatgagagcgatcacttctgatagatagactgacgagatgaacgatctaaatattacagacgatagacaagtggcagctacaattacagatggccacacatcggcaacaggacataacactgtgactaccattgaacgtcgaaatggtactgctaagtagactataaattaaatagcatatctggttgctcggtatcga

SEQ ID NO: 25026 - DNA, 203 bp, Glycine max
  Clone ID: 76-LIB3106-024-Q1-K1-D11
cccaccctttcgataacttaattaaacgtcttttcttcggtggacccactaatctttagggcggtcttcctctctagcggagccaaccttacaaacgcgagtatccaaacttataactcatatatcgagtgacattaattcggattcacagcccgcgattttacaacgtatgtacttttaaaaccgtagcattaccgagctta

SEQ ID NO: 25027 - DNA, 416 bp, Glycine max
  Clone ID: 77-LIB3106-024-Q1-K1-D6
gtaccaaggcaacatttataggtctcttagagtatgggagggctaatgaatgggttgtgactgaaaaacttggtgactctgtcaacaataataataagaataaatcaggagatgctgccaagaagaataatgccatcaaggccacccccaaaaagactcgatccaaatttgttgaaagacttaatttactggagctgggatttgctgtcttcctcttcgtatgtggatgctatgattatgttcatgggaaacacaactacttcatctatctcttccttcagaccttaacattctcaattgtaggatttggctacgttggcaccatcgtgtaaacctcattgagccaaatttctcaagttacttaagtttcaccaatgttggggccatatttttctaagttcttcctaaaaaaatac

SEQ ID NO: 25028 - DNA, 344 bp, Glycine max
  Clone ID: 79-LIB3106-024-Q1-K1-C4
cccacgcgtccgttttccttcaacatccagaattcgagatattacaaagcaggtagccgcagctgttataaaagaagcagtggaggaggacctagctgaacgatatcatggaatggatgctcgggagctgcagaaactaagcgaggatgaaatcgcggaatatgtgcagaataacatgtggagtccagagtaccctacattagtttacaagaaagaatgagtaacctgcagggttgataactacaatatccctctcgatgcatgtttggttcgatcaggttgttcacagaatgctgtttactggattagatgattcaaattctgaaacattatctcatagcata

SEQ ID NO: 25029 - DNA, 336 bp, Glycine max
  Clone ID: 80-LIB3106-024-Q1-K1-C10
tccactgctgctgcttcccttgtcatggcgggacatgctcggaaacgcgagcaacttcagtggtgccacaaggccagctccatctgcttctagtcctgcctccttcaagactgtggctcttttctccaaaaagaaggctacaccaacacctccaaaaaaagctgctgctgctgctcctgccaatgatgagcttgccaagtggtatggtcctgacagaaggatcttcttgcctgagggtctcttggaccgatccgaaatcccagagtacttgaccggagaagtccctggagactatggttatgacccatttggtcttagcaagaagccagaagactt

SEQ ID NO: 25030 - DNA, 350 bp, Glycine max
  Clone ID: 81-LIB3106-024-Q1-K1-C5
gtcgaaaagttcatctctccctctctctcacacatcccagccatgagcctcttcggggtaggcagaaaccagagaacattccgcccgaaaaaaagtactccttctggaagtaagggagctcaacttagaaaacatattgatgccacgttgggtagtggaaatctgagggaagcagtaaagctacctcctggggaggatttaaatgagtggctagctgtcaacactgttgatttcttcaaccaggtgaatctgctttatggtacccttacagagttctgtactcctgagaattgtcggacgatgtctgcaggacccaagtatgaatatagatgggcagatggtgtacaaat

SEQ ID NO: 25031 - DNA, 337 bp, Glycine max
  Clone ID: 83-LIB3106-024-Q1-K1-C6
ctttaagaatactgctggaattgagcctgaagatgttgcaaagcgcctcatggactgcggggttcatgcaccaacagtgtcatggcctgtgcctggcacactcatgattgagccaactgagagtgaaagcaaggctgaactagacaggttctgtgatgctcttatttccattagacaagaaattgctgagattgagaaaggaaatgctgacattaacaacaatgtacttaagagcgcccctcatccaccatcactgctcatggctgatgcatggacaaaaccatactccagggaatatgcaggcttcccagctccatggctgcgtgcttcaaagctc

SEQ ID NO: 25032 - DNA, 118 bp, Glycine max
  Clone ID: 84-LIB3106-024-Q1-K1-C12
cacaaattgataccgattgagtccatccatgcttatgatgttgaaaaatttgatgtcctgcgagaccagatggtacctggattttactgtttttaagattctgtcattggtacttgtt

SEQ ID NO: 25033 - DNA, 284 bp, Glycine max
  Clone ID: 85-LIB3106-024-Q1-K1-B4
cccacacgtccgttctcttcctctttcttttacatacaatccaacagcctattcgggctgggctgatactacagaagcttctgcccaaaacatagtactacttctttatgtaatggatcttaacttagctacacatactaattccacatggggtcgcggaattttgactgaagcatataatctacctactttgcagtatttaaatgttcaagtaactatcaacactctttattttttctaccaactaaatctgttttattgcacgattacctagatctgcacta

SEQ ID NO: 25034 - DNA, 302 bp, Glycine max
  unsure at all n locations
  Clone ID: 86-LIB3106-024-Q1-K1-B10
cccacgcgtncgctcttcttcttcttcttctacccttcaatattaatattccgtgcaaaaaccaccaacaacaacatcaccaccaacaagaagaacaagattggcgttatgggtctcttcctttctaggaatttggcttgcaaattcatatacccttttcttttctccaagaaggtttccaaggatttgtttcccaagcagttggagaacatgatgtctctgatctctcctcgtactggcaggcatttgcagcgctatgacaatggctgtcgccaagttgtgggatgcattccttatagata

SEQ ID NO: 25035 - DNA, 270 bp, Glycine max
  Clone ID: 87-LIB3106-024-Q1-K1-B5
gtcttacgctccatttgtagaagggtatattacatcccatcaaacagccccataggggagggctgatgataatgatggtgatgaacaaaacaaagtacatcatctcaagaggaggatgttaagggacaaaacacatttaatgcgattgaaggagcggagtatacctagggaaagatttgatgcactcagcagaggctgttccaataacagtcactatgaacactgatgattagggctcacgatggaatcttgtttaacatactctagatg

SEQ ID NO: 25036 - DNA, 285 bp, Glycine max
  unsure at all n locations
  Clone ID: 88-LIB3106-024-Q1-K1-B11
tttttcacttgccactacttcaacctatcttcctcctcctccaaagcgagctccccacaacacgctgtccgccaccacaaccaccaccaccatgctcaccccaccaccacgagactcacttcaagagttgcacagttcactgttaaagcctacatggagaaccccaacacattaggtagtttcgccaacagggtcattggtgcactccccgtggcgggactcagtgccaggattctcagcgatgaacgtggcgttggagatgacctcgtggatcntgctgaattc

SEQ ID NO: 25037 - DNA, 335 bp, Glycine max
  Clone ID: 89-LIB3106-024-Q1-K1-B6
cccacgcgtccgcccacgcgtccggaaattcataacatgtacgaaggagaggaatgtggggggctgaacagttaatagatctccttgtgaagcattggaggacgacactgagaataatggagatgtctagtaatatagatctgcttttgaagcattggagtgaggcactttggaaggctgctggcatctcggggggtgcagacctaatttccaatgagatgacggcacctctggaccctgcgatatacctcctcgtggaggattggaggaaggcacatcgtgcggttcgtgatatctcagagggtgtagtcttaaaatccatgtaatttagaaac

SEQ ID NO: 25038 - DNA, 392 bp, Glycine max
  unsure at all n locations
  Clone ID: 90-LIB3106-024-Q1-K1-B12
tttgtgtctagttagtgtctgggtcctggtcctgccaattgtgtcaattaattgtattgggtcgtaaaagatggcttgctcaagtggaacatcttcagggtcatctctgcttcagaactctggttctgaggaggatttgcaggcggtgatggatcagagaaagaggaagagaatgatatcaaaccgcgaatctgcacggcgatctcgcatgaggaagcagaagcacttggacgatcttgtttcccaagtggctcagctcagaaaagagaaccaacaaatactcacaagcgtcaacatcaccacgcaacagtacctgagcgttgaggctgagaactcggtgcttagggctcangtgggtgagcttagtcacaggttagagtctctgaatgaga

SEQ ID NO: 25039 - DNA, 273 bp, Glycine max
  Clone ID: 91-LIB3106-024-Q1-K1-A4
ctcacacttccgttttctacctccatctattacatatcatccaacaacctccattgggtgggcttttactaaagaagcgtcttctctctacaaactacaccatttctatataatcgatcctcatttactacacatactaattccaacctatttagctccatatttcttaaaatattaattctacccattttaccccatttatattttaatctttctataaacaatccacatttttttaaccttttaaatctcttttaacctactattacacca

SEQ ID NO: 25040 - DNA, 237 bp, Glycine max
  Clone ID: 92-LIB3106-024-Q1-K1-A10
acccccattcttctcaattgtgtcaatcaacctccatgcgctgggcttatactaaaggtgcgtctgctctctacatactactccatctttttttaatcgatcctcattaactacacatactaattcacaacctattctagcgccatttttctaaaagatatcaaactctccatcttaccccatctatatttcaatctttctatacacactctacattttttcaacctttttaatctc

SEQ ID NO: 25041 - DNA, 347 bp, Glycine max
  unsure at all n locations
  Clone ID: 93-LIB3106-024-Q1-K1-A5
ccgggaatnaacggccggacggacgcgtacgttcgtgtctacatagtgtctgggccctggtcctgccaattgtgtcaattaattggattgaggcgtcaaatatggcttgctgacgtggaacatcatacagggtcatctctgcttcagaactctggttctgaggaggatttgcaggcggagatggatcatagaaagaggcagagaatgatatcaaaccgtgaatctgcacggcgatctcacatgaagaagcataagcacttggacgatcttgattcccaagcggctcagctcagaaaagagaaccaacaaatactcacaggcgtcaacatcaccacgcaacagttcct

SEQ ID NO: 25042 - DNA, 220 bp, Glycine max
  Clone ID: 96-LIB3106-024-Q1-K1-A12
cccacccgtccgcccacccgtccgttttcttttttttttcaccaaaaaggggttcagtggtggctatttctatgacgtcgtccgcgaccatgaacatggcgatcgcgcttctgttcatggttttcgcagtttcatcagctttagacatgtcaataatatcacacgacaacgctcatgctgatagggccaccaggcgcaccgactaggaagtgatgtcaat

SEQ ID NO: 25043 - DNA, 51 bp, Glycine max
  Clone ID: LIB3106-005-Q1-K1-A1
aaaaaaaaaaaaaaaaaaaaaaaaaaaaaaaaaaaaaaaaaaaaaaaaaaa

SEQ ID NO: 25044 - DNA, 54 bp, Glycine max
  Clone ID: LIB3106-005-Q1-K1-A6
aaaaaaaaaaaaaaaaaaaaaaaaaaaaaaaaaaaaaaaaaaaaaaaaaaaaaa

SEQ ID NO: 25045 - DNA, 197 bp, Glycine max
  Clone ID: LIB3106-005-Q1-K1-H1
tagaaaataaattgcatcattatttttttataattctattggatttggcgcattcttttgtagcgttgctatggatactgtattatcatgtaagggaagggaatagattgctattaaatgcattgtaaagagatgtgaagaataaatttgaaattctaaatcttatctcttttgttccaaaaagggaaagttattgc

SEQ ID NO: 25046 - DNA, 54 bp, Glycine max; identical to SEQ ID NO: 25044
  Clone ID: LIB3106-005-Q1-K2-A6

SEQ ID NO: 25047 - DNA, 197 bp, Glycine max
  Clone ID: LIB3106-005-Q1-K2-H1
tagaaaataaattgcatcattatttttttataattctattggatttggcgcattcttgtgtagcagtgctatggatactgtattatcatgtaagggaagggaatagattgctattaaatgcattgtaaagagatgtgaagaataaatttgaaattctaaatcttatctcttttgttccaaaaagggaaagttattgc

SEQ ID NO: 25048 - DNA, 56 bp, Glycine max
  Clone ID: LIB3106-006-Q1-K2-C10
aaaaaaaaaaaaaaaaaaaaaaaaaaaaaaaaaaaaaaaaaaaaaaaaaaggaaaa

SEQ ID NO: 25049 - DNA, 99 bp, Glycine max
  Clone ID: LIB3106-008-Q1-K1-G2
caaccaagtttcattttgacatgcatttttaagcaacacgtcttctgttcgtaagcagcggagagagataaaaaagattcctatcaacaacaattaaat

SEQ ID NO: 25050 - DNA, 150 bp, Glycine max
  Clone ID: LIB3106-009-Q1-K1-A4
tagatcgcgagcgccaccccactttgtttgtttgtacttaaactacattcccatttgtttgtgctttttgagatttcatcatcctgtatttttggtttctgttttcggacttcaatggaaattaatggatgagaactaatgaataagctt

SEQ ID NO: 25051 - DNA, 105 bp, Glycine max
  Clone ID: LIB3106-009-Q1-K1-C3
cccacgcgtccgaaaaaaaaaaaataaaaaataaaaataaaaaaaaaaaaaaaaaaaaaaaggagaaggaaaaaaaaaaaaaaaaaaaaaaaaaaaacataaaaa

SEQ ID NO: 25052 - DNA, 260 bp, Glycine max
  Clone ID: LIB3106-010-Q1-K1-C2
ctttcctttgctctggaatgaacatctctattttatatgttccgattccagcaaattattggtaatgaattgcgaacttatttttgtttctcatgacgtgtgtatttcaaacatgtcaaagcattagccgattaatttaatgaatgcaacgtcccacctttgataaaaaaaaaaaaaagaaataaatataaatgagaaaagttatgcaaatacaagaagtaaaaaataaaaatttataaaatttaagaattatattaaaa

SEQ ID NO: 25053 - DNA, 356 bp, Glycine max
  Clone ID: LIB3106-014-Q1-K1-C8
gatactatgatggacgctactggaccatgtggaagctgcctatgtttggctgcactgaggcttctgatgtgttgaaggagcttcaagaggctaagactgcataccccaatggcttcatccgtatcattggatttgacaacgttcgccaagtgcagtgcatcagcttcatcgcctacaagcccccaggcttctaagtcattgaaaaatttgcaaagcatctgtagccaccccactttgtttgttgtacttaaactacattcccatttgtttttgctttatgagatttcatcatcctgtatttttggtttttgttttcggacttcaatggaaattaatggatgagaactaatgaatat

SEQ ID NO: 25054 - DNA, 317 bp, Glycine max
  Clone ID: LIB3106-014-Q1-K1-E12
cccacgcgtccggtttcaagaggctattactgcataccccaatggcgttcatccgtatgattggatttgacaacgttcgccaagtgcagtgcatcagcttcatcgcctacaagcccccaggcttctaagtcattgaaaaatttgcaaagcatctgtagccaccccactttgtttgttgtacttaaactacattcccatttgtttttgctttatgagatttcatcatcctgtatttttggtttctgttttcggacttcaatggaaattaatggatgagaactaatgaataatctaaaaaaaaaataagttaataaaat

SEQ ID NO: 25055 - DNA, 213 bp, Glycine max
  Clone ID: LIB3106-015-Q1-K1-G12
cctacgcgtccgcccatttttacacccattcgtccaatcgtactttttgttctttttaatattaatcgcctgtattaatccaacaaaaaatgtttctttgaaactaaagaaaaacaaactaagattgtcctaaactgaagaaatacaaaaaaaaatggcttgagatcaatcctaaccactaaaaaaaaaaaaaaagtgctttctctctaaatt

SEQ ID NO: 25056 - DNA, 63 bp, Glycine max
  Clone ID: LIB3106-015-Q1-K1-H3
cccacgcgtccgttagcattgaaaaatctatgctttgaaaaataaaaaaatataacttgggga

SEQ ID NO: 25057 - DNA, 95 bp, Glycine max
  Clone ID: LIB3106-018-Q1-K1-E1
ggacagtactactatatgcttaatgcctcaatggtagccatctatttattactcaaaaaagaaaaaagagaaaaaaaaaaaaaggaggatggaaa

SEQ ID NO: 25058 - DNA, 73 bp, Glycine max
  Clone ID: LIB3106-018-Q1-K1-E4
gcgaaaaaaaaaaaaaaaaaaaaaaaaaaaaaaaaaaaaaaaaaaaaaaatttctaatcgcgaggggcctggg

SEQ ID NO: 25059 - DNA, 438 bp, Glycine max
  Clone ID: LIB3106-018-Q1-K1-H2
cccacgcgtccgcccacgcgtccgcccacgcgtccgctagatcgcgagcgccgccctttgttttttttgtttgaaaaagccaaattttatagagcttcataactatacaaacacccaggacaagaagaatagacaactataaaatgttggtacaccagtaagacaaaaggaacatgaataatgaatccagcaatttgcttttaaatagaaactaacaaaaggaagaggatatactatcttggctccaaatggaaataggagcagttctgtgcaccagaggtagaacaaaattttacaaaacatttttagcaactatgctctgaagaaagatcaccaccataagacaactggtattatgatctacaaatctataacttgcagtgtgttgaagatgtttgaaatttcacccaaaatatatatagctaacaacattcagct

SEQ ID NO: 25060 - DNA, 346 bp, Glycine max
  Clone ID: LIB3106-021-Q1-K1-B12
attcgatcagatagacatacctactggtgctgtagaagtagctatagacggtccaacagtgggcatggatctcctactttcatggaatgaatcagccttgtatgatggatatctaaatctttggaccacctgcacatagcatatacaatactgtgtcagtcagatgagtatactttacacatgttctatatactatctacatacttattcttatctatagtgaaatatgtgaatgaatgtgaacgaaacattcgtgtaggaaatcagtgctacatctgtgtaagaaacgttatttagctcactaaatatcaagttgtactttcagatctgaaaaaggagaaattat

SEQ ID NO: 25061 - DNA, 68 bp, Glycine max
  Clone ID: LIB3106-021-Q1-K1-G6
cccacgcgtccgaaaaaaaaaaaaaaaacttaaaaaaaaaaaaaaaaaaaaaaaaaaagggggaaaaa

SEQ ID NO: 25062 - DNA, 461 bp, Glycine max
  Clone ID: LIB3106-022-Q1-K1-B4
cacagatagagcaatgtattccttggcacacagcaaggtgaacaacaggatgtggggaactgtgaaaggaggaggaaatgatgaagatggtttaaggactttgaacattagccaatgcactgcactcaccccatctgctgttcaagctgtttgtgactcattcccttctctccacacatgctcagggaggcactcactcatcatgagtggctgcctcaacttgacatcagtgcattgtgcctgtgctgtccatgcgcaccgtgcattcaccactttcccttatcctgcccattaagaagctcatgcttttgatgttgaacacacttcgaggatgtgccccttgaaagggctcaaagaagtgaaagaagtgaaatcccaccccccttgtagatgtatgccctgcataagaagagactttgaatctagcttatatgtaaaaaaaaaaaaaaaaagggcggcgt

SEQ ID NO: 25063 - DNA, 127 bp, Glycine max
  Clone ID: LIB3106-022-Q1-K1-E5
cccacgcgtccgcccacgcgtccgctagttctagatcgcgagcggccgtcctttttttttggttttttttttttttgtggggggaccggcaatttttatgtgtacaatggaagcattttttcatgtt

SEQ ID NO: 25064 - DNA, 413 bp, Glycine max
  Clone ID: LIB3106-022-Q1-K1-E7
caaagaaaaatgtatttttttcttcttctgatacttgagactagagaaaataccagacaatcacaaattacgatcacacctcaggttaacaaaaactgattttataaggtaaaacatcaatttaagctaacacaaagctgaccaaaaataagacctactcaattccaaaaagtatacaaattttggacctagaatttattttttctggaaggcaaaagcatatatagaaaaaaatttggaccaagaaaataaacagcacaggcaaatagattttaaagaaaatgattcatggacacaaaataagatagtttctacttgggcaggctatgggacagcatctgcaatgaactttcactcatcatcttcatcactatcagcagcagagttgatagccgcacgcgtgcaataactta

SEQ ID NO: 25065 - DNA, 384 bp, Glycine max
  Clone ID: LIB3106-022-Q1-K1-F6
cattgagcaggctctgggcaagtatggaatcatatccactgaagatctgatccatgagatcatcactgttggacctcactttaaggaggctaacaacttcctttggccatttaagctcaaggctcctttgggtggcttaaagaagaagagaaaccattatgttgagggaggtgatgctggaaaccgggagaattacatcaatgagctaatcaggagaatgaattgagctgtagcactgttcaatcatttgattagttgaatcaatcttttcttgttggctttttagatcaatatcagactattttcgtatctgaaattttgagaatagcacatttcttctgactttgataaatctttttgctaaggttgaatgtttttcgtttt

SEQ ID NO: 25066 - DNA, 242 bp, Glycine max
  Clone ID: LIB3106-022-Q1-K1-H5
acggcatctcctccctcatcctccgattccctcccaacttccagcgccagctcagcaccaaggcgcgccgcaattgtagcaacatcggcgtcgcgcaaattgtcgccgcttcgtggtcgaacaacagcgacaactctccggccgccggggctccggcgccgcccgcggccacagcagcggacgccgccacggtgcctctccccgtcgacctcgccgccgccgaggacgtcgtcgtctctgcc

SEQ ID NO: 25067 - DNA, 186 bp, Glycine max
  Clone ID: LIB3106-023-Q1-K1-E3
cccacgcgtccgcttaaataaaagggtttatgtagagaccgtgtttcgaaagtgaggtgccgttctgtgtataatgtaagggacactgttattaacttatcatgttgagtgttgagttaattaaaaaatgaaaacttatgaagcaaaaaaattatacaaaagagaaaattacataaatcattatta

SEQ ID NO: 25068 - DNA, 247 bp, Glycine max
  Clone ID: LIB3106-025-Q1-K1-G8
cccacgcgtccgagaagcaaggtggtaaatactgaaatatagttggcttttaagggtttgaggtttcgttttaatttagtctgtttattttctatctgatgattgacttgggcatacttgaaaaagatttatattttgtggacaatctgttatgtaataggtgttttctggctatgaaggtcacaatattttttaaaaaaaaaaaaaaaaaataatataaataatataatatatattaaaaattaaa

SEQ ID NO: 25069 - DNA, 100 bp, Glycine max
  Clone ID: LIB3106-026-Q1-K1-C12
accggtttaattttttaccctttaaaaaaaaaaattataaaaaaaaaaaaaaaaaaaaaaaaacgagaaaattttaatataaggggcggccgccctatct

SEQ ID NO: 25070 - DNA, 69 bp, Glycine max
  Clone ID: LIB3106-028-Q1-K1-A7
ttttactacaaaaaaaagattaaaaatattcaaaaaaaataaaaaaaaaaagggaaaaagaaaaaatac

SEQ ID NO: 25071 - DNA, 167 bp, Glycine max
  Clone ID: LIB3106-033-Q1-K1-B9
ctacgactcctttaccatttcaagagactacagagatgttttggcctgtgtgcacgatggttgtgagaaaactactctagcaacatgagttatgttgtgtctatgtgtagacccgatatggacttgaaataaaataaattattgtcccaataccaaagaaaataaaa

SEQ ID NO: 25072 - DNA, 54 bp, Glycine max; identical to SEQ ID NO: 25044
  Clone ID: LIB3106-033-Q1-K1-E12

SEQ ID NO: 25073 - DNA, 55 bp, Glycine max
  Clone ID: LIB3106-033-Q1-K1-G1
atgaagcagacgcgatgatgtataatcacattttcgtttaacaaactacagatac

SEQ ID NO: 25074 - DNA, 254 bp, Glycine max
  Clone ID: LIB3106-034-Q1-K1-A9
acggatcgcgagcggtcgccctttttttatctagttcttttttacgtgctgtcctaagttacttgaaactttgacctggtattttgattttaatggtgagacgtgtgctactgctacatcataattcccatcaaatttaattatcgatgggttagaatttcattaatttatgattttggtcgtgctagattcccggaagtttcttttgaagaaaaaaagccatgaacaaaaagaaaaccgacgatgacttacat

SEQ ID NO: 25075 - DNA, 298 bp, Glycine max
  Clone ID: LIB3106-034-Q1-K1-G11
gccaagagaacctaggtcgccaaaattgacttaaggtatgcttggattcccgtaaaaaacagtggacttgaaagcaatgcatacatgcttctatgtatttatctgggttttttgtgagaaaaaaaatgttagatgttggacactatttcaaacactcacttgtgctctgtgtgtgcctgggctcttgttaagaggtatgatatgtacatttatatttgtgttgctgctaagacatgtattgatgacactgttgaagattgagaaactgaaatcatgttattttaaaaaaaagaaatat

SEQ ID NO: 25076 - DNA, 328 bp, Glycine max
  Clone ID: LIB3106-036-Q1-K1-B6
cccacgcgtccgctatgtcgaaggcttgcgtaactgatgagatcgtatcctagctctgttaccgccctcggaaacagtgaatgcagacaaactatggatagtgatatctaacattgattgcaatgtatgcgtcattggatgtaggggtgtctgtttaatgctataatgtacgaagcggatgtaacatgaattttgctcatctgaagaaacaagtacgaaacttaacccgactagaaagcccggcccggacattctctcgtttatgaatgtcagcgatctagaagcttctgtcacttgtcattatgattacttagtagatgacaaatac

SEQ ID NO: 25077 - DNA, 302 bp, Glycine max
  Clone ID: LIB3106-037-Q1-K1-C4
cggacgcgtacgcccacgcgtacggcacatgatcgagttgtgaatgccagaaagtgggactggtcagttgtgaagattattgagcttgacgaatagaacttgattcattgtcaagtttgcgttataatatgtcttctttgtattagtattttctgttgtatgctttaataataaaaacacttcataataatgtgtatcacattggaagaaatgcttttggggaatggatatcattcattgccagcatgccaactgttgattataatataacaccattgaatgcttttatcaaaaaataaaca

SEQ ID NO: 25078 - DNA, 343 bp, Glycine max
  unsure at all n locations
  Clone ID: LIB3106-039-Q1-K1-D1
nccacccgtccgcccacgcgtncggtgtattattgcatgtctgttaagttgtggtagagcaggggattcttgtgattgagaggaaatgagattttggtttatggaaaacaaggagttggatttaggtgcactttagagagtgatgtacattattggaattgcggaatgattttgatggtaaaatatatgtgtatgtattatgaactatggaatttgtagaatagtagaatataaactgcctactttctaatcaactagtataagtagatactttatcccttgnaaaaaaaaaaaaaagacaaaacttccgtaaaacaaagaaaaatacttactattaaaatag

SEQ ID NO: 25079 - DNA, 204 bp, Glycine max
  Clone ID: LIB3106-039-Q1-K1-F6
gaggaactacctgggaaaccgactatcttttgggtgtctactgaagaaatgtgaaagccggttttattgccatgactgctgcgttttcaatgtcatccactagtaatagcactgttgaatgtacatatgtgtaaggctatggatctcaatggatattgggacttctctacgtattgaatttggaataaaatagaacaaacaata

SEQ ID NO: 25080 - DNA, 277 bp, Glycine max
  Clone ID: LIB3106-040-Q1-K1-F5
gtcatgcattcaaaactcaaaattaacagatctacactaaagcagagacatacacagcaggtatactttttctgattactttgtttttatttttattcattttactgcttaatttaatttctactgtcaatgattgctcaaaaagggtttctgttaggcttatgcactacatggtctcgttgtatagcactagcggactagtggaagttcataaattgttaaactagaacatgattgtattgtaccaagaataaacattacttcttcaaataaaaac

SEQ ID NO: 25081 - DNA, 291 bp, Glycine max
  Clone ID: LIB3106-040-Q1-K1-F8
gccacgcgtccgaccacgcgttcgtccacgcgttcgtgaggacattggtcacaatgctggtgtcttaaagggagcaaattgtgaacccaatgatattgctaatgctgcacttttccttgcgtctgatgatgccaaatatgttagtggacacaacttggttgcggatggaggtttcacatcttttaagaatttggacttgcctgcaccaaatcaagtgcagtaagagtttgtacaaattatattttacataaaggtaacaatgtttaaattaagtaattcaaatgataataa

SEQ ID NO: 25082 - DNA, 230 bp, Glycine max
  Clone ID: LIB3106-040-Q1-K1-G10
gaataaatcaattaaagcattttttttgatgtctctcatagatttcacaaagaaatagtcacgactcacaacacgagtaaaaaaaaactaccttgaaaacaaattacaacaacagtaacaatcccgtaatgttacaatcttctctccattcctcaacccaaaaacccaaatggcaaaacatcattatcataataatagaaattagatccaacaaactgataaagtatatg

SEQ ID NO: 25083 - DNA, 300 bp, Glycine max
  Clone ID: LIB3106-042-Q1-K1-D4
gaaaattggtcgtatagaggatgttactcccattccttcggatagcacacgtagaaagaggggtagaaggggtagaagactttaaacttcctattctggagttgctatattttacttttaatgccaaagagaattgtggccttttgatgttttttaagttaatatcagaacttctattgcatttcttgaggtgttgaacagaattttagttgagtacacatttaatcattgttgtcagagattttttaaagttgagcatgttgcttcctaaaaaaaaataatattttaaaaataataaaa

SEQ ID NO: 25084 - DNA, 298 bp, Glycine max
  Clone ID: LIB3106-045-Q1-K1-G6
cccacgcgtccgcaaacggataaagagatgagtaaatccgtctcaatgagtcccacaaggcacagacactcaaaaaaatgaaatctgaaatagtatctagcaaagtatcgggtgtggcacactgtcaagctgcttcaccttatccaactaaaccctgtcatctatggtgttgtgaaagtgtgaaagccaggaatcaaccatcttaatgttggcataacccgaacaacatttcctaccacttcctcaacttagtatttatttcataaaaaaaaaaaaaatagaaaacttaaaaaaataa

SEQ ID NO: 25085 - DNA, 92 bp, Glycine max
  Clone ID: LIB3106-046-Q1-K1-D7
aaaaaaaaaaaaaaaaaaaaaaaaaaaaaaaaaaaaaaaaaaaaaaaaaataaaggaaaagggaaaaaaaaataaaaaaaaaaaaaaaaaaa

SEQ ID NO: 25086 - DNA, 59 bp, Glycine max
  Clone ID: LIB3106-046-Q1-K1-F11
cccacgcgtccggaataaacatgtagtttgttggtgttttacagaaaaaaaaggaaaaa

SEQ ID NO: 25087 - DNA, 75 bp, Glycine max
  Clone ID: LIB3106-047-Q1-K1-B4
tcccacgcgtcctgttctagatcgcgagcggccttaatccttattgaaaaaaaaaaaaaaaataaagaataagtt

SEQ ID NO: 25088 - DNA, 206 bp, Glycine max
  Clone ID: LIB3106-047-Q1-K1-G10
gcattgccattctcaagtaatggcgctactacgtcttgcttgcttaccttcaacaaatcaagtatccactcatccccattcccattccctatccacctctttctcttttcttcgcaaaacgccccattctcaacccatcaatttcagtctctcttcctttcactttccacgcctaaccacgaatgaagaatatggaataaaggaaa

SEQ ID NO: 25089 - DNA, 73 bp, Glycine max
  Clone ID: LIB3106-048-Q1-K1-E6
tttcattgatttgttgtttggaccatacagagttaaggacttgtgacccttcttagctcatacccctttatac

SEQ ID NO: 25090 - DNA, 68 bp, Glycine max
  Clone ID: LIB3106-048-Q1-K1-E7
ttacaaagctactaacggtgaacacttccgggttctgggcttctgaatctcggatggttgaccctaat

SEQ ID NO: 25091 - DNA, 268 bp, Glycine max
  Clone ID: LIB3106-050-Q1-K1-E11
aggatattgggccaaagaactagcctcaattgctggtagtttgctgctttcatttatgcgagagtgatatattgttgtatgatcttgttaaaccccggagttatggagactctaagtcagactagttttatcaactgtgtttatggatgtgacagaaactgtttaacatttctctgtttcgatgttgtcttgatatttgtttgataaaatacgactatcaaattatttatgttttaacgtattttgcattctaactaaaataaataaa

SEQ ID NO: 25092 - DNA, 268 bp, Glycine max
  Clone ID: LIB3106-050-Q1-K1-E3
aggatattgggccaaagaactagcctcaattgttggttgtttgctgttttcatttatgcagaagtgatatatttttgtatgatcttgttaaaccccggagttatggagactctaagtcagactagttttatcaactgtgtttatggatgtgacagaaactgtttaacatttatctgtttcgatgttgactcgatatttttttgataaaatacgactatcaaattatttttgttttaacgtattttgcattctaactaaaaaaaaagaa

SEQ ID NO: 25093 - DNA, 134 bp, Glycine max
  Clone ID: LIB3106-051-Q1-K1-C4
ataacacatgagcgaagctctagacattatctacaggtgtgggtcccatgttcgggttctcagaattcgaggaagtgcacctaaatctgtccgagcgaatccacgatatgttcgtgtaaacactgagacaaaat

SEQ ID NO: 25094 - DNA, 256 bp, Glycine max
  Clone ID: LIB3106-051-Q1-K1-H9
gacaaaccctgctgatgaggaatgcaaagtttatgaatagaggagagctgctttgctaacgtatcatgtgaaaaagaaggaaattgttcagacagtctatctgaggagagattttcaaagtttatatttatttgcagccaataataagttttggcgtgactgaatgaatatcacccatatattgattgatattgaatttctgaattcttgtaactgatttgcaattcttcgaatcttttaatcaaaaaaaaataaa

SEQ ID NO: 25095 - DNA, 89 bp, Glycine max
  Clone ID: LIB3106-055-Q1-K1-A4
atttcagcacactggcggtcgatactagcgcatccggatcatgcgcaaccataatgctcaactagctattattcgagatactaccacct

SEQ ID NO: 25096 - DNA, 113 bp, Glycine max
  Clone ID: LIB3106-055-Q1-K1-D4
tttttacgctgaagccctgtacttgtgatatggtactctagaattcgtacctatctgacgggactcataaggtgcaccaaaactatttgcagtatttgttttactgaactctc

SEQ ID NO: 25097 - DNA, 431 bp, Glycine max
  Clone ID: LIB3106-055-Q1-K1-D5
ttgattcttttaacaacaatgatgatttattactactacaaatgaagaaaaagccttaaaaaatgaagcatgaaatgccattacaaatgaactcattaaaggctcccacaagcagggacatgaacatcatccctccgaccaaactgaacaaacataaatcaaacagacaggaaaaagatgattaaatcttggtctagttgatgattatattatatagtatcatatataattaagcggtaagctgttcctgcttgtgggtctcaataacaacatcactctgagggtaagcaacacaagtgaggacaaaacctgcagcaatctggtcatcatcaaggaaattaccgtcggattgatcgacggagccttgcttaatcattccggcacacgaagaacaagacccagccctacacgagaacggaagatcaatgcct

SEQ ID NO: 25098 - DNA, 215 bp, Glycine max
  Clone ID: LIB3106-055-Q1-K1-E5
tcagcacactggcggtcgatactagtgcatgcgtactgcataacaaaactgacttaacacagattgaggttatcgcccaacttgccatgtgatactgcaaatgctaaacccttatataacggctgctcataccaaattacagcatacactataaaaaacacgatgatgatggttgatgacccactttagacaaaatcttgaagcatggtatgcct

SEQ ID NO: 25099 - DNA, 95 bp, Glycine max
  Clone ID: LIB3106-055-Q1-K1-F1
attcctacacactggcgaccgttactagtgcatgggcaagggcgaatctttcagacgcgcacacttactcattcttgccctgtactatttaaccg

SEQ ID NO: 25100 - DNA, 89 bp, Glycine max
  Clone ID: LIB3106-055-Q1-K1-F3
atttttgcacactggctgccggtactagtgtatggtgttaaacaatgggaaagggttgagcatcgtaggtgatgatgatgactttggtg

SEQ ID NO: 25101 - DNA, 138 bp, Glycine max
  Clone ID: LIB3106-055-Q1-K1-F5
atttcagcacactggcggccggaactagtgcatgcacatgagcgaatccgtatggcgtgcacactaggtcaatcttgccatgtagcatatgagcgcgctacgacatatgcgacttgaaaccagggtttgaacacgccc

SEQ ID NO: 25102 - DNA, 273 bp, Glycine max
  Clone ID: LIB3106-055-Q1-K1-F6
atttcagcacactggcggccggaactagtggatgcacatgatcgaatccgtatggcgtgcgcactaggtcaatcttgccatgtagtatatgagcgctctacgacagatccgaggcgaaacagggacaagattaggcccgaactagtatatttccataatgcttccggcttatcgtcttttcgagcaagtgtatccatgcgactgccgaactcttcgaaagccttgatgctttctggatcataaccgcccacgaactgatgaacaccgcaagca

SEQ ID NO: 25103 - DNA, 310 bp, Glycine max
  Clone ID: LIB3106-055-Q1-K1-G8
attttagattattgatacaggagtctagtatttattattgataattggttggatcgagatgatcgctttggtaaatcattacaacgattggagcttaaagcttctgtacgatagaataaaagcccataacgtatcagctcatgcatagctatatgaaacttgacttaagctattccattctatatatacttttgaaccatgattgtttatattcatataatttcaatctattcgatggtctgaatgttatacctgatgtggtgattgcctattaagaaaaggaacatatattattgttctaataattttt

SEQ ID NO: 25104 - DNA, 292 bp, Glycine max
  Clone ID: LIB3106-055-Q1-K1-H7
tttttatttttacgaatatttataaaattaattgaaaatcacttaaattaatatgaaccttaatgattgaaagcattaaaaggaatcccagagacccagtttccctccctggggtcttcaaaaagatgactgcatagtaatttactttactgctctcaacattttatcattacataaccagatcaatgacaatgccattcatgcataagttgtatcttatgatgatgcagcccttctttttgcaaaattatttctcaacttcagctaggttctttgcaacttaaagcttaac

SEQ ID NO: 25105 - DNA, 55 bp, Glycine max
  Clone ID: LIB3106-056-Q1-K1-A6
aaaaaaaaaaaaaaaaattaaaaaaaaaaccttaaaaaaaaaaaaaaaaaaaaaa

SEQ ID NO: 25106 - DNA, 176 bp, Glycine max
  Clone ID: LIB3106-058-Q1-K1-C10
cccacgcgtccgcccacgcgtccgcccacgcgtccgcatgtatatggcatgccatatcaatgttcaatatatcaccttcttccaacacggcctcatcactggctagtggcacacacagttgcaagagaaagagagcgagattccgatggcgactctggattccgacgtgcctatgg

SEQ ID NO: 25107 - DNA, 256 bp, Glycine max
  Clone ID: LIB3106-059-Q1-K1-A4
agcccgcatgcttctaagtgtgaaaaatttgcaaagcatttgtagccgccaccccactttgggtgtttgtacttaaactacattcccatttgtttttgctttttgagatttcatcatcctgtatttatggtttctgttttcggacttcaatggaaattaatggatgagaactaatgaataagctattgtgttgtgttgctttgtttcaaaaaaaaaaaagcaaaaaaaagatgaagataaaactattacaaataca

SEQ ID NO: 25108 - DNA, 250 bp, Glycine max
  Clone ID: LIB3106-059-Q1-K1-D6
cccacgcgtccggggatttccagaaaatttgggacttcattacctgcctctttttccttagagtagttgtcttgtccaactagagctccaaatctgaagtcacagttccaccaaaatacttgatggagcagaggaaatattttcaagttatgtattttcattctctagattgtaatgtgagattcttcaagaatttagaagggaattggttatgacattggcagggatattaaagcaaaaaaaaaaaata

SEQ ID NO: 25109 - DNA, 186 bp, Glycine max
  Clone ID: LIB3106-062-F7-F4A
tgttatcgtttgatttctttggtttgtagtcttgtagagtttcttatttgttctctgtaccctcggcagaagaggagggaaaaaaatattacccccacgggcccacctactctctttatatattttttctgtcaaacttagcagcagcaacaatgaagtcatttctcattaagtgggttttccgtg

SEQ ID NO: 25110 - DNA, 121 bp, Glycine max
  Clone ID: LIB3106-062-F7-R5A
tcggagttttatgctgtctgaataccaacgtatgattaccacgcccgtttaaagggaaccgctccacaaattaactaactcctcgtcccaaaccaatatcaaaacacttgaacggtcttct

SEQ ID NO: 25111 - DNA, 79 bp, Glycine max
  Clone ID: LIB3106-064-Q1-K1-C10
gcgaaaaaaaaaaaaaaaaaaaaaaaaaaaaaaaaaaaaaaaaaataaaaaaaaaaaaaaaaaagaggaaaaaagggaa

SEQ ID NO: 25112 - DNA, 251 bp, Glycine max
  Clone ID: LIB3106-066-P1-K1-B1
ctcaagcgtacgtgcacgcgtacgaaaacacaagccaagtgtaagtgagaaaagataaagggaaagagcacgatggtgaacacagtagtgagtacaaaggagagcatcatggtgaacacaaagctggagagtaccatggtgagcacaagccagagcacaaagaggggttcctagacaaagtcaaggacaagatccatggtgagggcggcgccgtcgagggcgagaaaaataaaaaaataaaaatataaaaa

SEQ ID NO: 25113 - DNA, 74 bp, Glycine max
  Clone ID: LIB3106-067-P1-K1-B11
aaaaaaaaaaaaaaaaaaaaaaaaaaaaaaataaaaaaataaaaaaaaaaaaaaaaaaaaaaggaaaaaaaaaa

SEQ ID NO: 25114 - DNA, 63 bp, Glycine max
  Clone ID: LIB3106-068-P1-K1-F12
cccacgcgtccggctttttacgattattaaaaaaaaaaaaaaaaaaaaaaaaaaggggggaaa

SEQ ID NO: 25115 - DNA, 454 bp, Glycine max
  Clone ID: LIB3106-068-P1-K1-H11
cgtctcggctctatggcctacctctctaacttcttcttatttgttctctcacgatctccactagcccttctcttgttggtgcttttacttaccaaggcgactgactcgactcgatactcgtttcgtttcaaccttcaacaaagttcaacctcagtctcaactcaaaccattatgcgtccaaaaaggatgcttagtatttcatacctctggggtgttacaacctcaccaaagttggcagcaacggcgtgcccacctcgggatctctcggtcgtgccctttacgctgccccaatccagatttgggacagcgaaaccggcaaggtagccagctgggctacatcctttaaattcaacattttcgcacccaacaaatcaaaacggcatcgtggtggttgtccaatggacaagtggcggagattctcgttacctataatgcccgcacgagcctcttggtt

SEQ ID NO: 25116 - DNA, 537 bp, Glycine max
  Clone ID: LIB3106-070-P1-K1-A1.R3
tctgttggagagcgcactcaggtgttgcaggatgtcgctgcagatccaacgcttcctcgaaccaagtctgttcgctgcagtcaatgcaatcatggtgaagctgtctttttccaggcaactgccagaggggaagaaggaatgacactttttttcgtttgctgcaacccaaactgtggacacagatggagagactgaaatttgtgcttcctcagatcaaaggttcaatattggggagatctaactatttgtggttatctgaaaaacttggctgatgcggggacagtaatactgaagtatttgtgttacctgtttaactgcagttcctgatcaaataattaatacagttaatggacaaactgttgtttgccaatgctgataaattctgaggatgggcataaatttcatggtttgttaaaaggaaaaaggatgagtgacactgcttttatggatgggcctaactttcttgggtggggagttaggaatcaaaatgactttttttttgttatatgctatattatttgatgaaaaattcttatt

SEQ ID NO: 25117 - DNA, 225 bp, Glycine max
  Clone ID: LIB3106-070-P1-K1-A8
cttgaattttgcagcattgttagctgtaattctatttagtaacttaatgatttgagcttagaaagaacaagtacacccgtagggcgttactttctttttattactgtttaatgggtagagttcacatggcagcatttcgttacatgtgaaataatagaacggatagtggtgtatgtcttatttattaccgagtaatcgagtatagatccatagtggtcaattttt

SEQ ID NO: 25118 - DNA, 58 bp, Glycine max
  unsure at all n locations
  Clone ID: LIB3106-072-P1-K1-C4
naaaaaaaaaaaaaaaaaaaaaaaaaaaaaattataaataaataaacaaacaaaaaaa

SEQ ID NO: 25119 - DNA, 273 bp, Glycine max
  Clone ID: LIB3106-073-Q1-K1-A7
cccacgcgtccgtagatcgcgagcggtccctttttttttttttttttttttttttttgttggtttttttttttttttttttttttttttttttttttttttttttttttttttttttttaatttaaaaaaccctaatttttttaataaaaaaacacttccaaacccctttttttattccaattttggccccaaaccattccaacccttaaccaatccttaatgctttactgtttttcaacgattttttgtaaaaaaaaaaacctttttttttt

SEQ ID NO: 25120 - DNA, 241 bp, Glycine max
  Clone ID: LIB3106-073-Q1-K1-G1
gccctcaccaatatggttgctgctgccaaacttattcgcaaccagttatagctagtaccaagtgagttgagaatgagccaataaggtcatccatgtgagataatgtactcatgttgaaaatccgaatgctttgtatttccaataatgtcttcataaaagattttgtcctttcttctcccaaaatataagactgcttatacgaatgtggaaactgttgcatgaacgtgttggagtacatgta

SEQ ID NO: 25121 - DNA, 231 bp, Glycine max
  Clone ID: LIB3106-073-Q1-K1-G4
ttttttttttttttttttgatgtcgtagagtttgtttaatgagggaaaagtcaaaaccataaagctacggattttgttttccagttggctaatccatgtgccaagagagtggcccatccacccgggggtccaaatgttttttgtacttcatttctttcatttttttccctttattttcttgacagtaattgttaaactggtcagttcataaatattgttgtcgttactttt

SEQ ID NO: 25122 - DNA, 181 bp, Glycine max
  Clone ID: LIB3106-074-Q1-K1-D8
aaccacgcgtccggataaacactatatatattttgcatgtaaatattttgatgattaaaaagcgatgcttctggaggactgaaaaaaaaaaaaaaaaaaaaaaaaaaaaccaaggaaaaaaaaaaaaacaataaatgaaatgaaacaatacccaaacataaaaaaccataaataaaaacaa

SEQ ID NO: 25123 - DNA, 93 bp, Glycine max
  Clone ID: LIB3106-074-Q1-K1-H9
aaaaaaaaaaaataaaaaaaaaaaaaaaatttaaaaaaaaaaaaaggaaaaaaaaaaaaaaggaaaaaaaaaaaaaaaaggaaaaaaaaaaaa

SEQ ID NO: 25124 - DNA, 383 bp, Glycine max
  Clone ID: LIB3106-076-Q1-K1-D6
ggaccagaatgggttcatttctgctgctgagctccgccatgtgatgaccaaccttggggggaagctcactgatgaagaggttgatgagatgattcgagaggctgatgtcgatggcgacggccaaataaactacgaggagtttgttaaggtcatgatggccaagtgatggtagtacaccatctacactaaattctgaactgatggaaaaaaatgacaaggttgaacttgtggtatagtacacctagtccttgcctaatgtcattactgtcttatttctagatttttatttgatgtttttgaattcaatctaaacgacatttactggaaagctctgctgctaatggtaattgtggtggaatggtgtctttctaaaaaaccagata

SEQ ID NO: 25125 - DNA, 82 bp, Glycine max
  Clone ID: LIB3106-076-Q1-K1-G9
aaaaaaaaaaaaaaaaaataaaaaaaaaatttttacaaactaaaagatttataaaaaataggggaaaaattaaaaaatggaa

SEQ ID NO: 25126 - DNA, 57 bp, Glycine max
  Clone ID: LIB3106-078-P1-K1-B3
aaaaaaaaaaaaaaaaaaaaaaaaaaaatttaaattaaaaaaaaaaaaaaaaaaaaa

SEQ ID NO: 25127 - DNA, 81 bp, Glycine max
  Clone ID: LIB3106-078-P1-K1-B7
aaaaaaaaaaaaaaaaaataaaaaaataaatttaaaaaaaaaaaaaaaaaaaaaaaggaaaagaaaaaaaaaaaaaaaaaa

SEQ ID NO: 25128 - DNA, 179 bp, Glycine max
  Clone ID: LIB3106-079-P1-K1-C11
ctcagttcggtttttcattctctcgcgaatctaatctataggaaaagctaagggcacatcacaatgaaggcattgattctggttggggggtttggaacaaggctgaggccactgacactcagttttcctaagcctcttgttgattttgctaacaaacctatgattctgcatcagataga

SEQ ID NO: 25129 - DNA, 382 bp, Glycine max
  unsure at all n locations
  Clone ID: LIB3106-079-P1-K1-H2
ccgtccgtcaaagtcctcctccacctatctcccacttctcctctctccaccatanccattacacantcaccgacctgngctccttccccagcttcctgcgtcccaagtacatnttaccaaattncacctccacctccggtttatnatctatgcttccccnnacctccacctatctacacagtaagctcaaattgtgaaagcaccattcatgatgaatcattttctagttttcatcgaggaataaaggcaagctctattttgagccaagtgaaacatctatcttcctgtctaagttctttgaataaaagtctgaatgtgtcatctctatgctacaatgtttatgattcacatcaggttgattctatttgtttgatggccatct

SEQ ID NO: 25130 - DNA, 93 bp, Glycine max
  Clone ID: LIB3106-085-Q1-K1-B11
aaaaaaaaaaaaaaaaaaaaaaaaaaaaaaaaaaaaaaaaaaaaaaaaaaaaaaaaaaagaaaaaaaaaaaaaaaaaaaaaaaaaaaaaaaaa

SEQ ID NO: 25131 - DNA, 294 bp, Glycine max
  unsure at all n locations
  Clone ID: LIB3106-085-Q1-K1-C2
tttttttttnnttttttttttttttttttttgggggtttttttttttggtggggtggttttnttnnggggtaaatttttttttttaattttttttggggagggaaaaatttcttttaaaaatttttgtgggaaaggtaataaaagtggaaaaaaatgaaaaaaaaataacaaaaaaagggatcccccaaaaaaaaaaagccgccaaatttaaaaaaaattctttaaaaaaccccccctcaataacttccccaataccgaaactataaaaaacctaaaaaaaccccttccaatgg

SEQ ID NO: 25132 - DNA, 81 bp, Glycine max
  Clone ID: LIB3106-088-Q1-K1-G6
cccacgcgtccgcccacgcgtccgtaaaaaaaaaaaaaaaaaaaaaaaaaaaagagaaaaaaggaaaaaaaaaaaaggaaa

SEQ ID NO: 25133 - DNA, 150 bp, Glycine max
  Clone ID: LIB3106-088-Q1-K1-G9
acaagttataatgtcattagagcattgcgtttctaatgtaactgaactgcttagtacaaagtgcctttattttagttgtcattcattgccgtcaaaaaaaaataaaagaaataaaaagataacaatttgaaaacaaaataggaaataaaa

SEQ ID NO: 25134 - DNA, 326 bp, Glycine max
  unsure at all n locations
  Clone ID: LIB3106-090-Q1-K1-C1
ggaaaaagaaagcaatagaagccactgatatgggaggatcatcatataatgatttccatcgattagtgaaggaggttcttcacaatgatgtcgcttgagtctttcaatatattgggggtccgaaggtagggtattaggtgtttcaatattggagatcctagtgttgggctgggctatcaaacaaaatattatgaagaaactagcatgacttgatggctgaaaatcaagtctattaaataaagatttgcgtggatgtaattcatcatatattgcattgatttgaagtgtatgtcggtttacaatatanaanagatgtaataaaagat

SEQ ID NO: 25135 - DNA, 361 bp, Glycine max
  Clone ID: LIB3106-090-Q1-K1-G5
cccaggcttctaagtgtgaaaaatttgcaatgcatttgtagccgccaacggcttcatccgtgtcatcggattcgacaacgttcgccaagtgcagtgcatcagcttcatcgcctacaagcccccaggcttctaagtgtgaaaaatttgcaaagcatttgtagccgccaccccactttgtttgtttgtacttaaactacattcccatttgtttttgctttttgagatttcatcatcctgtattcttggtttctgttttcggacttcaatggaaattaatggatgagaactaatgaataaaaaaaaaaaaagaacaataagagactataaaatatgacacaagattaaactgatactctaaaaa

SEQ ID NO: 25136 - DNA, 303 bp, Glycine max
  Clone ID: LIB3106-091-Q1-K1-A9
cccacgcgtccgtttgtgaaaagcttctcttgtgttgaagactgtatcctgttctgattaggcgcaattactcttgggagtataactctaaaatgaatatatttgtaagtggtacaccagtttaattggtcacaactttttgttaggcttcaatcgaagttcttatcaggggttttgatgcactgtttgattggatggtccgttccatcccttgctgcaactgttttctgtaaatcactagttattttgattcaattgcaaacagatttggaaataaaaaaaataaagaagataaattaaaaa

SEQ ID NO: 25137 - DNA, 68 bp, Glycine max
  Clone ID: LIB3106-093-Q1-K1-A4
aaaaaaaaaaaaaaaaaaaaaaaaaaaaaaattaaataaaaaaaaaaaaaaaaaaaaaaaaaaggaag

SEQ ID NO: 25138 - DNA, 210 bp, Glycine max
  Clone ID: LIB3106-093-Q1-K1-B6
cgcagttactactagcctaaggatttttcatgtcacaaaaaaagaatctgtatattctctctgttatcgacccctttgatctctattctctatgaactatatcctgtgtgcagttgctcataatcttattcttcgactaaagacatcttattttattcaaaaaaaaaaaaaaaaaaactaaaacacataaaataaaacacatgataaaaa

SEQ ID NO: 25139 - DNA, 231 bp, Glycine max
  Clone ID: LIB3106-094-Q1-K1-G9
gtattctgtctcattataattagctctcagatagtgttctagtgcatggtcacacttcaagaggtacatttcgtcggatactttgtatgtaaaactacaaaaaaggaagtatacgttgttttatcccatgttaaaaaaaaaaaaaaaaaaaaaaaaaaaaaaaaaaaaaaaaaaaaaaaaaaaaaaaaaaaaaaaaaaaaaaaaaaaaaaaaaaaaagaaagaaacaataa

SEQ ID NO: 25140 - DNA, 351 bp, Glycine max
  Clone ID: LIB3106-095-Q1-K1-F7
aggactcttaatctttttatcccttttttgtaaacgacgaggaggataatgaaggaggcggtgattttataggatagcaacttaacaattgatattaaactgaacaaattgattaaaacgccaagaagacagacctacatatggaagaaacttatcttaatgatactaacaataaattataaaatgattcaccggaaattaagaatagtcatgtgaaaagacaaaatgtgattactgaaaagcctgaatgttaacaaacacaaaagcttgaaattgaaccagcaaacaaagttatcttataagcgccggacactgaaaaatcccaacgacccctactgactactgaattat

SEQ ID NO: 25141 - DNA, 118 bp, Glycine max
  Clone ID: LIB3106-096-Q1-K1-B11
gcgctcacgcgtgacctttaatacgttttctacacaaagatcatggcctctaataacgcggatatagccatgcatactgtcaatagagcttccgttaaacccaaaataaacaacaaaa

SEQ ID NO: 25142 - DNA, 253 bp, Glycine max
  Clone ID: LIB3106-096-Q1-K1-D8
gaaaagggtagtgacattgatccacaagaagcacagcaaactcttgaaatagcagaagctaatgtgaataaggcggaaggcaagagacaaacaattgaggcaaatctagctcttagacgaactaggacacgagtagaggctatcaatgtgatttcataacaagttgatgcgtccgaatatcggaataactaaaaagataaaaaatgaaaaaaaataaaagaagaaagtaaaacgtaaaaaaagatacaacata

SEQ ID NO: 25143 - DNA, 186 bp, Glycine max
  Clone ID: LIB3106-096-Q1-K1-E1
atttaattactatatactctacatattaacttttagaaatgtgtcccaatggatttacaaattgatacaacaaaaaatgaaacttttaaactaaaaaattaacaatactaatattggacctaactgtagagattcataataatgtcttgtgatcaaaacctaaccacgaaactagaaatgaaaact

SEQ ID NO: 25144 - DNA, 365 bp, Glycine max
  Clone ID: LIB3106-097-Q1-K1-A5
agaacatagccaagcgaccgttctccatgtttggtttctttgttcaggctattgtcactggcaagggccctattcagaacctttacgaccacgttgctgatcctgttgccaacaatgcttgggcttatgccactaactttgtccctggacaatgaggatgcctacatgcaatgcaatcttctgctcccttttgcagttcccttgtgtttaactccattttcactaatgtaactacacctgtgtagcagaaaaatctgtatgagaaccattatatttttataaaaaaaaaaaaaaactataaaatcaaaaaaaaaaagaaatcaatgaaacaaaacccttgagagaaacttggattggaacaaaaa

SEQ ID NO: 25145 - DNA, 305 bp, Glycine max
  Clone ID: LIB3106-100-Q1-K1-C12
tagatcgcgagcggctgccctttttttttttttttttttttttttactgatataacatcatttttttttatttccataccaataccattatttatagctcaaaactgtgattgcctattaaaaaaacaatcaaacaaaaaagtctctttcccactctacaatatgtatctcaatggtatgtgtttggtattggacttcaatgaaacacaaacgctttaatgaaaaggttgagaagaagttttattatgatgcatcaaatgacacattagttgtattgaaccaatcaatctttgaactcaagaatc

SEQ ID NO: 25146 - DNA, 87 bp, Glycine max
  Clone ID: LIB3106-100-Q1-K1-D1
cttacacttgcgtctatgataaatgactattagtggcactgtctataaaaaaaagatggggcgaatgaattctcatgattgggataa

SEQ ID NO: 25147 - DNA, 194 bp, Glycine max
  Clone ID: LIB3106-103-Q1-K1-B2
tcgcccacgcgtccgcaattatcaataattaataactttacaatggactaacgagagatactttgactgcaggcctataaacaagaatcagaattctggcaatctacatacataagtggtgaaagtatctctcgttagtccattgtaaagttatcaattatcaataattaaagtttaagcataaacaactttaa

SEQ ID NO: 25148 - DNA, 221 bp, Glycine max
  Clone ID: LIB3106-103-Q1-K1-B5
catcatcatgctcatgctgctgcggaacaccatcaccatcacccccaagttgacactcctcctcctactgctgctgatgctgctgctgctgaggaggaggaggaggaatctcaagacactccctttcaagaaacaaaccccaacatgaacacagggctagatgaggaaagcgcggatggcggcggggacaagaagaaaaagacacaactacttacaccaat

SEQ ID NO: 25149 - DNA, 162 bp, Glycine max
  Clone ID: LIB3106-103-Q1-K1-E7
agatgatatggtactttccaaacttaaaaaatgttaaacgcctgtattaatccagcataaaatgggcctttgaaactaaagaaaaacaaactaagattggcccaaactgaagaaatacaaaaaaatggcttgagatcaagcctaaccacgaatatggaaaat

SEQ ID NO: 25150 - DNA, 56 bp, Glycine max
  Clone ID: LIB3106-104-Q1-K1-C1
aaaaaaaaaaaaaaaaaaaaaaaaaaaaaaatttaataaaaaaaaaaaaaaaaaaa

SEQ ID NO: 25151 - DNA, 86 bp, Glycine max
  Clone ID: LIB3106-105-Q1-K1-F11
gtagatagtatgttgagaaagcattatattctttaaaatgaagaacaaagtgcattcatatggaactctttaataaaaagaaagga

SEQ ID NO: 25152 - DNA, 69 bp, Glycine max
  Clone ID: LIB3106-106-Q1-K1-E5
tagttctagcatgcgcattttactgtttgtgaaaacgacttggtcattctaatcattttttgtccattc

SEQ ID NO: 25153 - DNA, 441 bp, Glycine max
  Clone ID: LIB3106-106-Q1-K1-H10
cccacgcgttcgcccacgcgtccgtacaaatcagcaatgagagagaatctgttgaggcagggatacagaattgttggaatcattggagaccaatggagcgatctgcttggagaccacagaggcgaaagcaggacctttaagcttcctaatcccatgtactacattgagtagtaccttcacctctctcaacaatctagctagagtttgctcctatctatatgtaataaggtatgctgatatgcactattcaaataggagcattagctatgtttgttaatgtcactttatgttatgtgggtaagtcacctaagacactccacgtacctaacgtggtgtctcttaccgggtttaataaatcttctgcccttgttccatatttaaaaaaaaagacgctacggatatttctttctaaaaattgggccttaatgaattgaaaaaaga

SEQ ID NO: 25154 - DNA, 193 bp, Glycine max
  unsure at all n locations
  Clone ID: LIB3106-107-Q1-K1-D1
ctagttctagatcgcgaccggccgccctttttttttttttttttttttttttttttttttgtttttttttttttttttttggtttttgggngggaaggaacaaggggcctttttttttttaaaattggcttggggggcaagggaaaaaggggggaaaaaaggggtaaggggggggggggggcaaaaaaacaaa

SEQ ID NO: 25155 - DNA, 309 bp, Glycine max
  Clone ID: LIB3106-107-Q1-K1-F5
gaaaaatcaaggcagaaagatactgtcagcttctgtgtatttcatcatttggatgataaaataagttctatttgatacaattctcaattttcttgcagttaaatgtttaattgaatgtgtgaaaaatgagcatacttttttatttggttctgtcttttaggtcctcttgatgtggtgatgtaattttgcaactgttcaaattatgggataggtttcatatctcaaacaaatcatagacagtgtgcctaagttaaatttttttaaggcaaatctgaataatggatttaatctcttgaaaaaatttaactt

SEQ ID NO: 25156 - DNA, 315 bp, Glycine max
  Clone ID: LIB3106-107-Q1-K1-G1
ggaggggaaaggggggctttttttttttaagccccgaaaaaaaaaaaaactttggggggttttttttatttttttttggcccccagtttaaaaaaaataaaggggaggttgggcccttttttggacccctttttttttatattaaaaaaaagggccccccttttttgttgggggggggaggaattttttttttttttccggggggtttaggaaacttaaagggcttttttttccttttggggcctccgggggaaacctttttttggtttaaaaaaaccaaaaatttggggtcccggctttaaaaatttttttttg

SEQ ID NO: 25157 - DNA, 82 bp, Glycine max
  Clone ID: LIB3106-107-Q1-K1-G9
tgatatcatgtacctattgtcaattttattatgccacaaatattgcttaaaaaaaagaaggaaaaaaaaaaaaaaaggaagg

SEQ ID NO: 25158 - DNA, 227 bp, Glycine max
  Clone ID: LIB3106-108-Q1-K1-B7
gacaaattggaatgaagcatccattatcattgtaactgttaaatggtgcactgcagggcctaagtaagcacctgtatcttaatcccagtttgtgaaacaaattgaacattgctgtattgatgtattatcaaaatgtgcctgccttccctgttaaaaaaaaaaaaaaaaaaaaaaaaaaaaaaaaaaaaaacaatataaaaaaaaaaaaaatacataacacatacata

SEQ ID NO: 25159 - DNA, 62 bp, Glycine max
  Clone ID: LIB3106-108-Q1-K1-D9
cacaattccgctcgagcgttacttcagacgtttggatctacatccgaagcgtgcgctatatg

SEQ ID NO: 25160 - DNA, 183 bp, Glycine max
  Clone ID: LIB3106-108-Q1-K1-E9
cgggcctactagtgagctacactacccgctatttaattcctgacctgtacctacacgcgtacgaactttccctagggggcgtcgcattaaagctcgtcggaatcatcactataaagacttcctgtgagataatgcaatgccgtgacaattccactcaacatacgagtcgcaaacataaatggt

SEQ ID NO: 25161 - DNA, 269 bp, Glycine max
  Clone ID: LIB3106-108-Q1-K1-F2
tcggtttttagtttatgtaatgtttctgcttcttgaagtggtttcagatattgttttaggttgaattgcagacaatattggcatttggcacatatagtttgcttttgcttgacttctcagtgagaagtgttttgatgagattaattgatagttataagagatgttttcttggttgttcttgtgaaaaaaaaaaatatggaaccaaacaaaatagacctaatataaaaaaacttgaatgaagaaacaactcaagtaacatggaaataaaa

SEQ ID NO: 25162 - DNA, 223 bp, Glycine max
  Clone ID: LIB3106-111-Q1-K1-B4
ggagggtacgtatacatgcatgcagcgtactagcgcgtgctatggtgcgacctaaatttaatatcactggccgtagatttacaacattgggactgggaaaacaatggcgtgaccgaactaaatcggcttgcaccacatttaactgtcgttcagctggagtaatagtcgaagaggctcgcacagatcggaataggcaacaatggacagcccgaatggcgaatgg

SEQ ID NO: 25163 - DNA, 96 bp, Glycine max
  Clone ID: LIB3106-111-Q1-K1-E12
cccacgcgttcgaaaaaaaatatagattgctctgaaaaaaactacagattaagtgctacataaatggggactcttaaacctaaaaacggggataca

SEQ ID NO: 25164 - DNA, 369 bp, Glycine max
  Clone ID: LIB3106-111-Q1-K1-H3
ttcacatcgatgtgatcatgttggctcacaattcaggtgggaaagagagaacagagaaagagggtgaggctctggccaaaggctgtggattccaaggtttccaagtcctgtgctgtgctttcaatacctacgtcatggaatttctcaaaaaggtttaagttctttggcgtggattcatatcaagttgcatttggattttgactttgagactctgcttggggtgctacttacgaatgttttcccggaaaaacgtaaatttcttctaatgctttatgaaaagaattacgaacaatttcaatgtataccgcctttataaaataatcacaagtttcatattgtggttctggttcaaaaaaaaaaatatataat

SEQ ID NO: 25165 - DNA, 384 bp, Glycine max
  Clone ID: LIB3106-111-Q1-K1-H8
cccacgcgtccggggaagtgctacccctagactgagaaggcaagagatgcaggcacataaatctttgaacagaatttctatttttctcttttgctgcttccttctttgtcttattgtcttctaagtgagcacttgacattattttctctcattatctattgtatactttgtaaagaaggcaagagatgcaagctttaaaaacttgatagatcattgagtgaaatagtgaattatcacaggctaaagagcttgtgagtctatattgcacaaaactgcatctacacttctattcgttttattaaacctcttttttggtgtgtgtgtatatataagaataagacaataataagatttaaactttgaatctataaacaaattagaaaa

SEQ ID NO: 25166 - DNA, 342 bp, Glycine max
  Clone ID: LIB3106-112-Q1-K1-F4
cagagatgagtttgctgagattacttttgaagaattgttagcacaggagaagaaagattcattttggcaaagaaatgggaaatcaagactaagctcaagctagtaacactactagcttggctgactgtaacctcctgagttagtttagtatgtacatccaatacctgtagctgtgtattgtcacaggaatgctctttttggttccttgcctgtgccaattttggttgttaatggaatatagatgatacaactttgagtttattttagaaatttataaatggaagccagttaaattgaaaaaaaaaaaatacaccatatataaagaagcaaatcaaatgaaaa

SEQ ID NO: 25167 - DNA, 297 bp, Glycine max
  Clone ID: LIB3106-112-Q1-K1-H6
cacacgcgtccgcccacgcgttcggtatcaacatctataaattttgatacctcgggcgttcatgcttctcttcatctgtgaatatatttactactgcatgccttaattacgctatccccagatagtaccttatatacatgcataataaccctatgttctccgtcattacgtatcattaatcaaagacgatatgtatcatgtatgctttacaaaagataagtcaattagtctattcttatgattgagtgaattgggtaatcagaatttttcatcactctcacttattaacttccatta

SEQ ID NO: 25168 - DNA, 322 bp, Glycine max
  Clone ID: LIB3106-112-Q1-K1-H9
cccacgcgtccgctgtcttatgactagctagtttttgttagattattattattgtgtgagatcaatggtttgagtacgttatatatgtgcgagaagagtatgtattgcagtactagtagtagttagtcaggaaatgggagggaaaataaagttacatgggtgtggggtgatcttatgtacttggtatgatattatgtctgatttgaacaagttgacgaccaaaaagtgtgggtctcttcttgatcttatgtacttttgtattaatcgtttttttttatgtaaattttttaatatctttttttggaaaaaaaaaaaaaaataa

SEQ ID NO: 25169 - DNA, 253 bp, Glycine max
  Clone ID: LIB3106-113-Q1-K1-H3
tgactttctactttgaggctggacatgggaagaccccccttggtgctcttggcttgtggggtaaacatttcatgtagataagtgaattgagaggctagacagttgcaaatcaacctttgattgtcccgtctgtgttacttcatgacacattcaaattctatgatctaaaattggatgcattcactttatgtctgcactctaatgtaaccatcgtatcaatacttgtatttttacttttaaaatgattacacag

SEQ ID NO: 25170 - DNA, 87 bp, Glycine max
  unsure at all n locations
  Clone ID: LIB3106-114-Q1-K1-A11
gctcttgnacgaaatgagangtataccttgaccatgtgctagagttgcaaactatgaagggggacgggttagtaaaaaaaagggaaa

SEQ ID NO: 25171 - DNA, 93 bp, Glycine max
  unsure at all n locations
  Clone ID: LIB3106-114-Q1-K1-F6
naaaaaaaaaaaaaaaaaaaaaaaaaaaataaaaattaaaaaaaaaaaaaaaaaaaaaaagggaaaaaaggaaaaaaaaaatattgcaaataa

SEQ ID NO: 25172 - DNA, 453 bp, Glycine max
  Clone ID: LIB3106-114-Q1-K1-F9
attcggctcgagcagggtttccttttctcacttggagctcccaattgaaacccaatttcgtgatccctccacactttctcgttcggaaaactcgcgaattggaaagacatcgacggctccgcgtgatacgttctcttcctgtctggatatcaatgttggctattagtgcaattgcatctttgcccgtattaccaccactcacaagaggtggccactgcattgaacagaatgttgcttccacattgagctttccaagacgactacagacaactaataattcaatatctctgagtagtacacagcttccattcggtagaagagctcgttctacgcaaccagcaactataatatgtgctgcagctttgaatgcaagatgtggtgcagagcaaaccccaactggtactcgccaggctcctacaattactcatgttcctggcaaggagaacgtaccac

SEQ ID NO: 25173 - DNA, 254 bp, Glycine max
  Clone ID: LIB3106-114-Q1-K1-G5
ctcctaatagggagagacattaacatctgtagaagtttttcaggattcttgttcaactcaagatctgtggatatatgtttgagacatggcggtgtcatgtttttggatgatatattgttttctgacaattaaaaacatgtggtatgcttgtaattttgaaagacatttataaggtttggattcttaaaaaaaatatataatgaaaatattaatataaatttatatttaaatcttatatatacattaaaataaaa

SEQ ID NO: 25174 - DNA, 153 bp, Glycine max
  Clone ID: LIB3106-115-Q1-K1-F1
cccacgcgtccgcccacgcgtccgctagttctagatcgcgagcggccgtcctttttgtggaggaattgatatactgcatattgctgtttgagtaagatttaatgtttgagttgatgaatagttccttaacaaaaaataaaaaaacaataatat

SEQ ID NO: 25175 - DNA, 448 bp, Glycine max
  Clone ID: LIB3106-115-Q1-K1-H2
tccacgcgtccggggttttcgctcaccggtgtgcagtcgagcccccgaagaaaaagcgaaaatgccgtcgcacaagacattcagaatcaagaagaagttggcgaagaagatgaggcagaacaggcctatcccctactggatccgcatgaggaccgacaacaccatcaggtacaacgcgaagcgccgtcactggcgtcgcaccaagcttggattctgaggtgcttgctttgcctcggttctgcttatccaattaattagtgttttattttcttgagccaaaaacaatgctttggagattttaatattttgcattttgttccaagactatattgtgtaaggaacttattgtagttcagactaatggtggtgttggtcaccttttttttaaaagtattttggaattctttgcgtttggtttaaaaaaaaaacttaataactgaacccaaaa

SEQ ID NO: 25176 - DNA, 240 bp, Glycine max
  Clone ID: LIB3106-116-Q1-K1-A11
gtgatatcaattatcatcatcactaatagttttcatgcaacttgcatctaatgctatatccgctttctttgtattattgtccatgcccaagctagccagtggtttcttttttgttgcaactgttgtgggtaccttcccttttgcgatttatagatctgattgattcacttcaagtttgttgttgaaaagcgaaaaaacttgaattgatgacgcgtggaggagtgtaataatgacatttat

SEQ ID NO: 25177 - DNA, 347 bp, Glycine max
  Clone ID: LIB3106-116-Q1-K1-B11
cctcgtaattcatctcgagatgccctcctgatcttgacagacgcgtatgggggaccctcacattgaaccaaataccatagccttctgtttgtgcgtgacaaaatacgccccaccataagaataatgctgaaaaatgaaaatcactaggttataacgaagaaggctttctaccttgcgctgctgattattctgctccagtacaacatcctctgcaatgcctacaacaactaaaactgtgttacacacgattgcctcatcttgaacaaggatttggaatcagagttctactttggatcccatgtgggcataatgctctacgatgtgagccaatctgtgattggcaaaac

SEQ ID NO: 25178 - DNA, 513 bp, Glycine max
  Clone ID: LIB3106-005-Q1-K2-F7.TC
ataattccaattacggttcaacgttttacatctagagctgaataagcctatgttacaggatgaacctaaacatcaccagcatccaagagaacaagcacataggagcacagccaaaaaaagaattgttcagcctccaaaaccgtagagggtccttccctgcctcttaagagcataaaccacgtccatagcagtcactgtcttcctcctagcgtgctcagtgtaggtcacagcatcacgaatcacgttctccaagaatatcttcagaactcctctggtttcctcgtagatcaaaccactgatccttttcacgccacctcttctcgctaacctacgaatcgcaggtttcgtgattccttgaatgttatcgcgcagaaccttcctgtgcctcttggcacctccctttcccaaacccttgccaccctttccacgaccagacattttagtgaggaaaatttggtgcgaaatcaaatttgagaaattaggttttctcggacgcgtgggcggacgcgtggg

SEQ ID NO: 25179 - DNA, 380 bp, Glycine max
  Clone ID: LIB3108-001-Q1-K1-A1
cgacgagttcggccacatgctcgccgtaatcctcaaggaaaacggcgttcgcgccgacggcggcaactttgaccagggcgcacgcaccgacctggccttcgcgaccctacgcgccgacggagagcgtgagttcatgtactacagaaaccccagcgccgacatgctcctcaagcccgaggaactcaatctcgaactcatcagatctgcataagttttccattacggatcaatcagttagatcgtgtagccatgcagatcagcacacttgtaggcaatggaagtagccaatgaatctgggtgcttgctctcctatgaccctaaccttcgactacctttgtggtcgtcggctgatgaagctcgtaagcaaatactgagcattt

SEQ ID NO: 25180 - DNA, 82 bp, Glycine max
  Clone ID: LIB3108-001-Q1-K1-A11
cccacgcgtccgaaaaaaaaaaaaaaataaaaaaaaaaaaaaaaaaaaaaaaagggagagataaaaaaaaaagaaggggagg

SEQ ID NO: 25181 - DNA, 340 bp, Glycine max
  Clone ID: LIB3108-001-Q1-K1-A12
aaacaagtagttgagaactaagattaatgaaatggcttcctcaatgatctcctggccgggtgttaccaccgtcaagcgtgccgatgccggcatggttgcttcattcaccgggctcaaatccatggctggctttcccactagcaacaccaacaatgacattaccttcattgctatcaacggtggacgacgtcgatgcacgcaggcatctccaccaatcggcaacaagaagttctagactctatcctacttgacagacctcgacaatgcccaataggctaaagaagtcctattccttttaacgaaaggattgattccttgctttaaattcgagttggaacac

SEQ ID NO: 25182 - DNA, 427 bp, Glycine max
  Clone ID: LIB3108-001-Q1-K1-A2
cccacgcgtccgtcaccatgacagcttccatccttggcagcccagccgtcaccaaccggtgggcagttgcaacgcagaggagatcactcgtagtgaatgctgccaaagctgttgaagcagaaaaggtcagttatgacaatgacatggatggtagcaatggaaggaggaacttgatgttcgccgcggcggcggctgctgtttgctctgttgctgggatggcagtggcagatgagcctaaaccaggaaccccagaagccaagaaaaagtatgctccgatttgtgtcaccatgccaactgctaggatttgtcgcaattgagggactttggtttttattttacttctgatgattggaaatgtacaatggggttgttgtaatgctttgatgatttcatttgatcctcactgtacaagatgttcataaaacta

SEQ ID NO: 25183 - DNA, 420 bp, Glycine max
  Clone ID: LIB3108-001-Q1-K1-A3
tttcggtgtttcacttccgtaattctcaacacttccaataactctttctcttttcttcttagaacggtgattaatcgttgtttccgttatgaaacgctctgaatttgagttccccgcaactgtttttcccagtgcggtctccgacgacgtcgttttattcggcaaactcataacgcgccgaaccggagaaccgggtccagcgccgtgtgagaagagcgaaaaccgggttctgttgagatccgagtcttcttcgggtgggaccaacgggtttgtggcgtggctacggtcgccgtccgggagggaaagccggtaccggaaaagcgagagttgccggagccgttataagatggtgctgaaagttccactgcaaatggaactgagtgacattaagatgaggcaggaacggatggagccgatgcc

SEQ ID NO: 25184 - DNA, 441 bp, Glycine max
  Clone ID: LIB3108-001-Q1-K1-A4
aacattgccagtgccattcccttcacaccattctcacaaaacaactttcaaactctgagagagaatggctgccaacacattgatgagtactgctatctcagccttcccatctctcctttcttcctcaaaatccagatttgccaccgcagttcctctttctagctttggtgtcaccaatgcctcttcttctcgcttttctatgagtgctgactggatgccaggccagcctagacctccttaccttgatggttcatcacctggtgactttggattcgaccctcttcgtcttggtgaagtaccagagaatcttgagaggttcaaagagtcagaactcattcactgcagatgggccatgcttgctagtccagggattttggttccagaggcattgggcttatgcaactgtgtaaaggctcatgaatgggcagcagtttctggggg

SEQ ID NO: 25185 - DNA, 402 bp, Glycine max
  Clone ID: LIB3108-001-Q1-K1-A5
gaggtgcaagacatagtaacctaacggtgcttacaaatattaacagcggaagaagtgaagggcccggaccgccaccgtctagggtagggttagggttttaattttcgtcacacatcaacacacgctacctcactgcaaagcaatctcgctgcttccgttttcggatttcaatcgcttccactctcagctaccatggcaaaagctacttccggaaccgtcaatcctcacagccgtaccggagttcgtatcgtcctcgccggagaccagggcaccggaaaatctagcctcattataaccggcgacgtcgataacttttcggtgaatgtgctgcctgtcttgcctcccactcggttgcctgaagatctggatcctgatcgcgtgcctatcaccattattgacact

SEQ ID NO: 25186 - DNA, 129 bp, Glycine max
  Clone ID: LIB3108-001-Q1-K1-A6
tccacgcatccactatcatatacactctgatactacctttctctctaataaaaaatctctagccgggttatacatcatcctacggcattttatttaacatcaaccttaaaaaaaactcattactattct

SEQ ID NO: 25187 - DNA, 298 bp, Glycine max
  Clone ID: LIB3108-001-Q1-K1-A7
gtccagtgatcaagggtaataagtggtcaagtaccaaatggatgcctgtcaacgaatacaaagcttggatatacattactataggcttgtctgaattcatcatgccaagggtgtaccatttggagtctcaactaaaagtttgcgtgataatgtttcagatcttgaatgaaatatttacagcattccgtgacattttgtaaattttggatgttcagttttaaagctactcattttttcttctacccttttcatttatgataccagcgaatattttataattaaatataatatatgtacc

SEQ ID NO: 25188 - DNA, 356 bp, Glycine max
  Clone ID: LIB3108-001-Q1-K1-A8
cccacgcgtccgatattattttacgggagaggctacatatttttggaattctcggttgtgtggtgtgtgttgtgggatctacgacaattgttttgcatgcacctcaagaacgggaaattgaatctgtttcagaagtgtgggatcttgctatggaaccagcatttctcttttatgcagctatggttataacagctacttttatccttatcttccacttcattcctctctatggccagacacacataatggtttatattggtgtttgttcccttgtaagttctctaacggtatgtctcgttatgtagttgctgatgactttctaatagtatttggtcttcccttgttatttcccccct

SEQ ID NO: 25189 - DNA, 413 bp, Glycine max
  Clone ID: LIB3108-001-Q1-K1-A9
attactattagaccctccgataagttccaatctttttcggtcttttctccaccggactgaaacccgtcttcatttgatccggtgagagagagttcccctttggttgcgtgaatcttcagaaaagggttgtccttgtaatataatagttcgtgaattggagtttgtgtttatagcaagagaatggatgagtcaaaaaacaggcataatgataatttgggtgtgaacaaaatggggaaaaacattaggaagagcccattacaccagcccaattatggcaacaacaacaacagcagcatgaatgggggtagacagcaacagcaacagcctcagcctcaggtttacaacataagcaagaatgatttcagggatattgttcagcagcttacagggtcttcctctcagtctcaggatca

SEQ ID NO: 25190 - DNA, 371 bp, Glycine max
  Clone ID: LIB3108-001-Q1-K1-B1
gagaaattcagatagccataccccaggaagctccaagaatttcagtgcaaggagaagaagagcagtagatttcaaaaactgccttgattctttctcagaatcttctggcacggagaaatctaatttggtgaaatatgctgaagctataaaagattccagtggaaccctcaaacatagaacacatagaagatcagcatcatatagttcattttaacttattagctatatgcaaggattttacctcattccagcagtgaatatcacagattagcaggtgatttattaatcaatcctgatgtatattcaacaatagccggtaggggctgttaaataaccatgtattaaataaggatgcatttataatcataggc

SEQ ID NO: 25191 - DNA, 417 bp, Glycine max
  Clone ID: LIB3108-001-Q1-K1-B11
aagggaagaaaaacttagctactaaggaaggatcaaagagaatggctcaagcaatgggatcaatggctggcttgcgtggttcctctcaagctgtgttggaaggtagccttcaggtgagtggctccacacgcttgaatgtggggagtggaagcagggtggcctcagtcacacgtgcagggttcacagttagagcacaacaacaacaagtgagtggtgaggtacaaagcagccgtagggcagtgctttcacttgttgctgctggtttggccactggctcttttgttcaagctgtgcttgctgatgccaaatctatcaaagttggaccaccttccccaccttctggtggattgcctggaacgttgaactcagatgaagcaagagaccttcagctgccattgaaagataggttcttccttc

SEQ ID NO: 25192 - DNA, 297 bp, Glycine max
  Clone ID: LIB3108-001-Q1-K1-B2
ggatccgatgacagccatgtccttacatgactaaaccctgccagcagatggtacaagaggggctcattactgcatcaatgtgtggccctaaattctgctctatgaatataacggaggatgtgaggaagtatgctgaggaacatggctatggaactgatgaagctctgcaacgcatgatgcatgctatgaatgctgaatatctagctgacaataacactatcactatatagcaacatgttaaatctttccaacagatttacttactcgattaatactgaatgtatcaataagacttaa

SEQ ID NO: 25193 - DNA, 416 bp, Glycine max
  unsure at all n locations
  Clone ID: LIB3108-001-Q1-K1-B3
tcgtctcgtcccactgccgtccgactttgcattagtactattgacttaagacaagcgtattgtcattgatcttgctagcgtgccaacatatgggttctagcgagattattcattcattttagtacccttgtgcttgtgaaccttttcatttccatgatcattgactcaagggttgcagagnngcacgtaccctgcnncaaaatcagccttattggccttccaaagnnttgatatacctactgttgttccttcttccactttggtggcaccactttgccataatttgcctgttactttctccctccagtggcctganaactacctgcaagtaccctaaaagtactcanattccttgggaagtaaatagttaaataaacgtctcaaaataaatccccttagaggtaacctaatgatct

SEQ ID NO: 25194 - DNA, 439 bp, Glycine max
  Clone ID: LIB3108-001-Q1-K1-B4
cccacgcgtccgtccaggtgacaatgttggctttaatgtgaagaatgttgcagtcaaggatctcaagcgtggttttgttgcatccaactccaaggatgaccctgccaaggaagctgccaacttcacatctcaagtcattatcatgaaccaccctggccagattggaaatggatacgcaccggtgcttgattgccacacttctcacattgctgtcaagttttctgaaatcttgaccaagattgacaggcgatctggtaaggagcttgagaaggagcccaaatttttgaagaatggtgatgcaggtatggttaagatgattccaaccaagcccatggtggttgaaactttctctgagtatccttcccttgggcgttttgctgtgagggacatgcttcaaactgtggctgtcggagtcatcaagagtgttgagaagaaagac

SEQ ID NO: 25195 - DNA, 502 bp, Glycine max
  Clone ID: LIB3108-001-Q1-K1-B5
aaaaaaaaataaataataatataaaaaaaaattaaaaaaaaaaaaaaaaaacaaaaataaagggagggttataaaaaaaatatataaaatataaatacatacaattaaaatattattaaattataattattatatataatatttactatctcttatactaatatatatttttattttatatttaatatatttattatttatctttatttatatattttatctatttatttttaatatctatctattatttatatttcatattatattttttatatattttcttttatattttttatatatattttttctattttattatttctattttaattttttatttattattatttattttttatatatctttttttatttaaatttatctattcttttatttatttctttaatatttacttttttattattattattattattttaatatttatttattattatttttaattttattaattatttatttattatttattttttttta

SEQ ID NO: 25196 - DNA, 120 bp, Glycine max
  Clone ID: LIB3108-001-Q1-K1-B7
acccacgcgttcgatcacgcgtacactaataacccttattttatctattctctatcttacttgtgcggtctatgcatttagaagcaaaggataggaaattatgccttgcctgttttacca

SEQ ID NO: 25197 - DNA, 66 bp, Glycine max
  Clone ID: LIB3108-001-Q1-K1-B8
cccacgcgtccgcccacgcgtccgatttacagtaaactatactcctctacaccctatttctgtctt

SEQ ID NO: 25198 - DNA, 418 bp, Glycine max
  Clone ID: LIB3108-001-Q1-K1-B9
acaaaacaagccaattgacttctttaataagggcttggctgaggaactgaatagagagtgagcatgtcagcaagcaatgtttgcagacacacataaaattataaccaaatgtgctatgattggtaatttgtcaaaagaagggggtgatcgctgccatctaaattttgatttaggatgcacagatcctagttcgcacctgtacaacccgctagccaatgtatatgatggaacatgtacaattgcattggattgaatcttaagaataccaatatactttgcataaattttcatttcgatcataccttaatgatcgttttaaatacacagtgtatattgtaaattccactctcaacattggacatatgcaattactggtcttggtaccttaattctatgcttaatctggtactattgaaac

SEQ ID NO: 25199 - DNA, 426 bp, Glycine max
  Clone ID: LIB3108-001-Q1-K1-C1
agttgttccagattggcatcaaaagtaagaaggtgcacaattcgaccttctccactataaggtgaaatgacatatatcaaacagtgataccaactaggagtgacatgcagcaaattcacactgcaaaattcacaattaagagtttcattgttgaaggtggaagagaatttccatgaagaaaaaccaacaacaacaatgaaagaaatactacaatgatcaacagcacgaaagaaactgattttccactaaaacaagaaggtctttcttcaagtgatcatgagaaggcaaaggctccatcgagctcatcatcatcacaatggctaaaactgaaggatccaaggattgttcgagtatcaaaagcctttggaggaaaagacaggcatagcaaggtatgcacaattaagaggactaagagatagaagagtg

SEQ ID NO: 25200 - DNA, 417 bp, Glycine max
  Clone ID: LIB3108-001-Q1-K1-C11
attagggtttttgagtgcggtgcggcgatcctagcactctcttctgcagctttcgcggacagcttcattcaccatggctgagcaaaccgagaaggcttttttgaaacaaccaaaagtgtttctcagctcgaagaaaactgggaagggaaagagacccggaaagggtgggaaccgcttttggaaatccattgggcttggatttaagactcccagggaagccatcgaaggaacctacattgacaagaagtgccccttcactggcaatgtttccatccgtggccgtatcttggctggaacatgtcacagtgctaagatgaacaggactattattgttaggaggaattatctccattttatcaagaagtaccagaggtacgagaaaaggcactccaacattcctgctcatatatcacctgc

SEQ ID NO: 25201 - DNA, 314 bp, Glycine max
  Clone ID: LIB3108-001-Q1-K1-C2
cccacgcgtacgcccacgcgtccggtaaaactctccacgaagtactcttgtctactaggagtggggacgtacaatacctaaacctacagatgctacataatcttttatattgctagttcgagatttacgatctacagctatgaatctgaatcatgaccttgcatccgagaagaacttccagattcatacgacggcagctaaattggtcttactcagatctactactctatgattgatcagtatacacttcaacaacatccgatttgtatcagttatttttcaacagataatgtgtttgtgcaaattattttctt

SEQ ID NO: 25202 - DNA, 254 bp, Glycine max
  Clone ID: LIB3108-001-Q1-K1-C3
gcccccaggcttctaagtcattgaaaaatttgcaaagcatctgtagccaccccactgtggtggttgtacttaaactacattcccatttgtttttgctttatgagatttcatcatcctgtatttttggtttctgttttcggacttcaatggaaattaatggatgagaactaatgaataagctattgtgttgtgttgaaaaaaaaatactactattatcaactactctaattaaactgattttacacttaaacaac

SEQ ID NO: 25203 - DNA, 454 bp, Glycine max
  unsure at all n locations
  Clone ID: LIB3108-001-Q1-K1-C5
gcaaaaggagcgacccgaacctgctcactggtgctcttgttggtggacctgatgcatatggtgacgttgctgatgaaagagataactatgagcagacagagccagcaacctataacaatgctcctcttatcggtattctggcaagactaggtggaggtcatggtggctataaccagcttcttccagttgttgttccagctcctaagcctgttgttaccaagcctcaaccaacccccagtcccaagacaactccacctccagcttcgtggtcaggtccaatttccattgaacagaaaatgaccacctcgtggattgcccatggaataacttactacagatactcaacagtggtgactaacaaatctaacatgagtctcaaattctctcaatctttcaatatccaagctttatggtccaatcntgggggttacaaaatcaggtgattcatacacat

SEQ ID NO: 25204 - DNA, 462 bp, Glycine max
  unsure at all n locations
  Clone ID: LIB3108-001-Q1-K1-C7
gtgtccgtgtctcaagttgaaacgttgtgtcgtgtttgtcattgtctaagaaagagggagagatgggagtagtgaacagaagaaattctgcagctcataccagtaaccaaaacaaaacaacttcaattcaactccctttaggaatttttggaacagtgctggcagtgttgttcattgggtttgtagcatggagttatcaaactattcaacctcctccttcaaagatatgtggatctcttaatggtcccactataacagcacccagaatcaaactaagagatggaaggaatttagcatacaaagagcatggtgtcccaaaagatgttgccaagcataaaatcatctttggccatggttttgatgcttgcaggcatgatgcctatgttgccaaaacactatcacctgtagttgctgatgtattaangggttaacaattgatcttttgatagaactgggtattgg

SEQ ID NO: 25205 - DNA, 369 bp, Glycine max
  Clone ID: LIB3108-001-Q1-K1-C8
taaatgatatcattttgagaaaaaaaaaaaattaaattaaaaaaaaaataaaaaaaaaaaaaaagaaaagatatattaaaaaaaaaaatattaaaaataatcatacaattaacaattataaaactaacattttttttttttctattatatttttattttaatcattttttattttttatttttattttattatatattcttatttttattttattatttattttatttttttttttttatttttattttttacttattcaatttttaatttcatttattatttattttattttttatttttcattttattttttatatttctttttattttttatttatttatttattttatatttttttatttatatt

SEQ ID NO: 25206 - DNA, 379 bp, Glycine max
  Clone ID: LIB3108-001-Q1-K1-C9
gtgttctctctctgcttcagcttcggcttcgagaagggtcgattgggtccccaagcggtttcttctctgtgtctgacaaactttataacccttatcaaacatgagtggtcgcttttctcgcacaatttatgttggcaacctgccctctgatataagagagtcagaaattgaagatctattctacaagtatggccgtataatggatattgaattgaaggttcctccccgccctccatgttattgctttgttgagtttgataatgctcgagatgccgaagatgcaattcggggtcgagatggatacaactttgatggttgtcggttaagagtggagcttgctcatggtggtagagggccatcatcaagtgatcgacgtgga

SEQ ID NO: 25207 - DNA, 412 bp, Glycine max
  Clone ID: LIB3108-001-Q1-K1-D1
gtgcgttaagaaagaaagaaaaaaaaaaaataagtcatggcagcgagtgacggttgcagcaggttcttaacattgtcgtgtgcaggtgcagtgcagaatcaacatgtatcacaccctacaacgtttttgggagttcctaaaaacaatcatagaaaaaggaaaacaccgcacaggttagttgtggttgctgtgactcaaggctctgctgaatcaagcaagtccgatgaaaaaatcccttcgtgggccaaaccggactccgatgaaccttcggcgtgggcccgggacgagcccaacaacaacagttcgcaacaagaaggatttgagatcccgttctatgcttatttgtttgcctctgctatcactgctattgccgctataggctccattttcgaatatgtgaatcaaaagcctg

SEQ ID NO: 25208 - DNA, 405 bp, Glycine max
  Clone ID: LIB3108-001-Q1-K1-D11
aacaatctttgttccatttcggcatgaaaccctaattcactcgcttctcgatctcgtgagagcaatctttccacgctcgtcttcgcgctccatctgtacaagaagatccgtcacgagcgttggttatacgatggatgggaacaaggacgacgcgttgaaatgtttaagaatcggcaaagaggcgatggaaagcggcgatcggtcacgcgctttgaagttcgtgacgaaggcgcgtcgcctcgaccccactcttcccgtcgacgatctattgtccacgatagaggtggatgcaagggatcaagcccccggcggcgaagcggaaggccccacgaagcccactgatcaaccttctatccgccggagggccaccggggcggctgcgaccgtctcggccgggccctcgtc

SEQ ID NO: 25209 - DNA, 114 bp, Glycine max
  unsure at all n locations
  Clone ID: LIB3108-001-Q1-K1-D12
ctttttgtaaccatgccgaattanttgcaaaatctgaagtgtactactataccatacaagaaaatataaaaagtacaaccacctaaaaatgtttaattaaacaaccccttaaaa

SEQ ID NO: 25210 - DNA, 335 bp, Glycine max
  Clone ID: LIB3108-001-Q1-K1-D3
taaaaaataaaaaatataaaataaaaatttaatataaaaaaaaaaaaaaaaaaaaaaaaaagaaagaatatttacaacaacatatacaaaaatctaaattatatcaaaataattcatacttttacattatcttttatatattctaatttattttttatttattaaatttctttcttctcattttttttcttctttattctattcatattctcatatttatttacctttttttttatatataattccttcttttatcttactttatttcttttaatttttcttcttttttcatatacttttcctttaatttctatttcttattttttatttttttt

SEQ ID NO: 25211 - DNA, 356 bp, Glycine max
  Clone ID: LIB3108-001-Q1-K1-D4
gttcattagactctcacagacctagcatacatacacacatggctgccatgaactatggcggattggcctgcatctatgccagatctgctgcagcatgctacgagctcaatgacaaggtcactaacgaggcctctgacgcatactctggctacaaagggccatagatcaaatgtgatgccagagttcccacataccaaagaatccgaaggaaggagaggtgcccatgttctgtaggcagctaccctagtcatctatgcagcctccaattctatctgcaatgcatacatcattgatgattaccatcagaggagcaaagctaacaaggaattgaatgacaacaagaggttatgtactac

SEQ ID NO: 25212 - DNA, 410 bp, Glycine max
  unsure at all n locations
  Clone ID: LIB3108-001-Q1-K1-D5
tgtgaattcagttcaattccacccaaatttaagtgtgcacttggcatgttttggaatttgtgccttgttgtatgctggagctgctgtattgggatacacaatgtttggagaagctattctgtctcagttcactcttaacatgcctaaagaattggtagcaaccaagattgctgtctggactacggtggttaatccatttaccaagtatgcgttgactatatccccagtggcaatgagtctggaggagttgataccatcaaaccatgccaagtcttatctatattccatcttcatcagaacagggttggtactttctaccctggttattggtcttttagttcccttntttggtctggtgatgtcattgattggatcattactcacaatgcttgttactttgatactaccct

SEQ ID NO: 25213 - DNA, 420 bp, Glycine max
  Clone ID: LIB3108-001-Q1-K1-D6
cagaagaacaagtagttgagaactaagaaggagaagcaaatggcttcctcaatgatctctggccggagctgttaccactgtcaaccgtgccggtgccggcatggttgctccattcactggcctcaagtccatggctggcttccccaccagaaagaccaacaatgacattacctccattgctagcaacggtggaagagtgcaatgcatgcaggtgtggccaccagttggcaagaagaagtttgagactctttcctacctgccagaccttgatgatgcacaattggcaaaggaagtagaataccttcttaggaagggatggattccttgcttggaattcgagttggagcacggtttcgtgtaccgtgagcacaacaggtcaccaggatactacgatggacgctactggaccatgtggaagct

SEQ ID NO: 25214 - DNA, 393 bp, Glycine max
  Clone ID: LIB3108-001-Q1-K1-D7
cccacgcgtccgcacagattttgattcgattcgattcgattcagtcgaggttttaagcagcagcaagatgtctgggcgtggaaagggaggaaagggattgggaaaaggaggagcaaaacgacatcgtaaggtgctccgcgacaacattcagggaattacgaagccagcgattcgtcgtttggctcgcaggggtggcgtgaagcgtatcagcggtttgatctacgaggagactcgcggtgttctcaagatcttcttggagaatgtcatccgtgacgccgttacttacacggagcacgctaggaggaaaaccgttacggctatggacgttgtttatgcgcttaagaggcatggaaggaccctttacggatttgggggtagggtttttgcttgatt

SEQ ID NO: 25215 - DNA, 308 bp, Glycine max
  Clone ID: LIB3108-001-Q1-K1-D8
caccatcaatacctagttccaaagaaagttttacaaattaaaaaaggatgttatagaaagagtacttgagtgaagaagaactcaatcactctgagttgttgttcataaagaagactgcgtttgtgatattttctcctaccatgtctggctttctttgaactttcactcgcagcttcttattcttgtgatctaagttcctctactctcattccaagcgtgggtgtatatcaaggatccggattccttgtggtcggaggaagcacgcatgcacgcagttagacgattagtactgtcataaagattcaaca

SEQ ID NO: 25216 - DNA, 421 bp, Glycine max
  Clone ID: LIB3108-001-Q1-K1-D9
ctttgatctctgtccccgctgcgtctctcgtaatcatgcctaagcaaatccacgagagtaaggatttccttctcactgccagaaggaaggatgcgaggtcagtgaagatcaagaggagcagagatgtggttaagttcaaggtcagatgctccaagtacctctacacactttgtgtgtttgacccagagaaagctgataaattgaagcaatctcttcctccaggtttgagtgttcaagacctgtaaaggtactgggcgagagatcaaggaagagcaattcattgattcttctgaaatttgattctctgtagttgaagcttgagatttttgtcagttggtcttttattatagattattgctaagacatggttgtttttatctgttttggaaaatgaaacttgaatttatgtctaatggagtat

SEQ ID NO: 25217 - DNA, 211 bp, Glycine max
  Clone ID: LIB3108-001-Q1-K1-E10
tccctctgctacccactcatcctaaaaacacaactatctaaaatcaatcttacaaaactctttccaaattctatcaaagtaaacttctaacatttcctgactcataaatatataaatctaatctatctctatacacacacaacttcttctctgaccatttacatatactttctcaaattttttaattcatcaattaatctattaatcactt

SEQ ID NO: 25218 - DNA, 410 bp, Glycine max
  Clone ID: LIB3108-001-Q1-K1-E11
ctctaatatttttctcactgtcttgtctctccagagaactgtatagagagagatgacgtctgcaacatctggtgcgtgtgttaaatgggttgggatcttccttcttgagtggaggaaacaggagccaaacccttctggccactgctattggaggcaaagtttgtgctgctgctgttactgttagtcctagaagactcattgtggtagctgctgctgcaccaaataagtcatggctccctggtgtcagaggtggtgtcaacctcgtctacccataatggcttgatggatccctaccaggtgactattgcctttacctactaggccttttgaaggacccagcattccttaaatggtacagataatctgatcttatttattggatatgggcaatggcttccattttaggaatc

SEQ ID NO: 25219 - DNA, 359 bp, Glycine max
  Clone ID: LIB3108-001-Q1-K1-E2
gacctatcttggtagagatttgaagtttaaaccttcaaattaatcaaaccattttaattgggctttagattctgagtcactgctgctatggcgctacgcgtacttcttgtgttggggatgttgctgatgttgtgccttgttaaggtttcatctgatccaaagatagaagaagaaatactggaagcagaagaagaactgcagtttcccgataacgagccacttatcgtgagagacgcgaacagaaggctaatgcaagatatggattgtggtgggttgtgcaagacgaggtgcagtgcacattcgaggcccaacttgtgcactaaggcgtgtggcacgtgcttggtgaggtgcaagtgtgt

SEQ ID NO: 25220 - DNA, 430 bp, Glycine max
  Clone ID: LIB3108-001-Q1-K1-E4
gaaagctattgtcattgatttgctagctccaacaatgggttctagcagattatcattcatgttagtacttgtgcttgtaaccttttcatccatgatcattgactcaagggttgcagaggcacgtaccctgccaaaatcagccttattgccttccaaagttgatatacctactgttgttcctcttccactggtggcaccactgccaaatttgcctgttactctccctccagtgcctgaactacctgcagtacctaaagtaccaattcctgaagtaatagttaataacgccaaaataatcccttgagtacctatgatctatccagtcactactacttattttgtcacttgctaaattaacttgttgttgccatcccagggtggttctggttctgttggggttaatttctgtcattcaattacatgctatggt

SEQ ID NO: 25221 - DNA, 416 bp, Glycine max
  Clone ID: LIB3108-001-Q1-K1-E6
cccacgcgtccggcacatttggaaagtgttgtttttcttttttttcatttgcattgcaaagcaagaaccttgcaaattgcaatggcttccaacaaggttattgccaccatcttggttctttctctccttgcctactcaacatcattcaccaatgcatgtggcacatgccacccaaaacctactccttctccccctcctccatcagggaagtgccccaaggacacattgaagctaggggtgtgtgctgatgttctaggacttgttaatgttgttgttggttcccctgtctctagcaagtgttgtgcattgcttgaaggtttggctgattcggaggctgcactttgcctttgcactgctattaaggccaatgttcctggaatcaacttgaatgtgcctatcacactcagtgtgctact

SEQ ID NO: 25222 - DNA, 375 bp, Glycine max
  Clone ID: LIB3108-001-Q1-K1-E7
agtgatatggcgtatctgagattctcacacgcagcaccacagccacacctcacactagggtgtccgtcaccacctcaatttctctctattgctgctccaaaattctctccctcgtcttctaccatcaggtgcaaaggttttagtagattgatagtgaatcagaggctggtgactgtttttgcaacaaatcccaactctgtaggtgaaaaatcacccacagaaggatcagatgtatatgaaactagcaatgctgctcaaggacctcctctccttactattctggctggattctttgtccttttttgttgttgttggagcattcggtccattataacgtggctgataagtttaatagttaatgtacctgctccaaaa

SEQ ID NO: 25223 - DNA, 211 bp, Glycine max
  Clone ID: LIB3108-001-Q1-K1-E8
accacgcgtccgcccacgcgtccggtaccaacattgttgtggaagaattttataattgcaatgtgcctggaaaattatctaccaaaaaaaaaaaaaaaaaaaaaaaaaaaaaaaaaaaaaaaaaaaaaaatacaaaaaaaaaaaaaaaaaaaataaaaaaaaaaaaacatataaaataaaaaaaaaacaaataaaaaaaaatatataaaag

SEQ ID NO: 25224 - DNA, 421 bp, Glycine max
  Clone ID: LIB3108-001-Q1-K1-E9
ccactgcacaagtatctaaaatcaagcaaaggtggactctttggagatggtatgaaagtgaacttctccaagttccttggtgataaagagggaaatgtggttgatcgctatgcacccacaacttctactctgagcattgacaaggacttgctgaagttgttggatgcatgaatgaagctatgaatgactggagctgccaatagatgaattgtgattagaatatgaattatgaataagatatgtattgcatatgctgctgcaatttcctgtgtgccttgtatgtgtaccgaaacagttactcttgtagctctgacattaggttcataaccatgatattgggtacttattatagtgtgaatgtaaacttaagcttccttttaccattccagtgatctacctattccatttattggttttaaaa

SEQ ID NO: 25225 - DNA, 461 bp, Glycine max
  Clone ID: LIB3108-001-Q1-K1-F1
cccaagccctatacaaccaaaccctaacacacacccatttgattcagtttccatggctggcgctcaaggttgcatttttggctgcagtgctctgcatggttgtggtgagtgcacccatggcacatgcagctatcacgtgcgggcaggtgacgagtagcctgtccaattgcatcggttacctccagaagggaggaacgccgtcgtcgggatgctgcaacggagtgaagagcctcaatgccgacgccaagaccaccgccgaccgccagacggcgtgcaactgcctcaagtcggtcgccagccaaatcttcggcttcaacgccaacaactccgtctcgctccccggcaaatgcggagtctccatcccctacaagatcagcacctccactaactgcgctaccatcaaggtttgaagagaaagtcatggacgcatgatacccgaaactactaactagtatatgagt

SEQ ID NO: 25226 - DNA, 420 bp, Glycine max
  Clone ID: LIB3108-001-Q1-K1-F10
gaaatcgttcctatcatcacttctcaaatctcgaaccctctcgttcgtgccgatcacgaggtcacacttcatcaatggcgggtagaggcaaaaccctaggatccagcgccgctaagaaggccacctcaaggagcagcaaagccggcctccaattccccgtcggtcgtatcgccaggttcctcaaggccggaaagtacgccgagcgcgtcggcgccggagcccccgtctacctcgccgccgttctcgaatatctcgctgctgaggttttggaattggctggaaacgctgcgagagataacaagaagactcgaattgttccacgccacatccaattggcggtgaggaacgacgaagagttgagcaagcttctaggagatgttaccattgctaacggcggtgttatgcctaacattcacaacc

SEQ ID NO: 25227 - DNA, 356 bp, Glycine max
  Clone ID: LIB3108-001-Q1-K1-F12
aaaaaaaaaaaaaaaataaaaattatattaaaaaaaaaaaaaaaaaaataacaaggaaaagaataaaaacaaaagaaagtatgaaaaaaaaaaaaaaataaaaaaaataaataaaaaacttaaaataaaaaaaaagggactcttatttttaaagtatccattttactttacactttatttccacttatatttttttcttaatgtaccccaaattcaatttcattgtcattcttttaaaaacatcttaatttggaaaaacctttgctttcccaaatttattcactttgcaaaaattcctcttttactaacttggcgtattatctaaaatgccctcacattttgtctttacaaaaatt

SEQ ID NO: 25228 - DNA, 403 bp, Glycine max
  Clone ID: LIB3108-001-Q1-K1-F2
gttcattcactggatttggggttccctaagcacaccattattttattatgaatgagtggcgatagcagcaacaacaacaatataagtaaaagaatctctgtgttgtcatcacacttcgctagatccagccccatcatggcttcagagaagcaagcggctcttgccgtcactccctctgatgctgatgctcctaccatatttgacaagatcatcaataaggagattccttctactgtggtttatgaggatgacaaggtgcttgccttcagggacataactcctcaagctcctacacatattcttatcattcctaaattcaaagacgggttaagtggtctatccaaggctgaggagaggcactttgaagatcttggccgccttctggacactgccaagctggttg

SEQ ID NO: 25229 - DNA, 357 bp, Glycine max
  Clone ID: LIB3108-001-Q1-K1-F3
cccacgcgtccggttcatcttgttccactacgtccagatccggagatggcaagacatgagggaccctggctctgtcaaccaagaccccatcttcaagcaatacagcttgccccaacatgagtatggataccctgctagtgtgcttaaccccttgaactttgcacctactttggaggccatggagaaggaacttgccaatgggagattgactatgttggcattcttgagattcatagctcaacacaacatgacaggcaaaggaccatctgagaacctattgctgcacctctttgacctgtggcacatcaccatcatcaatacaattcgtggctactaattttgtatacaatgacatgg

SEQ ID NO: 25230 - DNA, 190 bp, Glycine max
  Clone ID: LIB3108-001-Q1-K1-F4
cggacgcgtgggttcatttagttgccaatcgatctagttaggtgatgtattttgattttggattttgcattttgtgaaacacaattaaagagaaaatgaagaaagttagcaagttggtatgaaaaaaaaaaaaaaaagaaaaaaaaaaaaaaaaaactaaaaacataaatataaataacaaagataaaga

SEQ ID NO: 25231 - DNA, 442 bp, Glycine max
  Clone ID: LIB3108-001-Q1-K1-F5
ctcattaaagccctatgggtgcagcttgatgtttcgggtgaatttcgcaatggagctcttcgaggaatcatatccttgtctagcaagtttattccaactatcatgaaccttatgaaaaaaactagcagaggagggacagaaccctgcagctaacaatcctcagagaaccccatcaaaaagcagttacaatgagggtcatgccgtgtcatctagcgcctcatctaacttgactagattggacaacggaaccgagtatgcgagtccattaaaagatgagtaggtgaagacactcatcttactgaaaaccaatttattctgttgggagatggtggtgtgtctggtggctgcatgcttgtccacaaaattcatgacttgtgagcattcaagacattcaaaggcattgggtttttttgtgcaagtgccatattcagggggccatgat

SEQ ID NO: 25232 - DNA, 185 bp, Glycine max
  Clone ID: LIB3108-001-Q1-K1-F6
ttcaaactgtcagcaagcataaccctagctgctcctgctgtctttgttcgtgtatttcagggggaggtagtctcatgtgaagcacgcactttttctcatagttattggccgaactggatccacagcacaagtgacccaggacagagtgaagttcatggatgatcataaccgatacatcatcagtt

SEQ ID NO: 25233 - DNA, 196 bp, Glycine max
  Clone ID: LIB3108-001-Q1-K1-F7
cccacgcgtccgcccacgcgtccgaaaaaaaaaaaaaaaaaaaaaaaaaaaaaaaaaaaaaagaaaaaaaaaaaaaaaaaaaaaaaaaaaaaaaaaaaaaaaaaaaaaaaaaaaaaaaaaaaaaaaataaataaaaaaaaaaataaaaaaaaaaaaaaaatatttttaaaattttaaaattataaaaataatttat

SEQ ID NO: 25234 - DNA, 450 bp, Glycine max
  Clone ID: LIB3108-001-Q1-K1-G1
atcacatagcagaatggcttctactcaatgtttcttgcaccaccatgctcttaccacggctgccagatccccatcacaacgcatcatggttagcaccaagcctaaccagcttgtttgcaaggcacagaagcaagaggatattgatgtcagcccaatctctcgccggttagctctaaccgtgctcattggtgctgctgctgttggctccaaagtccaacctgctgatgcagcttatggggaagctgccaatgtgtttggaaagccaaagacagacacagatttcctgccatacaatggagatggattcaaactatcgattccctcaaagtggaacccaagcaaagaggttgagtacacaggtcaggttgttagatatgaagataactttgattcaaccaccaacgtggttgtcaccatcactccgactgattaaaagtctatcactgacta

SEQ ID NO: 25235 - DNA, 425 bp, Glycine max
  Clone ID: LIB3108-001-Q1-K1-G10
gcttacactatgaaattgactgtggagaagggaaaaaggtataccaaaaggaagatatggcacaggggagcttgtttacttgggttagcgatgatgtattcagaaagcctacatttgcccgttttctttcacttttagataattacaatccacatcaaggatgtaaggaagtagtcacatctgaagagagacaagagcaagcttctttcatagaagaaatcagtagaacagcaccaattaagtatcttcacaagtatcttgcatccaagcaaattgtatcagggaattaccaagatttcaaaagaatgattaccagtctgtggtttgacctttatggccgtggtggcacttctggttcctcttctgcttttgaacatgtttttgttggagaaaccaaacaatgtggtgaagtttctggctttcat

SEQ ID NO: 25236 - DNA, 415 bp, Glycine max
  Clone ID: LIB3108-001-Q1-K1-G12
cgaagcttttgcttcttccgcagtacgaagaaccaagagggagggccacgtgttggtggcattcttcggtgacagcagctacgggtggtttgagccgtcggagctcatcccgtttgacgcgaatttcgcagagaaatcgcggcagataagttctagaaacttcctgaaggccgtggaagaggccgtagatgaggccagtagaagatgcggccttggattggtttgtaggtgtaggggccctgggaatttttgccccaccgatgtggaagggtattattctgttcaggtgccggattatgagcctggagtgtattctgatgctcagatcagaaaggccagaagtgaatttggagctgcggaaatgctttcttttctgaagcaattggcattgaatccacatggtggtgatcagaga

SEQ ID NO: 25237 - DNA, 459 bp, Glycine max
  Clone ID: LIB3108-001-Q1-K1-G3
agcgaatcagattgagatggggtcgtttggtcggagaagcatgtccactgtggcgaaagcggtggaggaaatcaccggcactggcaacaccaagatccgcaaatcttccagcgagctctgcaccttcctcggcatccctcgccaatctcgttccgaaatcgctctcattctctccaagttcatcaaactctataatttcaagagtcccggcattaagaaggacaagatttgggagcagaatttgcagacactgttgcgtggcagaaacaatgttggttttcctgagattgcgaagatactgtctccggaattcggtcatggcgcgattaatgtgaaggacagtagtattggggattcttccggtgacgccaccaaggggaaaggccctaaaaaaaaatgtaagtcctctaagaagtaggataggacttgcacatgccttgaaatcaccttcttctatga

SEQ ID NO: 25238 - DNA, 405 bp, Glycine max
  Clone ID: LIB3108-001-Q1-K1-G4
cccacgcgtccgcccacgcgtccgcaagaacaacccttctccttcttcttcttcctactgggccggctcctactccgccgtctccgctcccaacaaaccccatggccgcatccttgtcctaacccgacccacacccaaacccgtcacgccctccaccccgcaaccgcaaccaccaccgccgagcccgatccagcacaaccacccccggtccgaaccgggatcggatgcgatctcgctccgacccctgggccgaaccggaaccggttcaccgctctcgtcggttgtccccgttgtttccagccccgacaaggactagcccttgctctctcctcagccaccgaagacgaacaagttcgtgccggcgtaccttcgggccgggttcgtgccgagagaggaggccccccc

SEQ ID NO: 25239 - DNA, 373 bp, Glycine max
  Clone ID: LIB3108-001-Q1-K1-G5
gaaaaaagggcaaactgcaagtgtataagcatgccaaaggcagatacaaatcaaattgcttgatcacctttctttatgagcaatgcatagcaaagatggcttggatcggatgcttttaactttaatgctgagcaagtagaaagaaagatgctaatataggatgctactaccagaaataggagggtgaaaaatagagtagaaataaggtgagaaagatgtgttatttggattgatacaaataggagataaacagtagagaaagttctccttacatatttggatgagtgctaaagaaagtgaaaagaaataatcaaattgtgtaaagaaactttttataacaataataaaaatttatgcttttttttactaaaaa

SEQ ID NO: 25240 - DNA, 162 bp, Glycine max
  Clone ID: LIB3108-001-Q1-K1-G6
tgaagatgcaaccttgtctcaataagcttgctgaccatactatatcgcatgtgatgtaatggagcctgaaaataaatgtaactcttgtaataatcattctacttcaagtagatatcatttcttcaaaaaacaaaaagatatagatgtaagacaaatctataa

SEQ ID NO: 25241 - DNA, 258 bp, Glycine max
  Clone ID: LIB3108-001-Q1-K1-G7
cccacgcgtccggaggttggttcccaattcttatggtttctcacccgaaatcgaagttcagggtcgatcaaaacccttccttgtcggcggttctcacttccaacagtcttcaaccttccaagttcaccatcctctccttcttctctgcctccgcattcgcttttctcgctgtcttcttcagggataacggctttgtccacattttgagcttcgcagctttttcccctgtcacagcttatttaggtattctggtggttg

SEQ ID NO: 25242 - DNA, 460 bp, Glycine max
  Clone ID: LIB3108-001-Q1-K1-G8
cccacgcgtccgcaacgatggtgattatgtctgccttgttcagcttcatattcccaccaccatcttctctggtggtttcggggatgtcagtgataagccttgtgtcactggctaatgctggcttctcagagattagagggaagcatttgaactattcaaagttttggaatgctaatccctctgcagaaaagcaggtcaagttgtctagcaaagctggcatgcttttgctgtacactcctgcttttcttgctggccttgcatccttctggatctttcctcaccaaggcctcagatccaccctccttcagtctgcagttaccctgcatttcttcaagagggtctttgaagttgtgtttattcacaaatatatgtggtgccatgcttcttgattctgcaatccccatcactctgagttatttcctatcaactgcaactataatctaagctcaacacttaacac

SEQ ID NO: 25243 - DNA, 416 bp, Glycine max
  unsure at all n locations
  Clone ID: LIB3108-001-Q1-K1-H10
cccacgcgtccggcgagttgctgtgcggctttcagaagctcgtcatgagggactccgttatattcgacgaaccggaccggttcaagccggaccggttcacccaagagaaaggggcccagttgttgaactacttgtattggtccaatgggcctcaaaccgggtcgcccagtgtgtccaataaacagtgcgcgggtaaggacgttgtcacactcaccgcggctttgattgtggcgtacctttttcgcaggtatgattccatcccagggggatggcaagttcattactggcctttcaaagaacaagtgaaagaagggtaaatgtgtattttcattggggagcttggattttatctaaggtatattatttacttgagaatgatgatctatttatatagaagaggcangtttatgcaactc

SEQ ID NO: 25244 - DNA, 190 bp, Glycine max
  Clone ID: LIB3108-001-Q1-K1-H11
tcatcccaataaaaaaaactcaaatcaaaattattttataaacaaaaaataaataaaaaaaatgctggtaacttaaaaaaatcaagccagctaaaaaaacaaacaataaaataaacaccttcaaaataacaaaaacaactaaactatcccccaatcattacccaaccttaatcttcccttccttcaacac

SEQ ID NO: 25245 - DNA, 426 bp, Glycine max
  unsure at all n locations
  Clone ID: LIB3108-001-Q1-K1-H12
cccacgcgtccgcccacgcgtccgcccacgcgtccgggaataacatctttctcactcacttcaaagctggcaaaagataaagaggctgaaaaaaagataaagggggtacatgcatgatggttgagattctctttctcactcacacacatgcaagcaatttttacagtgctttattactgaaaatagagaagttaagagcaattgcaaatttcaaagagcaatttcaaattgtaatatgaaggggatgaactgtggcgtgtgtgtcgctctctatctctcgtggtccaatttttttggggtttaaggaaaatagtaagtgatggcatggcttggtggggtcttggggtgaaatttggctgacagctcgggcttcacgtgcatgcttttgntctgcattttgaatccgtatacgtaggttcttatcac

SEQ ID NO: 25246 - DNA, 340 bp, Glycine max
  Clone ID: LIB3108-001-Q1-K1-H2
acaaagcgttcccatggcaaacatgattgttgcttccaccaaacctctggttccagtcggcacgcgagttcccgttcccccacacccatagtccccattctccacatttcactccccaaatccccaaccttgaaacttatactcccgatttcaaagccccatatgctgtcccttcttgtagggatagcaccactgttcttgatcatgacccttccttgcatatgaaattgataaagcatcacttcttgactttaaccttacccttcctataataatgttggagtttctacttcttatggttgcccttgacaagatattgttcaaccctcttgtgaaattt

SEQ ID NO: 25247 - DNA, 423 bp, Glycine max
  Clone ID: LIB3108-001-Q1-K1-H3
cagatataaaataggaagcaacaacagcaacagcagcagctatagaccctagggaaatgatgcaggaagatcaaggacagtgttcttctcaagcgatcaataactaccaccaagcctatcaagagcagcttctccttcagcaacagatgcaacaacaacaacaaaacaatgatatctttggtggaggaggaggattgaacatgtaccctggtgctgaagtttctccaatcatgaatcatcatcatcaaccatggtctatgactatgccacatcatcatcaccatcatcaggttcatgacccttttcttgaccctccccaaccttcaccctatgcaagcttgttcaacagaaaaggtccttctcttcatcagtttgcatatgatcatcatggttcatcttctgaccatcttaggatcatatctg

SEQ ID NO: 25248 - DNA, 362 bp, Glycine max
  Clone ID: LIB3108-001-Q1-K1-H4
agcattttcatttttcaacttgagagaagaagagaaggggaaaaggaaaaaaaggcaaaaggggtaaggatctgagcgatgagcaagtgtcttcaatgaaggaagctttctctttattcgacacagacggtgacggtcggatcgcgccgtcggagctggggatcctgatgaggtctctgggagggaacccgactcaggcccaactcaaagccatcgtggccgaagagaacctcacggctcccttcgacttcccccgattcctcgatcttatggccaaacacatgaaacccgaacccttcgatcgccaactccgcgacgccttcaaggtcctcgacaaggacttcaccggcttcgtcggcgtc

SEQ ID NO: 25249 - DNA, 347 bp, Glycine max
  Clone ID: LIB3108-001-Q1-K1-H7
acaatttttacattactcaatacactacactaacacaatccccttccctcttctctttctatccagattctccaccagccatggcagtttcttcagcaacagcttcctccaaactcatactattcccccatgcatcatcatcctcttcccttaattccacacccttccgctccttcaccaccaacacccacatactaacccctctctcctcctccttcctccactctatcaccgtcctccgccgcaccccttcttccaccaccaccccgcgtcgcaccttcatccgccttgccgtccgcggcaaattcgagcgcaagatgccccacgtgaacatcggcaccatctgc

SEQ ID NO: 25250 - DNA, 402 bp, Glycine max
  Clone ID: LIB3108-001-Q1-K1-H8
cccacgcgtccgcaaagttagaagcaacgaagatcatggcttctctagcaaccttggctgctgttcaaccagctacgatcaatggccttgctggaagttccctctctggaactaagctctctttcaagccctctcgccacagtgtcaaatccaagaacttcaggagtggtgccgtggtagcaaagtatggtgacaagagtgtgtactttgatttggaggatctgggcaacactacagggcagtgggacttgtatggctcacatgcaccttcaccctacaaccctcttcagagcaagttcttcgagacatttgctgctccattcacaaagaggggattgttactcaagtttctgatattgggaggggttccacccttgcatacttagtgcaactgccttaagt

SEQ ID NO: 25251 - DNA, 223 bp, Glycine max
  Clone ID: LIB3108-001-Q1-K1-H9
tcttctcgtaactcgctctacttctttttttcttccgagattatccaagcttagtctgtcaccttaaaatgtctggctgccttcttaactgtcacctacataaactcctgcaactgccgcaacacctcctcaagcttcaaaatgcacccacacttcaactacacttaatcaaccaccacctaaacctttgtcattgtaactgcaccttttaatgctcaatttc

SEQ ID NO: 25252 - DNA, 367 bp, Glycine max
  Clone ID: LIB3108-002-Q1-K1-A10
ctgctctcttactttctttccactctgctgctactttgctccgccagcatgacgacggcgtcgtttacggagcttgacgacgatttggttcgaagcatgtccataggagccgtcttctccgacttcggtgggatgatacattcgattgatttccatcgaaaggatgatttacttgtcacgtctagtggggatgactcggtgcgactttacgacattgctaatgctaagttattgaagaccacttctaataagaaacatggtactgatcgtatatgttttactcatcatccaagctctgttatatgctcttcaaagtacaatttggagtctactggagaatcattgcaatatttatcaatgtatgata

SEQ ID NO: 25253 - DNA, 301 bp, Glycine max
  Clone ID: LIB3108-002-Q1-K1-A11
ctgatgagacggaaatgaaagatgctgttgctgctcttgatggtcagagtttggacggaaggccaattagggtgagtgttgccgaggacaggccaaggcgtggttccttttgagcgttatctcatgtagttccccatgtcagctgctggagttatcttgcatttttttaatagctgaagatatactatagtgtcaatttttgttcaaaggaaaatcctttcttggggcaccaatttcagattagatttacgtattttggtgttattagtttaatgccctgatgaaaattaagttgtaattt

SEQ ID NO: 25254 - DNA, 295 bp, Glycine max
  Clone ID: LIB3108-002-Q1-K1-A12
cttgcttcttcactttttttttttcctctgtctcctcctcaatcttcattgtggtggtctttcccttggtgacaaaccaagactaacacacacagaacatagcttgtgttggtgaggtgagaagataaagaaagaatggcatttgcaggaacaacacagaagtgtatggcctgtgacaaaaccgcttatctggttgataaggtgaccgcggataaccgagttttccacaaagcttgcttcaaatgccatcactgcaaaggaaccctcaagctgatcaactacaactcttttgagg

SEQ ID NO: 25255 - DNA, 224 bp, Glycine max
  Clone ID: LIB3108-002-Q1-K1-A2
cccacgcgtacgttcacaatctttacaagcagcttgttagctctggacatgcattgggtgcaaaacgttgggttgcaaccttatatctacaattttaaatactcgctagtgccatgtcatcaaacattcccactgttaatgtttgcgtgataacaaaccaagacgggagaaatatcatgatgcatcttgctgaaaaaacggtgataagcctttgtgctagactg

SEQ ID NO: 25256 - DNA, 286 bp, Glycine max
  Clone ID: LIB3108-002-Q1-K1-A4
ctaagactttccccacgctctttttggctgaaaggtggacgacgtttcttgtacttgatggactatccatggtgaagctcataaccccagaagagaatggagttgaagcccagatgatgttttcattgtgcaaggctgagaataagcattgaacttcctactctgcagggctggttcttgcgtttcatgtgttgggaaaattgtgaaaggtgacgtggaccagtcagatggtagcttccttgatgatgaacaaatagaaagtggatgggttctcacctgtgttgct

SEQ ID NO: 25257 - DNA, 357 bp, Glycine max
  Clone ID: LIB3108-002-Q1-K1-A6
cttcggaacttttgaacaagaatggttaatggaaaagctgcttatttcaactaaaaacctaggggctgaactgaaagatgctactttagtctatgttgatatttataccattaagtatgacctcatcacaaatgccgcgaaatatggtttctcgaatccgttgatggtatgttgcggctatggagggcctccttacaattttgacgtaagggtgacatgtggtcaacctggttatcgggtttgtgatgaaggggctcggtatgtgagttgggatggaattcatcaaactgaggctgcaaatacattgatagcttctaagatactttccatggcttattccacaccacggacaccttt

SEQ ID NO: 25258 - DNA, 312 bp, Glycine max
  Clone ID: LIB3108-002-Q1-K1-A8
cacaagatccttccaatacaaatgcagtttcatacaaaacagcagcgagagagaaagtgataaggcagggatacaacattgttgggatcattggagaccaacggagcgatctcctcggaggccacataggcgaaagcaggacctttaagcttcctaatcccctgtactacattcagcaggtccttcacctctcaacaatctagcttgctcctatctatctatatgtaataagacgcgttcaaataggggcactagcttcactttatgttggttcagctgtgagtcaacaagccatgtaagagacttcactat

SEQ ID NO: 25259 - DNA, 341 bp, Glycine max
  Clone ID: LIB3108-002-Q1-K1-A9
cgggggggccccacgcttccgcccacgcttccgtttttttccaacaatgcaaaggcggggagccatgtatgtggaagagggtggcacctcttctgcttagctaaacccccgaacgcagctgcgccactcgtttcatgcctcagcctctcgcctcggcgtgattgctaccaccttgttcgattcattcgtgtgatgttgtatgggttgaacaagggacagagattgcttcgggaatggagtgggacagcaattccgatctgagcggggacgaagaggaggaagggttcgtcttcaacgacggcgacgacgctggccctctcccgttcccctttcccgtcgtc

SEQ ID NO: 25260 - DNA, 124 bp, Glycine max
  Clone ID: LIB3108-002-Q1-K1-B1
gctaattaaaaaaaattgccttcagtctcgaaaaggtttacccttaccgtggcggggaggttacatgtgacctaaataagaaaaatgctattgttgctatcgatgactacggatggctttctac

SEQ ID NO: 25261 - DNA, 300 bp, Glycine max
  Clone ID: LIB3108-002-Q1-K1-B10
aattttcttttccttcactttcccgagaaaaaaataacacttttcactttcttcagtacgttctcacttcgatatggctcgtacgaagcaaaccgctcgcaagtccaccggtggcaaggcgccacgtaagcagctcgccaccaaggccgctcggaagtccgctccggcgaccggaggagtgaagaagccccaccgcttcaagccgggaaccggggcgctgagggaaatcagaaagtaccagaagagcaccgagcttctcatcaagaagcttccatttcagaagctcgtgagagaaatcgc

SEQ ID NO: 25262 - DNA, 67 bp, Glycine max
  Clone ID: LIB3108-002-Q1-K1-B11
agcattttcatttttcaacttgagataataagagaaagggaaaaggaaaaaaaggcggaaattggta

SEQ ID NO: 25263 - DNA, 322 bp, Glycine max
  Clone ID: LIB3108-002-Q1-K1-B12
cgaccacgcgtccgaccactcgtacgctcactcacaaactcacactgaactgaaaaacatcaaaagagagagggctgagcaaaccttgatcatgatcaagcctgatggcgtgcaaagaggccttattggcgagatcattagcagatttgagaagaaaggtttctacttgaaaggtttgaaacttgttactgtggaccgtccttttgctgagaagcactatgctgatttgtctgccaagcctttctttagtggtttggtggattacattatctctggccctgttgttgccatgatctgggaaggcaagaatgttgttacaact

SEQ ID NO: 25264 - DNA, 226 bp, Glycine max
  Clone ID: LIB3108-002-Q1-K1-B2
agagaactcatcaacggcgacctcattgccaaggatgtctagataagagagggtggatggctacattggaggaaagcctggagaatttgtatgtggatgggatctttacgcgctctttttgtaattactttttttataaatggtacatgatatgatgtaatctaatgcatgtgaaccacaatcaacctcatcttccaattcaattaatgtaagaagagttcttgct

SEQ ID NO: 25265 - DNA, 336 bp, Glycine max
  Clone ID: LIB3108-002-Q1-K1-B4
cttccgagcattttccgccatttgcaaggccttttttattccttaatgtccaaaaaaccaggggggttcctttgttttctgaatccaaaaaataaaattctggggtcttttattccccatttttaatactaaattcataaaaaggagagtaatgagcttaatctttcgctcagacgatgtactgatatattctatggcggacgttcgaagaacaagcaatttattctgggccgatttcactttgttaggttcattggcgttattgttcgttgctatttccagatatcttggtatggatatgttctttatttctgaaaacgacatattcaaaaagct

SEQ ID NO: 25266 - DNA, 335 bp, Glycine max
  Clone ID: LIB3108-002-Q1-K1-B5
cccactcgtccgcccacgcgtccgatacaagctgtctccaacctcatctctgacgggtccgccccagcactcgccgcctttgtcgtggacatgttctgcacaaccatgattgatgtggccaaagacttgaaggttccttcgctggtcttcttcacctcaggccttgcctttcttggtttgatgcttcatcttcacaccctgagggaacaggacaagacccacttcagggagtcccaaactcacttgctcatcccctccttcgccaacccagtcccgccaacagctttgccttctcttgtgctcgacaaggactgggaccccattttcttggccta

SEQ ID NO: 25267 - DNA, 298 bp, Glycine max
  Clone ID: LIB3108-002-Q1-K1-B6
tcaattaagtgggattaaagagggaaaagacctaaaggccaatggattccgatggcatgggaaaggggaaccagcctgcaggtggaagtgatgagaatgcttctaagggaaaaggaaaaggtgggaaaggtggagatgggcttggtacttgcacctatgtcaaagctaggcatatcctatgtgagaaacaaggtaagatcaatgaagcctacaagaagctgcatgatggttggcttggcaatggagacaaggtcccaccatctgagtttgcaaaggtagcacaagagtattcagaatg

SEQ ID NO: 25268 - DNA, 187 bp, Glycine max
  Clone ID: LIB3108-002-Q1-K1-B7
cactgcatcgcacattctgaatggaaatgtgtggagccacagctctgacatggtctcacaccatctgtccatcgcttcaccttcctcgatccgtctctaccatggaggctaggaagagcttcagtgtttggtgtgtctctgatcaagaccccaagggaaatataatgatcatatctgtaactggagc

SEQ ID NO: 25269 - DNA, 312 bp, Glycine max
  Clone ID: LIB3108-002-Q1-K1-B9
cccatttgcggataactcttttgacatcatcactaatgttgtgagggttgattacctaacaaagcctcttgatgttttcaaggagatgtgcaggatacttaaaccaggtggactggccataatgagcttttcaaaccgatgcttctggacaaaagccatttctatatggacatcaactggggatgctgatcatgttatgattgttgggtcatatttccattatgctggaggatttgaacctcctcaggctgtggatatatctcctaatcctggacgctcagatcctatgtacattgtgtactctaggaagct

SEQ ID NO: 25270 - DNA, 379 bp, Glycine max
  Clone ID: LIB3108-002-Q1-K1-C11
ggagcttaccttacctgaagatggcttcggtgtcctttgccgtgggactcttacggtacgcttcagttcgatttcccgtattgagcaacgccaactcactgaaactcagttcctcagctagcatctctactccaattcttcagcaaaagctctgctctcttctttcccccctccctctaagccctcgccctcgccctctcaccattgtatccgctaagggctacaaaatgaaaacccacaaggcatctgcaaagcggtttatggtgaccggacgaggcaaaatagtgcgtaggagagctggcaagcagcatttgctcgtcaagaaagataccaagcgcatatcccgactcttcaaatgcacgcggtcagcatgagcgac

SEQ ID NO: 25271 - DNA, 244 bp, Glycine max
  Clone ID: LIB3108-002-Q1-K1-C12
tttctacttactacataccaattaagaagccaccagtgcacaagcctccagtgtacaagccaccagggtacaaaccaccggtttataatccaaatccaccggtttacaagccttaaccacctgtttacaagccaccatatatgaagcctccatacaagaaaccaccttatggaaagtaccctccagtaaaggacaacacccatgcctaaagcaagcaatgaggtctattatctacttaataaat

SEQ ID NO: 25272 - DNA, 262 bp, Glycine max
  Clone ID: LIB3108-002-Q1-K1-C2
cttttcacatttccctacctctgctttcaagatgcagatcttcgtcaagaccctggcggatagaccatcacccttgacgtggaaagctctgacaccatctacaacgtctaggccaagatccaggacatggtaggaattcccccggatcagcaacgtctcatcttcgccggaaagcagctcgaggacggccgtaccctcgccgactacaacatccagaaggagtcaacccttcaccttgtccttcgtctccgtggtggcatgc

SEQ ID NO: 25273 - DNA, 129 bp, Glycine max
  unsure at all n locations
  Clone ID: LIB3108-002-Q1-K1-C4
cgcacncntncgctcactcacaagctcagactgatctgaaaaacatcttaagagagatggcttatcaagcctggatcattatcaaaccttatggcgtgctaacaaaaatttttctctaccaaaattaaa

SEQ ID NO: 25274 - DNA, 346 bp, Glycine max
  Clone ID: LIB3108-002-Q1-K1-C5
gctgttgttgctgctcatcctccgttacctccgagctctgcaccgaagaacgaaggctgggtaagacacatggaatgggatctgctcgcaagctcaagtcccaccgcaggaggcaaaggtgggctgacaagtcatacaagaaatcacatcttggaaatgaatggaagaaaccttttgctggttcatcccatgccaagggaattgtccttgaaaagataggtattgaggctaagcagcccaactctgccattcgtaagtgtgccagggttcaacttatcaagaatgggaagaagattgccgcttttgtccctaatgacggttgcttgaactacattgaagagaatga

SEQ ID NO: 25275 - DNA, 389 bp, Glycine max
  Clone ID: LIB3108-002-Q1-K1-C6
ttaatattttcctcactgccttggctttccaaaaaactgtttaaagagagatggcggctgcaacatctggtgctgtgttaaatgggttgggatcttccttcttgagtggaggaaacaggagccaaacccttctggccactgctattggaggcaaagttggtgctgctgctgttactgttagtcctagaagactcattgtggtagctgctgctgcaccaaagaagtcatggctccctggtgtcagaggtggtggcaacctcgtcgacccaaaatggcttgatggatcgctaccaggtgactatggctttgacccactatgcctttggaaggacccagcattcctcaaatggtacagagaaactgagctgattcatgggagatgggcaatg

SEQ ID NO: 25276 - DNA, 353 bp, Glycine max
  Clone ID: LIB3108-002-Q1-K1-D1
attttatctttattccactgaatagtacatgagcatataaatggataccctttagattatctatctttatattatctataaagggtaaagatatccgatgtgaatctatttgtttagttttctatcggtatgtatataggtgaataatccaacatgcctttttgtgaagtaaaaaaactaccctcgatccatgcctcaaaagggttgataataagtaaaaaaaatcaatgaattcatgataaaacccttctgcgtttttttattataaatttttttgtcaataaagggatcaaggggttgggggatcaaatggtaaagttcttttgttggtaaattggaagattagaaacatg

SEQ ID NO: 25277 - DNA, 329 bp, Glycine max
  Clone ID: LIB3108-002-Q1-K1-D3
tccactcttcctcccacgcgtccgctacagcaacggagaggatgagaagagagtagagtttgtgaaagagatggcactcgtaacaacaaacccaaccatcaatgatgggcctctgttcgccgaagttgacatgggttccgacttcaacgccccaacggttcgagctaccgttgttcaagcctccaccatcttctactacacaccagccaccttagataaggctgagaggttgttggctgaagctactagctatgggtcccagcttgtggtgtttccagaagcctttgtgggtggctacccgcgtggttcatcttttggtctttcgatcg

SEQ ID NO: 25278 - DNA, 87 bp, Glycine max
  Clone ID: LIB3108-002-Q1-K1-D4
ccaaaacaaacccactaagatggctttctttgtatccttcctagtgctgcttcttggagggcttattctcatgcctcaaaggctttc

SEQ ID NO: 25279 - DNA, 322 bp, Glycine max
  Clone ID: LIB3108-002-Q1-K1-D7
tccccgtctacccccaccctcccaaaaaatttttttatatccaaaaagtttaatttccttccttaaaattccaaatttttgccggtttaatccttcaattttcaaaaaaattttaaaaaaaacccttaaccccctcgacactgattatattaatttgctgcaaattcactcgccacatcgatatcttacatttttttgctagttttcctattattattcaaaatggagatccattgtgccatttatttatcaattgcaaactttccaagaacttatcaatgagacaaaggtacgctacatatgtgtttcaaattacacttca

SEQ ID NO: 25280 - DNA, 325 bp, Glycine max
  Clone ID: LIB3108-002-Q1-K1-E1
aagaattacaacaagaatgagcctatcctgcgaccccaccaccctgcatctcattggaactcaaatggaaggatttccaatgtggctgatgtcccactgaaaaaaactggccacttgtttgatctaaacctgaatgctaggagttctagtaaaaaagatgcttccattaacatttctggtccaccagtgcttaacttgaatcacaaagaaaggattaacagcagcaaggaagccacgaagaagagtgtaactccatttttcgacttgaaccagatttcgagagaagaggaggaattgcagggaaacagtgagcccatgggaatcg

SEQ ID NO: 25281 - DNA, 381 bp, Glycine max
  unsure at all n locations
  Clone ID: LIB3108-002-Q1-K1-E10
acgcgtccgctttgtcctctttgttagaaagcgcgttcacttggcgtggntctcttcgattcgtaagagttttcttgcttctcctgtcttggctcgagatccgggccaagcacagaagaatccgtttctgatttgcattttgtactcactggtttggcttgtttttttctctttgtataaatggcttcgagcgaggggtttctgaccgatggccagagggaactgctaaaaattgcaagtcaaaatgcggagaatctgtcttcgtcgccgaagtctcagtcgtccttgctgtctgaccatcatgtgaaagcccctgctggtggtaaggcacaaaccgctggaatagctgtgaggcatgtgcgtcggtcacactcgggaaag

SEQ ID NO: 25282 - DNA, 314 bp, Glycine max
  Clone ID: LIB3108-002-Q1-K1-E12
gtaccggtcctttattcccttttctacccactcgtccgaaaaaaaaaaaaaaaaaaaaaaaatttataaaaaaaaaaaaaaaaaaaaaaaaaaaagaaaaatataacaaaaataaaaacacccccatccctcaaaaaaaacctaattttaattacacttactttcacttccactcctcctcttttttcctcaccttccttttatacaaccccctcatttctaaacttcttctcctcaaaaaacattcccttttcccaatttaccctctttccataatatccctcactaaccaaccttcctaatatttactcacc

SEQ ID NO: 25283 - DNA, 336 bp, Glycine max
  Clone ID: LIB3108-002-Q1-K1-E2
cccacgcgtccggaagactcctcaatcatccatagacatggccaccgtcacttgggcagcagtttctattccctcattcactggcctcaaggcaagcgcatgcaaagtgagtgccgccgcagttaaagtctcagctccccaagccacaaggttctgcggcatcaaggcttccctcatagaccttggagtcgctgttgtggccactgctgcgagcgcagttctagctagcaacgccatggccattgaagtgttactgggcactgatgacaggtctctggttttctctaccaactctttctccgtggcccctggggaaaagatcgtgttcaagaacaa

SEQ ID NO: 25284 - DNA, 234 bp, Glycine max
  Clone ID: LIB3108-002-Q1-K1-E4
cttggtcatccctccaccgttttttctcattctcacttcgtaaccctcatcgaggctccatctccacaacatcacccttccctcaccctccacttccatatatttttatttccataactataaaagtatttaaaattcatttctataaaattttagtattctcgtaaaattaaaatgtcttacttttttccaaccaagagatttccggtgctatatgtgtcattttcattctta

SEQ ID NO: 25285 - DNA, 302 bp, Glycine max
  unsure at all n locations
  Clone ID: LIB3108-002-Q1-K1-E5
agtagtgatgttagaagcaaaaatgaaagatgcagagaagcgaagatgaanaggcgactaagcagttgcgtttctttgagtcggcgatgggtattgagctttcttcgctggagttggaatccctcaaagataataagtgcattttggaggtatcagaagccgctgattcatacgtgacagtattgggcaaaactattatggcagcgtttggcgcgtcttggaaagaggctctctgcgaagggaagcctgtagagggaaaagtcattgctggaagccccgcagttcttatcataacttcttct

SEQ ID NO: 25286 - DNA, 272 bp, Glycine max
  unsure at all n locations
  Clone ID: LIB3108-002-Q1-K1-E7
ccaattccctttgcaacccacccttcctcccacccttccnataaaaaaaaaattttaaaaccaaaaccaaaacaaatataccaaagaaactttaaaaaactagtacaccccatcccnttaaccatcaaccaatccaaatacaactcaatcaacaatacaacaaaccatcctcactataaaaaacaacaaacttaatcatcctccccctcccaccaaaaatcccttcttaatctccacccaacaactaatccatcaaccccttcaatttaacc

SEQ ID NO: 25287 - DNA, 387 bp, Glycine max
  unsure at all n locations
  Clone ID: LIB3108-002-Q1-K1-E8
tttttcgacccacccttccgcggacccgtgtttctttctttaacttttttttaaaaaagctatggncaacgacnnacgaactccaacaatggggtctagcanattatcattcattttattacttgtgcttgtaaccttttcatccatgatcattgactcaagggttgcataggcacgtaccctgccaaaatcatccttattgccttccaatattgatatacctactgttgttcctcttccactggtggcaccactgccaaatttgcctgttactctccctccatttcctgaactacctgcattacctaaagtaccaattcctgaagtaatagttaataacgccaaaataatcccttgagtacctatgatctatccagtcactactac

SEQ ID NO: 25288 - DNA, 188 bp, Glycine max
  unsure at all n locations
  Clone ID: LIB3108-002-Q1-K1-E9
gccacgcgtccgcccacgcgtccgattccccgatgttcctaatctgttgtttaattntgcatatgttgtgatgtacgggaagtacacttgacaacattaaagtccaataaatatgatatatgttcgtcctttcttccaaaaaaaaaaataaaaaaaaaaataaaaaaaaaaaaataaaaaaaaattaa

SEQ ID NO: 25289 - DNA, 298 bp, Glycine max
  unsure at all n locations
  Clone ID: LIB3108-002-Q1-K1-F11
ttctatttttttcataatatatttttttttctttatctttccctactccaaaaagaatttttttaaaaaatttaaccaccccaaaanncnncccccctctatctataaccataccctttttctaaccctttatctaactctttgtcaactcctttttaaccccatccaatcaaaaatacccctttctcttattttccaataatttcccatcatcatcatcatttaaaacttaattcaataaccaattccctccctcaatttcctccaattattacctcatctcttcttacctcacttt

SEQ ID NO: 25290 - DNA, 370 bp, Glycine max
  Clone ID: LIB3108-002-Q1-K1-F12
cccactcgtccgccgcaccgaccaactccgccagcctctacgccgccaccaagaaagccggctaggagatcgcccacacctacaaccacatctacggcctctccctcaccggactccgcttcttcaccgtctacggcccctgggggagacccgacatggcttactttttcttcaccaaggacatcctccaagggaaaaccatcgacgtgtaccagacgcatgaggggaagcaggtggcccgtgacttcacctacatcgacgacatcgttaaaggctgcctgggagccctggacaccgtccagaagagcaccgggagcggcggcaagaaaaatggccccgcccagctcagagtatacaatctggggaacac

SEQ ID NO: 25291 - DNA, 327 bp, Glycine max
  Clone ID: LIB3108-002-Q1-K1-F4
ccttccaatatacaaccccttcttttctgtcaactacttttccttccctatcggccactcctccgccgtctgcttcgtcgcctccgtcttctccctctcccgaaactcactcctcgcggatctcagccgtccacgtgtcgcaatcctcgttcgtctctggtttgcaagagacgacgctctctccgttgatctgctcctctccgcctcttgggcctgggccgttatcaccgtcatttccagagtcgctctcgggaggcattacgtcattgatgtcttcttcggcgcgtgcttcggtgtcctcgaagcgatgttcacctttcgtgttct

SEQ ID NO: 25292 - DNA, 150 bp, Glycine max
  Clone ID: LIB3108-002-Q1-K1-F5
tcaccctctacgcttctccctgccagggggggtatctccagagattctatgcacaagaggcgcgccactgccggcatcaagaacgcacgcaggaagaagagcaagtatgagctcggtcgccaacctgtttacactaagctgccaagcaac

SEQ ID NO: 25293 - DNA, 352 bp, Glycine max
  Clone ID: LIB3108-002-Q1-K1-F7
cttctatgggttggcttactcggttcataactgccgtggctttcttagccatcgaatgtatattctcaccggagacactggggtcaaaatcaaccacactttccacctacctcaaactcgctcacctcctctgcttctccaccgccttcggcgccgctctgtgggtaacattcatcggcggcatcatcatgtttaaaaatctgccgcggcatcagtttgggaacctgcaaagcaagatgtttccggcgtatttctcgatggtgggtgtctgctgcgccgtatcggcggcttcctttggctaccttcacccgtggaaaactttctccaccactgagagataccaacttgggtt

SEQ ID NO: 25294 - DNA, 328 bp, Glycine max
  unsure at all n locations
  Clone ID: LIB3108-002-Q1-K1-F8
gttcaattgttctgcataaactgatctataaccattgggatgttcgaattgctctgtcaagtgtttctgattgtggtgaacgtcaccanaaagatcaacatgttttggaaagaagaaaaaaggatagaagcagattttttaagccggaaacaaaacgggctctattcgataaaaattctgatgacaagatgcataaatttggtgggtccaaagctggatctcgtgtggttccttgtgtctgaatagagtcaagactcatatcctgtctgtaatgtaactaacgatctacatatgaatggcatacagagtgaggaattatccttgattc

SEQ ID NO: 25295 - DNA, 250 bp, Glycine max
  unsure at all n locations
  Clone ID: LIB3108-002-Q1-K1-F9
cctcaaaaatcctgagactgtttaataaattaataaaccaaccaaaaatcctccaaanaaaaaaacttttactaatttcactcaagaaaatactcattaaaatcaatttcaactttttatttctttcatctcataccactcatttcgtatcatattattactatcacttaggactcatcttcatctccttctttgaggtctcccattccaaaaatttcttcatcttatttttctaatcctcatctaattt

SEQ ID NO: 25296 - DNA, 265 bp, Glycine max
  Clone ID: LIB3108-002-Q1-K1-G10
agtatattatccttcgtaaaccatgttttagggaatttgggcttgctagggtgtaagtctgatgaatcaaaggattatatatatgggttctgagcctttgattttatatatagttaggagaataattaagaatgcttcttattttctattttttttctttagaggcttgagaggtaacgagtttgatttcatttaaatatgaaaaaaataagtgtgtataacaaggatcatctatagaactatagtatatatacggtggcgtgtt

SEQ ID NO: 25297 - DNA, 120 bp, Glycine max
  Clone ID: LIB3108-002-Q1-K1-G11
cctggtcttactgtgtggtgactgttctctgctctcatctcattcatattcatgtggatggcaactcacagtcaaatcattaccctcaaaacttccgtggccttggaacccaacaagccc

SEQ ID NO: 25298 - DNA, 172 bp, Glycine max
  Clone ID: LIB3108-002-Q1-K1-G12
gtgaaatccaaagagttgcgacactgtttcgcatatccagcattcatgcatcgggggcaaggccgttcaaggagtacaaatacgtgcaacgggaaaaggctgttgatcttgatattcaaccattttgggatgattcaaacatttttaaatggacccctcttatcaaaggacc

SEQ ID NO: 25299 - DNA, 155 bp, Glycine max
  Clone ID: LIB3108-002-Q1-K1-G3
agcatttataggaaacacaccatatcttctatttcacagaaaatgtcttcacattagtagtgatgcttttgctggaaccccttctatattatcatcacaagcactatatcttcaaatcgaacttgacttacttaccagtttctgtcttatcatta

SEQ ID NO: 25300 - DNA, 268 bp, Glycine max
  Clone ID: LIB3108-002-Q1-K1-G4
tatccctacaaacccccagcttcttttgtgaaaaatttgcaaagcattttaagcccaccccactttgtgttgtgtgtacttaaactacattcccatttgtttttgctttttgagatttcatcatcctgtatttttggtttctgttttcggacttcaatggaaattaatggatgagaactaatgaataagctattgtgttgtgttgctttgtttcaaaaaaaatcaaataaaaaaacataaaacaaataatataataaactctcaaaaa

SEQ ID NO: 25301 - DNA, 297 bp, Glycine max
  unsure at all n locations
  Clone ID: LIB3108-002-Q1-K1-G5
nctaaaatttctctgcgtctcccctattttttcagaatctcacattaacaacaaggatggcttccaacaggggtcaaggtggaattcaccagctgttggctgctgaacaagaggcacaacggattgtgaatgctgcgaaaaatgaaaaattggctaggttgaagcaagccaaggaagaggctgaaaaggagattgctcaataccgagctcaactagaggctgagtttcaaaagaaagtgtcagacagtactggagattctggagctaatgtcaagcggcttgagcaagagactgatg

SEQ ID NO: 25302 - DNA, 407 bp, Glycine max
  Clone ID: LIB3108-002-Q1-K1-G6
gtaccggtcggaatcgggggcgccacactcctgccaacccttccgttttttttaaaaattttcccttctttaaaaaaagcgtgaaagcgggggtcgttcaagatgagagctaactgaaacaacaagcgcatgaggaggttgaagaggaagcgccgaaagatgagacaaagatctaagtaggtgcttgagcaggagttgagatgagctttccatctgctaccagcctcatgacattttaggctgttatggctcttatgatcttgaagtctagtcgctaggggagcttcactcttgacttagtttgctttactggtcctggtcctggtccaagactattgagtgtgggttaagttgtgatgtttagtgttttgtggtatctaattatgtactgggttttatacttttgg

SEQ ID NO: 25303 - DNA, 297 bp, Glycine max
  Clone ID: LIB3108-002-Q1-K1-G7
acctagatactatgatggacgctactggaccatgtggatactgcctatgtttggctgcactgatgcttctcaggtgttgaaggagcttcaagaggctaatactgcataccccaatggcttcatccgtatcattggatttgacaacgttcgccaagtgcagtgcatcatcttcatctcctacaatcccccaggcttctaagtcatttaaaaatttgcaaagcatctttattcatcccactttgtttggtgtacttaaactacattcccatttgttttttctttatgagatttcatcat

SEQ ID NO: 25304 - DNA, 231 bp, Glycine max
  unsure at all n locations
  Clone ID: LIB3108-002-Q1-K1-G8
cacattactagaaagttagaaaacatttcaccgtttgccttttcttcttcctccacgattaatgtagctgctcttttcttatctttatatgaaaggctctaacaacagaaccctcaaacgntctgctacttatctaatccaaggtagacttgaaggccctcaaaccgagtacgccaatatctcgacccttccacttctaaacaccaatcttgacgaaaatcagacctacac

SEQ ID NO: 25305 - DNA, 281 bp, Glycine max
  unsure at all n locations
  Clone ID: LIB3108-002-Q1-K1-G9
cccaaaagaattttttaaatcttatgcccccccccccnttccatttcatattactctacatatttcacttcctcacaattttctcccatattattacaactaatattacttcatgaacaatactcctcttctcttacatattaaccctcttcacactaaaattcccattctcatccacattatcaaacccacttcctaaaccctcattacttctcattacatttataaaatttttaatttacataaatccctttcttccttcatacccttacctaataact

SEQ ID NO: 25306 - DNA, 291 bp, Glycine max
  Clone ID: LIB3108-002-Q1-K1-H10
ggccaagccaggtaagcacaaccaaatcaacaccccaaatggcttcagcttctggggccatggcgttgtcactgagctctgttaccaacaacaacaagccttcatccgaagccttcttcaggccactacccctacgccaaccaaagaggaccctcttcaccacgaaggcagtgtcaaactccaagcctcaaatcaatgcatctttgaaagagaaagcagttgccggactcacagcagcttctgtgacagcatctatggtggttccggaggtggctcatgctgctggatatg

SEQ ID NO: 25307 - DNA, 171 bp, Glycine max
  Clone ID: LIB3108-002-Q1-K1-H12
cacagcttcagttcgtttttgttgatcctgtgaacttatggctgacggggtggttgtgttggatacatggtccagcatgtttgggatgaaggttaagattgcattatctgaaaagggtgttgagtatgaatacaaggaagaaaatctcaggaacaagagtccttttccttt

SEQ ID NO: 25308 - DNA, 374 bp, Glycine max
  Clone ID: LIB3108-002-Q1-K1-H2
atcttttcacggaaccaaattacgaggatccactgaatcacgatgccgctgctgtgttgagagagaacccaaagatgtttgaatctaacgtgaggagggcaatggctggagggtatgtcgggcaaacctttttcccacgctgtatttagaccttttgcacgataccttcaagatcctgttcaaatatgttatcaatgcatgaaggcccgtggtttgtaaaatttatcaaaaaattggattttactttcgtcagttatgttatttttcttggtggagaaacaggccaagttcttaagaccaccaagcttcaaaaagccaaacaagtggaatgttattgtaacatgtgctttaattgaatgttaacgtattattct

SEQ ID NO: 25309 - DNA, 340 bp, Glycine max
  Clone ID: LIB3108-002-Q1-K1-H3
ttaattaacactaatccaaactcctttatgaaactagtgcagacatccttggaagggagtgggcgtggttattgggaaacttcacaacataatattgaaaagctcatgcagttgtattcagaagtggaagacaaaatcgaaggctttgatcgctgaatttaatagctattcttgaaaagaacatacaacagtgaatagaagagcagcatccttcaaatgtgattatgatttccttttctcattttttgagatcaagtctcgtttgtgcagttctgaatttcaacccctgcgaacaaataaaggtttaagttcataattgatttcttagattattttcttg

SEQ ID NO: 25310 - DNA, 335 bp, Glycine max
  unsure at all n locations
  Clone ID: LIB3108-002-Q1-K1-H4
ttccnntttcaacacctcctccttctttggttattcaccgattgagttcattttttctctggcgtgaaaataccttgctgcggtcgtaactacagttgcagaagctcctacaaatgcgtctacagctgcggatgcttcaatatgtacccatactcgatctacactgaatctaccaccacctagacctttctcatgtgagtggcacctgttcaggctcaatttgagggtactgaaatctttgttcccactgagaaccatttcttcatatgtgcaccaaactactcctgcaaccccttcactatcaaagtaagtgtttatagagcactcttcaaaca

SEQ ID NO: 25311 - DNA, 277 bp, Glycine max
  Clone ID: LIB3108-002-Q1-K1-H7
aaaaaaacaaccacacacattcctcattccatccctctaattatcacattatcgccgtacacattcattcttccatcgtttcctatctctctccctctctctctactcctctctatctccatacttattctacctcacgccaaatataaacacatttacagctccaaccaatgctaactgctgaacctacccacattgatgcccatgcaagcctcctacacaaacatcctacaaatgtttctgtgttacgtggcccacccatatgtaaagggtaccc

SEQ ID NO: 25312 - DNA, 314 bp, Glycine max
  Clone ID: LIB3108-002-Q1-K1-H8
cccacacgtacgggaaatggcttcctcaatgatctcctccccagctgttaccagcggcaaccgtgccggtgccggcgtggttgctccattcaccggcctcaaatccatggctggcttccccacgaggaagaccaacaatgacattacctccattgctagcaacggcggaagagtacaatgcatgcatgtgtggccaccaattggcaagaagaagttcgagactctttcctacttgccagacctcgatgatgcccaattggcaaaggaagtcgaataccgtctaatgaaaggatggattccttgcttggaattcg

SEQ ID NO: 25313 - DNA, 423 bp, Glycine max
  Clone ID: LIB3108-003-Q1-K1-A1
aaaggttctgctctttttaccatccaatttagttatctcaaatggctcgtacggagcaaggtgctctctaagtacaccggcggcaaggcaccacgtaagcacactggccaccaaagcagctcgtaagtatgctcctgctaccaacggtgtcgaagaatccgaacagataccgtccgtgaaccgtatcgctacgcgagatccggaagtaccataagagcacggaacttctgatacggaagctcccgtttcagcaattggtccacgagatcacgcaggacttcaagacctaccttagatttcagagctccaccgtatactccctccaggaagccgccgaggcctacttgattggactctattaagacaccaatctctgcgctattcacgccaagcgtgtcactatcatgcccaaggatattcaac

SEQ ID NO: 25314 - DNA, 438 bp, Glycine max
  Clone ID: LIB3108-003-Q1-K1-A10
cccacgcgtccgctgggatctgataaggacaagcgcagagagactcttgagaaggaagataaatccaaaaagtctgtcaacatcaatgagtttctgaagtccccagagggtgaaagttactataacccgggtgggcatggacgccgtcatggtcgtggacgtggtgcaagaggaggttatggtggctatgcaactgctaacattccagctccatcaattgaagatcctgggcaattccctactttgggtgtcaagtgagaatttccagtactgtgctgacatttttatgtactacctcctctcaattttggttcactgctttgaagcaggaaaaagaactatggtaattggatttcctgtatgggcaatttttttttataacgtcttaaaatgtaaatttagattggttctttgtgccccccttaatctcttataata

SEQ ID NO: 25315 - DNA, 440 bp, Glycine max
  Clone ID: LIB3108-003-Q1-K1-A12
cggacgcgtgggcggacgcgtgggtgagaacaacaacgaaaaagggtttttggttttggagtctgaaagaaactcaaagtgatgcgtttcatcgttctttcgcccaaaccctaacctcgtcctcgtgcattcattccccgcgatcaggtgtgtttttatccattgcaaacagcatgaattttgcagcatcattgtgcagaagattgaatatcaaggaacttgtgacatatgttcctgtgtatagaagcaccagtggtgtttctggagaaggtttgaatttggcgttcaggcgttgggcttccaaaaagactgctggttccacaaagaatggacgggattcaaaacccaagaaccttggagtgaagaaatttggtggggagagggtgatacctggaaatatcattgttcgacagcgtggcactcgttttcatccaagaaac

SEQ ID NO: 25316 - DNA, 444 bp, Glycine max
  Clone ID: LIB3108-003-Q1-K1-A3
caacctcagtggtgccacacggccagctccatctgcctctagccctgcctccgtcaaggcggtggctcttttctccaaaaagaaggctgcacctccaaaaaaagctgcagctgctgctcctgccaatgatgagcttgccaagtggtatggtcctgacagaaggatcttcttgcctgagggtctcttggaccgatctgagatcccagagtacttgaccggagaagtccccggagactatggttatgacccatttggtcttagcaagaagccagaagatttttccaaatatcaggcattagaattgattcacgccagatgggcaatgcttggtgctgctggattcatcattcccgaggcctataacaaatatggagcaaactgcggtcctgaggctgtttggttcaagactggagctctgcttcttgatgggggtaccttgaacta

SEQ ID NO: 25317 - DNA, 394 bp, Glycine max
  Clone ID: LIB3108-003-Q1-K1-A4
gccacgcgtccggaacgctgctgccgaaacccttcccgatccctaaggtaagtgagtagtgggtgggtgagaatggtggagacggcgaagggtaggaaggaggaggtggttaccagagagtacaccattaacctccacaagcgcctccatggctgcacatttaagaagaaagctcctaaagctattaaggagataaggaaatttgcccaaaaggccatggggaccaatgatgtgaggttggatgtgaagttgaacaagtttgtctggagccagagaatcaggagtgttccaaggaggattagggtaagaattgctcgcaagatgaatgacgatgaagatgccaaagaagagctatactctcttgtcaccgatgatgagattcctaaagatgagc

SEQ ID NO: 25318 - DNA, 478 bp, Glycine max
  Clone ID: LIB3108-003-Q1-K1-A5
atggacggatggacccacgcggccgaaaggttctgttctttttaccacccaattcagttttctcaaatggctcgtacggagcaagcggctctcaagtccaccggcggcaaggcgccacgtaagcagctggccaccaaggcggctcgtaagtctgctccggctaccggcggcgtgaagaagccgcacagattccgtccgggaaccgtagcgctccgcgagatccggaagtaccagaagagcacggaacttctgatccggaagctcccgttccagcgattggtccgcgagatcgcgcaggacttcaagaccgaccttcgatttcagagctccgacgtctccgccctccaggaagccgccgaggcctacttggatggtctcttcgaagacaccaatctctgcgctattcacgccaagcgtgtcactatcatgcccaaggatattcaactcgctaggcgtattacgggcgagcgcgcttaaa

SEQ ID NO: 25319 - DNA, 197 bp, Glycine max
  Clone ID: LIB3108-003-Q1-K1-A6
gcgccagggcctccttcaacgctggcgcaggctacaccgccaaagtcggacctgacggagcgggtggacattgcacaccacacgagaacggcaaccagagagccccagccgccatagagcacagcagccagagctccatacgcctacacgtcaacacattgaacctatacgaggcgcaaaccttaaacgccatcacg

SEQ ID NO: 25320 - DNA, 244 bp, Glycine max
  Clone ID: LIB3108-003-Q1-K1-A8
caattcgacccacgcatcacgcctgccctcacgcatgctcctacgcgtactaatgctacaccttaaatgcgaaaacatgcatctgttcaacattcccatgacagaagaacctacacttcaaggtgcaagaccaataatatcacactgtccagaccttgaattcgcatgcatgtctaatcactgcacaggtcttatgtgatgatctagaacctatgcggtcctctaaccaatcaaccattttgac

SEQ ID NO: 25321 - DNA, 445 bp, Glycine max
  Clone ID: LIB3108-003-Q1-K1-B10
caaacccactaagatggcttcctttgtatccttcctagtgctgcttcttgcagcccttatggtcatgcctcaagggcttgctacttactacaaaccaattaagaagccaccagtgtacaagcctccagtgtacaagccaccagtgtacaaaccaccggtttataagccaaaaccaccggtttacaagccgaaaccaccggtttacaagccaccatataagaagccaccatacaagaaaccaccttatggaaagtaccctccagtagaggacaacacccatgcctaaagcaagcaatgaggtctattatctacttaataaataagaggaactgctttgtgttttctagcattgtgatttacaacttcgtagcaatgcatattcttgactcttgcatgcacttcaatccttcgtagcattaatgatgtggccaagtcatcatgagca

SEQ ID NO: 25322 - DNA, 343 bp, Glycine max
  Clone ID: LIB3108-003-Q1-K1-B11
cagaaagaaaaatggaagctctgctctcccaattcaccttcctctcagaccaggccctacgagacaagaacttcgatccttcgacaatcgaagatctaatgaagctgttcgagatcgagtcctacaaggcatgggcagcagctgagcttgagcaagagaaagaggtggaagaagcagaggctggcatggaagaagctgaggagtaccttgactcagtgattgaaagtgccatggatgagtttagacgctttgaaaaagagctagagaagatgtctaagaatgaaatggaaagcttggttcaaactgctgagagagccagaaaaattggaaatttgatggaaaa

SEQ ID NO: 25323 - DNA, 413 bp, Glycine max
  Clone ID: LIB3108-003-Q1-K1-B12
atcaattctaggatctggtctgaagcgcatgaagagattgcatgttcatttctgttgtggtgtaccaacagatggagaagtaattagtggtatgaggcaggatgtcaatgttctgatctttctggacgttagaaaagcattagaagaaagtatgaagctttacatttctgacaacaaggtgatcttgacggaaggttttgatggtgttgttcctccgaagtattttgaaaggatagaatcatggccgagcagacagcccatttctttttaaagttcttttacaattttgcttttaggttcacaatacgttgaggattatttaaataaaataaaaaatgtctaaaaaattcttaatattataaaataatatataatatcataaaattataaaaaaaaaaaaaaaatacaaacaa

SEQ ID NO: 25324 - DNA, 373 bp, Glycine max
  Clone ID: LIB3108-003-Q1-K1-B2
aatcgacccacgcatccggccacgcctcccacaagtatgtaattgtaatactcatcaatgtatattctctaaatgttagtcaaacgttattatgtgatgactaaatttcattcacataaaaaaacaaaacaaataatataaaaaaaaccaaaccttaaataaacaataaaaaaaaaaaaatgcacacctcttttaagaataccaacttacctaccccttccttcaaccccttaaatgatttatctagccaccttaaatcaaatgactactcctaattttacaaccttatcactacgaaaacccctgcattccccaaccaaatctacttccagaacattccccttttcccaatttgccttattgccaaaaagcc

SEQ ID NO: 25325 - DNA, 80 bp, Glycine max
  Clone ID: LIB3108-003-Q1-K1-B3
aacaaccacacatacaactactcaagatacatattgatggcttaataatctaatcacgggctatgaccaaaagtaatcgg

SEQ ID NO: 25326 - DNA, 370 bp, Glycine max
  Clone ID: LIB3108-003-Q1-K1-B4
gccacgcctccggcctaaacagtggcctcaccgtggcctattgttgtggcgattgctgagtgaaaggcaaccttcgaaaagcagtaggcatatatcacgttagataacacacactcttatcgggacctataccgaacactacttgtgacagtacctgacattggtgaatacatctttggtgccattattttctacgaaactatttaccaatccactatcaatggaaggaatatcgttgacctactcgttgatcaaaacatcgatgccgacatcaatgtcgacaagggttttgtgcccctagctgattcatacgatcaatgattgcaccaacgtcttgattgacttgcttcttactaagctgaatactacc

SEQ ID NO: 25327 - DNA, 422 bp, Glycine max
  Clone ID: LIB3108-003-Q1-K1-B5
gaattgacggatggactccacgcgtgacgggaaagatgcctgactctcgtgtgcaggatatgatcaaatgttaccaatctgggtcagggcacgagcttgtcgatataagggacctcttttgtttcataaggatctgattggtgatgctcacaagactgcatcaaatgttgatcagacatcctgcaagaagcgttgttataatgcttctagactgtcaatatcttcagataagagtgacattgaacgtgtagagcaagccatgatcatagtgctgcgtgcagtgtatgagtctaagtgggtgaactgacgtgctcttactggcgcaaactgcaagatgggctcttcagaactgcttgattatcgccttggagaactccgagggaacatggtctatggtggaatctatgataatcgccgatgca

SEQ ID NO: 25328 - DNA, 327 bp, Glycine max
  Clone ID: LIB3108-003-Q1-K1-B6
ctcattcctttctattcatttcttcattccaccatcaccatggtcaaggagaaggagagcgtggtggtcaagaacaagaagccaaacaacaatgccgacgagcttcacttacgcggcgtccggaagcgaccatggggccgctacgccgccgagatccgtgaccccggcaagaagacccgcgtctggctcggcaccttcgacaccgacgaggacgccgcccgcgcctatgacgccgacgcccgcaacttccgcggacccaaagccaaaaccaactttcccgtgccccccgacgacaacaacaacaacaacgtttacgtgaacaaaaac

SEQ ID NO: 25329 - DNA, 449 bp, Glycine max
  Clone ID: LIB3108-003-Q1-K1-B7
cccacgcgtccggttcgtcttttacatcatgatggagtctcaggtgaagcacgcgctttgtgtcaaagtaatgggtcgtactggatccagaggacaggtgacccaggttagagtgaagtttctggatgatcagaaccgtcacatcatgaggaatgttaaaggaccagtgagagaaggagacattctcaccctactcgagtctgaaagggaagctagaaggttgcgctaagagggtctttctttcttgatctttatggtagttagtcggtgctaaaggttatagcaccctatcttgtcttggatctattttcattcgaattatggcttgagttttgctgttttgagtctaagcttcaaggttgaagtatgttttggcttaatatatgattttaattatggcttgagttttggattaatatgatttggcttctatatagtgatattcctgc

SEQ ID NO: 25330 - DNA, 323 bp, Glycine max
  Clone ID: LIB3108-003-Q1-K1-B8
cccacgcgtccgggaagtgtattatggggttgttaattatgtgggctaaaaagggattctgctagtttgtatgtgtacccacccttttgtaatgtaaagtgaaaaaattaaaatagggaaatttggccagattcaaaaaaaaaaaaaacaaaaaaaaaaaaaaaaaaaaaacaataaaattataaatatagaatctctttaccaattcaatatcaatcgtttgaatatctgtcaacgtacatagttattcaaaacattgatgaatctaataaggttcacacctttatcttctccaatatctgagtcaaacgtttaatgttaac

SEQ ID NO: 25331 - DNA, 341 bp, Glycine max
  Clone ID: LIB3108-003-Q1-K1-B9
cccagccgttgcgccacgcctactcacatccaaccatgtctcttatcagtggctctgtcaaactttaccgccaccccactttctttgtttgtacttaaactacattcccatttgtttttgctttttgagatttcatcatcctgtattattggtttctgttttcggacttcaatggaaattaatggatgataactaatgaataagctaaactgctctcaaggataataagggcttgcaaagatgaagacaacagaatgaaagcggagaaatgggttaacttgtagtgaaactgatgaaaaaaatcatacatccttctagagttgatcttgaagtcaatgaaa

SEQ ID NO: 25332 - DNA, 428 bp, Glycine max
  Clone ID: LIB3108-003-Q1-K1-C1
tccctggcggcttccaccgcagctatgtcagaaatgcttggaaaccccgtgagcctgaggggcgccaccaggtctgctccatcaccgtctacacctgttactttcaagaccgttgcgcttttctccaagaagaaggcagcaccacctcctccaaagaaaaagcctgctgctgtatcccccgccaatgaggaactcgccaagtggtatggtcctgacagaaggatcttcttgcctgagggtctcttggaccgatcagagatccccgagtacttgaccggagaagtgcctggagattatggttatgacccgtttggtcttagcaagaagccagaggacttcgccaaataccaggcgtttgagttgattcatgccagatgggcaatgcttggtgctgctggattcatcattcctgaggcctttaacaaata

SEQ ID NO: 25333 - DNA, 133 bp, Glycine max
  Clone ID: LIB3108-003-Q1-K1-C10
tccaaacttaaaaatgttaaacgcctgtattaatccaacaaaaaatgggcctttgaaactggagaaaaacaaactaagattggcccaaactgaagaaatacaaaaaaatggcttgagatcaagcctaaccacg

SEQ ID NO: 25334 - DNA, 454 bp, Glycine max
  Clone ID: LIB3108-003-Q1-K1-C11
aaaaaaaaaaaaaaaaaaaaaaaaaaaaaaataaaaaaaaaaaaaaaaaaaaaaggaaaaatgggaaaataaaaaaaaaaaaaaaaaaaaaaaaaaaaaaaaaaaaaaaaaaaaaaaaaaaaaaaaggccgacccttttaaaggatccaagttaccatacccttgcttccaaagaaaatccttttttacaggctcactaaaataaattcaactgtctaaaattttaaaacttatgtactggaaaaaccttgacgtaccaaaactaaatcacttttaaaaaaatccccttttccccaattgcctaaataccaaaaaggcccataccaatcccctttccaaaaatttccccatcctaaatggtaaatgtaaccccccttttatcggcccattaacccctgcggatttgggatttacccccaccttaaccgttacatttgcaaagcccttacgcccc

SEQ ID NO: 25335 - DNA, 457 bp, Glycine max
  Clone ID: LIB3108-003-Q1-K1-C2
accatggaggctaagttggccaccaccataatacttattttctccgtaatttggcttatgggggtggatggcatagacccttgtgcctctcaagcggataattccgacctgaacgtgattcccatctacagcaaatgctcaccgttcaaaccaccaaagtcagactcatcgtgggacaacagaattataaacatggcctcaaaagacccactccgattcaaatacttgtccaccttagtgggccaaaagaccgtgtccacggccccaatcgcttcgggccagaccttcaacatcggcaactacgtcgtcagggtcaaattgggaacccctggtcaacttttgttcatggtcctcgacaccagcaccgacgaggccttcgttccatgctcgggctgcacgggctgctccgacaccactttctcgcccaaagcctgcaccagctatggcccattggact

SEQ ID NO: 25336 - DNA, 384 bp, Glycine max
  Clone ID: LIB3108-003-Q1-K1-C3
cgaatcgacccacgcatccacgcctgaagcaaccattgcaatcgcaacccaagcctttatcttaaccccacccctctccgggctaaggccagctaccgcacctgccatccatgcaagcaaaactccatcctaatccttatccagccctaatcccctcaatttctacataacaatcacagcatcaaccgtcgacgagaccacacacgcaccatcaaaattagagactgtacctgtcgagttcaccccaccagaacttgacccaaacactcgttacccgatcttctcagacatgcaccagcgggctcctgcacaaggcacatgttgacgaataccatgtcattacatgggactcaccctaagaacagatcttagaaatgcccactg

SEQ ID NO: 25337 - DNA, 327 bp, Glycine max
  Clone ID: LIB3108-003-Q1-K1-C4
tcagcatcaaataaaaatacaacaaaaactattaaattaaataaacgacaaactaataagggctagtgattaattacaactcatgccatataaacacattactattaccacagaattccattatcaaatgcaagtgatgctacttcttcacctcacgtaagattcatttgaatcataactaacttatgcgtaacctagcacttatggcgtaactaccttaagaactcaataactcataacatacttagacagttataattccatttctcatccaaaatgactatccaaatctatacctatatatatatatatatgtatactatctta

SEQ ID NO: 25338 - DNA, 435 bp, Glycine max
  Clone ID: LIB3108-003-Q1-K1-C5
cccacgcgtccggctaaatccctagtaagccgccatggtgaagtactcaagggagcctgacaatccaaccaagtcttgcaaggctagaggcgccgaccttagggttcattttaagaacactagggaaactgcctttgcaatcaggaagttgcccttggttaaagctaaaaggtacttggaagatgttcttgcgcacaagcaggccattccgttcagacgtttctgtcgtggtgttggaaggacagctcaagcaaagaatagacactctaatggccaaggaaggtggcctgtcaagtcagcaaaattcatccttgatttgctcaaaaatgctgagagcaatgctgaagtgaaaggtttggatgttgatgcgctttacatttctcatatccaagtcaatcaagcacagaagcaaagacgccgaacataccgagccca

SEQ ID NO: 25339 - DNA, 425 bp, Glycine max
  Clone ID: LIB3108-003-Q1-K1-C6
atagcccaagtgcgtggcatagaaaaggtgaagcaatggctgtgtcctccaccgccgccggagtacgtattcctgctaagaacattccaaaccctcaagcgccaaaaattggattctcaagtacaatcgcttttactgcgaaaccgcaaagaagattattacgcatcagaagctcctcagccgaaacctctggcacagaggtagattcaaagagttccattgaagttccagaagaaacatcatcactcatttctgctctcaacgtcgaaaagattctccgtggcttaccaattacagatgcagatcattatggtaggctaggtattccacgaggatgtccctttgaattggtggggggtgcatataatatcaaggttcaagaattgaagagtcagaatttagaggaggatgaacttgagaagaaa

SEQ ID NO: 25340 - DNA, 447 bp, Glycine max
  Clone ID: LIB3108-003-Q1-K1-C7
gagataactagaaacagtgtcatgaaaattaaagtacttgatttcttagttgggacaatgttagtagcatggcaatgccatgcgtactatatgttccctctactaatgaacactggatatggtgcccgtactccagaggtgaaatgcgcaagtagcacgcttgctgtggaagcacacaacatctttagctttgagaccattcctgaagagtgcgttgaagcaacaaaagaatacatccatggcgaacaatatagatcagactccaaaacagttaaccaacaagcttacttttatgccagagacctcgaagtccatcacaaggacacatttgagttcaatatagatggcaccgtactctctaatattccatactacaaaaaacatggatatcgggtggagaaatttaactcgaccttgtatgatgaatgggttaacaagggcaatgca

SEQ ID NO: 25341 - DNA, 381 bp, Glycine max
  Clone ID: LIB3108-003-Q1-K1-C9
gcattattcaatggccaccacagcagctctatccggaaccatggtgagcacgtgcttcatgaggaagcaacctatgacgaccaagagcctaaagacattccccaacgctctttttggtctgaaaggtggacgaggtggtcgtgtaacttgcatggcctcgtacaaggtgaagctcataaccccagaaggagaagtggagtttgaatgcccagatgatgttttcattgttgacaaggctgacgaagaaggcattgaacttccctactcgtgcatggctggttcttgcgtttcatgtgttgggaaaattgtgaaaagtgacgtggaccagtcagatggtagcttccttgatgatgaacaaatagaaagtggatgggttctcac

SEQ ID NO: 25342 - DNA, 445 bp, Glycine max
  Clone ID: LIB3108-003-Q1-K1-D10
gccagagcctggtctgcaatccctatgtggtgtcatgtcacctggtggtccttgatcaatgactaacattgaaacccctggatctgccagtcaacctgatgaagaatttaaaccaaatgctgcaatggaggaaatgattattaattttcttatcagagttgcgctagtcatagagccaaaggacaaagaagcaagtgccatgtacaaacaagctttggagctactttcacaagctttggaagtgtggccgaatgcaaatgtaaaatttaattatttggaaaaacttctgagcagtatacagccatctcaagcaaaggatccatccactgcactggcacagggtttagatgtcatgaacaaagttttagagaaacaacctcacttgtttataagaaataacattaaccagatttctcaaattcttgaaccatgtttcaagcataaa

SEQ ID NO: 25343 - DNA, 442 bp, Glycine max
  Clone ID: LIB3108-003-Q1-K1-D11
ataaacgggtggtgcctctcttccatctccccagccaaaacctctctcaggaaggccacatgacgcccttccgtcttcgcaacccttaacactccttcttctccttcctcttcatcttccttcccctctctcattcaagacaggcctgtttttgctgcccctgcccccatcatcaccccaactgtgagagaggatatggcaaaggaatacgagaaagctattgaagaacttcagaaattgttgagggagaagagtgaactcaaagcgacagctgctgaaaaagtggagcagataacagcttctctagggacatcatcatctgatggcatcccatcatcagaagcctcagacaggatcaaagctggtttcattcacttcaagaaggagaaatacgacaagaatccagctttgtatggtgaacttgccaaaggccaaagcccca

SEQ ID NO: 25344 - DNA, 457 bp, Glycine max
  Clone ID: LIB3108-003-Q1-K1-D2
gtagcaaggagactagttctgtattcagattacattgcaaaaatggcatcattcaccatggcagctgctatctttggctgcccagctgtcaccaaacggtcggtagtggctgcgcagaggagattactcgtagtgagtgctgtcaaagctgaaggggaaaaggtcagttatgacaacaatgatagcaatggaaggaggaacttgatgttcgctgaggctgctgctgctgttttctctgttgctgggatggcagtggcagatgagcctaaaccaggaacctcagaagccatgaaaatgtatgccccggtttgtgtcaccaatcctacagctaggatttgacgcaattgaggatctcctgttacattttacctctgatgatcggaaatgtacgttggggatgtagtaatgtttttgatttaatatgatcctcattgtactagatgttcataaaactatc

SEQ ID NO: 25345 - DNA, 310 bp, Glycine max
  Clone ID: LIB3108-003-Q1-K1-D3
cttggattttggaacacaggcattaactcttatgcatttaacaacttactttagggaaacgagaattaacatcaaaatatctcccactcgactaatttattcagcaaatgattcaccatattatcactggccctaaagattaatacaatatataaacactcttttactacggaaaagttaataccctactatgtactcagctatgtatatatcatctctgcagacatatctttacatgattttgataaataatggattgacactgaatctaatggaccattatcttcttttttatgtatcaaaccctctt

SEQ ID NO: 25346 - DNA, 446 bp, Glycine max
  Clone ID: LIB3108-003-Q1-K1-D4
gtcaaatttcgtggaatatgctccaccaaccaccactaacaagacctatttcactgatgggctagcgaaactttcttcgaccaggaatggtgtacccattggcacaccgactcctctgagctggctctttatctatccggagggaatttataagctcatgacatacataagggacaactacaataatccaccagtgtacattaccgaaaatggcgttgcggaatcaaagaatgactcacttgcaatcaatgaagcccgaaaggatggtattcgaattagataccatgatggccatctcaaatccctgcttcatgcgatcaaagatagagttaatgtgaagggctactatatatggtcattttcagatagctttgaatgggatgctttacacagctcgatttggcatcatatatgtggattacaagaacaatttgagtagataccct

SEQ ID NO: 25347 - DNA, 368 bp, Glycine max
  Clone ID: LIB3108-003-Q1-K1-D5
cttgggttctggaacacaggcattcactcttgatcattcaacaggagactttgttctcagaaatccaagcatcaaaattcctccccgtggtcaaatttattcagtaaatgatgcacgatattttgactggcctgaaggtttaaggcaatatatagacactgttagacaagggaaaggtagataccccaagaagtactcagccaggtatatatgttctctggtggcagatctccacaggactttgttgtatggtggtgtggcaatgaatccaagggaccatcttcgtcttgtttatgaagcaaaccctcttagtttcattgtagagcaagctggttggaaagggtctgatggcaaaaataggattcttt

SEQ ID NO: 25348 - DNA, 448 bp, Glycine max
  Clone ID: LIB3108-003-Q1-K1-D6
cccacgcgtccgcaaatttctccactaccctatctcctttgctcctgaaactcggacatgcttcattagcaatgcacgatcttcaatacgaatgcaatttcgatatttgacatcggagtatcagtgtttgagcgggtgaattggaaaatgctagaggcaatggaaagttcggtcaatggtggcttctcccatttgcagagctgtggagatagcagcgaagaagagttatcggtgcttcctcgtcacaccaaagttgtcgtaaccggaaataaccgcaccaaatcggtgctcgttggtcttcaaggtgtcgttaagaaagccgttggactaggcggatggcattggctggttcttacaaatggtattgaagttaagctacaaaggaatgctcttagcgtgattgaagcacccaccggtaatgaggaagacgatgaccttgagtttgaaa

SEQ ID NO: 25349 - DNA, 312 bp, Glycine max
  Clone ID: LIB3108-003-Q1-K1-D7
cccacgcgtccgctttccctttttttggacttatccttctttctgcaactccagaatggggtccaaaggggcaaaaaatctagcactctcttcagccttgttgctccttttggtcggttttgcaacctcagacatcaatcaatacaaagcacaatgtacggataaacttcttggtctagctggttgtctttcctatgttggtggcgaagccaaagtccccaccatggattgatgctctggtatcaaagacgttattaacaagagcatgaggtgcctctgcatcctcatcaaggatcgtgatgatcctagtct

SEQ ID NO: 25350 - DNA, 434 bp, Glycine max
  Clone ID: LIB3108-003-Q1-K1-D8
gtgaatagtcttaaaacagaataaaatcttaagctgtttaactgaatgctaggtgctagtgaaatgaataatggcttttccaatagcaatggaaacaaactagggggagtgaactttgcaatgtaatagccagcattcctgaatagccttgaagcaagtgccaataaacactcatgcggtatttgatagcaaaaacacagaactagccagcaattttgtaggttggatttaccaaattatccagcccagaaactactttaatggattctatgacatcaccaactttgaggtctgccaagtaatcctcattatctgttacatagccaaagactgcatatcgaccatccaatatattggcattactgggagttagctcactttctttcaatagccaaaatatctggctggaggcagagttgtcctcaaattcatct

SEQ ID NO: 25351 - DNA, 322 bp, Glycine max
  Clone ID: LIB3108-003-Q1-K1-D9
cccacgcgtccgcccacgcgtccgaaaaaaaaaaaaaaaaaaaaaaaaaaaaaagaaaaaaggaaaaaataaaaaaaaaaaaaaaaaaaaaaaaaaaaaaaaaaaaaaaaaaaaaaaaaaaaaaaaaaaaaaaaaaaaaaaaaaaaaaaaaaaaaaaaaaaaaaaaaaaaaaaaaaaaaaaaaaaaaaaaaaaaaaaagctaccactttaaaaataacaatcttaataacaaatgaatgctaatatacaaggtatttttcataataccaaaataacattcaatagcattacttttaaaaaaaatggttaaggaaaaacccgg

SEQ ID NO: 25352 - DNA, 278 bp, Glycine max
  Clone ID: LIB3108-003-Q1-K1-E1
cccacgcgtccgcccacgcgtccggggattttcagtactgtgctactaataaataaaggggaaattggagtttttctaagtgctaaacttctagcaacattattgtgttgttcttactgtccatgtctaagtactgaactgctgtatttgatttttcgttggtaattgaagcaacttattacattaaacaaaacaaacataataaaaatgaactaataaaaataactaaatactaagaaagctatcctaaaaaacaactgactacacaaacactataa

SEQ ID NO: 25353 - DNA, 401 bp, Glycine max
  Clone ID: LIB3108-003-Q1-K1-E10
aacaaacaaacaaaaacacaaaaaaaaaaaataaaaaaaaaaaaaaaaaaaaaaaaaaaaaagcaaaaaataaaaacaaaacaaaacaataaaaaaaacaaccaaaaccaaaaacaaaaaaaaaaaaaaacacaactataaaaaaaaaatcccataaccacctaactctaacatcaaacttaaacaccataacaatgcttcaaatcatccccaactaccttaataacaaaaccactccattcttactatcccattcactgacaccgaccgtctcatttaaaattcagacaacaatcaaatccccatataccccatcaacaccctcttaaatgccaacaagtttattcgtcatactattcactcattactctcatcacacctatatcatacttaaacctttc

SEQ ID NO: 25354 - DNA, 438 bp, Glycine max
  Clone ID: LIB3108-003-Q1-K1-E12
ctctgttacaccacttcaacttctagtgaaatatctgatcaattaatggctcagtatttcgttttgtttgttttggtgtttgccagccaactgatggctggattcaatgcaccgctaccgctaccatctccgtcatatggaaatcatacaaccattctcagcatagacggtggtggtatcaggggcattattcctgcgactgttcttgaatacttagacaaggctcttaaggctaaggatccaacaacatctttagcccattattttgatgtgatatcaggaactagtactggtggcctcatgactgctatgttagcagccccaaactcatctaatgccaatagtcctctctttactccctcggaagtcgtgcaattctacaagaactatggccctaaaatatttgaacctagagcttggtatgatcttgacaaatgt

SEQ ID NO: 25355 - DNA, 378 bp, Glycine max
  Clone ID: LIB3108-003-Q1-K1-E3
accgacgcatgggtcgatctacaactcctgattcttgttagatgcaaaacaaaggaaatgggaatttgcaagactttagtactgataaaataaacataaacacaaataccaaaaaaaacctaaacaaataaaaaccaaacaaaaaaaaacaacatacattacaaaagtataaaacaaaaaaaaaaaaactaaaaaaaaaaacacacaacgtttattaactgcaaaactattcctcaagatttcaaagatatatatgaaactacatgctacgaaaccaaaatagattagactccataaaaaaacgccctaaaagctaaaacctatgctaaacccatcaaaatcactttcaaaaccacatgcttttttcaagttgatgaa

SEQ ID NO: 25356 - DNA, 355 bp, Glycine max
  Clone ID: LIB3108-003-Q1-K1-E4
cccacgcgtccgcaattttctagggttttattcattttccgatggcttctgcagatgatgagtacggttgctttgtcggtgggctcgcttgggccactgacgaccatgccctcgagagagccttctctcagtacggcgaaatcgttgaaacgaagattatcaacgatcgtgagactggcagatccaggggttatggatttgtgaccttcgcctcggagcagtccatgaaagatgcgatcggagcgatgaatggacagaacttggacggccgtaacatcactgtcaatgaagctcagtcccgcactggcggcggcagcggctgaggatgaggatacaatcgtggtggctgtggata

SEQ ID NO: 25357 - DNA, 349 bp, Glycine max
  Clone ID: LIB3108-003-Q1-K1-E5
agaaaatgaaagtcattgttttcttcgttgctataataattttaggtgcagaatggcaaggcaatgggtcagagcatgagcatgagcatggccacagctaccaaattttccctttgcgaatgaaaaccggccccggtggccactacattccggaggtatcgtgcaaaagttggaggcttggtgtggaagcacacaacgtcattgactggagaaccattcctcaagattgcgagggatatataggaaactacatgcttggccaccaatatagatcagactccaaaacagtttgccgtgaagcttatttttatgctaaaaccatcaacatcactgccaaaaccacatgggt

SEQ ID NO: 25358 - DNA, 348 bp, Glycine max
  Clone ID: LIB3108-003-Q1-K1-E6
ggagagagaaaaagagagaggtagagaaaagcgaagagtctctctcttcctatggctctgtttcaatgtcagggcacaaatcttccacctctacttcttcttcttcttccttctaacctatatcagaaggaaacgcgaaaaaagaaaaaaaaaaaagaggcagaaggttctagaagccgccaatttttatttcttttaatttgtctgagtcagagacgttcgtgattgtaaccatggattcttcgtgtgtcccaaacggcgacgtttctgggttcaaagataaggagtcaatggttgaccctttcttggtcgaggctcttgagaaccactcgcaccgtgtcaccattt

SEQ ID NO: 25359 - DNA, 418 bp, Glycine max
  Clone ID: LIB3108-003-Q1-K1-E7
ctggggctgcttgcgataatgctaagaagtacatagaggctggtgcgtctgagcatgcaggaaccttttacacgaagggagctgaaccacataaggcagctgttattggagataccattggagaccctcttaaagatacttcaggtccttcactcaacatcctcatcaagctcatggccgttgagtcgctcgtcttcgcaccatttttcgacactcacggtggcctgcttttcaagatcttttgatttgagggtagagttttctatcaatttatcctatttttctcggaacctgcatcaagcaattttctttgtaccaatatacccttctcacctttaggggtagctcttctaattatcaggacttgctcttcaaattatcaagacttgaaatttgtactaaatgtaatagccttttc

SEQ ID NO: 25360 - DNA, 407 bp, Glycine max
  Clone ID: LIB3108-003-Q1-K1-E8
ctaatatttttctcactgtcttgtctctccagagaactgtatagagagagatggcagctgcaacatctggtgctgtgttaaatgggttgggatcttccttcttgagtggaggaaacaggagccaaacccttctggccactgctattggaggcaaagttggtgctgctgctgttactgttagtcctagaagactcattgtggtagctgctgctgcaccaaagaagtcatggctccctggtgtcagaggtggtggcaacctcgtcgacccagaatggcttgatggatcgctaccaggtgactatggctttgacccactaggccttgggaaggacccagcattcctcaaatggtacagagaagctgagctgattcatgggagatgggcaatggctgcagttctaggaatc

SEQ ID NO: 25361 - DNA, 311 bp, Glycine max
  Clone ID: LIB3108-003-Q1-K1-E9
cccacgcgtccgtccacgcgtccggtggtgccttatcgctgtggttatcatctgcttcttgggctttcttagatctcttctttctctacgccggacgccgaaaccatggccggaaaaggacagggtcctgctatcggaatcgatctcggaaccacctactcttgcgtcggtgtgtggcaacatgaccgcgttgaaatcatcgccaacgaccaggggaacagaaccacgccgtcttacgtcggattcactgacaccgcgcgtctcataggtgattcggccaagaatcaagtcgccatgaaccccattaacac

SEQ ID NO: 25362 - DNA, 395 bp, Glycine max
  Clone ID: LIB3108-003-Q1-K1-F10
aatgaccggaccgacccactcgtccgcccacgcatccatacattagttcttctcattcattattcattctcagctccttgtcttctggacaacttaaaagggcactttgcacatccaatattgatctcctttacccatcatcatcatggagctcctcagatacctcaatcagggtcacccttctatctgaacaccacttgttattactctgtaatcaattccatctacacttttctccttctacactaacacacataccttctcttcttctacactgacggaactgaatcctatcaaacctattcactcacatattctcactaacgccgtgcaacatgactctactacttcacaactttcttaaatatgatcacctcttgaaatcgctatatctc

SEQ ID NO: 25363 - DNA, 418 bp, Glycine max
  Clone ID: LIB3108-003-Q1-K1-F11
gtcaattatgtcagattggaagactcctattttgtcaccaaattgatgtctatgtatcaatgcttctttaaaattgcactgtgtatttaaactttgaagtttaatttcctgaactcctatcgaattatttcctaatgaaagtattgaaataagagcaaatataacactagcaattaataaagtaccgtaaaataagatttttgaagttaaatcttttctttaaatactaaaatcaaaagtttcagcgattttcatgtacatgtacttatagtattttattaaatgttaattcttttataacaaaacaatcattttaaaaattataaccaaataaaaaaccattgcgtgcggatatttatcaatcatcactcctatcattttgcgtctgcttatgaaacacacccattgagtcacccac

SEQ ID NO: 25364 - DNA, 361 bp, Glycine max
  Clone ID: LIB3108-003-Q1-K1-F3
atctgcattgctcaatttacaaagcatacacaactaactaacaatgactcagactggtgatcggtctcttactaaacacacatatgtacacactagactagttcaagtcttaaatattaaaatgacctccgtgatcgtgacctactgcaagcgcgtactcggtctcataaagatcaacgggttccccatttacctcgttgagcctgaaatcctccgcttcaaagccttcgagcctatcctcctgatgcgtaagatccgcttagacggcgtcgacatgcgcattcgcgtcaaggagtggccgccacaccttccacatctacaccatctgccagagcatcaccaaggcgctcgtcgcgttcta

SEQ ID NO: 25365 - DNA, 426 bp, Glycine max
  unsure at all n locations
  Clone ID: LIB3108-003-Q1-K1-F4
ctggcggtgcttgggataatgctaagaagtacatagaggctggtgcgtctgagcatgcagggaccgtgggcccgaagggatctgaaccacataaggcagctgttattggagataccattggagaccctcttaaagatacttcaggtccttcactcaacatcctcatcaagctcatggccgttgagtcgctcgtcttcgcaccatttttcgccactcacggtggcctgcttttcaagatcttttgatttgagggtagagttttctatcaatttatcctatttttctcggagcctgcagcaggcatttttctttgtaccaatataccctctccacctttaggggtagctcttctaattatcaggacttgctcttcaaattatcaggacttgaaatttgntactaaatgtagtagcttttcgatttttc

SEQ ID NO: 25366 - DNA, 424 bp, Glycine max
  unsure at all n locations
  Clone ID: LIB3108-003-Q1-K1-F5
aattgacggacgcatcagactatcagcgttgctcaattcacagagcaacacaacgaactaacaatggctcagactggggatgaggctcttacgaaacacggacaagcagagctagaacaagtgcagagcttcagtcgcaagaagaccgccgtggccgtgacctactgcaagcgcgggcgcggtctcatcaagatcaacggctgccccattgagctcgtggagccggagatcctccgcttcaaggccttcgagcctatcctcctgttgggtaagagccgcttagacggcgtcgacatgcgcattcgcgtaaaggatggcggcacacctgccagatctacgccattcgccagagcatcgncaaggcgctcgtcgcgttctaccagaagtatgtcgacgaacagagtaagaaagagatcaaggacat

SEQ ID NO: 25367 - DNA, 439 bp, Glycine max
  Clone ID: LIB3108-003-Q1-K1-F6
ctttccattcgttcaccgccccaatctctgcagcgccttcgatctagaaaacagtgactgggagaacaaagaaggctggcattgttggaaaatacggtacccgttatggtgccagtctgcgaaagcagattaagaagatggaagttagtcagcacagcaaatttttctgtgaattttgtgggaagtatgctgtgaagaggaaagctgtacgaatatggggatgcaaggactgatgtaaagtgaaagcaggcggtgcttatactttgaataccgcaagtgctgtgacggtacggagcaccatcaggaggttgagggagcaaactgagagtcgagctttttagtgatgttatcaattactattagactttgcgtgatatgcctaattagtgttcactgaactgcattgggtgtattcaaaagtaactccttaaaagttaat

SEQ ID NO: 25368 - DNA, 237 bp, Glycine max
  Clone ID: LIB3108-003-Q1-K1-F7
gaattcccataccgacccacaacgtatctacgtacattcatatacagtgctacacaacatagcaacaatgccccagccaggtgttcatgctattactatagacacatatatacacacagttctagttcaagtcttaaatattacaatgacctcagtgatcgtgacatacttcattcccgtactcagtctcataatgagcaacgtgttccccatttacctatatgttcatgcaatgct

SEQ ID NO: 25369 - DNA, 360 bp, Glycine max
  Clone ID: LIB3108-003-Q1-K1-G1
aactcagcctccacagcactactgttatatatggattcgatgcttcttcgatgggttccgagatattaacaacgcttcttctctcgccaccactggttcttatttgccaaatgcttcatggcacactatgaaaatccaaaaagaatataattttctgaggtttcggtggccaagtttgaaccaccattacaaaagcattgaaggaaggtgtacatgtaaaaaatgtaatataaaatttgttgtgaaagcgacctctgaaaaatcttttgagtctgaacctcaagcttttgatccaaaaagcattttggactcttgcaagaattccttggatgctttctacaggttttccagaccttacac

SEQ ID NO: 25370 - DNA, 425 bp, Glycine max
  Clone ID: LIB3108-003-Q1-K1-G10
gctgtccactaattttcttttttcctgcattgtcgttttgatccctcccccagacgaaacggaccctctcctctttcggaaccttcgccgcccttctccggccaaattccccgcggtttctcgaacttccgacgccatctccggccacctcagagagtgaagaaggtcgttgacgatgagcaacgtgttcgagggatacgaacgccaatactgtgagctctcggcgaatctagcgaaaaagtgcactgctgctggtgttcttaatggagagcaaaagaaacagaaagtttctgaagtaaaggctggaattgatgaagcagaagctttgattagaaaaatggaccttgaggcaagaagtttacagccaaacatcaagggtgtgcttcttgctaagttgcgagagtataaatcggatctcaacaatc

SEQ ID NO: 25371 - DNA, 189 bp, Glycine max
  Clone ID: LIB3108-003-Q1-K1-G11
tcgcccacgcgtacgaaaaaaagaaaataatggtgtctttaaataaagggtcctggcgtgttatgccttgatgtaccctcgccagtgtttttgttgcctgtccctgtataaagattgcattgtattattattagaattgggtacacaataaacatatgcatatgttagtatgctgatgtataaaaaata

SEQ ID NO: 25372 - DNA, 434 bp, Glycine max
  unsure at all n locations
  Clone ID: LIB3108-003-Q1-K1-G12
tgctactacacccaagtattccaaggccaggtatgatgaaattgtgaaggaaggctcttcgtacttgaagaaagtaggatacaaccctgacaagattccttttgttcctatctctggttttgagggagacaacatgattgagaggtccacaaaccttgactggtacaagggtccaactctgcttgatgcacttgaccagattagtgagcccaagaggccctctgacaagcccctcaggcttccccttcaggatgtgtacaagattggaggtattggaactgtgccagtgggacgtgttgagaccggtgtcttgaagcctggaatggtggtgacttttgcaccaactggactgacaactgaagtcaagtctgtggagatgcaccatgaatctcttacagaggcacatnctggtgacaatgtgggattcaatgtta

SEQ ID NO: 25373 - DNA, 259 bp, Glycine max
  Clone ID: LIB3108-003-Q1-K1-G2
caattctccaattgacccacccatccaaccattcccatcacacacatataaaaaactttatactcataacacaaaaaaactaaaaaatggtaaattcaaaattctaaaaacacatatatacacacaaaaaataacaaaactcttaaaaattagagatcacatcattcatagacacaaatttatttcatacactacttaaatatgcatgtttcatcaaatctcccaatatgatcattcatcaaactttaataacctaatc

SEQ ID NO: 25374 - DNA, 335 bp, Glycine max
  Clone ID: LIB3108-003-Q1-K1-G3
ttggttttccttcactttcccgagaaaaaaataacacttttcactttcttcacgacgtgctgacttcgatatggctcgtacgaagcaaaccgctcgcaagtccaccggtggcaaggcgccacgtaagcagctcgccaccaaggccgctcggaagtccgctccggcgaccggaggagtgaagaagccccaccgcttcaggccgggaaccgtggcgctgagggaaatcagaaagtaccagaagagcaccgagcttctcatcaggaagcttccatttcagaggctcgtgagagaaatcgcgcaagatttcaagaccgatttgcgtttccagagcagcg

SEQ ID NO: 25375 - DNA, 352 bp, Glycine max
  Clone ID: LIB3108-003-Q1-K1-G4
aggacgcgtgggcggacgcgtgggcggactcgtgggcaaattttttggtttggggataggtggagtgatacgcgtcacattttcataataataaaaaaatggcagcggcggcggcagtgacggtgctactcccacctaggattccgaccaccaccaacgttacccgctgctctgctttgccttctctacctcctcgcgtctccaacaccaaaaccactttgttctcaccttccctcaacaacttttcagtgtcccgaaaatcttctctgcttcagaccagagcttcttcagaagaatcatcctcagtagatgccaatgaagtgttcacagatttgaaagaaaagtgggatgc

SEQ ID NO: 25376 - DNA, 185 bp, Glycine max
  Clone ID: LIB3108-003-Q1-K1-G5
aaggttttccttaactaatcccgagagaaatataacacttaacactctcttcacgacctgtgcacttcgataagggtcctacgaagcaaaccgttcgtacgttcaccggtctcaaagccccacctaagcagctcaccaccaagaccaatcgtgacttcgctctccactaccggaagactgaagaa

SEQ ID NO: 25377 - DNA, 395 bp, Glycine max
  Clone ID: LIB3108-003-Q1-K1-G6
gaaaagaaaaagaaagaagacatttcctttcgaattgaggaagggaaaggtgggttggatggccaagtcatcttgcttagctatcacgttgatctgcgccgccacggtattggtggcgatgagtcggtggccgacagccgtgggcggcggggaccaccacttgggaatgggatgggtttccagcacgtgcaaggggaccattgctgagtgcctgggaggggaggagtacgagttggattcggagatcaaccggcgcatcttagccaccaacaagtacatcagctacgttgcgctgcagaggaacactgctccctgctctcgccgcggcgcctgctactacaattgccgacccggagcacaggccaatccttacagccgtggctgcagcgccatta

SEQ ID NO: 25378 - DNA, 449 bp, Glycine max
  Clone ID: LIB3108-003-Q1-K1-G7
tcgttggttacatcttcactttcccgataaaagcataacactggacactttcttcacggcatagggacttctatatgggtcgtacgaagcaaaccgctcgcaagtccaccggtggcaaggcgccacgtaagcagctcgccaccaaggccgctcggaagtccgcttcggcgaccggaggagtgaagaagccccaccgcttcaggccgggaaccgaggcgctgacggaaatcagaaagtaccagaagagcaccgagcttctcatcaggaagcttccatttcacaggctcatgagagaaatcgcgcatgatttcaagaccgatttgcgtttccagagcagcgctgtttccgcgcttcaggatgctgctgaggcttacctcgttgggttgatcgaggacactaacctctgcgcgattcatgctaagagggttaccattatgcccaacgatatc

SEQ ID NO: 25379 - DNA, 278 bp, Glycine max
  Clone ID: LIB3108-003-Q1-K1-G9
caagacactgtcagcgcgcacgcatacatggccatcacaggcaacctcaacctgaacctaggactccccgtggcacgccctatggcgtgccccccacgcgcacgaacgtacctacttgctcgacgccgtggcgcgtactctaccaccttcgctcctggtaacgcgcgccatcgacttaaaccagttgactgcagacttcgtggcgcccaacaccttttcaacagagctttgaaggtcctctgatcagaaaaggctgtgatacatgctcacctagcaca

SEQ ID NO: 25380 - DNA, 455 bp, Glycine max
  Clone ID: LIB3108-003-Q1-K1-H1
caaaaaatggagaacacaaggccaaatagaagtgacatgcacctctcagcagaggaagaagccaccatagaggcaaagaccagagactactttgatggggttgcaccacaacgccacacaaagcctcaacgaagtgagtattcagctcaatatgtggatgctttctccaatgcccatcactcttcttcttcttcttctataccagaattcatgcaattccaacgcctcgagaatgatccccaagagaagaaattggagtacaatggaagtcaagtaccggaagaatttgtggaaacagagtattaccaagatctcaacagcgtggacaaacaccaccatacgacgggaacaggatttatcaaagtagagaaaaatggaaatgactttcacatagaaccagataatgacactggttgccatcactcttgcaagtgcaatccagcaaccaatgattg

SEQ ID NO: 25381 - DNA, 436 bp, Glycine max
  Clone ID: LIB3108-003-Q1-K1-H10
ctatgctttgaaaccaaagttcaaactctgtcttccctgggttctatttcgaaatcaacggcgatgagttccacagaggcagcagccacagagaagaaaggtggaagagggaaaccgaagacttcaaagtccgtttcccgttcctccaaagctggccttcagtttcccgtcggccgtgtcgctcgctacctcaaggccggtcgctacgcccagcgcgttggctccggttcccctgtttatctctccgcggttctcgaatacctcgctgccgaggttttggagcttgcggggaacgctgcgagggacaacaagaagacgaggatcgttccgaggcacattcaactggcggttaggaacgacgaggagttgagcaagctgatgggatctgtgaccattgccaacggtggtgttctgcctaacattcaccagaaatttg

SEQ ID NO: 25382 - DNA, 435 bp, Glycine max
  Clone ID: LIB3108-003-Q1-K1-H11
ctcaagatgctgccagagctttggatgttctgaacttcactcctctcaataagaggcccatgcgtatcatgtattcgcatcgtgatcccagtatccgtaaaagtgggcaaggaaatatatccattaagaatttggatagggcaattgaccacaaggcgttgcatgatactttgtctacatttgggaatatcctttcgtgcaaggtagctacagattcatctgggcaatcaaaaggctatggctatgttcaattcgataatgaggaatctgcccaaaaggccattgagaagctgaatggaatgctgctgaatgataaacaagtgtatgtgggacccttccttctcaagcaagagagagaaagtactgctgacaaggcaaagttcaacaatgactatgtgaagaatctgtcagaatcaaccactgatgatgaattga

SEQ ID NO: 25383 - DNA, 337 bp, Glycine max
  Clone ID: LIB3108-003-Q1-K1-H12
cccacgcgtccggttgggatcttccttcttgagtggatgaaacaggagccaggcccttctggcctctgctattggaggcaaagttggtgctgctgttactgttaatcccagaagactcattgtggtagctgctgctgcaccaaataagtcatggctccctggtgttagaggtggcggcaatctcgtcgacccagaatggcttgatcgatcactaccatgtgactatggctttgatccactagtccttgggaatgacccaccattcctcagatggtacagagaatctgagctcattcatgagacgcggccaatggatgcagatctaggaatctttctt

SEQ ID NO: 25384 - DNA, 322 bp, Glycine max
  unsure at all n locations
  Clone ID: LIB3108-003-Q1-K1-H2
gcaagatataagaattagatttaattttgttatgctgtcaacgtaaagatttttacgctggtaattagtaaaaactcgtgtgcccctattactgagcaaaaaaaaaaaaaaaaaaaaaaaaaaaaaaaaaaaaaaaaaaaaaaaaaaaaaaaaaaaaaaaaaaaaaaaaaaaaaaaaaaaaaaaaaaaaaaaaaaacaaaaataaacaaagaaaataacaaaaataaaaaatacaataaaaaaaaaatactaaattcataaaaaaaatcanaagagaccaaaataaactacaactgaaaaaagaggtataaatacaaaaata

SEQ ID NO: 25385 - DNA, 435 bp, Glycine max
  Clone ID: LIB3108-003-Q1-K1-H3
gaagaaggaaatggcttcctcaatgatcctccccagctgttaccaccgtcaaccgtgccggggccggcatggttgctccattcaccggcctcaaatccatggctggcttccccacgaggaagaccaacaatgacattacctccattgctagcaacggtggaagagtacaatgcatgcaggtgtggccaccaattggcaagaagaagttcgagactctttcctacttgccagacctcgatgatgcccaattggcaaaggaagtcgaataccttctaaggaaaggatggattccttgcttggaattcgagttggagcacggtttcgtgtaccgtgagcacaacaggtcacctggatactatgatggacgctactggaccatgtggaagctgcctatgtttggctgcactgatgcttctcaagtgttgaacgagcttc

SEQ ID NO: 25386 - DNA, 453 bp, Glycine max
  Clone ID: LIB3108-003-Q1-K1-H4
gtgagtcagtgaccgagttgaaccatgtcggacgaagagcaccatttcgaatccaaggcggatgccggagcctccaagacctatcctcagcaggccggaaccatccgcaaaaacggctacatcgtcatcaagggtcgtccctgcaaggttgttgaagtttctacttccaagactggtaagcacggacatgctaagtgtcactttgttgggattgatattttcactgccaagaagcttgaagatattgtgccctcttcccacaactgtgatgttccccatgtgaatcgtactgattaccagttgattgacattgctgaggatggatttcttagcttgcttactgaaaatgggaacaccaaggatgacctgaagttacctacagatgagagtctgcttactcagataaaggatgggtttgctgaaggtaaggaacctgttgtgtcagttatgtct

SEQ ID NO: 25387 - DNA, 429 bp, Glycine max
  Clone ID: LIB3108-003-Q1-K1-H5
gaagaaggaaatggcttcctcaatgatcctacccagctgtaaccaccgtcaagcgtgccggggccatcatggctgctccattcaccggcctcaaatccatggctggcttccccacgaggaagaccaacaatgacattacctccattgctagcaacggtggaagagtacaatgcatgcaggtgtggccaccaattggcatgaagaagttcgagactctttcctacttgccagacctcgatgatgcccaattggcaaaggaagtcgaataccttctaaggaaaggatggattccttgcttggaattcgagtaggagcacggtttcgagtaccgtgagcacaacaggtcacctggatactatgatggacgctactggaccatgtggaagctgcctatgtcaggctgcactgatgcttctcatgtgttgaacg

SEQ ID NO: 25388 - DNA, 450 bp, Glycine max
  Clone ID: LIB3108-003-Q1-K1-H6
gttgaaggcggcgtgagaatgttggacattaacctattcagagaggagaagggcgcacaacgcctgaactcatacgcgaatcccaacgccgtcgtttcgccagcgtccaaatcgtcgacgaggtcatcaatctcgacaaagaatggctaaaacgtcaattcgagttggaaaatctccgcaaggaattcaacaagatcaacaaggaagtctccaaactcaagcgtgctggggaggatgcttctaagttcattactgaatcataggagaccaaaaaatcgattgcggataaagaggttgaagtgctggaaactctgaatctcttgaattccaagttggaaactattggaaacctcgtacacgattccgttccaattagcaacgatgaggccaacaatgttgatgatagatcgcgtggagagaaaagagtggagcctaagctgaagaatcatg

SEQ ID NO: 25389 - DNA, 326 bp, Glycine max
  Clone ID: LIB3108-003-Q1-K1-H7
gctggattatcaggtttcctggataccttttcccagatccgctagctccaggcgatccggtggccattgtcaatgcttggtgcccttgcctgcacccttccatagatccttgacaagaatgacctacaatctcatgacgtcgattgcttgcaggcctgctcgactacaatccttacatggagtcctcacctactcgggcaacccatacctgacccatgctctacatcatccatgctatctatgctgatcaggttgtgctcatggaatacgctgtacgtgacagaattagtccttgaccacttttcgaatgacttgacccaatctac

SEQ ID NO: 25390 - DNA, 391 bp, Glycine max
  Clone ID: LIB3108-003-Q1-K1-H8
cccacgcgtccgctcactgtgccgcaaggtgtgccacaaggagtgccacgagggttcttaggctaacgcgcgctctctccacggaggcgcgtgggcaaaagatcgagcgcatcgccacggagcttctcgacctcaacagtttcgagaggcacgatttcacggtcctctggcggctcaagatgggtctgcaccgctacggcgctcctgtggctggcatgacgatgccgtccgtcggggcggctgcccgggctgaagccggtgctgccgcagacgcggagaagatggcatttgacttgaagttggagaagtatgatgctgctgccaagatcaagatcatcaaggaggagacgtctttcaccgatttggggttcaaggaagccaaggacttggt

SEQ ID NO: 25391 - DNA, 443 bp, Glycine max
  Clone ID: LIB3108-003-Q1-K1-H9
ttcttcagcaactgcgattttggatcggaacctcttctgcggcgtagcaatgggacactccggcgtttggaattctcacccaaaaaactacggtcctggttctcgcacttgccgagtgtgtgggaatccacatggattgatcaggaagtatggccttatgtgctgcaggcagtgcttccgtagcaatgccaaggaaattggcttcatcaagtatcgctaaaagagctgttgtcacctacggaccaatattatgttctggcactaggatgttttgaagatgttatgtttgaagaaacttgagacttgtttttttcatctattttattatcagacataatgtgtggaacgaagaatacttttatataaattgttttgcactaaacaaaatctactaaaaaaagggcggactgcctttacgtttttctgttatgattttggacatt

SEQ ID NO: 25392 - DNA, 464 bp, Glycine max
  Clone ID: LIB3108-004-Q1-K1-A1
acttgttagggttgattttctttcccttgctagtgcctgccttgcttatcatcaacaatggtctggcaagtgatccagatatcatatatgactatgtttcaccacagaatagcagtgtcaatggaagcttctttacttacactggattaagaggagtccttcatcaaattcctcaatctttcaaggcaacaaaagtaaccctggttgaatttcctgctctcaatggacaaagtatatcatatgcactatttcagtaccctgctggtagcatcaaccctcctcacatccacccccgtgccgccgagtttctgttccttgtaagtggctccctgcaagtaggatttgttgacactactcgcacactttacacacaaaaccttcaatcaggtgatatgttcatatttcctaaagggttgatacattatcagtataatccacaatccagtccagccactgctatatct

SEQ ID NO: 25393 - DNA, 454 bp, Glycine max
  unsure at all n locations
  Clone ID: LIB3108-004-Q1-K1-A10
acgctcagttcccccctcttcattttgtagtcctcctttacctgcaaaaaacagcagatggctggtcttagcctcatacttatctggttatttttattgagtctgtgcctttattcatgtcctacttcggcccagttaagtagacaccactatgcaaaaacatgccccaatgttgaaaacattgtcagagaagcagtcaaaaagaagtttcatcaaacatttgttacggttcctgctaccattcgtctcttcttccatgattgcttcgtgcagggttgtgatgcctcggttttggttgcatccacaaaaaacaacatagcagagaaggatcacccagataatgtttcactagctggagatggatttgacacagtgattaaagcaaaagaagcagttgatgcagttccattgtgcangaacaaagtttcatgtgctgatattttagccttggcaa

SEQ ID NO: 25394 - DNA, 459 bp, Glycine max
  unsure at all n locations
  Clone ID: LIB3108-004-Q1-K1-A11
acgctagtattttcgtttctgaacccaattaattaagcacacaaggaccataacatacctatagctcaatatcacaagtcttatggaggcagagcgagacaagtacaagatgatcaactttgaagaaaccgagttacgactcggcctgccactcagtggaaacgagacgctcaaaaacacttgcagcactgggaagagggttttttcggatactgccgtggatttgaagcttaacctttcctcaacctcaaacagtgcttcttctgacctggctaaagagaagaacatcactgctgctgcacctnctgctaacgacccagcaaagccacctgcaaaggcacaagtggtggngtggccaccagtgaggtctttcagaaagaacattgttcaaaggagtaacaacaatgagggcgaaaaagccgncacaagtagtagcaacaatgtgaacacgggagcagc

SEQ ID NO: 25395 - DNA, 457 bp, Glycine max
  Clone ID: LIB3108-004-Q1-K1-A12
acgcccacgcgttcggcacggtgagaagaagtggaagtgcgaaaagtgctccaagaaatacgctgttcaatctgactggaaagcccataacaagatttgtgggactagacagtacaaatgtgactgtggtacaatattctccaggaaggacagctttgtaacgcatagggctttttgtgacgccatggcggagcaaaatgcgaggcttccgtcggttttgtcaaaccttggaagcgagattttgatgaatgctgctcaagctccaagagtaatgccacagggtttacaattacatgggtttcattcagagtttggtgggccaggccaagaaccatacattggaaattttgcggatgtgaaccatcatgagcataagctaaagatgccactatggctagaccagaccaataatcctcttcagcttaatcatcatcatcctctaagcgtttcaagcaac

SEQ ID NO: 25396 - DNA, 356 bp, Glycine max
  Clone ID: LIB3108-004-Q1-K1-A3
cccacgcgtccgagaacataccaatctacaataaacgatgattctcattatctgcctcagtttttctcttctctctttctcccatgcttctgtcctagatttctgtgttgcagattatgcaggtcctattggacctgcaggatattcctgcaagaagccttcaaaggtcacagcagatgattttgcttacagtggccttggcattgctggtaacacctcaaacattatcaaagctgcagtgacccctgcatttgatgctcagtttgctggtctcaacggtcttggcatttccgcagcacgtttggacttagcagcaggtggagttataccacttcacactcatcctggagcttcag

SEQ ID NO: 25397 - DNA, 290 bp, Glycine max
  Clone ID: LIB3108-004-Q1-K1-A4
ctaccgccttggtgaaaggaacctttgaaaaaggtctttgggaccttaaagaaaaaccctggtagcgctaaattcccaccactggagaactcatttaatccttccgctatattatcttgaacacatttgcagctccatacgctgctgataattttggacaatatccttatggcggcttaatcctgaaccgtacatctctacccagaaggtttatcccatctgaagcaaccccatattatgattagatggtgaataatcctcaagattcttatctgagaacaatcacaccc

SEQ ID NO: 25398 - DNA, 309 bp, Glycine max
  Clone ID: LIB3108-004-Q1-K1-A5
ctttagtttcatgcgcaaggggaagaagctattcatttgactcttactttattatttgagttgccggcaccctcttcttcacgggagctgaaaaaaaatgggagaaagtgctttgttctctgtgtagagtttggcagagaaagataacaacattttttagtcctttataatgccagttccacttgccccctacccaacaccgccagctccttatacaccaccagctaatggtgtacagagtcaacttgtctgttctgggtgtagaaaccttctagtgtttccagttggagccacctccgtgcgctgcgc

SEQ ID NO: 25399 - DNA, 469 bp, Glycine max
  unsure at all n locations
  Clone ID: LIB3108-004-Q1-K1-A7
acgcgtgcgcccacgcgtccgcccacgcgtccgttctaatccttctttcgcctactcctccctctctctgactttcacacgcagcgaggtagcgtcttcttcttccgtttctctgcatcggtgtgaacaatggctacatacgctgcgatgaagcccacaaagcccgggttggaggagtcccaagaacagatccacaagataaggatcaccctttcctccaagcacgtcaaaaacctcgagaaggtttgtgcggatttggttcgcggtgcaacggataagagactcagggtgaagggacctgttaggatgcccactaaggttcttcacatcactaccaggaaatcaccctgtggtgaaggtaccaacacatgggacagatttgaacttagggtgcacaagagagtgattgacctctacagttccncagatgtggttaagcagattacctctatcacgatcgaaccttgtg

SEQ ID NO: 25400 - DNA, 160 bp, Glycine max
  Clone ID: LIB3108-004-Q1-K1-B1
cttccgccaagccttccgaaactcctccgtactaatagccattgctacacttgtaaagcttatgtcgacattgatctcaagtccaacgcatacaagtactggcaaacccttaggaattctactgaaatattccctaaggccttccaacataattccaaaa

SEQ ID NO: 25401 - DNA, 246 bp, Glycine max
  Clone ID: LIB3108-004-Q1-K1-B10
tcttctagatctccaacgaacgccccatacgtgctcaatcttacatacactttcattctactgaatcactgttaaatcttcacggcactcatacaaccactgtccatcactcatcaccaatctcacatatctaacccatacggtacccaactgaaccgacatactgcacatgctcttacaaccagcttgcactattacaaataactcttaacctatctatcctttatacatgaaagcaatctcaac

SEQ ID NO: 25402 - DNA, 433 bp, Glycine max
  Clone ID: LIB3108-004-Q1-K1-B11
gatcgagataactagaaacagtgtgatgaaaatgaaggtccttgttttcttcgttgctacgattttggtagcatggcaatgccatgcgtacgatatgttccctctccgaatgaacactggctatggtgcccgtactccggaggtgaaatgcgcaagttggaggcttgctgtggaagcacacaacatctttggctttgagaccattcctgaagagtgcgttgaagcaacaaaggaatacatccatggcgaacaatatagatcagactccaaaacagttaaccaacaagcttacttttatgccagagacctcgaagtccatcccaaggacacatttgtgttcagtatagatggcaccgtactctctaatattccatactacaaaaaacatggatatggggtggagaaatttaactcgaccttgtatgatgaatgg

SEQ ID NO: 25403 - DNA, 421 bp, Glycine max
  Clone ID: LIB3108-004-Q1-K1-B12
ttcctaatcatggtcatagcttagaaacagtgtgatgaatatgaaggtccttgttttcttcgttgctacggttttgggagcatttcaatgccatgcgtacgatatgttccctctccgaatgaacactggctatggtgcccgtactccggaggtgaaatgcgcaagttggaggcttgctgtggaatcacacaacatctttggctttgagaccattcctgaagagtgcgttgaatcaacaaaggaatacatccatggctaacaatatagatcagactccaaaacagttaaccaacaagcttacttttatgccataaacctcgaagtccattccaaggacacatttgtgttcagtatacatggcaccgtactctttaatattccatactacaaaaaacatggatatggtgtggagaaatttaac

SEQ ID NO: 25404 - DNA, 202 bp, Glycine max
  Clone ID: LIB3108-004-Q1-K1-B2
ggccttcccaagaaaaccaactataatgtctttcctggtgccattcctggttcggtcacccgagaaatctaagcacgccgacacattgcaagggcttaagaatcccttcaatgtgcattaaacttcggtctttccttcgccacttaccccggcttgtgtgatagctcacagggcacagaaaatagaggcttttaggcacgag

SEQ ID NO: 25405 - DNA, 453 bp, Glycine max
  Clone ID: LIB3108-004-Q1-K1-B3
gttacttacaggtttcagaagcctgccaccgttgtttgcagatacacctaatgcagttcatgaattaacaatagcaagggatatatatgagcatgctgttgtccttagtgtgaaaattgaggatcaagatgctttcgaaagggatttcttccagttgaagccttattatacagatgcctgcaatcgtcttccaccatctcctcaggagtaccctatactgggtctcaacctgttgagactacttgtgcagaataggattgctgagttccatactgagttggaattgctttcatctgctgctcttgagaatccttgcattaagcatgccgtggagttagaacaatcttttatggaaggggcttacaatcgtgtcttgagtgcacggcagacagtgccacatgatacatacgtttatttcatggatcttttggcaaagactgtcagagatgaaat

SEQ ID NO: 25406 - DNA, 385 bp, Glycine max
  Clone ID: LIB3108-004-Q1-K1-B4
agttaagagagttgagtaagatcagaatggcagacttgatgaaaagaatcctgcaaatgagggaggctgaacaagcaagcaaagggtccaaccatggttcttcaaactcacataacagctatggcagcggaagccagaatggatcaaccatcaacagtggcaatcatcttaacaacggcaacaggtatgacgactcataccactacggtgaacgccctatttataacagtggcactttcaatggtaatggcaacgggtcacatatcaagggtggctttgactcctcaacaaggaactactatggtcgtcgttatgattattaattatctggatttgatacaagatatgctaactagctgggcaaaatatataatatgctatgcta

SEQ ID NO: 25407 - DNA, 326 bp, Glycine max
  Clone ID: LIB3108-004-Q1-K1-B6
acgggggagcttgaacaatttgtccctactcatcaagcaatatggattgtcaaagagtactgaggaggccatgtttgtgattgaagcttataagactctccgtgaccggggtccataccctgcagatcaagtggtcaaggaacttgatggcagttttgcttttgttgtctatgacagcaaggttggcagtgtctttgcagcactgggttctgatggaggagtgaagttgtattggggtattgcagctgatggatctgtggtgatctctgatgatctagaagtcataaaagagggttgtgccaaatcctttgctccctttcaacaag

SEQ ID NO: 25408 - DNA, 112 bp, Glycine max
  unsure at all n locations
  Clone ID: LIB3108-004-Q1-K1-B7
tttcagtttgagtatatctgttatagttaatttactactgaaagatggattcgaagagnaagatatcattacatatcttcggtcttctggccatgctccttttcatctcctc

SEQ ID NO: 25409 - DNA, 62 bp, Glycine max
  Clone ID: LIB3108-004-Q1-K1-B8
actcaacgcctgccactgtaatcttgggctccataggaagtaagaagatgaacgtggatctg

SEQ ID NO: 25410 - DNA, 464 bp, Glycine max
  Clone ID: LIB3108-004-Q1-K1-B9
cccacgcgtccgacagaagttgtgcttgttcgcaaaaccatcaatggcatcagcattatcgtctctgtgctccacctcttcttcactgttacagcacagtttcaccggaaactcgaaggctcctcccactactcaattccccaacaaaaatgtacgcttttcggtcttcgctcaaaagaaggcaaagaaacttcgaaagattattttgaaggaagatgtggcttatgtaggaaagcaagggcaacttcttgatgtgaaggctggctttttcagaaattacctgcttcctatgggaaaagcacaacttgttactccacagcttctcaaggaaatgaagatagaagaagaaagaattgaggctgagaaaaaacgggtaaaagaagaggcacagcaacttgctctaatttttgaaactgttggggttttcaaggtgaagcgtaaaggtggtaaaggaaaacaaattt

SEQ ID NO: 25411 - DNA, 243 bp, Glycine max
  Clone ID: LIB3108-004-Q1-K1-C1
cccacgcctagaatggaattaaggtatgtttatacataaatagggcaagagaaaaaaagagatctttttaaaacggaaccgtggcagtggtcttgggaggaccaggcagcaaacggaggcataagcaaatgggatggggtgaagaacaagcaggcccagaaatacctcaagtccatgtccatcaacgacctctgcttcttctaccactccggccccaaagcccgccgtatcgtcggcgttgtt

SEQ ID NO: 25412 - DNA, 372 bp, Glycine max
  Clone ID: LIB3108-004-Q1-K1-C10
actgttttcttttggtgtgtaatgtcttgaaccataaaaaataaaaaaaaaaaaaaaaaaaaaagaaatttgtaaaattaaaaaaagaaaaaaaaaaaaaaaaaaaaaaaaaaaaaaaaaaaaaaaaaaaaaaaaaaaaaataaaaaaaaaaaaaaaaaaaggccgccccttttaaaaaacccaatttaacatacccttccttccaactctaaaccttttttatagtgtcccctaaattaattaaaatgcccttctttataaaaacttctaaactggaaaaacccttgttttaccaaatttaaacccttaaaaaaaaatccccttttcccaaattgccttaataccaaaaaacccctaactaatcccctttt

SEQ ID NO: 25413 - DNA, 459 bp, Glycine max
  Clone ID: LIB3108-004-Q1-K1-C12
ctctattcccttcttcaacatttttagcttcttctctttctcaaatccccctatcttcaaaatttcaaggttatcactctaaagacagatttttttcttaaatgactgtggctatggctgtttggagtgctggtcttcacttcagtgctgctacgaagcctcatagtagcttgaggcctttggagaaaatcatttgcactgcccctttcttcaaggcctcatctgggtttgctgctactaagccattctgcatccttaacacaacaagattgtcatattctggaactacaattatccctcgagcagcacctgttactgatgtggaggacgggaatcatggtgagactgataccattccaactcccgtagttataattgaccaagactctgatcctgatgctaccgtggtggagataacttttggtgatcggcttggagcacttcttgacacaatgaatg

SEQ ID NO: 25414 - DNA, 254 bp, Glycine max
  Clone ID: LIB3108-004-Q1-K1-C2
aggcaatatcttgggcaacagttctatctcagagtgtgggatgcacagaaaaggcttgcgaatgaatatgacattcccaacaatgttctgctttgcggcaaagctgttgggcatcacccttagaacatatatcaactatcagcctcctatttatcggtgtattttctggtcatgagggcttgactacaactagaattccttttcctttttcttaaaaatgaaaaaggacaatgagaagctactttctccaaatt

SEQ ID NO: 25415 - DNA, 401 bp, Glycine max
  unsure at all n locations
  Clone ID: LIB3108-004-Q1-K1-C3
gagagagagagagagagaagcgttaatctgaatgggttacatccaccatggaagaaccggtctcaggcacatactcagattcagaaccgccaccggcgtggtctcaaactccggcagatcgcaatcgcgcgctgcattcccctcccattcccctatcctcggcaacgtgcttttttttctcaacaggcgataaatacctcaacgaaattaccgcagaggtggaacgcgacaggcgcagggagcgaaacgagcgtttgcgcctcggcctcgacaccgncgacatcgacacngagtcggagcaggactacatgggcgtggggcccctcatcgcgaagctcgagaaggagattgctcaggaatcccccgagctgaaccggtacgaggagcccaccgacttcgac

SEQ ID NO: 25416 - DNA, 227 bp, Glycine max
  Clone ID: LIB3108-004-Q1-K1-C4
cccacgcgtccgttaaaagattactggagtatatgtcaatgaatctatatcaagtaagtgaaaaaaaagacgaataagaaaagtttgtaagttagtttcaatagtaggaaatattttggattggttatgttaataacgcttttaaaaattccttgttcaaaattaaattattcattggacctttattattaaaaaaaatttatgtgtttcacatatatatttcaaaa

SEQ ID NO: 25417 - DNA, 271 bp, Glycine max
  Clone ID: LIB3108-004-Q1-K1-C5
cccacgcgtccgaccccttcttctatttctatgcctaactcttcctttgtttttgttggccttcttcaaataccgtaaaaccttcaagaatccaccacttccaccaggtcctagaggccttcccataatagggaatcttcatcaactagatagtccttctcttcatgagcagctatggcatctctcaaagaaatatggtcctttattttcccttcaattgggattaaggccagccatagttgttccctctccaaattggcccaaaggggta

SEQ ID NO: 25418 - DNA, 337 bp, Glycine max
  Clone ID: LIB3108-004-Q1-K1-C7
cggacgcgtgggctgcgcgtgaacaagccttatgtaagccaaagccatggttaagcataagaatgttatccccaacggacactttcgtaagcactggcagaactattttaagaccttgttcaatataacaccaacggaaacacagaaacactgtggtctcgacaaaaaaactctgaaaatattttccacacatatacatctagaccttttacacccattgcacatggtcaaactttgaaatacaacatgaaagtgagatctgaaaggggattttcccttgaagaactcaaggcagcaggtattcccaaaaagcttgcaccaacaattggtattgctg

SEQ ID NO: 25419 - DNA, 370 bp, Glycine max
  Clone ID: LIB3108-004-Q1-K1-C9
gttggctttgactcaaaagctgtgtgtggcatcagaaaatgaacagtttatcaatggcaggtctccacccaaatcttcttcccactttcaattccaacactcttacctttccttccatcaaactcaaaccctcactctcgcacgtgccttctccaacccccacacgcttcagtctctctgtttccgcggcggaaaccaccgcttttgccgcccctcccactccccaacctgagaagcttggagttgtagttaagccaacggagaagccgagacttgtgttgaagctcatatggatggagaagaacattggaattgcgcttgaccagatggtaccgggccatggcaccattcctgtgagcccatattactt

SEQ ID NO: 25420 - DNA, 451 bp, Glycine max
  Clone ID: LIB3108-004-Q1-K1-D10
gctatctccgatggctctctctgcgcatatttgccgtttccccgccacacgcgctgacacgtctttgccggagagtctcaccagaatccggtgccggaaacctctctccgtccgatgctccggcgattccacttccggctctgtgggttcggagttcgatccgaaggtgtttcggaagaaccttactcggagtaagaattataaccgcaaaggatttgggtacaaggaagagaccctccaactcatgaatcgcgagtacaccagtgatatcattaagactttgaaggaaaatgggtatgagtatacatggggtactgtcacggtgaagcttgctgaagcctatggattctgttggggagttgagagggctgttcaaattgcttatgaggccagaaaacagtttcctactgagacatattggcttaccaatgaaatcattcacaaccccact

SEQ ID NO: 25421 - DNA, 452 bp, Glycine max
  unsure at all n locations
  Clone ID: LIB3108-004-Q1-K1-D11
gttggccttatccgtatctctttgtttgggtgataggatacaacaccttcttcttagcttagcaatggcatcgtcttcgctcacttcagttcctctctcatcttcttcactcaacattccacattcttcctccaaagcttccgctagctttgtatcttctccaattggcgcattctctcgcacccccaaaaccctgtttgccgaatcaaggttccactttcacccgaagagaaacgattatgggttttccatcagagcccagaccctagacttctcggattcattcttcgaagggggtttcggctctgaagacgtcccttcttctcccggcggacccggcttcacggccgtggaggaaaaggaggaaccccaatgcccaccgggtctcagacagtacgagactatgatggttttgaggcccgacatgtccgangatgaacgacttgcactca

SEQ ID NO: 25422 - DNA, 282 bp, Glycine max
  Clone ID: LIB3108-004-Q1-K1-D2
caccgagcaactaccatggctaccgctccttcgcttctacactcatctgggtggtctttgttctctcaatttcgtgcctttcaattctcttcttcttcgctgtttcctcatggaaacaggcatgggaatgccgtggtctctgtgaaggcctctgcttctggggttgtgttggtggagaagtctgaggcagagaaggccaataggctcaaaacagcttacactgagaaaattattcccttgctcatggaagagttctcttacaccaacaaacaccaggtgcct

SEQ ID NO: 25423 - DNA, 450 bp, Glycine max
  unsure at all n locations
  Clone ID: LIB3108-004-Q1-K1-D3
gtaaaaatggcgcagtgtgtgaccaaaaacacattcgtgcaaggaaaacccttgcttccggttccagcagctcccactaaaaatgttcggagagtggttcagtgcggtgtgtggtgcaagaagaaggagattcacccgcaattccacgaggaagccaaagtgtactggaacggggagctggtgctgacgacaggtgggacctcagatgagtacgtggtcgacgtgtggtncgggaaccaccctttctacctcggaagccggtcggcgtctatggtcaacgacgaccaggtcgagaagtttcgcaagaagttcggagagctaaaagagatcatggagattcctgttcttaaaggatagattgttatcccctaaaaacgcaagggcttttccaaaggaggcaagataaaaataatttattcgattcaaacatagatggcttttttcttcttc

SEQ ID NO: 25424 - DNA, 271 bp, Glycine max
  Clone ID: LIB3108-004-Q1-K1-D4
acggttttcttcagaaaatttgccatcgttgagggaagcgcgagaaccttccttggtcaagatgagaacttaatggaagaagaagccccttaagaaggttaagaagaaacccccaaagattagaccaagatctaagtaagtgcttgaacaaagaattgaaatgatgtgcttttccatctgctaccagctctacataacattatacgctgacaggtcttatatgatgatcttgaggtctagtgccaaggggagcttccatcttgactttagt

SEQ ID NO: 25425 - DNA, 413 bp, Glycine max
  Clone ID: LIB3108-004-Q1-K1-D5
acgcccacgcgtccgggaaggtgaaaaagaatataaagaaaaggatgatgggaaggaagtgagagagaagaagaaaaaagaagacaaagacaagaaggagaagaagaaagttactggaaaggacaagaccaaggatcttagtgcgctgaagcagaagcttgaaaaaattaacggaaaaatacaaccactccttgaaaagaaggctgatatagaaaggcagataaaagaagctgaagctgagggtcatgtagtcaatgggaaggacaaggatgaggtacagtagctgtttaggatacacttatactatcttgcgtaatatgcaaactatgtttgctctttttaagttgttttgtgtaataaaggttgctttttatttgattgaggagtgatacattttgtcattcttatgcttt

SEQ ID NO: 25426 - DNA, 270 bp, Glycine max
  Clone ID: LIB3108-004-Q1-K1-D6
atcgtattctgcaaattcaaaccgggtcttggttttctgaaagatgggaggtggcaagggcaagcagcatgatgaatctgacaaaggaattttttcacaccttgctcatggggtagctggtgcagcacatggtggacatgggtacccacctggggcttacccaccaccacctggggcataccttccacaacagggatatcctccagctgggtatcctccacaacaagggtatcctccatttggggcccttcaacataaaggttatcctcc

SEQ ID NO: 25427 - DNA, 259 bp, Glycine max
  Clone ID: LIB3108-004-Q1-K1-D7
cccacgcgtccgcttgtttctgcgtttggcgttgcacacgatgaggaaattcaccaccagattctcccacatcaaatcaacaaagatgaacttctccgtttcgcttcttcatcggagctctccattttgccccaatcaaccaccacaccctaatttcaagaacctcacatggcagaatcgcgattcactactattatttccccttctctgttcgcgccactttgccttcactaccgcgcagaatcctttcacattgaat

SEQ ID NO: 25428 - DNA, 330 bp, Glycine max
  Clone ID: LIB3108-004-Q1-K1-D8
acgcccacgcgtccgcaagattctcacaaacaactcttgataaagaaagaatggctgccaacagattgaggagttctgccatctcagccttcccatctctcctttccttctcaaaatccaaatttgccccaacaattcctctttccaactttggtgtcaccaatgcctcttcttctcgcttttccattaatgcttattggatgccctggccagcctaaacccccttacctagatggttaaacacctggacactttatattacacctcttgcctctgggaaaaaccccagaaaatctttagaggtccaaagagtcagaactcattcactgc

SEQ ID NO: 25429 - DNA, 127 bp, Glycine max
  Clone ID: LIB3108-004-Q1-K1-E1
ccggaaagtgagcgtcaaagaacgaaatgtcttttgagagtttttagatttgtgtttggggaagtacttcagataatgtgaattatcttgtgtatccgaatccaacttaatgttacttgctttttac

SEQ ID NO: 25430 - DNA, 397 bp, Glycine max
  Clone ID: LIB3108-004-Q1-K1-E11
cggactcgtgggccaacacctggctcaactcatgggctcactggctcaaggctgaccccagaaagtacctcaagatgaaggagaggcttgtcggcgtctctgaggagaccaccactgttgtcaagaggctataccaaatgcatgagaccggcgccctcctcttccctgccattaacgtcaacgattacgtcaccaagagcaagtttgacaacctgtatgggtgccgtcactcgctccctgatggtctgatgatggccactgacgttatgatcgccggtaaggatgctgcggtctgcggatacggagatgtactcacgggttgtgctgctgccctgaagcaatgctgagcccgtgtcattgagaccgagatcgaccccatctgtgccgttcaggctct

SEQ ID NO: 25431 - DNA, 301 bp, Glycine max
  Clone ID: LIB3108-004-Q1-K1-E2
cccacgcgtccgcattaattcacttgcccgcaaatccttggtcaatgccgacggtattatagagaaaacattcttggggggtaagtactctttggaaatgtctgctggtatttacaaggattgggttttcaacgatcaaaccttggcttatgaacctggcaagaaaagaattgcttgtaaaggttcattttgttcccattgaatttgacttttgatcgaggactatccttatgcttctgatgggctagagatatgggatgctatcaagtcttgggtggaagaatatgtctcattctactac

SEQ ID NO: 25432 - DNA, 369 bp, Glycine max
  Clone ID: LIB3108-004-Q1-K1-E3
gcctagaaccttcttcctttacacctcgctggaaccagcgatggatcctcagcctgagcgagtcagctacatatgcggagattgtggaatggagaatacgctgaagcccggtgacgttatacagtgccgtgagtgcggttaccgtattctttacaagaagcgcactcgtcgcattgtccagtacgaggcacgctgaagaaaactgctataacgtttgcaagtaatttccatgaagaaattgttactacatctgtgttgtgtgatattgaagaactacttttaattctacagtagatggctttttgggagatgtttaccaaaggataaaaactttgaatgtgaatattttacaaacatccgggtttcatt

SEQ ID NO: 25433 - DNA, 329 bp, Glycine max
  Clone ID: LIB3108-004-Q1-K1-E4
ctcgaaacggagattcaaagtgggttgcctcacaaggactaccacgacccaccccccgcgccattctacgaccccgccgagctccgaaagtggtccttcttccgagccctcatcgccgagttcgtcgccaccctcctcttcctctacgtcaccatcctaaccgtcatcggctacaaccaccagacagccaccgccgccgagccctgcaccgccttcgccttcctcggattcgttgggccctttgaagccttaattttggccctcgcttatggcaccgccggcatatcagggggacacataaacccggcggtgacgttcgggttgttttt

SEQ ID NO: 25434 - DNA, 262 bp, Glycine max
  Clone ID: LIB3108-004-Q1-K1-E5
atgaaattgacacgaccatgtcataattattcaccgacttgctcattttactatccctagtaatacgactatgcaattgcagggatacaacaacagacgaacaggcgcaaacgctaaacacaaacactcacttgaacccacaagtgccacccatgcgaacactatcttccataaatcggttctaaggatcctcatagttcgggaaactcagataccacatctgacctgcactatcaggtgagatcaacatctacctcatttg

SEQ ID NO: 25435 - DNA, 198 bp, Glycine max
  Clone ID: LIB3108-004-Q1-K1-E6
cccacgcgtccggtgaaccatagccatggctacttcatcaaccacattatggctatcatcgctcatagctgcaagcatcccatcattcaactctggaaaccattcagtttttttgcttcaaaaccggtctttgaatcgacccaagaagagagtttccttcggtggtcaagcagccaagccccctattggtgtggaaat

SEQ ID NO: 25436 - DNA, 380 bp, Glycine max
  unsure at all n locations
  Clone ID: LIB3108-004-Q1-K1-E7
gctttctggaacatttatcggtgttgcccttatcaaacacagacctgacattttaaaaggtgtcagggatggtattgaatatgcttttgtagatgctccaaaacaattgtcatttcttgaagaggcagtgctccattttgtgtcaaaactgactgcacctgatctatcggacatcacgaaggatgttcaacagcgaacaacaaatgtcaatacagacgagaaccccagtggctggcgtccctataaagtatttattgccaacttactagaaaaatgtgcaaagaatgagggatttcaagatgagaaagaaggggtttctgttaggcgtangggccgttctcggaagaggcaaaacataccaggaaagaagctttttgatg

SEQ ID NO: 25437 - DNA, 234 bp, Glycine max
  Clone ID: LIB3108-004-Q1-K1-E8
cccactcgtccggaggaagtagatcatcttaatgcatttccggttgcttaatgctccggacaaacgcaatgatcaaaggaaaatgctctggatagaataatgatgctcccattctatgatatgtaatcaattccaaatcattatctccatataaatccttcttaatttgttcaaatccccttgaacaaccagattcaaacaaatttttacctaaaacctaaccctaatcttttt

SEQ ID NO: 25438 - DNA, 282 bp, Glycine max
  Clone ID: LIB3108-004-Q1-K1-E9
cccacgcgttcgcccacgcgttcgtttcagtaggctttgatagagaaatatagaaactatggaatttggctattcttttttggttttaatgtaagggctttttccttgttaattatcaacttgggggcacacgtgccacgtttgctgtaaatgcagtaaggattgaaatagctgtcaatctacattaatattagccacatttttgtttaaaaaaaaaaaaaaaaaaaaaaaaaaaaaaaaaaaaaaaaaaaaaaaaaaaaaaaggaggacaaatctaaaaag

SEQ ID NO: 25439 - DNA, 428 bp, Glycine max
  Clone ID: LIB3108-004-Q1-K1-F1
cccacgcgtccgcaagaactagggtttgcagtcactgctctgtttcaccgagtttgggcgtggagatcagaaccaaatcgtgttctctttcattggcaaacatggcaactcaaatgagcaggaagagaaagtatgttgcggacggagtgttctttgccgaactgaacgaggttctgacacgtgaattggcggaggacggttactccggcgtcgaaattaagggttacgccgatgcgcaccgagatcatcatcagagccaccagaacccaagccgttctaggtgagaagggaaggagaattaaggaacttaccctaatggtgcagaaaaggttcaaattccccgaaaacagcgtcgagctttatgctgagaaggtcaacaacagaggcctgtgtgccattgctcaagccgagtcgcttcgctacaagct

SEQ ID NO: 25440 - DNA, 451 bp, Glycine max
  Clone ID: LIB3108-004-Q1-K1-F11
ataactagaaacagtgtgatgaaaatgaaggtccttgttttcttcgttgctacaattttgggggcatggcaatgccatgcgtacgatatgttccctctacgaatgaacactggctatggtgcccgtactccggaggtgaaatgctcaagttggaggcttgctgtggaagcacacaacatctttggctttgagaccattcctgaagagtgcgttgaagcaacaaaagaatacatccatggcgaacaatatatatcagactccaaaacagttaaccaacaagcttacttttatgccatagacctccaagtccatcccaaggacacatttgtgttcagtatagatggcaccgtactctctaatattccatactacaaaaaacatggatatggcgtggagaaatttaactcgaccttgtatgatgaatgggttaacaagggcaatgcaccggcac

SEQ ID NO: 25441 - DNA, 387 bp, Glycine max
  unsure at all n locations
  Clone ID: LIB3108-004-Q1-K1-F3
atctcaagctggatcccctcaactaattagcactacctcgaatcttcatccccagattaattctttagttggagtaatggaaatgcctaaagccaaagctagtgaaggatactccaattgcatatataattatgactactcagcttacaaagttccttcaatttgtcctccattgatcaaaaaatgtaaacgctctcgttaatcaattgtatgtgaatnttgttgcanaatattagctaattttgttttcttcgagatttgaaagtccttttttgttctcttaaattcttcgtaattcttttttctcgtcaaaaaaaaaaaantnnntatttntttattattatttattttaattatatgttaataataaaaaaatttaattataat

SEQ ID NO: 25442 - DNA, 312 bp, Glycine max
  Clone ID: LIB3108-004-Q1-K1-F5
gcgaattgtctcagggtacttgaatagactttacaatcagcatcagttgtgattacgtttggcatgatgtgaaaatggtggctgatgctttgtagcaggaggcttgtggaggtttggtagtgcatttgagaaagataaatattataagcaggtgtgattataagtgtttttatcttttttataaaagataaacaagtatatctattcttcttctgttagaatcttttcaggctaattgaacgtcatcaacattgtttttctttgtatcagataataatagcagtggtcaagacttaaagttatgttgaaaaa

SEQ ID NO: 25443 - DNA, 330 bp, Glycine max
  Clone ID: LIB3108-004-Q1-K1-F6
agctccttcacctccttagtttcgaaagcatggcttccctggcggcttccaccgcggctgtgtcagagatccttggaaaccccgttaacctcagatgcgcaaccaggtctgctccataccactacacctgcaccttcaaaccgcgaacttttttccaagaggaagccagttcaacctccaaagaaaaagcctgccgctgtatcccccgccaatgaggaactcgccaagtggtatggtcctgacagaaggatcttcttgcctgagggtctcttggaccgatctgagatccccgagtacttgaccggagaagtgcctggagattatggttat

SEQ ID NO: 25444 - DNA, 366 bp, Glycine max
  unsure at all n locations
  Clone ID: LIB3108-004-Q1-K1-F7
gcatgttttactatgctggaagtgaagatcactctgaggagcctcacttcctccaagctgggtttctttgcagaaaaccactcggccaaaaccgtgacatcttcatgtacagagggaacacaccattttgtagcaaagagtgcagacaggaacaaatagagattgatgagtcaaaggagaaaagttggaagctttcttccaaaaggggtgtgagacaatcagagaccaatcaaaattccacacccaataaggctgtaagaacaggcacagttgcagtggcctaatcaaagaataatccatgacatgatgatgagtggngaaagtgcccaatttttgaggaaaaaaagatggatattgaaatggaaa

SEQ ID NO: 25445 - DNA, 450 bp, Glycine max
  Clone ID: LIB3108-004-Q1-K1-F9
cccacgcgtccgcagatcaatgcagagctgtgtatgcatgctcacatctgttttgggttgatgatcatgataacatgaaagatggagagagggtcctattatgtcttaagcgggctttaagaattgcaaatgctgcccaacaaatgccaaatgcagcacgaggtagcactggatcagtaatgctcttcattgagatattgaataagtatctttacttctttgagaagggaaacctacaagtcaccgttgctgctatccagggcttaattgagttaattatgaatgagatgcagagtgataccacaactcaagatccagctgctaatgctttcttagccagtaccatgcgctatatagagttccagaaacaaaaagggggtgcggtaggcgagaagtatgaagccatcaaggtttcacatgctggatgaccgatacccttgttggtgtcgt

SEQ ID NO: 25446 - DNA, 314 bp, Glycine max
  Clone ID: LIB3108-004-Q1-K1-G1
acgcccacgcgtacgctttgttcaggctattgttactggcaagggccctattcagaacctttggtaccacgttgctgatcctgttgccaacaatgcttgggcttatgccactaactttgtccctggacaatgaggatgcctacatgcaatgcaatcttctgctcccttttgcagttcccttgtgtttaactccattttcactaatgtaactacacctgtgtagcagaaaaatctgtatgagaacccattatatttatatattaaaaatttgggtccccagaaaaaaaaaaaaagttatgatataatggaggggg

SEQ ID NO: 25447 - DNA, 463 bp, Glycine max
  Clone ID: LIB3108-004-Q1-K1-G10
acgcccacgcgtccgcccacgcgtccgattgcaaagaaaatacacattacattactaagtcttggttcatttgagtagtagtgatggctagcctcaaggttgcatgtgtggttgctgtgatgtgcatggttgtggtggccatgagtgctgcacccatggcacaggccgcaatcacgtgcgggcaggtcgccggcgacatgtctccgtgcttcagttatcttcgaagcggcggaaaaccgtcgcaggcctgctgcaacggagtgaagtccctcagcagcgcggcgaagaccaccgcggaccgtcagggggcgtgcagttgcctgaaaaaccttgccaataatatgggacagagtttgaatgccggcaacgcagcctctctccctggcaaatgtggcgtcaacatcccttacaagatcagcaccttcaccaactgcgccaccatcaaattctgaaaggcaatttt

SEQ ID NO: 25448 - DNA, 457 bp, Glycine max
  Clone ID: LIB3108-004-Q1-K1-G11
cccacgcgtccgcaaggctctactctactgcttcaccttctgctctagaaaattcagtggggatacatggcttcggctactctctctgtagccaaaccagcccttcaggcaaatgggaaaggcttctctgaattctctggcctccgcagctcatcaggcttccttcccttttctagaaaatcttcagaggatttccattctgtcattgccttccagacctatgcagttggaagcagtggaggatacaagaagggtgtgacagaagcaaaactgaaggttgccataaacggatttggaaggattggaaggaacttcttgaggtgctggcacggtcgcaaagactcccctcttgatgtcattgccatcaacgacaccggtggcgtgaaacaagcctctcaccttctcaagtacgattcgatcctcggaaccttcgatgctgatgtcaagcctgttggca

SEQ ID NO: 25449 - DNA, 434 bp, Glycine max
  Clone ID: LIB3108-004-Q1-K1-G12
atgctattgaaggggaaatattcgaaaaaatgcaaagtgaaaaggctgagcatgaagctcgtgaagttggcatggggaatatggccatagatggaaatccaaagccactcaaagagttccaatctatgaagccatcataatatacgcaaattggcttatttggattggggtataccacctgtttttgattatatggcaatcatggatggtccttggagcgtgatattatatttaactgttatattaagcattgcatgcagcataggtcatacatgaggttgtcatttgggaagccttttgtaaggaagctaaatcacctattacagaacttaatgtctaaaagatagctttcttcacattcagtagaaagcacactgatgtaagcactttttcttttcttctctatttggagaatttgtttgaggactttcccc

SEQ ID NO: 25450 - DNA, 216 bp, Glycine max
  Clone ID: LIB3108-004-Q1-K1-G2
cccacgcgtccgtatttgttcaagcttttgctgattggagattctggtgtaggcaagtcgtgtcttctcctgaggtttgctgatgattcataccttgacagctatatcagtaccattggagtggactttaaaatccgcactgtggagcaggatgggaagactattaaacttcaaattggggacactgcgggtcaggaacgtttccgaacaatcact

SEQ ID NO: 25451 - DNA, 163 bp, Glycine max
  Clone ID: LIB3108-004-Q1-K1-G4
gtactttctaatccctttgagtattgtgatattgtgaccaccacaacccacaggtctttacgaggtccaagaggtggtatgatattcttcaagaaagatactgtgcatggggttgatttggagcctgccattaccattgctggttttcctggtctacaagggg

SEQ ID NO: 25452 - DNA, 328 bp, Glycine max
  Clone ID: LIB3108-004-Q1-K1-G5
acgatccaactcaaaattgcaatgggagtggaagatacagatatgtgtatcatcaaggagccagatcatgttgtagggtatgcagatggcatttctcatgattcgggtcatgaagctggaagtgatcatcacaatattacagagtcgtatgaacaaatcaatgagactactgaacatcatagttcagaggatagtgcaaaggaatatgaggtgaaggaatgcacaacagaagtttctgttaaggtctctgatgtctctaatgttaaaaaatgtgaggataagttaacctcagatcctgagggtgtcgtcagggagaaaagttttaaat

SEQ ID NO: 25453 - DNA, 245 bp, Glycine max
  Clone ID: LIB3108-004-Q1-K1-G6
attttattccctccattggccgtagtagcagcgttgtgtggcggtgacaaccatggccggctcatgcgcaagaccttgaccaactcctcgatagtgctttggatgattttcagtccttcaacctcaatcctccccctccaagtggggaagcaagtgcgaacaagaagaaggagagtccttctttggcgtcgggggtgcaaggattgggcatgggtttacccgatttgagaacgaagaaaaagggg

SEQ ID NO: 25454 - DNA, 320 bp, Glycine max
  Clone ID: LIB3108-004-Q1-K1-G7
acgcccacgcgtccgggacaagcaccctccatgcgagatttgttcatgcggttgaacttcttgggggccatgaaagagctactccaaaatcagttcttgagctcatggatgtgaaggatctaacactagctcatgtgaagagccatttgcagatgtatcgaactgttaagaccactgacaagcctgcggcatcttcaggccattcagatgggtctggagaagatgatttatctccgatgggtagcacccgccatccgtggtggtctccgacaatttcccaccacagagggcggccggaatgggccggacaacaggacatg

SEQ ID NO: 25455 - DNA, 405 bp, Glycine max
  Clone ID: LIB3108-004-Q1-K1-G8
aaagaaagaggatttacatgtggtgaaacccacaacatctgtggatgaagctttggagatgcttgttgaaaacaggataactggttttcccgtgattgatgataactggaaactggttggtgttgtttcagattatgatttgttagcactggactctatatcaggtcacgggctaaaggataacaacatgtttccagaagttgacagtacttggaaaactttcaatgaggttcaaaagctgctaagtaagaccaacggaaagttgattggtgaattgatgaccactgcccctatggtcgttcgtgagaccaccaatctcgaggatgctgcgaagttgttgctagaaaccaaatttcgacgcctaccagttgtagatgctgagggtagactggttgggattatcac

SEQ ID NO: 25456 - DNA, 272 bp, Glycine max
  Clone ID: LIB3108-004-Q1-K1-H1
acgcccacgcgtccgcccacgcgtccggtgtaccttgagcacaacaggtcacctggatactatggtggacgctactggaccatgtggaagctgcctatgtttggctgcactgatgcttctcaagtgttgaaagagcttcaagaggctaagactgcataccccaatggcttcattcgtatcattggatttgacaacgttcgccaagtgcactgcattagcttcatatcctacaaaaccccaggcttctaagacatttaaaaatttgcaaagca

SEQ ID NO: 25457 - DNA, 349 bp, Glycine max
  Clone ID: LIB3108-004-Q1-K1-H10
acgcccacgcgtccgatggccacctctgctattcagcaatcagcattcgcaggtcaaactgctgtgaagcggctcaatgagttggtccgcaagaccggtggcgccggcaaaggtcgcaccaacatgcgccgtaccgtcaagagtgctcctcagagcatttggtatggccctgatcgtcccaagtacctgggtccattctcagagcagattccgtcatacctgaccggagaattccccggtgactacggatgggacactgctggactatcaactgacccggaaaccttcgccaggaaccgggagctggaagtgattcacaacagatgggccatgcttggtgcacttggct

SEQ ID NO: 25458 - DNA, 456 bp, Glycine max
  Clone ID: LIB3108-004-Q1-K1-H11
ggaaggaaaacccaaatcgaaaatggcagtgatggagaggttgaagatgttcgtcgttcaggagccagttgttgccgcttcctgtctcatcgctggcttcggtctttttcttccagcttttgtgaggcccatgttggattcatatcaggcaaccaagcaacctccccagcctgctttaagtgacgtggttgcaggaatgactggtaaaaagtaaaggtgatttacttgacagatgcaagggcaaatttgctaagtttcttgtttgaacttattttaagtctcaaatgtgagagaaataagagtactgaatattggatttaacttccctgtctgacgatctctatctgttccggaatcattcagtggtttcatttcatattaatttcggctgagttgggttgaaatatcagtttttctgccgcttgatttattcggcctgtactagcagatacgatt

SEQ ID NO: 25459 - DNA, 448 bp, Glycine max
  Clone ID: LIB3108-004-Q1-K1-H12
cggagagtttgcagctgcatcatcgatcatcgtcacctcatggacggacacgattcacaagacccgaagcagagccctgctgacatgactgcctttgtgcaaaatcttctccagcagatgcaaaataggttccagacaatgtccgactccattgttacaaagattgatgatatgggaagtcgcataaatgagttggaacaaagcatcaatgacctaagagcagagatgggagtggagtcctctccatcacctgcgacccctgctaagccaacagaggaaatcaccaaagaagagggttcagcttaagtggcgtgttctgatatcagttgctcggtattcatgtattcatgtattgtattgcacaaggattgatgttatgcatctacttttgtctgctgtagtggttcagaaaacagatgtgctgtatagctatgagtgcatctcgata

SEQ ID NO: 25460 - DNA, 327 bp, Glycine max
  Clone ID: LIB3108-004-Q1-K1-H2
cgagataactagaaacagtgtgatgaaaatgaaggtccttgttttcttcgttgctacaggtttggtagcatggcaatgccatgcgtacgatatgttccctctccgaatgaacactggctatggtgcccgtactccggaggtgaaatgcgcaagttggaggcttgctgtggaagcacacaacatctttggctttgagaccattcctgaagagtgcgttgaagcaacaaaggaatacatccatggcgaacaatatagatcagactccaaaacagttaaccaacaagcttacttttatgccagagacctcgaagttcattccaaggacac

SEQ ID NO: 25461 - DNA, 356 bp, Glycine max
  Clone ID: LIB3108-004-Q1-K1-H4
gcgtcgagaatgttcatttgaattttgagctttatagtgtcaataagataagggggtgagtacattggaggagaatgggcaaaaaatgatggatacgaacatcaagaaagctaaaaatcttgcagtttcaatggcaacgaaagcggcctcactagcaagagaattgaagtccattaaatcagatctctgttttatgcaagaaaggtgtggtttacttgaagaggagaacaggagactgcgtgatggatttgcaaaaggagttagacctgaagaagatgatctggtgaggcttcagctggaagcacttcttgctgagaagtccagactggccaatgaaaatgcaaatcttgtcagag

SEQ ID NO: 25462 - DNA, 291 bp, Glycine max
  Clone ID: LIB3108-004-Q1-K1-H5
gaggatttacatgtggtgaaacttacaacatctgtggatgaagctttggagaggcttgtttaaaacaggataactggttttcccgtgattgatgataactggaaactggttggtgttgtttcagattatgatttgttagcactggactctatatcaggtcacgggctaaaggataacaacatgtttccagaagttgacagtacttggaaaactttcaatgaggttcaaaagctgctaagtaagaccaacggaaagttgattggtgaattgatgaccactgcccctatggtc

SEQ ID NO: 25463 - DNA, 403 bp, Glycine max
  Clone ID: LIB3108-004-Q1-K1-H6
cccacgcgtccgggaatgaaaaggaaatttgaccctaatgatgtctctgaagagaatgcggttgactcacaaaaggaggagaatgggaaaaaaatgatggatacgaacatcaagaaagctaaaaatcttgcagtttcaatggcaacgaaagcggcctcactagcaagagaattgaagtccattaaatcagatctctgttttatgcaagaaaggtgtggtttacttgaagaggagaacaggagactgcgtgatggatttgcaaaaggagttagacctgaagaagatgatctggtgaggcttcagctggaagcacttcttgctgagaagtccagactggccaatgaaaatgcaaatcttgtcagagaaaatcaatgtcttcatcagcttgtggagtaccaccaac

SEQ ID NO: 25464 - DNA, 51 bp, Glycine max
  Clone ID: LIB3108-004-Q1-K1-H7
gcaaaaatgagcggagcgaaggggaagaagatgggagctagctttgtgatc

SEQ ID NO: 25465 - DNA, 385 bp, Glycine max
  Clone ID: LIB3108-004-Q1-K1-H8
cccacgcgtccgggaatgaaaaggaaatttgaccctaatgatgtctctgaagagaatgcggttgactcacaaaaggaggagaatgggaaaaaaatgatggatacgaacatcaagaaagctaaaaatcttgcagtttcaatggcaacgaaagcggcctcactagcaagagaattgaagtccattaaatcagatctctgttttatgcaagaaaggtgtggtttacttgaagaggagaacaggagactgcgtgatggatttgcaaaaggagttagacctgaagaagatgatctggtgaggcttcagctggaagcacttcttgctgagaagtccagactgggcaatgaaaatgcaaatctggtcagagaaaatcaatgtcttcatcagc

SEQ ID NO: 25466 - DNA, 453 bp, Glycine max
  Clone ID: LIB3108-004-Q1-K1-H9
acgctctcactcacaaacgcacactgaattcaaaaacatcgaaagagagaggcatggccgatcggaccttcatcatgatcaagccagatggcgttcaaagaggccttattggcgagattattagcagatttgagaggaagggtttttacttgaaagggttgaaactcgttactgtggaccgtccttttgctgagaagcactatgctgatttgtctgcaaagcctttctttagtggtttggtggattacattgtctctggccctgttgttgccatgatctgggagggtaagaatgttgttacaactggccgaaagattatcggagccacaaacccagctcaatctgagcctggaactattcgtggtgactttgctattgacattggaaggaatgttatccatggaagtgattcagttgagagtgctaacaaggaaattgcattgtggttccctg

SEQ ID NO: 25467 - DNA, 411 bp, Glycine max
  Clone ID: LIB3108-005-Q1-K1-A1
cccacgcgtccgcccacgcgtccggaacaaacatgactggaagtaatgaagtcaacctcagggaatctaagagtgttgttccactcaacacttgggtgcttatctccaatttcaagctggcttacaatctactaaggcgtgccgacggaacgttcaatcgagagttggcggaattcctggaccgcaaggtccctgctaatgcaattcctgttgatggtgtattttcttttgatcatgttgaacgaagcaccgggctcttcaatcgggtgtatcaactagctcctgaaaacatggggcggtttatagagctggagaagcccttgagcaccacagagatagttcctgttataattttcttccatggtggaagcttctctcattcatctgctaacagtgctatctatgacacct

SEQ ID NO: 25468 - DNA, 212 bp, Glycine max
  Clone ID: LIB3108-005-Q1-K1-A10
gcgatgcgctcctgtcctcaactggccgattcgtgcctccggtgctgttacttcgaagagcttagagtgctcaaagcacagcctacgctcatgatacattagcatgggataacaccacaggattctgatactatcgtgttggcctacgtcatcgccgtcatgatcaacagggacagtcacaggcatacgtatctcatagtcagaggtgaaat

SEQ ID NO: 25469 - DNA, 335 bp, Glycine max
  Clone ID: LIB3108-005-Q1-K1-A11
cgacccagcgcgtccgcccacgcgttcgccgcactgctaatggggatcgatcttacaaatggatgacttgctatgtgttccgtgcttgcatactagtttcaagcttatgtcactggacaaggtcctgctgagaaccttgcagaacatctcagtgacccttatggcaacaacttgctcactgtcatttctggatctgctgagagagctcctactctctaaatcattcatcttcatgttattctccaatcttacttaatgtactatacatatcactgagatcttaatgcattcggctgtagtccttggaactcagatgttggaatccaagctgacat

SEQ ID NO: 25470 - DNA, 433 bp, Glycine max
  Clone ID: LIB3108-005-Q1-K1-A12
gagtttctctgccaccaaacacctccgtcaaatacaggcgcggccgtccagatcttgcatgaagagggcgtcaactaaaacggtggagcacattgtcctgttcaaggtgaaggaggaaacggagccgtcaaaggtgagtgacatggtgaacggactcggctctctggtgtcgctggacccggttctccacctcagcgtgggcccactcctccgcaaccgatcctccgccctaaccttctctcacatgctccacagccgctacaagtccaaggaggatctcgaagcgtactcagcacaccctagccacgtcagcgtcgtcaagggatacgtgctccccatcatcgacgacatcatgtccgtcgattgggtcgccgatgacctcgtcaccgtcagtctcgttccgccggcggtgtccgcgggtcgagtcagcttc

SEQ ID NO: 25471 - DNA, 83 bp, Glycine max
  Clone ID: LIB3108-005-Q1-K1-A2
cggacgcgtgggcggacgcgtggggatttatctgtgattaattctgtttttagtctttcgcgcctatctgatgacaggaagag

SEQ ID NO: 25472 - DNA, 413 bp, Glycine max
  unsure at all n locations
  Clone ID: LIB3108-005-Q1-K1-A3
accacgcgtccggtataaggccaaagctcccccttctggctcaagcttcatccaatgccaaaatgttgtggatgaagcactccatgttaatgcaacatgctcttacaaggattgcactttctgagggatatggaatggtggtggcggagctggagaaaacaacttttttattgcctaatttttctttgaaattgccaatgaggctggttttgttgatccaaacgcccgcaatgccaaagatcgtcctgtggattttgagaatgcatcaaaggttgtctgtaacacagaattaaaggatctcaaatccattttccctcgtgttaaagatggagacgttccttatatatgcttagatcttgtatacgaatatacattgctcgttgatggatttggcatacatccgcancaagaga

SEQ ID NO: 25473 - DNA, 453 bp, Glycine max
  Clone ID: LIB3108-005-Q1-K1-A4
cccacgcgtccgcccacgcgtccgggggctggttttgtgcccaggaatttggatcaagatgggcttggtgaagttatagcgatgtcaagtgatgaagcacttgaaactgcaaagcaattagcactccaggaaggcttgctggtgggaatttcttcaggagctgcagctgcagctgctttgaaggttggaaagaggcctgagaatgcaggaaagcttattggggttgtcttcccaagctttggtgaaagatatttgtcaactattcttttccagtcaatacgggaagaatgcgagaaaatgcaacctgagccatgaattgactttgcttgttaatgtttcatactcattttccacaagtatctgtatggaatgacagtgtcagatgtccatgttatgcccgcgtttctcatttttgacactcaagaaattagataactgtgtacaggtcattga

SEQ ID NO: 25474 - DNA, 445 bp, Glycine max
  unsure at all n locations
  Clone ID: LIB3108-005-Q1-K1-A5
atttgctaggagtagagtccaacaaatcattggtgctacaaataatttgcatcggcgttcagggaatgttttaccgccaccagtagataatcctaaacatatgtcatcagccaccaaactagtgtcccaaagtcctttagataaatgtgagaaccagattaaaggatttgcttcaggtattggggctgtcacttcaactgtgcttcctgctgtgacctcttgggttaggtgtgtgtctggcaatcttccacatgatacaagttcatcatgttctggtaatctggcaaatagaaagattgaggcatctaatgatccacaagcccttgtgtccggagttgcttccactgaaaggtctattaatataagaaaatcangggaagctgaaaatagctctgatgtgtgttccaatggtgccttcgtaccttcagagacgaacaaccataat

SEQ ID NO: 25475 - DNA, 457 bp, Glycine max
  Clone ID: LIB3108-005-Q1-K1-A6
gttttgacttggcaggaaaagagctcttcctccactcacatatttcatagttggccaattgggtattaatggctggttaagttgcagtgttcaaatgctcaggttttttggaataggttacggctctcccactttggccactgcaatgtctgatttaatccctgcttttaccttcatacttgccatcgtcttcaggatggaaaaattggattggaaaactaacagtactcgggccaagtccattggcacattggtatcaatcgctggagccttaataattactctgtacaaaggccaggcagtcataaacaatcatgcatcaaataaattgttccccaaaaaacatgtttcatctgagcaatttgactgggtaataggggcagtgttgcttgcgggtcatagctttgttctctcattggtattcatagttcagacatggataatcagaaattaccct

SEQ ID NO: 25476 - DNA, 420 bp, Glycine max
  Clone ID: LIB3108-005-Q1-K1-A7
cttgtggcttgtggcaagtctcctcctcctggttacacctgctccctctaaaccagtgaagggattgaggaaaatatggtcaaaatcgacatgagaggatgtcgagccacactatctctcttctgtcctgattggaactgctggtgtttgttttgctattatttgaaaaaccatttgtttttaattgagattgttgcatgtatgttttaatcctaggcaagtagcaacaaagatgcttctctgtgacatgttcaattattaatttatctggaaaaaaaaaaaaaaaaaaaaaaaaaaaaaaaaaaaaaaaaaaaaaaaaaaaaaaaaaaacccccccaagggaaaaaagaaaccccaccctaaaaagcccataaaaaccggggggggaaaggaaaaaaaaaaaaaagggggggccccttt

SEQ ID NO: 25477 - DNA, 158 bp, Glycine max
  Clone ID: LIB3108-005-Q1-K1-A8
gcttgctcctatctatctatatgtaataagatgcgttcaaataggggcactagcttcactgtatgttgtttcagctgtgtgtcaacaagtcatgtaagagacttcactatgttgttttctctttcgtggctttaataaattatgcgcccttgttccat

SEQ ID NO: 25478 - DNA, 415 bp, Glycine max
  Clone ID: LIB3108-005-Q1-K1-A9
ctcactcactaagctaaacaatttcatcaagcctgccatggcttcctcgtgtgcttcctgtgccattgcagctgttgccatctccacaccaagttcccagaagaatggatcactcttgggaagcacaaaagcttcttttcttagtgggaggaaactgaaggtgaacagttttacagcaccagttggagcacgatccagcactacagtgtgtgcagttgctgagcctgataggcctctgtggttcccaggcagcacccctcctccgtggctagatggcagtttgccaggagatttttggctttgatcccctaggtcttggatctgatcctgagagcctgagatggaatgtccaagcagagcttgtgcactgcagatgggccatgttgggagctgctggcattttcattccagaatt

SEQ ID NO: 25479 - DNA, 372 bp, Glycine max
  Clone ID: LIB3108-005-Q1-K1-B10
ataaaagtgaagatgctagtactagatggatatgataacaagctgataatttaatggaactacgtgcttattttttggtctctattagtttgccaattcttgtgtgtaggttaatttaaaaaaatgatagtatctacatttctctctttattatatagttttgcattgatgttatcagccccagcttgtgattcatattcatgtgtatactctgattcgttattattataataaaaatatttattacataggacgaggaatacatgaaggagaccgaagaagtgatcaacaaagtgaggacaacaatcgtgatggacaagaatgaccgcaacgtttaaaccagcgaggcttacttgagagaaatctaaaact

SEQ ID NO: 25480 - DNA, 395 bp, Glycine max
  Clone ID: LIB3108-005-Q1-K1-B11
ataaaacttaacatgctattactacacggttatgtttacaatcttataattcaatgcaaggacgggctcattcagatcactgtattaactcacacacatcaagcccaaactcaccttcaacaaaatcatcacttttacaccactcacatcatcatataccttcgcattcacccaatctatcccaccttaatacttcataatcatcaccatactctcattccttattattaaaatccctacacttactacctcttactaataatacatgaatgataccgaagaagtcatcaacaaatttaagacaacaatcgtgatggacaataattaccccaacttttcaacctccaaatcttaatttcacagaaacctcaaactcttgtgtttctaatttcatt

SEQ ID NO: 25481 - DNA, 408 bp, Glycine max
  Clone ID: LIB3108-005-Q1-K1-B2
cccacgcgtccgatgttattttgctcaaaaaaaaaaaaaaaaaaaaaaaaaaaaaaaaaaaagaaaaaaaaaaaaaaaaaaaaaaaaaaaaaaaaaaaaaaaaaaaaaaaaaaaaaaaaaaaaaaaaaaaaaaaaaaaaaaaaaaaaaaaaaaaaaaagggggggccgttttaaaggatcaaagtttacttccgggggcttgcaacgtaatattttttttatgggggccccaaaattaaattcatgggccggggtttaaaaacgtgggaatgggaaaaaccggggggttaccaaattaaatggctttgaaaaaaatccccttttagccagttggggaaataacaaaaaggcccgaaccaatggccttttcaaaaagttggccaccttaaatggcaaatggaacccccc

SEQ ID NO: 25482 - DNA, 468 bp, Glycine max
  Clone ID: LIB3108-005-Q1-K1-B3
cccacgcgtccgaaaaaaaaaaaaaaaaaaaaaaaaaattttaaaaaaaaaaaaaaaaaaaggggaaaaaggaaaaaaaaaaaagggaaaaaaaaaaaaaaaaaaaaaaaaaaaaaaaaaaaaaaaaaaaaaaaaaaaaaaaaaaaaaaaaaggggggggccgttttaaagaatcaaattttttttccgcgggtttgaaaaaaataatttttttttttgggccacaaaatttaatttaattgcccgggtttttaaaacgtggggattggaaaaaccgggggtttcccaaattaaatggttttaaaaaaaatccctttttcccaagttgggttaataaaaaaaaggcccgaaccgttggcttttccaaaaatttgcccatcttaattggaaattggaacccccttttttccgccctttaaagccggggggtttgggggtttaccccaaggggacccttttatttttcaa

SEQ ID NO: 25483 - DNA, 217 bp, Glycine max
  unsure at all n locations
  Clone ID: LIB3108-005-Q1-K1-B7
caagaactaaacacccttctgtttctgtattcaaagtctcaaacttttccacctgaaccaagaaaaaacaaactttgcagcaaggtttaaaaaaaaaaaaaaaaaaaaaaaaaaaaaaaaaaaaacaaacaaaaaataaacnggcgagcgtcgtaaaaaaaaaaaaaatatcggcctctactttttaaacaactaaactatcattttatatctaacc

SEQ ID NO: 25484 - DNA, 416 bp, Glycine max
  Clone ID: LIB3108-005-Q1-K1-B9
cccacgcgtccgctttctttccctcacgtctctctctcacatcatcatggcctccccaacgctaatgacccccagatcagtgaaatcactcacacccatcaagcccaaacccaccaccaccatcgccgccactctcacaccacccacaacaacctccaccgccgccgccacccaccctcgccgccgcgaattcttgtccatcatcaccgccaccacatggctggtccctctgagcccggcactggcttcctcggacgaggaatacatgaaggagaccgaggaagtgatcaacaaagtgaggacaacaatcgtgatggacaagaatgaccccaacgtggcaaccgcggtggcggagttgagagatacctcgaactcgtgggtggcaaagtacaggaggggaaaaaagcgctctggga

SEQ ID NO: 25485 - DNA, 331 bp, Glycine max
  Clone ID: LIB3108-005-Q1-K1-C1
caagttaataataagggaggaaagggtgcattactatctagttcaccacactagcaatacgtgtggactcattgctaaatggccaccaaattttgcatttcatccgagggagaacaaaatactcttctcactgaaacacccggttctcgtttctctagagtccatatcctgaattgtccatggggtttgcagcagatatggcacttaattactttatctcaactatcacacaaactgacatttataaggtaactggctactcatgctggatgcgttatgcgatatttgaccacctgggctggatcaatgatcccatcatacaataaagctt

SEQ ID NO: 25486 - DNA, 311 bp, Glycine max
  unsure at all n locations
  Clone ID: LIB3108-005-Q1-K1-C10
acgcgttgagtctctttgtaatccctttcatgtcatgcctctgtggtgctttcaattcatcgcgttgataacctntggcaacgacttgcaacggtgtgggtggcgaaggaagattggcctccctcgactttgattacccatcctaactccagctaggcccttgtgtggcctgtgtgacatatgtgagcactcttatcaaccaggactcttaatcagtaaccttctctgtcagtactcaagttgccatggagtccacttgaagctttgtgcctcaacttgagaacctacacgtagtacatgttctgttgcca

SEQ ID NO: 25487 - DNA, 251 bp, Glycine max
  Clone ID: LIB3108-005-Q1-K1-C11
acgcccacgcgtccgatcgacttggtcaaaaaataaaataaaaaaaaaaaaaaaaaaaaaaaaagaaaggaaaaaaaagaaaaaaaggaaaaaaaaaaaaaaaaaaaataaaaaaaaaaaaaaaaaaaaaaaaaaaaaaaataaaaaaaaaaaaataaaaaataaattaaataaaaataaataaaaaaaaaaaatattaaacaaaaaaaaaaaaaaaaatatcacttttttatataaattaaatttatttt

SEQ ID NO: 25488 - DNA, 436 bp, Glycine max
  unsure at all n locations
  Clone ID: LIB3108-005-Q1-K1-C2
cccacgcgtccgaattgatctgtgtcaagtcacttggtttataattttttatgctcatttgtaaattgaaagtaccctgtactaggatatgttgcttgtgtctgattggaatttggaaaaggtgtaaaatataacttctttcttgatgctgtttgattgatacattgccataaaaattgagaaaaagttgaatttggtttatcaggtagaaaataatgtgatactgctgcttctgtgttatataatgagctaacaataaacatacatgcttttttttatttgntctttttctcaattttcttttctcccatcatcgtaattatctgactccatttgatccacctacaccaccgttatctctgacccacacttcatctgcttgaaaacccttgctattcgtccttctgcatactaacactcacatctgacaatgttt

SEQ ID NO: 25489 - DNA, 230 bp, Glycine max
  Clone ID: LIB3108-005-Q1-K1-C3
aaaaattattttttccatcaaacccaaccaaacctttcccccccttttttctccaaatccccatcttcctttacttcttaactcttaccaaaacccacaattaaccttttttcacactctttcataaatcaccctttccttaacacaaactccaactttaaagtaattcttctccaccccaaaggctcctgcccttaccaatatctcataaaacttttctttatacccca

SEQ ID NO: 25490 - DNA, 468 bp, Glycine max
  Clone ID: LIB3108-005-Q1-K1-C4
gttaccatttgctcccagtacagagcttaaccgagcttcacaaagatgaatcgggaaaaggggatgaagatggccggttcggttagaactgggggaaagggtaccatgagaagaaagaagaaggctgtccacaagacaacaaccacagatgacaaaaggcttcagagcaccctgaagagaataggggtgaatgccatcccggctattgaggaggtcaatatctttaaggatgacgtagttatccagtttctaaatcccaaagttcaagcatccattgctgctaatacttgggttgtcagtggttctccacaaacaaagaagttgcaagatatactccctagcattatccaccaattaggaccagataacttagaaaacctgaagaagctagccgagcaattccagaagcaggctcctgaatgagccgccggttcaaccacagctcaagaggagaatgatgatgacgat

SEQ ID NO: 25491 - DNA, 457 bp, Glycine max
  Clone ID: LIB3108-005-Q1-K1-C5
cccacgcgtccgggcactgactcacacccacaatagtcgggggcagcttcaaagtacctccgcattgtctcctactcttactgttctcttctcttctcatcatttttattttttccaatcaaaccaaacaaaacataagcaccgctcttttctctccgaaatccccatctcccttcacttctgagctctggacgagatcccagatctcaccatctttcacgcactcttccatcagattcaccctttcgtttaacgcaaactcataacttgaaggttaatggctgctccaccggcaagggctcgtgccgattacgattatctcataaagcttctcttgatcggtgacagcggtgttgggaaaagttgcctccttctgcgtttctccgatggttctttcaccactagtttcatcacaactataggcattgattttaagataagaaccattgagcttgat

SEQ ID NO: 25492 - DNA, 450 bp, Glycine max
  Clone ID: LIB3108-005-Q1-K1-C7
cccacgcgtccgcccacgcgtccggatccggtacccataacagtatcatgcatataaccatgctttgaaattactgtgaggggggactacgcaatatttttggatcttcctttgatttttaggccaaaggtattccaggtgtttctgttcttatattctcgctaaagcttatattccaggttggaagcttcttttttgtgtgggggggagggttgtgtcaaggatggtatgatgatatagcatctattgactttgcacatcaattgatggctattaatgaatttggcattatggattgaaatccattctcaggaaatggtgaagaataagacactgatattctcatttgattcaaccaagaaagctcgttttggtgtgctacctcggtatgctaaggatgaaaagcttattagatggtttgagttacccaactgcttcatattccacaat

SEQ ID NO: 25493 - DNA, 247 bp, Glycine max
  unsure at all n locations
  Clone ID: LIB3108-005-Q1-K1-C8
acgcccacgcgttcacccacgcgtacgccaatttcttaagacctcgaaacgcanatgggacttgggtaaactcacatggactaccatgacccacccatccccccattctacgacatcgccaaactccgcaagtggtcctttttccgagccctcatcggcaagaacaacgacaccatcctcttactctacactaccatccttacctgaagttgctacaaccaccatacagccaccgacgcctatccct

SEQ ID NO: 25494 - DNA, 379 bp, Glycine max
  Clone ID: LIB3108-005-Q1-K1-C9
cccactcgtccggtcttactggcaagcaattcaacatgatcagtgttcctgattcatggtgtagcgtgataacatatttaaagagaaatgtcaaaagcctttatatgttgatgaatccagaaaatcttggtcgttatgttgaaatgtatagatgcatatgtaataaaggcttcaaataccaaatttcttaaacagatgattgttgaacctatcccctataatggggttacaatcaatcattagtggttgtatctgctataaattcaactagactccttcactgcatataatccctcatgattctgatatgaattattttaccttgatgatattgtttaaatataaactttatttgttcctaaatttaaataaatttttt

SEQ ID NO: 25495 - DNA, 452 bp, Glycine max
  Clone ID: LIB3108-005-Q1-K1-D1
caaatatggaatctgaagcactgatatggggtgacaaactcatactgaagggattgtcattgcatggtgttcatggagcactaccggaagaaaggaagctaggccagaagttcgtggtagatgttgatgcatggatggatctgaaagcagctggcaaatctgatcacttatcagatacaattagttacacagatatatatgatatagctaaggaaattcttgaagggtcacctcaaaaccttctggagtcagtggcacaaaaaatggcagggactactctgacaaattataagcaaatatctgctgttcgagtgaaggttgaaaagcctcatgtggcagttcaaggtccacttgattacttacgcgtggagatacttagacgcagaagcgatttgtcagaatagaaatttcatacgtttggtctctctggtttttggtgctctcattctgat

SEQ ID NO: 25496 - DNA, 452 bp, Glycine max
  Clone ID: LIB3108-005-Q1-K1-D10
cttccccatggaaatcttaagccaacagatttagtgttagcaggccctgatttcaatgctggtcggactgactacggtctgcaccggctgatgacgccggctggaattgcagagcagatactaaatctcggagcccttggataccgtgctccagaacttgctactgcatccaaaccagttccatcctttaaggctgatgtctatgcacttggtgtgatcctaatggaattgttaacaagaaaaagtgcaggtgatatcatttcagggcaatcaggtgctgatgatcttacagattgggttaggctgtgcgagcgagaaggaagggtaatggactgtattgacagagacattgcaggtggggaagaatcctccaaagagatggatgaactgcttgcaatatctctcaggtgtattcttcctgtaaatgagaggcctaacattagacaagtttt

SEQ ID NO: 25497 - DNA, 390 bp, Glycine max
  Clone ID: LIB3108-005-Q1-K1-D11
aaactttagtactagagtttgcagactgagtggcttggtgagttagtgagcgaaaactatagatagcattaccatgttggtgggataactgaagtgagtgatgatttcaacttcaagcatggctttgctttctttactacccaaaacggcaccgcatgccctttccctcacaaacccttcctcttccactcccctcatcttacctttcagtttccaatgtttgcctcaccctcttccttctcctctctcttccctcaaagctactttttccgacggtggctacaatttgcgcggcaagcccttggttcctcaggcctttgaagaagaagacgacgactactacaacaaatgggttgactggtaggacctgattttggaagacaccgttcc

SEQ ID NO: 25498 - DNA, 433 bp, Glycine max
  Clone ID: LIB3108-005-Q1-K1-D12
cttcaagaaagacactggtgacacaagggagactcctgccattgatgtatgccaggggctactaggtgataaggccaacctgagcatatacgacccgcaagtaaccgaggaccaaatccagagggatctatccatgaacaagtttgattgggatcatcctatccacttgcagcccacaagtcctactactgtgaagaaggtcagtgttgtttgggatgcctatgaagcaacaaaggatgcgcatggcctttgcattctaaccgagtgggatgagttcaagactcttgattaccagaagatatttgacaacatgcaaaaaccagcatttgtttttgatggcagaaacattgtggatgctgataagttgcgtgagattggcttcatagtttactcaattggtaagccactggacccatggctcaaagacatgcct

SEQ ID NO: 25499 - DNA, 424 bp, Glycine max
  Clone ID: LIB3108-005-Q1-K1-D2
cttccaacgaccacaaatcactgcaattcaaggtttgaacttcccatggcgagcgctgttgatgcttccggaaacccgatcccaacttctgcggtgttgatggcgtcgtcgaagcacattgggataaggtgccactccgagaatttggagtttctgaagtgcaagaagaaggatcagaaccctgaaaagtgcctcgataagggtcgtgatgttacccgttgtgtccttggccttctgaaggatctgcaccaaaagtgcacaaaggagatggatgaatatgttggctgcatgtactaccatacaaatgaatttgacttgtgtcgcaaagagcagcaagcatttgagaaaaagtgctctttggaatgaaattatgcactgcttgtgtcgaaaataatatcacaagcaatttggagtgagcaaatga

SEQ ID NO: 25500 - DNA, 355 bp, Glycine max
  Clone ID: LIB3108-005-Q1-K1-D3
aaagcattgaattcaaaaacttaagttcattccttgtgttttgctttcttcctcaaaaccaggcatgtcgaacacatgcggcaactgcgactgcgctgacaagactagctgcaccaagggaaacagctatggtgttattgtagagactgagaagagttacatcgagactgttgtcatggatgttccagcagctgagcatgatgggaagtgcaagtgtggcactaactgcacttgcacggactgcacctgtggccattaaagaatatgtatgaaaatgtaattggcatgtgtttggcaatacaaatatccaaataatggaatcttcggatgaataaatgtgtgtgctggtatcctg

SEQ ID NO: 25501 - DNA, 394 bp, Glycine max
  Clone ID: LIB3108-005-Q1-K1-D4
cccacgcgtccgcggacgcgtgggaagccacttgaggtttgatttgcatacttttggtgttggaagagctattcgatctgccaaaatgaagggacgtgtaagatggaatgaggataatattggagaaattgaagcaaacaagcccgtgaggcaaaaaatcgctgaagtccctttgccaccaccaaaagagacagaaaggcagctctctaaaaaggaaaggaagaagaaggaacttgcagagcttgaggctcttctagctgattttggagtggcaccaaaacaaagtaaagatggtcaagatgagtctcaaggtgctcaggataagacaggtgttgagactgatggagatggagaaaagaaagaaaatgtccctgcagaatccaaaacttccaag

SEQ ID NO: 25502 - DNA, 251 bp, Glycine max
  Clone ID: LIB3108-005-Q1-K1-D5
aaaaaaaaaaaaaaaattagggttttaaaaaaaaaaaaaaaaaggggggccttttgaaaaatcaaacttgcctaccccttccttccaaaaaataaattttttattttggcacccaaaattaaattaatgtggcccgctttacaacaccgggaatgggaaaaacctggggttacccaaaataaaaaccttttagaaaaaacccctttttccaaatggggtaataaaaaaaaaaggcccacccacatcccttt

SEQ ID NO: 25503 - DNA, 457 bp, Glycine max
  Clone ID: LIB3108-005-Q1-K1-D6
cccacgcgtccggaaaatggtttgtttttcatggagacctctgccaaaactgcgtccaacgttaatgatatattctatgaaatagccaagaggttaccaagggctcagccagctcagaacccagctgggatggtacttgttgatagacccgccgaaggaactagggctgcatcatgttgttcataagtatttgaactgtatttgcactccccaaccctttttaattaatcatgttttctgtggtttgtatgtactacacactttgatatcactgttatgtggagctccaactgcaatttacaaaacacaacttgatctggtgcaaaatatatatcctttggacgtgtagtttgtgtcccatgatttgtttcattgtttgggtatacgaggtgaaaaagcattaatgttcagcttcattcgtatgcttctaaacaagattagtgattctttgcaaaaa

SEQ ID NO: 25504 - DNA, 449 bp, Glycine max
  Clone ID: LIB3108-005-Q1-K1-D7
ctcatgactccaaccaacttacccaccaactaatctttttaattccaaaccaaaccatgcggctttttttcacttgacaactttcatttcagtttgagttctccaatggcagttcctgcaccattctctctttcttctgatccctttgcttccaaatctgccacatcaacgatccttggtcctgccgtgctgaaaatagggaactttgagcaaactcatttcggattgttcacggcattaaggagaaatcaaggtttcactttaaaggcctcaatggggcctgcgggatttacagagaaacttaacaacaacaggctaaagactttagctgacgctgaagatgggtgtgatatatttaatgacctgaaagataggtttttaagttttaaaaagaataaatacatgaaaaatattgaacagtttgaaaatcttgcaaaggttcaaacacc

SEQ ID NO: 25505 - DNA, 409 bp, Glycine max
  Clone ID: LIB3108-005-Q1-K1-D8
tgcttctaaggctagaggccttcacagtcatttttgtcgctgctataaccattgcgatcgggtaacaaaccaagggtgcaaccattcatctttcaaaatccttaccacctctacatgttcttctcactgctaatggacatcaaatgcttatcatacgtttacattactgttgaccacacgcaacttcactcacgcttgcaatccctcacactacttctagccctcgtgaatagacagataatcaaactcttgtggacatctaactctgctctaaacacattcatcaaggctttactcttttcctacaacggatatgccactgcacactgattcctttgctactaaactaattattatgcttaaaggaaacatgcttgctatattcatatgaaaatgtgacatcaaatat

SEQ ID NO: 25506 - DNA, 417 bp, Glycine max
  Clone ID: LIB3108-005-Q1-K1-D9
gagactagttctgtatttagattacatggtttaaatggcatcattcaccatgacagcttcgatctggggctgccgagctgtggccaaacggtcggcagtggctgcgcagaggagattactcgtagtgagtgctgccaaagctgaaggggaaaaggtcagttatgacaacaatgatagcaatggaaggaggaacttgatgttcgctgtggctgctgctgctgttttctctgttgctgggatggcagtggcagatgagcctaaaccaggaacctcagaagccaagaaaaagtatgccccggtttgtgtcaccaatcctacagctaggatttgtcgcaattgaggatctcctgtttcattttacctttgatgatcggaaatgtacgttggggatgtaataattgtttttgaattaatatg

SEQ ID NO: 25507 - DNA, 268 bp, Glycine max
  Clone ID: LIB3108-005-Q1-K1-E1
gccttttcatatataaatccttccaactactttataagttattgcaatgatatcaaaaaccaagcaaatcgggaaagttctgttgccgtcatacatggattcctatttaaattgtgcataaccgtatggataagcaatacactaactctttaattgcggatccaatttggatccttaagatgtatcggcactgaattttttaatataataatatcgatacatactgattctgaattaagcgacctctattgattcaaactctctatct

SEQ ID NO: 25508 - DNA, 429 bp, Glycine max
  Clone ID: LIB3108-005-Q1-K1-E11
ggagatggctctgggaagaggcagtgcagtggttctactactttgcttcttgctgcttcagtctgagatggctcgtgctgccggctacacagttggagattctgggggttggacctttaacactgttgcctggcccaaaggaaagctctttcgggctggtgacacacttgctttcaattatagccctgggactcacaatgtggtggccgtgaacaaggctggatatgatagctgcaagactccaagaggagccaaagtgtataagtcagggacggatcagatcagacttgccaagggacagaactacttcatctgcaattatgttggtcactgcgagtctgggatgaaaattgccatcaacgctgcctgagtttaataatatggttaacttcccatacatattgtattgtaatgcaaattgcacccttt

SEQ ID NO: 25509 - DNA, 412 bp, Glycine max
  Clone ID: LIB3108-005-Q1-K1-E2
cccatttttcacaccaccaacacaagatgtttctccacattgtgttcctccttttccttctggcatccacttcccatgccactgtccaagacttctgtgtggcagacctcaaaggtgcagacacccctgcaggctacccctgcaagccacctgctaatgtcacttcagatgactttgtgtacactggcttagctgaagctgcaaatgtcacaaacataatcaatgctgctgtgaccccagcttttgttgctcaattcccaggtctcaatggccttgaactatctgcagcaaggttggaccttggtcctagtggtgttatcccactccacactcatcccggtgccaatgaactactcattgtgcttcaaggtcacatccttgctggattcatatcttcaggtaacatagttta

SEQ ID NO: 25510 - DNA, 462 bp, Glycine max
  unsure at all n locations
  Clone ID: LIB3108-005-Q1-K1-E4
aacccaaccggaccggggctatcaaaggcagaggagagagtaacgaacgttgcttctaactggtcagaatcatgtcttggtgcaccattgagtccgatcccggtgtgtttacagaacttattcagcaaatgcaagtgaaaggagtacaggttgaggaactttattcattggatcttgactctctcaacagccttaggcctgtttatgggttgatttttcttttcaaatggcgtccaggagaaaaggatgaccgagtggttatcaaagatcccaaccctaacttgtttttttgctagtcaggtaattaataatgcttgtgcaacccaagcaatcttgtccattcttatgaattcaccagacattgacattggtccagagctgacgaaattgaaagaatntaccaagaatttccctcctgaactcaaaggtttggccatcaataacagtgaggccatacgtaca

SEQ ID NO: 25511 - DNA, 455 bp, Glycine max
  unsure at all n locations
  Clone ID: LIB3108-005-Q1-K1-E5
cccacgcgtccggtgctttctccactgcctaaaccgactctctctctctgcctgtgcaagcgggttacttggctgggtgtgagtgattgccccaatggccgcgtgtggctatatatctgctgccaacttcaatcatcttgttggcgccagaaacttatccaaattcagttcttcggatgccacaatttcgttatcatttggcgggagcgattcaatgggtcttagtttgcgacccgctccaattcgtgctcctaagaggaaccatttctctcccttgcgtgtcgtttgcgtcgattatcctcgaccggagctcgaaaacactgttaatttcgtcgaagctgcttacttgtcttccaccttccgtgcttctccgcgtccactaaaacccttgaacatcgttattgctggcgcangattggctggtttatcaactgcaaaatatttggctgatgctg

SEQ ID NO: 25512 - DNA, 455 bp, Glycine max
  Clone ID: LIB3108-005-Q1-K1-E6
gaaccctagccctagccctaacctaataccaaaatctcgttgtggtgctttcggcttttcggtcacatcaatggccgactctgtaatttccattcagtaccttaaagatttcgtccattctcaaatctacgacgatgagaagtgggccttcaatgcgaaattgctgcgtgctgctggattgtttgcaggatcaatattacttatgcgaaactatggtgaccttatggcaatttgaaagtagaacagcaaattgtctgccatgagttactattatctactttaacagtaatgcgatgtttaagcttcttttttttccttctttctatcagtaatttgaacatgaactgagttttttggtttgaagctttcggtgaacgatggcaatgctttgccgattgggttatgtttaatagtacattcacatactatggctacgatgtgtttgggatgaaata

SEQ ID NO: 25513 - DNA, 132 bp, Glycine max
  unsure at all n locations
  Clone ID: LIB3108-005-Q1-K1-E7
cccacgcgtccgcccacgcgtttttccacgcttccgcccacgcgtccacccacggatacgtgcacacgttcgaaggaaaaaagatcaataaacttgttattcgattctannacacaagcacaccaaggaaac

SEQ ID NO: 25514 - DNA, 235 bp, Glycine max
  Clone ID: LIB3108-005-Q1-K1-E8
cccacgcgtccgcccacgcgtccgaaatcacaaaggcaaacacaagggatatgggcataatggttgatggattagtgtacttcttaaagactaaggttcaatttaaacctgggatgcccttgtttgttgatctagtttttgtctgaagcaaccaatgagaaagctatagcaatgtttaaagagaatctaatactgtcttttaaccaaaaaacaaataaataaaagaggatacaat

SEQ ID NO: 25515 - DNA, 322 bp, Glycine max
  Clone ID: LIB3108-005-Q1-K1-E9
aaaatgtggcttgtgcatctctcaaccccttttctgaacggacatggtcattccaccaccgttctgtccaagcacagttcgggggtgactcagacccactgggccccaccgagtttcctgcctcaaatcaatgcgatgaagacaatgcatgggagagtggtgtgctccaccagcgacaagacggtggcagtggacgtggtgcggctggcccctcacccaaagtacaagatgctcgtgaggaagaagaagaagtaccaggcccacgaccccgataaccaattcaaagtcggcgacatcttccagcttcataagaccaggccca

SEQ ID NO: 25516 - DNA, 452 bp, Glycine max
  unsure at all n locations
  Clone ID: LIB3108-005-Q1-K1-F1
gtaagagggccacaaacccttgtgacaaattctcaagaaggctaataagttgaaaaacgtgattccaagttttcttgcctccactccgggcctatgttaataagaagaaaaaaaaggtcgggatactcacagctgcacacatgcacactcactatcatctagtagtgtaaacaattctgattttgtgactactttaacaaaattagtacatgaaaatcttagaacaattatgcgtagtaaagggaaagtgcttggtgtggttggtctgaactgaacttgatgtatatatagtaggtgttgacaataatggtgtggtgtcgttgtcataagatcatggaaaacgctgtttangatagttttgactattgagtattgaaagaaaaacacccgatcttccatagaaactgtaaacgtgagatttttaggttgacgagagctcgtagcatttgctt

SEQ ID NO: 25517 - DNA, 395 bp, Glycine max
  Clone ID: LIB3108-005-Q1-K1-F11
aatttccgatcgactgacgcggccgatccacgaggcatccaatgcaatatcatgtatgaacacgtattcaggatataaaatttgcgggacaggctcattcaactttgtgtgaggtgcttgatgagctatttaagtcagcaaaggttaaagcagaagcttctgagccaataaaggaagctgttgcagtttaatcttccttaagtatctgctttacaagagagtttcctgtacaatggagtttcaatgcatttcacatcttctggcggaatactttaacacattcagtatcctacaaaagaatggaactgttgaatgagtctcgccaatggtatcataatgtgatgagtatccatatattatattcttggcatatagttagtgtccaacatatatca

SEQ ID NO: 25518 - DNA, 378 bp, Glycine max
  Clone ID: LIB3108-005-Q1-K1-F12
gacgcgtgcgcacacgcgtccgctcctcacttccctcttcccacttcccagatcccaaaggagtgtcttttgtttgtttatcaagtttgttggggatatttaacaacctagagttaaggattttttttgtgctaattagatttaaggatttttaataatggacataaaagtgctttcttccggagttcagtacttaaatctgccggagagttacatccgacccgaatcggagcgacctcgtctttccgaggtttcggagtgcgaggatgttccaatcatcgacttaagttctcaaaatatagcccagattgttcaccaaatcggtgaagcctgcataaactatggtttctttcaagtgatttatcacggggtggcttt

SEQ ID NO: 25519 - DNA, 364 bp, Glycine max
  Clone ID: LIB3108-005-Q1-K1-F2
caagtactctccaatctctttcatcataaacaaagattcttctctattctccaactcttttgcttcttcttccaaagtggcatcaaaaactagaagaaaatggggtgtggcaatttgttcttcacagtcctcataaccttctcagtggcactcataacatacaacatcataatctctgccaatgcccctctcaagcaggacttcccaggcccctcacgcccctccatcaaggtggatcccctcatcaagatgccactccacagatcatcattctcggagaaatcaaaaaagaggttgtttcacactgctgtcactgcctctgattctgtgtacaacacgtggcagtgcacagtgatgtactatt

SEQ ID NO: 25520 - DNA, 347 bp, Glycine max
  Clone ID: LIB3108-005-Q1-K1-F3
ctcctggcgcctgagacccttcgatttcggctatgcccccgggctgccgcgtgactgggcctcgtcggggctacgatttcacagcaccttcatcggcgacgcctcgctcacaaagcgcccgatgggccgcgtgttgaacccgctgcgcgaaatgggcgtgcaggtgaaatcggatgacggtgaccgtcttcccgttaccttgcgcgggccgaagacgccgacgccgatcacctaccgcgtgccgatggcctccgcacaggtgaagtccgccgtgctgctcgccggcctcaacacgcccggcattacgacggtcatcgagccgatcatgacgcgcgatcatacggaaa

SEQ ID NO: 25521 - DNA, 465 bp, Glycine max
  unsure at all n locations
  Clone ID: LIB3108-005-Q1-K1-F4
cccacgcgtccgacctatgcacccagagacgaggaagagcatgctgagaaattgatggaatatcanagcgagcgaggtggaaaggtgaagttacaatctatagtgatgcctcttactgagtttgaccatgaggaaaagggagatgcgctatatgcaatggaacttgccctgtcgttggagaagctgacaaatgaaaagctgcttaacttgcacagtgttgcctcaaagaacaatgatgtgcaattggcagattttattgaaagcgagtttttgggtgaacaggtggaagccataaaaaaaatctctgaatacgttgctcaactcagaagagttggcaaaggacatggtgtgtggcactttgatcagatgctactccatgaggaaggagttgctgcttgattaacattttttttctacctctcgttcgtgcatctagttagttattcggattagtattttcaggtc

SEQ ID NO: 25522 - DNA, 293 bp, Glycine max
  unsure at all n locations
  Clone ID: LIB3108-005-Q1-K1-F5
cccacgcgtccgattttatgcaattgtaagctgatgatgattggaagatgaagaaatgtcggcatgtgattattgcggaaaaaaaaaaaaaaaaaaaaaaaaaaaaaaaaaaaaaaaaaaaaaaaaaaaaaaaaatgcacacatgcacactaactataaatatagtaatgcaaacaatattgattttgtgactactttaacaaaattagttcatgaaaatcttaaaacaaattatgcataataaaacgaaagngggtggggttgtaaaagataaaataacttgatgtatatat

SEQ ID NO: 25523 - DNA, 454 bp, Glycine max
  Clone ID: LIB3108-005-Q1-K1-F6
tgcttatgaggctgttcgccttcacagtcactcttgtcgctgctatagacattgcggacgaggagcaaaccaaggttggtcccattcaacttataaattccttaccacctttggatgttcctctcactgctaagtggcatcaaatgtccgccatcgtgtactttctggtgaccaatgcaatagcatgcacgtatgcagacctgtctctactccttgccctcgcgaatagaagtaaaagcaaaggcttgtggacattgatcgctgtcctcgacacattcatggtggctttgctcttttccggcaacagagccgccgctgcagttggtgtccttggctacaaatgaaactctcatgtgaattggaacaaggtgtgcaatgtctttaggaaattttgtgatcaaatggctgcttcaattggtgtgtcactgattggatcattagcattcctcttgct

SEQ ID NO: 25524 - DNA, 454 bp, Glycine max
  Clone ID: LIB3108-005-Q1-K1-F7
cccagagatcgatcaaaaaacagaaaatgaatgcctatcaccgatgccgccaccgacgcccgtgagcagcgcctgcgccgcgctccgacagcatctgcagcagtccctgcggacccgcggcggcgcggagtccgggccgagccggtggacgagccccggccacgaggagaggccaaaggggtacctcgttaatcggacccctccgccctcgggccagtcccgcaagtgggaggactgggagctcccctgctacgtgaccagcttcctcactatcgtcatcctcggcgtcggcctcaacgccaagcccgatctcaccatcgaaacctgtgcccacgaaaaagccctcgagcgcctcaagatcgaaaactccctcgccgccgccgcaaccaataacaacagcgagtcggcgtgctacgacgaatcggactgagtcgactcggatccagccatgtta

SEQ ID NO: 25525 - DNA, 303 bp, Glycine max
  Clone ID: LIB3108-005-Q1-K1-F8
gaacgaccgacccgacggctcgatacccacacccatgacacattcgtgtttactgtttttagcaccgtactaatataatggggaatagtgcaaaatacatgggtattgggtttacaaatataacttgaccttgtatgatgaatggattaacaagatctattgcaccatcactgaccatgactcttaaatattacatacaagcaaatttctattctctctaacattatacatttgtgatgaagaaccctgcccaaacaggccgtaacacaaacactcttgccgatcgatagctaccacacatac

SEQ ID NO: 25526 - DNA, 388 bp, Glycine max
  Clone ID: LIB3108-005-Q1-K1-F9
gcgatgaccgtgaccatggcggctgcgtttacaagtacaagtgcaacactgagactgtcaaatgttggggagagcagaggtttgcgagctgcgtaagtgtaaccctaatcctaataagctgaaggttatgggggggtttggaggttgttctggagtggcagtgggtgtgagagaaagaaaaggaattggaagggttagggttcgggttcgggcgagttcttcgtcggacgaggcagtgagtgcgcagtcaaaagtgactcagaaagtattctttgacgtcagtattggaaatccagttgggaagcttgtgggacgtattgtgattggactgtacggcgacgatgtcccccaaaccgccgagaacttccgtgccctttgtactggaaag

SEQ ID NO: 25527 - DNA, 257 bp, Glycine max
  Clone ID: LIB3108-005-Q1-K1-G10
taaaaaaaaatataaaactaaaaataaaaaataaaacattataaaaaaataaaaaaaaaaaaagggaagggtaaaattaaaaaaaaggggtaaaacgcctccctctactctatatctaacactttttcccctttcatactctaaacaactctcttactacactgtcaccaaaattcaatttattctccatcttttaaaaacatcttcacttaaaaaaccctatcttttcccaactaaaatcactttcatcaattccc

SEQ ID NO: 25528 - DNA, 447 bp, Glycine max
  Clone ID: LIB3108-005-Q1-K1-G11
cccacgcgtccggctctcttggactcagttcagtttcacgaccgatcctacaatggcgacagtcagggtttccttttccgctaaaaccctaactctaccttatcaccccaaaaccccaatctccaactttaccccggtaacgaatcttcgcctccctccttctatcgtgacccgaacccgcaattgtaaccggattcgggcggcgctggatggggatttctcggcgaaaaggagcagcagcagcaacaacaacgaccagagggagacgataatgttacctggttgtgactacaaccattggctgattgtgatggactttccaaaggaccctgcacccacccgtgaacagatgattgacacgtacctcgacactcttgccactgtcttgggaagcatggaagaagctaaaaagaacatgtatgcctttaacaccaccacttacactgg

SEQ ID NO: 25529 - DNA, 416 bp, Glycine max
  Clone ID: LIB3108-005-Q1-K1-G2
ctcgaagtccatcccaaggacacatttgtgttcagtatagatggcaccgtactctctaatattccatactacaaaaaacatggatatggggtggagaaatttaactcgaccttgtatgatgaatgggttaacaagggcaatgcaccggcactgcccgagactcttaagaattacaacaagctggtgtctcttggcttcaagattatattcttgtcaggaagaacactggacaaacaggccgtaacagaagcaaacttaaagaaggctggctaccacacatgggaaaaattaattctcaaggatccacaagatccttccactccaaatgcagtttcatacaaaacagcagcgagagagaaactgataaggcagggatacaacattggtgggatcattggagaccaatggagcgatct

SEQ ID NO: 25530 - DNA, 248 bp, Glycine max
  Clone ID: LIB3108-005-Q1-K1-G3
cccacgcgtccgtgcttatgaattgacatcagattggttagagtccactttcaattgatttgttcccattttttcttcatgattagtgatcatattcttttttgaaatacaagttgattccctcgtagtataggaagaaagtgtgagggatatgctaattttttgtaatgatagtggtagttgataagattgaacttcctttaagatggaagatttgtccttgatgcttgcgtctgatttggaattct

SEQ ID NO: 25531 - DNA, 463 bp, Glycine max
  Clone ID: LIB3108-005-Q1-K1-G4
gaaatggcttcctcaatgatctcctccccatctgttaccaccgtcaaccgtgccggtgccggcatggttgctccagtcaccggcctcaaatccatggctggcttccccacgaggaagaccaacaatgacattacctccattgctagcaacggtggaagagtacaatgcatgcaggtgtggccaccaattggcaagaagaagttcgagactctttcctacttgccagacctcgatgatgcccaattggcaaaggaagtcgaataccttctaaggaaaggatggattccttgcttggaattcgagttggagcacggtttcgtgtaccgtgagcacaacaggtcacctggatactatgatggacgctactggaccatgtggaagctgcctatgtttggctgcactgatgcttctcaagtgttgaaggagcttcaagaggctaagactgcataccccaatggcttca

SEQ ID NO: 25532 - DNA, 456 bp, Glycine max
  Clone ID: LIB3108-005-Q1-K1-G5
acgcccacgcgtccggtttccgtgactgagatgtctggaggtgttattcaacaaatggtgatgagtaaactgcacccggggtttactaactctcccttgttgtcacccatcgtagcaaaaaaagatgatgctggctctactggcagtcagtccttaagagcacttgcattaattggagctggtttgtcaggtcttttcagtttttcaacaatggcagcagctgatgaagctgaacatggcctggcatgtccaagctatccatggcctcacaagggaattcttagttcatatgatcacgcttcgactcgtcgtggtcatcaagtttatacagaagtctgtgcttcctgccattctatgtctttgatatcgtatcgtgatttggttggtgttgcttatacagaagaagaggtaaaggctatggcagctgagattgacgtggttgatggccctaacgat

SEQ ID NO: 25533 - DNA, 382 bp, Glycine max
  Clone ID: LIB3108-005-Q1-K1-G6
aatgaaagaaagcacaaaaaacagcgccctagatttgctcttctttgcttcaggggaaagaggaaaacaaataacgatggcgtgcgcttctatcctccgcagacttctcttcgcttacgtcttcatacgtctctgcttaccaagaatttaacgaattttgagtagatggacgacgctgcagcaaaagcactcagacctaatattgatgcctttacacatccagtgcatactcaagttggcttacaacttcctgagatagatctgaataccataattgctgaagctattgcttaaaagggcctaggaggcgttctcttcatatgcggcagctactatgcagctttgcttgtgatactgcaccagctgatttgcaccctaatcc

SEQ ID NO: 25534 - DNA, 490 bp, Glycine max
  unsure at all n locations
  Clone ID: LIB3108-005-Q1-K1-G8
caccggacctgaaaaaccgggccgaccgacgcgtccgcccacgcgtccggcaaatttgtttaccagcattcgtgctgtaactaatctcttggggaatgtgtgctacgtacaagtggttgcaaaaacatctaantgagattcttgatgctttctcaagttgtagttcatctccaaacaagaatttgcagttgtcatactctaccttgttactaaactatgctgtgctattgattgaaacaaatgatcaagaatgtcaatctcaaattctatcggcagctcttgagattggtgaggatgaaaatgttgaagtcgaccccaaatttcgtgctttagttgctgttggatcactgatgcttgaaggtcttgtcagaaaaacagcactggattttgatgttgggaacattgcaaaagcagccaacggttctaaggaaggcaagattgctgaaatcgcatctgacattgagctgtttacaaatcgttgctgaatacc

SEQ ID NO: 25535 - DNA, 138 bp, Glycine max
  Clone ID: LIB3108-005-Q1-K1-G9
atttcccttcgaccgcacgcggccgatcaatctgccccctattccctttaatggatatcgtttctcgacacccaaaatgatcactggatcggtgattttctacggcggcgaggtctactctagttcatctatccaaaa

SEQ ID NO: 25536 - DNA, 172 bp, Glycine max
  Clone ID: LIB3108-005-Q1-K1-H11
cccacgcgtccgccaacccttccaatcaaatatccttgcgaaaatggcgttattcaccaggacagggttcatacttgggagagcagaccttaccaaccggtcggcagtagcaacgcacaggagatcactcgtagtgaatgctgccaaagctgttgaagcagaaaaagtcagt

SEQ ID NO: 25537 - DNA, 444 bp, Glycine max
  Clone ID: LIB3108-005-Q1-K1-H12
cccacgcgtccgagaatttacagcttgcagaggaaaatcttcaaaaggaacctcgcatcagggaaggtaggaatcaatgtagaataattcgaacaactgagttagctgctgctaaggagaaattaaatgagcttgagaagcagaaagaagacatgttgaaattgaattccccagcatcccttctccaaaggatccaagagtctgcaaataagactgactaggaatctgaaaacttgcaccagcatctctttgacagagagatagaccttgctgcttttttgcaaaagtacaagaagctacgtactacttaccacaggaaaactcttgtacatcttgctgctaaaacatcaacagtttaagcacatcacgaattattaagaaatataactggttttggcaagtatgtttttgattttaagttcactattgtcaaaagttatcatt

SEQ ID NO: 25538 - DNA, 276 bp, Glycine max
  Clone ID: LIB3108-005-Q1-K1-H2
cccacgcgtccggtcttcttctctctctctttaccacgcctagagagagaaaactcgccgggggcacccctccggcgatgacatgaccgccgtttccctcactcccttcgtagacctttgatgcgccgatcgaatgcccgcactcgcagcgccgcctccaatctcaacaacaacaacgaattaatggatccgatcaaaaccaaaacccgctccaccaacctcttcgcccgtaaccctaaggccgcgcaatcaaagtccctccgttccataatcctc

SEQ ID NO: 25539 - DNA, 261 bp, Glycine max
  Clone ID: LIB3108-005-Q1-K1-H3
aggaaccctagctagggtttggaagaagctgatccgagaagatggtgcagcgtctcacctacgcgcaaacgccacagctatgctaccaaatccaaccagcacagagtcgtcaagactcccggtggcaagcttgtttatcagaccacgaagaagagggccagcggacccaagtgccctgtcactggaaagaggattcaagggattccacatttaaagccagcagagtataatagatcaaggttacacagaaaccgaaagact

SEQ ID NO: 25540 - DNA, 417 bp, Glycine max
  Clone ID: LIB3108-005-Q1-K1-H4
ttaagcagaccgggaaaaaacagtttcattgtgatgattgtgggatttgtagacttggtgggcgtgagaattattcccactgcagtaagtgtgggtgttgctactcaaatactctgcgtgataatcatttgtgtgtggagaactccatgaggcatcattgtcccatttgttatgagtatctttttgactcattgaaagacattgctgttatgaaatgtggtcacacaatgcatagtgaatgctacctagagatgctaaagcgtgacaagtattgttgtcccatatgctccaagtcggtgatggacatgtctagggcatggaagagaattgatgaagagattgaagcaactgtcatgccttgatgatatcggtacagaaaggtttggatactatgtaatgactgtaatgacacaactg

SEQ ID NO: 25541 - DNA, 410 bp, Glycine max
  unsure at all n locations
  Clone ID: LIB3108-005-Q1-K1-H5
ttttgaaaagaaacttcaacttgttggtgttggttatcgtgctatggtaaaagggaacgaggtcgtgctgaatcttggattttctcatcctgttaagatgataatccctgatggcctcaaagtgaaggtggaggaaaacaccagaatcacagttagtgggtatgacaaatctgaggttggccagtttgctgcttcaattangaagtggagacccccagaaccatacaaaggaaagggtgtcaaatatgctgacgaagttgtaaggagaaaggaagggaaagcagggaagaagaagtaatggggagtttcaatttttcattttcatttatctcttggtgtttttcctcgcttgttagtaatggaaatggaaatattttacccaagtaaaagaaatttatattcattgagat

SEQ ID NO: 25542 - DNA, 459 bp, Glycine max
  Clone ID: LIB3108-005-Q1-K1-H6
ggttcaccccaccagaacttgattcaaacaccccttccccgatcttcgggggcggcaccggcgggctggtgcgcagggcacaggtggaggagttttatgtcattacgtgggactcacccaaagaacagatctttgaaatgcccactggcggcgccgctatcatgagggagggtcctaaccttctcaagttggccaggaaggagcagtgcttggctcttgggactaggctcaggtccaagtacaagatcaagtaccagttctacagggtcttccctaatggggaggttcagtatttgcaccctaaggatggtgtttaccctgagaaggtcaacgccggacgccaaggggtgggtcaaaacttcaggtctattggtaagaatgttagtcctattgaggtcaagttcactggcaagcagccctatgatttgtgagcacacaactctatctttatcatcatca

SEQ ID NO: 25543 - DNA, 323 bp, Glycine max
  Clone ID: LIB3108-005-Q1-K1-H7
ccggaccggaatgagccgagtcgaccgcacgcatacggtttattatcatttatgattgattatgacttttgctaaaaaaataataaatttataatatggctaagggaaaaggggaaaaaaaaaaaaaaaaaaaaaaaaaaaaaaaaaaaaaaaaaaaaaaaaaaaaaaaaaaaaaaaaaaaaaaaaaaacaaaaaaaggccagcgacataaaaaaaaaaaaaataaaaaaactcataaaaaaaaaaaggggccgctttttaaaagaaaccaaagttacaatccccgccttggcactttaaaacttttttattgggaaaaccaa

SEQ ID NO: 25544 - DNA, 113 bp, Glycine max
  unsure at all n locations
  Clone ID: LIB3108-005-Q1-K1-H8
angaaagaaagcaaagggatatgtattaagttatgattgaaaaataattttgaagcgcttattgttgctacccgggcgggccccatttntacccccatctctttatcaacata

SEQ ID NO: 25545 - DNA, 350 bp, Glycine max
  Clone ID: LIB3108-005-Q1-K1-H9
gcgcccacgcgtccgcttattcttcattagatcctcagtttgatcgaccctcatttctgtgaactgagagtgctgtaggtgttattcggcagttatttaggaggaaactccaatctcattctcctaattcttcttttaagtcatccattatcacaaagaaagatggtgctgactctactggcatcaactccttaagagtgcttgcttttgttacagctggtgtgtcagggtttttaggttttgcaacaacagcatttgctgatgaagctgagcatggcctgtcatgttcaagctatccatggcctaacaaggtcatccttagttcatatcatcatgcttcgattcgtctt

SEQ ID NO: 25546 - DNA, 346 bp, Glycine max
  Clone ID: LIB3108-006-Q1-K1-A1
cccacgcgtccgctagaaacagtgcgatgaaaatgactgcccttgatttcttcgtcgctacaactctggtagcatggtaatgccatgcgtacgatatgtgccctcatagaatgaacactgtctatggtgcacgtactccggatgtgaaatgcgcaagatggaggctggctaaggaagctcacaacatctatggctatgcgaccattcctgatgagtgcgtcgatgtaacacaggaatacatacatggcctacaatatataacagactacctaacagttaatcaactagcttactttcatgccatagacctcgaagtccatactaaagacaaatttgagaacactat

SEQ ID NO: 25547 - DNA, 412 bp, Glycine max
  Clone ID: LIB3108-006-Q1-K1-A10
gatcgagatctctttgctgtttgccgaggatcggagcttctccgcgcccgtcatggaggtggctaggactgtaaaggacgtctccccgcacgatttcgtcaaggcgtactccgcccacctcaagcgatccggcaagatggagcttcctcactggacggatattgtaaagactgggaagttcaaggagcttgctccatatgaccctgactggtacttcattagagctgcttcaatggcgagaaagatctatctgaggcagggagttggagtgggtgcttttcagaagatatatgggggtcgcaagaggaatggaagtcgtccaccccatttctgcaagagcaatggggcaattgcccgcaacatcctgcagcagctggaggctatgaagatagttgaactagatcttaaaggg

SEQ ID NO: 25548 - DNA, 302 bp, Glycine max
  Clone ID: LIB3108-006-Q1-K1-A11
gaccgacgcgtccgaccacgcgtccgcaacggtttagtctattgtaggaaaatggggagctcttaggtcgcgcggaccagggtcacactataacggccatcagttctgaaagattgttgaagcccatcttgtcagctgatgaagtatcagtctgtgtacatggaacctacaggaagaatcttgattccatcttgaaatcatgtctgaaacgcatgacaagactacatgttcacttttcatgtggcttgcctacaagcggcgacgtgatctctggcacgctactgaacattatcatactgatg

SEQ ID NO: 25549 - DNA, 218 bp, Glycine max
  Clone ID: LIB3108-006-Q1-K1-A12
cgtcgcctgatacaacaggcttttgatgatatagaacaatgacatacctagggcacagtggcatttccatgagaaaatcgaataacgagatcagcatatacaaatagcattaggatgaacctgtttgaagaattcaacatttgaaagttgtcatactctgaatcgttgataaaagaatctctgtgaatgtacccaccagcaccactgatactgccacg

SEQ ID NO: 25550 - DNA, 424 bp, Glycine max
  Clone ID: LIB3108-006-Q1-K1-A2
gacaagttgaagttgaaaaccgtagtaagctaggtgatatgaatcaaatatagacgtacattgtgaggcttgaccatttaaattcattccctgaattgtagaaatatatttgaatatttttccaatgttgtaaaatttttggttaaaaattgttttcaatgaacatctcgtatagatgttctcctgttaaaaaatatgtaactattataaaatactgcatcatattgagtacaaaaaactaataagggcgggcagcctttttctctttttttaaaacccgaacaaaaaaatttttccttaaaaagttttcagaatttaaagtcttaaacatggccccttacaaagcttaacccaccaaaagaaatttctgaaaacttcttttgcaaacttaagattttggagagcttttaaaaattcaagggcc

SEQ ID NO: 25551 - DNA, 171 bp, Glycine max
  Clone ID: LIB3108-006-Q1-K1-A3
gccacgcgtccgcttcaaccagcttcacttgagccagagttgttgctgtctttagtgacaggcctaaggtggcctatgtatacgcaccccgcgatttgatggtttacatactgcacaatgtctacttgtgacaaactaccgagatagcttgcacgaggtcacatatattct

SEQ ID NO: 25552 - DNA, 322 bp, Glycine max
  Clone ID: LIB3108-006-Q1-K1-A4
cccacgcgtccggatcaaccctgacccctaaggccaggggtttttctcggcttcttcagattcctgaaatggcgtctgtttcagctttagccaagtacaagctcgtcttcttgggtgaccaatccgtgggcaaaaccagcatcatcactcgcttcatgtacgataaattcgataacacctatcaggctacaattggtattgattttctatcaaaaactatgtatctcgaagatcgaactgttcgactgcagttgtgggatacagctggccaggaaagatttagaagtcttattccaagctacattagggactcatctgtagc

SEQ ID NO: 25553 - DNA, 406 bp, Glycine max
  Clone ID: LIB3108-006-Q1-K1-A5
ccaagccttcggatcatcaacagtgctgattcccctaactaccctcgattttcccttctgtacaactctttgggacatctcgatgtcccttgtaccatatgtgtcttcataatccagatactgtctacgatctacggactctggctgaattaaccatcagatgtttaatggataatttctatgacgattcgcaaccctatgcgacgaatccggctgcttcactccttctacgtcatgtttctatactgggtctacgtcttctcatgaactaacttcctgtcaatcccctaccctaattccttcaatttcaccattttttttctaattaatgcgctttgcaaaatcctaatttctgtatcctaacaaaaccccctaattcctacaaatcccatggctttgattccgc

SEQ ID NO: 25554 - DNA, 256 bp, Glycine max
  Clone ID: LIB3108-006-Q1-K1-A6
tcgactccacgcgttcgcccacgcttccggatcaatcctgaccactctagccactagcgattatcggcttacttacagggcctatatggagcctggatgagctttatccaaattcaagctcaatacttcagaagacctcatacgtggcaaaaccttcatcataacatcgcttatatgccacatattcgataacacctattatgctacaattgatactgattttctatcataaaactatgtatctctaatatctaac

SEQ ID NO: 25555 - DNA, 51 bp, Glycine max
  Clone ID: LIB3108-006-Q1-K1-A7
tcggtcacacgttcgggagctcaatcatgaggcttttgctctgcaggaaca

SEQ ID NO: 25556 - DNA, 91 bp, Glycine max
  Clone ID: LIB3108-006-Q1-K1-A8
ttgacgcgttcggtaactagaaccagagggttgaagttaaagggaacagtggctttagtaggtagcatgccagaagccttgcgaaacgcta

SEQ ID NO: 25557 - DNA, 465 bp, Glycine max
  unsure at all n locations
  Clone ID: LIB3108-006-Q1-K1-B1
cggacgcgtgggcggacgcgtgggcggacgcgtgggctttgatgaatatgcagtgtgcttttttaagtcaaagcatcatcaaagcacactgcatcctaacagcacacgtacgtagaaaggtgaagttccaggtcttgcacaacatacacaacacaccataatttattttatatacaatcttatggtgcccaagatgcagatgcatggactaattaaacaacaacgttagtctgataggcagtgtccatagatatattgggtacccataaaatggccttgcttccaaggaaatggcaaacagggttagttccaggatcaactcccatgagttcatgaagcatgtgatgattcattccagaagtatctgagtggcatacagcaagtgcctgagttttggttccatcaccagccaccaatggaaccatgaaagctggtgtttcacggactntatggcagtaaaatact

SEQ ID NO: 25558 - DNA, 433 bp, Glycine max
  Clone ID: LIB3108-006-Q1-K1-B10
cccacgcgtccgggaggagagatagatggcaggcatgtctgacatgcagaacaggcaagcgggaccactcccccctggtcaattcaggggcgctccccttactcgccctcgctctgatcccgtagaccgtgagaaaacttgccctcttttgcttcgggttttcaccaagactggtggccaccactcggacgaagaatttgctacgagaggaaaggagcccaaagatgaagtccagatatatacatggaaggatgctacacttcgagaactaactgacctggtcaaagaaggtgctcttgcagcgaggaaaagagatgcgaagctgtcatttgcatttgcgtatcctgacaagcgtggtcgttatgtcgtgaggccggttggcatggcattttcgtatggaaataatcggcgattggatgatgcaaagacatta

SEQ ID NO: 25559 - DNA, 429 bp, Glycine max
  Clone ID: LIB3108-006-Q1-K1-B11
cttgcacggtcgatgagttcaacgagtccatcgactgcatcaagctggtgtctgaggaacttgcggactgggtttcggccagtaggcctgagcggtggtcagatgcgttcttcaagggtctgagacacggacattactcgtctaacgctgcagcgatgttcaaggaatggctaccgctgaaacggattgaaccttcggtcgttcagatggttgacattgtcagatgcaagatgatggaaatgatatttatacgaagggagtcttctaggacttggactgagattcttacaccgtccacgagctgcaagctgcaggaagagatcaacaaatcacacgggctcgatgttgtgtgttcgaccgatagtgtgtttgatgtgcgagatgaatctctgcatgtcgtgaacattgagaactgggagtgcatatgtc

SEQ ID NO: 25560 - DNA, 286 bp, Glycine max
  Clone ID: LIB3108-006-Q1-K1-B12
actcatacgacacctacaccacacaaatgccttctctaacatgtagaaattgtctccaatggatgttagcgaatttgaaaagagttgacagtctctgatcgtctattcgatcatacacttatttgcccttactcgcgtcatcttaaccacgcacttctacttcaaaatcagcgatcacatcttttcaaaatccccgtctacggcttctctgtcagtttaatcgatgaaaccaacattttcgaatggagcgtgaccataaatggaccgtccgatactctttacgaaa

SEQ ID NO: 25561 - DNA, 342 bp, Glycine max
  Clone ID: LIB3108-006-Q1-K1-B2
gcaaatgcagcaatacttgaggctgatgatgatgaagaactcttggagaaagtaaagcgtgacagaaagaagagacttgagaagcaaggtgtgatcagttcttccaaacaagaaacagggtatcttcaagatctggtgtacaagctaagcacggttggtcaagcacttgaaaagaatgatctatctgctgctggctctgtccttggaggaaacgcggacgcagattgcgtccaaagggctaatatagccttcaattaactgagctccagtcctgaagagaagactgaggtatactcattcaactcctcattagcttcactaatttcatcagtttctaaaatg

SEQ ID NO: 25562 - DNA, 255 bp, Glycine max
  Clone ID: LIB3108-006-Q1-K1-B3
gcggcatgtgtactacctaacgtatgatgacttgtttctgtattattcgacataggagcaggaggctcgagagcagttctgtgtacaagatcagagctattgggtataataatcacatgaggaggttgaagaagaagcgccataaagatgagacatagatctaggtaagtgctaggacaaggtgtggagatgatgtgcttatccatttgctaccagcttcatgacattctatgctgtcatgattcttatgatgat

SEQ ID NO: 25563 - DNA, 63 bp, Glycine max
  Clone ID: LIB3108-006-Q1-K1-B4
tcgaaaaaaaaactaacacacatacaaaaaaattttaccaaaattaaataataaacataaaaa

SEQ ID NO: 25564 - DNA, 420 bp, Glycine max
  Clone ID: LIB3108-006-Q1-K1-B5
cccacgcgtccggaatcgttttcttcagaaaatttgccatcgttgagggaagcgcgagagccttcgttgttcaagatgagagctaagtggaagaagaagcgcatgaggaggttgaagaggaagcgccgaaagatgagacaaagatctaagtaggtgcttgaacaaggagtggagatgatgtgcttttccatctgctaccagcttcatgacattttatgctgtcatggctcttatgatgatcttgaggtctagtggcgaggggagcttccatcttgactttagtttagctttactggtctaaagattgctgttttagtgtgggttaagttatgatattgagagttttgtgttatctaattatgtactggtacgttttgtatactttttggtttatcttaatagcttaaatattagtatttt

SEQ ID NO: 25565 - DNA, 330 bp, Glycine max
  Clone ID: LIB3108-006-Q1-K1-B7
gcgctaatcgcgctcattagcattggagcatgtctttgtcgacttagaacaccctttaataaggaggctgatgatactatcatcacacttaaaccaaccactaatgcagctttaagcgcttaattatttggctatggcctattcagagtcccttcctaagatgaagaatgtgggcatctattcaaaccaaaaatcagatctcaattctatggattgattattggttcatgagctgatcactttgtcatatccattaataagggagaaaaagatagtttggaatttgcagaatctttgcaagtattttaagaagcaataaccgttataaat

SEQ ID NO: 25566 - DNA, 361 bp, Glycine max
  Clone ID: LIB3108-006-Q1-K1-C1
ctgatgcgctacattgttattggggcatgcttcttcggacaaagaacaccctttaataatgaagctgatggtactaacatgacacttaaaccaaccactaatgcagttttaagcgcttaattagtaggctttggcctatttggtgtaccttcctaagatgaagaatggtggcatcgatccaaaccagaaatcagattcaaattcaatggattgattattggttcatgatctgatcactttgtcatatccataaagaagggagaaaaagaaagtttggaatttgcagaagctttgcaagtattttaagttgcaataaccgtgagaaatgaaccactgtggaagatgttcaatataatacata

SEQ ID NO: 25567 - DNA, 425 bp, Glycine max
  Clone ID: LIB3108-006-Q1-K1-C10
cccacgcgtccgcggacgcgtggggcatggccatgattcagagccatactacctccatgccaagcacatgtacaacttggacagaatgaagcaccaggcactgaagatgtccctctcagttctagctgttttcagcattggcgttgctgttccggtgtatgccgtcattttccagcagaagaagactccctccagttgatgacagcggacatactgtggggaagttgaatatgtttacttcctcctgctgtttggaaactctgtttaagctttcattttgatcttagtttgcagaattagaaaccccgggctcagtagctcatctagagcctggtgtttcttggttaattggttttggcttgaaatctgttttgttaagctgtgatcagcttaagaataaaagtatgcattaatactgctatttc

SEQ ID NO: 25568 - DNA, 430 bp, Glycine max
  Clone ID: LIB3108-006-Q1-K1-C11
ccacgcgttcggaggagtgttacgggagggcgatactggcgagccccggggacggtgaggtgctggcgatgtatggggggcttgtgtgggaggcttaccgcgacagcgagagagccggcggttatttacagcgagcggtggagtcttcgccggatgacagctatgtgctaaggtcgtatgcgaaatttctgtgggatgccgaagaggacgaggaggttgggagctcagcgtcatcgacgccaccgatggtaaagtccttgtgatggacattctggtaactgctgaactgactgagtatagaggcaatctctaagttcgatctataacaacttgtagagcactgagggtgttgttgacgaagactgaaggcgttgatgacgaaggcgatggtggaggcttttgtgccaagcactattgatatgctatggat

SEQ ID NO: 25569 - DNA, 255 bp, Glycine max
  Clone ID: LIB3108-006-Q1-K1-C2
cccacgcgtccggataggtgaaaatggcgcagtgtgtggccaacacattcgtgcaaggaaaaccctttcttccagttgcagcagctcccactaaaaatgttcggagagcggttcagtgcggtgtgtggtgcaggaagaaggagatacacccgcatttttacgaggaatcgaaggtgtactgcaacggggagctggtgctgacgacaggtgggacccagaaggaatacgtggtgcacgtgtggtcggagaaccacc

SEQ ID NO: 25570 - DNA, 125 bp, Glycine max
  Clone ID: LIB3108-006-Q1-K1-C3
cccacgcgtccgcccacgcgtccgcctaactaagctaattttatgtttcatgtgttgctgttaattcaggatcttttaatttggatttactttgtagagagagaaaaaaaggaaagaaacatttt

SEQ ID NO: 25571 - DNA, 156 bp, Glycine max
  Clone ID: LIB3108-006-Q1-K1-C5
gagaaacaaagttagaagtaaagaagatcatggcttctctagcaaccttggctgctgttcaaccagctacgatcaatggccttgctggaagttccctctctggaactaagctctctttcaagccctttgccacaggtaaatcaagaacttaagagt

SEQ ID NO: 25572 - DNA, 257 bp, Glycine max
  unsure at all n locations
  Clone ID: LIB3108-006-Q1-K1-C7
ctggagagttggaaagtggaaatgcaggagagccagcaaaactgatcaggcagagataccgtgaagccgcagacttgatcaagaagggaaagatgtgtgctctcttcatcaacgatcttgatgcangagctggtcgtcttggtggacccacccaatacactgtaaacaaccaaatggtgaatgccacccttatgaacattgctgataacccaaccaatgtgcactttcctggattgtttaccagggaaaagattccc

SEQ ID NO: 25573 - DNA, 104 bp, Glycine max
  Clone ID: LIB3108-006-Q1-K1-C8
ctcacgcgttcggaaacgcaaacaccagattttcagtcatattgaacagacctttatgcggtctagttgcattctagaatatgaatggacattaacacgatctc

SEQ ID NO: 25574 - DNA, 442 bp, Glycine max
  unsure at all n locations
  Clone ID: LIB3108-006-Q1-K1-C9
cccacgcgtccggctatagttccttaattgataatgatttgctccaaatggttctctaggttgttagaaataatgagtaggttcacattctggactttgttggaaatcatttgattgttgataatcttgtgtaagttcctaacaataattttggggtaaattattttcagggtagtaggttgtgtcataaatgtttgtattcatttggttttggttgtaaaaatcgacctcatgttgatgttgataagccaaattgtcctaaagtaagggacattgtgatatatagtgattggcactctggcaaaactcgcagtagatttgatggtcatcatacattgaatacaaggttcaaggtgaacgttaatcgtttatgatcacaacaaggaacacttcaatattttgacgttatatgactttatctttggcttatttagttntctat

SEQ ID NO: 25575 - DNA, 437 bp, Glycine max
  Clone ID: LIB3108-006-Q1-K1-D11
cccacacatacagaggagagaatatggcgaccacaggcgctttgtgtggcacgatgtttgacaccttcttcctgaagaggcaggcatcagtgaacatgacaagcttcaaggctaacgctgctgtctttggtgtaaaaggaggacgaggaggtcgtgtgagggccatggcaacttacaaggtgaaactgataactccagagggagagcaagaatttgaatgcccagatgatatatacattcttgatcaggccgaggaaaatggcattgatcttccctactcatgcagggctggttcttgctctgcatgtgctgccaaagttgtgagtggcaaactggaccagtcaaatggtagcttccttgatgacgacccaattgatgcatgatatgctctcacctgcgttgcttaccccacctcagatcatgtcattgagactcac

SEQ ID NO: 25576 - DNA, 279 bp, Glycine max
  Clone ID: LIB3108-006-Q1-K1-D12
accgacgcctccgaaagaatctatggcgaccaataaacctgattacgtaaaaacggcatccggcacattgctagatcccaaaagatccactctatccttccccttgatcatgcttctgcaattcactcctacaatgatatctgcgtaattcgaattctaagtccttaagccttctattgatcttatatcaacgggaaaaacaatgtaatctgcttctaaaaaatatcatgcacattctacacctgactactgaagatcaagctgttaaatcccatccct

SEQ ID NO: 25577 - DNA, 292 bp, Glycine max
  Clone ID: LIB3108-006-Q1-K1-D2
aaaagtagaggctgcaccggtcgggttcaccccaccagaacttgacccaaacaccccttccccgatcttcgggggcagcaccggcgggctcctgcgcaaggcacaggtggaggagttttatgtcattacgtgggactcacccaaagaacagatctttgaaatgcccactggcggcgccgctatcatgagggagggtcctaaccttctcaagttggccaggaaggagcagtgcttggctcttgggactaggctcaggtccaagtacaagatcaagtaccagttctacaaggtc

SEQ ID NO: 25578 - DNA, 253 bp, Glycine max
  Clone ID: LIB3108-006-Q1-K1-D3
cacgcgtccgctaacacatactgtcacgctctttcactcttctggattcatggctctagcactttttcacgacattctcaaatcttccaaacgcagaaaatctcccaaagggtttcccacaaagaacacccacatgctttagcctgaccacaagaacaatttctcatgcttctaaaggagtctcatctttctgtgaaccactttcttcagatagaccattgtgggtccctcgtagcttacctcctgagaggct

SEQ ID NO: 25579 - DNA, 314 bp, Glycine max
  Clone ID: LIB3108-006-Q1-K1-D4
cccacgcgtccgctcgttatagaattgcactggggattgcacagggtttggcatacctccatcatgatttgcttcttcctattatccaccgagatatcaagtcaactaatatcctgttggatgttgattaccagcccaaggttgcagactttgggattgccaaggttttgcaagcaagaggagggaaggattccacaacaactgttattgcaggaaccatatggttacttagccccagaatttgcatattcatcaagggccaccaccaagtgcgatgtctacagtttttgggcgatttggatctaatacctcac

SEQ ID NO: 25580 - DNA, 263 bp, Glycine max
  unsure at all n locations
  Clone ID: LIB3108-006-Q1-K1-D5
ctaacacattctgccacgcctttcactaatctgaattcatggctttagcacttctccaccgcattgtcaagtcttccaaacagagaaattcgtcaaaagggtttcccagaaagaacacccacatgcttgagcctgaccagaagaacaattgcaaatgctacaaaaggagtctcagctgtctgtgaaccacttcctccagatagaccattgtggttccctggtagctcacctnctgagtggcttgatggcagtcttcctggtga

SEQ ID NO: 25581 - DNA, 276 bp, Glycine max
  unsure at all n locations
  Clone ID: LIB3108-006-Q1-K1-D6
cggattgagatttcaatttgtcaacagaaaaacctaatgtctcatcgagactctgattccaagcgtcgccactccaagttcgatcgagaagcaagtcccaagagatatagaagggatagtaacagagtaacctcagatggaggagatcggagaaacccaccacatcattctaggcgtgaacccttcgatgctgctcccaagaaatcaaattcaaatgatcatcatgagaantccgcccaacatttgtctcaaccaccaagatcttcgctctatcat

SEQ ID NO: 25582 - DNA, 377 bp, Glycine max
  unsure at all n locations
  Clone ID: LIB3108-006-Q1-K1-D7
actagttctagcttgcgtgtggaacaccttcaggagacattgtagttgtaaattcaacagatatgcagattcacacaatgataaaaaaggctcaccttggcatagtaactgctttagcattctcccctgattcaagggcggtggcttctgtatccatggattcaagtgcgaaggtaacaataattgaagagaagaagactaatgggcttagcttggggattgcattatttatcatcctacttgcagtagccgcttacttnctgaggcangaaatttgaaagtgaaaggtccaaagatttgcttattggaatatgaaaacattagcatcttgtgaatgctactgcttaattttgatgcattgtcattttttaaggggt

SEQ ID NO: 25583 - DNA, 448 bp, Glycine max
  Clone ID: LIB3108-006-Q1-K1-D8
agcagttattggagcatgtgctggtaaacaaatcaggtactctatagatccttttggctgggtttgtgcaaatatacgtcgccagtcagcccacgatgaaccaagaacacatggagcagttattggagcatggtttggggcttggccaatgcctcttgactgggagaggccatggcaggaatggcccatttctgtgagctatgggaccgtagctggttacctggtggcattggttgcatcattgggctttgttcttgcttgtggtagatcacaacatatcaaaagagaatgaagtgctagtagaagcatctgattatactaattgtgggtgagatgtagaagcataatatcttgatgaactagacatggaagctgtcttctttaagacctgtttgtaagcaatggataatgaattatgatgacaaagggaaaattggtgctataaaac

SEQ ID NO: 25584 - DNA, 438 bp, Glycine max
  unsure at all n locations
  Clone ID: LIB3108-006-Q1-K1-D9
ccacgcgtccggaggagtgttacgggagggcgatactggcgagccccggggacggtgaggtgctggcgatgtatggggggcttgtgtgggaggctcaccgcgacagcgagagagccggcggttatttccagcgagcggtggagtcttcgccggatgacagctatgtgctagggtcgtatgcgaaatttctgtgggatgccgaggaggacgaggaggttgggagctcagtgtcatcgtcgccaccgctggtaaagtccttttgatggacattctggtaactgctgaactgactgtgtatagaggcaatctctaagttcgatctataacaacttgtagagcactgagggtgttgttgacgaggactganggtgttgttgacgagggctaaggtggaggcttttgtgccaacaactttgtatatgctatggatggtcagtt

SEQ ID NO: 25585 - DNA, 63 bp, Glycine max
  Clone ID: LIB3108-006-Q1-K1-E1
gtcacacgttcgaatatgatagcgctcaactttgaacgattctgaactaagttaaatgacgac

SEQ ID NO: 25586 - DNA, 345 bp, Glycine max
  Clone ID: LIB3108-006-Q1-K1-E10
gctgccaatgttctcaaggctactgtcaagccttctccggaggctgtaactggggcttgagtatttgctttactgcttccttctgttttttctatattgtatgtaggtggttatagcgttaagtgtgagactttctctgtctttctgcatgcacgtggtatagtgttaagtgtgagactttctctgtctttctggttttgcgtagaacatcggtgtgccttatagattgtatgtatgtggtgggaacttatgtgttgtgcctttatagtctatcttttgatttaaaaaaccttctcctgatgttaaagtgattttatatatacttaacattaataagggcgtccg

SEQ ID NO: 25587 - DNA, 248 bp, Glycine max
  Clone ID: LIB3108-006-Q1-K1-E12
tcgcacacacgttcttcatatcattcataatgtcaaaattttataaaataccgatacctatcggaatgatggcaactttacccagcactatgcaactcccttcccacatttacaagatcatgcacctcactacttgtgaacaatacgcatcaattctactcgaatacatccatctcgtattctataaaatcttatcatcatctactcagtccttgatatcaatcaaaactggaatcatttaaatgcta

SEQ ID NO: 25588 - DNA, 75 bp, Glycine max
  Clone ID: LIB3108-006-Q1-K1-E2
tcggtcactcgtgcgtatgcgggcgatctgcattgcgaatattgttgaccgtaggctagcgacggctatgtgggt

SEQ ID NO: 25589 - DNA, 257 bp, Glycine max
  Clone ID: LIB3108-006-Q1-K1-E3
gccaccgtcacttctgcagccgttgctattccctcattcactggcctcaaggcaagcgcaggcaaagtgagtgccgcagttaaagtctcagctccccaagccacaaggttgggcatcaaggcttcgctgaaagacgttggagtcgctgttgtggccactgccgcgagtgcagtgctggctagcaacgccatggccattgaagtgttgctgggtggtgatgacgggtctctggctttcgttcccaacaatttctccgt

SEQ ID NO: 25590 - DNA, 165 bp, Glycine max
  Clone ID: LIB3108-006-Q1-K1-E5
gtacccttctcctccaccaccaccatataagtacccatctccaccacccccagtctacaagtacaagtctacaccacccccagtttacaagtacacatctcctgctacaccctataagtgttcatctactccaccaccaccatacaagtacccatcaccacacaa

SEQ ID NO: 25591 - DNA, 248 bp, Glycine max
  unsure at all n locations
  Clone ID: LIB3108-006-Q1-K1-E6
ctttttcagaaccttccacaacctaagccactactcctactccctccgccaaacaccaccgcttccactgcaacttacgccatctccctgcaccgcaacttgccaggcaggactccatcaccactctcatcgacatcactaccacaccaaaaccctatcctccaacctcaccttcgttctcaaacaactccaaaggcgactctgcgctagttatctcccccaatgttctncatgtttggatccctctg

SEQ ID NO: 25592 - DNA, 256 bp, Glycine max
  Clone ID: LIB3108-006-Q1-K1-E7
cccacgcgtccgttaaaatatgaagtctgctcttatctaaatcacccttatttatccagattaaaatagccttcagcagaatataagaagctgcaaagttcccttcttttggggcagagtcaattcatcaattaggagttgggtgagagaatggaagcctcagagcagaacaattcaaaggtagtgttgattgattctttgcagtcatgggagttccacgtcaaccaagcctattatcagaaatactcctgttgtg

SEQ ID NO: 25593 - DNA, 230 bp, Glycine max
  Clone ID: LIB3108-006-Q1-K1-E8
gagggagttcgttgatgacacagaggattacatcaacatcatgctggatgacaaacagaggcatcttctccaaatgggagtcatgttgaccacagcaactctggtagtgagcgcctttgttgttgtggcgggtatttttggcatgaatattcacattgagctatttgatgaccagaaagcggggatgacgcaattcctctggactgatggaggtagcactgcaaggacca

SEQ ID NO: 25594 - DNA, 430 bp, Glycine max
  Clone ID: LIB3108-006-Q1-K1-E9
agaaaataatgagaatcgcatgcttcaagagacttctgatgtatctccagttggagtacggaaaaggaaggcacctctaaatgcacatagcaagacaaaatctacttcaaacaggcagtctaattctagaagacaaagtcttgcacatgctggtttaacatggaaatcaggtgttatgcgaagcacccggatcaagacaagaccattgcagcattggtgtggagagaaagtgttatatgggcgagtacataacagcatgataacagtaattgcgatgatgtacgccgagagggaagtggatggcaaatcacctgtgctgaatgtgaagtcgtatgtttctgatcaatatgctgatctggcgtctaaagtagccaagtagcactttcactgtgtaccctttacttgcaagggcttgctatgagatgagtcc

SEQ ID NO: 25595 - DNA, 292 bp, Glycine max
  Clone ID: LIB3108-006-Q1-K1-F1
gtgagagctgcgaagaagaagaagatcaataatgaacgacgccggacagagccacaaggcgaatgcaaagctgtcgacggagacgcggaaggatcggaaatcggcgactgggctgagtggatcgccgaagaagggaggccacggcgggaagttcacgtggatcggcaacggctacgagaacgtcgagatggagcacggtgctatggacgccaaggacccgaacttcgaggatccagcggagatcgtcgccgagtgatcgccgtgggttacgatgacgagatctgtacatact

SEQ ID NO: 25596 - DNA, 354 bp, Glycine max
  Clone ID: LIB3108-006-Q1-K1-F10
cgttcacgcactctacaccgcacgcatctggacgcttcccctctccaccgagaccctaagcctaagttctcgcgatgaagggagtcaagccgaggaatcgcaccgtcaagcctgatgacaagctgggggctaagcggaagggcgccgacaaggtgagcaggcaggtgaagcgtgccaaggctggcaaggaccccaacgcgccgaagcgtcctccgaccgcgttcttcatcttcatggatgatttccgcaaggagttcaaggagaagaacccgaacaacaaatctgtggacactgtgagcaaagctgggcgtgacaagtggaaatcgatgtctgatgctgagaaagcaccctacc

SEQ ID NO: 25597 - DNA, 426 bp, Glycine max
  Clone ID: LIB3108-006-Q1-K1-F12
gtataaggcaagatcttggttcaacagggttgttaccctttcccctgacgggggagacgggagagctctctgctacaagtttgaacttcagcatggaagtgaagagagccaaaaggatgttttgaaaagatgtgttgctgcagagccgaagcatggagaaaaatggcaagtgatttctaaggctgtcgagaattcccacttaccagttgaagccattcttaagaaaaccgtggttgctatgggtaaagaagagacgtctattctttccgatggcaccaaatctcaggctccatcccactgaagtagagattacataggagtggttgctgcatgatgcgtaaaggttttcttcatatagggcgcttctgtgctaatgatggtacgcactcaacgagttggttgtcactctttgcttatatgcctttt

SEQ ID NO: 25598 - DNA, 296 bp, Glycine max
  Clone ID: LIB3108-006-Q1-K1-F2
cccacgcgtccgaaaactcacccactccaagttactcactcaaccacaaccaccatgttctgatattcccccaaccacacttttcacacaccaatcaaactaatgcaaatgcaaagcatgtcaaccaccatggcttcgttttctcctccgacccatttctcagccactccttcttcctcgaaaccccgtcttgtctacaagaacaactttttcttctctctcaggtcgaggagtctttctctctctcccttgaaggctgctgcttctgagaacggcgtcgggaccgccgtggagcc

SEQ ID NO: 25599 - DNA, 308 bp, Glycine max
  Clone ID: LIB3108-006-Q1-K1-F3
tcgcccacgcgttcggtacgcaatatttgaaggttgtgttattctgaaagagaagatagggagggcggtttggtttggtgcaaatggattccttagaagacagcggctgttgggattttctcgattactctttcattgatcaagcgccccctgattacctttggtccaataacaataatagtgtgagcaccgaaattgacattacaggtgatgctgttgcttgtcaagagaacaccatgaagaggtgacgcaccgattcatgcttcaagcggcatcaaaactttgcctcgaaaatttgcaaagggaga

SEQ ID NO: 25600 - DNA, 394 bp, Glycine max
  unsure at all n locations
  Clone ID: LIB3108-006-Q1-K1-F4
gcaaaagccagaaaaaactgtgtttgaattaaaactcgagtcctacgaagtggcttccaaaattaaaatcatcaaggaggtccggggctttactgatttaggtttgaaggaggcaaaggatttagtggaaaaaacacctgctgttataaagaaaggtgtttcaaagtaagaaggggagcagataatagagaaattgaaagctcttggtgcaaaagttgttatggaatgaagtgatgtatgttgtttcttccagctttcaatattttagttgtctgaaattttgaaaatttcagattgctagccaaggatactgcaaattttgctagtgctgtcactgtgtgttaatgttttagcataaactggaatttgattntatgcacgtttgcaacattat

SEQ ID NO: 25601 - DNA, 312 bp, Glycine max
  Clone ID: LIB3108-006-Q1-K1-F7
ctttctctcttctctctacacccaaaccctaactaccgaccctgttcccgtgtcgtatccgtcatgaaaggaggaaagtccaagaccgaatctaagagagccgatcccaaacttgctgtgaataagaagggagccgccaccaatgctaggaaacccgccggcaaggggaaggcagcgaaagaccctaacaagccaaagaggcctccaagtgctttcttcgttatcatggaggagttcaggaaggtattcaacaaagaacatcctgaaaacaaagcagtgtttgctgtgggcaaagctgctggagcaaaatgg

SEQ ID NO: 25602 - DNA, 173 bp, Glycine max
  Clone ID: LIB3108-006-Q1-K1-F8
cacacacttccgtgttaactcatactctcttactaccaacagtcttcccggcttacatagccatctactccatctgggctttactccgaccacattaaatccggtaccaaacttactggataaaacacctgctcttatacacaagattttttacacgcctctaagggatcacc

SEQ ID NO: 25603 - DNA, 193 bp, Glycine max
  Clone ID: LIB3108-006-Q1-K1-G1
cccacgcgtgcgaagtgtttggagttcaaaatcacacttatccagttaaaggttcaggtcggatacactgcctttgacgtattgaaaccttaaattagggattacgtatgagcagtctggatagcagaacctgtagtcttacacagtcaagtcatatgtatggattacactatcgaatacatactgacttaga

SEQ ID NO: 25604 - DNA, 220 bp, Glycine max
  Clone ID: LIB3108-006-Q1-K1-G11
gatgaacatgatcacaagtcccatacacggtctacccaagatcatcgactcgctcactccagatattttgtctaatacatatggaactactctcaaatcatgggaaagcctataagcttgtttacccttgaactactcaaactatccttgcataatgcagccaaactaccacctcgatctctaccatgatcccaccgacgtgttgtctaacaataccggc

SEQ ID NO: 25605 - DNA, 333 bp, Glycine max
  Clone ID: LIB3108-006-Q1-K1-G12
taccggtctcggaagacccaggccgacgcacacgtgcgcgcacacgtgtgccaaaaacaagcaagctgactcatgaggggcaaaaatgggagcatgcggctccatgggtatgtattaacgatccttgtatattaagatctttaatgtgtgaccattagacgccttattcgagaaagttagcattaggaatatccgatcatataatgcctactgcggaagacattgaccggcccataccgcattaagtacttagcactattctcttgctaatccacgtcctacctcactggcgactttctagatgactacagcttacacactggtgcactttac

SEQ ID NO: 25606 - DNA, 303 bp, Glycine max
  Clone ID: LIB3108-006-Q1-K1-G2
cccacgcgtccgaaaacttacccactccatgttactcactcaaccacaaccaccatgttctgatattaccctaaccacacttttcacacaccaatcaaactaatgcaaatgcgcagcatgtcaaccaccatggcataatactgtctcctaccacccatttctcaaccactccttcttactcgaaaccccgtcttgtctacaataacaactctttcttctctctcaagtcgaggagtcttactctctctcactagaaggctgctgcttctgagaactgcgtcgggaccgccgtgtagccttcga

SEQ ID NO: 25607 - DNA, 342 bp, Glycine max
  Clone ID: LIB3108-006-Q1-K1-G3
ctgaagagttcgaaagcggaaatgctcgagagccatcactcctgatcaggcagagataccgggaagccgcatacttgatcaagaagggaaagatgtgtgctctcttcatgaaccatcttgatgcacgaactggtcgtcttgctggaaccacccaatactctgtcaataaccatatggtgaatgccagccttatgaacattgccgataaccccagcaatgtgcagcttactggtatgtataacatggcatagaatgcccgtgtgcccatcatcgtcaccggtaacgatcgtttcacactctatgcacatatcatccgtgatgcgcgaatcgaaaattctactg

SEQ ID NO: 25608 - DNA, 218 bp, Glycine max
  Clone ID: LIB3108-006-Q1-K1-G4
gccaatcgttcttaagcctgcatatgagattcttgtcattctgaatcaaacgtctctgacgacggaccggtttcgcgattacgaagggcatgctgtataatacgtgaatcaagcatctgatttacactataaggcatcctatgcgataaagttacatctctacctgtacgcataggagcatttcacaccgcatctgacataccaggagacccctcaga

SEQ ID NO: 25609 - DNA, 143 bp, Glycine max
  Clone ID: LIB3108-006-Q1-K1-G5
gtcattctttcttattaatgcatatcagattctgggaattctgtactataagttttataggactgtgatatatagcaattattaagtgcatactgatcattgcgtatatcaagcacctgatgtattctataagacgatttatg

SEQ ID NO: 25610 - DNA, 241 bp, Glycine max
  Clone ID: LIB3108-006-Q1-K1-G9
aaaaagagttctttcaaaatgcaaacagcctttaccttctttgaccccaacgttgtgccatgggcacccgcaaagagtgtctgccatattggcatttttcccaccaaattgaaagccccgcgctcctcacctcgttactctccgattagggttgcaaccgtgtagcccgacactttaactgtctactacaactctgcgttctcagagtttcctgcagaagcatgcgaaactgtatgagggg

SEQ ID NO: 25611 - DNA, 295 bp, Glycine max
  Clone ID: LIB3108-006-Q1-K1-H1
catattagagaaaactatattgaattaaaatccttatatatattctaaggcttacacatatggataacgtttagcccgatgctgcagattgcttggatggttgcactactgtctgagtataaagcgactacaggcttgaagcacggtgtgatcgcaagtgcagcatttgatgcggtccagattccacaatcaatgacgacatgggatgagtatgtaaaggcacatctcaagcaagcagtgtctgcttgaccaacaccgtgtcttttatagtacgtgcttatatatgatataacat

SEQ ID NO: 25612 - DNA, 431 bp, Glycine max
  Clone ID: LIB3108-006-Q1-K1-H10
cccacgcgtccgattctgtgacggatcacttcagaagcataatcaacaagggcaaaaagggtgcaaaagcggaactcaaatctagtattgaggaatacgaagagaaactaaacaaggtccacatggagagaaaggaacaagaaataacagctagaaatgcacaggttcaccaacagaaggttggcaatctggaaggtcttctgaggactgagaactttgctaaagaacaaaacaatgcagataatgctgaagttggtgctggcgaaattatcaatcctgaagctccagagagtacacttgaagagaacaacccaaagtcggtagaaaatgaagagatgaacctaatttcggaggagattgaagagaacagcaaagagtctaaattaattgaagagaaccaaaagcctgaagaaaatgaagagaacataaaa

SEQ ID NO: 25613 - DNA, 189 bp, Glycine max
  Clone ID: LIB3108-006-Q1-K1-H11
ctttcgagatgatcctggccaacatcctcatacgctctaaacatctacattgagaatatggggacgcttaaaatgtacaatgttaatcgcttttcaatgatgatcccaataaagcctatcgacctatatactgtgtctgataacctgtcgctcgaacctaaccctactacatacattatcctgaatgtt

SEQ ID NO: 25614 - DNA, 285 bp, Glycine max
  Clone ID: LIB3108-006-Q1-K1-H12
aattccctgtcgaccacgcgtacgacacgcgttcgataattaagtgaaacaaggcttttcaagaaatgcctatcatcatactcagggggtcatggctgattactaagaggactatagctcatatgaatacgctacagacttgaatgttaatcagcctatcacgactaaaggaactactattgtccatacgaactataacgaaatgctatacgatgactgttgaactgcagataccaatatatgtacatatcggatgaatgacttaaacattcgcgctgtcactaa

SEQ ID NO: 25615 - DNA, 362 bp, Glycine max
  Clone ID: LIB3108-006-Q1-K1-H2
ataagatgaagaagatggtggttgcaatgatgcttatatttcttctaatttctacgcaaatggagagcgttgagcccgatgctgcagattgcttggatggttgcactactgcctgtgttcaaagcgactcgaggcttcaagcacggtgtgatcgcaagtgcagcattagatgcggtccagattccacaatcaaggaggacatgggttgagtatgtaaagtcacagcgcaagcaagcagtgtctgcttgaccaacaccgtgtctttcttagtccttgcttatatatgatataacattctatagtcttcccgatgctgtagtagcattcaagataacatggatgatagacagctttttaaagat

SEQ ID NO: 25616 - DNA, 104 bp, Glycine max
  Clone ID: LIB3108-006-Q1-K1-H3
gttaatcgtacgcaagagtaaatgcaaaattgtctgtatgtctgatcaagcttacattcaggaaattcgcatacttcatcgttaatgctacgatgttcagtttc

SEQ ID NO: 25617 - DNA, 351 bp, Glycine max
  Clone ID: LIB3108-006-Q1-K1-H4
gacccacgcgtgcgccgacccgtgggcggacgcatgggcagacgcgtgggtttcaattagccatgtcactaaagtcagttactgtattgactacatatctcatctatgcatccatagctgctaagtcagctatggatccctacaaggccctcaacatcatcctcaacccaaacggaaccctcacacgcttaagcattcctccacaaagcccttcctcaccggatcccactctgcccacagcggttctctccaaaagatctaccatcaaccaatccaagcacacctgggcccggatctacctaccccacaaagcactcgaatatttccccaacaccaacttcaaactaaccc

SEQ ID NO: 25618 - DNA, 352 bp, Glycine max
  Clone ID: LIB3108-006-Q1-K1-H5
gtcagttgcaggaaaaatggtttcgctgaaactgcagaagcggctcgccgcgagcgtgctcaagtgtggcagaggaaaggtttggcttgaccccaatgaagtcaacgaaatctccatggccaattctagccaaaacataaggaagctggttaaggatgggtttatcatcaggaagcccaccaagattcactctcgctcacgtgctcgtcgaatgaaggaagccaagaggaaaggacgtaactctggatccggtagccgtaagggtccaaggaaggcagggtttccaactaaaattctatggttgaggagaatgcttgtgctaaaaccctggtttcgaaggtccaggaattct

SEQ ID NO: 25619 - DNA, 293 bp, Glycine max
  Clone ID: LIB3108-006-Q1-K1-H7
gacctatcttggtagagatttgaagtttaaaccttcaaattaatcaaaccattttaatttgcctttagattctgagtcactgctgctatggcgctacgcgtacttcttgtgttggggatggtgctgatgttgtgccttgttaaggcttcatctgatccaaagatagaagaagaaatactggaagcagaagaagaactgcagtttcccgataacgagccacttatcgtgagagacgcgaacagaaggctaatgcaagatatggattgaggtgggttgtgcaagacaaggtgcat

SEQ ID NO: 25620 - DNA, 397 bp, Glycine max
  Clone ID: LIB3108-006-Q1-K1-H8
tcggtctctctcactcacaggcacagcaacagcaccatggaaggcgcaacgatgttactgttgtcgccaatatcgagctgcaacgtgcgcagtaagcatttaaactactcactcagaaggcgtagctgttattcttctcccagggcactgaaaatagtgagcatggcgaaggagggaagcgacaccggcaacggcgtggtagaaaaagcagccatagcgggtggattgatctcaaccccagtaattgcttggtctctctatactctcaaaacaacagggtgcggtcttcccccaggaccaagtgggtcaattggagcattggaaggtgtgagctacctcgtggtaatgggcatagtgggttggagcttgtacactaaagccaaaaccggttcgggac

SEQ ID NO: 25621 - DNA, 402 bp, Glycine max
  Clone ID: LIB3108-006-Q1-K1-H9
cgaggcgatcgcgtcgctgaaggagaggaccggatcgagccagtacgcgatctcgaagttgatggaagacaagcacaaggctcacctcccggccaacttcaagaagctcctcctcgttcagcttcggaaacttaccgccgccggcaaactcaccaaggtcaagaactcttataagatctctgccaagcccgccactgctgtgaagccgaagtccgctgctgccgccccgaaggcgaagccgaagtccgcaactgctgcagctaaggcgaagctaaagccgaaatctgctgcagcgaagctgaagaaggctgctgtgaagccgaaacggaaatcctctgctgtgaagcctaaatctaaggctgcggtcgtgaaatctaaagctgttgcccctaagcctaaagc

SEQ ID NO: 25622 - DNA, 361 bp, Glycine max
  Clone ID: LIB3108-007-Q1-K1-A1
acaaaatccgaagctgcaaaattgcttctaagtgcagtaaccgaaacccaatgacccacctagccatggtttggcttcaaacatggctccctgaaccctagcgtttatccctcttcgccaacaacgctgatccgatcccgatctgtttttgattccgatccgatccaattcaatggctggggcagcctctgctctgttcctccttgacatcaaaggccgcgttctcatctggcgcgactaccgcggtgacgtcaccgccgtcgaagctgaacgcttcttcaccaaactcatcgaaaaagacggggatccgcattcttaagatccggatgtgtatgataatggtgtgacctacttgtttata

SEQ ID NO: 25623 - DNA, 271 bp, Glycine max
  Clone ID: LIB3108-007-Q1-K1-A2
gggcaaagattttgagcacaatggcctcgacacaatgctttttgcaccaccacgccctcacgactccagctagagcttcaacacagcgcctagttgtgagcaccaaaccaaaccacattgtttgcaaggcagcacagaagcacgttactgtccaagagggtgaggacactactactggccttgtctctcgcaggttggccctcactgagctcattggtgctgctgctgttggctctaacgtggcacctgctgatgcagcctatggagaagc

SEQ ID NO: 25624 - DNA, 332 bp, Glycine max
  Clone ID: LIB3108-007-Q1-K1-A3
cccacgcggacgcccacgcattcgccttaatcttcaatttatatcaatactttatcttcgggcctcatgatatcataattacgctatgccaaaagctcattgcttaatgaaacaatggtgcagttaactgatctcaaaagaaatgttctgtatacaaggtgtaggacactactgttgtgggagtgtctacacacgttggacgtaactgaattaataggtgccgctatcagatctctctaaatggcgatgctgctgatacaggctatattgtatctgccactggggccagagaagcaaactcttttgctgactgtgctctaaacaaagtccat

SEQ ID NO: 25625 - DNA, 299 bp, Glycine max
  Clone ID: LIB3108-007-Q1-K1-A4
cacacgcggccggcatcgcctccaccttattctacacattatatatatcctctacatccaggcttggggataccaaagctgcgagatgacaacaactcacacaatatggaaaccctgcacctgttcactcttcttggaagaccactgctttctgtcgcaggattgcaagcaatgttatggcaatggctaccaccagagaggcacccgcagcagaagttgccacgaccgaactctctgatgccgagacgcccgatattgtgaagactattcaaaacacttgggacaaagttgaagacaaa

SEQ ID NO: 25626 - DNA, 316 bp, Glycine max
  Clone ID: LIB3108-007-Q1-K1-A6
cccacccgtccgaatattcaatctgggcatttataacttatgcccaaaattgaggaaaaggggggaagaaaaagggcgaagcttgcgaaaagataaaaaaccaaattgcttcgattcacaagggagcttgaaaaaaaaagccattattgggcgcagaaaaggggaaatatttttttagcggaggaacacactctacaatgtatagcaaatctgacacatctaaaaaaactctttggatgtttctaatgcttcaaatctcaagcattgtggggaaagaaaaagatattttttattgtgtatctttgggcattaaata

SEQ ID NO: 25627 - DNA, 357 bp, Glycine max
  Clone ID: LIB3108-007-Q1-K1-A7
ggaacgccagcaatggctaaagcagggaaagtgaggagctccatggaggaaaagccttaaagcggctcaaatatggggatgggggcatacttgatagcaactacaattgccgcaaccatgtcaagcccagacatggcttgaggtggatgatgagactcagaactgaaagaacctggcttccgttggggctcagcatcaacctcattgattagatcctgcagggtgtctgaaaccttatatgggctctctactttgactacgctagcaccctggaaaaggatgaagagactggattgtgcgtctaaaccgccatgtgacgaagcatgcacttgtagaaattgcaaagacttatctctt

SEQ ID NO: 25628 - DNA, 310 bp, Glycine max
  Clone ID: LIB3108-007-Q1-K1-A8
gccacgcgtacgatgggtcatgtttgaaatttaataacctatatgtacaaacaggctcagggggtgtgtaatacggggagacattcatacaccataccaaccagaattgcatctatcatctcttacctggatataaattacatggatgtgaaacgacctacttatatgatctggctccggttgagactgagtctcaacttcattggataccttgtgcagatactgagcatcattatataggctatattctcactgtactgtaacatcctgagaaagaatgaagcgtatgattcgcgtgtctataatcaca

SEQ ID NO: 25629 - DNA, 85 bp, Glycine max
  Clone ID: LIB3108-007-Q1-K1-B1
accaaacgtgcggctacacgatgggttgtaagtactgtattcggtaccaaatcacccaccgagccatgggtagatttaaaacgtg

SEQ ID NO: 25630 - DNA, 304 bp, Glycine max
  Clone ID: LIB3108-007-Q1-K1-B2
cccacgcgtccggatttttgttggatgggattcaaactatttttcccttctgatatgaacgttgctgtaagcattatgttatttgcgttattttcattattagatggtatactcaattgttatgcactttacctgtaggaattattctgtcttgttaaatgacatatcttgtctttagtcaaaaaaaaaaaaaaaaaaaaaaaataaaaaaaaaaaaacaaataaaaaaaaatataaagggggaccctgctgattcaccccatgggggagctcgctttgggtgtggaaaatctaaaactttcgc

SEQ ID NO: 25631 - DNA, 459 bp, Glycine max
  unsure at all n locations
  Clone ID: LIB3108-007-Q1-K1-B3
ctagtatcttatagcttccatttcttctcttctattccctcctagttccaattcttcaccctagtctaaaaataatgtcattcacttccaaggtcattgctctgtggtgcaagaaacatgggaatgatgatggtgtcgatgtgtatgatgctcctgctgccactgcttgcattgaaggaaatgtttgcaattggcatggagattttgtaagttttgtcccagttgcattggtggagggtgacgatgacgacgatgacggaggttatgactacgctcccgcagcataaactataaatgtttggttaccttgtatactatccaacttgtagtgaccgacatattagaatgtctgcttctattcttaatttttagtttggcgccaattgaaagcgattaagctacaaaattatgtgcgaggtgactttatgttgatgtgtangcatgcactatcaattattt

SEQ ID NO: 25632 - DNA, 374 bp, Glycine max
  unsure at all n locations
  Clone ID: LIB3108-007-Q1-K1-B4
cccacgcgtccgcccacgcgtncggtttaatcttcaagtcacattaattcttcatcttttgtccacattatatcataatttgtttattccacaagctttttgcttaaggaaataatggttcagttagctgattgaaaaaaaaaaaaaaaaaaaaaagaaaaaaaaataaaaaaaaaaaaaaaaaaaaaaaaaaaaaaaaaaaaaaaaaaaaaaaaaaaaaaaaaaaaaaaaaaaaaaaaaaannngggggggggcctttttaaaggaccaaattttacgcccgggggttggcaaggaaatattttttttatggggaccccaaaataaattcaagggcccggtgttaaaaacgggggggggggaaaaacccgggg

SEQ ID NO: 25633 - DNA, 352 bp, Glycine max
  Clone ID: LIB3108-007-Q1-K1-B5
cccacgcgtccgttctaacaaattaaaaattttaaaaaaaaaaaaaaaaaaaaggtaaacgtgaaaatataaaaattgaaaaaaaaaaaaaaaaaaaaataaaacttaatataaaaaaaaacggttcgcccttttaaattatccaattttacttcccctttcttccaacttattaccttttttttggtgtcacttaaattaaatttattggccgtcattttacaactttaggacttgaaaacccttgcctttccccaacttattccctttgcacttcatccccttttaaccatttgttgttttacctaaaagccctttaccaatctcctttcccaacatttacccaccttta

SEQ ID NO: 25634 - DNA, 316 bp, Glycine max
  Clone ID: LIB3108-007-Q1-K1-B8
ggaagatgagtttgagggcatcagagatagcgaagaagttgaatctgcaacctcacccaggaggtgggttttacgtggagacattccgagaccattccgtccagctttcgacctctcagctcccccccgaatacaaagtggatcgccctgtatcgacctccatctattttctcgttccttctgggagtgtgtctcgccttcatcgcataccctgcgccgaaacctggcatcattacatcggcgaccctctcaccgtagtggaattgaatgagaaagatgggagcgtaaaattcacttgccttggatcagatctgac

SEQ ID NO: 25635 - DNA, 210 bp, Glycine max
  unsure at all n locations
  Clone ID: LIB3108-007-Q1-K1-C1
gcgcccacacattctaccacacatacnatcacattttctttcttctacacccaaaaaaacaccgcaccccgcaaatttaaaattgtcccggccaaaacaaaaaactttcttcattttcaaaaacaactcataatatctcctaatctctttattcttccgatgccacttctttcattttataaacacttcacaattatattcatcacattc

SEQ ID NO: 25636 - DNA, 329 bp, Glycine max
  Clone ID: LIB3108-007-Q1-K1-C2
atcagcaccacattcacctgagctttttgtgaggattccaaagcatggcttcccttgcagcatccactgctgctgcttcccttggcatgtcaaaaatgcttggaaaccccatcaacctcagtggtgccacaaggccagctccatctgcctataaccctgcctccttcaagactgtggctcttttctccaaaaagaaggctgcacctccaaaaaaagctgcagctgctgctcctgccaatgatgagcttgccaagtggtatggtcctgacagaaggatcttcttgcctgagggtctcttggaccgatctgagatcccagagtacttgacc

SEQ ID NO: 25637 - DNA, 436 bp, Glycine max
  unsure at all n locations
  Clone ID: LIB3108-007-Q1-K1-C3
cccacgcgtacgattgtctttgcctcactttgctgccgtacctaatcggagagctcccggtgactgcgatcggatttcatggctcctaagaaagacaaggctcccccaccttcatccaagcccgccaagtctggtggtgggaagcagaagaagaagaagtggagcaagggaaagcaaaaggagaaggtgaataaccaggtgctgttcgatcaggctacctatgacaagctcctctccgaggcacccaaatacaaactcattactccttccattctctctgaccgtttgaggattaatggatcacttgcaaggaaggctattanggaattgatggccagaggttcaataaggatggtgtctgcccatgctagtcagcagatttacactagagcgacaaacacctagatgtactgggtataatttatgtagtattgat

SEQ ID NO: 25638 - DNA, 382 bp, Glycine max
  Clone ID: LIB3108-007-Q1-K1-C4
ctctctttgatacccttttgttctttttggtgctttaatttgcactagcaagggggttggttttatttctgtttgcttgcaacaatggctgtggctaataagttactttctgttttgatcattgccctcattgccatttccatgcttcaaacagtggttatggcatctcatggacatggaggccaccactacaatgacaagaaaaaatatggacctggcagtctcaaaagcttccaatgcccatcacaatgctcaaggaggtgtggcaagacccagtaccacaagccctgcatgtttttctgtcagaagtgttgtaagaagtgcctatgtgtgccaccggggtattatgggaacaaagcagtgtgcccttgctacaacaact

SEQ ID NO: 25639 - DNA, 466 bp, Glycine max
  unsure at all n locations
  Clone ID: LIB3108-007-Q1-K1-C5
agcacctgcaaatcaaccttatcatttacctgaaaagcatgctgcatccactgctcagacgagtgcctcagaatatgccatggaagccttctggtccggcccttaatcctaaacctgttgttagtgttaggcaagacacaattcttgggaagcagtttgaggatgtgaagcagttctacacactcgggaaggaattgggtagagggcaatttggggtgacatatctttgcactgagaattcaactgggttgcagtatgcctgcaagtccatttccaagaggaaacttgtgaagaaatctgataaggaggacataaagagggagattcagattatgcagcatttgagtggtcaacccaacattgttgagttcaaaggggcttatgaggataggaactcagttcatgttgtgatggagctgtgtgcaggtggngaactttttgataggattattgccaaggggcatta

SEQ ID NO: 25640 - DNA, 408 bp, Glycine max
  unsure at all n locations
  Clone ID: LIB3108-007-Q1-K1-C6
cccacgcgtccggagaactaagaaggagaagcaaatggcttcctcaatgatctgttccccggctgttaccactgtcaaccgtgccggtgccggcatggttgctccattcactggcctcaagtccatggctggcttccccaccagaaagaccaacaatgacattacctccattgctagcaacggtggaagagtgcaatgcatgcaggtgtggccaccagttggcaagaagaagtttgagactctttcctacctgccagaccttgatgatgcacaattggcaaaggaagtagaataccttcttaggaagggatggattccttgcttggaattcgacgtggagcacggtttcgtgtaccgtgagcacaacaggtcaccangatactacgatggacgctactggaccatgtg

SEQ ID NO: 25641 - DNA, 455 bp, Glycine max
  Clone ID: LIB3108-007-Q1-K1-C7
cggacgcgtgggcggacgcgtgggcggacgcgtgggcggacgcgtggggcgaaatggacgatgtaccagaacttgtgatgagcaaagggatcatgtagcagacgagcaaattttgcgtgtcatttttctggaccctgaacgctctagccctgctttggataagcttaaacggcagctagctgaggctgaggctgcattggaagcaagaaagaagcccccggaggagacaggtcctcgagttgctggtgaaggacttgttatagatgaatggaaagaaagaagagaaagatacctggccaggcagcaggttgaagtggtagattcagtgtaaaatatttctttatttttttggttgtgcccttaatgttctcccatttgtatgtccagaaattgaattgcttggccactgcatatgtcaaatgtggttgagtgacctactaaaaagtgcctaaata

SEQ ID NO: 25642 - DNA, 337 bp, Glycine max
  unsure at all n locations
  Clone ID: LIB3108-007-Q1-K1-D2
cgcaggaggagcacgaccaccgcttccgtatcttcaagaacaacttgctccgcgccaagtcgcaccagaaattggacccctccgccgtccacggcgtcaccaggttctccgatctcactccgtctgagtttcgcggccagttcctcggcctgaagccgctccgccttccctccgacgctcagaaggctccgatccttccgaccagcgaccttcctaccgatttcgattggcgcgaccatggagctgttaccggcgtcaagaatcanggctcgtgcggatcgtgttggtcatttaacgccgntggagctttgaaggtgcccatttttttttaccgggg

SEQ ID NO: 25643 - DNA, 331 bp, Glycine max
  Clone ID: LIB3108-007-Q1-K1-D3
gcgcggacgcgtgggtacaaatcctgtccatgctactatttttgctgctttcactcccaaaggggaagggggggaacaactctatgattgcaagccttatacaaacattggcaaacctttttaactaacttgtaacgcttaaatggttttaggagggagtgtttatgttggtgaaagcttggaaaatggctacttctattgtcatgcatagattgaagatttaatgctcaaatacctatttaaggtttctaaaatattaaatgacctaggaagtggaagtaatgttgatgtttgtgtgataaccaaagggacataaggaatatctcacgaa

SEQ ID NO: 25644 - DNA, 366 bp, Glycine max
  Clone ID: LIB3108-007-Q1-K1-D4
actgactcttcttaagaaacacctgttcaattatcaagggcatgtctcagctgctttagttcttggtggggttgatatcactggacctcatttgcatactatttatcctcatgggtcaactgacaccctcccatttgctacaatgggatcaggttcacttgctgcaatgtctgtatttgagtctaagtacaaggaaagtttgagtagggatgaaggcattaagctagttgttgaggcgatatgtgctggtatatttaatgacctaggaagtggaagtaatgttgatgtttgtgtgataaccaagggacataaggaatatctcaagaaccaccttctaccaaatcctcgtacctatgtcaatccaaa

SEQ ID NO: 25645 - DNA, 412 bp, Glycine max
  unsure at all n locations
  Clone ID: LIB3108-007-Q1-K1-D5
gcgtcgctccgcaccagtttcaccgcacgaatatcttgttgtttggagcgatccgagaaggactctgtaaacatgttggtttaccaggacctccttacaggtgatgagcttctctctgactccttccgttacaaggaaattgagaatggaatgctgtgggaagttgaggggaagtgggttgttaaaggagcagttgatgtagacattggtgcaaacccttctgctgagggtggaggagaagatgagggagttgatgatgcagctgttaaggttgttgacattgttgacacattcagacttcaggagcaacccgcattcgataagaagcagtttgttaccttcatgaagaggtttatcaagaatttgactcccaagctcgatgcagagcaacangagttgtttaagaagcaca

SEQ ID NO: 25646 - DNA, 439 bp, Glycine max
  unsure at all n locations
  Clone ID: LIB3108-007-Q1-K1-D7
cccacgcgtccgaaacaaatcccagggagccaccaaccatggcttccaagctctgcgactggtgcaaatcagccactgctacgttgtactgccgccccgacgcggccttcctctgcggcgcctgtgactctaaggttcatgccgccaacaagctcgcatcgcgccacccgcgcgtcgtgctctgcgaggtgtgcgagcaggcgcccgcgcatgtgacctgtaaagccgacgccgccgcgctctgccttgcctgcgatcgcgatatccactccgccaaccccctcgccagccgccacgagcgcatccccgtcacgccgttcttcgagtccgtacattcagtcaaggcctcctcgccgatcaacttccaccaccgcttcttctccgacgccgacgctgatgctgacgtcagcaccgaggaggccgangccgcgtcatggct

SEQ ID NO: 25647 - DNA, 229 bp, Glycine max
  Clone ID: LIB3108-007-Q1-K1-D8
cccacgcgtccgaaacaaatactaaagaatttacaaccataaaataaaaaactctgaaactgatacaaataaaaacggtgctaccttaaactaacaccccaacacacacttactctacagaccctgtaactctaaagttcatgcacacaaacaaactcacatataaccacacccaacgtcgcgctcttttaagtgttccaacattcccccgcacatgtgacctgtaaag

SEQ ID NO: 25648 - DNA, 333 bp, Glycine max
  Clone ID: LIB3108-007-Q1-K1-E4
tggatatggatgggcaattgcaaaatctcttgctgcagccggagctgaaattcttgttgggacatgggtacctgctctgaatatttttgagtccagcctacggcgtggaaagtttgacgaatcacgcgtattaccagatggttcgctgatggagattaccaaagtttatccattggatgcagtttttgacaatcttgatgatgtgccagaagatataaaagcaaacaagcgctatgccggttcatctaaatggacagttcacgaagttgctgaatctgttaaagaagactttggcagcatagatatgcttgtgcactcacttgccaatggacc

SEQ ID NO: 25649 - DNA, 412 bp, Glycine max
  Clone ID: LIB3108-007-Q1-K1-E5
atgggatgttgacaatacccggctgaagcatattttcagtaaacacggtaatggtgtgagggctcgggtagtctatgacagggagtcaagtccatcacgtggctttggctttgtcacaatgtctgatgagacagaaatgaatgatgccgctgctgctcttgatggcaagagtttggacggaagggcaattaaggtgagtgttgctgaggacaggccaaggcgtgtctccttttgagcgttagcatatgtagttccccatgtcacctgctggagttctcttgcatttttttaatagctgacgatatactatagtgtcaatttttgtttaaaggaaaatcctttcttggggcgccaatttcagattagatttaaatatttcgttggtattaacttaatgtccagatgaaagtta

SEQ ID NO: 25650 - DNA, 184 bp, Glycine max
  unsure at all n locations
  Clone ID: LIB3108-007-Q1-K1-E7
ggaaaagccgggccgaccgcacgcgtccgnacaccccaacccttattcaaataatcccttacacacaccctaaaacatacactgggccattcgctaatccttaaagagcgcatttaggcaactacaaatactctaacattttatgactatgacctgcacaccatggacacatcacacactatac

SEQ ID NO: 25651 - DNA, 351 bp, Glycine max
  Clone ID: LIB3108-007-Q1-K1-F1
ggcagcgcaactcgtcttcgttccttagactcggctcgatctgcgagaggggcttcctaggcctccctctctctctctgctgcaattcaggtgatttgtcttcacatggaaacattgcttgcttgagggactcctttgtctcaaaggagttggagttttctgggtttttgtgggattggagatttagagagtgcccctgcactccctgttttatttcatcaccatgattgccactgaaactatagtgccgagtacaaaattgaagatcaagttttcaaccaaaagaatggaggttgagtctgggccaaaatatgaatttggacagaaagtgtctcacactgacgaaaacag

SEQ ID NO: 25652 - DNA, 370 bp, Glycine max
  Clone ID: LIB3108-007-Q1-K1-F2
gcgcccacgcgtccgcttcacttggacagatagtcactcttcgattccctcactcacattagggaatacggatgccggcgccgggggaaaacgccagcctgggcgtcaccgccatgtcctacatcgccgtcgactacctccgccacctttctccggtgtggcactcgcgtctgcaaccggcactgtggtccctcctcgccctcgctgccgtggaccgcgtcccctcctaccggcactgggccgcggagttccggtcggcgattccgttcatcgcctccatgttctttatgctcgccgccctcctctacgaaatgatctccgtccgctccgacaccgctgtgctcggcctcaactggcacctgaatacacc

SEQ ID NO: 25653 - DNA, 248 bp, Glycine max
  Clone ID: LIB3108-007-Q1-K1-F4
acgatatgtatcgccaatagcgaagtgtgttgctgcattcgcagctaaaattcttgttggggcatgggtacctgctgtgaatgtttctgaatccactctacaccatgcaaagttctacgaatcacgcctattaccagatatgatcgctgatggagattaccaaagcttatccattggatgcagttcttgacaatctcgatgatgcgcctgatgatataaaagcacacaatcgctatgccatatcatct

SEQ ID NO: 25654 - DNA, 339 bp, Glycine max
  Clone ID: LIB3108-007-Q1-K1-F5
accacacgtacgtaaaagagtattggattttatttgcatatatatatatattggtgcacggacattagatgtatatatatatatgcataaataatcataaaagacatgtaagttttgagcttgacgcgttacatatataactatgtctttaattattgctaatgttcatacatcgtatgatattattgacaaagagatgggtggattgaatgatatcatccaaaacatgggtgatgcgatatcatatatatgaaccattgaccccagttgggcatacgttgctgatgattatgaaaagatgcatatccttaaggacttgttagctaaccaaaaacatgc

SEQ ID NO: 25655 - DNA, 395 bp, Glycine max
  Clone ID: LIB3108-007-Q1-K1-F6
cccacgcgtccgaaaaaacagattcaacttttagcatacctgtaatcaatgcggggcatgggcatatacaacatggcactcaggcactaatacatctttataccattgaaagagagataggacaactgtaccaaattaaagttgggcttgtgggaaaccttgctaatgagagaacagttctctcacttgcatacttactagccaagtatcatgatgtgaaaatttattttgtctctccaaacgcggttaaaatgaacgatgacataaaatactatgtgacattaaatggagtagagtagtaagaaagtgctgatttgttgtaagatgcttataagtgcgatgtggtttattaaactcgcattcataaagaaagatttagagagaaaattgaactt

SEQ ID NO: 25656 - DNA, 368 bp, Glycine max
  Clone ID: LIB3108-007-Q1-K1-F8
cccacgcgtccgaacgaatttatctagacttttttaaaatgacatacaaacatgaaaacgttatttatttagatggaaagggaaactacaccactattcatccaatatcacccttcaatatcaaatactatactttatacgctttacataggccaaaatcatatacacacttaataaatgaataacatattgagaattttacatgactcaaaatatttaacacatatgacctctacaataacagtaatattctactacacatacaaaaatttaagccatactatataccactcatcgagaagtatatcccaacatttcttaagcttagtaactttaaaacatacacatctatatggaatcaacatcat

SEQ ID NO: 25657 - DNA, 335 bp, Glycine max
  Clone ID: LIB3108-007-Q1-K1-G1
gacaagtggtcatgagcatggaggcaagaattggagtgatgggcaccaagttgtgtatgaggagctatttctaattctacggagaggttggtcctgtcactgtcgagggtttcaaagaaggcaacatcgactcccagatcaaaactgaggccaccgatggatacgacgccggccatgttggataccgaaaggtcagagaccgtacattgaccaaacccgaaacgggtcatctccataaggccggcgccattcccatgcgccatcttaacgagttccgtattcaaaccatcgatggcttggaccttaatcaacgccttctttgtgatgaaactttt

SEQ ID NO: 25658 - DNA, 372 bp, Glycine max
  Clone ID: LIB3108-007-Q1-K1-G2
cccacgcgtccgctttccttgtttccgaggagggccaaccacatatgctaaacaaggaagcgaatgggtaacctccttcagagctacatcacccttctctttttttccagtttcataaattctacaccatgggcacggaggttctacggccacaagattgtttcacccaccgcatcgctgttccaccggcggggttttcccggagaagaacctctgggacacacaacaacaattacttcaggggcacgcggaagccggttacccgacccgaacagagaaaacgggttgtggagaaaaggcccaacttcgatgattcgaggttttcgaggttggagatggagaacgtcaccattctccggaggggggagtcgc

SEQ ID NO: 25659 - DNA, 294 bp, Glycine max
  Clone ID: LIB3108-007-Q1-K1-G3
cacacacatagaaacccaacaacaagaatgaagaagatgattctaaccctcttcttcaatatcattttatctctcctctccctctcccacgcctccgtggtggatttctgcgtagcagactacacaggccccaatggccccgcagggtactcatgcaagagcccagcaaaggtcacggtggacgacttcgtctactccggccttggcaccgccggcaacacctcaaacatcatcaaagccgcggtgacgccggcgttcgacgcgcaattccccggcgtcaacgggcttggaatc

SEQ ID NO: 25660 - DNA, 358 bp, Glycine max
  Clone ID: LIB3108-007-Q1-K1-G4
cccacgcgtccggaccgtcttcccgttaccttgcgcgggccgaagacgccgacgccgatgacctacggcgtgccgatggcctgcgcacaggtgaagtccgccgtgctgctcgccggcctcaacacgcccggcatcacgacggtcatcgagccgatcatgacgcgcgatcatacggaaaagatgctgcagggctttggcgccaaccttaccgtcgagacggatgcggacggcgtgcgcaccatccgcctggaaggccgcggcaagctcaccggccaagtcatcgacgtgccgggcgacccgtcctcgacggccttcccgctggttgcggccctgcttgttccgggctccgacgtcacca

SEQ ID NO: 25661 - DNA, 403 bp, Glycine max
  Clone ID: LIB3108-007-Q1-K1-G5
acggttatgactccttcttatacgactttatcttattctcatatagatatataatggggcattggtatcacctgaaagggtcttgctcataaagaaacttaaaatacagaaacgcctgcaagtgcggcaactacttataaagctgtaagatgtacccaaacttgagctacaccgagtcaaccaccacctataccttagtcatgggaatggcaccaattaaagctcaattagagagtgctgaaatgcgtgtattcgctaagaacgacggctgcaaatgtagagctaactgcacctgcaacccatgcacttgcaagtgatgtgttgaacaactaaagcttcaaacagagatggcccttataaataatgataaaaactatgtgtagtttcaaaaattcaaaattat

SEQ ID NO: 25662 - DNA, 361 bp, Glycine max
  Clone ID: LIB3108-007-Q1-K1-G6
cccacgcgtccgaaagagcagcttcaactttttgcatacctgtaatcaatgcggggcatttgcattttcagaatggcactgtgacactgattgatctttataccattgaaagagacatacgaaaactggaccgaattaaagttgggcttgggggagaccttgcttatgtgagaacagttctctcacttgcatacttactagccaaatatcaggatgtgaaaatttattttgtttcttcaaacgcggataaaatgaacgatgacataaaatactatctgacatcaaatggagtacagtgggaagaaagtgttgatttgttggaacgtgcttataaatgcgatgtggtttatcaaactcgcat

SEQ ID NO: 25663 - DNA, 275 bp, Glycine max
  Clone ID: LIB3108-007-Q1-K1-G7
cccacacctccgaactaacaaatacaacttttttcatacctacattcaaaataggacacgggccttaacaagatggaactcacgcctacacagatctttataccattgaaacatacacatgtcgaacataccacgttaaaatctcgcttcggagcaaacttaatcatccgagaacatacttatcacttacatacttattatccacatctcagcaatatgaaaatttatttaacatctccaaactcttctatatagaaacataacatcaaatacta

SEQ ID NO: 25664 - DNA, 290 bp, Glycine max
  Clone ID: LIB3108-007-Q1-K1-G8
cccacacgtccgaactaatttatttagatttttttaaaactacaaacaaacatgaacactggcatatcttaaatcgaaatggaaactaaaccactattcaatcaattcaacctttaaatatcaaatcctataaagtaaaaactttacatacgtctaaatcatatacccactaaacaaactaatcacatatctacaactttacatgatctcaaatatcgaacacatatttaccatataaacctcttatatatttaaacacaaatttaaataaaaactctactatataaaac

SEQ ID NO: 25665 - DNA, 263 bp, Glycine max
  Clone ID: LIB3108-007-Q1-K1-H1
gacacacgaactcttctatggacgcaaattttggacttttttacaacacgattattattaggaactggtttttacataacagtgtgcagtgccctcacactttataaaggcttagataatgccctattgctattagatcacaactgaggccacacattgattcaacgcatgtcacattcaataacccatggacactcaccctactttgcaccttacccacctacgttcattattatcagattggcgctcatcctatgcatcat

SEQ ID NO: 25666 - DNA, 248 bp, Glycine max
  Clone ID: LIB3108-007-Q1-K1-H2
accacacgtacgctcccataagacaggaattttgtgcatttatataacccattcattaaggggaatggtgtatctactatgagtgtgcgtgaactttcctattttatattggattcatataatatacactatcatcttggaggtcatggtgatcctgcattacttcagccacagcatgcttggattactaggcgtactctgtgcttggcttcactatatccaactacaaaaatgattaattcacttga

SEQ ID NO: 25667 - DNA, 335 bp, Glycine max
  Clone ID: LIB3108-007-Q1-K1-H3
gcgcagcctagcctccagaagacgaatcgaaaatgccgtcgcacaagacattcataatcaggaagaagttggcgaataagatgaggcagaacaggcccattccctactggatccgcatgaggaccgataacaccatgaggtacaacgcgaagcgccgtcactggcgtcgcaccaagcttggattatgaggtgtatgctctgcctaggttcaatttatccaattaattaatgctttattttcttgaggcaaaaacaatgtgttgagtttttaatattttgcatttgttcgaagactatattgtgtaacgaacttattgtagcgcatactcatggcg

SEQ ID NO: 25668 - DNA, 364 bp, Glycine max
  Clone ID: LIB3108-007-Q1-K1-H4
cccacgcgtccgcccacgcgtccgggggactttgaggcctggtacccctggccctggagggcaccctacaatgcactactttaacccttcttttaggacttcttccactcctccaaggaaatctcctttcctttcatcagataaagaagggtctggtcctcatggtgctggacttcattctagcaataggttgtctcttgagacagattctaatggctcttcaactgtgacttgccacaaatgtggagagcaattcaacaaatgggatgctgctgaagctcatcatttatccaagcatgctgtgactgaacttgtggaaggagattcatcaaggaaaatagtggagatcatatgcaggactagc

SEQ ID NO: 25669 - DNA, 462 bp, Glycine max
  unsure at all n locations
  Clone ID: LIB3108-007-Q1-K1-H5
cccacgcgtccgcggatcctctaccgccgtttcctcaaagacactctcaactgggccggggatcgccacctcttgtgacgacgacgcttcaaacctccgcgaaaggttcgaggagaacagacacgtggaagaccctgataccattgacaggctcatagcggatgctgaagcttcctacaacaagtggcgccatcctgatccttatattgttccttgggctcctggtggttccaagtttactcgcaacccaactccacctcaagggattgagatagtttataattatggccgagaagataatgactgaaatctgattttttcttgcatccttacaatgaataaaggtctgcaatcaaactgttctgtattactagattgtggattaaatgaccttcatttatgtgatgagcatacatngatacagattgacggaatcatgcctgcttatgatgttgaaaattt

SEQ ID NO: 25670 - DNA, 457 bp, Glycine max
  Clone ID: LIB3108-007-Q1-K1-H6
gcgaacccaacgccacagctgctgagaatgttgagcagataacagcttctctgggaacatgatcatctgatggcatcccatcatcagaagcctcagacaggatcaaagctggtttcattcacttcaagaaggagaaatatgacaagaatccagctttgtatggtgaacttgccaaaggccagagccccaagtttatggtgtttgcttgctcagactcaagggtgtgcccatctcatgtgctagatttccaaccaagagaggcctttgtggacagaaatgttgctaacattgtcccaccatatgaccagtcaaaatacgctggaactggggcaacagttgagtatgctgatttgcatcttaaggtgtctgaaattgtggtcattggacacagtgcttgtggtggtattaaagggcttctgtctttcccatatgatggaacctactctacttgatttat

SEQ ID NO: 25671 - DNA, 256 bp, Glycine max
  Clone ID: LIB3108-007-Q1-K1-H7
accacacctacaaaataactgattcaaatgtatttaaaacaacaaataaattgggacactggctatttttaaaaggcacctgctcataaacataccttaatacaactccatcttttattaatctaccataaaacacatttctctctaatacagctaaaacacttcaactttccacatctcatacacctacatccttactgttctcattctagcatacgaccatgtgtttatcatatcaactctcttttatatctat

SEQ ID NO: 25672 - DNA, 287 bp, Glycine max
  unsure at all n locations
  Clone ID: LIB3108-008-Q1-K1-A1
acgcccacgcgtncgcacacaggctccacaaaacatctcatcattcacccaacaaaatggccctggttctgatgattccgatctcactggtcaccctctggctcggttacaccctataccagcgattaagattcaagctccctccgggtccacggccctggccggtagtcggtaacctctacgacataaaacccgtccgcttccggtgcttcgcggagtgggcgcagtcttacggccccataatatcggtttggttcggttcgaccctaaacgtcatcgtttcgaac

SEQ ID NO: 25673 - DNA, 169 bp, Glycine max
  unsure at all n locations
  Clone ID: LIB3108-008-Q1-K1-A11
ccggattaaattaacattgaacataggtttttgttttttttccgtttattcgtttcttattggtggtggtactaaataaaattaaatagtgtattaattttatttantnnnancaaaaatatactataaaatgggggggtggggaaaatttttaacttttttatataat

SEQ ID NO: 25674 - DNA, 327 bp, Glycine max
  Clone ID: LIB3108-008-Q1-K1-A12
gttgggttgagttggctttggattgtatttctaatctaatctatacctttctgtttcctgtgcttttaaggcacaaatccttctcccttctctcttctttcttcttcttctcctgacccttattattattccttgcccttaccctttaggcaagggaaggaagaaagaataactatattattatctttattgtaatctatctttttattataattataattataattattgttgttattattccttaaatatggattcaccgcgtctctccaacgattccgtttctgcattcaaagacaaggagtcaatggttgacccctttttggt

SEQ ID NO: 25675 - DNA, 363 bp, Glycine max
  unsure at all n locations
  Clone ID: LIB3108-008-Q1-K1-A3
cacacntccaaaaaaaaaaaaaaaaaaaaaaaaagtaaaaaaaaaaaaaaaaaaaaaaaggaaaaaatgaaaaaaaaaaaaaaaaaaaaaaaaaaaaaaaataaaaaaaaaaaaaaaaaaaaaaaaaaaaaaaaaaaaaaaaaaaaaatacggtcgttcttttaaaaaaataaaattttattcacccttaaaaaaaaaaaaatactttttataatttctcactaaaataaaaatatttgacccttttataaaaattttaaaatttaaaaaacctttccttaaaaaaattaaataatattttaaaaaaaaacctttttaataatttctttaaaaaaaaaaaaaatcataactatattttctttt

SEQ ID NO: 25676 - DNA, 455 bp, Glycine max
  unsure at all n locations
  Clone ID: LIB3108-008-Q1-K1-A5
gcgaaagcgaaaagagattcnaatccaaggaagggaaaggaaagtaagagaagagaagaatgggcgaagggggacaagtgattggtgtccacagcgtgnaggagtgggaggaacatctcaagaagggacaagagtccaagaaattgattgtggtggattttactgcttcttggtgcggcccatgccgtttcattgccccaattcttgcggatatggctaaaaagttgccgaatgtcaccttcctcaaggtggatgtggatgaattggcgactgtttccagggagtgggaagttgaggctatgccaaccttcctattcttgaaagaaggcaagctggtgaagaagcttgtgggtgccaggaaagaggagctgcaagacataatagtcaaacttgctgcaattgatgctgcctgaagtgccatatgaatatgttgagaataattgactattgtcttc

SEQ ID NO: 25677 - DNA, 236 bp, Glycine max
  unsure at all n locations
  Clone ID: LIB3108-008-Q1-K1-A6
cttcttcagaagatgaagcncttcntagattcantggattaagatacccatcaataactcgcctctgggtataagtctaaacgaccatcaacctcctaatcaccacccgttttttttcccttttccccatcatatactctcaccatgttctttcatgcggagggaacatttattttttcatctattccaacttaaaccaaatctttatattatactaatttgttttacttattttt

SEQ ID NO: 25678 - DNA, 392 bp, Glycine max
  unsure at all n locations
  Clone ID: LIB3108-008-Q1-K1-A8
ncccacgcgtccgctgcttcgcactgatcgccattcccattcgatggcttccagtgaatcagcccctttcaagaaaattcanattcaaagggatnacactacatttgacgcatatgtggttggaaaagaggatgctcctggaattgttgtgattcaggagtggtggggtgtggattactaaattaagaaccatgccgtgaagatttctcagcttggtagtgggtttaaagctcttattccagatttatacagaggaaaggttggtctggatgtttctgaagctcatcatttgatggatggtcttgattggcaaggtgctgtgaaggatattgctgcttcngttaactggcctaaagcaaatggcttcaaaaaggctggtgaaactggatttt

SEQ ID NO: 25679 - DNA, 422 bp, Glycine max
  unsure at all n locations
  Clone ID: LIB3108-008-Q1-K1-A9
aacacaanccaantgaaaggganaaaggataagaatcaaagagcataatntgagggatcgtgcacaggattggggagacccttcatntnnnanggcacaanaaggaggaggagcataagggtgagcaccatgctggagaatacagaggggagcaccatggtgaacacagtagtgagtacaaaggagagcatcatggtgaacacaaagctggagagtaccatggtgagcacaagccagagcacaaagaggggttcctagacaaagtcaaggacaacatccatggtgagggcggcgccgccgagggcgagaagaagaagaaggagaagaagaagaaggagcatggccatgagcatggccatgacagcagcagcagcaatgacagggattaaactgctgcatcacctatatatttaaaaaggtta

SEQ ID NO: 25680 - DNA, 374 bp, Glycine max
  unsure at all n locations
  Clone ID: LIB3108-008-Q1-K1-B1
aatggtttcnctgaaactgcanaagcggctcgccgcgagcgtgctcaagtgtggcaaagggaaggtttggcttgaccccaatgaantcaacnaaatctccatggccaattctcgccaaaacataaggaagctggttaaggatgggtttatcatcaggaagcccaccaagattcactctcgctcacgtgctcgtcgaatgaaggaagccaagaggaaaggacgtcactctggatacggtaagcgtaagggtacaagggaggcaaggcttcccactaaaattctatggatgaggagaatgcgtgtgctcagacgcttgcttcgcaagtacagggaatctaagaagattgacaagcacatgtatcatgacatgtaca

SEQ ID NO: 25681 - DNA, 399 bp, Glycine max
  unsure at all n locations
  Clone ID: LIB3108-008-Q1-K1-B12
aactggacaccntacgctgtctgattgcacatgcctgcggagtgnnaaaccgaggcncggtgctggatgggttggcctnaacntncctataactggcgtgacggctcctttcacgcccaacgcgtgtttgcgagggtagcgtcagcaatctcaagattctagtctgtaacagtttgtgttacttctgcacagtgggagaacgcgcggagtcagctaccggagcatatcatggtcgttgagatgaacatgaacgattcttggttccgtgatattggacctacttttgttgtgagaagaagcaccacgccggaatctggtgatgcagtgagcangattgcatggattgactggaattttaatagttggggaggcttaaaagatggatgttactgtgattgg

SEQ ID NO: 25682 - DNA, 412 bp, Glycine max
  unsure at all n locations
  Clone ID: LIB3108-008-Q1-K1-B2
ggaagcaattcaagctgtattgaagtcctgtttggctaaaatttacaagaggcanaantagagtcaacttgaggcgaggaccaagattgtttaacatgcaatanaaactagagttctgatttctatctagtatctagagcagtatcatgttccgtggcttggaattttttaaaaattgattttcttcttgccttttttttctaattttgttttttcagtgttaacatcttgttgtattttatcttgtaatattgtttgactattttcttcttaaacttttgggtcattattattagacgtctgctatttatataatattatttcagtattttctctcttgggaaattctttattttttatatttcttttttttttattatatattttctattttttttttttttattttttt

SEQ ID NO: 25683 - DNA, 419 bp, Glycine max
  Clone ID: LIB3108-008-Q1-K1-B4
cttatccctctaatcactctaactgttgcaaatttgtactatttttcaatggcttctgcggatgttggggtccggtgctttgttggtgaacttgctattgtcaccggcaacgattccctctagaaagccttttcaatctactgcgacatctttgaatcgaatgttatcaaccaccgtgagactggaacgtccagaggattccgatttgtgaccttcgcctcagagcagtcaatgaaagatgcgatcgcaggaatgaacggtcagcacctttactgacgtaacattactgtcaactaagctcagacccgcgccagccgttgtggtggtggaggccgttgttacggaagtggccgtggatacaaccgcagtagcagcggatatggtcgtagctgtggcggttatccatactgagatcgtcg

SEQ ID NO: 25684 - DNA, 466 bp, Glycine max
  unsure at all n locations
  Clone ID: LIB3108-008-Q1-K1-B5
ggaataatgtcttcttcattctctgttcggtttcttgctcctccatcatcatgcttccccaggtctcnggccaagagatggctctgcgccgccaccaccccaacggtggctccggcaactgcctcctcggaggtggaggcttcaaggttggagcctagagtggaggagagagatgggttctgggttttgaaggaagagtacaggggaggcatcagccctcaggaaaaagtgaagcttgagaaagaccccatgaagctctttatggaaggtgggattgaggacttggctaagatgtcccttgaggaaattgagagctccaagcacaccaaggatgatattgatgttagactcaagtggcttggcctttttcataggagaaagcagcattatggtagatttatgatgaggctgaagcttccaaatggggtgacaacaagtgcccaaacacgatatttggctagtgtga

SEQ ID NO: 25685 - DNA, 368 bp, Glycine max
  Clone ID: LIB3108-008-Q1-K1-B6
catttaagtgttcccatgtctcctgcccactgaagtcgaacccctaatggcttctcaagttcttctgtaacaggcactgtttgcccccaagctaagtttcccttcttcttctcgtaacgtcgcgttaatttctagggttccttccaccccaatttcatggcgttgcactcctctcattgctaagcctagtttcgctgtgagagctgactccaacgtcgaaggcgctggtgaagccaccgaggatgttccttcgtataatgttgatgaagtttcggaaggcgaaggagaacaagtttcggattctgaagctccaaaatctcccagaaaaccccgagtcaagctcggagacgtcatggggatactgaatc

SEQ ID NO: 25686 - DNA, 363 bp, Glycine max
  unsure at all n locations
  Clone ID: LIB3108-008-Q1-K1-B7
aattatgggaaaaaaaagtggtgatccgtctagcaaagatgggtgctacatttnnnaaattatggctactgctcttaatgatatggtattgcagggaataataaaggaagagcaattggatacttttaacatccctttctacactccatccccatctgaagtgaaattggaagttcttaaagaacgttcatttgccattaattgtttagaggtgtctgtagtgcacttgagcgcttgtgatgaatggagtgttcttgacttttaatcttaaagctgatacaatttgacacaaagcattagggctgtggcagaatctatgcttgttagccacttttgttaaactatcatttatgaacttttcaa

SEQ ID NO: 25687 - DNA, 369 bp, Glycine max
  Clone ID: LIB3108-008-Q1-K1-B8
actttttctacttacctttgctcttaagccaaatacgatggcagccatggcagccacaaccctctcttcaaacggcaaactctcattcttcaacggaaagcccgtcacatattcttcccgcgtcgcgcccaccaccaaattatcctcatccaaacaaggcacaatttccatgtccctaaccccacccccctacgacctccagtccttcaaattccagcccatcaaagaatccatcgtgtcacgggaaatgacgcgccgctacatgaccgacatgataacctacgccgacaccgacgtcgtaatcgtcggagccggttcggccgggctctcctgcgcgtacgagctcagcaagaaccccgccgtgagcgt

SEQ ID NO: 25688 - DNA, 441 bp, Glycine max
  Clone ID: LIB3108-008-Q1-K1-B9
tcaaaagttctagtgtccatttccacagtttaaaaaaaaaaaaaaaaaaatggaaaaattaaaaatataaaaaagggaaaaaaaaaaaaaatattccaccctttttaaaaatcccaactttcctaccccttcctcccaccatcctggcgttttatcttacaactttttttattttaattccccaacccaccatttcaacctttttctctctaaacccctccctttcccaactttccctcctttccccccttttcccttttttcaaattcccttatatactataaaacccccccctttttccccctcctacccttttcccccctttattgtcccctaaaactccccttttaccccccctctttttcctcaaaattttttttttttcgaaaattttcccatttatattccccaaaccctctttcccccccccttttttttttt

SEQ ID NO: 25689 - DNA, 158 bp, Glycine max
  unsure at all n locations
  Clone ID: LIB3108-008-Q1-K1-C1
cttcaatcctttcnttattctcttattcatccttctcttctgaataatccacatctctttgtgcccttttctccggcacgcttttcttnaccncatctttatggatttcatccacatctacacgccgatggtggttttggcctggtctttcatacatc

SEQ ID NO: 25690 - DNA, 337 bp, Glycine max
  unsure at all n locations
  Clone ID: LIB3108-008-Q1-K1-C10
ttttcatttcatcntccgttcaatggccaccacancanctctatccnnaagcatnntgggcacctgcttcatgaggaggcaacctattaccaccacaagcctaaagacattccccaacgttcgtgaagctctttttcgtctgaaaagtggacgacgtgttcttgtcacttgcatggcctcatacaacgtgaagctcataaccccaaaatgagaagtggagtttgaatgcccagattatgttttcatttttgacaaggcagaggactaaggcacttaacttccctactcttgcaaggccggttcttgcgtttcctgtgttggcaaaattgtggaatgt

SEQ ID NO: 25691 - DNA, 375 bp, Glycine max
  unsure at all n locations
  Clone ID: LIB3108-008-Q1-K1-C11
aataangcctccttcaactaccttctnacaaggcactttggtctaaccctatgtgccgccctcttcttaaaaaatattcatcngacnaacatnccttcttctctgattactcttangctcaccaaaagctttctgagctttttttttcttaagcctaagcaactttttagggattctttgagaggcaccatgcccataatatttctctcataaattctatcgtcatggtttctaatgcgccactgttggttcctcaaatttttatatagcttttgaatgtatttttctggactttgttatgatgattggaatttcgttttttttatttatggtccatccttttgttaaataacatttttcaacgatttccatatt

SEQ ID NO: 25692 - DNA, 447 bp, Glycine max
  unsure at all n locations
  Clone ID: LIB3108-008-Q1-K1-C12
agaaaaagagctcttctttgtcttcaatgcgatgtctcatctttctctcctcgctttcctgtttcaggtgcaaggcttcaataacntaactgccatttttatttttaatttaattatcgttgctttacgtgcaagcttctacattttttcccgtccaggtaaagaagaatccctagttatcatttttggggaaattcaacccatgattctgtgagatttgtttgagtgtaaacgttgcttgtttgggtatttggggtcacagaggagagaaagctgaaaactttttatgccttgtgattttgttgatttcatgggtttagtgttgttctcatcagacaaatggggtttttaaatgataggctattattaattttgctctaaatgtaatttttttttttttgggttttgtctaggtcagaattggaaaaaaaaaaaagtttctttttt

SEQ ID NO: 25693 - DNA, 352 bp, Glycine max
  Clone ID: LIB3108-008-Q1-K1-C2
cggacgcgtgggcggacgcgtggggtcggtgtgggtgtttgaatctggtgaaggatgtcaattgttccaatcaacgagggtgatgccaacggctccaaccccttcgcttcgtggggtcaattcgtggattttcctctccctccttccatctccggcttcttccccggcttggaattcggattctgattcggatcatccgtgaacacacgtgtggactggagggagactcccagagcgcacgtgtggaagctggtgcttcccggcttctccaacgaggacgtgctggttgagctccaagacgagagggtgctccaagtcagcgtggagagcggcaacttcgtcacgaggttta

SEQ ID NO: 25694 - DNA, 360 bp, Glycine max
  unsure at all n locations
  Clone ID: LIB3108-008-Q1-K1-C3
aaaaggattgaaagatgggtcaagcactatgttgctatcaagttgatcagtcaaatgtgggtatcaaggagcattttggaaaatttaataatntcctaaaacctggatgtcattgcctgccttggtgtcttgggtaccagattgctggtagtttgtcactgcgtgtgcagcaacttgatgttcgatgtgagacgaaaaccaaggacaatgtctttgtcactgtggttgcatctgtgcaataccgagctgtgtctgagaaagcatctgatgcattctataggcttaccaacacaagggagcagatccaatcatatgtttttgatgtcatcagggccagtgtaccaaagttggagttggatt

SEQ ID NO: 25695 - DNA, 456 bp, Glycine max
  unsure at all n locations
  Clone ID: LIB3108-008-Q1-K1-C4
aaattgcaagaacggcttcaggctcttgcgatcaacaaacgcagcgttttgatctcagatgtganggggagagaatggcaacaacagtgagaagtctgaagataaagacaagtacgtgcaaacgtatagtgaaggagctgcattcttatgagaaggaagttgagagagaagctgccaaaacagctgatatgaaggaaaaaggagccgatccctatgatctcaagcaacaggaaaatgtcttggctgagtctaggatgatgattcctgactgccgcaagcgccttgaggccgctttggcagacttgaaaggattattggctgagttggaggagtcggatgagaaggccagtcctgagattgatgaagctcggaacaccatcgtagaagttgaaaaagtatttgaaacaacagaagattaacaaggttgtttgattagtgctcttgatggaggatatt

SEQ ID NO: 25696 - DNA, 450 bp, Glycine max
  unsure at all n locations
  Clone ID: LIB3108-008-Q1-K1-C5
ggacccgtcgcgcaagtanttgagaactaanaaggagaagcaaatggcttcctcaatgatctcttccccaggtgttacgagtgtcgaccgtgccggtgccggcatggttgctccattcactggcctcaagtccatggctggcttccccaccaggaagaccaacaatgacattacctccattgctagcaacggtggaagagtgcaatgcatgcaggtgtggccaccagttggcaagaagaagtttgagactctttcctacctgccagaccttgatgatgcacaattggcaaaggaagtagaataccttcttaggaagggatggattccttgcttggaattcgagttggagcacggtttcgtgtaccgtgagcacaacaggtcaccaggatactacgatggacgctactggaccatgtggaagctgcctatgtttggttgcactgatgcttc

SEQ ID NO: 25697 - DNA, 427 bp, Glycine max
  unsure at all n locations
  Clone ID: LIB3108-008-Q1-K1-C6
tttctctacatagtttctttttcactcgcccattcttctttgttaagcaacaacaacctggttcctcggatcctaagaaaatgggaaccagagtgtggtgttgtttcatgatgttcttcctctctctcaatgctcttgcaatagcattggaagatcacaacctcaaaacgacgtccagggatgacatcaagtgcaccccatgtggccaagttccctccccgccgccaccctctccggcggtggtggtgcttactattactctccgccgccaccctctcaatatatctactcttctcccccgccgccggcgtccaccggcggcggtggtggcggcgtttactactacccaccgccgagagggtactacccaacgccgncggcttccaacccaattgtgccttatttcccgttttactaccatacccct

SEQ ID NO: 25698 - DNA, 362 bp, Glycine max
  Clone ID: LIB3108-008-Q1-K1-C8
cccacgcgtccgaatttatggaggcagcttcaacagactttaccaccttctagccttgctgcaacctggtcatccttgcagcctcagcagcagcttgcacttcagtccatcctatcatcctagtagttttggtcagaagatgcgtgtctattgtcatgggatgtcatagttaccttttcagaagctgctttgtcaggtcaaattcattccttagcatcattggagtgtctttttttgagaagcagctgcgtctggttcgtgtttcatgattgctgattccatacttggttatgcaagccaggacttgaagtatggctttgtcacagaggcagagcatttgtgagttgttttggatgggaaac

SEQ ID NO: 25699 - DNA, 254 bp, Glycine max
  unsure at all n locations
  Clone ID: LIB3108-008-Q1-K1-C9
catctaaaacaccaccttcacttctgcttcangttctattccctcattcactttcctcgcggcaatctcaagcgaagtgagtgcctcctcaattaaaatctcaactccccaacccacaaatttttcctccatcaatccttcctcaaaaacttttgaattcccttttttttcaacttctccaacccacatactacctaccaacgcccttgtccttttaaaacttactttgcacttaatacatatctatctttttc

SEQ ID NO: 25700 - DNA, 494 bp, Glycine max
  unsure at all n locations
  Clone ID: LIB3108-008-Q1-K1-D10
accggnccggaaggccgcggtggacgcacncatccncatatatagcanccaaaaaagaatgaagaatactgcgttgtgcactatctttgtactccgggctttcacctcatgcctaccttcanccaccgctgctagtgtgtacgatacggatggtaatattcttcaaaagggtcgcacatattttgtgttggcagctacaagaggaaacggcggtggaatagaatttgccgcaactggaaacgacacttgccctctaactgtcgtgcaatctcccagtggcgactctattgggtttccaataaggttttcatatccatttatagaaacgcttgatgatatccttgaaggctttggtttggagattcgtttcgcttatcgaccgccgtgtagccccagttctatagccactactaagtggactatcgtcaatgatgcttttaagcttactaaaacttcatcatcgataatacccggttttttttatatttgggggg

SEQ ID NO: 25701 - DNA, 370 bp, Glycine max
  unsure at all n locations
  Clone ID: LIB3108-008-Q1-K1-D11
ctcaagnnccctgnnacccagnctngaggagaagtaaaaaatgcancantaaggatgtagattcagaagcttaggaagctgtggcanccctcgacttctctaatttttctttttcaatttctgcccttctctgctcagcatgctgggcaacaccattagcaagagcttgataattgaactcaagcttctgggtaaggttctcaaacctcgatggatccaatgatggtatcactttgatgaatccacagaaaacacaaaggtcaaactcttataaatgggactccgcaactctctatctcatgaatattaatttattggcataaaattttgtataaagccttctccttgcatgcatctatatatccatata

SEQ ID NO: 25702 - DNA, 196 bp, Glycine max
  unsure at all n locations
  Clone ID: LIB3108-008-Q1-K1-D12
caaaaaaaaaaaaaaaaaaaaaaaaaaaaaaaaaaaaaaaaaaaaaaaaaaaaaaaaaaaaaaaaaaaaaaaaaaaaaaaaaaaaaaaaaaaaaaaaaaaaaaaaaaaaaaaaaaaaaaggggccgcccccccaaaagaaccaaaccnaacgaccccggccagccaacgaaaaagcccnncaaaagggccaccaaa

SEQ ID NO: 25703 - DNA, 252 bp, Glycine max
  unsure at all n locations
  Clone ID: LIB3108-008-Q1-K1-D3
ccggncgaccgacgcgtcggaaaagttgcgtacccatactctgattcattattgaagaaaaatggcaaccatcatctccggcatcccagctacagctatcacgcgcgcannntctttnctcaaacgacctgttggagcctcgtcctctaccgttcttggattgccaccaatggctaaggcagggaattttaggttttccatggaggaaaagccttcaaccagctcaaatatagggatggggccatccttttt

SEQ ID NO: 25704 - DNA, 439 bp, Glycine max
  Clone ID: LIB3108-008-Q1-K1-D4
ggaagtagttgagaactaagaaggagaagcatatggcttcctcaatgatctcttccccagcgggtaccactgtcaagcgtgccggtgccggcatggttgctccattcactggcctcaagtccatggctggcttccccaccaggaagaccaacaatgacattacctccattgctagcaacggtggaagagtgcaatgcatgcaggtgtggccaccagttggcaagaagaagtttgagactctttcctacctgccagaccttgatgatgcacaattggcaaaggaagtagaataccttcttaggaagggatggattccttgcttggaattcgagttggagcacggtttcgtgtaccgtgagcacaacaggtcaccaggatactacgatggacgctactggaccatgtggaagctgcctatgtttggttgcactgatgcttc

SEQ ID NO: 25705 - DNA, 239 bp, Glycine max
  Clone ID: LIB3108-008-Q1-K1-D5
tccctctcccaaagaacaccggccaatgggccccgacccccgaagggaaaagcgccaggtggaagccttcctgcgaaacacacaacaaccatcggctttgaaaccattcctgaaaagtgcgttgaaccaacaaaggaatacatccatggcgaacaatatagatcacactccaaaacagttaaccaacaagctcacttttatgccagagacctcgaagtccatcccaaggacacatttgt

SEQ ID NO: 25706 - DNA, 361 bp, Glycine max
  unsure at all n locations
  Clone ID: LIB3108-008-Q1-K1-D6
cccacacgtccgcggacgcatgggggcgctgtaagaaatgacatgtaaaacaactanaagcattctagatcaatggaaaagggagaaaaaaataaaaaaaaaaaaaaaaaaaaacaaaacaaaaaacaaaaaaaaatactataaaaataaaaggacgaaaagcagaccaattttgtttccattcagctaacaaaattcacttaccacctttggaatgacctgtcactgctaaataaaataaaatgtctaccattgcgtactttcatgtgaccaattcaatatcatgcacgtatacaatactgtctctactccttgccctcccgaatagaggtaaaaacaaatgcttgtaaacatttatccc

SEQ ID NO: 25707 - DNA, 369 bp, Glycine max
  unsure at all n locations
  Clone ID: LIB3108-008-Q1-K1-D7
aaaagaacaganaaaacgggttanaagtgtccaaggagaggaaaagagtggggcacattgtgatgcgataatggcaacaccaaaacantcatatgagcagcaacaacaaccaaatgtgcagcgagtgaggaactcggggatgattaacagcaaccagagtccaatgagggatgacaaggaagaggagatgtcaagatcagctttggcaatgttccgagcaaaggaagaagaaattgaaaggagaaaagttgaggtgagggataaggttcacgcttatctcggtcgagtagaggaggaaacaaaacgattggctgagattagaaaagagcttgaaggtctcacacatccattgaggaaggaagttgcaat

SEQ ID NO: 25708 - DNA, 397 bp, Glycine max
  unsure at all n locations
  Clone ID: LIB3108-008-Q1-K1-D8
acccaatacananaagattcanagaatggcaactatgactnntntnaggctttcaggccacagggttttcttcaacccatcantctcaccgcaaaacgcgcatgcttattgtattttgtccagcagattctatgacttgacaggactgcagaatgttattcttaatcgagggagagagattttcctcactggttgctacctccgaactcccactggaggttctggacattcacgtcttttgccaacagagtatcttgtgattctattggatgaagtaatggtcaaagattttttaattttaaatttgtccactttgaagtttaattgggctaacaaaaggagttagtgaataagctcaacatacataaattccttttaagaagtcaaacccaattat

SEQ ID NO: 25709 - DNA, 227 bp, Glycine max
  Clone ID: LIB3108-008-Q1-K1-D9
aaaaaaaaaaaaaaaaaagattttaaggttttaaaaaaaagaaaaaaaatagggaaaaattgtaaaatttaaaaagataaataaacttatttaataatttttaaaattcctttcctttttaaaatatccaaacttttccttcctccttctttccaatcttaatatcttttttattttttttcctcttaaataaaattcaataccccccctttttacaaccccttttt

SEQ ID NO: 25710 - DNA, 360 bp, Glycine max
  unsure at all n locations
  Clone ID: LIB3108-008-Q1-K1-E1
aaacccggncgaccgacgcgtgggcttttatcaactgctgttcctgcgcgtgaacaagcctcaggtaagccaaanccattnttaggcataagaatattatccccaacggacacttccntaancactggcanaactatgtgaagacctggttcaatcatccagcacggaagacaagaagactgttggctcgtcataataaagctgtgaagattttccccagacctacagcttgacctcttagacccattttacattgtcaaactttgaaatacaacattaaagtgagagcttgaaggtgattttccctttaataactcaaggcagcatggatttccaaaaagcttgcaccaacaattttta

SEQ ID NO: 25711 - DNA, 413 bp, Glycine max
  unsure at all n locations
  Clone ID: LIB3108-008-Q1-K1-E10
ncccacccctccgctcggggctcaccccatgcaaggagtcgaagcacttcgcggggcntgggaagcaggcgatagagaagctggagtcntcnctgaagctctacgaggcgggcagcgcccccgcactggccattaaggcgagcgtggagaagacgaagaggaggttcgacaactacgcgaagcaggggttgctgtgcggcggcgatgggttgccgcacctgatcgtgagcggagaccagaggcactggggtgagttcatcacacccggaatactattcctgtacatctcgggatggatcggctgggtgggtcggagctacctgattgcgatcagggacgagaagaaacccaccatgaaggagatcatcatcgatgttcctctggcttctcgcttgctcttcaggggtttcagc

SEQ ID NO: 25712 - DNA, 314 bp, Glycine max
  unsure at all n locations
  Clone ID: LIB3108-008-Q1-K1-E11
aagaggctgtacccacgtggcagttactgcgacccagtgggccgggcctcagatccananaataaanccacccttcaattggcggagatcaagcacgcccgtctcgccatggtgggcttcttgggctttgcagtccaagctgccgccactggcaagggcccgctcaacaactgggccacccacttgagtgacccactccacacaaccatcattgacaccttctcatcctcctcttaagaagaagcaaaagaagaagaattgtctttcttgtgcctggtcattctagttatattgtaaaagtctttttcttcttc

SEQ ID NO: 25713 - DNA, 345 bp, Glycine max
  unsure at all n locations
  Clone ID: LIB3108-008-Q1-K1-E12
acgcccacccgtccgcccacgcgtccgagaatcacagttagtgggtatgacaaatgtnangtgggccaggttgctgcgttcaattangaantggaaacccccagaaccatacaaaggaaagggcgtcaaatatgctgatgaaattgtaaggagaaaggaaggaaaagcagggaagaagaagtaatggggggtttcaattttcctttctcatttatctcctgttgtttttcctcatttgttagtaatggaaatattttaaccgagtaaaagaaattcatattcattgagataagcttgagtcacttatgcttatgatgaaatttaaaagcatagcaatccataact

SEQ ID NO: 25714 - DNA, 225 bp, Glycine max
  Clone ID: LIB3108-008-Q1-K1-E3
aaaaaaaaaaaaaaaaaaaaaaaaaaaaattataaaaattttaaaaaaaaaaaaaaataatggtaaaattgtaaaagctaaaatgctcttacaaaataatttcttaattataccatctcattcccattatctcttcccttttttctcctccatccctccttttgaccccttttttttctcttctattctccctcataacacccctccctcctttctcttctctcc

SEQ ID NO: 25715 - DNA, 276 bp, Glycine max
  Clone ID: LIB3108-008-Q1-K1-E4
gcgttttgaccgacattaccatgcacagagggattccaaagagcgtcctcatggctttagcgggtaccaggcatctggtataggaactccttccttcaaaaatttacactctctatatgaatgcagctcttcctgatcgtactaccaacgataaatatgaacaattctagcttcttaggcaagcacacaatatcttctctttagagaccatcaacttatagctattatctccatcattggattacatacttcttttgcaacatacatcatacttca

SEQ ID NO: 25716 - DNA, 311 bp, Glycine max
  unsure at all n locations
  Clone ID: LIB3108-008-Q1-K1-E8
gctggcancaaacagtgactttcctgactattaccgttctgattatcgtagagcttcgtatttagcttattgtgggggtcattgctcacatgggcatggatactattattagggtgatgaatctttggaggatctggaattgtgggatagacatcttcaaatataatcttgcggcttgagcatacaattctgaagttgcatatttattttatacacttttctgttattcctcttccacctggttttttctatatatctatatctattttggcataggtggtatatactaaattgtttaatgaatttaaggt

SEQ ID NO: 25717 - DNA, 332 bp, Glycine max
  unsure at all n locations
  Clone ID: LIB3108-008-Q1-K1-F10
cccacgcgtccgcataaacagccagaggcactacgncaacgtccaaaacagggggnacaggaaaaaccctagctgcatccaacaaaacctcatttcatacctaaacattattctcctacatcatctctgacaccactcacactcttactatcacatcaactttcaaaatatttcggaggcacccaccaacaatctctctaataccctatgggctcttcatgccttctaaagcaacatatttcaatacaactggacctacagctgatcatgaaagaacttctcccaggaacatattgacgcaggatacatcagcctaataaaatcacctcaag

SEQ ID NO: 25718 - DNA, 296 bp, Glycine max
  unsure at all n locations
  Clone ID: LIB3108-008-Q1-K1-F11
attatctatattgantatcggaatgtacaaagaggttccatcccattattctttgcatatgaaatcatatttatatctaataaaataaaatataaataaagtgttatttttttttttttttatttataaaataaaaaataatattatttaaataatatattaaatatattataatataatgttgcccccctcttttaatatctaaatttttctatcctttctttcacaatatatattttttaataatttccacattataaaattttctttcctcattttttaaaaatctttttaat

SEQ ID NO: 25719 - DNA, 339 bp, Glycine max
  Clone ID: LIB3108-008-Q1-K1-F12
gaaggcatcaatgtaatcagagtgagagataagagatctagggagggaaattggggcttcgtgttgcgatgacagtaaggaacgtcttaaacaaaaacaattttcagaatggaacaatgtttaataatttggaatctgaaaaagaaaaaaagaaaaaaaattaaatttattaaaataaaaaaaaaaaaaaaatatttaaaaaaaaatattaaaaaaattagattaaataaaaaaaaaaaaaataaaaaaaaaaatataataaataaaataaaaaaatggggggggccttttaaaagaaacaaatttttttcccctgtgtttaaaaataaaatatttttt

SEQ ID NO: 25720 - DNA, 445 bp, Glycine max
  Clone ID: LIB3108-008-Q1-K1-F2
cccacgcgtccgcccacgcgtccggttgcactacgtcgagatccgaagatggcaggacatgaagaacgctggctgtgtcaaccaagaccccatcttcaagcaatacagcttgcccccacatgagtgtggataccctggtagtgtgttcaaccccttgaactttgcacctactttggaggccaaggagaaggaacttgccaatgggagattggctatgttggcattcttgggattcatagttcaacacaacgtgacaggcaaaggaccatttgagaacctcttgcagcacctctctgacccgtggcacaacaccatcatcaatacaattcgtggctactaagtttgtatccaatgacatggataagcctgtgtccttctcgtgtaatcctgaatggatgaattttgagagtgatttgggcgtgattgtgggatccatctattttca

SEQ ID NO: 25721 - DNA, 405 bp, Glycine max
  unsure at all n locations
  Clone ID: LIB3108-008-Q1-K1-F3
aaatttcagttttttctcataatgggtgccaccaatgccaataatgaaacggtcgcanaggttcctgagtggatgcgcgtcttcaaagatggcaccgtggaacgcccacttgattttccgatcgtgccacccactctcaacactggactctcatccaaagacatcaccatctcacaccaccctccaaaaccaatttctgcacgcatttaccttccaaacatcaccaattcccagactaagaaacttcccatctacgtctactttcacggtggtggcttcttctttgaatccgctttctccaaacttttcaatgaccattttctcaagttggtccctcaagccaacattataatggtttccggtgagtacagacttgctccaaaacaccctcttcctgcagcttac

SEQ ID NO: 25722 - DNA, 440 bp, Glycine max
  Clone ID: LIB3108-008-Q1-K1-F4
ggcccacgcgtccgcccacgcgtccgaacttttgttaccaaaaaacaacctcaaagtttgaggcattgaggcttgtgtgtgccactagttgctcatcacaccagccatgggcttcacccattcccacactcaccacactcccaaaatgcacaaccgcagaacacgtgaaccagctccacgcacgcatgatcacaaccgggttcctcaaaaacccttccctcaccgcaaaactcgttctttcttgcatttcctcaccccgtgagcctcttgtcgagttcgctcgctacgttttcttcaagcaccacgcttttcgcgatttccgtgatgacccttttctctggaacgctctgctcaggtcccactctcacgggtgtgaccccagaggggccctagttctgctctgcttgatgatcgaaaatggggtgcgtgtggatgggtac

SEQ ID NO: 25723 - DNA, 413 bp, Glycine max
  Clone ID: LIB3108-008-Q1-K1-F5
ggcccacgcgtccggtggatttggcggaggaggtggtggtggtggaattggacaccactagggcgttgcggacattgcatgcatgacaaagtgatattttaacgtccttgtattagccatgataattggtttattgaaaaatattgtgcgagtaagagaattaattattaatgttggtttcataatattaatgtgctctgtttttatttatagttaacgttgaaggaaagaatcggagatatatcatatatgtactatttttgtattcaatgagaagaagaaatggtaggaaaatcactttcaaaaaaaaaaaattaatataaataattttatattttataatttatttttaattaataagatttatattattatattttattttaaattatataaataaaattataaaaggg

SEQ ID NO: 25724 - DNA, 445 bp, Glycine max
  Clone ID: LIB3108-008-Q1-K1-F6
cccacccctccgaccggcactgcccgagactcttaagaatgacaacaagctggtgtctcggggcttcgagattatattcttggcaggaagaacactggacaaacaggccgtaacagaagcaaacttaaagaaggctggctaccacacatgggaaaaattaattctcaaggatccacaagatccttccactccaaatgcagtttcatacaaaacagcagcgagagagaaactgataaggcagggatacaacattgttgggatcattggagaccaatggagcgatctcctcggaggccacagaggcgaaagcaggacctttaagcttcctaatcccctgtactacattcagtagttccttcacctctcaacaatctagcttgctcctatctatctatatgtaataagatgcttcaaataggggcactagcttcactttatgttggtt

SEQ ID NO: 25725 - DNA, 289 bp, Glycine max
  unsure at all n locations
  Clone ID: LIB3108-008-Q1-K1-F7
ccactcgtttctaaaaacaagtacttnagaactaaaaatgaggaaatggcttcctcaatcatctcctccccanctcttaccaccntcaaccttnccagttccttcataatttctccattcacctgcctcaaatccatggctgtcttttttactattaataccaacaattacattacctccatttctatcaacagttgaatagtacaattcatgcatttattgccaccaattttcaataacaaattcgagactcttttctacttgccagacctttattattcccaattgg

SEQ ID NO: 25726 - DNA, 221 bp, Glycine max
  unsure at all n locations
  Clone ID: LIB3108-008-Q1-K1-F9
cttgtatagacatgcatatgttacttaacaccagaaatgttcttttattatttttatatcgcgactgctattaaagtgctcntctctttataaaaaaaaaaaaaaaaaaaaaaaaaaaaaaaaaaaaaaaaaaaaaaaaaaaaaaaaaaaaaaaaaaaaaattttttcttttaatatcaagaaaacatttcatacccccccattccactcctttctactct

SEQ ID NO: 25727 - DNA, 422 bp, Glycine max
  unsure at all n locations
  Clone ID: LIB3108-008-Q1-K1-G1
cgttattcttggcagaactttttcagatgtcgaaaccctagcgctcctctccgccttcacggtcttcgtcgtctggctcaccagcgttggatctgttctcgtctccgctctcatgcttggcgtcgccgtcgtctgcctccacggcgcgttccgcgtgccggaggatctgtttcttgacgaccaggacaactctcaggccaccggattcctctccttcctccgcggccctgccgcctccgccaccgctgttcccaccgttgccgcacgcgtttaagtaaacaaaaaaaaaaagatctcagcgaaatcctcagatctggggatgtttctcccgatctgatgagttttggtgcctggaagcagaatgaatcttgaaatgtagcttctcttttatttntggtttttaaattcccttatctgtctaa

SEQ ID NO: 25728 - DNA, 364 bp, Glycine max
  unsure at all n locations
  Clone ID: LIB3108-008-Q1-K1-G10
atttttcaagtcaatangaatggatccctcatatnttnattttnangccaagcctccagggganaaagatcaggcacctcatctancttctctagttccatctggcacaattaatttgcctgaccaaccagaaaagcaaccttcatcacaacctacagaaggaaaccatgtttctgtggatgagcccaagattatttcagcaaaacttgtcaagtcatgcgttagtgggaaaaatacaaaggagaaagcagtcaacaaagctcattcttcaggcaactttgcagatgttgagctatttgtctaagaaatattgcataaaacatcaagattattgctttcaaacatcaaggaagacactataact

SEQ ID NO: 25729 - DNA, 386 bp, Glycine max
  Clone ID: LIB3108-008-Q1-K1-G11
atacggtttttcattattaaaaaggtttattatgctaacattattcgtgtaacttctggtgtaccggaacaatgtcgcaagcctcacatatgtctacaaaaatctacatcacaaaagctatttctttatttctatctgctataccctctaattctcctcctatatacttttaattgcgctaccctgaatagccatcttcaccgtcttcttcttcaactaaactcccaatttctcgaaccaaacccaaatcccttctcacctctttcaccattctcactcctcttaaccccatcttcctctcctctccttcttcataatatatcggctgtgatcactcttttaccaatatttacaatggtggtcgaatcacttccatgagacatttt

SEQ ID NO: 25730 - DNA, 314 bp, Glycine max
  Clone ID: LIB3108-008-Q1-K1-G12
ccacgcgtccgcccacacgtactaccacgcgtgcgaaaaaaaaaaaaaaaaggaaaaaagggaaaagaaaaaaaaaaaaaaaaaaaaaaaaaaaaaaaaaaaaaaaaaaggacggccaaaaaaaaaaaaaaaaaacaaacaaacgggggaaaaaaaaaaaaaacaaccccatcagaaccaccaaaaaaaaaaaaacggcccggccaaaaaaaaaaccgaaaaagggaaaaaccaaacaaaaaccaaacgaagagaacccaaaaaaaaaacacaacaggaaaaaaacgggcaaaaaacaaaaaaaacccaaagga

SEQ ID NO: 25731 - DNA, 461 bp, Glycine max
  Clone ID: LIB3108-008-Q1-K1-G4
agaaaaagagctcttctttctcttcaatgctatttctcatctttctctcctcgctttcctgtttcaggggcaaggcttcaataacgtaactgccatttttatttttaatttaattatcgttgctttacgtgcaagcttctacattttttcccgtccagggaaagaagaatccctagttatcatttttggggaaattcaacccatgattctgtgagatttgtttgagtgtaaacgttgcttgtttgggtatttggggtcacagaggagagaaagctgaaaactttttatgccttgtgattttgttgatttcatgggtttagtgttgttctcatcaaacaaatggggttttttaattttaggctattattaattttgcttcaagtgtaattctttatttttttggttttattcttagtttattttttgtttgaaatataatgtgttcttttttatggtttttt

SEQ ID NO: 25732 - DNA, 250 bp, Glycine max
  Clone ID: LIB3108-008-Q1-K1-G5
taatcttttattgataaccgctttatcggtggatttgtgttttgattatatgggccttgggggatggaaaaaggagaaaaaaaaaaaaaaaaaaaaaaaaaaaaaaaaaaaaaaaaaaaaaaaaaaaaaaaaaaaaaaaaataaagggaaatgtaaaaaaaattaaacttttattaatatcaaataaaaaaaaacaaatatcttaccttctaaatacaactttattaactgttaaaaacacatttaataa

SEQ ID NO: 25733 - DNA, 415 bp, Glycine max
  Clone ID: LIB3108-008-Q1-K1-G6
catccacttagagagacattgtggttagccatagtctcatatagtgtcatacagcaaaaagtttcagcgacacagaacaatgggttctcttatggcaggatggtattctacccacatggatcctcaatcagccacacttaaaaggaaccgctcactcactaaggatgaaattgatgcttactggaaatcaaagaagaagatagaggaagaacaccttagagctatttccaatgtgtcagagactattcaggctagtaaaaacacagagcctgaaaagaagttgcagaagtcaatgaccatgccagttacccgtgcacgggactacttaaatatggtggacattgacacaagtttggagcaacttattaagcgaaatggctggtggaccaagagtagcttggcgtttctgaatgag

SEQ ID NO: 25734 - DNA, 343 bp, Glycine max
  unsure at all n locations
  Clone ID: LIB3108-008-Q1-K1-G7
tgaactcatgaccgatattgacaggcgatcctgcaaatatctttacgaggatccgaaatttgtgaagaacggtgattcttcttttnttaagatgattccaaccaaacccatggttgttgaaactttctccgagtatcctccacttggtaggttttctgttatggacatgcgtcaaactgttgctgtgggagtcatcaataactttgagaagaatgatcctaccgtagccaatgtcaccaatgctgcccataagaataattgaatcgtgcgggctggttcatcatgggatgttggttacaataaatgttggttttcttttctttactcttttgtcttcttttct

SEQ ID NO: 25735 - DNA, 404 bp, Glycine max
  unsure at all n locations
  Clone ID: LIB3108-008-Q1-K1-G8
gagcttccattgtgctcactcatctctgacaacgaaaccctcttcatcttgtgctatctgggacgagcatcatggcctcaanagcantgttattgttggctatgtgtgtgcttccggcgatggttgtggccattcgcccagcaaagaaccctttttgcgtgaagggtcgtgtctactgtgacccttgccgtgctggttttgagacctcagctaccacctacattgctggtgctgagattatgttgcaatgcaagagcagggttagcaacgaggttgtgtacacgaagaaggggtacaccgactcaaccggagcatacacaatgtacgtggatgaggatcacgcacatcagatctgcagtgccaagcttgtaagcagccctcaccctcaatgcaaggaagtcacc

SEQ ID NO: 25736 - DNA, 288 bp, Glycine max
  unsure at all n locations
  Clone ID: LIB3108-008-Q1-K1-G9
tctcttaaattccaactgcttttaaagttaaaaangcttgcaaaccatttgttcacacgtgaaacatggaaagccgccaaaaactaaacattacaaccacatcacataattcataagcccttcctgttattcaacacacaaaggataatttctacaattttttaattaaatattaaaatacttaatatacttattctgtataaattacgctaatgaatccatcaaatgtaataatatttactataagttttcgtaatataatattccaaatttatctgtcttcatttt

SEQ ID NO: 25737 - DNA, 367 bp, Glycine max
  Clone ID: LIB3108-008-Q1-K1-H1
gcgcccacgcgtccggctggcttgcgtggtgcctctcaggctgtgttggaaggtagccttcaggggagtggctccacacgcttgaatgtggggagtggaaccagggtggcctcagtcacacgtgcagggttcacagttagagcacaacaacaacaagtgagtggtgaggtacaaagcagccgtagggcagtgctttcacttgttgctgctggtttggccactggctcttttgttcaagctgtgcttgctgatgccaaatctatcaaagttggaccacctcccccaccttctggtggattgcctggaacgttgaactcagatgaagcaagagaccttcagctgccattgaaagataggttcttccttc

SEQ ID NO: 25738 - DNA, 402 bp, Glycine max
  Clone ID: LIB3108-008-Q1-K1-H10
caaacccactaagatggcttcctttgtatccttcctagtgctgcttcttgcaggccttatgctcatgcctcaagggcttgctacttactacaaaccaattaagaagccaccagtgtacaagcctccagtgtacaagccaccagtgtacaaaccaccggtttataagccaaaaccaccggtttacaagccgaaaccaccggtttacaagccaccatataagaagccaccatacaagaaaccaccttatggaaagtaccctccagtagaggacaacacccatgcctaaagcaagcaatgaggtctattatctacttaataaataagaggaactgctttgtgttttctagcattgggatttacaacttcgtagcaatgcatattcttgactcttgcatgcacttc

SEQ ID NO: 25739 - DNA, 422 bp, Glycine max
  unsure at all n locations
  Clone ID: LIB3108-008-Q1-K1-H11
aaaaacatatnnttcangatttttgataactcggtttntcggttcatttgtgtcaccgtgttcattgtttaagaacgccaaacatatatataaattcttttctacccactctattccatccattgctagaacattaaagcagagccttgaccgggtcaatatcaattcaaatttgcttcatagtgttcagaacgaaaatatgcttggttatcctatgaatgaattggcatacagagtttactaatctcttgtctagagcgcttttccataaataaaataaataagtttggtggtaatttcaactttcttctttctatcaatgttaccgtcttttgctaaacattgacctttcctattatccttacatttgaataaatttttgtgttccctttttaaattttcaagtcttccaattttgtttt

SEQ ID NO: 25740 - DNA, 328 bp, Glycine max
  Clone ID: LIB3108-008-Q1-K1-H12
cccatgctttctggtgagtgcaataactcgttgtacattcctagtgtccgggggagacatggctaatatgtgtgttttggtgtaccttcttgctctgtctgtggccacaagtgccataaacgttcccaaccccaacgatgctggtcttaaggaccagaagaactttatcagctatggtggagttggtggttattcctggattgataacaatggactgtcttttgtaggagctggtgccggaatatgaggtggttttagcggaggtggaggacttggaactggacttgatgatggacttggtagtggccttgtccgtcctaccggtgga

SEQ ID NO: 25741 - DNA, 358 bp, Glycine max
  unsure at all n locations
  Clone ID: LIB3108-008-Q1-K1-H2
caaaggtccagtccctgaaaaaggaacgactgttcaggtacactttgattgcttatatcggggaatcggagctggctccaggcgagaatctaaactcctanctggaaatcgtatcattgctcagccatatgaattcaaagtgggagctccaccgggaaaggaaaggaagcgcgaatttgttgacaacccaaatggtttattctctgctcaagcagcaccaaaacctccccctgctgtgtatataatacttgaaggaatgcgagttggtggaaagcgaactgtcattgttcctcctgaaaatggctatcgtcaaaagggaatgaatgagattccccctggagctacatttgaactaaat

SEQ ID NO: 25742 - DNA, 400 bp, Glycine max
  Clone ID: LIB3108-008-Q1-K1-H4
agggaaaaaaacaaacactaggcagtgtctgggttctcttccgtgtccgattattccaattcggaatctgcgggatgagagtggaaagagagaggaacagcaacacagtgatgccggcggcggcggcggcggcgggggggaggagaatcgggtacataaacgcgcaaacggcgtcgttgcagcagcatcacatccgtggctcctcagtggtgacgtggttcctgcagaggccccactccatccccttggtcctcgccgtcttcctcttcctcgcgtggctctcactccgcctccagcgcgtggcctacgcgccccctcactccttccaaacggacatcagggccaacctcgccaggttcgactctttcgaggtcgcaaaggacaaccgcggctggatctt

SEQ ID NO: 25743 - DNA, 426 bp, Glycine max
  Clone ID: LIB3108-008-Q1-K1-H5
cccacacatccgcccacgcgtccgcatgcccatttttcacaccaccaacacaagatgtttgtccacatggtgttcgtcctttgccttctctcatccacttcccatgccactgtccaagacttctgtgtggcagacctcaaaggtgcagacacccctgcaggctacccctgcaagccacctgctaatgtcacttcagatgactttgtgtacactggcttagctgaagctgcaaatgtcacaaacataatcaatgctgctgtgaccccagcttttgttgctcaattcccaggtctcaatggccttgaactatctgcagcaaggttggaccttggtcctagtggtgttatcccactccacactcatcccggtgccaatgaactactcattgtgcttcaaggtcacatccttgctggattcatatcttca

SEQ ID NO: 25744 - DNA, 448 bp, Glycine max
  Clone ID: LIB3108-008-Q1-K1-H6
acgcaagcaatcacccttttttttttttttgttttttttttttttttttttttttttttttttgttttttgttaaattttttatttttttttttttttttttttttttttctttatttagtttaaaaaaaaaaaataaaattaatttttttttaaaaaaaaaaaaaaaaaaaaaaaaaaaaaaaaatgtgtggtcgttttaaaataaaaaaaataaaataacctttctttaaaataaaatatttttttttttttaaaataaaaaaaaaataattttactttctttaaaaaaaaaaaataataaaaaaaaaaatatttataataataaaaattattattataaaaaaattattttcttattgaatattaaaaaaaaaaaaaaaaatattcaataattttttttaaaatatttctacttaaaattaaaatttaaaacctcctttttcttt

SEQ ID NO: 25745 - DNA, 386 bp, Glycine max
  Clone ID: LIB3108-008-Q1-K1-H7
cccacgcgtccggagaaagaagcttaagggagaaatgaccgaatgctattcagttctaaagcttccatttccatcgtttcccgtcattgatttcggcgcaaaaatcttccccaaacgtttccccaaatccatttcattctcacacccttcatcgaagtttcaactttgtggaatttcccgagctatggaagtggtctaaggaagtgaagagagtaaagggtcgtcatcccctctaatgaagctcttgttcgtggaaatgggtgtcggctactatcaacatggacaggacataacggttgcagcaatgagggcttgcagggatgcaatctcttctaattcaatccctgctttccgcagaggttccattcctggggtcagtttttatc

SEQ ID NO: 25746 - DNA, 341 bp, Glycine max
  unsure at all n locations
  Clone ID: LIB3108-008-Q1-K1-H8
caaaagttgcgtggcaatagcatactcttactctgattcnttantggagaaaaggggcaacaatcatcgccggcaccccaactacatcaatcactcgcacaggtcatgtgctcaaacgacctgttggggcctcatcctctaccggtcttggattgccagcaatggccaaggcggggagagtgaggtgctccatggaggaaaagccttcaagcagctcaaacctagggatgggggcatccttgttagcagctgcagctgccgcaaccatgtcaagcccagcagccatggctttggttgatgagagactcagcactgaangaactgggcttcccttttggctt

SEQ ID NO: 25747 - DNA, 312 bp, Glycine max
  unsure at all n locations
  Clone ID: LIB3108-009-Q1-K1-A1
ccacacccctccctaatcaacccttactttacttctttttcctccctctacctcaccgccttatagtgccgccgaaggccgaccccaaccacatcgtnaaaatgctcttcacacaatgctcctccgctaaataagcccaaggcctggaatcaccccaaaaatcaatcccctccgtctctcccacaaaaaaatcatagaagatctcgccaacctaaccaacatacactttaaaggccttcaagtaaccttaccactcatcggacataaacgcaacgccaacgtcatcatgaacccattcatcaacgacctctt

SEQ ID NO: 25748 - DNA, 202 bp, Glycine max
  unsure at all n locations
  Clone ID: LIB3108-009-Q1-K1-A10
gacccacgcatactatcaacccttccttaaatttctatcaaattncctaannnnccacttctccgagctttggcctatttatcaactcctttcccattcaatttatactggtcacttattacttctatctttttttctttcccaactctttctacttggcccctcattaaaacatctttttcataaacaactcacttttcct

SEQ ID NO: 25749 - DNA, 436 bp, Glycine max
  Clone ID: LIB3108-009-Q1-K1-A12
cccacgcgtccggcattattcaatggccaccacagcagctctatccgggagcatggtgagcacctccttcatgaggaagcaacctatgacgaccaagagcctaaagacattccccaacgctctttttggtctgaaaggtggacgaggtggtcgtgtaacttgcatggcctcgtacaaggtgaagctcataaccccagaaggagaagtggagtttgaatgcccagatgatgttttcattgttgacaaggctgaggaagaaggcattgaacttccctactcgtgcagggctggttcttgcgtttcatgtgttgggaaaattgtgaaaggtgacgtggaccagtcagatggtagcttccttgatgatgaacaaatagaaagtggatgggttctcacctgtgttgctctacctaggtcagacgttgtcattgagacacac

SEQ ID NO: 25750 - DNA, 418 bp, Glycine max
  Clone ID: LIB3108-009-Q1-K1-A2
cccacgcgtccgctaaccaaccctgacactccttcttctccgcttcctcttcgatcatggcttcagaatgccgccgaagttcgacccctcccagatcgtcgacgtcttcgtacgcgtcaccggcggtgaggtcggcgcggcgagttccctcgccccgaagatcggtcccctcggtctctcccccaagaagatcggagaagatatcgccaaggaaaccgccaaggactgtaagggcctccgcgtcaccgtcaagctcaccgtgcagaaccgtcaggccaaggtcacggtggtcccatccgccgccgcgctcgtcatcaaggccctcaaggagcccgagcgtgaccgcaagaaaacgaagaacatcaagcacaacggcaacatctcgctagacgacgtcatcgagatcgctagggttatg

SEQ ID NO: 25751 - DNA, 423 bp, Glycine max
  Clone ID: LIB3108-009-Q1-K1-A3
ccacaaacgcttgcatggctgcacatttaagaagaaggctcctaaagcaattaaggagagaaggaagggtgctcagaaagcgatggggacgaatgatgtaagagtggatgtgaagctcaacaaggctgtgtggagccaggggatccggagcgtcccaaggaggattagggttcgcattgctcgcaagaggaacgacgatgaggatgcaaaggaagagctctattcccttgttactgtcgtcgaaatccccaaagaggagctcaaaagtttggaaaccaaggttattgatgatgaagattgattatgtgttggttatatatctgttttttttatagttgatgtggatttgcgaatatcttttattttgttgagacattggagatatgtagtttgataattggttgccttcctctcgtttgattc

SEQ ID NO: 25752 - DNA, 440 bp, Glycine max
  Clone ID: LIB3108-009-Q1-K1-A4
cagaaacagataagggcgttctctttaccagctaacatttccagtgttcccatgtctggggcccactgaagtcgaacccctaatggcttctcaagttcttcttcaacaggcactgtttgcccccaagctaagtttcccttcttcttctcgtaacgtcgcgttaatttctagggttccttccaccccaatttcatggcgttgcactcctctcattgctaagcctagtttcgctgtgagagctgactccaacgtcgaaggcgctggtgaagccaccgaggatgttccttcgtataatgttgatgaagtttcggaaggcgaaggagaacaagtttcggattctgaagctccaaaatctcccagaaaaccccgagtcaagctcggagacgtcatggggatactgaatcagagggcaattgaggcatccgagaagcaaagccaac

SEQ ID NO: 25753 - DNA, 437 bp, Glycine max
  Clone ID: LIB3108-009-Q1-K1-A5
gtgagagagagagcgagcagtttcatacacagagagaggggtttgggattggagggatgggcgctgcgtctcttcctcttctctttcgatccatccctcattcctaatcctccaatccaaccacctcagcctcacactcacatatacacatatctgaacgcgtatcgtccctcctatggcttcaaagcgcatcctcaaggagctcaaggacttgcagaaagacccaccaacttcttgcagcgctggtccagtagctgaggacatgttccattggcaagcaacaataatgggtcctgctgatagtccttatgctggaggtgtattcctagtcactattcacttccctccggattatcctttcaagcctcctaaagttgcctttaggactaaggtgtttcacccgaacatcaatagcaatggtagcatttgtcttgata

SEQ ID NO: 25754 - DNA, 349 bp, Glycine max
  Clone ID: LIB3108-009-Q1-K1-A6
aagagtcacaccactacacctgccttccagcgcatttgttgtaatattgttggcagagggagctacagcagctctctcaaatgggttgcatcaatctttcttgcccagcgatttcctcattgacattgctttttcctcttaccagtatgaaagaccttacaagattgacagcaaaggactgagcaactggtataactacactcacggaccacgtagaactgtaataatggatgcaatcaatggggatatcgcgattgatcattatcatcgctacctggaggatatatatttaatggaaactttgggagtaaacagctaccctttatacctgtcatcggcaagaattcta

SEQ ID NO: 25755 - DNA, 356 bp, Glycine max
  Clone ID: LIB3108-009-Q1-K1-A7
gcgcccacgcgtccgctaaccaaccctgacactccttcttctccgcttcctcttcgatcatcgcttcataaggccgccgaagttcgacccctcccacatcgtcgacgtcttcgtacgcgtcaccggcggtgaggtcggcgcggcgcgttccctcgcccctaagatcggtgccgtcgctctctgccccaagaagatcggagaagatatcgccaacgaaaccgccaaggactggaagggcctccgcgtcaccgtcaagctcaccgtgcataaccgtcaagccaaggtcacggtggtaccatccgacgacgcgctcgtcatcaaagccctcaaggagcccgagcgtgaccgctagaaaa

SEQ ID NO: 25756 - DNA, 461 bp, Glycine max
  Clone ID: LIB3108-009-Q1-K1-A9
aaccgccggggagacccaggctcgacgccacgcgtacgatcaaggcttccctcaaagacgttggagtcgctgttgtggccactgctgggagcgcaggtctagctagcaacgccatggccattgaagtgttactgggcactgatgacgggtctctggttttctctcccaactctttctacgtggcccctggggaaaagatcgtgttcaagaacaacgcaggtttcccccacaacgttgtgttcgacgaggactagattcctagcggcgtggatgcagggaaaatctccatgagcgaagaagaccttctcaatgcggctggtgagacttacagcgttactttggatgccaagggaacctacagtttttactgttcgcctaaccaaggacctggtatggtgggaaaagtcaccgttaattaattatatattgtctcctacgtctaagttctcatatgcttgttt

SEQ ID NO: 25757 - DNA, 402 bp, Glycine max
  unsure at all n locations
  Clone ID: LIB3108-009-Q1-K1-B10
ctttcttcaccgcccgctttttctttctttcctacacaaaacatgactccgcccaatcggcaaaccttcgagtaccccaacttcaaacttgtcatcgacggcgacggtggcacaggaaagacaaccttcgtgaagaggcatttcactggtgaattctataagaaatatgaaccgaccattggtgtggaggttcattcgatggattttttcacgaactgtggaaagattctcttctattgttggcatactgctgcgcaagaaaagtttggtggcctcatagatcgatattatatccatgggcaatgtgcgattatcatgtntgatgttactgcccgtctaacatacaaaaatgtccctacctggcaccgcgatcttttgtcggctctgtgaaaacattccaat

SEQ ID NO: 25758 - DNA, 433 bp, Glycine max
  Clone ID: LIB3108-009-Q1-K1-B12
cccttttccaccgcaaagtttagggtttatgccatcaattttgattcagggaggctttgggtactcatctgggtcatggtgtttgctctgttttgttgtgtctgaatgaatgcataaagtttggtggcatctgatcctttttcgatcccaaataacagaagagaatgagagtatcactggtaggtttgattatttaacagaaaaacggttggaaaatgggaggttgctgttgttctgccaggaaacctcacctgcatggaacgccagtgtattactattgcccaccaactttagaagagcatgagtctttaacgtctaatgatggtacagctacgtcactcactactggattgctggtaggcttgaacctggaaacttccacacctgatacataccatccccctcctgcacctctaccttatgatatggtcct

SEQ ID NO: 25759 - DNA, 233 bp, Glycine max
  Clone ID: LIB3108-009-Q1-K1-B2
cccacgcgtccggttctcgctactctcgcggtggggaaggcggtggatccgatggaaactggagaaattaggcatatgaccctgtaaattagggtttatgattaagtcaattattttaaaggcgtgtctgggggggggtttaagtttcgtatctgtgttgggttccgtttcgggtccctggggttttcgtttttgacctacaattttagtggggttaatagccaatcgattga

SEQ ID NO: 25760 - DNA, 417 bp, Glycine max
  Clone ID: LIB3108-009-Q1-K1-B5
cccacgcgtccgtgatggcactaactgttacagtaaacaagtatgcttcatctaatctggaagctgttcccagaacacaaggaaaagtagcaaccaaaaaaaccacaccaaccttaagcaccaatgtggaaatgggaagaagaggacttgtcttatccactgtaatcgccaccacgcaagtacctgaacctgactctaggactcagcttcttaaaaaatatcagaagaaatcagaggaaaacaaggagaaaaatgacaaagagaggctggagagttattacaagcgtaactacaaggattactttgaattgatggaagggacattgaaggcaaaggatgggaagctttctgatacagaaaagggtatccttgattggcttcaaaaaaacaagtgaaagggtttcttaattgttttac

SEQ ID NO: 25761 - DNA, 421 bp, Glycine max
  Clone ID: LIB3108-009-Q1-K1-B6
cccacgcgtccgcccacgcgtccgcccacgcgtccgaggttcaatggtgttgtgggagagaacgctcggaactgcgtatttcttgggtctgaagcgaacttacaggctcgctctcaggattcaacgcaggatcgtaagccctaagtaccctaagctcctccaatttcttcacagacggacccgtgctgtgtttgatgtagctatcagagtgcatcgtaacattcaagttagggacatagaagtgggacggaattttgggaactttatattgcgatggctggatcgaatgaagccatcggctcagattcgcggtcccccaccttctaatggtattacatcaagagaaagtgttggaaaacgcttatcagcaggtggaagtcccaatcagaagggttctggaacgtcaaggagggactctgat

SEQ ID NO: 25762 - DNA, 198 bp, Glycine max
  Clone ID: LIB3108-009-Q1-K1-B7
agatttggtttttctctatttgcgtgcgtgctagtatagtcgttgctgggcagtatggcgggaatcttttcgttggttactgggaggccgggactaagtggattcggatcttcctcaactgctgaacaagttactgaaggaattgatgccagcaatctcactgcaatcatcacaggaagagcgagtggcataaggttg

SEQ ID NO: 25763 - DNA, 221 bp, Glycine max
  Clone ID: LIB3108-009-Q1-K1-C1
agaaggaaatggcttcctcaatgatctcctccccagctgttaccaccgtcaaccgtgccggtgccggcatggttgctccattcaccggcctcaaatccatggctggcttccccacgaggaagaccaacaatgacattacctccattgctagcaacggtggaagagtacaatgcatgcaggtgtggccaccaattggcaagaagaagttcgagactttttct

SEQ ID NO: 25764 - DNA, 371 bp, Glycine max
  Clone ID: LIB3108-009-Q1-K1-C10
gaagattccacaacagttttagggagattcaaaaagagagagtggaaaaggtggcgcgggtgatcacagtggtgttgtgcgccatggctattctattatgcgccgcggtcggtgcgttgtgggtggaggaggcggcgaacccgatacgaatggtgtctggcgtggaggcggaggtggttcgggtgatcggggagtgccggcgtgcgttgaagtttgctaggttcgtgagcaggttcgggaagagttaccaaagcgaggaatagatgaaggagaggtacgagatattctcgcagaatctgaggttcatccgctcccacaacaagaagcgtttgccctatactctctctgttaatcattttgctgattggact

SEQ ID NO: 25765 - DNA, 434 bp, Glycine max
  Clone ID: LIB3108-009-Q1-K1-C11
cccacgcgtccgcccacgcgtccggtttcagcgagcattctacaatggcggctataccagttaatcccaagcctttcttgaacaatttgactgggaagcctgtaattgtgaaactgaagtggggaatggagtacaagggctatctcgtttccgttgattcctatatgaacttgcagctggccaacactgaggagtacattgagggacaatttactggaaatttgggagagattttaatcagatgtaacaatgttctctaccttcgaggagtaccggaggatgaggaaatcgaagatgctgctgaagagtatagagtgatagaagctgctaatggctatgacataaacagaactcgaatttctactgtttttgtatcttcacataaatgtacgttttttgtagtcaatgtgtagagatttgaatcaatgatgcac

SEQ ID NO: 25766 - DNA, 279 bp, Glycine max
  unsure at all n locations
  Clone ID: LIB3108-009-Q1-K1-C12
atncaaaacctctcattctatcttttcactttttaaccaacaatctcaatggccgcccattcctgactattcaccccacccctctcccatctcaaacccaactaccgttctaccgcaccatgtaaacaatactccaccctttccttcttcacctcgaaacccctcaatatctcactaacaatcttaccaacatccacctaccaaaccacatacacaccacttgccttcaccccaccttaactttacccaaacaccccttcccctatctttttattcatc

SEQ ID NO: 25767 - DNA, 374 bp, Glycine max
  Clone ID: LIB3108-009-Q1-K1-C2
cccacgcgtccgcccatttttcacaccaccaagccaacagaagatgtttctccacattggtttcctcctttcccttctctcatccacttcccatgccactgtccaagacttctgtgtggcagaccttaagggtgcagacaccccttcaggctacccctgcaagccacctgcaaatgtaacttcagatgactttgtgtacacaggcttagctgaagctgcaaatgtcacaaacataatcaatgctgctgtgaccccagcttttgttgctcaattcccaggtctcaatggccttgacctctctgcagcaagattagaccttggtcctggtggtgttatcccactccacactcaccctggtgccaatgaactactca

SEQ ID NO: 25768 - DNA, 339 bp, Glycine max
  Clone ID: LIB3108-009-Q1-K1-C5
aaaaaaaatataaaaaaaaaataaaaatttaaaaaaaatttaataaaaaaaaaaaaaaaagagaaaatagataaatatgtataatattttaaacctcccttatttaaagggccctttcttcttacgtcttaccttcttatttgggccctcttttttttaaattcaatattttttttttttccccccctttaatttaactatctcttttcttacccctacttatcttctttagcccgttttttacaaaatctacttttttaaaactgcttgcgtcttcaaatattcgcctttaataaaatttcccatttataaatgccctttaataatatatatgcccct

SEQ ID NO: 25769 - DNA, 380 bp, Glycine max
  Clone ID: LIB3108-009-Q1-K1-C7
cccacgcgtccgctttttctttttctctctctctagggtttcgaaaatggtctccgggggccagttcgacgccaccaccgtcttctccggcggcggcttcatgtcttctcagccgtctaccctcaacgattcctctcccgcgccgtcaaaaagccgcgaaactcaaggtttggtgccagtgacagtgaagcagataagcgaggcctctcaatccggtgatgaaaagtcgaatttcgtgatcaacggtgtagatctgaacaatgtaacactgcttgggatggtgtttgagaaagttgagagaaatactgatgtcaattttgttttggatgatggaacaggacgcatcaaatgtcgaagatgggttaatgaggcttttgaca

SEQ ID NO: 25770 - DNA, 434 bp, Glycine max
  unsure at all n locations
  Clone ID: LIB3108-009-Q1-K1-C8
cccacgcgtccggatttttcaagctctaccctcccttccctccactttcgtccctcttgttcttttgcttctgtttttgaggcgaanaaggatggaattgtaatgctgggaatataattggagaattgggggaggagtaagggaggaaatcatacacaatgcccgagttccccttgagctcgaggttggaaagggtgcaaaatagcttgagagagaatggttctctggtgtatctcaatgtgtatgatcttacacctgccaacaattatctttacgcctttggggttggaatctttcattcgggcatagaagtgcatggtatggaatatggctttggagcacatgaatacccaacaagtggtatatttgaggtcgaacccagaagctgtcctggcttcatcttcagatgttcagtattgttaggcaggaatgat

SEQ ID NO: 25771 - DNA, 414 bp, Glycine max
  Clone ID: LIB3108-009-Q1-K1-D1
ctctgtatcatttcatttcgataatcatccatagttactgaagaaaatggcaaccatcggcgctgctatcacaaccccatcgatcacccgcgcatgtctagtgcaaaaacgttctcttgggttctcatctcccgttcttggtttgccagcaatgggtaaggtgggaagagtgagttgctccatggaggaaaagccttcttctgtgaaggaaagcagctcaagcatgttggggatgggggcatctttgatggcagcggccagcgccgcagccatgtcaggcccagccatggccttggtggatgagagacttagcactgaaggaaccgggctacccttcggcctcagcaacaaccttctcggttggatcctgttcggcgtcttcggactcatctgggctctctattttgtctacac

SEQ ID NO: 25772 - DNA, 432 bp, Glycine max
  Clone ID: LIB3108-009-Q1-K1-D10
cccacgcgtccggattagttctcagaagggtcatggaatgcacttcccggggggtgggggggaaactgatgaatccatggaacaagctgctttaagggagaccatagaagaagctggagttgttggcagtgttgaaagtaaactgggaaaatggtattacaagagcaaacgccaacccataatgcatgagggatacatgttccctttgcttgttaagaaggaattggataactggccagaaatgaacacaagaaaacgaagatggatgactgtggatgaggcaaaagtaatatgcccttatgcttggatgaaggaggctttggatgaattggtcagaagacaaactcaactgcactccaaaaaggatggggatatgagtaggttgtaaatttgtaatagcgtgtttggttccacatcacagatttgtttttt

SEQ ID NO: 25773 - DNA, 412 bp, Glycine max
  Clone ID: LIB3108-009-Q1-K1-D12
gaaccttgcattgtatctacccacttctcaaccaacaatggcaatggcagcccaagccgctctcttcaccccacccctctccggtctcaaacccagcgaccgagccaccgcgccatggaaacaatcctccaccctctccttctccacctcgaagcccctcaagttctcgcgaacaatcagagcagcagccaccgaccagaccacagaggcaccggttgggttcaccccaccggaactggacccaaacaccccttccccgatcttcggaggcagcaccggcgggctcctgcgcaaggcccaagtggaggagttttatgtcatcacatgggactccccgaaagaacagatctttgaaatgcccactggcggcgctgccatcatgagggagggtcccaaccttctcaagttggcg

SEQ ID NO: 25774 - DNA, 401 bp, Glycine max
  unsure at all n locations
  Clone ID: LIB3108-009-Q1-K1-D2
cccacgcgtccgcgaaagttttattttgagcacaatttaaaaaacaagcatatcctcagtggcaattacgaaaatataaaagcaagccacaatgcctaagcagatccacgagattaaggatttccttctgacggcacggaggaaggatgcgaggtcggtgaaaatcaagaggagcagggatgtcgttaagtttaaggttcgatgctccaagtatttgtacacgctttgtgtctttgatcctgagaaagccgataaattgaagcaatctcttcctcccggtttgagtgttcaagacctgtanaggtgctgagtgcggcagcgtgcgtttggttatctttttggtgcctcatgctctagattttgtggcttgcttttatattttggtaattgttatgaggata

SEQ ID NO: 25775 - DNA, 439 bp, Glycine max
  Clone ID: LIB3108-009-Q1-K1-D3
tcctgaccatcttacccataacctctggatgctggttttggagctattgtagagcgggcaaggatcttcagcgcctttccctttccgggcttcttactgaccgtgtttttgaatatattgggacttatggcaagaagcttgagatgctttctgtggctttcgcgggagatagcgatctgggactccatcatgtgctgtctgggtgtgacaaccttaggaagctggagatcagggactgcccctttggtgacaaagccctcttggccaatgctgcaaagctggagacaatgcgatccctttggatgtcctcttgcttggtgagttatggagcatgtaaactgctgggtcagaaactgccaagacttaatgtcgaagtcattgatgaaagaggacctccagattcaaggccggagagtagtcctgttgagaagttatacat

SEQ ID NO: 25776 - DNA, 425 bp, Glycine max
  Clone ID: LIB3108-009-Q1-K1-D4
ggcagatatatctaccgagggttaaacatttagcatatttgctgagggggtacctttgtggacactacatactatccataatatggtcgaaaacaatccagcaagggtttttggttcttctatgtttctatgtttgcttgtgttgatcacttggaacaacattgttgttgttgttccacaagctgaggctcgagcattctttgtttttggtgattcgctagttgacaatggcaacaataactacctattcaccactgctcgtgccgactcatatccttatggaattgactatcccactcacagggccactggccgtttctctaatggcctcaatatcccggacattatcagtgagaaaattgggtcagaacccacattgccgtatctaagtcgcgagctcgatggagagaggctactcgttggtg

SEQ ID NO: 25777 - DNA, 444 bp, Glycine max
  Clone ID: LIB3108-009-Q1-K1-D5
ctgagactggttccaagcacatcatttattattattcttctatataggtttatataagagagagggtgtcaaagccatatcatatcagaaaacacaaaggaataatatattgcgggggtgtttgtttctcatatggggtctcgctctgcttctccatagggattacatttattaccattcttttgttagctatcactaccatacggaatgttggtcaccctcatacactccctaaggtagcagcatttaattaacactactactactactttgatcactactgctcagctttcatcatggaaaggctccaaggacccctcaattcctgtttctttggagaccctttggaagtgaattgtttggaccaagttctggtggatgaagaaagcctgagactagaagaggaagagcagcttctgatatcaagcttagaggacaacatgc

SEQ ID NO: 25778 - DNA, 442 bp, Glycine max
  Clone ID: LIB3108-009-Q1-K1-D6
cagagtttactgataagctcacagagtagaggagttatccgaagatcaaaaggatgcgttcaaggaatttgtcaagggaaaggttcgtgaagctaagaaagctaatagagaggcaagggaagctcggaaaaaagccattgaagaaatgagtgaggaaaccaaagctgcgtttgagagtatgagattttataagttctaccctgttcaatctccagatgcacctgatgtatcaaatgttaagtctccattcattaacaggtattacggaaaggctcatgaggttctgtgattggctccaagacaataatgacaatttttctggtttgttttgcccaacacgagatgttttgttattatgaactatgtagttcaggaggcaaccccctgatgtcccatcaaattgtctttgccagtgtagttgtctaaagtgacatataccatg

SEQ ID NO: 25779 - DNA, 427 bp, Glycine max
  Clone ID: LIB3108-009-Q1-K1-D8
atggccaaataagcaatgggatagagtatttgagccccccacttgattgggcgagggagaccaagtttccacatgctgtctgggcagctggtcgtggtcttactgctcttttattaccaaattttgatgatgttgataatctttggcttgaacctctatcctggcagggaataggatgcacaaaaatcacaaaagcaagaaatgaaggttccatcaatgggaattcagaatcaagatcatatcttgaaaagaagcttgtgttttgttttggttcttatgttgcatcccaaatgttacttccttttggggaagaaaacttactttctacatctgagatacagcaggcgcaagagatatctacacgaatggtcattcagtatgggtggggacctgatgacagtcccgcaatatattactgtagtaatgc

SEQ ID NO: 25780 - DNA, 300 bp, Glycine max
  Clone ID: LIB3108-009-Q1-K1-D9
acatttttcatatcccttccatccccgcccttttcgagcatttttatatatacttcattaaaaaatatcaaatatattcactcaaagtctctacaaaattatgcagctctttataatcccttactttacctttttttccttcaacacactgccaactaattcacacactattgcatacatacctccctgttttaatttatagcttaaccaccatattatcatatatttatgcttcaactataatctatactttatattatataacataagcctctttccttacatgtatatatctatact

SEQ ID NO: 25781 - DNA, 327 bp, Glycine max
  Clone ID: LIB3108-009-Q1-K1-E1
cccacgcgtacgtcctgacactgctacatactgagagacattgcacgcggcatcacaggggggatgtggtggtaaataaggagcactggcggatcctgggtggcgcaactgcttcaacgaccacataagaggagttagacgacaattccctgttcaaaaaacaaggtgtcagacaaaacgacaccgatacggctgctcacctcctatacctatccgtagagggtcaaatcagggactcccacaccctgcgtttcgctcttgagaacttgactgagaaaattgatgaaccagttgtagatgcggatacacgctcttcatttaacatgt

SEQ ID NO: 25782 - DNA, 295 bp, Glycine max
  Clone ID: LIB3108-009-Q1-K1-E10
cacatcttactacaatttttacacatttaccatacaatctccatacccgcactatttctaaaatcgaatctacacttcaataaaaaaaatcaaatctctacaatcaaaaacattatgaatccgatccagcatcttaaattacctcaaataaagctaacttgattccacacaataacaactaattcacaacttataccattcatacctccttactcatatcattacttacaacaaccatataattaaacattttattttcacctatattatatacttatcaattatctaatcatat

SEQ ID NO: 25783 - DNA, 435 bp, Glycine max
  Clone ID: LIB3108-009-Q1-K1-E11
cccacgcgtccgacacacactgtctctgtacactacaaagtgtaagttgggaacaaagagaggaaggagcatagactcaaagatgagcaaagattccatgagaggttcaaagaagaaacttttatgcagaaggcttggagggtacctcaaagagcaaaaaggaagactatacataatcagaagatgtgtagtcatgcttctctgttggcatgactagaatcattctcaacaacaagcattgtttaacgttcttctttgcggctcatcatatcgtggatcagcacactctagagtcctcaaagccatagccaaggatcaaagttcaagcacgcagaaaaaaggataaatgttttgttagctctttattattattattcactaggtaaatagcagagcaagtaacgttagagacaattttccttcatatcatgccta

SEQ ID NO: 25784 - DNA, 432 bp, Glycine max
  Clone ID: LIB3108-009-Q1-K1-E12
agagaagaacagagagagatccatccatcaattccaatggccgatcagcgcaccgacgaacagatctccgagttcaaggaagccttcagcctcttcgacaaggacggggatggttgtattaccaccaaggaacttgggaccgtgatgcggtcacttggccagaacccaactgaggcagagctgcaggacatgataaatgaggttgatgctgatgggaatggtaccattgatttcccagaattcctgaatctcatggctcgcaagatgaaagacactgattcagaggaggagctgaaggaggctttccgcgtgtttgacaaggatcagaatggcttcatctctgcagcggagctccgccatgtgatgaccaatctcggtgagaagctgaccgacgaggaagtcgatgagatgattcgcgaggctgacgttgat

SEQ ID NO: 25785 - DNA, 413 bp, Glycine max
  unsure at all n locations
  Clone ID: LIB3108-009-Q1-K1-E2
aattccggtcgacccagcgtncgcttttctttatccaatacgatggcagccatggcaaccacaacctcttttaaacggaaactcgattcttaacggaaagcccgtcacatattcttcccgcgtcgcgcccaccaccaaattatcctcatccaaacaaggcacaatttccatgtccctaaccccacccccctacgacctccagtccttcaaattccagcccatcaaagaatccatcgtgtcacgggaaatgacgcgccgctacatgaccgacatgataacctacgccgacaccgacgtcgtaatcgtcggagccggttcggccgggctctcctgcgcgtacgagctcagcaagaaccccgccgtgagcgtggccatagtcgagcagtcagtgagccccggcggcggcgcgtggc

SEQ ID NO: 25786 - DNA, 348 bp, Glycine max
  unsure at all n locations
  Clone ID: LIB3108-009-Q1-K1-E4
cgcacatatatctaccgatacataaacttttagcatattttctaacancctaccttaccgcacactacatactatccataatctcttctaaaacaatccatcaaccctttttacatcttctatgtttctatctttcctactcttgaacacttggaacaacattcttcatgttcttccacaaacttacgctctaacattctttctttttggacattcactacttgacaataccaacaataactacctattcaccactaatcgtgcctactcatatccttattgaattcactataccactcacagggccactgtccttttctttaatgacctcaatatccccaacattat

SEQ ID NO: 25787 - DNA, 436 bp, Glycine max
  Clone ID: LIB3108-009-Q1-K1-E5
cttgctcttcctcagtagtgcgattttcgattctcttctctgcaactatgcctaacccggaggtcttgttcgacatgaccatcggcggtcaacctgccggccgcatcgtgatggagctctatgccgacgtgactcccagcaccgccgagaacttccgcgcgctctgcaccggcgagaagggcgccgggcggagcggcaagcccctccactacaaaggctcgtccttccaccgcgtgatcccgaacttcatgtgccagggcggcgacttcaccgccggaaacggcaccggaggcgagtcgatctacggcgccaagttcgccgacgagaacttcgtgaagaagcacactggtcccggcatcctctccatggcgaacgccggtcccggaaccaacggatctcagttcttcatctgcacgacgaagacggagtggctcga

SEQ ID NO: 25788 - DNA, 439 bp, Glycine max
  unsure at all n locations
  Clone ID: LIB3108-009-Q1-K1-E6
gtttcgtttcgggtttgacgttgttcacaatcactttctgcgcttcactcactcccttgaagcggttgtctttctttgtcgaactcgtgcgaacatgcgtgagattcttcacatacagggagggcaatgcggaaaccagatcggagcgaaattctgggacgtggtgtgcgcggagcacgggatcgattccacggggaggtaccagggggacaacgagttgcaactcgagcgagtcaacgtctattacaatgaaccgagttgcggaaggttcgtgccgagggcggtgctcatggatctagagccagggaccatggacagcgtcagatctggtccctacggtcagattttgcgacctgataacttcgtcttcagacagtccggcgccggaaacaactgtgccaaaggtcactacaccgaangcgctgagttgattgactct

SEQ ID NO: 25789 - DNA, 342 bp, Glycine max
  Clone ID: LIB3108-009-Q1-K1-E7
gtttttcttgaatttattgtaaaattatatagtaaatggcttactattaggattggacggtgatagtcttgtatcgtggagattcaaatgcatagcttttctatagatggatgtggatcttaattttggcaaaaaaaaaaaaaaaaaaaaaaaaaaaaaaaaaaaaaggcaaaaaaaaaggaaaaaattaaaaaaggggcgtccactctaaaaaatccatgctttcttacgcgggcaagcaacgtcatacctgttgtatagtgtcaactaattttacttcactgaccagctttttacaccggagcgactgtgaaaacccaggctttgcccaactaattgccg

SEQ ID NO: 25790 - DNA, 423 bp, Glycine max
  Clone ID: LIB3108-009-Q1-K1-E8
ggggaaatttgcgttgtttttcgcggtacagctcacacacactgaacggggagtatggcggacaaggctgttacaatccgaacccgaaagttcatgaccaacaggcttctttccaggaagcagtttgtcgttgatgttcttcatccagggagggcaaatgtttccaaggctgaacttaaggagaagctagctaggatgtatgatgtgaaagaccctaatactgtatttgtcttcaaattccgaacacattttggaggtggcaaatccactggatttggtttgatttatgacacagtggaaaatgctaaaaagtatgagcccaaatacaggcttatcaggaacggccttgacactaaggtagaaaagtcaaggaagcaaatgaaggagagaaagaatagagctaagaagattcgcggagtaaag

SEQ ID NO: 25791 - DNA, 431 bp, Glycine max
  Clone ID: LIB3108-009-Q1-K1-E9
cagattgtgagtggaaggcacaagcaggtaacatatgtgttgcatcctgggactggagctgcagtggaatctgcaagtcagtagagaagatcaaatatgtgcactcaaagtgtggtgaaggggatggagctgtttggagtgccttagtttaggtttggttggttcaacagaatgccaactaattcacacgtgttggcatgcatacctccctgtctttgtttttgggtgtgggaggatatgatgatatatttttggttcaactatagtctatacttggtattatgtaacataggcctcttttgttacatgtatatttgtatacttttgttccttagacccttttgcacaatgcctttggaggtagttgtgctagtgcagggtcatttttcagtgtagcatgctgaagagcaatgaagtgatagtgttgttga

SEQ ID NO: 25792 - DNA, 374 bp, Glycine max
  Clone ID: LIB3108-009-Q1-K1-F1
caaatgcattgtgattggatagttaagttttctaatatctcttcaaagaataagagttcgtttatgctcaaaaaaaaaaaaaaaaaaaaaaaaaaaaaaaaaaaaaaaaaaaaaaaaaaaaaaaaaaaaaaaaaaaaaaaaaaaaaaaaaaaaaaaaaaaaaaaaaaaaaaaaaaaaaaaaaaaaaaaaaaaaaaaaaaaaaaaaaaaaaaaaaaaaaaaaaaaaaaaaaaaaaaaaaaaaaaaaaaaaaaaaaaaaaagggggggggggttttaaaaaaagtatttttttaattgggggggggtaaaaaaaaaaattttttttaaggggaaaaaaaaataaaaaaaagggggggattaaaaaaaaggtgaagg

SEQ ID NO: 25793 - DNA, 436 bp, Glycine max
  Clone ID: LIB3108-009-Q1-K1-F10
cccacgcgtccgcaaatattactgcaattacataagtacaaaacaacatagcatcctggggcctttgaacatcgttttgcaaccatggaaacaggcatagcatgctacactcgcgggcctttcttgcctagtgtttcttccaagcactctccaccctccatctctccatcttttggcttgaggagtctgaaatcgagctctttatttggagaatctctaagagtggcatccaaatcaacactaaaggtttcaaagacaaagaatacttcactcgtgaccagatgtgaaattggtgacagtctggaagaattcctcacaaaagcaacaccagataaggcgttgatcaggttgttggtgtccatgggagaagcattaagaacaatttccttcaaagtgaacacggcttcttgtggtggaacacaatgtgttaatactt

SEQ ID NO: 25794 - DNA, 431 bp, Glycine max
  Clone ID: LIB3108-009-Q1-K1-F11
caaggctctactctactgcttcaccttctgctctagaaaattcagtggggatacatggcttcggctactctctctgtagccaaaccagcccttcaggcaaatgggaaaggcttctctgaattctctggcctccgcagctcatcaggcttccttcccttttctagaaaatcttcagaggatttccattctgtcattgccttccagacctatgcagttggaagcagtggaggatacaagaagggtgtgacagaagcaaaactgaaggttgccataaacggatttggaaggattggaaggaacttcttgaggtgctggcacggtcgcaaagactcccctcttgatgtcattgccatcaacgacaccggtggcgtgaaacaagcctctcaccttctcaagtacgattcgatcctcggaaccttcgatgctgatgt

SEQ ID NO: 25795 - DNA, 432 bp, Glycine max
  Clone ID: LIB3108-009-Q1-K1-F12
aagatagataggtgaaaatggcgcagtgtgtggccaacacattcgtgcggggaaaaccctttcttccagttgcagcagctcccactaaaaatgttcggagagcggttcagtgcggtgtgtggtgcaagaagaaggagatacacccgcaattctacgaggaatcgaaggtgtactgcaacggggagctggtgctgacgacaggtgggacccagaaggaatacgtggtggacgtgtggtcggggaaccaccccttctacctcggaagccggtcggcgtctatggtcagcgacgaccaggtcgagaagttccgcaagaagttcggggagctcaaagagatcatggagattcctgttctcaagggagagattgttatcccctcaaggcgcaagggtgtttccaaaggaggcaagaaaaaataatctattctactcg

SEQ ID NO: 25796 - DNA, 414 bp, Glycine max
  unsure at all n locations
  Clone ID: LIB3108-009-Q1-K1-F2
ccacgcgtccgccacgcgntccgcaatcgcgaagactagatctgatctgagagaatgggctcctcgtctagcagtaaggacgcccaagaccttttccgcgctctttggtctgcttatgctgcaacccccactaatctcaagatcattgatctctatgtcatctatgccgtattcaccgctttcatccaggttgtttacatggctttggttggatcatttccatttaactccttcctatcaggagtactttcttgtgtaggaactgctgttcttgctgtttgtctcaggatccaagtgaataaagagaataaggaattcaaggatcttgcacctgagcgcgcttttgcggattttgttctctgtaatttggcgcttcatttggtgatcatgaacttccttggttaaattgggttt

SEQ ID NO: 25797 - DNA, 428 bp, Glycine max
  Clone ID: LIB3108-009-Q1-K1-F4
tgagaactaagaaggagaagcaaatggcttcctcaatgatctcttccccagctgttacgactgtcaaccgtgccggtgccggcatggttgctccattcactggcctcaagtccatggctggcttccccaccagaaagaccaacaatgacattacctccattgctagcaacggtggaagagtgcaatgcatgcaggtgtggccaccagttggcaagaagaagtttgagactctttcctacctgccagaccttgatgatgcacaattggcaaaggaagtagaataccttcttaggaagggatggattccttgcttggaattcgagttggagcacggtttcgtgtaccgtgagcacaacaggtcaccaggatactacgatggacgctactggaccatgtggaagctgcctatgtttggttgcactgatgct

SEQ ID NO: 25798 - DNA, 441 bp, Glycine max
  unsure at all n locations
  Clone ID: LIB3108-009-Q1-K1-F5
aaaaaattgtaaaggagagtacataaatgtagacaccaaaaatgtattatgttctagaaggatcgagacattcaatgaggttacatcaggacttagtatggtcaatattttggacccgtcatgtgattggcttgatactgaaacatcttggaggagatctctacttaagaaatatccgagaaagaatttccttaatactcatctcaaattgccatccttaaactgtcggagttatgcatacttcctctgcggttattgggccaatgatgatagtgttcgcagtgcactgcatatccgtaagggaactataggaaaatggcgtcgctgtaccttcaatatacctaacaaggaggacatctcaagcagctatgagtatcatgtaaatctcagtagaaaaggctatcgttcactgatatacagcggngatcatgacatgaaaat

SEQ ID NO: 25799 - DNA, 443 bp, Glycine max
  Clone ID: LIB3108-009-Q1-K1-F6
ggttatttgattggtgtgcatccatgttaagctagtggcgatcggatccagctacagcggacaacctacagatcaaggaaggaagatgttgcgtgttataaggcacaagagtattcgccccgccttctccgcaatcagacacttctcttctgcagctaaagagattactgtcagggatgctctcaactccgcactcgatgaggaaatgtcagctgatcctaaagtcttcttgatgggtgaagaggttggggaatatcaaggtgcatacaacatatccaaagggctgctcgacaagtatggccccaagagggttctcgatactccaatcactgaggctgagtctgctgggattggagttggcgctgcttactatggtctaaggcctgttgtggagtttatgacttttaacttctccatgcaggcaatacatcatattattaact

SEQ ID NO: 25800 - DNA, 377 bp, Glycine max
  Clone ID: LIB3108-009-Q1-K1-F7
attatgggtttcacccctttcaaatcacacactcttagctcatgtctaccgacaaactggtttcaagtgaaccactcttcaatattgccaaagcaacattcaaactctagtcttatcaacagaccgtggcaggtcttagagggcaagagcaaaaaaagaggatctttgtgtaaagtgaatggcttgccagattggccactgatggccattatagtagagcaaatggaatggcagagagatttgatcactgaaaaaacagtttcccatcttagtgatcatgcaataaaaaatgtttactcttggtacataatgttcaccgtttggcggtgcttattctttggtgccatgaaagatccatattaccactcataaacata

SEQ ID NO: 25801 - DNA, 411 bp, Glycine max
  Clone ID: LIB3108-009-Q1-K1-F8
aacttgaacaacctcatcttcaatgagttaacgttctccactcgtccctgcttctgcttgggctcattcttctccttccacagggatggcttatgttccacatggaaatgcaaattgcaactctttattccaaaaatttgcaaattcccatgtgggtatttctgctttgcccttcctgcaaccgggactaaaatcttgtacagttttcaacagaggaacactcattcccctgtgcttaaatggaaagaggagctttgctttatcagaaaagggatttaattgcaagttttcaaagagagagagattctctatccctagaagtagtagttcttctaactctagtggaagtacggatgaaacctctaaagagacaaatgtaaagacaccatttggatatacaaagaaagatgt

SEQ ID NO: 25802 - DNA, 421 bp, Glycine max
  unsure at all n locations
  Clone ID: LIB3108-009-Q1-K1-F9
gggcaagccccgagcagcaatgttcaacttgatacccgaggattgggggggccacgtcggcccatgggtcaaggagatttctcagtacttcgattgcctcaagagtctccacttccgccgtatgattgtcaaagattccgatcttcggaatctcgctcgtgaccgcggccacgtgcttcactctctcaagcttgacaagtgctccggtttcaccaccgatggtcttttccatatcggtcgcttttgcaagagtttaagagtcttgtttttggaggaaagctcaattgttgagaaggacggagaatggttacacgagcttgctttgaataatacagttcttgagactctcaatttttacttgacagatattgctgttgtgaagattcangaccttgaacttttagctaaaaattgccccaac

SEQ ID NO: 25803 - DNA, 226 bp, Glycine max
  Clone ID: LIB3108-009-Q1-K1-G10
tcatttacacgccttttccgccatttttaacacctttattataattctttttctttctttccaaatattcatcttttatctttcacatcaaacaccaacaacatttccaaataatcaaacaaccttcataatcaatacccactaatcaacccctcacccatctccatccacttattcttcttcatcatatcaaactataacttaacttctcttttcaataataaca

SEQ ID NO: 25804 - DNA, 431 bp, Glycine max
  Clone ID: LIB3108-009-Q1-K1-G11
cccagcgtccggctgatgatgatgatgtaaacaggactgtgaccaagaagctgcttgagaaactggggtgtcaagtaactgctgtttcatcaggattcgaatgtcttggtgctataagtggctctggtaactcattcaaaattattctgttggatcttcacatgcctgaaatggatggttttgaagttgcaagaaggattcggaaattccaaagccataattggcccttgatcatagcttttactgcaagtgcagaagaacacatcaaggagagatgtctacaggtgggaatgaatggattgattcgaaaacctatcctccttcgtgagatagcagatgaacttggaacagtcttgcaacgtgcaggtgaaaaattgtgacaacaattttaaatatctcaaattttttaggttcctcaaaattcattactt

SEQ ID NO: 25805 - DNA, 396 bp, Glycine max
  Clone ID: LIB3108-009-Q1-K1-G3
cccacgcgtccgattttctcgcaccaggttactcgctcagaacgtgccctggacaagcaggcccgaagatattcgctctttgttcgaaaaacatggaaaagtcctccaagtcgagctttctatgtataagaaaaacagaaaccggggtttggcctttgtcgaaatgggttccccagaagaagcacttgaagctctcaataatctcgaatcgtatgagtttgagggtcgcgtaatcaaagtcaattatgctcggccgaaaaaggagaaaacgccgccccctgtgaaaccaaaggtggtgacgtttaacttgtttgttgccaacttgtcctatgaagcgagcgccaaagatctcaaggagttttttgattctggaactggtaaagttgtgtctgctga

SEQ ID NO: 25806 - DNA, 317 bp, Glycine max
  Clone ID: LIB3108-009-Q1-K1-G4
cccacgcgtccgaaattataacaccaattttctcaactcaaaacaaaccctaaacaaacgggcaaaaaagagattcaatctaagatcaaaaaaacataaaaaaatactacaaaataaaaatgggtctgccttttaaaaacatccacctttccttcccccttcttccaaatgaattcctcttatatagcgctccaaaatttcaataatctgccctcctattaataacagggtcacgtaaaaaacctcggttatccccaccttaataacgtgaaaacacatccccctttgacaccttaggttattaccaaaaactccct

SEQ ID NO: 25807 - DNA, 157 bp, Glycine max
  Clone ID: LIB3108-009-Q1-K1-G5
cacgcgtccgcccacgcgtccgaaataaaaaaaatatttttataacttttccaaatcaaaaaaaaaacggaatattaagagaaaatataaggaaaaaaaaaaacatataaaaaaaattaaagtctccctttttatatatatcaaaaactcttaccct

SEQ ID NO: 25808 - DNA, 400 bp, Glycine max
  unsure at all n locations
  Clone ID: LIB3108-009-Q1-K1-G7
gaaaaagcaggggcaaaaaaaggaaaatatgttgtaattcacggcatacagtcagactcgatggatgcctttgaatctnattttatnccntgaattacaacatattcaaaggcctccatgcagtctaggggtgatcctgatagcttgctacccattgaagtgtgggctgaaattgcagacgctataacggatgttacgccactttttgtcattccgcatgaaaaagaaagggaaaatgtggaggaaatattttcagaagatgcctttgttgtcttcatcaccacccctggacagctggctgctcttattaatgactcagctggagtgatagctacaaatacagctgctgttcagcttgcaaatgcacgccagaaaccttgtattgcactattttgctctg

SEQ ID NO: 25809 - DNA, 399 bp, Glycine max
  Clone ID: LIB3108-009-Q1-K1-G9
cccacgcgtccgaccactcttaatttctctctgccttgctcatttacacgcctctccagcctttcactttcagctttatttgaatccctctctctcctttccaaatggccagcgttgaggttgcacatcaaacaccaacaacacttccagaaaatgaaacaaccgacgtaatcaagacccaggaaacaaccccggaaccagtaccagccactgaggctcctgcaacagaacaagcagcagctgaggttcctgctcaagaagaacaacaagcaactgaggttcctgccccagaatcaaccaccgaagcaccaaaggaagaaaccaccgaagcaccaacaacagaaacagtagaaacaacaactacagaagaagccaagccagaggagcctaaagaagttg

SEQ ID NO: 25810 - DNA, 430 bp, Glycine max
  Clone ID: LIB3108-009-Q1-K1-H1
gttccagagagtttgttaaagaactgtgaagaagagggtaactgcaaacaaagcaagcaggacaaaagacgcagtgatggagaggatgaagagggtgcttctgctgcttctggccttcactgttcttctcatgttgccagaagcttctgctacaaagtttactgttggaaacaaccagttttggaaccccaatattaactacactgagtgggctaaaggcaaacatttctaccttggtgactggctctattttgtgtacgataggaaccaagcgagcgtgttggaagtgaacaagacagattatgaaacatgtaactctgatcatccactcacaaattggactaggggagctggaagagacgtggttccattgaatgtaacaaaaacttactacattatcagtggccgagggttctgcttcagcggcatg

SEQ ID NO: 25811 - DNA, 347 bp, Glycine max
  unsure at all n locations
  Clone ID: LIB3108-009-Q1-K1-H10
cacgcatccaattactttccagtagttattaaanaattttataatattcttgatgttaccgtttacatcgccaatataaaacgtcgctgaagtatcaaaaagccttgataaagttgatggtgttgtggaccatggtgttgtttctaaaatcccatgcacagttgtaattgcttctcagactgggctgaacatttttgacaaattaactgcagatatagtgggttaggcttcagagcttatagctctgctttgcacaagaatgtgtaattaagtttttttttttcccctcttatttttctcttcaataatcctttttgcccgcctttgcctttttatccttccctttc

SEQ ID NO: 25812 - DNA, 414 bp, Glycine max
  Clone ID: LIB3108-009-Q1-K1-H11
acccacgcgtccgaccacgcgtccgaatcgctccacaaaaacgtgggagccctgaatcgtgcgtgttttgcgattctgacttgtgtttcatttttactttttgggcctttgaaagcttaaaaacctaaacgcccaagactcaaaacaaggcagaaccgctcaactgcgccgtgaaactcttcttctcattcacattcagttgcgccaaacaccatcaggctctgcaaatgccaatggtggatttggagggcacagaaggttacataccttccacagagtatgtggaagacagcaacgaaacactcattaacttgactgactcaactgagcttttgtttcttaagttgccttcttccaatgatttttttatctgacatacatgggcagaaattgtttctcactcttcataatgat

SEQ ID NO: 25813 - DNA, 368 bp, Glycine max
  Clone ID: LIB3108-009-Q1-K1-H3
gcgcagtcgagccttcagaagacgaatcgaaaatgccgtcgcacaagacattcagaatcgagaagaagttggcgaagaagatgaggcagaacaggcccattccctactggatccgcatgaggaccgataacaccatcaggtacaacgcgaagcgccgtcactggcgtcgcaccaagcttggattctgaggtgtatgctctgcctaggttcaatttatccaattaattagtgttttattttcttgaggcaaaaacaatgttttgagtttttaatattttccatttgttcgaagactatattgtgtaaggaacttattgtagttcatactcatggcgtttgtcaactccttttaaagtattttcggattc

SEQ ID NO: 25814 - DNA, 381 bp, Glycine max
  Clone ID: LIB3108-009-Q1-K1-H4
caaggaaggaaagttgactgtggagagggatgttgtgaggactaaaaccatcgattttgcgccaattttgcagttcgaacaagacccggttcagatccttgatgcactgttgccactgtatttgaacagccaggttctgagggcattgcaggagtccttggcgagtgaacttgccgcgagaatgagtgccatgagcaatgccacggataatgctattgaattgaagaagaacttgtccattgtgtacaatagggagcgccaggctaaaatcactggtgaaattctggaaattgtggctggggccaatgccttgcaatagtgcagtttgtaggtattgtttacttattataatgatgatgggtggtggttgcccatttcatt

SEQ ID NO: 25815 - DNA, 447 bp, Glycine max
  Clone ID: LIB3108-009-Q1-K1-H5
acgcgtccggtctcgtaccaacatcactccaatctttatttggcttctcaagaaaagcctcctttctgcgtaaagcagctgctactccgcctgtcaagcaaggatcatacagacctttgtggtttgcatcaaagcaaagtctttcctacttggatggcagccttccgggtgactatggatttgaccctctgggactttcggaccctgaaggaacaggagggttcattgagccgaaatggctagcatatggtgagataatcaatggtcgttatgcaatgttgcgtgcagatggtgcaatagcacctgaaattctaggcaaggctggtctgatccctcaggagacagcactcccatggttcagaaccggtgtgttcccacctgcaggaacctacaactactgggcagactcctacacactgttcgtgtttgagatggcactgatgggat

SEQ ID NO: 25816 - DNA, 391 bp, Glycine max
  Clone ID: LIB3108-009-Q1-K1-H6
aaccggtccggagacccacgctggaccgcacgcatgaaagggtacaaccttcttggcacttcgtattcattcaagcttaactgcgcggaattgtttgcttgaagaaaatccaagccgaggcacttctgtaacatttccgtaacgcttccgtgggtgatttcgcgaagattttcaactgttcttcatcattcatcgtccgttcttcattgttcttcggtcttcaaccggtaagtacccgaaatcgaacttttcaattcattctatgtacccgtggtggtccccatttgtttcgtgtacttttattctcgtttcatttactttctgtacccccttttgacgcgcttcagtcatttacttaagtcattttctcgcctaatcgaaaaataaaata

SEQ ID NO: 25817 - DNA, 344 bp, Glycine max
  unsure at all n locations
  Clone ID: LIB3108-009-Q1-K1-H7
aacaaancaaccccgccattccccacatttaaaaccacacaacanntncttctccttcttctaaccttcacccaacttctcatcttaccataaccttctactacaaaatttactcattcaaacaaccaactctanaaccccaatattaactacactcacttctctaaaatcaaacatatctaccttcnatactatctctattataattaccaaataaaccaaacaatcatcatataaattaacaaaacacattatcaaacacgtaactcttaacatccactcacaaattctactaaattaactaaaaaaaacacctgtccattcaattttacaaaaacttacta

SEQ ID NO: 25818 - DNA, 468 bp, Glycine max
  unsure at all n locations
  Clone ID: LIB3108-010-Q1-K1-A11
tttagatcatgatgcacgtctcgattgcatattcaccaattgctcaaggtgctctcactggaaagtacactcctgataaaccaccaagtgggccccgaggcagaatttatactccagaattcctaacaaggctccaacctttgctgaacaagatcagtgaaataggagagaagtatgataaaactccaacacaggtatccttgaactggctggtagcacaaggcaatgttgtcccaattccaggagccaagacagcagaacaagctgaggaattcataggtgcacttggctggagactaactgatgaagaggtagctgagctgcgtagtttggcttcagaaattaaacctgttattggttttccagttgaaaaactctagaatatagcatgcaccttctaaatcaaatgtaaangtgtactgtctctgtatattgatatagctcttggtataataattatttatttac

SEQ ID NO: 25819 - DNA, 320 bp, Glycine max
  Clone ID: LIB3108-010-Q1-K1-A12
atgagtctgctcgaaatgcgcaccgggatccactgcaagctccttactttctgaccttaaattgcgtgctataatcgagaatgcacgtcaaatatcaaaggtcatagaagagtttgggtcatttgacaagtatatttggagttttgtgaaccataagcctataattagcagattccgatatcctcgacaggttcctgtaaaaacaccaaaagctgatgttattagcaaagacctggtgagaagaggtttccgaggcgtgggccctacagtcatatactccttcatgcaggttgtggggttaacaaatgaccacctcatca

SEQ ID NO: 25820 - DNA, 385 bp, Glycine max
  Clone ID: LIB3108-010-Q1-K1-A2
attcgagctatgaagttttctgtctcacctgttgttcgtgttgctgttcaatgtaaggttgcgtcagatcttgccaagcttgttgaaggtcttaagcggttggccaagtcagatcctatggttgtttgtaccattgaggagtctggtgaacacattgttgctggtgcaggagagcttcatcttgagatctgtttgaaggacttgcaggatgatttcatgggtggagctgagatcattaaatctgaccctgttgtgtcattcagggagactgtcctggagagatcatgccgtactgtgatgagcaaattatccaacaagcacaatcgtctgtacatggaatcaagaccattggaggaaggtctttgccaggccattgactttggca

SEQ ID NO: 25821 - DNA, 469 bp, Glycine max
  Clone ID: LIB3108-010-Q1-K1-A3
gaaagaaaaaagaaaagaacaagcaaatccacaaatactaatataataaatactagaaataaaggctttctacggatacatatatcgtccaaaacaacgatttttatcagctgtagcaaagaatgaaacttcatagaagtcaaaatatgaagaaatcaatgtctagatacccccttttctatggataaaagatctaattgataaaggaagcatcgtaaggatccattaacgcggttttgaaccgatacaataaaaactgcttacttatctcatgatagaaaagtcaggaatccacttatgtaataaagtacatcccccgatattttgagcagcggtgtagtatcaaatcccaaagatagaaagtcttttctctttactttataaataagaaagaaaagactttttccaagattctatataaatggatatattataaagtttatgatatattaaattgagattggtactt

SEQ ID NO: 25822 - DNA, 424 bp, Glycine max
  Clone ID: LIB3108-010-Q1-K1-A4
agagggacattaggtgagaatgaagttctgatctgattcatagaaaagaaaaagaaagaaggtttggtaaaggagggaaaaacgacccaatatgatcccctttttaggaatttgctcaagatcaatttgtccgctttgagtttgtggattccattctgcttcacttattttattttcttttgttgaagtttcatctgttgttgttttctttacaaataaaaaactcaacataaagcacaaacaaacaatttctttcattctcgtcttccctttcttttttttccaattggtagtgctagtcaagtccatttcaccccccttcaacactaccacaacaattctgggtattatccccccacattctgcatccgtccaatctttcacagtcgcaaaattttcagtgtctccactcttcctaaaaatc

SEQ ID NO: 25823 - DNA, 437 bp, Glycine max
  Clone ID: LIB3108-010-Q1-K1-A5
aattagttcattctctttgcgcagttccctacctctcctttcaagatgcagatcttcgtcaagaccctcaccggaaagaccatcacccttgaggtggaaagctctgacaccatcgacaacgtcaaggccaagatccaggacaaggaaggaattcccccggatcagcaacgtctcatcttcgccggaaagcagctcgaggacggccgtaccctcgccgactacaacatccagaaggagtcaacccttcaccttgtccttcgtctccgtggtggcatgcagatcttcgtcaagactctcactggcaaaaccataaccctagaggtcgaaagctctgacaccattgacaacgtcaaggccaagatccaggacaaggagggaatccccccagaccagcaacgtctcatcttcgccggaaagcaacttgaggacgggcgcac

SEQ ID NO: 25824 - DNA, 423 bp, Glycine max
  Clone ID: LIB3108-010-Q1-K1-A7
attaccgggcccgacgaaaagggtgaggtgatgatattatattattatatatctgtctcaggacatgatttcaaaaacaaaattataaggaaaatgtcattgcttatgtggtatgcttatctgtatctgtttatctttttcaaccattaattaagatgaccttcggtctggtgtacacggtctacgcaactgccattgaccccaagaagggttatttgggaattattgctcccatcgccattggtttcattgtcggcgctaacattttgttgggtggggtcttcttctggagcggtcattaaccccgctgtgacatttgggcctgctgtcgtgagctggaccttgtaccaactcactggatctactgggccttgcctttcattttttgtggaatcgctttccttgtttactaggtttgttttt

SEQ ID NO: 25825 - DNA, 464 bp, Glycine max
  Clone ID: LIB3108-010-Q1-K1-A8
cccacgcgtccggcaagatatcatcacattgcaaagaaaatacacattacatgactaagtctgggttcatttgagtagtagtgatggctagcctcaaggttgcatgtgtggttgctgtgatgtgcatggttgtggtggccatgagtgctgcacccatggcacaggccgcaatcacgtgcgggcaggtcgccggcgacatgtctccgtgcttcagttatcttcgaagcggcggaaaaccgtcgcaggcctgctgcaacggagtgaagtccctcagcagcgcggcgaagaccaccgcggaccgccagggggcgtgcagttgcctgaaaaaccttgccaataatatgggacagagtttgaatgccggcaacgcagcctctctccctggcaaatgtggcgtcaacatcccttacaagatcagcaccttcaccaactgcgccaccatcaagttctgaagggcaattttt

SEQ ID NO: 25826 - DNA, 465 bp, Glycine max
  Clone ID: LIB3108-010-Q1-K1-A9
tcgaacccttttctattcttctgccccagcgccacctgctactcttgctttcgcgcccagaaagcaatggctttcttttaaggtatgtgcaactgttgctgaaactggtcagccaaaatggtgggaaaagaatgcaccaaatatgattgacattcactccacgcaagaatttctgagtgctttgagtcaagctggagatagactagttattgttgaattttatggaacttggtgtgcttcttgccgagcattattccccaagctatgcagaacagctgaagaacaccctgaaattcttttcctcaaagtaaattttgatgagaataagccaatgtgtaaaaggttgaatgttaaagtacttccttacttccacttttatcgtggggctgaggggcagcttgaatcattttcatgttcacttgccaagtttcaaaatataaaggatgccatggagatacataacac

SEQ ID NO: 25827 - DNA, 246 bp, Glycine max
  Clone ID: LIB3108-010-Q1-K1-B1
accacgcgtccgtggcttttctcttctgtgtctaaggcatgccctgacatcacttttaacaatggtgaaagctgtgacccttctgagcaccatatagggcgtcactggaactattcacttcgttcacaacgtaagtggtccaaccaccgtaactggatctcttgctggtcttaagcctggtctccatagttttcatgatcatgctcttaattaacactaccaatggttgcctctcaactggatcac

SEQ ID NO: 25828 - DNA, 464 bp, Glycine max
  Clone ID: LIB3108-010-Q1-K1-B11
gctcgtccttacattacaagacaaattcacagtctaaacaagaaattcagaaaattaagctttgggtgaatggagaacctaatttctttggtgaacaaaatccagagggcttgcaccgctttgggtgaccacggcgaagcaagtgccttacccactctctgggactctctccccgctatcgccgtcgtcggtggccagagctctggaaagtcctcagtattggaaagtattgttggcaaggatttcttacctcgtggatcagggattgttactcggcgaccccttgttttgcagcttcacaagattgacgagggtggcagagagtatgctgaatttctacatcttcccaggaaaaggttcaccgattttgctgctgtgagaaaagagattcaagatgaaaccgatagagagactggacgaacaagacagatttcaagcgttccaattcatcttagtatatattt

SEQ ID NO: 25829 - DNA, 360 bp, Glycine max
  Clone ID: LIB3108-010-Q1-K1-B12
ttgattctcttctcgcgtccgcagcagttctggtagtaataattttggtgagctgtcaaatgaaaattctgcacgtgctgaaaagacaaaatattcatttatttgtgaatgcttctttatgaccgcaagagtgctcaacttgggccttttaaaagcattttctgacttcaaacacttagttcaggatatttctcggtgtgaagatgctcttgccacacttaaagccatgcaggagcggacacccacccctcaggcagaattggatataaatcggcttgagaaagaaatggagttgtactcacaggaaaaactttgttatgaggctcagatattgagggataacactcttattcaaaatgc

SEQ ID NO: 25830 - DNA, 434 bp, Glycine max
  Clone ID: LIB3108-010-Q1-K1-B2
cccacgcgtccgaattggcaaaggaagtagaataccttcttaggaagggatggattccttgcttggaattcgagttggagcacggtttcgtgtaccgtgagcacaacaggtcaccaggatactacgatggacgctactggaccatgtggaagctgcctatgtttggttgcactgatgcttctcaggtgttgaaggagcttcaagaggctaagactgcataccccaacggcttcatccgtatcatcggattcgacaacgttcgccaagtgcagtgcatcagcttcatcgcctacaagccctcaggcttctaagtgtgaaaaatttggcaagcatttgtagcccgcaaccccactttggttgtttgaacttaaactacatttcccattggtttttgctttttgagatttcatcaatccggattttggtttctgttt

SEQ ID NO: 25831 - DNA, 363 bp, Glycine max
  Clone ID: LIB3108-010-Q1-K1-B4
ctcttctttctctctcgctctttcttcaattccaagctttattcctcatgtctttcagaggccgcagccggccgaatgcctcatcaggcatgggtgttgctgatcacagcaagaacaccttcatggaattgaagcagaagaaggttcaccgttatctgatctttaaggttgatgagaagaaaagggaagttgtggttgagaagactggtgacccggctgagagctatgaggatttcgctgcatctttgccttgaaaatgattgcagatatgcctgccttgactatgatttcgtcactttttagaactggcaaaagagccaaatcttcttcattgcatggtttggttctctcctttatatatat

SEQ ID NO: 25832 - DNA, 402 bp, Glycine max
  Clone ID: LIB3108-010-Q1-K1-B5
cccacgcgtccgctcatggttttcccacaagggttgttgcacttccaaattgctgttggtaagagaaaggcccttgcttttcctgtcttcagcagtgcttttcctggccttcaaatccttgactttgcactctttgccagcaatttctccactcctttggtgacacagaccactttccttgaccctgccatagtgaagaagcttaagggtgttcttgggggaagtggctagagtactacttatttgtgttcatggatagttttttattattttgctcaatttattattattccttgtgtttgtttcaattcgttagacttgtgcaggtctcatggtcattgaattattatgctcgtgtcaatgtagagcaattaataaatttgcatgctttatttgtcttcc

SEQ ID NO: 25833 - DNA, 418 bp, Glycine max
  Clone ID: LIB3108-010-Q1-K1-B8
gcagcagagagtgcggtaggctcatccgagtttcggaagcagcaatggggatcgatctcaagggcggaggtaaaagcaaaaaaaccaaaagaacagcacccaagtccaatgatatctatcttaagctcttggtcaagctttatcgcttccttgttcggagaactggcagcaaattcaatgccgttatactcaagagattgttcatgagcaaggttaacaagcccccattgtctttgtcaaggttgattaagtataccaaggggaaggaagataagattgctgtggtggtgggcaatataaccgatgatattcgtgtttatgaagttccagccttaaaggtcacagcactcatgtttacagatactgctcgggcaagaattgataatgcatgtggtgaatgcttgacgtttgatcagtt

SEQ ID NO: 25834 - DNA, 385 bp, Glycine max
  unsure at all n locations
  Clone ID: LIB3108-010-Q1-K1-B9
aaggggagcncngangccaaagagagccagagnagngacgngaaggacgaggnangaggagnnaagnganacacccccacnaatagaaacgagganncagacagangangacanagngaccgaggnaaaaaanaccaagnnaccccncaccccnggncaanaaaaaacaaacggggagnggggggagagagacaaangcgaggcacacangnannacnannaacnncaacnngnacaacagngggnaannaagaannnngaccnngggnngagaccccaanaaanncccccnnaaannccaaaaaaaaaaaaaaaaaagaaaaaaaaaaaaaaaaaaaaaaaaaaaaaaaaaaaaaaaaaaaaaaaaaaaaaaaaaggggcggcc

SEQ ID NO: 25835 - DNA, 364 bp, Glycine max
  unsure at all n locations
  Clone ID: LIB3108-010-Q1-K1-C11
gcagatgttgagtnccgnngcgtcggcggngggcttgcttgggtcaccggggacgatgccctcgagaaagccttttcaatctacggcgacgtcgttgaatcgaaggttatcaacgaccgtgagactggaaggtccagaggattcggatttgtgaccttcgcctcagagcagtcaatgaaagatgcgatcgcaggaatgaacggccaggaccttgacggccgtaacatcactgtcaacgaagctcagacccgcgccagccgtggtggtggtggaggcggtggtttcggaagtggtggtggatacaaccgcggtagcggtggatatggtggtggtggtggcggcggcggatacggtggtcgtcgtg

SEQ ID NO: 25836 - DNA, 315 bp, Glycine max
  Clone ID: LIB3108-010-Q1-K1-C2
gatttttatatttcttgtacttaaatttgaaatttatgccgtgtgatgtttattgcctttggaattgaagctgtcacggttgcaattgacaatcgcatttttttcctttctctttacaattgtagatggtgctcttgctctaaaaaaaaaaaaaaaaaaaaaaaaaaaaaaaaaaaaaaaaaaaaaaaaaataaaataaaaaaaaaatatataataattttaaaaatataaaaaaatttgtttatttttatatattattaaaattttttatattttattattttaatattaaaataataaggggtggccctttta

SEQ ID NO: 25837 - DNA, 312 bp, Glycine max
  Clone ID: LIB3108-010-Q1-K1-C3
gaaggagaaataacaatttcttgcttctcacaagatagtacatcagaacacgtgccaacggattgaaatgctaaaacaagcgcaccctttcaatctcaaacaagtatgagtagtatcatatcatacccaaaaagcaacattcctttcaacagtaataatttacaatatattagccaaagatagaagcacgttcagctccacaagcaataactggtagttgaaagtcatttctttatttgttagttgaagattcagtttggggccaaaccgctgaactttttctttttatacttaacaaagaccggttcaacc

SEQ ID NO: 25838 - DNA, 458 bp, Glycine max
  Clone ID: LIB3108-010-Q1-K1-C4
tcgggcatttattaaattttcgtttttattgtaaatgtatctataatttgttgatgcaagtttaaagtatttaatgaggtgacaaaaaaaaaaaaaaataaaaaaaaaaaaaaaattaaaaaaaaaaaaaaataattttttaatatatattatatttttataatttatataatatattatttatattttttttttttttatatttattttataattataatttatttttatattaattttttattttatattttttatttttatttattttattttttttatttttttatttatatttttttttttatttttatatattatattttttttatttttatttttatatattatataattttatattttttttatttttttttatattttatttttttattttttttttatttttttttttttttattttattttatttttttattttattatattttttt

SEQ ID NO: 25839 - DNA, 472 bp, Glycine max
  Clone ID: LIB3108-010-Q1-K1-C5
cccacgcgtccggggaaatatcttacaaataccacattcaattgaacaagttttcattgcacggaaaatggagaacacaaggccaaatagaagtgacatccacctctcagcagaggaagaagccaccatagaggcaaagaccagagactactttgatggggttgcaccacaacgccacacaaagcctcaacgaagtgagtattcagctcaatatgtggatgctttctccaatgcccatcactcttcttcttcttcttctataccagaattcatgcaattccaacgcctcgagaatgatccccaagagaagaaattggagtacaatggaagtcaagtaccggaagaatttgtggaaacagagtattaccaagatctcaacagcgtggacaaacaccaccatacgacgggaacaggatttatcaaagtagagaaaaatggaaatgactttcacatagaaccagataatgacact

SEQ ID NO: 25840 - DNA, 466 bp, Glycine max
  unsure at all n locations
  Clone ID: LIB3108-010-Q1-K1-C7
gcaggtttggctttataacatcggattaggtagtcttgtgtacaacgttgagaagatttgtgatgaatctggtgaggatccggattgcagcaggtcggtgactgggaatagcattgctgatcacttagtctattatggcgtagacatgggatcagatgagcctagttcatgcagaattgttatggattctcatgttcagaatactagcatcagagattcaagaggaaacttaatcttgtccagagatcctgcaacccccctcatcaaattgggtggagagggtgacaatcaggaaaatcccattaatgttgattgaattggcattagatatctcttgcatgatatgttccagaggtttgctgtggggcattatacttcagatttattttttcttcacggtccatacagctgaacaattttattgaattggctagggctggaaggagtttgtatagtncttgactcg

SEQ ID NO: 25841 - DNA, 458 bp, Glycine max
  Clone ID: LIB3108-010-Q1-K1-C8
ctttgttgcaatatcacaaacacctcgtccgtcacaatgcagctagctgtggcggccaacgctgtcgtttcaccgtcgccgttccgacctcatccccttctccggtcatccttctccggcgtctccgttaagctcactccccaatccataacgttttcacgcttgaagcccctcaccgtcttcgccgccaccaagaaggccgtcgctgtcctcaaggggacctccgtcgtcgaaggcgtcgccactctcatccaagaagacgatggcccgacgacagtttctgttagcatcactggccttactccggggcttcatggctttcacctacatgagtatggtgataccacaaatgggtgtatatcaacaggagcacattttaatcctaataacttgacacatggtgctcctgaggatgaaggtcgtcatgcgggcgacctgtgaaacatagttgctaatgc

SEQ ID NO: 25842 - DNA, 316 bp, Glycine max
  unsure at all n locations
  Clone ID: LIB3108-010-Q1-K1-C9
ggaggnggcacngnggcagaaggcnnaggagngnaaaacagagacgcggaaggaagacgangcnagcggccgagaccangaanangggcgacggcgagagcancaagggncacgccaaggnaancgaggangagggcccncgnggaaaacacgcgcgagacgaccaccancngaacagggacngccaacagagnaccgacgacggcggcaaaaggaagcacaagacagaagacaggaacggcacacgcaaaaccgccgccgccaaccgcaccgcccacagccacgaagagaacnagaacaccggcgncaccaaggg

SEQ ID NO: 25843 - DNA, 402 bp, Glycine max
  unsure at all n locations
  Clone ID: LIB3108-010-Q1-K1-D10
tctcacatcancatggccttcccaacactaataacccccaaatcagcgaggtcactcacacccatcaagcccaaacccaccaccaccatggccgccactctcacaccacccacaacaacctccaccgccgccgccacccaccctcgccgccgcgaattcttgtccatcatcaccgccaccacatggctggtccctctgagcccggcactggcttcctcggacgaggaatacatgaaggagaccgaggaagtgatcaacaaagtgaggacaacaatcgtgatggacaagaatgaccccaacgtggcaaccgcggtggcagagttgagagaaacctcgaactcgtgggtggcaaagtacaggaaggaaaaagcgcttctgggacgcgtttactttaaggacatg

SEQ ID NO: 25844 - DNA, 479 bp, Glycine max
  unsure at all n locations
  Clone ID: LIB3108-010-Q1-K1-D2
cccacgcgtccgagaatatataaaacaacaacaaaactcatccatttttttccctctctaaaaaaactaagcgcgactaatctcacgcgccgacgatgggttttcccgtagggtacccggagctcctggttccgaaaatgttcctccacgcgctttccttcctcgcgtggctccgctccctcgttttcgccctcttccgcctcctccgcatctccgacctcctcgacactgaaccttccccctccgacctccctccgccggctccgccgcgcgagccgacgctatccgcacttctcatccgagaggttctccccgtggccgncttccgcgacctcgccagcgccttcggagtagatcctcctccgtcgggatgcgccgtgtgcctgagcgagttttccgaagaagaggaaatccggtgcatggcgaactgcaagcacatttttcactgcgcgtgcgtggacctgtggatcgatcacgat

SEQ ID NO: 25845 - DNA, 486 bp, Glycine max
  Clone ID: LIB3108-010-Q1-K1-D3
cccacgcgtccgctgaaattaaaagataagactaaaatcataaatttttaaaaaagtaaaaaacaaaatatctgaattaaaaaaattagaaaactaaaattataaattttcaaaatttagaaacaaaaacatgttggtgaaggtgtacggtccaacctatggagcccccaagagggtgctggtgtgtctgattgagaaggaaattgagtttgaaacagtacatattgatctcttcaagggagagaataaggaacctgagttcctaaagctgcagccattttgatcacttcctggtattcaagatggtgattatactctctatgaatcttgtgcaataatcagatactttgcagagaagtataaagaccaaaggacagacttgttgggaaagacaatagaagaaaaaggtctagtggaacaatggcttgaagtagaagctcataactttcacccaccactctacaatttggttattaatggtctggt

SEQ ID NO: 25846 - DNA, 360 bp, Glycine max
  unsure at all n locations
  Clone ID: LIB3108-010-Q1-K1-D4
ggttgcttggcggggataagattaaagattcaacaatggcctctgcttctgctactcttctcaagtcatctcctgttcttgacaagtgcgagtgggtcaaaggccagacccttcgccaacctctcgtgagatgtaacccttcctcagcatcagctctcaccatcaaagctgcttcctatgctgacgagctcgtcaaaaccgccaaaacagtggcctcaccggggcgtggtattttggcgatggatgagtcaaatgcaacctgcgggaagcgtttggcatctattgggttagagaacacagaagctaatcggcaggcataccgtacnctacttgtgacagtaccttgtcttggtgaataca

SEQ ID NO: 25847 - DNA, 436 bp, Glycine max
  Clone ID: LIB3108-010-Q1-K1-D5
gattaggtgagtcatcactccgattctcttcacacctaagatccattctttcttaattctcagctccctcactcgttcattcgaacaaaaccctttttagtttttttcctcctctgtttctctctctgctctgcattttggtggcatcatcagagatagagacttgagtgtgagagccacaacttctccaattcttcaaaagggtgaaactttgaaggaaaagaaatggttggtgctataaaagcagcgattggagacgcggtgttgactttcatgtgggtgttctgttcctctgtgttgggaattgcttcagggtacataaccaatgcacttaaccttcaacacataacctacaacgggttcccttacccttcttttcttgtcaccaccaccctcgtttttgttctcgtttttcttttcaccatcattggcaatg

SEQ ID NO: 25848 - DNA, 70 bp, Glycine max
  Clone ID: LIB3108-010-Q1-K1-D6
aaaaaaaaaaaaaaaaattttaaaaaaaaatataaaaaaacaaaaaaaaaaagggaaaaaaaaagaaaaa

SEQ ID NO: 25849 - DNA, 413 bp, Glycine max
  unsure at all n locations
  Clone ID: LIB3108-010-Q1-K1-D7
aaggatcccaataggcctagtacatcgtcatttgctggtggttctgaaggtgttggtcttttgaagtggctaatgcagagcactgatgagtcaatggtgcctctgacaatcaactgctggccctcttcttctggaaatgaaacttatgtcagcattgagtatgaggcttcatcattgtttgatttgcggaatgttgtgatctcagtacctcttccagctcttcgagatgcaccatctgttagacagattgatggggaatggaggtatgactcaaggaattcctttttggagtggtctgtccttctgattgataattcaaaccgcagtgggtcaatggaatntgttgttccacaagccgaatcatcagcattcttccccatttcagttcgttttatagcaactgaaacatttag

SEQ ID NO: 25850 - DNA, 455 bp, Glycine max
  Clone ID: LIB3108-010-Q1-K1-D8
aaccccctctgcctcctctttctaaaacagctccatctagccctattgctgggactggacagggagcacaaccaccgcaaaatgcgcaatctaaggtcactgtttgcgtatttttgtccactctgattgtgcttgtagcttctcttctactttgactggtgaaggcttccacttcccactaaatagaaaaaaaaattacaaaaaattgaaggaaagtgttggttatgctggctttagccctctaattccccatttctttctgggttaagtagaatgaagcttttggcttcagactgcttgaataatcctgatcttttacttgcaccagtaaatcatttctattaactgttgtagctagctagttatactttcccttctccgatctttctgttgtagcaataactattacgtttacgggtgcatatctcatctgaaaactttagtagatgtgaatt

SEQ ID NO: 25851 - DNA, 435 bp, Glycine max
  unsure at all n locations
  Clone ID: LIB3108-010-Q1-K1-D9
gactgatatcttcatacgtncgcgtaattgcagggtgttgttcccttcatccgtgaaaaaaaaaacaacaaagtcgccacaccactgccggcaactttgtcaatggcctatggtggtgccctatttgctgatgcttgccttaagggcctcaatggagtcccagatgttgtggagtgctcattcgtgcaatccactgttactgaacttccctactttgcttccaaggtgaggcttgggaagaatggagtggaggaagttctgggcttaggacctctctcagattttgagcaacaaggcctcgaaagccttaagcctgaactcaaatcatcaattgagaaaggaatcaaatttgccaaccagtaattgaacatgttatcacatacgtgtcttgtaagctaatgttaatgttattccttcaagaaccaaatcaaattt

SEQ ID NO: 25852 - DNA, 257 bp, Glycine max
  unsure at all n locations
  Clone ID: LIB3108-010-Q1-K1-E11
gcggcggcgaacgnggnagcggagcnagcagcggcacaggcggcggacgccggcgaggacaaccgaacaancgcgccgagcacggacacgcgagagcagagaaccgacggangcacgnncggaaacgcgnncgcnccgaaggacaagaacnacaacaacaacaacaacagcgnncaagcgacgccgngcgacacgaggcncacgcacaccagggcgaacncacacaacaccgagnncagacccaaggacgacgagaa

SEQ ID NO: 25853 - DNA, 439 bp, Glycine max
  Clone ID: LIB3108-010-Q1-K1-E2
aaagatatcagcaggtattttcaaggacctatatctgagggatgtgaacatagtttcttgtcggaaactttaggaagcaacaaggttcttcacatggagtcacagatggataacactttgatgccaaccagtggagttgcctcattctctacattgagatcaaataataattccatgttgcatggtgattatctgcagccttctttcttatctagtgagtatgcctcagcagaaactgtgaagcaagagggtcagttccttcgacctttctttgatgaatggcctaaaatgagggactcatggtctggtctggaagatgagggatccaaccacactcaactctcaatatccattcctatgtcagcatcaaatttctctacaactagctctcattccccacatggtgagatttaaattaagccatgttgaatgaaaccac

SEQ ID NO: 25854 - DNA, 456 bp, Glycine max
  Clone ID: LIB3108-010-Q1-K1-E3
cccacgcgtccggtctcaagcaaccatggcaatggcaacccaagcctctctcttaaccccaccgcctctccggggtcaaagccagcgaccgcgcctccgtgccatggaagcaaaactccagcctctccttctccagcccgaagcccctcaagttctccagaacaatcagagcagcagccgccgacgagaccacagaggcaccagcaaaagtagaggctgcaccggtcgggttcaccccaccagaacttgacccaaacaccccttccccgatcttcgggggcagcaccggcgggctcctgcgcaaggcacaggtggaggagttttatgtcattacgtgggactcacccaaagaacagatctttgaaatgcccactggcggcgccgctatcatgagggagggtcctaaccttctcaagttggccaggaaggagcagtgcttggctctggggactaggc

SEQ ID NO: 25855 - DNA, 462 bp, Glycine max
  unsure at all n locations
  Clone ID: LIB3108-010-Q1-K1-E4
cccacgcgtccggatcctcatcatgggaaccatttttcctcctcactctctctctccactccgcaacatcaaggcttcaccctcaagaattctcttggctccctctccccaacccaagtcaaattctctcttttgctccaaacccattgtttcaagtctcagaaagaaccaaacttcatctcccaaaccttcatcgggcacaagctggttggctcatgctcaacagggcctagcagctttggctatctccttggcactcaactttagcccagttttgtttaatggcaatgcattggcatctgaagttgatgtgcttaatgagggtccacccaaagattcttatgtggttgatgattcatgagtgcttagtaaggtgaccaggtcttgattaaagccagttgttgctgatttggaaatcaaggaagaacttncgcaataattttataactgttagaaaactca

SEQ ID NO: 25856 - DNA, 470 bp, Glycine max
  Clone ID: LIB3108-010-Q1-K1-E5
attttatactatacccacattttgataattatttttctagttgataagccatggctactcgaggaaagcttgaggttgacgttgatctcaagtctaacgcagacaagtactggcaaacccttaggaactccactgaaatattccccaaggccttccccaatgattacaaaagcattgaggttcttgagggtgatggcaaatcacctggttctatccgccacataagttatggtgaaggttcaccacttgtgaagtcatcctttgagaagattgaggctgttgatgaagaaaagaaggtagtgtcgtacactatcattgatggagaactcctccagcactacaaaacattcaagggagacatttctgtgactccagttggcgatggatgcgaggtgaagtggagtgctgtgtacgaaaaggttagccatgatgtttctgatccaaccctcgtcaaagattttgcagtcaaa

SEQ ID NO: 25857 - DNA, 469 bp, Glycine max
  Clone ID: LIB3108-010-Q1-K1-E6
tcccaaggtagaagtccttgagaagaatagaatggtgtattgaagagaaactgtggagatctgaggaaaagggaaatggagttggggaattggaatctgtttcggatagtagctcaccttcaaggtatgagaatggtccattagagaataggtatagaggtatatatgacagtgaacattgggtgaaattgagaaatggagtgcgcaggctgtgcagacaccctgtatttcaattgagcaagcccactaagaagcgtgcaagtcttggtattgtaaatactagggaaggaggtggagaggcttgggcctaaaacaactactgcatgcatgaatgcatgctttggttttatatatggcttgtatgattgagatgtatagatgttttgttgagattgtatgaagctagctttagttgtaattgatgcttggtctcttggtagaatccaagttctgagatgtttcaaggagt

SEQ ID NO: 25858 - DNA, 92 bp, Glycine max
  unsure at all n locations
  Clone ID: LIB3108-010-Q1-K1-E9
ccaagagagcaaacgcanannancccggagncnngacgnngacacagggaaccacagccnngacccnncancagggangccccacacgaccc

SEQ ID NO: 25859 - DNA, 256 bp, Glycine max
  unsure at all n locations
  Clone ID: LIB3108-010-Q1-K1-F10
caagcgcaggcaaagagagngccgcagnnaaaggcacagcaccccaagccacaaggnngggcancaaggcnncgcngaaagacgnnggagacgcacgcgnggccacngccgcgagagcagngcaggcaagcaacgccanggccagngaagngnngcagcgnggagaagacgggncaaaggccnacgcacccaacaacgncnccgaggccgcaggggagaagaccgngcncaagaacaacgcagggngcccccacaa

SEQ ID NO: 25860 - DNA, 106 bp, Glycine max
  unsure at all n locations
  Clone ID: LIB3108-010-Q1-K1-F11
gggagccggnggncgcacaggacaaanacgggacaaaaaannaaaagagaggccaaaccaanacgnggggagaggncnggnaagaacagaagaaagcaaacagaac

SEQ ID NO: 25861 - DNA, 424 bp, Glycine max
  unsure at all n locations
  Clone ID: LIB3108-010-Q1-K1-F12
ttgacctttagttctcatgtatcagctcaggagtgtataatctgagcgatgtcagatcttgaggctcccttgcgccctaagaggaagaaggtttgggtggactatttcgttcagtttcgatggatccttgttatttttgtggtccttcccatctccttcaccatttatttccttacataccttggggatgtaagatctgagtggaagtcctataagacgcgtcagaaggaacatgatgagaatgtgaagaaggttatcaaacgtctcaaacagaggaatccatcaaaagatggtcttgtctgtaccgctcgtaagccctggattgctgttgggatgcggaacgttgactataagagagcccgtcattttgaagttgatttgtctgctttccggaatgtacttgagatcgacanagaacggatga

SEQ ID NO: 25862 - DNA, 475 bp, Glycine max
  Clone ID: LIB3108-010-Q1-K1-F2
gtccggtgcattattcaatggccaccacagcagctctatccggaaccatggtgagcacctccttcatgaggaagcagcctatgacgaccaagagcctaaagacattccccaacgctctttttggtctgaaaggtggacgaggtggtcgtgtaacttgcatggcctcgtacaaggtgaagctcataaccccagaaggagaagtggagtttgaatgcccagatgatgttttcattgttgacaaggctgaggaagaaggcattgaacttccctactcgtgcagggctggttcttgcgtttcatgtgttgggaaattgtgaaaagtgacgtggaccagtcagatggtaacttccttgatgatgaacaaatagaaagtggatgggttctcacctgtgttgctctactaagtcagacgtttgcattgagacccacattgatggagagatcgaatgatcgatttatatcataatgtaatctt

SEQ ID NO: 25863 - DNA, 88 bp, Glycine max
  Clone ID: LIB3108-010-Q1-K1-F3
tttctttgcttacttaccctatctatgtatcatacacctaatgatgctttcatttattattaatgacgatatggatttttatcttctc

SEQ ID NO: 25864 - DNA, 465 bp, Glycine max
  Clone ID: LIB3108-010-Q1-K1-F4
cccacgcgtccgggccttccatggcttccgcttgtgcttcctctgcaattacagctgttgccgtctctacgccgagttccgggcagaagaatggatcaggaggttgttttcttagtggaaggaaattgagggtgaaaaaggagagagcagcaattggaggacgatcgatgggcactacagtgtgcgcagttgctgagcctgacagacctctatggttcccaggcagcacccctcctccatggcttgatggcactctacctggagacttcggctttgaccctcttggtcttggatctgacccggagagtctgagatggaatgttcaggcagagctagtgcactgcagatgggcaatgttgggtgctgctggcattttcattccagaattcctaacaaagattggtgtcttgaacacttcttcatggtactcagctggagagctggaatacttcacggacactacta

SEQ ID NO: 25865 - DNA, 471 bp, Glycine max
  Clone ID: LIB3108-010-Q1-K1-F5
acaaaatacaactttgtggagcactccttatttaatattgctatatcataaaccatgaatagagccttttgtttctcttattggaaattgattaaggaaaatgctagagctcataaatagatttagcatacttgcttccagactgagctggcttgccagcttgctattgagcacctcaccccctcctaaatgtatgcattttgttttgggctgagtaaatggtatgtgttttggtaaacctttttgttgaatagcatgggtctgattagcatatgtacaggttgagatttcttctctccgttttgtcatttgtgaactattgagaatttgtttactgaacccaagaatctgggttgagctgaataattgtgtaatattagccggagcttgtttttgtgaatatttagtttctgcttttgtttgcttgggagggcataggtgcggacattatctgatttgcatttattactt

SEQ ID NO: 25866 - DNA, 471 bp, Glycine max
  Clone ID: LIB3108-010-Q1-K1-F7
cccacgcgtccgcccacgcgtccgcggaaagggcaagtccacgctgttgaagcttcttgcttggaggaagataccggtacctaagaatattgatgtccttctggttgaacaggaggtagttggtgatgataaaacagctcttgaagctgttgtttctgctaatgacgaacttgttaaaattcgacaagaagttgcctctctgcagaatgcagcttctgttgaagacaaagataatgatgaggaagacgatacaggagagaagctagcagagctatatgaaaaactacagctgatgggatctgatgctgctgaagctcaagcatcaaagatattagctggtttaggttttacaaaggatatgcaagcccgtcctacaaaatcctttagtggtggctggaggatgagaatttctttagctcgagcactttttgtgcaaccaactctattattgcttgatgaacccacaaatca

SEQ ID NO: 25867 - DNA, 387 bp, Glycine max
  Clone ID: LIB3108-010-Q1-K1-F8
tctgaattaccggtcggcgacgcgtccgtccaatcgttattcctattacattgagttttttcccggagcaaatgcatccggatgtagaaggacttctttcaccaccacataggaaagaagcagggaaatctcatctggattctgatgaagtgatactgagtgagttggaagatgagaagcctaaggaagttgacatgctccctgcatcagagaggcataaacgtatcgcgcacttgcaacaaagactgctccaagcagctgcagaaggagcagcgagggttaagatgagaagaggaccacacagatggtaagatttcaccttgacacaagcattgatcaaagcagactattggcttcttttcatttccatgatcatgggttctggat

SEQ ID NO: 25868 - DNA, 398 bp, Glycine max
  Clone ID: LIB3108-010-Q1-K1-F9
aactagatcatctcacgtccgatttaaaacaaaaaaggaaattgggctacctatatgggaatattaagatcggtattaattgtattatataatgattttaaacatataaatgaaactatatttaaaattttataataaatatgtttaaatatataaactaaatatattttaaacttatatgaaataatttatatacaattaatacaaggttattactatttattatatttgttttacaaaatctacttgttgggatgttggttacaatagagatggcactaggttgggaagaagaaaattcgtacttacaatcggttcattaactattaactattgggtatataccagcagatttattttttaaacttatgggtattcatgcatatctgcgatacttc

SEQ ID NO: 25869 - DNA, 427 bp, Glycine max
  unsure at all n locations
  Clone ID: LIB3108-010-Q1-K1-G11
ttgcctcctgttctctttccagaacagcagtctcggatgcacgacaacatggtaaaaaacgtgtccctcattcaggaactcaacggcaacatctccaaggttgtctctctctactgtgatctcaacaccaatttctccaacgtttgccaacaacgctccaaaaactcctccaaataagtcaattcaaaaggttcttcctaagtaatgtttcgtgtctgtgtcctctgtctatgtctattgcgtatgtgtctgttgttgaagttgaagaatttgtgatggtaattttgggctttgttttgtcatcaattgtcgataaggacggtgaaaaggcgaagcattgtatcgtcctctttacttctttttcttttcttttctttttatataaaaaaaaaagtttaggtgagtcgagttcgaagctcacanaana

SEQ ID NO: 25870 - DNA, 354 bp, Glycine max
  unsure at all n locations
  Clone ID: LIB3108-010-Q1-K1-G12
gatcacacaggccccaagcagagcatgaggcagagcagaaccctggcagggagagagctaagatcaacgcaancatacaagaggtgagtgcacgggcaattgacacatcacctgccgcagccgaaaggactaagtcggaaccctaccggaacccaagagaaacgaagaaactagacgatgagacacataatgaaggagacaggaaaatgaacgagaggaagagactgactcgtcaaagacgcctgatttgaacatgagatggaaggagacctcacggtcatatgcggctgagacccttgctagatgcctaacgagtcactagaagatagcacgactaatggaaatcacatagag

SEQ ID NO: 25871 - DNA, 418 bp, Glycine max
  Clone ID: LIB3108-010-Q1-K1-G3
gaagagggaggaaggggacgatttaaatcacattccaatgctcctgccaggatatctgacagagagaagaaggcgccactgaagacataattatatgacacagcctgtgatttcatcattgatttttgcctagtggatgggaaaaatgactataggtgatgatacatccaaaggcaaaggttcttatcttgattgctcatgcaacataggattgaaaattcctcctgagcactaagtggggcacctatatttttttgtcacccaagtgttgtaacatcccctccccctcttttgaataatagtttttatcaattatgaagtgtgcatctatgatttgaaggagagcagaaaggtaaggaaacgggtactgcatcttggaaattgtgtggattttgaccaattcagggtgaaaaatgga

SEQ ID NO: 25872 - DNA, 343 bp, Glycine max
  Clone ID: LIB3108-010-Q1-K1-G4
ataaaagaaaaaagtgtaaatcaaatagaaatttataaaatctatgatcctagagtagttcgctagacaaaggagaagtaagttcacaaacaagattcaagaataagattctctgatgaaaggagagaaatatgtctgaggatccgctgggtataaggagtgaaagaggggatcatttgtttcttgaacagttcttttaaaaaaattttctatcggatttttgagtcataggagattttatgatttatgacttggaggatttttaagaatagaaaggaataactacattgagttcatcgatttgccctagatatcaatagactcataacatactttttattcg

SEQ ID NO: 25873 - DNA, 466 bp, Glycine max
  Clone ID: LIB3108-010-Q1-K1-G5
gaaaaaggagcatgttgattatatagaaagtaaagggcaacaatcatttttgtttaccatgggtaaggacaccatcgctgacataataacctatataagaaatgctgacatgaataaaaaaggaatggttcaaataccatttactaacataacagaaaacattgtaaaaatacttttacgcgagggttttgttgaaaacgtcagaaaacatagagaaaacgacaaatattttttagttttaactctacggtatagaagaaatagaaaaggatcatataaaagttttttaaatttaaaacggatcagtacacccggtctacgaatatattctaattatcaacgaatccctcgaattttagggggcatggggattgtaattctttcaacttctagaggtataatgacagatcgagaggctcgattagaaagaattggcggagaagttttatgttatatatggtaatct

SEQ ID NO: 25874 - DNA, 393 bp, Glycine max
  Clone ID: LIB3108-010-Q1-K1-G6
gcttgggagaccctgttgcgaaccagtgctgccccgtgcttcaaggcctggttgagcttgaggctgcggtgtgtctttgcaccactcttaagctgaagcttctcaacctcaacatttatgtcccacttgcccttcagcttcttgtggcttgtggcaagtctcctcctcctggttacacctgctccctctaaaccagtgaaaggattgaggaaaatatggtcaaaatcgacatgagaggatgtcgagccacactatctctcttctgtcctgattggaactgctgttgtttgttttgctattatttgaaaaaccatttgcttttaattgagattgttgcatgtatgttttaatcctaggcacggtacaacataaatgcttctctgtgacatgttc

SEQ ID NO: 25875 - DNA, 134 bp, Glycine max
  Clone ID: LIB3108-010-Q1-K1-G7
cccactcttacacccactcttcctatcatcatttacattcattatcatctatatacatatcaagtttatcttactgaaaaattttaaaataaaacaaaaccacaacactaaaattataaaattaaatatatatc

SEQ ID NO: 25876 - DNA, 94 bp, Glycine max
  Clone ID: LIB3108-010-Q1-K1-G8
acccaaaaaattgttgggtatacctaagagtctttctctaattttcatggtgcatcaacaaaatcattatacaacacttgctatattacacaat

SEQ ID NO: 25877 - DNA, 368 bp, Glycine max
  unsure at all n locations
  Clone ID: LIB3108-010-Q1-K1-H11
taggtcantccacgtccgaagtatgcactttctgtctctgctgactgtaaagtctaatggaatattgagtaagatatacaggttgagagcagaacaagcaagatgttgtaaacgagctaaaaaaaaaaaaaaaaaaaaaaaaaaaaaaaaaaaaaaaaaaaaaaaaaaaaaaaaaaaaaaaaaaaaaaaaaaaaaaaaaaaaaaaaaaaaaaaaaaaaaaaaaaaaaaaaaaaaaaaaaaaaaaaggggggaccgttttaaaggatcaaagttaacctacgctgttatgcaaagttttaactttttatttgggtcccaaaaattaaattaaaaggctgatgattaaaaatgaggtaattggaaaaacc

SEQ ID NO: 25878 - DNA, 331 bp, Glycine max
  unsure at all n locations
  Clone ID: LIB3108-010-Q1-K1-H12
cacaaggccaaacaggagngacanccaccncncggcagaggaagaagccaccanagaggcaaagaccagagagggccnnganggggncgcaccacaacgccacacaaagccncaacgaagggacnanncagcncaacacggcgangccnncnccaaggcccaacacncnncnnnaacnanaccagaannaacacaannccaacnccnccagaacgaaccccaagagaagaaannggcgnacaanggaagncaagnaccggaagaacncgnggaaacagagnannaccaagaacncaacagcgnggacaaacaccaccanacgacgggaaca

SEQ ID NO: 25879 - DNA, 395 bp, Glycine max
  Clone ID: LIB3108-010-Q1-K1-H2
cccacgcgtccgcaagtagttgagaactaataaggagaagcatttggcttcctcaatgatctggtacccagcggggacttctgtcaaccgtgccggtgccggcatggttgctccattcactggcctcaagtccatggctggcttccccaccaggaagaccaacaatgacattacctccattgctagcaacggtggaagagtgcaatgcatgcatgtgtggccaccagttggcaagaagaagtttgagactctttcctacctgccagaccttgatgatgcacaattggcaaaggaagtagaataccttcttaggaagggatggatttcctgctaggaattcgagttgaagcacggtttcttgtaccgtgagccacatccagtcaccaggattctac

SEQ ID NO: 25880 - DNA, 449 bp, Glycine max
  Clone ID: LIB3108-010-Q1-K1-H3
cccacgcgtccgcagaaaaacaagtagttgagaactaagaagaaggaaatggcttcctcaatgatctcctcccgagctgttaccaccgtcaaccgtgccggtgccggcatggttgctccattcaccggcctcaaatccatggctggcttccccacgaggaagaccaacaatgacattacctccattgctagcaacggtggaagagtacaatgcatgcaggtgtggccaccaattggcaagaagaagttcgagactctttcctacttgccagacctcgatgatgcccaattggcaaaggaagtcgaataccttctaagggaaggatggattccttgcttggaattcgagttggagcaccggttcgtgtaccgtgagcacaacaggtcacctggatactatgatggacgctactggaccatgtggaagctgcctatggttggctgcactga

SEQ ID NO: 25881 - DNA, 290 bp, Glycine max
  Clone ID: LIB3108-010-Q1-K1-H4
gagattggccatgttctctatgtttgggttctttgttcaggccattgtcaccggtaagggtggattggagaagctttctgatcaccttgcggacccagtcaacaacaatgcctgggcctacgccaccaacttcgtccccggcaagtgagcatgaaagaaaaggatgacttgtggacttttgagagtttttagatttgtgtttggtgaagtatatgttattgcaatgtacttcagataatgtgaattatcttgcgtatccgaatccaacttaatgttacttgctttttacg

SEQ ID NO: 25882 - DNA, 391 bp, Glycine max
  Clone ID: LIB3108-010-Q1-K1-H5
ctcctgcggcgtgttcaacaatcggcggcgaaaatgccttcccacaagacgttcagaatcaagaagaagctcgcgaagaagatgaggcagaacagacccatcccttattggatccgcatgagaaccgacaacactatcaggtacaatgctaagcgcaggcactggcgccgcaccaagctcggattttaaggtccatgtcaacctccgactcgagatttttatattgtttttgttattctagaatgttactagcaatgtgtaaactggaaaggttttagcttttggtcatgtggtcacacagagggatcattgttgagcgtttccatatctctattttgtttttgtactttttttggatattaatctgagactgagatggtagtttttattt

SEQ ID NO: 25883 - DNA, 361 bp, Glycine max
  unsure at all n locations
  Clone ID: LIB3108-011-Q1-K1-A1
gtttgcttcaatggaagtgatttccgcttttagcttgaattccaacgctccgatgttcgtgcctctcgcctatcggacggtggaggatttctccgaccaatggtgggacctcgtccactcctccccctggttccgcgactactggctccgcgagtgcttccaagatccccagtaccaatacgacgacgttttcgacttcgactttgacctagatctccaagataaagatgaaaatgaatggaaggaagggaaagaggtggtgtcgttgggggtgctcaaatggcgaanctgtggaagaggatgggccgaagcgccgaggtatgtggataaggcccctaagtttgtgaagcccaaggtgagc

SEQ ID NO: 25884 - DNA, 359 bp, Glycine max
  Clone ID: LIB3108-011-Q1-K1-A10
cgcaggcctttatagcataaacatttgagacttcattgctcactgtcttcctctagccttcagggtaggcgcctctcttgcatgtcaccagccaaaacctctctcatgactgccacattaagactttctgcatatgcaaccgttctcactccttcttatccttcttcttcaccttcttcttccttcccttctttcattcaagacaggcctgacttagctgtctatagctcccatattcacccctactgtgatagattgatatagcaaattgaaaactatcaatatattgcagatctccacaaactgctgagggagaagattgaactcactgactcaacttctgatatcgatgatcaaat

SEQ ID NO: 25885 - DNA, 416 bp, Glycine max
  Clone ID: LIB3108-011-Q1-K1-A11
cccgggtcggccggcgcgtccgcttcaaatggaaaagaaaggccaattatgaccgtcatagttctggaatggggaccttcaccagtcgcgcgttggcgcagccgcttcagaacgccgacgaactcatcgactccgtcgagacatttatcttcgattgtgacggagttatatggaaaggtgataaattaatagacggagtgcctgaaacgcttgacatgcttcggtcaaagggcaaaagattagtttttgtcaccaataactcaacaaagtctaggaagcaatatggaaagaagtttgaaacacttggcctgaatgtcagcgaggaggagattttcgcatcatcctttgcagctgctgcatatctgaagtccattgatttcccaaaagaataaaaggtttatgtcatcggggaagat

SEQ ID NO: 25886 - DNA, 328 bp, Glycine max
  Clone ID: LIB3108-011-Q1-K1-A12
cccactcgttcgaaaaaaaaaaatttacaaaaaaaaaaataaaaaaaataaaaaaagaaaaataaaaaaagagtctatttaaatttaaaaataatatatttaaggtacaaatagtaaatcgaggtacccattttatgataaactttccttccatttttgttcctttattatgcctattatttccggaaattgcaatggcttctttatttcttaatgttcaaaaaaacaatattttttatatacataaatcttagtaaaattctggagttattaattccccaattataatactaaattcaaaaaaattatattaatgagaataatcttt

SEQ ID NO: 25887 - DNA, 265 bp, Glycine max
  unsure at all n locations
  Clone ID: LIB3108-011-Q1-K1-A3
ccacggcgtcgcgcaaaacaaacacagtacgttgatgaacctaagaatgaagggaaatggcttttcctcaatcggatctcctccgcgcagctgttacgcaanccgtcaacccccgtgccgnngtgccggnncatggttgcttccnaattcaccgnngcctcaaatccatggcttgnngcttccccacnngaggaagaacgcaacaatgacatngntacctccattggctagcannacggtggaaggagtaccaatnngcatgcag

SEQ ID NO: 25888 - DNA, 407 bp, Glycine max
  Clone ID: LIB3108-011-Q1-K1-A4
gaccgacgcgtccggctagaaatctcagttcgtttgagagaaaaaaaatggcggagggtttcggttttccgcggggcaatgccggccaacacgaacgtcgggacggcaattgcaattccaattgacacctccaacataaccgtgacggcttcgccaacaaatcaatatatttttggcacctcaccagggagcacaagacttacggtgtcccccgcggccgtctaacggaacattctcactttgtacagaacgtggctctcttatacgacggtcagttcgccctctccggctcctgggacggcgagctccgcctctgggacctcgcggctggcacctctgcccgccgcttcgttggccacaccaaggacgtgctctccgtggcgttctccatcgacaaccgtcagatc

SEQ ID NO: 25889 - DNA, 394 bp, Glycine max
  unsure at all n locations
  Clone ID: LIB3108-011-Q1-K1-A5
acgcgtccggccctttttttctatttattttttgtttttttttcctcaatgatctcctccccagctgttacctttgttttttgtgtttttggctttatnaaaaaaaaaaaaaaaaaacttattttttcttttttcaaaaaaaaaattgaaatccaaacaaaagggaaatgaaatttccggggtctgggggactccacttccccccacaaaagaaaaagccgaactttttttgtggaattaaaaagggtttaaaaaatgggaaccttggcccccatttttttaaggtgtttttttgaattttcaacacccccttttaaaaaaaaaccgggtgcaaattttttaaacaaggtgataaaaattttgggattaaaaaaaaaaaagtttaagaacttcc

SEQ ID NO: 25890 - DNA, 207 bp, Glycine max
  unsure at all n locations
  Clone ID: LIB3108-011-Q1-K1-A7
acagaancggaaaagcgggccgaccgcacgcgtacggncattcattcataacatattatcagatttttacacaatagttgtactaaggtcaaaaaagcgtgtactcatgtactgcaattttaaaagcattgcaactgagaattaattactttttccgtcctgnaaaaaaaaaagaaaaccaaaaaggaaatttaccttcattgttta

SEQ ID NO: 25891 - DNA, 158 bp, Glycine max
  unsure at all n locations
  Clone ID: LIB3108-011-Q1-K1-A8
acgaaacaattaaaaataccaagtctgatagtgcacaaggagatgctgatacatgtgccatatggagaggtctttgaggtggcttccgatttcnaatacctggaattctaacactatgattacaattttattctacggatgtagcttctgttcattct

SEQ ID NO: 25892 - DNA, 444 bp, Glycine max
  Clone ID: LIB3108-011-Q1-K1-A9
gacaaacaggtgtagcaattacgggagttcaatgctatggccaccattctaccgccaggcaacgcgcacattgttaccttcaacgctcgccaccgctcttcctctcccactctcccaaggtggggatggagaaaagagcaagacgcaagcatagttgccaatataacccgaagtcaagcatttcaagtcctggtagcttcaggaaaggaaggctcaaaagatgatatggacatggttgatcctgtggaagccaagagattggctgccaagcaaatggaaaaaattaaagcagaacagaaactcaagagaacacgccaaattgaggcaattaacggagcatgggcaatgattggtctcacaggtggccctaagattgaaaggcaaactgggaaaggtattctgactcactggaagactacttgggtacaattgttaatttctttg

SEQ ID NO: 25893 - DNA, 455 bp, Glycine max
  Clone ID: LIB3108-011-Q1-K1-B10
cccacgcgtccggacggttgtgacatctcgggtttatccaacaaaggcaatctatggagctgctaggttgttcttgttcaacaatgctaccgaggccactgtgacagcctcactaaaagtttggcaaatgaattctgcatttatacgcccattccaccctgatcagaagagttaaaaatttgaattggagatagaagagctatagtcacaaaggattggaatacatcttgggttggcaatttgtacttatcagttgtaatgtcctcccctgaataaccgacataaggttatggttcttgctcaaagcgcattccttcatttttgcccagttatgtttatcagaatttttgttgtaattttatcatatcatgtgaaatgatgcttacaagagaatctgttcaaagaaatatggatgtaatcgtatccaattctatgctaaaaatatttacatatgg

SEQ ID NO: 25894 - DNA, 281 bp, Glycine max
  Clone ID: LIB3108-011-Q1-K1-B11
gcaaaacatagaaactacagaaaaaagaagaaagacatggcttccacttctgcagtttcattggctatgccagtaacttatgccagccagaagagggtactggtgcctagctctgatgcattattcctcaagccactgcctctacgttcttattcttccaaggcaatggcagcatcaaaagtacccaatggaaggtttcaggtgagggcttccatgaaggagaaagttgtgacaggcctcacagcagctgcattcacagcctcaatgatggctcctgatgt

SEQ ID NO: 25895 - DNA, 416 bp, Glycine max
  Clone ID: LIB3108-011-Q1-K1-B2
cccacgcgtccgcccacgcgtccgctgacctatcttggtagagatttgaagtttaaacctggaaattaatcaaaccattttaatttgcctttagattctgagtcactgctgctatggcgctacgcgtacttcttgtgttggggatgttgctgatgttgtgccttgttaaggtttcatctgatccaaagatagaagaagaaatactggaagcagaagaagaactgcagtttcccgataacgagccacttatcgtgagagacgcgaacagaaggctaatgcaagatatggattgtggtgggttgtgcaagacgaggtgcagtgcacattcgaggcccaacttgtgcactagggcgtgtggcacgtgctgtgtgaggtgcaagtgtgtcccacctggtacatctggaaatagggaacta

SEQ ID NO: 25896 - DNA, 265 bp, Glycine max
  Clone ID: LIB3108-011-Q1-K1-B4
cccacgcgtccgtgcttatgaattgacatcagattggttagagtccactttcaattgattgtttcccattttttcttcatgattagtgatcatattcttttttgaaatacaagttgattccctcgtagtataggaagaaagtgtgagggatatgctaattttttgtaatgatagtggtagttgataagattgaacttcctttaagatggaagatttgtccttgatgcttgcgtctgatttggaattctaaatgtaaatttccgaa

SEQ ID NO: 25897 - DNA, 401 bp, Glycine max
  Clone ID: LIB3108-011-Q1-K1-B5
acggttcgatcctggctcaagatgaacgctggcggcatgccttacacatgcaggtcggacggggagtggtgtttccagtggcggacggttgaccacaattatcggaggaggagattctgttgcagctgtggagaaagtaggagttgctagtgtcatgagccacatatctactggtggtggtgccagcttggacgttattggaaggcaaagagcttccaggagtccttgctctcgatgaagccgtcccagttgccgcgtaagacaattttgagcttggaaaatttttccatcctcagatttcggtgttgtcaatcttgtaaaagagcatatgttgtaggacccttcggagactgttagtgtaaatgttatcatgcttgagtgattattggcttgacacataa

SEQ ID NO: 25898 - DNA, 315 bp, Glycine max
  Clone ID: LIB3108-011-Q1-K1-B6
gttttattttcaaattatttcttcaattaatagaagaaatacgaatagtagggaatatatagggaattattttatcccattcggaaggatatcgtttcataattatctatgactgtttatgtctttagcatgactgactacttgattaaatgtggaggaaagtgggataaatggccgatattacagaaaggattccattccttaataaatacaaaaaaaaaaaaaactaaaagaaagaaaacaaaaaaagaccaaaacataaactaaattatagaaaaaaagaaacaccattccaagttagggggggggtctctt

SEQ ID NO: 25899 - DNA, 370 bp, Glycine max
  Clone ID: LIB3108-011-Q1-K1-B8
tgacacggtgctaccttttctagggctagcagcactgtaacctcaactcacctctcccaaatccgttccctctttcaaaccttttttttttttccaccaaatcggcgatggcaacgacgtcggtggtgccggcgaaccggcgtcgcgcggcgaaccccgcggaggagatggacttcgagacgacggagggcgtgaaggccatcgcaagcttcgaggagatggggatcaaggacgatctgctccgcggaatctaccagtacggcttcgagaagccctccgccattcagcagcgggccgtcacgcccatcattcaaggccgtgacgtcatcgctcaagcccaatccggaacggggaaaacgtccatgattgc

SEQ ID NO: 25900 - DNA, 393 bp, Glycine max
  Clone ID: LIB3108-011-Q1-K1-C1
ggcacactttgataagttttttgtgcagctccaatggcaacctctcaaatcacttcatcattgaggaactggcctgcatttgaaaggtttcaaccttcaacgcttcgatttccttctgctgggcacgtcagaattgggacactgacacaaacctcgtttccctctttcgttgtcaaagccgccactgttgtcgcccccaagcacaccactgttaagcctctgggtgatagagtactggtgaaaattaaggatgcagaggagaagactgcaggtgggattttactgccagcaactgctcaaggcaagcctcaaggaggtgaagtggttgctgttggggatgggaagtcggttgggaagagcaaagtggatgttagtgtgaagacaggtttgcag

SEQ ID NO: 25901 - DNA, 208 bp, Glycine max
  Clone ID: LIB3108-011-Q1-K1-C10
gccaagactacttttcagccgtgttactagtttaataactaagataggctatcttgatctgtgttaatcattgaattgcacaagggccttgctttttttaatgatttgcaataccttaaatattgagccgcatccttctttaatatacgtgcttctgtactgtatttttaaatctactacgtattaaatttcaattactgttcattct

SEQ ID NO: 25902 - DNA, 57 bp, Glycine max
  Clone ID: LIB3108-011-Q1-K1-C11
cacactctttcgtctacgctaacggaccagattacagatattctaaaagattcatac

SEQ ID NO: 25903 - DNA, 216 bp, Glycine max
  Clone ID: LIB3108-011-Q1-K1-C12
gtccggtggtgctagagttattccccttatctacaatgagtcacctgagaacctgagacaaggagctcgatttggtcaatggagtgctcttcactggttggtgggctgtttctggtccatatttggatactcttggaaacatttttaagaaagccttaaagaaaaatgaatcttgagacccttttccaataattgcctttaacttaagttgaaacc

SEQ ID NO: 25904 - DNA, 337 bp, Glycine max
  Clone ID: LIB3108-011-Q1-K1-C2
cttgctgaaattgtcacgaccatgttgtcattattcaccaacttgctcctcttcctatccgtgctaatcggtctatgcaattgcagggtaacaacaacaaatgaagaggtgcaaaccctaaacacaaacactcacttcaacccacaggtcccacccctccgaaccctctcttcctcgaagcggttcgagggttcctcggagttcgtgaagctcaaataccacatgggacctgtgctatcgtctccgatcaacatctacctcatctggtacggcaagtggccccaatcccagaagctcctcatcaaggacttcctcaactgaatctgcgacgaccacc

SEQ ID NO: 25905 - DNA, 278 bp, Glycine max
  Clone ID: LIB3108-011-Q1-K1-C3
ggaccccaacattctaccttgttgaattctgaaatatttgagtgaaagatgcatgtgcatgcccgagtgggtcccatgaagtagttatcgatggtgcaccacagtcgtgccaagaaaattgtgaatgttgctttataccgatgagctcaatcacatggtcttaagagcttcttgggcacgatcgagcatgaaatcttgtgatgggattaggaattaccccacacaacttgtaatgtttcaaagctaaaattactggaactgttttctttttttcggca

SEQ ID NO: 25906 - DNA, 370 bp, Glycine max
  Clone ID: LIB3108-011-Q1-K1-C5
atttgtggacgggcatccacctttgggttgtcaagatactgcagcatatcttgttttacctattcttcttgtcgtttctcaatacgtttcaatggaaatcatgaaaccacctcagacagatccttctcaaaagaatcaacttcttattttaaagtttcttccactcatgattggctacttctcactatctgtcccatcaggactaacaatttactggcaagtccgatttggtccgaaaactccagtaatggtttataaacaatgtcctgagcacagctcaacaagtatggttgcgcaaattgggaggtgcaaagcctgttgtgaatgaaaatgctggtgggattattactgctggacgcgctaaaagatc

SEQ ID NO: 25907 - DNA, 460 bp, Glycine max
  Clone ID: LIB3108-011-Q1-K1-C6
accacgcgtccgcgcttaacatcacccaagagagaacctaggacacacaacgcaacacacggagagagtttgaggaagaaatcatcatggcttcagcagcatctgggtttgtgctgactcttaatgttgcaactaacaccacaaactcaagggtggtcttgttcaacacaaagaaccacgcttctatgcttgttgcgagggctttaaacgagcctggagcggtgggacccggaaccaccactcctgcagctgaagctgaagcatagccaaaaccaccacctattggcctcaagagaggtgctaaggtgaagattcttatgaaggaattctactggctcaaaggcacttgattagtggatgctgttgatcatgaccccaacactcgctaccgtgttgtggatcgattcaacaaagtcaactatgccaatggatgaacaaacaactatgctttggatgagat

SEQ ID NO: 25908 - DNA, 445 bp, Glycine max
  Clone ID: LIB3108-011-Q1-K1-C7
cccacgcgtccggaaaatggcagcatgtcaaagagaccacagaaattggtgaaggaaaactgttctccccaggaaatttgagagccacatctgacaaccccgattatgctaagttgatcgattactatgtcaatgaaaagtacacattgagatacactggaggaatggtgccagacgtcaaccagattattgtaaaagaaaaaggaatcttcaccaacgtgtcatcaccatcagccaaagccaaactgagactgttgtttgaggtagctcctttggggttcttgattgaaaaagctggaggttacagcagtgatggtcatcagtctgtgctagacaaagtcatcagtaacattgatgagagaactcaagttgcttatgggtccaagaatgagataatccggtttgaagaaaccctgtatggtaaatccaggctcaagggtggtgt

SEQ ID NO: 25909 - DNA, 456 bp, Glycine max
  Clone ID: LIB3108-011-Q1-K1-C8
gattggcctagccagtagtagccaatttgttggagctggttgggaatggcgtcgaaaccggaatcaaatggaaattccaaatgcaacaaaggattcgctgacagctatatgctgttgaatcctgaagacgctcatttcttcgatcttgttcatgtgctgtattcccgtaacttgcgaaaccgaaaatttgtggacagcaatgctgagggatcttatgagggaagcttccgccaaagatggcttatattcatctctgtggggctccagaagcttctgttgctcatcgctaaaccactttcgttctttggctcttgcgttgagttcttcatcaacctccttgtcctcaacggtggctgcatcatgatcgttattaacttcctcacaggtcacctggtcgtccccgatcgtaatgcaccaaattatttgtcttgcatcggaaatttggacgcgagagta

SEQ ID NO: 25910 - DNA, 328 bp, Glycine max
  Clone ID: LIB3108-011-Q1-K1-D1
gacaaagagtgattcagagggagaaagctccctcgcacaaagcaatgcctgccatcacctgaattctatgctccttttcccttcatccgcattgctctcttctctttcaccgtttttgtctctgaatatccaagatcttcaaggacaatgttatctctgagaaacatttttctgaatagcgcttgatccggcgtgaaacattcaattgttgataatttactgcttcactttgggctgtgcgagtggagcagcctattttactattaaaggcatattctcttacaaggttgatttgcagagagcatggcgtcttgggatcaaatggggg

SEQ ID NO: 25911 - DNA, 475 bp, Glycine max
  Clone ID: LIB3108-011-Q1-K1-D11
cccacgcgtccggtttggaaggaatatagcaaaggggattcaaggtatgcaggaagggatgcaggggtagttactgttgaaggaataacagcggttttggagggtccagctagccttctagcagtatacgctatagctactgggaagtcatatagctacatacttcagtttgccatttctttgggccagctatacggaactgctgtttattatataacagcaatcttggaaggtgataatttttctacaaactcgttttactattatgcatactacattggagcaaatgcctcctggattgtaatacccttgatcattgccatccgctgctggaggaagatctgtgcagcatttcgagttcaaggtggccagacaaaaaagcctaaagttcgttgaaggaaacattttcaggttattggtcttagagatcctgagctaataatgatgttttggggtaattgagataggagagatt

SEQ ID NO: 25912 - DNA, 362 bp, Glycine max
  unsure at all n locations
  Clone ID: LIB3108-011-Q1-K1-D12
attgatgggaaacagtactacagtttgactgttttgacaaggacagctgatggaggtgaagggggcaagcaccagctgattgcagcaactgtgaaagatggcaaactatacatttgcaaggctcaagctggagacaagagatggtttaagggagcaagaagatttgtggagagcacagcaagttctttcagtgttgcctaagaacttatcagtggagtgctattgtgcatgtgaatcatcttgaaggggtgtgtatgtgttgaattatgtggtcactttttgtccacaaggtttatgtttttgaggctgntggttgcagtaagcactttgattcttaattttttatagtctctaaggactta

SEQ ID NO: 25913 - DNA, 302 bp, Glycine max
  Clone ID: LIB3108-011-Q1-K1-D3
gttgcttccttctcaaaaaaagaaaatgaggcaaaaacagagaaaggcagaagcaagagctaagaaagaggcggaagaaaaaaatgaagaatcaagtgctggtgggatatcaaagtctgggaaacggcaggcaaaacccattgatccggatccacgtggtgaaaagttgttgcaggtggaagatcctttgttggaaggcacaaaatacttgaagctgctgcagaagaattcaccagattcagtggagacgcactttctctcttttgaattatatatgagaaaacagacgattttgcttgcat

SEQ ID NO: 25914 - DNA, 402 bp, Glycine max
  Clone ID: LIB3108-011-Q1-K1-D4
caacacggacgcagagccttcgatccagaaaccatgactaagagaacgaagaaggcaggcggtgtcggaaaatatggtacccgatatggtgctagtttgcggaagcagattaagaagatggaagttagtcagcatagcaaattcttttgtgaattttgtgggaagtatgctgtgaagaggaaggctgtgggaatatggggatgcaaggattgtggtaaagtgaaagctggcggtgcctacactttgaatactgcaagtgctgtcactgtgcgcagcaccatccggaggttgagggaacaaaccgagggttgagctttttggttgatgttagattttgagcaaattaactggagaaatgattcgtttttgtttaagaagctgtattgtttcaacttacaatgc

SEQ ID NO: 25915 - DNA, 460 bp, Glycine max
  Clone ID: LIB3108-011-Q1-K1-D5
gttggtgactaaatagaaaaaaataaaaaaagaacacaatcaaagcattaagagagaggaagaatgcaaatggcaattttgttaagaggaggagcacttggagattctagctttcgtttgtgttcattaacatcaacttcttctttgcatgtctcccaaaatgttgccatacccacctcatcatcatcaccaatactacccttgattgcaagtaaatttaaaacggccagcagaaacagaattacctgctctgccgttcaagaatcatctcctagcacagcagctactactgctgaaacaaaggaggaggtaaaggaagccccaaaagccgcagcaccagcaaagaaacctcctgctaaagctccagctaagcctctgcctcagatgatggaggaggatgtgatcccttcactgaaagcaatatttgaagcccaagaagatttctcaaatattgagctgg

SEQ ID NO: 25916 - DNA, 454 bp, Glycine max
  unsure at all n locations
  Clone ID: LIB3108-011-Q1-K1-D6
gaaccctggngactacaaacaaaataataaaagtttaacacacacaaancattttgcgatattgggcaagcaaatgtcacttttctttccactattatcactttttgactctaacnaacagangagttcattaacatcaacttcttcttagcatgtctcccaaaaggttgccatacccacctcatcatcatcaccaatactacccttgattgccagttaacttaaaaccgtcagcagaaacagaattacctgctctgccgatcaaaaatcatctactagcacagcacctactactgctgaaacaaaggaggaggtaaaggaagccccaaaagccgcagtaccaacaaagaaacctcctgctaaagctccagctaagcctttgcctcacatgatggaagaagatgtgatcccttcactgaaagcaataaatgaagcccaataagaattctcaaac

SEQ ID NO: 25917 - DNA, 455 bp, Glycine max
  unsure at all n locations
  Clone ID: LIB3108-011-Q1-K1-D7
gagataactagaaacagtgtgatgaaaatgaaggtccttgttttcttcggtgctacaattgtggtagcatggcaatgccatgcgtacgatatgttccctctccgaatgaacactggctatggtgcccgtactccggaggtgaaatgcgcaagttggaggcttgctgtggaagcacacaacatctttggctttgagaccattcctgaagagtgcgttgaagcaacaaaggaatacatccatggcgaacaatatagatcagactccaaaacagttaaccaacaagcttacttttatgccagagacctcgaagtccatcccaaggacacatttgtgttcagtatagatggcaccgtactctctaatattccatactacaaaaaacatggatatggggtggagaaatgtaactcgaccttgtatgatgaatggggnaacaagggcaatgcaccggcact

SEQ ID NO: 25918 - DNA, 341 bp, Glycine max
  Clone ID: LIB3108-011-Q1-K1-D8
acgattcaatgaaaaaaaataaaaaaaaattttttatttatacttaaaaggagaaaaaggaaagattaagaataaaagaaaaaaaaaaaacacttgataaatataaatataagttgtgtaaataaaaacaacttgtgtaatcatacttaaaaatgaaacaatacggcgtggtgatcataagcaatactacccttgagtccatgtcacttaagaccttcttttaaagaaatacatttatttcgtcaacaatcatatacttcacaggactatactgctgagcatagaggagtactgaagggcataagagagtaccaccaagaacatactgtaaggctccagct

SEQ ID NO: 25919 - DNA, 412 bp, Glycine max
  unsure at all n locations
  Clone ID: LIB3108-011-Q1-K1-D9
ggagaagcanatggcttcctcaatgatctcttccccagctgttaccactgtcaaccgtgccggtgccggcatggttgctccattcactggcctcaagtccatggctggcttccccaccagaaagaccaacaatgacattacctccattgctagcaacggtggaagagtgcaatgcatgcaggtgtggccaccagttggcaagaagaagtttgagactctntcctacctgccagaccttgatgatgcacaattggcaaaggaagtagaataccttcttacgaagggatggattccttgcttggaattcgagttggagcacggtttcgtgtaccgtgagcacaacaggtcaccaggatactacgatggacgctactggaccatgtggaagctgcctatgtttgggtgcactgat

SEQ ID NO: 25920 - DNA, 412 bp, Glycine max
  Clone ID: LIB3108-011-Q1-K1-E1
cccccactccattttttaaaaacttttgtagcattctttacctcaaagtgaaacttaaatttacatgtttgacgctaggatataggttacaaaataactttggttagctgcaaaagaaaaaaaaaaacttggttagagctaccattaggcaatgagtaagtattaaatgaatcatcaaaacctttgatatcttaaaaaaaaaaaaaaaaaaaaaaaaaaaaaaaaaaaaaaaaaaaaaaaaaaaaaaaaaaaaaaaaaaaaaaaaaaaaaaaaaaaaaaaaaaaaaaaaaaaagggggggccttttaaaagaaccaaatttaataaccggggtttggaaacgaaaaattttttttttggggccccaaaaataaatttcgggggcggggttttaaaaaggggggggggggaaa

SEQ ID NO: 25921 - DNA, 235 bp, Glycine max
  unsure at all n locations
  Clone ID: LIB3108-011-Q1-K1-E10
cgtccggcgaggcgtgtatacaatcactatatccacatatatacacttagtagtactttaagtcttaaatgttanaagaacatcagtgatggagagaaagttcatttcagtacttgttttgtgagtatgttttgtgctgtgaatgtcccaatatgttgatgcaaggtacttggataaaaaatcaattgatgacgtgaataagccacaatcgtgcttagattgacgttccatttgt

SEQ ID NO: 25922 - DNA, 221 bp, Glycine max
  Clone ID: LIB3108-011-Q1-K1-E12
acgcataaacgcatttcttctccgcttccgatgcctcgttcgaattctctttttgatcggcgaaagggatatagtgcatctcgatccacattggtcaggctggtatccaggtcggaaatgcttgctgtgagctctactgcctcgagcacggcatcggtcccgatgggcaaatgccaagtgacaagacagttgtcggtggtgatgatgctttcaatactttc

SEQ ID NO: 25923 - DNA, 111 bp, Glycine max
  Clone ID: LIB3108-011-Q1-K1-E2
cccacacatccggagctatacttcactatgactcagcttatcttactctggcatgcgacggcatgcataggtaatagcactaactgaacacagtatactgggcgacgctca

SEQ ID NO: 25924 - DNA, 437 bp, Glycine max
  Clone ID: LIB3108-011-Q1-K1-E3
cacgctcgtaccaacggaaacacgttcacgggtcttgctatcagatatggcatgatccaaggcatggatatgacaaccaacagctgttcgtattcatccgactactgctagggacacgtaaacgaagaaaggagctgttctttttataacatgaggatcaagacgaaaaagaagtgattgacgaggctgaaaacgaagcgccgaaagatgagacagagattcaagtattgcgtctaacctattaagcttgacggtgctttgacaaaatgcttatgttgccaaatcagacacacagctgatagcggcactgatcgtatgactctgacgttctgatgcacttttgtggattttatttcgtcttatgttcttagctgaaaacaatgctgttactgcgtttgcgaatcaacaggatatcttggttgcatttctgtttctct

SEQ ID NO: 25925 - DNA, 210 bp, Glycine max
  Clone ID: LIB3108-011-Q1-K1-E4
tctaaacctgcccactttaacataagcacagcatggacatggaaacaacattaaacaactgagtatttatggggacacgcatgatgaaggtccattcattgacgcagcacttactatcgcgcttcgtattatttaaaaagaaagccgacagatcgaataaaggttgcagagagttaagatctagatcctatatgcccctgaaggatccgg

SEQ ID NO: 25926 - DNA, 453 bp, Glycine max
  Clone ID: LIB3108-011-Q1-K1-E5
gcgaggattccgattccgccgctcattctgtgctgcgtggcagctgtgaagttcctcgccgaccccgaaaccgacgaggtcttcgccaggctgcggatggttcctctaagaaactccgagctcgactacgaagacagcgacggtaacggcgcggaggggtcggagaagcccgcgtcgttcgcgaagacgttaactcagtccgacgcgaacaacggcggcgggttttccgttccgaggtactgcgcggagacgatattcccgcggctggattactcggctgagccgccggtgcagacggtgatcgcgaaggacgtgcacggcgaggtgtggaagttccggcacatttaccgagggacgccacgtcggcacttgctgaccaccgggtggagcagtttcgtgaaccagaagaaactcgtggcgggtgattctatcgtgtttcttcgggccgagaat

SEQ ID NO: 25927 - DNA, 457 bp, Glycine max
  Clone ID: LIB3108-011-Q1-K1-E7
gtgattattcctcttttaacaatccacacccaaattctagggttccgaaatggacgctggcggaaagatcaagaagggcgccggaggtagaaagggcggcggcccaaagaagaagccggtttcaaggtccgtcaaagccggtctccaattccccgtcggaagaattggccgttatttgaagaaaggaaggtacgctcagcgtgtcggtaccggtgctcccgtatacttggctgcagttctcgaatacctagctgccgaggtgcttgagttggctgggaatgccgcacgtgacaacaagaagaacaggattattccaagacacgtgcttttggcagtgaggaacgatgaggagttggggaaattgcttgctggagtgacaattgcacatggtggcgtgcttccaaacattaaccctgttttgttgcctaagaagaccgagagggcttccaaggaacct

SEQ ID NO: 25928 - DNA, 345 bp, Glycine max
  Clone ID: LIB3108-011-Q1-K1-E8
atttgcagaactttgtttcccaacctccattgcctccgcttctacctcgctaccatgatcattcctgagaagaaccgcaaggagatctgcaaatacctcttccaagagggagtttgctttgcgaagaaggacttcaatttggcgaagcaccctgagattgacgtgccgaatctgcaggtgattaagctgatgcaaagtttcaagtctcgcaagtatgtgaggaagactttggcttggatgcactataactggttcctaaccaacgatggaatcgagtttctaagaacttaccttaaccttccttccgaaattgtccctgctactttgaagaaacaggccaagcca

SEQ ID NO: 25929 - DNA, 422 bp, Glycine max
  Clone ID: LIB3108-011-Q1-K1-E9
gccgccctttttttcttttactatttttgacaacacattctactcaaccaactgaattagatgcctttgaaaatttagattcatcctattaaaccatctggaagattgactattgaccaggggattaaacaagacactaacctgtaagggtgtacataattagaatttagaacacaaattgtcgaaagtacatttgaattatatacccctccaaaacacttctgtggacaaggccggtaagaggctaccaaatttttcacacctaaaatatccaaagaaagttctgctcgcaagtgataccgaatatgcaaaaggcacgggggactagatgtgtggagctagaagagatgacctgtaaaccaacttgaaacatacctattctttgttgagagacatacttgctcggtaaaaaataatcacat

SEQ ID NO: 25930 - DNA, 469 bp, Glycine max
  unsure at all n locations
  Clone ID: LIB3108-011-Q1-K1-F1
cttcaagttttcttgtttttggatctaaaaaactgaaaaattcagcaaattctatgttgggtttgaaaaaagattcaatttttatgcaaaagttttgttcctttaggatttcagcatcagtggctacagcctgcatgcttcacggtgcaagcagccggcccgcaaccgcccgcaaatcctctggcctttccggaaccgtccgcattcccggcgacaagtcgatctcccaccggtccttcatgttcggcggtctcgcgagcggtgaaacgcgcatcaccggccttctggaaggcgaggacgtcatcaatacgggcaaggccatgcaggccatgggcgccaggatccgtaaggaaggcgacacctggatcatcgatggcgtcggcaatggcggcctcctggcgcctgangcgccgctcgatttcggcaatgccgccacgggctgccgcctgaccatgggcctcgtcggggt

SEQ ID NO: 25931 - DNA, 351 bp, Glycine max
  Clone ID: LIB3108-011-Q1-K1-F10
atttggtcactgacctatcttggtagagatttgaagtttaaaccttcaaattaatgaaaccagtgtaatttgcctttagattctgagtcactgctgctatggcgctacgcgtacttcttgtgttggggatgttgctgatgttgtgcctcgttaaggtttcatctgatccaaagatagaagaagaaatactggaagcagaagaagaactgcagtttgccgataaccagccacttattgtgagagacgctatcagaaggctaatgcaagatatgaattgaggtgtgttgtgcaagactaggtgcagtgcacattcgaggcctaacttgtgcactagggcgtgtgtcacgtgct

SEQ ID NO: 25932 - DNA, 328 bp, Glycine max
  unsure at all n locations
  Clone ID: LIB3108-011-Q1-K1-F11
cccacacatccgcttattgtcttctatatctcaaactcactacatcccaatgccataatcatggcacctgcttacctaattccacgccaactcatatacacctctactaatactcttatatctcccaatctcctatatctctattcactacttcacctattccaactctatacacaaactaaacttcactactaatcacatccaatcttagatgccaccctatcaaanaatttataccatcatccatgacccatacattgaaaacctaaaaacttcattttcatacatcccattacacccattgtacttgatcaacacgccctaatac

SEQ ID NO: 25933 - DNA, 283 bp, Glycine max
  Clone ID: LIB3108-011-Q1-K1-F2
cggacgcgtgggtccttatagccattcgattcgttttagttctatcaattctatatgaatgaatggatggttattttcaccaaaaccaaaaaatggaaaatttccattttttggtttggatataaatagccggtatctgttcgctttagggaaaaaagaaaaatgtgagagaaagagaaacgcccaccctatatcataataaaacactcccacgttttcagtcggaaagagaatataaaactctgagatgaaaaaaaaaaaagactcgccctttcgagtgttc

SEQ ID NO: 25934 - DNA, 317 bp, Glycine max
  unsure at all n locations
  Clone ID: LIB3108-011-Q1-K1-F3
cccacgcgtncgattgactagtatcattaatatggctaattcctacttatccttgcttggcgggatacttggagctctgctactcacccatcaatggcttgctgatgaatctgattcttactataagccactcagttacaagaaaccacgagtgtacaaccccaagccaaagccacccattcacaagccaaagcaacccgttaacaagcccaagcaacccgttacaagaaacccccttatggtaagtacccaccaagtcaagacaaccatcacttcttaaccatgcaacaaggcatggtaatgttaactatctacat

SEQ ID NO: 25935 - DNA, 355 bp, Glycine max
  Clone ID: LIB3108-011-Q1-K1-F4
accacgcgtgcgtccacgcgatcgaccacgcgtccgggaggaactaattggattagcatggagcttcatctaatagcgtggcttatcaattttacatgtgttgtgacttgaataacgagtgagtatgctttggctactacttttgaacgatgtttgtgtccatgctcctcatcgagacgcacttcggcatcgacgtttccacgccgccggagcagctcgcgaagctctacgactccatcttcgacaagttcgacggcgaccggagcggcgccgtcgaccgccgcgagttccgcgacgagatgaggaagatcatgctagccatcgccgacggcctcggatcgttccccataaggat

SEQ ID NO: 25936 - DNA, 130 bp, Glycine max
  unsure at all n locations
  Clone ID: LIB3108-011-Q1-K1-F5
cgcgggtgaaacggcacccacctaaaatgaaaggcacctgncnctcacgcccttaaccaccaaagactaaactctcgatgctctatggctgacgacccccttgtttgacctacacgtacatgctcctttg

SEQ ID NO: 25937 - DNA, 405 bp, Glycine max
  unsure at all n locations
  Clone ID: LIB3108-011-Q1-K1-F6
acgnttcttttttctttttttttttaaaacagttcaataaaagattaatcttggggatgaaagagcggtacatcagtgtcaaaacaactctatttaaactgtaacaaaaaataggaacaaaactaaaagctcagcgtttcccgcctccaccaccgagtttgggacctttgggcatagcacccttagaaatgcctttacctcctgctttttgtgacttggctggaacttctgctttcttagccttcttctcatcctttgatttcttgatcctctccttaatttcactgcaccacatcagagactgagataaacatatgttatccacattaaaaagtaaggctctgaaacagaaataatattttacatgattaaagtaaaacatacatgatcatgatagcaatgatg

SEQ ID NO: 25938 - DNA, 148 bp, Glycine max
  Clone ID: LIB3108-011-Q1-K1-F8
gtttcattgccccaattcttgcagagttttttaaaaagttgccgaatgtcaccttcctcaaggtggatgtggatgaattggagactgtttccaaggagtggggaattgaggctatgccacccttcctgttcttgaagaaaggcaactt

SEQ ID NO: 25939 - DNA, 365 bp, Glycine max
  Clone ID: LIB3108-011-Q1-K1-F9
cgtccgcccactcgttcggaatcctgaaaaatgggtggcaccctatccgaaatatgaatttggatgggggaaacgggtcttgccccctgttcagacagaggtgcagccttaagatattatttatccacactgtttcagtgcttggtattcttaaatcttcttttccaatgcttattgttcaagtgcaactggatggtagataaagttggctaaatttgcatccatttttgtatttttgttaagtattatgattatttaaagttgaggcgttaacctttttatctaaattgtaagaattgcattttatgtctctcgaatgacttacgtatacatattgctatcatattgatgttctctgtttctag

SEQ ID NO: 25940 - DNA, 306 bp, Glycine max
  unsure at all n locations
  Clone ID: LIB3108-011-Q1-K1-G10
tcggccgacgcgtccgataacgtacttttggtttgaagaaaaatgaatctaaaggattcaatgttgatttggtctttggtactgcttaattttcttttcttcacttgttttgcagctgataatctcccgtgccctccaaaatctactatcccaccttcctcttcaccgcagaaatgccccaaagacacgctcaagcttggtgtgtgtggaagttgcttaggcttggttaaagaagttattgntacatatccaattgtatagtgctgtattcttttgaaaggtctcgctcttttttaatcatcactg

SEQ ID NO: 25941 - DNA, 477 bp, Glycine max
  Clone ID: LIB3108-011-Q1-K1-G12
gctgatagcattgtgatgtcaagaagataagcatttaggaaggatgcacatccctccatttatagtggtgatttgaatcctcaacaaagagctaaccctacctactcagctgattgcagccactggtgtcttcctggattgccagatacttggaatgaactattctatactgccttgttctattaaattttgtggtttgcttactaattaacacacttcctcttcactgtttttatgagtaatattaggtaatacatttattgagagggttgcatgatatagctgcaactgattcatatgtaaagatatgctaatgagatgaaatatttttttttattttaaaaaatttaggaaaggaggattaggatagtttccaattcaaggaatgagaagtctaccttaccaaatgtaacctatcaattatgaaagctctacttgggcaatccctagagattagaaaaggaagtttctttggtc

SEQ ID NO: 25942 - DNA, 135 bp, Glycine max
  Clone ID: LIB3108-011-Q1-K1-G2
actcattttcattgtgagggatttaattatcagagtttttatgtgtgtatgtatcacttctcttgagattgtttagtctttgatttcattcttcttcaaccatgaaataattaattaatagggcgtgcattgtcc

SEQ ID NO: 25943 - DNA, 449 bp, Glycine max
  unsure at all n locations
  Clone ID: LIB3108-011-Q1-K1-G3
attccaataaataccttcctctctatattttcgcacaataccctctcacccttcaacgatgagttactacaatcagcagcaaccacccgtcggtgttcctcctccccaaggttacccaccgccggattcttacggaaaggacgcgtaccctccgccagggtacccgccgcaaggaggataccctccgcaggcgtatccagcacaggggtaccctccaccctacgcgcctcctcagtacgctcagcctccgccgcaacaacaccagaattcatctggcccacgttgcttagaaggatgtttggctgctctctgctgctgctgtctgttggatgctgcttctgaaaggagaagacgttgctttgcacaaattggatttgaaactgtgttttgactttgaatatcgncgntagcttttattattctatgttgatttacatttcgtggatatg

SEQ ID NO: 25944 - DNA, 460 bp, Glycine max
  Clone ID: LIB3108-011-Q1-K1-G5
ccaattatggctctgaatctttgtatctcacctaagtttaaatgggttccttccttagatggtgcttcctattctttgagaccttcacttgggtcttgttttggtaacataaacattgctagtgtgagtctaagtactactagaagtttgagtttgaggaggagtgggagtgttagtgtaagatctagtttagaaactgcggggcccacagtcacagtgggacaggtcactgaggttaacaaggacaccttctggccgatcgttaaggctgccggggataaaaccgttgtccttgacatgtacacacaatggtgtggcccttgcaaagtgatggctccaaagtttcaagaattatctgaaaagtatctggatgttgtctttctaaagcttgattgcaaccaagacaacaggcccttggcaatagagctgggaattaaagtggttcccactttcaaaattc

SEQ ID NO: 25945 - DNA, 253 bp, Glycine max
  Clone ID: LIB3108-011-Q1-K1-G6
aattaagccaaagcaagattgctttgcttacttttgtatgttcaaaatagggaataaaaggggaacttactattatttgaaacctataaataaaaaaaagatttgataacatatgcattgcttgtgtgagtctaagttctgctagaagtttgacaatgacgaggagtggtattgttagtttaaaatctaatttacagactgcggggtccaaaatcacagactgacaaaaccttggcgttaacaaggacactct

SEQ ID NO: 25946 - DNA, 93 bp, Glycine max
  unsure at all n locations
  Clone ID: LIB3108-011-Q1-K1-H1
cccgggtcggacccacgccgtccgacaaggtacgttgagaaacttaagaagggagaagcatcaatggcttctctcaatcgatcnntcttcccc

SEQ ID NO: 25947 - DNA, 335 bp, Glycine max
  Clone ID: LIB3108-011-Q1-K1-H10
cccacgcgtccggtgactttgtccatttctcttctgccataaatcgtttcaaaagggaacaggaaaagaaagaagcttctcttgccaacaagttattccactcccttgatgaatcttcttgttctcttcctgcctgtttgggtgctaagcatttctttttcctcaccaattcttcatgctgcttcctccatttctctttctcaaaatgcacaagctgaatctccatgaattcatgactttagaacagtgcaccatcataatttgaataatagaattataatctcactagttgctttttctgctcttcttgttgtagtcttccaattcctgtaata

SEQ ID NO: 25948 - DNA, 472 bp, Glycine max
  Clone ID: LIB3108-011-Q1-K1-H11
aaattaattgttgctggagctagcgcttatgcacgtctctatgattatgaacgtgtacgcagggtttgcgataaacagaaagctatactattggcagatatggcacacatcagtggattggttgcagctggtgtcatcccatcaccttttgattatgctgatgtagttactaccacaactcacaagtcacttcgaggaccacgtggagctatgatattctacagaaaaggggttaaagaaattaacaaacaaggaaaagaggtattgtatgactacgaagacaaaatcaaccaagctgttttccctggactgcaaggtggccctcacaaccacactattactggtttagctgttgcgttgaagcaggccactactcccgagtatagagcatatcaagagcaagttctcatgaacagctttaaatttgcacaggctctgagtgagagaagctatgaactcgtctctggtggaa

SEQ ID NO: 25949 - DNA, 485 bp, Glycine max
  Clone ID: LIB3108-011-Q1-K1-H12
gttcataagatctaatatctccaacaaagtggtttacattaacatttacatgatatagttggaatttggaagacatttcgtaatgctgaataaaagcagccttcatatggttgtatggttgaaacaaatctcatttctgggagatgcaaattgttatatttttttgtagcttagggactggctggatttgtctctcaaccattctgtgccatcttccctcttaattctttctaggtattttagtattttctctgttgaaatattatctttttaaggattttctggaaaggtgtgatcatctcattctctctgtagagcattttctgtttcaggaaaggtcagaccagaggaagctgttcaagctacactctcttctctgccagacgaggttgtagatactgttggggtgacaactttgtcgtctgaagattctgtttcagaaaggaagaggaagttggaatatcttgaaatgcaagaggagctaa

SEQ ID NO: 25950 - DNA, 417 bp, Glycine max
  Clone ID: LIB3108-011-Q1-K1-H2
cccacgcgtccgcccacgcgtccggtcgagcagtgaataccagttgctcctatagccggcgctcaacaacagggcggacaaggcagtcaccatccgaaccagaaagttcatgacaaacaggcttctctccagaaagcaattcatcgttgatgtccttcatccagggagggctaatgtttccaaggctgaactgaaggagaaattgggcagaatgtatgacgtgaaagacactaacactgtatttgtcttcaagtttcgaactcattttggtggtggcaagtccactgggtttgggttgatctatgattcagttgaaaatgccaaaaagtacgagcctaagtacaggcttatcaggaatggacttgatactaaagtagagaaatcaaggaagcaaatgaaggagagaaagaatagagc

SEQ ID NO: 25951 - DNA, 350 bp, Glycine max
  unsure at all n locations
  Clone ID: LIB3108-011-Q1-K1-H3
gttgcttccttctcaaaaaaagaaaatgaggcaaaaacagagaaaggcagaagcaagagctgagaaagaggcggaagaaaaaaatgaagaatcaagtgctggtgggatatcaaagtctgggaaacggcaggcaaaacccattgatccggatccacgtggtgaaaagttgttgcaggtggaagatcctttgttggaaggcacaaaatacttgaagctgctgcagaagaattcaccagattcagtggagacgcactttctctcttttgaattatatatgagaaaacagaggattttgcttgcattccangctgtgaagcagttactgaggttggatgctgaacaccctgatt

SEQ ID NO: 25952 - DNA, 302 bp, Glycine max
  Clone ID: LIB3108-011-Q1-K1-H4
gccacgcgtttgtaaaaaaaagaaaatgagtcaaaaaacagagaaaggcagaagcaagaggtgggaaagaggcgggaagaaaaaaatgaagaatcaagtgctggtgggaatatcaaaaaaatggggggcggccggtttaaaggattcatccttattcaccttgtgtaaaactgattaatttttattatgctttacttaaatgcacaaaattgtcgaagcttttacaaaagaattaatgagaaaccctggagacgccctatttttattttgttgtatatatgacacttttgacgatttggctt

SEQ ID NO: 25953 - DNA, 438 bp, Glycine max
  Clone ID: LIB3108-011-Q1-K1-H5
acgaatttttctctcaaccggcccaatttagcataagcccagcatggccaccgcaacagcagcggccacctcgtccttcatggggacgcgcctcctggaggcccattccggggcggggcgggtgcaggcccggttcgggtttggcaagaagaaagccgccgccccgaagaaagtttccagggggtcgggctctagctccgataggcccctgtggtatccgggcgccaaggcgcccgagtacctggatgggagccttgtcggagactacgggttcgacccatttgggctagggaagcccgccgagtacctgcagttcgagttggactcgctggaccacaaccttgcgaagaacgtggctggggacatcattgggaccaggaccgagctcgcggacgtgaagtccacgccgttccagccctacagcgaggtgttcgggct

SEQ ID NO: 25954 - DNA, 262 bp, Glycine max
  unsure at all n locations
  Clone ID: LIB3108-011-Q1-K1-H7
tggaaaaaagggccgacgacgcgaacgaacacgcaccaacaagcccaagaagcattagcccaaagggccaccgggacaacagcgcccaccacaaccgacaaggggacccgccnaccagaggcccaccacggggacgaaagggggcaagcccagnacaaggagcgcaagaagaaaaccgcccccccgaacaaacaaaacaccgggacggacaccgaacgacgacaggccccagagacaaacaggcgccaaggggcccaaacac

SEQ ID NO: 25955 - DNA, 317 bp, Glycine max
  Clone ID: LIB3108-011-Q1-K1-H8
aagaacaagtagttgagaactaagaaggagaagcaaatggcttcctcaatgagctcttccggagctgttaccactgtcaaccgtgccggtgccggcatggttgctccattcactggcctcaagtccatggctggctttcccaccagaaagaccaaccatgaccttaccttcattggttggcaccgggggaaaagtccaatgcatgaaggtgtggccaccagttggcaagaaaaagttggagactctttcttacctgccaaaccttgatgatgcacaattggcaaaggaagtagaataccttcttaggaagggatgga

SEQ ID NO: 25956 - DNA, 118 bp, Glycine max
  Clone ID: LIB3108-011-Q1-K1-H9
tcttcatgtcactcttgacaggactctaatcttttattcatatcttaaaatcatggtacccggtcaactccctaacttctcaaacccaataaccatcatcctatcttacaatataccc

SEQ ID NO: 25957 - DNA, 433 bp, Glycine max
  Clone ID: LIB3108-012-Q1-K1-A1
cccacgcgtccgcaacagagagctcgggcgtggcaacttctgctgccgagacgccagagagtgtgaagactattgaagaagcttgggacaaagttgaagacaaatatgcagtgagttcacttgccgtagccggtgtggttgcattggttggctcagctggcatgatctcagcaattgataggcttcctttaattcctggggttcttgaggtcgtaggcattggctacagtgggtggtttgcttacaagaacctatttttcaagcctgacagggaagcttttctacgaaaggtaaaggaaacatatagcgaaatacttggaagcagctaaaacagtgaggaattgctgcttagattctgttcacacaaaagagatctctgtcttgcagcattttgttaaagatgcaaacctcgcttcattttggcgcaataagc

SEQ ID NO: 25958 - DNA, 354 bp, Glycine max
  Clone ID: LIB3108-012-Q1-K1-A10
acaaaacagagctaagagagagtgtgtgaaatgtcgaaacaaccgacagaacatccatggcgcgactcagggtcctcagcctcttccccccgttgcagatgatcgtgagcagctccgaacagccttctcaggttggggaactaacgacgagctgattgtatcgatcttggctcatatgaatgctgctcacaggaagcttatcagagaaacttatgcccagacctatggagaagatctcctcaaggccttggacaaagaactcacgagtgattttgataggctggttcatctttggacacttgattctgctgaacgtgatgcattattggcaaacgaggcgactaaaaaatggac

SEQ ID NO: 25959 - DNA, 450 bp, Glycine max
  Clone ID: LIB3108-012-Q1-K1-A11
cccacgcgtccgaaaaaaaaaaataaaaaaaaaaaaaaaaaaaaaaaaaaaaaaagaaaaaaggaaaaaggaatctatataaatataaaaataatatatataaggtacaaatagtaaatcgaggtacccattttatgataaactttccttccatttttgttcctctagtaggcctagtatttccggcaattgcaatggcttctttatttctttatgttcaaaaaaacaagattttttagatccagaaaacaaagtaaaattctggggtttttaattccccaattataatactaaattcaaaaaaaggagagtaatgagtataatctttcgctcaaacgatgtactgatatattctatggcggaggttcgaagaacaagcaatttattttaggccgttttcactttgttaggttcattggggtaattgttcgttgcaatttccagttatct

SEQ ID NO: 25960 - DNA, 392 bp, Glycine max
  Clone ID: LIB3108-012-Q1-K1-A12
cccacgcgtccgcccacgcgtccggaagaagatggcacaaacgctggcaatgcccgtggcacgttcgctagctatcatctccaattctcgcctctccaacacactctccgttcccgttctgaacaaaccaaaggttcaagggtcaagcatcaagtgcgttcgtgttggcggtgtggagattccgaacaacaagcgaatcgagtactcgctgcagtacattcatggaattggaatgaccatagcgaaacagattctctgtgatatccaaatggataataaaatcacgaaggaactcactgaggaggagctaatcacactcagggacgaggtctccaaatacatgattgaatgcgacctgagacggttcaatggcggtaatataaagagactga

SEQ ID NO: 25961 - DNA, 383 bp, Glycine max
  Clone ID: LIB3108-012-Q1-K1-A2
cccacgcgtccgctccgttcctgcatgcgtcttccccgtttgtcctaccttctccgccacgggcctcgtctccacgccatggcgcgtgccgtcacgtgcgccactcagccctctcatttccacgcctcgctcggcatcgccacctctcgccaccccgtctctctgccctccaaatcctcgcttttctgccgcacctttcacgccctcgcgcggtgccagagcgaagagatgacgcggcggcgcgtggctggagtccgcgccgggcagagggagtacaggaaggcgaggagaagagcgccgcccaagagcaaaggcaaggagctgcaactctgtgtcgacatttgcatcgaagaggatttgcctgacgatcctgaattttgagc

SEQ ID NO: 25962 - DNA, 373 bp, Glycine max
  Clone ID: LIB3108-012-Q1-K1-A4
gcgcccacgcgtccgctgattccatagtgaagaaaaatggcttcaatcatcgcccgcaccccaagtacatgggtcactcgcacaggtcatgtgctcaaactacctgttgtggcctcatactataccgctcttggattgccatcaatggccaaggctgtgatagtgatgtgctccatgtaggaaaagccttcaagcagctcatacctaatgatgggggcatacttgttagcagctacagctttcgcaaccatgtcaagcccagcagccatggctttggttgattagagactcatcactgaatgaactgagcattcctttgggcttatcaacaacctttttggctggatcctgtttggagtctttggtctcatat

SEQ ID NO: 25963 - DNA, 291 bp, Glycine max
  Clone ID: LIB3108-012-Q1-K1-A5
acgcacaaacagaggaccgtgcatgcggaaagagttatctttcaagctcaaaatggatatatgggcctctataacgaagccgatcaaatgttgtacatacaacatggtctcttatgggactaattcatgcctgacaggccgatagaaactcctatcctctttaccgtgctgcaaagttgctcattaattctaagttcgaaataggtgattggtcccaacaggaaatcacgggagtattcatgaaaaattgcatattgcattatccaatgtacagaaatatttatccaatgt

SEQ ID NO: 25964 - DNA, 411 bp, Glycine max
  unsure at all n locations
  Clone ID: LIB3108-012-Q1-K1-A8
tgcagtcactgcttgagtcgttatatgtaatcctccaagtgcctaggttgcgtgatactcgttcntgggcgttcctcgggagttccaggtggtgaatcttcattcctgcttctgctgctaacactgctaacatatgatgccaagcttctatttgcctaccgaagtagtcactttggttgttactatctccatcgaggagtgaaaaaataaagagaagattgtaaactgcttgatacagccatacttgacttcattatcaagcaaatttcaaaagactcctaaacaacacagaacaacgaactgcttcagtgattgctgttcaaagctcactccattgatgatatccatgtctaaagtgattcactttgtagtagattaattatttatgtaattatgtgtatgaaagttaat

SEQ ID NO: 25965 - DNA, 400 bp, Glycine max
  Clone ID: LIB3108-012-Q1-K1-A9
cacaattgagctagttgcaagtcaccaccatggcacttgttcaaccctttgcttctctttcgatctcttttcgcgatgctcgtgttttcactgcaccaaaatgctctcccaccactcactttcctcatcggaatttggttccaactcgagcatcattcatcgctggttccccactgttgattcgaagaaatcatggaaggaatggtgcatgcaaagcaatgcctgtttcaataagatgtgagcaaagtacccaggaagggaacagtttagatgtgtggctaggccggctagccatggttgcgtttgcagtagccatcactgttgaaattgctaccgggaagggactcctagagaactttggactcacatgcacagtgtctacagtcgcccttgcagtcac

SEQ ID NO: 25966 - DNA, 408 bp, Glycine max
  Clone ID: LIB3108-012-Q1-K1-B1
accacgcgtccgaccacgcgtccgcccacgcgtccgcgacggtttcgtgtaccgtgagcacgggaggtcggcatgatactacgatggacgctactggaccatgtggaagctgcctatgtttggttgcactgatgcttctcaggtgttgaaggagcttcaagaggctaagactgcataccccaacggcttcatccgtatcatcggattcgacaacgttcgccaagtgcagtgcatcagcttcatcgcctacaagcccccatgcttctaagtgtgaaaaatttgcaaagcatttgtagcctgcaccccactttggttgtttgtacttaaactacattcccatttgattttgctttttgagatgtcatcatccctgtatttttgggttctggtttcggacttcaatggaaa

SEQ ID NO: 25967 - DNA, 85 bp, Glycine max
  Clone ID: LIB3108-012-Q1-K1-B10
ctaaatctttacaaggctcgacactactgattgacatactgctctatagaatacattcacgagtcatgccttgactcactctctc

SEQ ID NO: 25968 - DNA, 361 bp, Glycine max
  Clone ID: LIB3108-012-Q1-K1-B11
aacacgcgtcattactgttaagccatactacatttatactgcattgacaatctcgtgtgctggtaatgagggcttgatgaacaatgctaccgcagccactgtgacagactgactactatacattcacatggcttatgcttttaaccacacattccacaatgaaccgagaagatatgtatatagctcagcaagttattagatatatgcataaaagcttatcatacatctgctattctgcatgtgaactaaccagaaggaatgtgcatctgttaaaatatgtcatcactttatggccacagcttacagctcatgacgctattggttccaataattgcttataatattaattgttgatatctta

SEQ ID NO: 25969 - DNA, 147 bp, Glycine max
  Clone ID: LIB3108-012-Q1-K1-B12
cacaaacatagaatcaaaaaacccttagccaacacaaccatcatggccacctctgctattcagcgatcagcattcactggtcaaactgctctgaagcagctcaatgagttcgtccgcaagaccagtggctccggcaaaggtcgcact

SEQ ID NO: 25970 - DNA, 363 bp, Glycine max
  Clone ID: LIB3108-012-Q1-K1-B2
agaacaagtagttgagaactaataaggagaagcaaatggcttcctcaatgatctcttcccgagctgttgccactgtcaaccgtgccggtgccggcatggttgctccattcactggcctcaagtccatggctggcttccccaccaggaagaccaacaatgacattacctccattgctagcaacggtggaagagtgcaatgcatgcaggtgtggccaccagttggcaagaagaagtttgagactctttcctacctgccagaccttgatgatgcacaattggcaaaggaagtagaataccttcttaggaagggatggattccttgcttggaattcgagttggagcacggtttcgtgtaccgtgagc

SEQ ID NO: 25971 - DNA, 58 bp, Glycine max
  Clone ID: LIB3108-012-Q1-K1-B3
actacactaccagtactacaccataatgatcacacatctctacctattacatatatat

SEQ ID NO: 25972 - DNA, 356 bp, Glycine max
  Clone ID: LIB3108-012-Q1-K1-B4
ataacacgtacccacaaactaagcaagcggatcaaaattgtaacttctgcttctatgttctgcctgttggatatcgcttgtcagccattgctgatactcctgataatgctactggactcatgttcactccatcctatattgatatcaagaccaacaatgacattaccttcattgctatcaacactcgtagagtgcaatacatgcatgtgtatccactcattcacaaaaagaaattcgagactcttttctaccttccacaccttaattatacacaatttgtatacgaattataataccttcttacgaacttattgatttcttgctcaaaaattttacttggaacacggtttcttata

SEQ ID NO: 25973 - DNA, 139 bp, Glycine max
  Clone ID: LIB3108-012-Q1-K1-B5
cccacgcgtccgcttcggttcctaatgcgtaacagacacatgtgattcgcaggtgtatagtacatctgacttgtgagcaatagattcttcaaattcggctgcattgggtcggctcaacgatcaagatctgtcgaccatc

SEQ ID NO: 25974 - DNA, 463 bp, Glycine max
  unsure at all n locations
  Clone ID: LIB3108-012-Q1-K1-B6
atcgaatcacaaggataggaatggaatcagaagaagtgatgagcgaggtgcaccggggttggccagccggtttctccggaccctatatttcccttttctctttctctacgaatctccaattcgaccaagatggtgaccttcttctccctcgacgacgcaccgctatgttcgaagcaaacgcacaacattcatttagtgtcagaatccagcataacatcacttcgtcaattccaaatgttggtctccaggtttggagagctgaactattattatctgattatatattgcataaagcatcttcttcctctcaacttcatcaagttattgcattagaacttggcgctggaactggcttggtgggtttattacttgcacgtgttgcaaatgcagtgttcctaacagaccatgggactgaaatacttgacaactgtgcanagaacgttcagcttaattttggattatt

SEQ ID NO: 25975 - DNA, 308 bp, Glycine max
  Clone ID: LIB3108-012-Q1-K1-B7
taacactcttcccaataacaacactatacctttctctaccaaatcaaacaacgcggatattggacaactaacatacgctcaacagactattctaattcaactcaaatatactcaacctacaatatcaacatctctatctacattcatatttacatactacccaccttcattattgctccatacacacttccttacattcccttacccatccaagtacttccttacattttcacatcatactccatctttcttgaccctaaaattttatctattctactcataatacacatcttcaattattaacttat

SEQ ID NO: 25976 - DNA, 461 bp, Glycine max
  unsure at all n locations
  Clone ID: LIB3108-012-Q1-K1-B8
cccacgcgtccgcccacgcgtccggtgacatgtaacaccaaactcactcaaacctaccttgggttttctccttctgtttcttctcagtttcattctcttgctcatggacatggatgtttgccgaaatatatcagtttcttcaagtgagtgtcagcaagagcttcccacccttgatgaccttttctgtcatcagaacacggaagtggattttggcatcgaatggttatcagtgtttgtggaagactgtttctctagtaggccaagttgcctcttgccaccctctggtggtggtgttcaaaccacaagcactagcaccaagccttcttcaggcacaataatgccaagaccccaacanagtcatcactgtcctttgcagaattntgctgtgccagggaaagcaaggagcaagaaaaagagactttcagcccctagaacaacaaacacaccctaagcacatggtc

SEQ ID NO: 25977 - DNA, 421 bp, Glycine max
  unsure at all n locations
  Clone ID: LIB3108-012-Q1-K1-B9
ggaagaagagaagattttcatcagttgagttgagagaaggaaagggaaaatgggtaaggatctgagcgaggaacaagtgtcttccatgaaggaagccttctctctattcgacactgacggagacggtcggatcgctccgtcggagctggggatcctgatgaggtctctgggaggtaacccgacgcaggcccaactcaaagccatcgtggctgaagagaacctcacggcccccttcgacttcccccgattcctcgatctaatggccaaacacattaaacccgaacccttcgatcgccaactccgcgacgccttcaaggtcctcgacaaggactccaccggcttcgtcgccgtcttcgagctccgncacatcctcaccaacatcggcgagaagctcgagccctccgagttcgacgagtggatc

SEQ ID NO: 25978 - DNA, 275 bp, Glycine max
  Clone ID: LIB3108-012-Q1-K1-C1
cccacgcgtccgaaaaaaaaaataaaaaataaaaaaaatttaaaaaaaaaaaaaataaaataggagaaaatagaaaaaaaaaaaataaaaaaaaaaaaaaaaaaaaaaaaaaaaaaaaaaaaaaaaaaaaaataaaataaattaaaaaaaaaaaaaaattaaaaaaaaaaaaaattatagggctaattttttataaaatattattatctttacacttcattataatttaaaatttttttttttatactcaataaacaaattcaattgcacctttt

SEQ ID NO: 25979 - DNA, 155 bp, Glycine max
  Clone ID: LIB3108-012-Q1-K1-C11
taaaaaacacacttaacattcacatttaaagatatatacaaatttacacaaaaaaacgttattatgcaaattggaaaaaaggtcatcacatataaactactcttcttgtccttttctcttctctccttaatgccttattactctttttttcgact

SEQ ID NO: 25980 - DNA, 203 bp, Glycine max
  unsure at all n locations
  Clone ID: LIB3108-012-Q1-K1-C12
acgcccacgcgtncgtccacgcgtacggtacacattacatttatttacattgttaccttcataccgtgattagtccattgatgtcgttgtcatcactagtgctactgtgcttggctttttgtctcattctgtttagacttattactcttttgaagcacttggttgagacttgataggtggatgatgctctttctgttagtgat

SEQ ID NO: 25981 - DNA, 463 bp, Glycine max
  Clone ID: LIB3108-012-Q1-K1-C2
cccacgcgtccgggccaccacagcagctctatccggaaccatggtgagcacctccttcatggtgaatcggcctatgacgaccaagagcctaaagacattccccaacgctctttttggtctgaaaggtggacgacgtggtcgtgtaacttgcatggcctcgtacaaggtgaagctcataaccccataaggagaagtggagtttgaatgcccagatgatgttttcattgttgacaaggctgaagaagaacgcattgaacttccctactcgtgcatggctggttcttgcgtttcatgtgttgggaaaattgtgaaaggtgacgtgtaccaatcatatggtagcttccttgatgatgaacatatagaatgtggatgggttcttacctgtgttgctctacctaagtcagacgttgtcatttagacacacaacgattgatagatccaatgatcgatgtatatcataatg

SEQ ID NO: 25982 - DNA, 233 bp, Glycine max
  unsure at all n locations
  Clone ID: LIB3108-012-Q1-K1-C3
cccacgcgtccgcccacgcgtncgcccacgcttccgcccacgcgtccgcccacgcgtccggggactcgtgggcttgcttgccatagataacatctgcatcagacaatagacaaacatgtattccttaacatgcacaccactttcttcttcttcttattctcatcacaccactctaaagccaaacctcaaccctcttctggtgcagatgcaacttctaggccatgttctctacc

SEQ ID NO: 25983 - DNA, 332 bp, Glycine max
  Clone ID: LIB3108-012-Q1-K1-C4
cccacgcgtccggatcctattgtgttggccttcgggatcggagtaatgattaacaggagtgcagtctttcacgggcaaggaacgggcacttgatttagttccaacgaagttgcacgagcgatctcccatattccttggtagctatgatgatgttgaggaaatcaaagctctttatgctgctgctgagggtgaacaagaatgaaattggaaaggtttcttgtatctttcgctacttacaagcgcttgttttctaattgttactagcaggtgcttataagacaactagttatctggtcatgtatatgttaataaaattggttgatgtgcctgtc

SEQ ID NO: 25984 - DNA, 352 bp, Glycine max
  Clone ID: LIB3108-012-Q1-K1-C5
ctgaagattgccttccagagtttaacaatcttatcattagaacgcaatcatctggtatgagtctatctgcattatgatacatgtttatcgggtttcttaactaaaaaaaaaaaaaaaaaaaaaaaaccaaaaaaataaataataagtaaaaaaaaaataaatttttataaaatttaaaaaataacaatattatattttcatatataacttctatatataaataaaaaaaaggccgaccactttaaaatacccaaactttcaaaccctctttatcaaacttaaaatttttttatttgtgaccccaaaatcaaattaattgccctcttttaaaaatcctgttatttgaaaaacc

SEQ ID NO: 25985 - DNA, 455 bp, Glycine max
  Clone ID: LIB3108-012-Q1-K1-C7
gcgaggccgtgtggttcaaggctggttcacagatcttctcggagggaggactggactactggggcaacccaaacctgatccatgctcaaagcatccttgccatctgggctgttcaggttgtgctcatgggttttgttgaaggttacagagttggtggaggaccccttggtgaaggacttgaccctatctaccctggtggtgcatttgaccctcttggtctggctgatgaccctgatgcattcgctgagttgaaggtcaaggaactcaagaacggtcgcttggctatgttctccatgtttggtttctttgttcaggccattgtcactggcaagggccctattcagaacctttacgaccatgttgctgatcctgttgccaacaatgctttggcttatgccactaactttgtccctggacaatgaacatttgaattcaatgcaatcttctgctcccat

SEQ ID NO: 25986 - DNA, 465 bp, Glycine max
  Clone ID: LIB3108-012-Q1-K1-C8
cccacgcgtccgtttcgttcaattatttctccccttttcttaaaatcgaattgggtcgaatccttcacaagtcaagagttagcacacccaaaagaacgcgtttcagctggccacactgttgatttggctgacacatagtaaagaatcatattaatgtcgtcaagaacattgaggagaagactctatcatggggatgttgatggcaaaaggcaggagcatttggagacttcgggattggattctttgagtgagcccttgctggcagacgatgattatattgagaataagaagatatgtactcttgaagatctatgggatgatgagaagaagaaggcgcagtttcattggacattcatattctcaaaccttattgtgcaatgggctcagtggttagcaaatatggtattatgatctggatctattcttgggcgtcttatatcttttccttctgcttgactaaatatt

SEQ ID NO: 25987 - DNA, 342 bp, Glycine max
  Clone ID: LIB3108-012-Q1-K1-C9
taaaaaaaaaaaaaaaaaaaaaaaaaaaaaaaaaaaaaaaaaaaaaaaaaaaaaaaaaaaaaaataaaaaaaaaaaaaaaaaaaataaaaaaaaaaataatttatttccattttttaattacacatttttaaaactaattattttttatattatttttcttaaattattttaacttaaacatatttttacaaactttattattctgaaattcttaccatttacttatctttttattctttttttctaatatttttttttacaatttttttattttttaaaattttctaatttatcatcattatcaacattttttaacctttaatgcataatgtcattcactt

SEQ ID NO: 25988 - DNA, 342 bp, Glycine max
  Clone ID: LIB3108-012-Q1-K1-D1
gttgcgatatctccatccaaattccacaatcggtttctgaaaatcgaagcaacttcactaggtagttagcgtccaattccatagacacagatccacagtttttattttcccgagaaagtgtggggaagcaatggaaaagatgaacaaagccttcgagaaagtgaagattatggtgggaatggatgtcgaagacgaagagcaacaagctgcggcattggacaacagcaactccttcgccttcatggacgacttcaaccgcaactgcaccttgtccaccacacagtctatgcttgttttcttcaaaccaatcaagtttgcgatagcattcactcttggtaattt

SEQ ID NO: 25989 - DNA, 383 bp, Glycine max
  unsure at all n locations
  Clone ID: LIB3108-012-Q1-K1-D12
ggctcgtacggaagaagcaaatggctaactcaatgatctgtttcacagctgttaccactgtcaaccgtgccggggccggcgtgattgctccattcactggcctcaagtccatggctggcttccccaccagaaagaccaacaatgacattacctccattgctagcaacggtggaagagtgcaatgcatgcaggtgtggccaccagttggcaagaagaagtttgagactctttcctacctgctcagaccttgatgatgcacacttggactatgaagtagaataccttcttacgaagggatggattccttgcttgaaattcgacttggatcacggcttcgcgtaccgtgagcacaacangttaccaagatactacgatggacgcta

SEQ ID NO: 25990 - DNA, 466 bp, Glycine max
  Clone ID: LIB3108-012-Q1-K1-D2
gccgaggataaaaatgcagaacttgaggctgtttcagagggaattccacaagaagatgttggaaatacgcttctctatgtcccagtagagtctgatgctcagattttggataggactgagtctgaagaagcttctgttgcgaacgtggaagctgatgaattagcccagaataataaggaggccgagaataatgatgatgttcatcaaaacagtaatggcaatgttgagatggctttggaggtgaagcctgaagcctgtggaatggctgatagtaaagcatgtgataatggtgaccctgtgcctgcaagtcataatgagcttgctacgcacctacctgctcctgcagatacaaacactgaaattatgaatgtattagagttgagaataacgctgacggaaagcaagctactgaacctgcagataatgggaattcaaattcaaagtacatgcttttcttggatgctga

SEQ ID NO: 25991 - DNA, 447 bp, Glycine max
  Clone ID: LIB3108-012-Q1-K1-D3
gagagggtgtcagtgatgcccttttgcttgatccgtcatttgtcaagataagattaagagggtacatatcttggtggtgatttgatacacaagaagaatgttgggtcgggctgcattttcccgaactgggagtttcaggcctgagaatttaggtcagaatgccatggccatgattgggaacgtttgcttctcattttttgttattggggttttggttttcaccattatggctgccacttatgaacctgaggatcccttatttcacccttcaaccaagatcaccacattcctcacttccaaatccaatgcaactttcaagtctgataacagtgttgtgagaactggggagggattcatggctgctaatgaaactgcgtttggctccattatcaactcaacttgatgtgacaacttggctagtgcggaaattattgatgccggcgatgc

SEQ ID NO: 25992 - DNA, 468 bp, Glycine max
  Clone ID: LIB3108-012-Q1-K1-D4
cccacgcgtccgcccacgcgtccggttttcttaaaatttcttccttgccactgccagtgtgtgaccagcatggccaccgtcacaacccaagcctccgccgcgattttccggccatgtgcctcgaaatcgaggtttctgaccggctcttccggtaaactcaaccgggaagtgactatgaggccaatggggtgccctccttctgcctctttcaaggttgaagccaagaagggagagtggttacctggcttggcctccccaacttacctcaatggcactcttcctggtgacaatggatttgaccctctgggactagctgaggacccagagaacttgaggtggtacgttcaagccgagcttgtgaatggaccgtgggccatgttgggtgttgcaggaatgctacttcctgaggttttcaccaagattggaatcatcaatgcccctcaatggtatgatgctgggaaatcggag

SEQ ID NO: 25993 - DNA, 409 bp, Glycine max
  unsure at all n locations
  Clone ID: LIB3108-012-Q1-K1-D5
cactcataacacaaagcacaaagcaaagctcatccttgagttaaaaaatggcagcagcttcttccatggctctctcatccccatccttggctggcaaggccgtgaagctgggcccatcagccccagaagtgggaagggtgagcatgaggaagaccgtcaccaagcaggtctcctcaggaagcccatggtacggcccagaccgagtcaagtacttgggcccattctctggcgagcccccgtcctacctaaccggtgagttcccaggcgactacggctgggacactgctgggctttccgcagacccagaaaccttcgccaagaaccgtgaactcgaaatgatccactccaggtgggccatgctncgagccctgggctgcggcttcccggagttgcttgtccgcaaccgggt

SEQ ID NO: 25994 - DNA, 460 bp, Glycine max
  unsure at all n locations
  Clone ID: LIB3108-012-Q1-K1-D6
cccacgcgtccgcccacgcgtccgattaacctttctcattccccatctcctcaccttattgagccactgctaattgctagggttccgaaatggacgctggcggaaagatcaagaagggcgccggaggaagaaagggcggcggccctaagaagaagccggtttcaaggtccgtcaaggccggtctccaattccccgtcggaagaattggccgttatttgaagaaaggaaggtacgcccagcgtgtcggtaccggtgctcccgtttacttggccgcagttctcgagtacctagctgctgaggtgcttgagttggctgggaatgctgcacgtgacaacaagaagaacaggattattccgagacatgtgctattggctgtgaggaacgatgaggagttggggaaattgcttgctggtgtcaccattgcacatggtggtgtgcttncaaacattaaccctgtttt

SEQ ID NO: 25995 - DNA, 315 bp, Glycine max
  Clone ID: LIB3108-012-Q1-K1-D7
attaacctgacctctacgcgagtattccaaatcacggattccctagcagcatagactactggtgcttgcctaagcgtatcagaaatgctagcaaacctcatcaacctaacaggaaccacaaggccagatccatctgcctctacccctgcctgattcaagactgaagctcctttatacaaaaacaatacttcacctccaaaagaatctgccgctactgctcctgccaatgataagcttaccaagtcgtatcctcctgacacaatgatcttctcgcctgactatctcttggacctatctgagatcccatactacttg

SEQ ID NO: 25996 - DNA, 301 bp, Glycine max
  Clone ID: LIB3108-012-Q1-K1-D9
gcgaagctgccaagcgtaagagcagaagcaggcgctctcaatcgagatttcaaccgacaaacaggcccgaatgttgcaagcacccaaaaaggaaaaggatgatgataactggaatcttccagaagtagacgctccatatatttcaaccgcatgatccactcacattctgtacggttcttcacttgggagaggctttttatgcatgtgagttctgttatgtaaaatcaattccttggacgcagttagtgcaatgttcaattcacatttcattttaagttatgctatttattcattgtccatc

SEQ ID NO: 25997 - DNA, 248 bp, Glycine max
  Clone ID: LIB3108-012-Q1-K1-E1
cccacacattcacccacgcgtccgaccacgcttcctaataaaataacaaaaataaaaaaagggtacatacaataaaagaaataaactacactaaacaactaataattccactctctattatcaatcatctatgactattacatacctataaacatgctaaacataccatttttcctcactaataacttcatgctgcttactacatttcatctttctcaaacatgcacacaccttaatctccatcaatt

SEQ ID NO: 25998 - DNA, 391 bp, Glycine max
  Clone ID: LIB3108-012-Q1-K1-E10
gtgaggcgtgtatacaattactatagccacatatatacacacagtagtagttaaagtcttaaagggtagaataagatcagtgatggagagaaagttcatttcagtagttgttttgggagtatgtttggtgctgggaatgtcccaatatgttgatgcaaggaacttggagaaaaaatcaaaggaagaggtgaataagccagaatcgtgcttagatggacggtccattggtggtgttgtgggcattggcggcattggcggtgctggtggacgtggtggtggtttacgaggtggctatggatgatgagctggtggagatagtggattaggtgctggatgtagatctgggcaacattttgagttcaatgtggccagacaaaaaagcctaaagttc

SEQ ID NO: 25999 - DNA, 233 bp, Glycine max
  Clone ID: LIB3108-012-Q1-K1-E12
gcgttaaggtttatcctacagtggttaagctctcgaggcatggcccacaatgtgtgagacccaggtttaacggcaaaaacttatcatcccaccttgtgtccctcaataaccttttgcacgtcctccacttcttgcaacttcactacaccatagtgcttgtccccttagtatagcacatactttaccagcttgtttggaccaatcccttcttccacgtgtatcttctccttaat

SEQ ID NO: 26000 - DNA, 234 bp, Glycine max
  Clone ID: LIB3108-012-Q1-K1-E2
aaaaaacataaaaaaaaacaaaaaaaaagaaaaaaaaaataaaaaaaaaaaaaaaaaaaaaagaaacatttaaaaatatcaaactaacttcaataatcatacaacaatttttaatctattttatatttaactaaatttatttcactcttcctttttttttcaacaatttctatttcataatctttttacattacctaattaattctttttattatacatatttttttcaccatt

SEQ ID NO: 26001 - DNA, 435 bp, Glycine max
  unsure at all n locations
  Clone ID: LIB3108-012-Q1-K1-E3
taaagacattgatgttagggcacactcttctaccaccttcaaatggtaatagctcaaaatggtgtcccgtaacatgaatgtctttatcggtggttagaaacctttctggtttgaactctaatggatttgaccaaacactaacatctgtgtggatcttccaaagatttgtaattagacgagtcccttctttgacattgtagccacctaaagtgcaatcctctatgaattcacgaggtgctgaaagaggacctgcacggtataatcttaaagtttctttgaccacagcttgaatgcatgttaacttacttatatcatactcagntatacatctttctttaccaacttgaaaggcaagttctgctattactgtttccaatacaagatgatttctcaatttcacacatactggccattgtagaatagcaataattgttt

SEQ ID NO: 26002 - DNA, 428 bp, Glycine max
  Clone ID: LIB3108-012-Q1-K1-E4
ctctctctctctttcctcccttccttccgtctcaacttcattttcctttcaaatagtaacggtagaggaaaatgcagcttgcaagagcacttggcttgcaaccaagacaaattgctatatggttccagaatagaagggccaggtggaagaccaagcagttggagaaagactatgatgttctcaaaagacagtatgaagctgtcaagtcagataatgatgcacttcaagctcagaaccaaaaacttcaggctgagatattggcactgaaaagtagagagccaacagaatccataaaccttaacaaagaaacagaaggatcctgcagcaatagaagtgagaacagctcagacatcaagttggatatctcaaggacaccagctattgacagtcctcattctacacatcagcaacagccaagcagacccttc

SEQ ID NO: 26003 - DNA, 441 bp, Glycine max
  Clone ID: LIB3108-012-Q1-K1-E5
gcctcttaggccacagactaagttcagatatatcacttgaacttgactatttggaccttcgttccagactctttgagcattaaccatgtctgtcccattatccacattcaccccatgaaacaaaaaccttcgaagagggatcttctctcagacttgacttgtgacagccaccttaagattgacatgttcatcaacagacagtccaacttgcctcttcatgaaatgtaacgaggaagttactatcttaaaatgttattgcctagcgcttacgaggaggcacattggtggagctcacaatatattcggaaacctcagcctgatcacggtgactcatagcgatggctctcacagcttcatgctgacacgtgccgtgctggtgccatcctatggagatgttcttacagtgatgcagcaccagacacgactcatgttcaagacact

SEQ ID NO: 26004 - DNA, 211 bp, Glycine max
  Clone ID: LIB3108-012-Q1-K1-E6
ctcattctgtcttatgcttatgttaatagattttgtaatggaagatatttccagtttattggattaatgtatgatcatagcaatctttacttttcaaaaaaaaaaaagaaaaaaaaaaacaaaaaaaaaaaaaaaaaaaaaaaaaaaaaaaaaaaaacaaaattcaaaaatacttctaaaaatgcacatcaattattcacaaaaagaataa

SEQ ID NO: 26005 - DNA, 457 bp, Glycine max
  Clone ID: LIB3108-012-Q1-K1-E8
cccacgcgtccggaactccatagccttgaaatccttcgtcggcctccgccaggcctcgccggaggccccgcattgcgccgcccagccaagacccgccactccccaccgcaaattccgcgtcttggctggaaaattcagccccaagctcaatggccggaacctccgcgtggcggtggtgggaggcggtccggctggcggggccgccgcggagacgctggcgaagggcggcgtggagacgttcctgatcgagcgaaagatggacaactgcaagccgtgcggtggcgccatcccgctgtgcatggtgggggagttcgacctgccgctggacatcatcgaccggcgcgtgacgaagatgaagatgatatcgccgtcgaacgtggcggtggacatcgggaggacgctgaaaccgcacgagtacatcggcatggtgcggcgcgaggtgctggacgcttacctc

SEQ ID NO: 26006 - DNA, 472 bp, Glycine max
  unsure at all n locations
  Clone ID: LIB3108-012-Q1-K1-E9
gcattaaccccaaaaacctcaaactcagtcctaaacgcttctttcgcaaaaaggggcgatctgtaatctcacgctccgacccaccttcattcggatccggatcttcctccgacgactccaccacaaatcacaagccttccgctggtaaccaaactccgaccagcgtcctcccgggcgtctccggagactggtccgacgtcgccgccgtcgacgtgcggngggacctcgcccaggccttccgcctcatcgaccgcgacaacgacggcgtcgtcacgcgccaggacctctaggccctcctcacgtgcctcggcgcgtcgccgtgccccgacgacgtggcggtcatgctcggcgaggtcgactgcgacggcatcaccgtagaaaggctcatgatctacgtcgcgtcgggtctgaaacccgtttcggatccggacgagctcaatgaggcgttcgatgtgttcgacacggatcgcga

SEQ ID NO: 26007 - DNA, 374 bp, Glycine max
  Clone ID: LIB3108-012-Q1-K1-F1
cccacgcgtccgcatgcagtagcagtaggagcacttgctgttccatctccaactcccatcggttttttgaattccactgctccagtggaattggaacatggtcatggtcatggggtgaagctcattcaagatgggtataagtggcgcatcgttttggcttacgatggaacccaatacgcaggctggcaatatcaggagtctccccctactgtacaatgcaccgtggagaaagctttaactcaggcaacaaagcttcaaaggaaggatctctgtttggttggtgcaagcaggaccgatgcaggagtccatgcttgggttcaggttgctcatttttttacaccctttaactatgacaacttggaacaacttcatgc

SEQ ID NO: 26008 - DNA, 475 bp, Glycine max
  Clone ID: LIB3108-012-Q1-K1-F11
ccggcattgttccatcctcatcgccctgccaactcttgtggctgccatcccgaggagcatttgatcggcttttgcccgtcatgtctgtatgagcgcttaaccattcttaagcatgacggttcatcttccattgacacgcgccctattacctcccttacttctcccgaagctaattgtcaacccttcaccacaacgcttgatggtaaccaccttcccaagtcttcctccatcaccttcaaccctaagctttgcagcacgaaatcttttcctgctttaaaaaatgaagggctttcttgtgccttagagccacgacgaaaatcatgtgacgtcatcccctatagcccccttttttccatttctaacccagacgacaaacatgaaattcctataaaggaacccaaagttgaaacgtgcaacctcacttcgtcttccattatagaacttgaagctgatgtggaagcagaaaaaaccctaa

SEQ ID NO: 26009 - DNA, 502 bp, Glycine max
  unsure at all n locations
  Clone ID: LIB3108-012-Q1-K1-F12
aattcccgggaacaaaggaaaagccatttggatcctctcttctcttctttgatctccgttacccttttcgttttctcaacacagagagagagagagagtctttcggagttcgtttgcgtgtgttgtgtgatcagtcaccgatggcagcaccacctgcgagggcacgtgccgattacgattacctcatcaagcttcttcttattggcgatagcggtgtcggaaagagttntctgcttttgcgattttctgatggttccttcacagccatttttatcaccaccattggcatttattttaagatatgaaccattgaacttgatggcaaacgcattaagttacaaatctgggatactgctggtcaggagcgatttctaactattaccacagcttattaccgtggagccatgggcatattgcttggttatgatgttactgatgaagcatctttcaacaatattaggaattggattcgcaacattgaacaacatgcttctgacaatgt

SEQ ID NO: 26010 - DNA, 465 bp, Glycine max
  unsure at all n locations
  Clone ID: LIB3108-012-Q1-K1-F2
cccacgcgtccgagaacctttgtgactttgtccatttctcctctgccaaaaatcgtttcagaattgaacaagaaaagaaagaagcttctcttgccaacaagttattccactcccttgatgaatcttcttgttctcttcctgcctgtttgggtgctaagcatttcttttttcctcaccaattcttcatgctgcttcctccatttctctttctcaaaatgcacaagctgaatctccaggaattcaggaggttagaacagtgcaccaccagaatttgaataagagaattctaatcgcactagttgcttgttctgctcttcttgttggagtcttcctattcctgttatatgtctggttcggtcgacataaaaacttaagatgctccaaaagtaaaagccaagaaaccatcgaggctgcanaaggggaaactcatagctcggttaatgctaaacttaactactctaagat

SEQ ID NO: 26011 - DNA, 326 bp, Glycine max
  Clone ID: LIB3108-012-Q1-K1-F3
cacaaacacatacattgtagtatcacttttgtctcggattttgttcttttgagttatggcgggcttaagggttgcatgtgtgggtttgatgtgcatggctgtgatgagtgcaccaatgatggtgcaagccgtgtcatgcaatgatgtttctgtgaacctagcaccgtgcctatcttacctgatgcacggtggagatgttccagaatcgtgctgtagcggagtgaggaacattctgggttctgccagcaccacctttgacaaacaaaccgtgtgcaaatgtcttcagcaagctgctaataactatggcatcaacgactaatacgctc

SEQ ID NO: 26012 - DNA, 239 bp, Glycine max
  Clone ID: LIB3108-012-Q1-K1-F4
aaaaaacataaaaaaacaaaaaaaaaaaaaaataaaaaataataaaaaaaaaaaaaaaaaaagaaataaagaataacaaaaaaaaaaaaaaaattaaaaaaaaaaaaataaacaaaaaaataaaaaaaaaaaaaaaaaaaaaataaaaatataaaaatggctcactttttataaaacctcaataattatacatgatattttaaaacatttcaatttatataattgcacactaaaaattt

SEQ ID NO: 26013 - DNA, 426 bp, Glycine max
  Clone ID: LIB3108-012-Q1-K1-F5
cccacgcgtccgcccacgcgtccgagagaatggacgctattgattctgtgttcgatccgcgcagggaattcgccgaggacagcgtcaggctcgtcaagcgatgccacaagcccgatcgcaaagaattctccaaggttgctgtgcgtaccgcgatcggtttcgttgtgatgggattcgtgggttttttcgttaagctcatcttcattccaattaacaacatcatcgtcggatctggttaggatgaggggaatcgcaatcgcctcaggaattcaagttatcaaacaaaatgagaggcagaaagagttccaacttcaaatagatagctcaatgaaattaattgtagttctgctgtatttcatttttggtttacctttgtatcttcggaagcattacaattttatttgaaatgtaaaattttgtttttcc

SEQ ID NO: 26014 - DNA, 210 bp, Glycine max
  Clone ID: LIB3108-012-Q1-K1-F6
tcccactctttctaaaaaatataataaaatttttatataaaaaaaaactatttaagatatagcaaaaatataaaaaaaacttctattaaaaaactaattattcaaatccctataaataaatttcattatctctttctatctttatattcctctcaccatttcttttttcttatccttttttttaatctactttctttatttttatttttc

SEQ ID NO: 26015 - DNA, 437 bp, Glycine max
  Clone ID: LIB3108-012-Q1-K1-F7
atcatggccacctctgctattcagcaatcatcattcgcaggtcaaactgctctgaagcaggtcaatgagttggtgcgcaagaccggtggcgccggcaaaggtcgcaccaacatgcgccgtaccgtcaagagtgctcctcagagcatttggtatggccctgatcgtcccaagtacctgggtccattctcagagcagattccgtcatacctgaccggagaattccccggtgactacggatgggacactgctggactatcagctgacccggaaacctttgccaggaaccgggagctggaggtgattcacagcagatgggccatgcttggtgcacttggctgcacctttccagagatccttgagaagaatggtgtgaaatttcgcgaggccgtgtggttcaaggcttgttcacagatcttctcggaaggaggacttgacta

SEQ ID NO: 26016 - DNA, 306 bp, Glycine max
  Clone ID: LIB3108-012-Q1-K1-F8
tctacaacatctagtgctgggttaaacggttttgcatctcacttctcgtgtggaggaaaggggaaccatgccctgcttgctgctagcattgcagggaaagttggtgcttctgttattcctaaaagagttattgtggctcttgctgctgcaccaaatatgtcatggatccccactgtaaaaggtggtgggagtttcatagacccataatgtcttgataactctctaccaggttactatggttttgacccactatgactaggaattgaccctgcaatactgaaatgatatatacaatctaaactcatt

SEQ ID NO: 26017 - DNA, 405 bp, Glycine max
  Clone ID: LIB3108-012-Q1-K1-F9
cggacgcgtgggaaaggatccaaaggtcttagtctctgtaacatggatgaagatggattggaggcttgcaagccctcagtgactcagccaaacccagttgatccatcccctgattgctgcaaggctctggatggtgctgacttgaagtgcctttgctcttacaagaactcatcagagttgcctcttctaggaattgatctaactcttgctgcttcacttcctgcaaagtgcaatctcactcctccagataattgctagttagcttctctgagctatttctgcttttcgtttttgtgtgttataatcttttttctgcagatgacctattgagaaaaaagaaaattattgtactctaattttgatccctcttatttttgtggtacaatataatgtccttaatttcct

SEQ ID NO: 26018 - DNA, 449 bp, Glycine max
  unsure at all n locations
  Clone ID: LIB3108-012-Q1-K1-G1
cgaacacactctcacataactctctctgtctctctctctctgagtccttcttcttcttcgtgcanccaacatgagctcaatcgttcagggtttctccaagtcactggccatgaccattctctctgagatcggtgacaaaacgttttttgcagctgcgatactggctatgcgacaccctagacgcctagtcttatcaggttgcttatcggctttgattgtgatgaccattctctctgctcttgttggctgggcagctccaaatctgatctctcgcacatggactcatcacattacaacatttttattcttgggatttggactttggtccttgaaagatgctatatttgaacaaagggatgcggaagaattggctgaagttgaagctaaatntggataagattggaaggctagcaatggagctacaaaaaatagcaataaggatgatgatg

SEQ ID NO: 26019 - DNA, 354 bp, Glycine max
  unsure at all n locations
  Clone ID: LIB3108-012-Q1-K1-G11
cccacgcgtccgccatgaccgtgaccatggcggctgcgtttacaagtacaagtgcaacactgagactgtcaaatgttggagagagcagaggtttgcagctgcgtaagtgtaaccctaatcctaataagctgaaggttatgggggggtttggaggttgttctggagtggcagtgggtgtgagagaaagaaaaggaattggaagggttagggttcgggttctngcgagtgcttcgtcggacgaagcattgagtgcgcagtcaaaagtgactcataaagtattctttgacgtcagtattggaaatccagttgggaagcttgtgggacgtattgtgattggaactgtacggcgacgat

SEQ ID NO: 26020 - DNA, 220 bp, Glycine max
  Clone ID: LIB3108-012-Q1-K1-G12
actccttctgcgcatttcatttcaaggcttaaaattgcgttcagcttaatttcaagaatggcctatggagcataacaaagtcctgattctgagaatgtgtacactctaacttctgtgatagaggatttggttagacactaggataccatcatttatggactcattgagagagccttgttccctatcaattctcacacctattatgaaaagtatgctcaaa

SEQ ID NO: 26021 - DNA, 428 bp, Glycine max
  unsure at all n locations
  Clone ID: LIB3108-012-Q1-K1-G2
attattcctctccctaatggcttctcaagttcttcttcaggcactgcttgcccccaagctgagtttcccttcttcttctcgtaacgtggcgttaatttctagggttccttccaccccaatttcatggcgttgcactcccctcattgctaagcctagtttcgtagtgagagctgacaccaacctcgatggcggtggtgaagccaccgaggatgttccttcggataatgctgaaaaagtttcggaaggcgaagcagaacaagtttcggattctgaagctccgaaatcgcctagaaaaccccgagtcaaactcggagacattatggggatattgaatcacagggcaattgatgcatccgagaagcaaagaccaactccagacattaggactggngatattgtcgaaatcaaattggaggttcctgagaaca

SEQ ID NO: 26022 - DNA, 256 bp, Glycine max
  Clone ID: LIB3108-012-Q1-K1-G3
cacacacacatacatagtagtatcactggttccacgtaactggttcttttgacctatgccagccttaaaggttacataaatggacgtgacgtgcattcctatgatgactgcacccatgatggtacaaaccgctctatgcactctatgcttctgctaacctagcatcgtacctatctaacatgctacactgctgagatcatccataatcagactttaacacatttagtaacatatttgattctggcagcaccaccta

SEQ ID NO: 26023 - DNA, 350 bp, Glycine max
  Clone ID: LIB3108-012-Q1-K1-G4
cccacgcgtccggttgtggtgtttcatttgtgaaactaacaacaacacaaggccatcatcgtggcagctgcttccccaatggcaagccaactcaagtccaccttcactaggactcttgtagctcccaagggcctctctgcctcttcaccacttcacctcgtgccttctagaaggcaatttagcttcactgttaaggccatccaatcagagaagccaacctatcaagtgattcagccaatcaacggtgacccattcattggaagcctggaaaccccagttacatccagccctttgatcgcatggtacttgtccaacctgcccgcatacagaaccgcagtgagcccactact

SEQ ID NO: 26024 - DNA, 409 bp, Glycine max
  Clone ID: LIB3108-012-Q1-K1-G6
cccactcgtccgacgaaacccttttctgtctctctctcttcaatttcaccctggtagcatgggtacattcctttgccttccttgaatcgttcttaattgcgagaggggatatcgtacaagttgattggcctcccattaattgcaggtctgaatgatctgatggagtctaaagtcttgaataagaagtccgttcgtactaagaaccttttgtacgaagctactctcgattacaccattgaagactttctaccacaccttggaattaaaaagtccagatctgctgcttactccaactgcatgcgcaagccatcctgagattaactagcttgtagtgaccacataacccgcgtagtcttgcatctgctatattattttagtctcttcttgtccctttttttagatctcttcc

SEQ ID NO: 26025 - DNA, 262 bp, Glycine max
  Clone ID: LIB3108-012-Q1-K1-H1
atttgtcctttcaaatgtttgtgtagtgtgcaaaagtttcaaagcctcttaagaaagatcggcgccacgaaatttggaatgcgttgcttagactttggttggcttcatagatgcataatagggcttgatataaagttattgcaagatgctatgggtcaaacacttcttactctacctctaaatcaacaatacatgctcttcatggaatggttcaggcacttcttaagccattgaactgaatgttcaaatctaaacaaggcat

SEQ ID NO: 26026 - DNA, 232 bp, Glycine max
  Clone ID: LIB3108-012-Q1-K1-H12
gtcgaccgactcgtacgcccacgcgtccgatagtttactactcaactaacatggactcgaagaggaagatagcattacggatttcaggccttctggccatgctcattttaatctcctcacatgtagcagccagagaattgaaagaggtcactggtgctgccttgtctggtcgtcatggtgtcaactatggtggctttggtggtgcctcctctggctctcgtggttacttccc

SEQ ID NO: 26027 - DNA, 358 bp, Glycine max
  Clone ID: LIB3108-012-Q1-K1-H2
atcaaacctttcaaaagttcgtctcaagttttaaactttcaaaacctcttaagaaacatcgtgacaacgtaaatagtcaataggaagccaactcaaaaaacaacacttcactaaaactctaaaaacatcccaaaatcctctctatctatataccactttacctcttaccttctaaaatgcaatttatcttcacttttaaaagccatccaatcatagaagccaacctatcaagtgattcagccaatcaactttaacccattcattgtaaacctccaaaccccacttacatacatcccttttatctcatgatactttttcaacctgtccgcatacagaaccacaatcagcccactactaa

SEQ ID NO: 26028 - DNA, 107 bp, Glycine max
  Clone ID: LIB3108-012-Q1-K1-H3
aaacctcttaataaaaatctgctcattgtaacaacgtctattggtacacaaaaccaattccatcatcttccctaacaaaatacccccattttttcataataaccctc

SEQ ID NO: 26029 - DNA, 268 bp, Glycine max
  Clone ID: LIB3108-012-Q1-K1-H4
gcatgcccaagcattgttaatgcaaaagccctgggtttgccaacttcaaagctataaacacgcatggttcaagggcctcaaattgcacaaatggccaatttttgtgtgttgggttaggctctggggctagtctgttcttttttgtgtatgtactatgtagagtgtctatggcactgtgcatataaagactgtgatgttaataagcatcgtgtgtttgtagtatttcaaacattaattaaacatatatgaagttattccttatgtccct

SEQ ID NO: 26030 - DNA, 296 bp, Glycine max
  Clone ID: LIB3108-012-Q1-K1-H5
cccacgcgtccgcccactcgtccgtccacgcgtgcgttaaactctatagattaagagtaccgttcccttaaccaggaagtgacaataaaagggtatataagagtgcatgctcggtcacctttctgtccaattgttcaatatttctcacaaatgttccttgagttattatctgaagttaggttgctttacttaaattcttatgtattaacattctgattcaattaatgatctagattcaagcagcaaagtgtggtgcaagaagaaggagatacacccgtaattctactaagaaatcg

SEQ ID NO: 26031 - DNA, 253 bp, Glycine max
  Clone ID: LIB3108-012-Q1-K1-H6
tcaccataataatccttacatttatgacattaaatcttattatcagcaatttcccacagctcttaacttctcattaatatcatcttttatccttcttccaattcttcttttcttctatatatattatagaaatttacatatacacataaattacactactcaaatcattataaccagtacatttcttcaccattagcatatattaaatcttaaaccattatccaacatattacacattctatcttattcacct

SEQ ID NO: 26032 - DNA, 442 bp, Glycine max
  Clone ID: LIB3108-012-Q1-K1-H7
gctccctcgaactgttgtttggtctcttctctcttatccatggcatcaacgttgctcaccgtaccaactcccttgctacacaaaaccaatgccatcagtttctctaacaagagaccctcatttttgcagaggagctctctgaagattcatgcaattaccaaaaaatgggaacccacaaaggttgtgcctcaggctgatagagttcttattcgtttggaggagctttcagataaaacagttggtggagttttgctgcctaaatcagctgttaaatttgagcgctatcttgtgggagaaatcctaactgttggtgctgaggctggagaactaaaggctggaacaaaggtactattcactgacatgaatgcttatgaggtggatttggggactgatgcaaaacactgcttctgtaaagcacgtgacttattggccgttgtggagt

SEQ ID NO: 26033 - DNA, 107 bp, Glycine max
  Clone ID: LIB3108-012-Q1-K1-H9
atgccctatcattactaatgcaaaagcccttaattttccaactttcattctataaacacagattactcgtaatcctcaaattgcacaaatggccaatttttgtattt

SEQ ID NO: 26034 - DNA, 353 bp, Glycine max
  Clone ID: LIB3108-013-Q1-K1-A1
accactcgtccgaacaaacatacacacatttttaaaaaacataaaaaaatattacaaataaggatcttattgcttaaaatctatctccaaagacgatcttcaatacaaccacctttacaatcaaacttcagttgcttgcctcttataccactgaaacgggtccttaccttttcaatagccaccccaactaaaataattatcaaaaaaagcaggccatctccttgtagcatcaccccttaagccttatttactcatatggaaaatatcctatcatgtgtgatagccaacttcaatacttataatcccaaactctcaattttccaaattgttacatacaattctattacaccttt

SEQ ID NO: 26035 - DNA, 414 bp, Glycine max
  Clone ID: LIB3108-013-Q1-K1-A11
catgatcaagcattctcacatcgcttctcattttctcgttttcccaatcgcagctaaaaggtcctctgtacccttttacccttttctcaataagaagaaattaggaaacgcaacaatggctcaagcggttgaagaatggtataagcagatgcccgtcatcacgcgctcctatctcaccgctgctgttgtcaccactatcggatgctcccttgatataatttctccgtatcatttgtacttgaaccctatattggtggtgaagcaatatcagctttggcgcctggttactaatttcttgtactttcgtaaaatggacttggatttcctgtttcatatgttttttcttgctcgttactgcaagcttcttgaggagaactcgtttcaggggaggactgctgatttctttacatgctc

SEQ ID NO: 26036 - DNA, 296 bp, Glycine max
  Clone ID: LIB3108-013-Q1-K1-A4
cccacgcgtccgggacaaggttgctgagttataccctgaatacgatgtggctaagttgccgaaggatacccaaccagggttgttgagagcaagtggaaaggatgcatcaaagaagctgattgatttaggtctagaattcactcctgttgagcaaatcatcaaggatgcagtggagagtttgaagagcaggggctatgtctaatttctctgctactgcagaggaactgagtgcactgttacaagtggtggtggcgttaatattattgttctgccattgctatgactcattgttcatg

SEQ ID NO: 26037 - DNA, 422 bp, Glycine max
  Clone ID: LIB3108-013-Q1-K1-A6
cggacgcgtgggtttcaccgcagtgttagggtttctgtagcctccaaccagaaggagagggaaatggctcccaaacatcctagtacgggtttgtttgttggattgaacaagggtcacgttgtcaccaagaaggagttgcctccacgcccttcagatcgtaaggggaaaacaagcaagcgagtgcactttgtgaggaacctcattcgagaggttgccggctttgcaccttatgaaaagcgaataactgagttgctcaaggttggaaaagataagagggcactgaaagttgccaagagatagcttggaacccattagcgccccaaggaaaagaaagaagggaatgcccatggtcttccgaagatgaaggcttgttgagcttgagaccagaagaaattagtcttggttaccttttctaggttcac

SEQ ID NO: 26038 - DNA, 243 bp, Glycine max
  Clone ID: LIB3108-013-Q1-K1-A7
cacatgcattgttgtgatcattataacgttttgcaagtccaccaaaacctatgatggactcaacaatgtacaatctatggaagaccccctaaccatataaaaataaagtgaacaaatttggcttgaatgtgttctacttcccctttcccttcattaccacactcttatttccttctattgatatgacacatatgatatctctgtataaagcttgcgtataaaatataaaattatcatcgagtc

SEQ ID NO: 26039 - DNA, 302 bp, Glycine max
  Clone ID: LIB3108-013-Q1-K1-A8
gtcaaaattgctgagttggaatcgtcattaaaatccattgaagatgagaaaatagaacttgaagggaaaatagcttctttatcagaggagttatcaatagaaaaggatcggattctaaggattagtgcagactttgacaattttcggaagaggacagagagagatcgcctttcattggtcacaaatgctcagggtgaagttgtggagagtttgttgcctgtgttggataattttgagagagcaaaaacccagataaaggtggagacagagggagaggagaaaataaacaacagctatcagag

SEQ ID NO: 26040 - DNA, 376 bp, Glycine max
  Clone ID: LIB3108-013-Q1-K1-A9
atccttgtgtttttcctttcgggattggtttctatggcttctgaagtaatagagtaccgaggctttgtcggtgggcttgcttgggccaccgacagcgatgctctcgagaaagccttctctcattatggtgagatcgtcgaatcgaaggttatcatcgatcgtgaaactggaagatcgagagggtttggatttgtgaccttcgcctcggagcaggcgatgaaagacgcaatcgaaggaatgaacggtcagaacctcgacggtcgtagtatcacagtgaacgaagcacaatcccgtggaagaggcggtggtggcggtggatacggaggtggtggtggttatggcggcggcggttacagccgcggtggaggaggatatg

SEQ ID NO: 26041 - DNA, 219 bp, Glycine max
  Clone ID: LIB3108-013-Q1-K1-B1
atttgccctctctgcagaaatcaaaagatgttaacccatgattcctcctccatcttcctgtctcttccagttcctcctcctctttcctctcatactctcccattccgattccgattccggtcaccccgtgctcccgcgcccgctgatcgtggagtacccgcagttcgacgcgatgctgcggtgccgcgcgtggcgcactacgcagcaagccaacaacct

SEQ ID NO: 26042 - DNA, 432 bp, Glycine max
  Clone ID: LIB3108-013-Q1-K1-B10
cttctgcagccgttgctattccctcattctttggcctcaaggcaagcgcaggcaaagtgggtgccgcagttaaagtctcagctccccaagccacaaggttgggcatcaaggcttcgctgaaagacgttggagtcgctgttgtggccactgccgcgagtgcagtgctggctagcaacgccatggccattgaagtgttgctgggtggtgatgacgggtctctggctttcgttcccaacaatttctccgtggcctctggggagaagatcgtgttcaagaacaacgcaggtttcccccacaacgttgtgttcgacgaggacgagattcctagcggcgtggatgcaaggaaaatctccatgagcgatgaagaccttctcaatgcgcctggtgagacttacagcgttactttggatgctaagggaacctacagtttct

SEQ ID NO: 26043 - DNA, 273 bp, Glycine max
  Clone ID: LIB3108-013-Q1-K1-B11
caatgtaattttctaaaaaaaaaaaaaaattttaaaaaaaaaaaaaacaaaaacaaaaaaagaaaaaataaaaaaaaaattatggaccacaaccggaccgtctagactatccaatctaacctacccttcccttccacgccatagcttatctattctataacctaacttaaattcacttcactgccctttacaacacaacgactggaaaaacccatcccttacctaacttaatttacttgcattacatcccattctcgtctgatcacctaatat

SEQ ID NO: 26044 - DNA, 410 bp, Glycine max
  unsure at all n locations
  Clone ID: LIB3108-013-Q1-K1-B12
atgacattgttcatatattttgatggacggtatgtgcaaatgtttcaagtgaaggttattgggacatccgttgcttctgttgatccttgccggaatgcagttacatccaccagttaccagatagctttcataacgttcccgtttttaaactattgagatttactatcagaattttgtctatttatgtattatttaaaatagtatcccaagtgggaaggaggcataatgtcgtcctttatttatggctgtcagattggcctctgggatattgttcttgaagtttgcttcctgatataggttgtaattttgtcaaattttagtttaggcttattgcacttttagtattttagtcccattataactaatgtgagttcaattcggtaaaaaaaaaannacattaaagattatac

SEQ ID NO: 26045 - DNA, 348 bp, Glycine max
  Clone ID: LIB3108-013-Q1-K1-B2
attctattcttcaatatcttagggttccgtcagattccccatcaattcaaccacttgccgggttagttgatccattcttataaaaagatcaaagactcattatttatagccaaaggccttctgggtcgtcgtgaatctatcttgtgtttgagagattaagacaaaactttttgctttgcaaatggctgctgcaactgctgcaactgcttcttggatgcgattcaaaggcggcaaggaaaggaagctaaccaagatgaataaatccaggattaattgctcttattcttcttcttcttctgtgatagatccttacaagaccttaagaataaaacgaggtgcctctgaatc

SEQ ID NO: 26046 - DNA, 312 bp, Glycine max
  Clone ID: LIB3108-013-Q1-K1-B3
atgtgtacacatttcatacaccacacactctttatacataaacctacttgcaaaaatgtcgggtaaggcgtataggagctacgacaactgatgctttatctccgactccgaatgccacacacaggccatgaagtctcttaacaatgattattgcgaccatcccgactgtcttaccatttgcgaaatttcgaagactcattggttgccatgctgaactccaaaggcgtcattactgcttacattcgcgaagttttacgtcataatatggcacgcaattgccttacatgaatcgtatctcgttgaccatggatc

SEQ ID NO: 26047 - DNA, 342 bp, Glycine max
  Clone ID: LIB3108-013-Q1-K1-B4
cccacgcgtccgcccctccaattttctcccttcccctcactagaactcaccacatttcttggtcatcacaaactccaccaccaactcctcctccacaatctcagcctccaacttcgtctccacagcagctaagaacaacaaatttgaatgatgaatcaatgcaagtgtgcactgaagctaagcaacagaagcccatcaaaccatccactaaggttgaatccacagattggatagccacttccttgaccagaaggtttgggataggagctggtcttgcatgggttggctttcttgcatttggtgtcatctcagaacaaatcaagactcgccttgaggtgtctc

SEQ ID NO: 26048 - DNA, 348 bp, Glycine max
  Clone ID: LIB3108-013-Q1-K1-B7
attgaacccaaactggacacatgaaaggagtgagatagcgaggaaacttggtgcttacttgttacccgcagacagaggaaggaagggaaatagatggaagctgtgtgtggacgtggaagcagtgtttgggtcacatagctccttacacgctcactcaaagatcacactgcctctattcccgtgcaggttaccaagcacctaacagtatctccttcacaagtcccttttttgttctattacccttctcgctatgctaatgctagaacccttcgcgccaagaacctgctgcaaacccattttccttccccacttaattgcttctctggaacaagttgaccagacttacat

SEQ ID NO: 26049 - DNA, 311 bp, Glycine max
  Clone ID: LIB3108-013-Q1-K1-B8
atttttctcactgtcttgtctctccagagaactgtatagagagagatggcagctgcaacagctggtgctgtgttaaatgggttgggatcttccttcttgagtggaggaaacaggagccaaacccttctggccactgctattggaggcaaagttggtgctgctgctgttactgttagtcctagaagactcattgtggtagctgctgctgcaccaaagaagtcatggctccctggtgtcagaggtggtggcaacctcgtcgacccagaatggcttgatggatcgctaccaggtgactatggctttgacccact

SEQ ID NO: 26050 - DNA, 409 bp, Glycine max
  unsure at all n locations
  Clone ID: LIB3108-013-Q1-K1-C1
cgcaagcaaaaagaaagaatcccaggcgaggagaaagatggaggggaaggagcaggatgtgtcgttgggagcgaacaagttccccgagagacagccaattgggacggcggcgcagagccaagacgacggcaaggactaccaggagccggcgccggcgccgctggttgacccgacggagtttacgtcatggtcgttttacagagcagggatagcagagtttgtggccacttttctgtttctctacatcactgtcttaaccgttatgggagtcgccggggctaagtctaagtgtagtaccgttgggattcaaagaatcgcttgggccttcggtggcatgatcttcggcctcngttactgcaccgctggcatctcanggggacacatataccccgcggtgacatttgggctg

SEQ ID NO: 26051 - DNA, 429 bp, Glycine max
  Clone ID: LIB3108-013-Q1-K1-C10
ctccgctctttggtttgctcaaccgatctcctcagcaatggtgaacgttccgaagacaaggaagacctactgcaagagcaaggagtgcaagaagcacacgctccacaaggtcacccaatacaagaagggcaaggacagcatcgccgctcagggaaaacgccgttatgaccgcaaacagtcctgttacggtggccagaccaagcccgttttccacaaaaaggcgaaaaccaccaagaaaattgtgttgaggctccagtgccaaagatgcaagcatgtctcgcagcacgctatcaaaaggtgcaagcactttgagatcggtggtgacaagaagggaaaaggaacatctctcttctagatggaatattagaatttgcaatttcacacactctctgtacttttctcagtttgattgccatcttcggcttttaa

SEQ ID NO: 26052 - DNA, 430 bp, Glycine max
  unsure at all n locations
  Clone ID: LIB3108-013-Q1-K1-C11
caccttcgttcactcttcttctcttgcggctagggttttagcgcagcttcttctagatttgaagaagatgggtaaggaaaaggttcacatcagtattgtggtcattggccatgtcgactctgggaaatccactaccactggtcacctgatttacaagcttggaggcattgacaagcgtgttattgagaggtttgagaaggaagctgctgagatgaacaagaggtctttcaagtatgcctgggtgctggacaaacttaaggctgagcgtgaaagaggaatcaccattgatattgctttgcggaaatttgaaacaacaaagtattattgcacagttattgatgcgcctggacatnaggatttcattcagaatatgattactgggacattccaagctgactgtgctgttcttatcattgattcgaccactggt

SEQ ID NO: 26053 - DNA, 303 bp, Glycine max
  Clone ID: LIB3108-013-Q1-K1-C12
aaaacaagaactctacatacttcgtcaaatttatacctaataatgcgaagtccagcgtgggggatattccacctaagggtcttataatggcatccactttcattgctaactctacttctattcatgatatgttcatgagagttagtgagcattttacagctatgttcaatcacaacgctttcttacactgttacaccggataaagaactgatgaaatgcaattcaccgaaggcccaagtgacatgaacgatcttgtcactgtgtatcatcagtaccaggatgctactgctgactaggactagt

SEQ ID NO: 26054 - DNA, 333 bp, Glycine max
  Clone ID: LIB3108-013-Q1-K1-C2
ccgcgctcacttcgaactaaacctattatcttatgcacgaaactgcacaactggaccatgctcattcactacctcaaaaacactagctttagcactatgttacctatccataagaccgaaaaacactaccattatccgggattccctttgcaacttgactaattcataaatcacttcatataattaaatacatagcatatatatctatatatatatatacatatatatatatatacatcactatctatacacactttgaacctacaaagcataattacacatgcattacctatgatattacaactatatcttaacattttaacatgaatcatc

SEQ ID NO: 26055 - DNA, 350 bp, Glycine max
  Clone ID: LIB3108-013-Q1-K1-C3
cccacgcatacagacacacttccaggcgattctaaaatcatccatgactcgcatgatatgctcaatgtaacctatcaactttcactctagacatcaactacaaacgtcgcattctaaccaaaactacacagaccactaccaatatctacatccagaaacgctagatgaacaccctcaatatacataatcatctgtctacaaaacacaaatatcttactttcaaacacactttttcttcttctcacaaaataccttaaccttcttaaaaagtctcactttataagtctaactatcctaccatttcactttaatgaatatattcatccattataaaacacatctaccctcat

SEQ ID NO: 26056 - DNA, 114 bp, Glycine max
  Clone ID: LIB3108-013-Q1-K1-C4
cctcacaatattttacaaactctttcaatgccttttacaccttcactcgctatcatctccaatgctcacgtctccaacacactctccgttcccactctcaacaacccaaacttt

SEQ ID NO: 26057 - DNA, 441 bp, Glycine max
  Clone ID: LIB3108-013-Q1-K1-C7
gtagtttccaaacttaaaaatgttaaacgttttgtattaatccaacaaaaaatgggccttgtaaactaaagaaaaacaaactaagattggcccaaactgaagaaatacaaaaaaaatggcttgagatcaagcctaaccacgaaaaaagaaaaaagagaaaaatattgggactagcccttttgttgccagatgtttagattggtgaatgctatcattaacatttatagataatgtatactaaaacttattcctggtgcattgaatttcatgctttgtaatcgcaagttttagactaaagatcattcctgaactatcatgttttacattgatggtttaaactttgatattttacttcaaaaaaaaaaatatttatttatttaattaaatttaaattttttttttattatataaataaaattttttttttaaaaatttttttta

SEQ ID NO: 26058 - DNA, 136 bp, Glycine max
  Clone ID: LIB3108-013-Q1-K1-C8
attaccagctcattgatatctctttaacattcttcataattcaacaaaaaattgaccactgaaaattataaaagacaaactgccattaccacactctatacaattactatacatacgccttgccatcaaacctacc

SEQ ID NO: 26059 - DNA, 412 bp, Glycine max
  Clone ID: LIB3108-013-Q1-K1-C9
cccacgcgtccgcccacgcgtccggaaggactcgctgttaaactcactgggtttaaaaatgcagtgcccggtgtgtttacattgaagagagttcccgccgatgaaattatcggctacaacatcttgttctgtcctcttgataataacccatgtgggtatgttgcggttcatttcgaccaattccgaaacaggcgtttggtggtgtctgaggttcaggaggatgggttatgggttatgtttcagaaactttcatatgcatcaggattaactctttcatctgcatgaagcaccccttgccctcaaaagtcatatatgtactttcacgtagtgagagacatgagtgagactaaataaatgcttcatgctgtattcaattattgcaagtctaaataaaataatcgaagtttatgtc

SEQ ID NO: 26060 - DNA, 333 bp, Glycine max
  Clone ID: LIB3108-013-Q1-K1-D11
cccaggcgtccggaaagcacacagaagatattgaaagataacaaagaggagaaagaaagggttgaggaagatacaaacaatttttgcagattgttgagaatgcctttcaagaagcctcatcacacctcagacaagaactacataacaggggacgacggaggcaagttcgagatacaacctataggactcaacattgtgtggggaaatgattctcgatactggaaaatttcagaacaaggtcctgcagagctgatccaagtttcatggatagaggtatccggcgtggtaaacttaccaagtgtcaagaaatatatggttgaattcgaagtgaga

SEQ ID NO: 26061 - DNA, 218 bp, Glycine max
  Clone ID: LIB3108-013-Q1-K1-D12
cctcatcacaccttacacacgctctacatatcacgacactactaacgcaagttcaatatacaacctacacgactcaacactacgtcatgaaatcattctttatactcaacaattccacatcaaggtcctacttatctgatccaaacttcattcttcgatttatccatcgtaataaacctaccaaccttataaaaatacaatcttgaattccaaattat

SEQ ID NO: 26062 - DNA, 355 bp, Glycine max
  Clone ID: LIB3108-013-Q1-K1-D2
cactgccacaaagtgcgagaagcctatcatttaacattttctcttcttgacacacagggagggcagggagtatcatccatggcggccaccagagcaataactatagccagcaactccacatgctctctgcttgcaaagaaaccctttgtgggtggcactgctctttccctcaacaacctcaatttttgtcgtactaggaggtcttacacctgtagagccatctacaatccccaggttgtcgtcaaagaagaaggccaacccgaaaccctcgattatagagttttctttgttgacaaatcttgcaagaaagtttctccctggcatgataattccttgccggtaggtgatgatatct

SEQ ID NO: 26063 - DNA, 282 bp, Glycine max
  Clone ID: LIB3108-013-Q1-K1-D4
caagactcctcaatcatccatatacatgatttccatttcttctacagcagtttctattcgctcattggctgatcttaatgcacgcacaatcatacagagtacctactcagctaaagactcagcttcccaagccacaaggttctacatcatcaatgcttacctcaaagacattgtagtcactcttatggccacttctgcgatcaccattctagctagcaacaccatggccatataaatgtcactgttcactgatgaccgatctatgcttttctctacaaactc

SEQ ID NO: 26064 - DNA, 203 bp, Glycine max
  Clone ID: LIB3108-013-Q1-K1-D5
tcaaaagcttacaaacattcatttacaacatgtacaacaaactctcaaaataaggtaatcgtatattcataaggctccactcaagatacaaacaatttactcacatctagctcttagactaactattacacgcttacaggctatcaatgttatttcataacatgatcatccgaccaaatattggaataactaattttataaac

SEQ ID NO: 26065 - DNA, 162 bp, Glycine max
  Clone ID: LIB3108-013-Q1-K1-D6
cacaagcctacaaacactcattttccacattctcaacaaacactccaaacaacggcaaactgttatttttaaaacaaccaccaccatacatactatctactcacatcaagctctaacactaactatcacacgcttctactctatcaatgataacatataaca

SEQ ID NO: 26066 - DNA, 235 bp, Glycine max
  Clone ID: LIB3108-013-Q1-K1-D8
cccacgcgtccgcccacgcgtcctattattagcagcccggaagcagagaagggctatgcgtctactgtatcttctctgaacgatgtccttgccaaacttggttaatgtgattaatttcttgctttcttgtgtaagctttgtgcatgattttctcagacactttattgactgatattttaagaaaatcaaatgatgagggaaaattttctataaataagatcaatatatctagacc

SEQ ID NO: 26067 - DNA, 328 bp, Glycine max
  Clone ID: LIB3108-013-Q1-K1-E1
cccacgcgtccgcagaattggaatcggaataagaaaggagaattagggtttgtggagatggaagggcgaggcgttgatgaagtgaacattgaagagttggcctcgaatctttccctctacaaagatcaactgaaccaggttaggcaactcttgaacgatgacccttcaaattctgaatatgctgacatggagagggaactttccgaggtctgctctgtctcctgatgtccagcatgctttctcctcatatgagatgttcacactgagattctaagtcattgctttgactgaggaactccttgcaactgcaaagcagaatgaaatccct

SEQ ID NO: 26068 - DNA, 195 bp, Glycine max
  Clone ID: LIB3108-013-Q1-K1-E2
tccagacgcgttgacaaatgcattcgtggttcactactacagcaccttctacaccaacaggaacttgttaacgaatctctaccaagaattttccatgctcactttcaaatttcacaatatccaaatcacttccaacatctttgccaagcttacctccatcacttttcagcatttccatcactcaatctccaccgt

SEQ ID NO: 26069 - DNA, 433 bp, Glycine max
  Clone ID: LIB3108-013-Q1-K1-E3
cccaggcgtccgcacaattgcaatcggatttagaaattacaattacggtttgtggagatggaacgtgaaagcgttgatgaagcgaacattgaacagttggcctcgaatctttccctctacaaagatcaactgaaccaggttaggcaactcttgaacgatgacccttcaaattctgaatatgctgacatggagagggaactttccgaggtctgctctgtctcctgatgtccagcatgctttctcctcatatgagatgttcacactgagattctaagtcattgctttgactgaagaactccttgcaactgcaaagcagaatgaaatccctgctcctcctaacgctgctgctgcctctccaaccttgtccatacataatgacaatcaagtgctggatagcagctctgatcatcaagagaaacttcctgttggcacc

SEQ ID NO: 26070 - DNA, 289 bp, Glycine max
  Clone ID: LIB3108-013-Q1-K1-E4
accagagtactacaagggaagaagaacttattctcaatctaaggaaggatcaaagagaatggctcatgcaatagcatcaatgactagcttacatgattcctctcaggctgtgttggaatgtagccattacttcacacactttaatgtactgagtggcaacaacctttcctaatttacacatgcagacatcacaattagaccacagcaacaacaatttaattgctgatatgtacaaagcatccttatgacattactttcactcactgctactgtattgaccactttctct

SEQ ID NO: 26071 - DNA, 79 bp, Glycine max
  Clone ID: LIB3108-013-Q1-K1-E5
cccacacattcgaaaacaaaatttacaattttaaaagataaatataatacaagcatagtgtacacattaacaacaaaaa

SEQ ID NO: 26072 - DNA, 236 bp, Glycine max
  Clone ID: LIB3108-013-Q1-K1-E6
tcccacccatcctctcatcaaaattacaaatattctacttatctacaacaataatatacatgatcacatatacacaatcatcattcccaacactaactactagatctccaaaattaaataatataataaaaaaaaatgtcaattattaaatttcaccacaatcttcatctgccaattgctttactaccatagacaatactaacctatttaatcaataaccgatcatccaaaaataa

SEQ ID NO: 26073 - DNA, 236 bp, Glycine max
  Clone ID: LIB3108-013-Q1-K1-E7
ccgagacatgcaaccactgagtttactattgtctgaatatacatcatccagtggtatctgaactaataaaataaacgtgcttgatgagcaatacgctgccattcgacctactctaggagatacaaactgctactttcgaagctttatgttatcatatcttgagcatgttatgaaatgtcaagaccaagcataagtctatcgaatcaaagctaatgttgaaaaaagtagataagcac

SEQ ID NO: 26074 - DNA, 341 bp, Glycine max
  Clone ID: LIB3108-013-Q1-K1-E8
cactgttcagcttcccgtgggttttcgttttccattcctctttaccattaaggagttgtgtgcatctttgaaaccagacagcttcagtggggagttcctagtgccttcttaccgtggttcctctttcttggaccccaaggtaaggggtgcctcaactggttatgacaatgctgttgctttgcctgctggtggcataggagatgaagaggaacttgctaaagaaaacaacaagagtgcttcttcttccaagggcaaaatcaccttgagtgtcaccaagaccaagcctgatactgctgaggttattggggtcttcgagagtgttcagccttctgatactgatt

SEQ ID NO: 26075 - DNA, 279 bp, Glycine max
  unsure at all n locations
  Clone ID: LIB3108-013-Q1-K1-E9
gaccgcacgcgtccgcccacgcgttcggaggttttgatgcaacgctgtcacttataaaggatctctatctacnaaggagcgttttaaaacccttctctctgtgattaagagaatggcttcacatcggaaacttcacacttttgaggaggtggctaagcacaaccagaccaaggattgctggctcatcatttctggcaaggtgtatgatgtcacccctttcatggaggatcatccctgaggtgatgaggttttgttatctgcaacatggaaagattcaac

SEQ ID NO: 26076 - DNA, 316 bp, Glycine max
  unsure at all n locations
  Clone ID: LIB3108-013-Q1-K1-F1
ctgacacgtacgcggactcgtatgcggactcgttgacagacgcatgagcgtacacatgggcatacgcgtaagcgaactcgtatttgtgtaaacgaaaaatacatgttatataaatagttcatgcatggaatgctgatgattgggccacgcaaggtggtcgtgtaaaaacagattggagccacgcaccattgattgccacatatanaaactcagacatcaatactcgtgaatgtgacgtgttagctgttgtataggataatgataataaatgcactagccgtgagtttaaaacgtattgactggaaaaaccctaatt

SEQ ID NO: 26077 - DNA, 289 bp, Glycine max
  Clone ID: LIB3108-013-Q1-K1-F10
cccacgcgtccgcattaattaaatggacatttatttcatgtgtgaaaaaaaaaacaaaatgagccatacaaactactcataagagaattcacacatactatatatatataacacatctatatgacaacttctaaacagatctacacaatgttcaaaacacacattccttctcttcttctatcccttctcattatttcactctttgtagctgaaatcatatgcaagtagacaccatcaagctctcaacaaactgcacaacttcaccaacttcagaagaaattcacaaatt

SEQ ID NO: 26078 - DNA, 336 bp, Glycine max
  Clone ID: LIB3108-013-Q1-K1-F11
cccacgcgtccgaattggaatagccaaagctatagccatacggcagtacccacccttgcagtgttgactatgctgctagctcaacccattttcctctctcgcaactttcccactctcaacaaccgaaactcgagaacttctcttcaacttcacaaccctcctgcactcataagagtttcaccgcaaagaacgccaataatagcctcttctggttgctttggttgcttccgaaaaccgcttgatgtcagaaccaaaacctcgctgggtgcgtcttttaagaaaagaaagggttgtgcacatatttgccatagtttgaaggaagagagcgaggttggt

SEQ ID NO: 26079 - DNA, 436 bp, Glycine max
  Clone ID: LIB3108-013-Q1-K1-F12
gcgctctagcaagtttgtggctttgtcttatcattggttaccatttgttgtcatctctgagtccaccgtccacgtcatcaccgccaccgccaccgcaccgccatctactgattcgttttttgctccttcctcaggaaaatgggattgtggaccttacttgaggggttcctgcttcttgcaaacgcactagcaatactaaatgaggaccgctttctcacacctagaggatggggcttatcagatttttcagctggccagacaaaatcttttaaaggccagcttataggtctcatttatgcaactcagtacctaagatttcctcttatacttctcaactctgtcttcattatcgtgaagttagtttctggatgatgcctgaaaaggttccaagagttatcatcaggttatttcaatttgttttaaggtaggaaaattt

SEQ ID NO: 26080 - DNA, 301 bp, Glycine max
  unsure at all n locations
  Clone ID: LIB3108-013-Q1-K1-F2
accacattcacctgagctttttgtgaggattccaaatcatggcttcccttgcagcatccgctgctggtgcttcccttggcatgtcagaaatgcttggaaaccccatcaacctcantggtgccacaaggccagctccatctgcctctagccctgcctccttcaagactgtggctcttttctccaaaaagaaggctgcaccttcaaaaaaagctgcagctgctgctcctgccaatgatgagcttgccaagtggtatggtcctgacagaaggatcttcttgcctgatggtctcttggaccgatc

SEQ ID NO: 26081 - DNA, 284 bp, Glycine max
  Clone ID: LIB3108-013-Q1-K1-F3
gaaaagaaaaaaaaaaaaaaaaaaaaaaaaatttaaaatttaaaaaaaaaaaaaaaaaaaaaacaaaaagtaaaaaaaaaaaaaaaaaaaaaaaaaaaaaaaaaaaaaaaaaaaaaaaaaaaaaaaaaaaaaaaaaaaaaaaaaaaaaaaaaaagcacaccaaaaaaaaaaaacaaataaaaaaaaacataaaataaaacacatataattaaaaaaaagcaaaccaaatttaaaattaaacccattactttaaaaaaataataacaaaaaaaactataactaac

SEQ ID NO: 26082 - DNA, 409 bp, Glycine max
  unsure at all n locations
  Clone ID: LIB3108-013-Q1-K1-F5
cccacgcgtccggcaagctcatcctagagttttaaaaatggcagcagcctcctgcatggctctctcttccccatccttggctggcaaggccgtgaagctgggcccatcagcccccgaagtcgggagggtcagcatgaggaagaccgtcaccaagcaggcctcctccggaagcccatggtacggcccagaccgcgtcaagtacttgggcccattctctggcgagcccccgtcctacctcactggcgagttcccaggtgactacggctgngaccactgctggctntcggccgacccagaaacccttggcagaaaccgtgaggctcaagtgatccactccaagttggccaatcctggggccttgggcttcgtcttccccgaactattgtcccggaacggggtcaaatttgga

SEQ ID NO: 26083 - DNA, 436 bp, Glycine max
  unsure at all n locations
  Clone ID: LIB3108-013-Q1-K1-F6
cccacgcgtccgcaaactatgaatactattttcctccttcaccaactccagcagatntatgggcaaatctcctttcctcaatgatgaaaaggttaggtgagcttgaagtgaaggttgacacactccaatctaagccatcggagatgccttatgagaaagaggaattgctaaatgctgctgtatgtcgggtggatgctttggaagcagagctaattgcaactaaaaaggctctttatgaagcactaatgaggcaagaagagctgcttgcttacattgatagtcaagaaaaagctaggttacggaagaagttttgctggtgagttttggttgctgatagaaagggactctgggagagggtgttttcgaatcatggtggttctagtgctgaccttgcacatgatgttaaactctgaatactgattcagtttaatgagta

SEQ ID NO: 26084 - DNA, 183 bp, Glycine max
  Clone ID: LIB3108-013-Q1-K1-F7
ccacccactcgtacacccacacatccacaaaccacatttacaacttatcaccttaaccacatccacatgaaaccagcacaattaacaaatcccaacccctaacacaaccactctcccccaattcaacgctcacacaccccaatcctcaccatcccctatcaataactacaatcactaacaacc

SEQ ID NO: 26085 - DNA, 148 bp, Glycine max
  Clone ID: LIB3108-013-Q1-K1-F8
cccacgcgtccgcaaaaaaaaataaaaaatataaaaaaaaaaaaaaaaaaaaagaaaaaagaaaaaataaaaaaaaaaaaaaaaacaaacaaaaacaaaaataaaacaaaaatacaaaataaaaaacaacacttaaatacaataaaaa

SEQ ID NO: 26086 - DNA, 420 bp, Glycine max
  Clone ID: LIB3108-013-Q1-K1-F9
gtttgtgtttacattggacccgatgtatgtttaattcgttttgactcaggaaaacctccgggtaccgagagcaggcaaaatttatgctttcaatgaagggaattatcagttgtgggatgacaagcttaagaaatatattgatgatctcaaggacccaggtcctagcggcaagccttattctgcaaggtacattggtagcttggtaggagacttccacaggacactgctatatggtggcatttatgggtaccccaaggacaagaaaagtaagaatgggaaactcaggctcctgtatgaatgtgctcctatgagcttcatagtagaacaggctggtggaaaagggtcagatggccaccagagaatacttgacatttaaccaacagagattcatcaacgagtgccactgtacattgggagcgt

SEQ ID NO: 26087 - DNA, 430 bp, Glycine max
  Clone ID: LIB3108-013-Q1-K1-G1
ctttcaaagaaaaaaggagagtgcttagagagagagcaaaacatattattttcattttcagctttttgggagtatcaacaaatggcaaccactgtgatgaccactctcccccaattcagtggtcttagaccccaattctcagctgcccctgtgaagaacttggttgctgtgcaacccatgagtcgcaaggggaagggtgcattgggagctcgatgtgactacattggttcatccactaatctgattatggtggcttctacaaccctgatgctgtttgctggaaggtttggattggctccatcagcaaacaagaaaaccacttgaaggcttaaacttgaagttaaggaactaagctttcaaaattgtgacccttcttgctttaaccttggttgacactttggcctgtggatctgttggccacatcattggg

SEQ ID NO: 26088 - DNA, 387 bp, Glycine max
  Clone ID: LIB3108-013-Q1-K1-G10
aaatagacaagatggttgtcgatgtctcttttcaatttttccctgatatagcagtaggtttggaggacccacgtgtaacacttactgttggtgatggagttgcattcttgaagaatgttccagaaggaacttacgatgcagttatagtggattcgtccgaccctattggccctgctcaagagctgtttgaaaaacccttttttgcgttcgttgcaaatgctcttcgtactggaggaattgcgtgtactcaagcagaaagtatatggcttcatatgcacatcaatgaagacattgtggcttattgtcgtccaatattcaaaggttctatcaactatgcatggaccacagttcctacatacccaagtgggatgattggttttatgcttt

SEQ ID NO: 26089 - DNA, 333 bp, Glycine max
  Clone ID: LIB3108-013-Q1-K1-G11
gaaccagattccttaatcagttgtgtatgcttaagtcatgtatttggagtggctgaatagatgtgtatttgtcattaataaagagagttgtgttagtataatggaaaccaaaataataaatgcaaaatacatacaaaacaataataaaagataactaacaacataataaacactgcacaaaaaactaacttataaaacaattattttcgacaatatcaaaatgcttatagaaaaaaaaaggccgtccttttataaggctcaaagtttattaacgcttacatacaaaatataaattcttttataatgactcctaaaataatttcaggggcctca

SEQ ID NO: 26090 - DNA, 340 bp, Glycine max
  Clone ID: LIB3108-013-Q1-K1-G2
cccacgcgtccgcatcgtttgatggaggtttaacttttatgtgagattcatcagcattcgcgcaaggctctttcacctttcaaaaataagtactacattgaataacaatcgggatttcaaattctgagggctgcaagatacaatgaactgctcacatgctttgtgatcatatggaattgtatggttcttaattacgtagtaatatgaaaaaagtacttgtcgccactttcaacatttatgttcttccaatcattttggttgtttatgatttgcaactcaagtacgtttagcatgtctcagttatgatggttgaataaccctcttgcttattatctatacc

SEQ ID NO: 26091 - DNA, 178 bp, Glycine max
  Clone ID: LIB3108-013-Q1-K1-G3
cccacacatacgaccacacatccgtccacttgtcctttaaaaaaaaaaaaccaacacaaagaaacattgtaaaatcaaaaaaatcacttccactctaaaggacccaactttaccaactcacgcatcctacatcataattcttcaataataataccaaaaaccaatttacttaccaaca

SEQ ID NO: 26092 - DNA, 290 bp, Glycine max
  Clone ID: LIB3108-013-Q1-K1-G4
ttctaagataatcaaaaggaaacaaccgttcaacatttatctcacaccatttcgtgaataaaaaaaatgttatggttttcaaatattctcaatataattccgtgaccattggtttttaaaaattgttcaaaggttattaatgcaaaactttctcctatctcaagttccttataaagagaaattatattaaaaaatgttattttatcatccattcttgttactcttaaatggtaacactataccaactaaattttgtcacatatcccttaatcatttcatttacttaattt

SEQ ID NO: 26093 - DNA, 177 bp, Glycine max
  Clone ID: LIB3108-013-Q1-K1-G5
acagaaaacatcaccatccatcgctttaaagcttccaatcttacgtacacctacatgcactgtatatctcaaccaaactcaaccactcttaagcacactctccgccaattcacaacttctataccccaattatcatatccatacccaacaaacttaacttctatcacatccatcatt

SEQ ID NO: 26094 - DNA, 380 bp, Glycine max
  unsure at all n locations
  Clone ID: LIB3108-013-Q1-K1-G6
gatcttcatggaggtgcatgattatccacttaaagcacctgttgatggcccagcacagtggccgttgcgccactttaaggagctacttgaagagcttgtagccattgctaggataagcaaagggaagcaacggttcaacattgatctcacaccatttcgtgaataaagaaagggtgatggttttcagatattctgaatataattccgtgaccattggtttttaaagattgttcaagggtgatgaatgcaaaactgtctcctatcgcaagttccttataaggagagtntatattaaaaaatgttatttgatgatccatgcttgttactctgaagtggtaacactataccaactaatgtttgtcacatatcccttaatcatg

SEQ ID NO: 26095 - DNA, 434 bp, Glycine max
  Clone ID: LIB3108-013-Q1-K1-G7
caaatcgaataagatagataggtgaaaatttcgcagtgtgtggccaacacattggtgcagggaaaaccctttcttccagttgcagcagctcccactaaaaatgttcggagagcggttcagtgcggtgtgtggtgcaagaagaaggagatacacccgcaattctacgaggaatcgaaggtgtactgcaacggggagctggtgctgacgacaggtgggacccagaaggaatacgtggtggacgtgtggtcggggaaccaccccttctacctcggaagccggtcggcgtctatggtcagcgacgaccaggtcgagaagttccgcaagaagttcggggagctcaaagagatcatggagattcctgttctcaagggagagattgttatcccctcaaggcgcaagggtgtttccaaaggaagcaagaaaaaattatctat

SEQ ID NO: 26096 - DNA, 291 bp, Glycine max
  Clone ID: LIB3108-013-Q1-K1-G8
cttaaatctagctgtacatacttaaaattttcatactcttaaaccaacaacagcaaactgtcaaaataaaaccatataaagaccaatacacaaaaaaccaaccaaataacaccctcttcaccaccaaagcatcgtccaactccaagcctcaacatcaattcatctttcaaggacaaggcagtttcctcactcacatcaccttttctgacaacatctatcacccttacagaattcgctcatgctgctatatctgagatctaccctttcctaaagaactttctactcagcatc

SEQ ID NO: 26097 - DNA, 373 bp, Glycine max
  Clone ID: LIB3108-013-Q1-K1-G9
cacaatcgtactatcatactctcaagcattttacattctcaatctcgaacgctaatatcagagctagcttcacaaccacctttattaacgtcataggactacgcgccacattaatgtcattcatctaatctcggcttacttaagaagccgtgaaatacctacttattgctaagtatacttgtagacaagctgaaactatgagtaatgagaatattacatcctgcgagcggaataggctcctctcaaactaccatgagactgtgttacaggtgattcagtgtctagtacccttaagcatacgctctattaagcttgaaagtatatctggccatattattgatagcatttgtgcttgacatgaacaatttcttaa

SEQ ID NO: 26098 - DNA, 294 bp, Glycine max
  Clone ID: LIB3108-013-Q1-K1-H1
cacaatttttcttttggttgtgaatttccaatctcaggtgctgcagaggttgaggaggaggatgacatgtttatcttggtggctcctcaaaatgctgtagggaattgtattattgatgatctaagagccatgaccaatgctgctgaacacagaccagttatactaatcaatgctaggcttaaggttcagttcctagctccttttgtatgatttactgcttgattttgagggtgttattattaaatgaagataatctgaatctgactcagtactaagtcaacttcataacatgcc

SEQ ID NO: 26099 - DNA, 344 bp, Glycine max
  Clone ID: LIB3108-013-Q1-K1-H10
aagtgtacccctatccactcctgaattcttttccctaactccgcatcaagatccaatctagtatgattcacacactcgttgtcaaacctatagataatactgcatccacaggacacaataccacagttaaaacaaagcttctgcatgatcaaaaccatcacatcattagaaactttcaaagacctgatacacaacgagacattgtaacaatactacgatcttcaagaggagcgaggagacatacactatatacactctcaaagttctgaatcaccttcacattgacaactgaaccttatgcaacgtcatactaatcattaacagcttcatcaacaacatctttt

SEQ ID NO: 26100 - DNA, 431 bp, Glycine max
  unsure at all n locations
  Clone ID: LIB3108-013-Q1-K1-H11
cccacgcgtccgtccacgcgttcgnccacgcttncggtgatttgatgtgatgtgatgtgagggagtctacaaaggaacaatctggaatgctgcacaagatcctacctccacgtctagaagatgccggcctcgaagatcctgcccttccacccgattccatccacgaagcttttctgaaggccgccgccgccgtcaaatcacgcgccgcctccattttctcctccaccgacgacgacaacgacggaggttgcgtcagcgacccgtggcccagcgccaaagacgcctncgatgcagtcatcggagtcgaatcggaaaacgaaccgncgggatcctgcatcgtagagaggggagtcgagcccgtcgccgacgaagtcaaagttgctggtgaaggaggcgacgccttcgccgacgtggtggtggagggaggagac

SEQ ID NO: 26101 - DNA, 363 bp, Glycine max
  Clone ID: LIB3108-013-Q1-K1-H12
cccacgcgtccgtccattgctagcaacggttgaagagtacaatgcatgcaggtgtggccgccaattggcaagaagaagttcgagactctttcctacttgccagacctcgatgatgcccaattggcaaaggaagtcgaataccttctaaggaaaggatggattccttgcttggaattcgagttggagcacggtttcgtgtaccgtgagcacaacaggtcacctggatactatgatggacgctactggaccatgtggaagctgcctatgtttggctgcactgatgcttctcaggtgttgaaggagcttcaagaggctaagactgcataccccaatggcttcatccgtatcattggatttgacaac

SEQ ID NO: 26102 - DNA, 240 bp, Glycine max
  Clone ID: LIB3108-013-Q1-K1-H2
cacaattcacaccaccaacacaaaatgcctatccaaattgctgcacacctttgacatgagtatcacgttgccatgccactgtcctacacataatgctgtacagacctgaaagatcgatacaccaatacccactaccaatgctgctaaacacataccacacatactaatccatgctagtcacaagcttcacttactatctacatgtgactgacatactcaatgcttctgagaccccaacta

SEQ ID NO: 26103 - DNA, 435 bp, Glycine max
  Clone ID: LIB3108-013-Q1-K1-H3
aacaagaaatcttttggttgtgaattatgctttctcatttgctgcaaaaggttgaagaggaagatcacgtgtttatcttggtggctcctcaaaatgctgtacggaatcgtattattgatgatctaagagccatgaccaatgctgctgaacacataccagttatactaatcaatgctaggcttaaggttcagttcctagctccttttgtatgatttactgcttgtttttgaggttggtattattaaatgaagattatctgaatctgactcagtactaagtcaacttcataacatgcctggttgaccttggtcctttgtaatgtggaactcatataaccatgttatacataaaaactgtttgccaaatagtataaccgagtatcttcaattgcatgcctataaatgatttttaatgatttccacctttttgaataac

SEQ ID NO: 26104 - DNA, 237 bp, Glycine max
  Clone ID: LIB3108-013-Q1-K1-H5
cccacaccttcgtccactcgttcatttatttttcatcactaaaattcaacacaagctaatgcagaattcatcacagtattcatcatcatccaactgttacatgacaaatcaacaacctagtcatacaagattcaatatccataagcataatactcattaacgacgacaacatcaatgcttccttttatacctgctcatgcatcactactcatcttaatactcttgaaagacctcaaa

SEQ ID NO: 26105 - DNA, 321 bp, Glycine max
  Clone ID: LIB3108-013-Q1-K1-H7
gcttgagcttctgttcccatggctttgtctttgagctctgttaccaacaacaagaagcctgcatcctaagccttcttcaggccactacccctacgccaaccaaagaggaccctcttcaccacgaaggcagtgtcaaactccaagcctcaaatcaatgcatctttgaaggagaaggcagttgccggactcacagcagcttctgtgacagcatctatggtggttccggaggtggctcatgctgctggatatgagttctccccttccctaaagaactttctactcagcatctttgctggtgaggttgttctagcagccatattt

SEQ ID NO: 26106 - DNA, 222 bp, Glycine max
  Clone ID: LIB3108-013-Q1-K1-H8
acccactctgcgaataacagtctaacataaattcctcttcatcatcgcatctatcaccctgaaacctgtccatttcactgttgacaagtcctcacttatacgccttccctacctctcaatgaactcctcttcattcatagttgtctccaatccttacaacaacatcaagactgacaagccttatgtaattaatcttaccattgcttttatgcaacgacttta

SEQ ID NO: 26107 - DNA, 352 bp, Glycine max
  Clone ID: LIB3108-014-Q1-K1-A1
gattctgttgcagctgtggagaaagtaggagttgctagtgtcatgagccacatatctactggtggtggtgccagtttggagttattggaaggcaaagagcttccaggagtccttgctcttgatgaagccgtcccagtcgctgtgtaagacacttttcatcttggaaaattttcccatcctcaggtgtcagtgttgtcaatcttgtaaaagagcatatgttgtaggacccttcgaagtctgttagtgtaaattttatcttgcttgagttattattggcttcacacataaattgcgtgtaactgtaaaccctggctgagagccataaattcaaataaatcttttagttgctggc

SEQ ID NO: 26108 - DNA, 300 bp, Glycine max
  Clone ID: LIB3108-014-Q1-K1-A11
ctttcctccggtggcttcttcggccgcagaagaaacgacccgccaccccaccaacccacgtgggacctaccaggcccaggaccatcaccaccctctgggagtttcccagccccaccacccaccccccttcatgtccttccccagtgactcctcgccggtgctcaacaccgccctcatagagtggaaggagaccccggaggcgcacgtttacaatgcgcaccttccgggctacaagcgcaacgacgtgcgcgtggaggtcgacgacgaccgggtgctctgcatcgtgtgcgggaagagcgt

SEQ ID NO: 26109 - DNA, 359 bp, Glycine max
  Clone ID: LIB3108-014-Q1-K1-A12
gctggcttaatctaagcaattgttcctctttggaagttttgaagctagagtgtccgagattgaccagtctattccttcagtcttgcaacattaatgaggaagctgttgaggctgctatatcaaaatgcactatgctggagactcttgatgttcgcttctgtccaaagataagctcaatgagcatgggaagattgcgtgcagcatgttctagtttgaagcgtatattcatcagcttgtcagcttcataaacatgaccaaggatctgtgaaattgttcagtggctttcaactggattgaatgcatacttgggaataaatctgggtatattcttatgtattgtaaacgtggaacttggtatt

SEQ ID NO: 26110 - DNA, 426 bp, Glycine max
  Clone ID: LIB3108-014-Q1-K1-A2
cccacgcgtccgctcaagttttatgttattctcttcagtcttttatagcttttagtaatcttttaagttaatttgcagtagatagaaaattgctttttatcatcatcttggttccttccttgcctgccacaatgcgatctacggagtcatcaacttcttccattgtgattttatctttgcccctttcaactggcaagaatcacggcttgattcatgaggtttgctaggtctgcaccactgaatcccggagttctcatggcaatgacactaagagagacatccttgtcaagcttcttcatttcagtgagcaactgattcaatgtttgctctctttcatcatttcctccaactatacctgtacctcttagcctccctacatcatctatttcatcaatgaacttacttgtatctaatgtattaaaagaa

SEQ ID NO: 26111 - DNA, 481 bp, Glycine max
  unsure at all n locations
  Clone ID: LIB3108-014-Q1-K1-A3
tgctggtacgcctgcggaaccgcgccggaaatccccgcgtacgggcaaacagagatgctgtcaatagagcgtccttcatacctgctgatacaccacttaaactggctgattactacaagatccaaggggtgttctcccttggaagtatccctgactaccccactggtagtggtggctaccttcaaacttctgtcatggaagccgatttccgaggctttatagacgttgtgtttgagaacactgaagacactgtggagtcatggcacgttgatggccacagcttctttgtagtaggaatggatggagggcaatggtcatcagcaagcaggctaaattacaatttaagagatacagtttctcgttccacagttcangtgtatcccaagtcatggactgcaatttacatgcctttggataatgtgggaatgtggaatgtgaggtctgagaattggttcatcagtatttgggccagcaattttat

SEQ ID NO: 26112 - DNA, 436 bp, Glycine max
  Clone ID: LIB3108-014-Q1-K1-A4
gcggacacaactgcatggactctagggcgaatgttcgaatttttgcatggatcagctctggatgctccgattattactccagcaaactgccaacagattattactgtgctgcttcagagcatgaaggatgttccaaatgctgctgacaaggcttgtggagctctatattttcttgcccaaagctatgaggatgctgcatatgcgacctcttcattgacccccttctttcaagatattgatcatgctcttctcactgtaactcacagagaggatgctggagaatcccgccttagaacagcagcctatgaagccttaaatgaagtagtgaggtgttctaatgatgaaacagctcctatggtggtacaacttgttcctctcatcatgatggagctccatcaaactcttgaaaatcagaaagtttcatctgacgagaggc

SEQ ID NO: 26113 - DNA, 348 bp, Glycine max
  Clone ID: LIB3108-014-Q1-K1-A5
aggagattctgttgcagctgtggagaaagtaggagttgctagtgtcatgagccacatatctactggtggtggtgccagtttggagttattggaaggcaaagagcttccaggagtccttgctcttgatgaagccgtcccagtcgctgtgtaagacacttttcatcttggaaaattttcccatcctcaggtgtcagtgttgtcaatcttgtaaaagagcatatgttgtaggacccttcgaagtctgttagtgtaaattttatcttgcttgagttattattggcttcacacataaattgcgtgtaactgtaaaccctggctgagagccataaattcaaataaatcttttag

SEQ ID NO: 26114 - DNA, 435 bp, Glycine max
  Clone ID: LIB3108-014-Q1-K1-A6
cacaatctctaatggcactcaggatgtgtgcttcttccactgccaatgcactcaaactctcttctgtctccagacctcatctcttgcctcctttttctttctccagatgcttatcttccgtcttggatggacttaagtacgctgattcacatgaatgggtcaagcacgaaggctcagtcgccaccattggtatcactgaccatgcccaggaccatcttggagaggttgtgtatgtggagctgccagaaccaggtggcacagtttccaagaagtctggcttcggagccgttgaaagtgttaaagcaacaagtgatataaactctccaatctcgggggagatcgttgaggttaacaaaaagctcacagaaacgcctggcctggtcaactcaagcccatacgaagatggatggatgatcaaagtaaagccaagcgatc

SEQ ID NO: 26115 - DNA, 423 bp, Glycine max
  Clone ID: LIB3108-014-Q1-K1-A7
agactcttccttttctcttctctgtctaaggggtgccctgagatcacattgaacaatggtgaaggctgtggccgttcttggcagcagtgagggtgtcactggaactattcacttcgttcaggagggaagtggtccaaccaccgtaactggatctcttgctggtcttaagcctggtctccatggtttccatgtccatgccttgggggacactaccaatggttgcctctcaactggatcacatttcaatcctaataacaaggagcatggtgcccctgaggatgagaatcgtcatgctggtgatcttgggaatgttaatgtcggtgatgatggtactgtcagcttcactattactgacagccagattcctgtcactggaccaaacaacatcatatgaagggcggttgttgtccatgctgatcctga

SEQ ID NO: 26116 - DNA, 408 bp, Glycine max
  Clone ID: LIB3108-014-Q1-K1-A8
cccacgcgtccgcccacgcgtccgccaaaattagggtttttgtcgtagcaggaagaagcagcaatggcgccgaagataacacgcaaggtcagcagaaaccccgaattgataaggggaatcggaaagtactcgaggtcgcagatgtaccacaagaggggcatttgggctatcaaggccaaaaacggtggcgtgttacctcgccacgaccccaaacccaaacctgaaactcccactgaaaaaccacccaaattttaccccgctgatgatgtcaagaaaccccttgtcaacaagcacaaacccaaaccagctaagctcagggctagcattacccccggaacagtgttgattcttcttgctggtagatttaagggaaagagggtagtgtttttgaagcaactaccttctggg

SEQ ID NO: 26117 - DNA, 360 bp, Glycine max
  Clone ID: LIB3108-014-Q1-K1-B11
cccacgcgtccgattcatattttccatttttatttttctaataaaacaaaacaacataagcaccgttcttttctctctgaaattcccatattcatcacttctgagctctggacgagatccctctctctcccattccagatctcgccatcagattcaccctttcattttaagcaaagtcataacttgaagaaggttcatggctgctccaccggcaagggctcgtgccgattacgattatctcataaagcttctcttgatcggtgacagcggtgttggaaaaagttgcctccttctgcgtttctccgatgggtctttcaccactagtttcatcacaactataggcattgattttaagattag

SEQ ID NO: 26118 - DNA, 286 bp, Glycine max
  Clone ID: LIB3108-014-Q1-K1-B12
gcggaaatatgccttctcagaaggttgaaacgggtcatcaagacacggtccatgatgttgcaatggattactatggtaagaggctggccacggcttcatcagatcacacaatcaagataattggggtgagcaactcggcctctcagcatctagcaaccttgaccggtcaccaaggacctgtatggcaagtggtgtgggctcaccctaagtttggttctctacttgcgtcttgttcctatgatggccgtgtcattggttggaaagagggcaaccaaaatgaatggac

SEQ ID NO: 26119 - DNA, 456 bp, Glycine max
  Clone ID: LIB3108-014-Q1-K1-B2
atggaggaggagcaggaggtggtggagttggaggacttggaggtggtatgtggctatgagtgcgaaacaagtatactgaaccttgatagtattgataaatttgaaatgtttcttctgcatcaccaaaaaaaaaaaatcacttttttttatataaaaaagtatttgcttaattatattatgatttttctattttccttccttttatttatatattttttttatttattatgtaataaaacttttttgaactttttttatttttttgtaactgttatatattgtttgtactgttttataaacaatttttatataatgatattttaaatatatttttttaatttttattaaatgaatgtttattattagaaacttactattttttttataatctttttttttttaaaagtaaactaattattttttttatttattatattttaatgtttcttttatttt

SEQ ID NO: 26120 - DNA, 303 bp, Glycine max
  Clone ID: LIB3108-014-Q1-K1-B3
gttgagcaggcgttcatcatagacataaacattaaaccttagcaagactcaacaatgctagacattggaggctactgagtactcttcgtactatggaacatatcaaccattttggggaaagacatggagaatgatcatcaaattgtgaaaatagctacgagacctgcaacatcaacaccctggctaatacacgcgccatatcttcgtttactgcactacccagcagagttatagctatcactgtgctcttgaccccttttccacgtgatgatggagtcgaaacacgtggtggtggcgtcgttg

SEQ ID NO: 26121 - DNA, 327 bp, Glycine max
  Clone ID: LIB3108-014-Q1-K1-B4
gggcaatgtgcgattatcatgtttgatgttactgcccgtctaacatacaaaaatgtccctacctggcaccgtgatctttgccgggtctgtgaaaacatcccaattgttctttgcggtaacaaggttgatgtcaagaataggcaagtgaaggcaaagcaggttacttttcacaggaagaagaatttgcagtactatgagatatctgctaagagcaactacaattttgaaaagccatatttgtactgggtcaggaaacttgcagtcgattctaacttgcactttgtataatctcttgtattgtcttcacgagatgtttaaattgattta

SEQ ID NO: 26122 - DNA, 422 bp, Glycine max
  Clone ID: LIB3108-014-Q1-K1-B5
gctggacgaaaaaatatgataaagtagaagtctccgtctccaacacactcgttctctgccgctcgctggttccgccgccaatttccgggtttgatttgaattggggggaaagaaatggagtttgttaatcgaatagtggacatagctaccagagctgtaaacagcaacgcagtgatcaatgtttgtctgcttgcgtcgtttgcaacactcggcgtaagatctatgaatcagcaaaagaccattgaagctctacaggatgagaaggagtctcttaccaaatccaacaagtccattagaaagacattgtgggactggaaacagcagctttatgctgaagcctccgctgattctgcagtggttcctctggctaggctcaaagcaatctatggcgaagccccgccttcttcacgtgccacgctcgc

SEQ ID NO: 26123 - DNA, 436 bp, Glycine max
  Clone ID: LIB3108-014-Q1-K1-B6
gcttactgtgaagcgggaaagagaaattgaggagggtatcaataagaggttgtctagaaagcttgataaaaaatggaagaaaagcattgttgtaagaccacctccgtctttaaagaagcttcgggaggaagaagcagcagcagaagctgcagaaactgaaaaagctgcatgagcttacacataaatatgcaagttacagagttcaatggttaaaattattgttcagtcataattttcttgtttaaatggatgtggttgtcacgtggataatattatcttaatggtagtaatttatgtttgttccttgccggaatgttaactttattctttttctgtattcttcgtttttgatgctattgttgtttttagtttgtttatattaatttttttctattattctacttcttcatttttcttattggggtgtttttttttt

SEQ ID NO: 26124 - DNA, 418 bp, Glycine max
  unsure at all n locations
  Clone ID: LIB3108-014-Q1-K1-B7
gctctttcagggattacattaaggaaattgggacagctatcaacttgtgtgtttatataaggcgcggacgtagcactgggactatagcaatactatctacagtttgtcctgcggcaacacagtgaatatgacatgggccggagcaactgaaagcaaggcagcgatgactagcgtgtggtgaaactggatgaagaacacaaccacggcgatgaactccacctagatctgagatccgctcctccctgtgctttttttcaggtggatctcctgcgccgacgtctgcaacactatctacgggtggatcttcaagtttttgattttgtagatctggaggaactcaaatctataagtcttcgttttgtagatctacanaaaatcaaatctacaaatttttgcaatgcttcgatctcacaacgac

SEQ ID NO: 26125 - DNA, 409 bp, Glycine max
  Clone ID: LIB3108-014-Q1-K1-B8
ggcttcgaaacgcatcctgaaggagctcaaggatttgcagaaggatcctcctacgtcatgcagcgcaggtcctgtggctgaagacatgtttcactggcaagccacaatcatgggacctgctgatagcccatatgcaggtggtgttttcttagtttcaattcattttcctcctgactatcccttcaagccaccaaaggttgcttttcggactaaggtgttccacccaaacatcaacagcaatggcagtatatgtcttgacattctcaaggaacaatggagcccagctctaaccatttccaaggtccttttgtcaatttgctcattgttgacggatcccaaccctgatgatccacttgtacctgagattgcacacatgtacaagaccgacagggccaagtatgaggctaca

SEQ ID NO: 26126 - DNA, 203 bp, Glycine max
  Clone ID: LIB3108-014-Q1-K1-B9
aagaaatataactaatattctttagaataatcaaaaagaatattaaattcaaatgaattgtgagatagaaaaaatacttaaaaaggaggtttttgtaatgcttgatctaaaaacatatcatttcgtggcaccagtattaagtactctatggttcggtgctttgtcagttcttttgatagatatcaaatcgtttttttcatatt

SEQ ID NO: 26127 - DNA, 428 bp, Glycine max
  Clone ID: LIB3108-014-Q1-K1-C1
cgtgaactttctttctccatcggcaacttcttctccgatgacgacagcttcttcttctttctttcctagggcgggatcgttgttgagttgctcttcgaaaactctctccgctttctcctcgttcaacacgttctctgtttttgtcgccagcagtgagagcaaggcggcgatgacgagcgtgtggtgaaactgcatgaagaacacaaccacggcgatgaactccacctagatctgagatccgctcctccctgtgctttttttcaggtggatctcctccgccgacgtctccaacactatctacgggtggatcttcaagtttttgattttgtagatctggaggaactcaaatctataagtcttcgttttgtagatctacaaaaaatcaaatctacaaatttttgcaatgctccgatctcacaacgactttg

SEQ ID NO: 26128 - DNA, 439 bp, Glycine max
  Clone ID: LIB3108-014-Q1-K1-C11
cccacgcgtccgcgcagatattgtgattaatggcttgccatcaacggaaacccgtgaggtatttgaagaaattagcaagtactggaaagagagaatcacagtgcctgccatcatttccttagcaaagggtgtggaggctgaattggggcctgaaccacggataataactcccacgctaatgatcaatcaagcaactggagttctcattgagaacatcctttaccttggaggtcctaacatttgccttagaaatttactacaaggaatatgccaacgctaggatttgttttgctaatagtgtatgaatccatttgcataattttttgatggtattccactttatagtgtggattatttgttcctttgtctttattaatttatggtgtgtttattgtttttttttttttttttttttatagttttttttttttctaaattt

SEQ ID NO: 26129 - DNA, 431 bp, Glycine max
  Clone ID: LIB3108-014-Q1-K1-C12
gacacaactgcatggactctagggcgaatgttcgaatttttgcatggatcagctctggatactccgattattactccagcaaactgccaacagattattactgtgctgcttcagagcatgaaggatgttccaaatgttgctgagaaggcttgtggtgctctttattttcttgcccaaggctatgaagatgctgcatctgcgtcctctccattgacccccttctttcaagatattgttcatgctcttctcactgtaactcacagagaggatgctggagaatcccgccttagaacagcagcctatgaagccttaaatgaagtaatgaggtgttctaatgatgaaacagctcctatggtggtacaaacttgtcctttcatcatgatggagcttcatcagactcttgagaatcaaaagggttcatctgacgagag

SEQ ID NO: 26130 - DNA, 345 bp, Glycine max
  Clone ID: LIB3108-014-Q1-K1-C2
gcgagcgaactttcattctccatcggcgacttcttctacgatgacgacagctgcttcttctgtctttcctagggcgggatcgttgttgagttgctcttcgaaaactctctccgctttctcctcgttcaacacgttctgtgtttttgtcgccagcagtgagagcaaggcggcgatgacgagcgtgtggtgaaactgcatgaagaacacaaccacggcgatgaactccacctagatctgagatccgctcctccctgtgctttttttcaggtggatctcctccgccgacgtctccaacactatctacgggtggatcttcaagtttttgattttgtagatctggaggaa

SEQ ID NO: 26131 - DNA, 346 bp, Glycine max
  Clone ID: LIB3108-014-Q1-K1-C3
ctccggctgaaacctttcttcacaaaatggcctcaactacactaacaaccctctccctgcgcaacctctcttatcctacaccctcctcctcttcttaccctacgcacctctccgccaacccctcctccctccaattccccaacttctcccaccgcgccaccaccacgcgccgcgcccgcgtcgtcgtcgtctccgccgtcgaggcaccggagaaaatcaccaagctcggcgacgaaatcgcgggactcacgctcgaggaggccaagaacctcgtcgacttcctccaggacaagctcggcgtctccgcggcagcgttcgcccccgtggccgtcgccgcgggtgccgt

SEQ ID NO: 26132 - DNA, 312 bp, Glycine max
  Clone ID: LIB3108-014-Q1-K1-C4
gatcgacagtgcccgtgcttcagaaagtgttcgtaactacactaacgatcctttttctgggtatcctggggtatgctacgccctgcttctcttcttacaatactcacttcgttgtctaccccttcaaccctgtcaatttgctatcttctcccaccgtgccagcaccgcgcgccgggccagcgtcgtctgcaactgcgtcgacgaggcaccggagaaaatcacctagctcggcgacgaaaatgcgggactcacgctcgtggaggccaagaacctctactacttcctccaggacaagcttggctactgcggggc

SEQ ID NO: 26133 - DNA, 328 bp, Glycine max
  Clone ID: LIB3108-014-Q1-K1-C5
gcgaaaatacatcacaaaatggcttatacgatgactacaagctacttattctgtgtatcctagggcgggatacgaccgctgaactgctacttacaatactcacttcaatttacagggcgggccccctgaaatgtgccaacgtctccaaccgtgccagcaccgcgcgcctcacccgcgtgggcggcaactgcgacgacaacgcaccggcgaaaatcaccaagctcggcgacgaaaacgcgggactcacgctcgaggaggccaagaaccatctctacttcctccaggacaagctcgacgtactgcgggcagcgttcgcccccgtggccga

SEQ ID NO: 26134 - DNA, 295 bp, Glycine max
  Clone ID: LIB3108-014-Q1-K1-C6
cgttgacagcttaagttgctttgttatataatacccaatatcatttggagatgtacattatttcaaatcatgggaactttcgcaagtcagaattacatttagcgcttatcccattttcagcacatagtatattacgcataaaacacaccttgttgtgtttagttgtagtttattttgtgtctcttgccttcatggatctctgtttttcttgagattttttttttttttttttatcagtttctactttttatatttttctacttatttatatatcttttttttcttttttttattt

SEQ ID NO: 26135 - DNA, 438 bp, Glycine max
  Clone ID: LIB3108-014-Q1-K1-C7
gcctttcatagtgagatagccctagaaatgtttcgtgattctttgtttgctctctttcgactttctgccttctcctcctcactcctacctttaaccactgctcaagattacgttctcgacacggacggtcacgcggttgaaaatcacggtacatactatttgttgccagcgaaatcaggaagcggcggtggtggaatagaggtagccgcaactggcaaagaaagttgcgctctcactgtagtgcaatctctgaacgaggactccatggggctaccattgaagctttcaagcccatccatcactacgtctcacttcaccgaatacacttcgttgagcatcgagttcacttcggcgccggcgccgtgttcgtccgcttcggagtggaccgttgtcaagggattacccgaaagacgcgccgttaaacttaacgattacggg

SEQ ID NO: 26136 - DNA, 390 bp, Glycine max
  Clone ID: LIB3108-014-Q1-K1-C8
caaaattgactttgacttccaagattttgatatccctcctaccaaaggtaaaaatggcaagggtgggaataatggtaaaaacaataatgacaagggtcatggtagcaataatggcaatgtgggccaccacatgggccccatgggtcagatgggcccaatggttcagagaggtccaatgaatcagatgggcccaatggaccatatgaggaatatgaacatcaatatgccggcggtgcaaggattaccggcagccacggccgcagcagcgatgaacggtggttactaccaagggatgcagatgcagatgcaacaacctaacccttacaacatgcagcagcagcaacaacaacagcaactaatggccatgatgatgtaccaacaacaacagct

SEQ ID NO: 26137 - DNA, 434 bp, Glycine max
  unsure at all n locations
  Clone ID: LIB3108-014-Q1-K1-D1
gcctttcatagtgagatagccctagaaatgtttcgtgaatctttgtttgctctctttctactttctgccttctcctcctcactcctacctttaaccactgctcaagattacgttctcgacacggacggtcacgcggttgaaaatcacggtacatactatttgttgccagcgaaatcaggaagcggcggtggtggaatagaggtagccgcaactggcaaagaaagttgcgctctcactgtagtgcaatctctgaacgaggactccatggggctaccattgaagctttcaagcccatccatcactacgtctcacttcaccgaatacacttcgttgagcatcgagttcacttcggcgccggcgccgtgttcgtccgcttcggagtggaccgttgtcaatggattacccgaaggacgcgccgntaaacttaacgatta

SEQ ID NO: 26138 - DNA, 347 bp, Glycine max
  Clone ID: LIB3108-014-Q1-K1-D10
aaaggatcagaggcaaggggtttgggttgtgctgtatgagaaaaccaaaccactaaaaattactatgagcagagaattaaaaaaagtgttttgggggtgaagggaaaaacatgctgaaaagcttgtgttctcggatctgaagggttttgacttttgaaatcactctagtgtgtgcttttggcatacctttatatggagttatactctgaagcaagagaagatggaagatacggtgcagtttcgatcttcctcaagtttggcaacttttatggttattattttggcatcttgggttggatgctatgcttatgatgttgttccactgatctttttgaaatttcatgtga

SEQ ID NO: 26139 - DNA, 369 bp, Glycine max
  Clone ID: LIB3108-014-Q1-K1-D11
cccacgcgtccgataacccataaccgaccgcaccaccgttttcctttgctttgcgttctacaatgtcgaaaacctcagagattattacatgcaaagctgctatttgctggggaataggaaaacctgtgactgtggaagagatacaagtagaccctcccaaagccaccgaagttcgagttaagatgctttgtgccagtatatgctccacagacatctctagcacaaaaggattcccacataccaattttcctatagcacttggacacgaaggagttggtattatagagagtgtcggtgatcaagtaacgaatctgaaagaaagggatgtggtaattccaacatacataggggagtgtcaagaatgtgaga

SEQ ID NO: 26140 - DNA, 328 bp, Glycine max
  Clone ID: LIB3108-014-Q1-K1-D2
cccgaagacacgcgcgcctgcgatgaacgacgaatatgcgattctcgctgctgtcgtcggactttctgacgggtcgaccgcactgctacctttaaacaatggtcaagattacgttatcgacacggtctgtcacgcgggtgaaaataacggtacatactatttgttgccagcgaaatcaggaagcggcggtggtggaatagaggtagccgcaactggcaaagaaagttgcgctctcactgtagtgcaatctctgaacgaggactccatggggctaccattgaagctttcaagcccatccatcactacgtttcactttaccgaatacact

SEQ ID NO: 26141 - DNA, 229 bp, Glycine max
  Clone ID: LIB3108-014-Q1-K1-D3
cccacgcgtccgtattaattagttagcatagtctcactacaaacattcccttctgtttcattaattgtgaccttaagcttttatattgaaccgtgtcaatggccggtcctgtgaggactttagctcttgttgctttgcttgttgccattaatgcaatggtgtgtgaaagtagagtggtaagaaaggaccttggtttggaccttggtggggtgggaattggggtgggtgc

SEQ ID NO: 26142 - DNA, 223 bp, Glycine max
  Clone ID: LIB3108-014-Q1-K1-D4
cagcgctcaaccaaagatgcagaacgaggtaggacagatcactgagctttacattcctaggaagtgctgcgccacaaacagattgattactcgctaaggaccatgcttcgggtcagatcaacattgggcatgtggatgataatggcgactacaatggctatttgtccacttttgtcttctgcggatgcattcgtgctctgggtgattgctgtcagtgctatat

SEQ ID NO: 26143 - DNA, 476 bp, Glycine max
  Clone ID: LIB3108-014-Q1-K1-D5
gtacgcctgcggaaccgggccgggacccacgcgtgcggccttccatcgtgagatagccctaaaaatgttacgtgaatctttgtttgctctctttctactttctgccttctcctcctgactcctacctttaaccactgctcaagattacgttctcgacacggacggtcacgcggttgaaaatcacggtacatactatttgttgccagcgaaatcaggaagcggcggtggtggaatagaggtagccgcaactggcaaagaaagttgcgctctcactgtagtgcaatctctgaacgaggactccatggggctaccattgaagctttcaagcccatccatcactacgtctcacttcaccgaatacacttcgttgagcatcgagttcacttcggcgccggcgccgtgttcgtccgcttcggagtggaccgttgtcaagggattacccgaaagacgcgccgttaaacttaacgattacggga

SEQ ID NO: 26144 - DNA, 335 bp, Glycine max
  Clone ID: LIB3108-014-Q1-K1-D6
cccacgcgtacgaaagttttaatactatttaaaaaaaaaatattaaaaaaaaaaaaaataaaaaaaaaaaaataaaaaaaaaaaaaaaaaaaaaaattaaaaaaaaaaaaaaaaaaaaaaaaaaataaaaaaaaaaatataatataattattaattatataaaaatatatatataaatattttttttttattttaattaaatatttaaaaaaatttttatttatttatttatatatatttttttttttttttattttttttttatttatattattatttttttataatttgtattcttttttatatattttttttttcattatgttttaattttt

SEQ ID NO: 26145 - DNA, 418 bp, Glycine max
  Clone ID: LIB3108-014-Q1-K1-D7
gatatttcttgaaaccttgtgttaaaaattgtgtccttttgaacttcaataaaaatttgattttttttttcttagtttcatacccacatacccattgttggatttgaactagttttacttgccttatggcccttcatataagcagcggttgttttactgtgatgtgtaactcaagagttcacagaataagagctgttgcttcagagggttctgctactcttaatacagttgtggaggagaaggtgaaattgggtggctctgatttgaaggtatcaagggttggaattgtatcttggtcttggggtgataccacttactgttacaattttgaatgttatgatatgaatgagtaggtttttttagcttttttcattgtcagtattgttggtggtctactctttttttcacttctgttttt

SEQ ID NO: 26146 - DNA, 278 bp, Glycine max
  Clone ID: LIB3108-014-Q1-K1-D9
cagtttcaccgcacgaatatcttgttgtttggagcgatccgagaaaaactctgtaaacatgttggtttaccaggacctccttacaggtgatgagcttctctctgactccttccgttacaaggaaattgagaatggaatgctgtgggaagttgaggggaagtgggttgttaaaggagcagttgatgtagacattggtgcaaacccttctgctgagggtggaggagaagatgagggagttgatgatgcagctgttaaagttgttgacattggtgacacat

SEQ ID NO: 26147 - DNA, 276 bp, Glycine max
  Clone ID: LIB3108-014-Q1-K1-E1
tcttgggagaagaggtcgagtttcacagcagcaatggtgtacgtcaaggctcagaaatcaaaagcctacttcaagagatatcaagtcaagttcaagagaagaagagagggaaaaaccgattaccgtgccaggattcggctgattaatcatgacaagaacatatataacacttcgaaataccgattcgttgttcgctttagcaacaaggacattgttgcacaaatattattttctagcattgcttgcgatattgttctttgttgagcatatgcacat

SEQ ID NO: 26148 - DNA, 340 bp, Glycine max
  Clone ID: LIB3108-014-Q1-K1-E11
tttgcattgcaaagcaaaaaccttgcaaattgcaatggcttccaacaaggttattgccaccatcttggttctttctctccttgcctactcaacatcattcaccaatgcatgtggcacatgccacccaaaacctactccttctccccctcctccatcagggaagtgccccaaggacacattgaagctaggggtgtgtgctgatgttctaggacttgttaatgttgttgttggttcccctgtctctagcaagtgttgtgcattgcttgaaaggttggcttgatcggaggctgcacttttgcctttgcactgctattaaggccaatgttcttggaatcaactt

SEQ ID NO: 26149 - DNA, 328 bp, Glycine max
  unsure at all n locations
  Clone ID: LIB3108-014-Q1-K1-E12
cgaaaatcattttctctttcttttcatttctctctgtctgatatgaacaacagaactcgttctcagatctcaaacggtggtagttagaagagcaaggtgagaggttcacgttcctttgtttttcatctaaattttcggaaatggaggaggcgatagatgctactgcaactttggattatgcttcaattcagatttttcctaacctaaaaaggtatgaggcatttgtctgtaaggggaaacaatccgacaaagtagcaactggacatttggaacatntggtgcctcatttacctgcaataaatgatttacatgctgaaatgatttgata

SEQ ID NO: 26150 - DNA, 439 bp, Glycine max
  Clone ID: LIB3108-014-Q1-K1-E4
ataaaactgatgatgaagggttttctccaaagtcatccagatttctgaaggttaccaagagcacgagaaagacaccagaagctgcgagtcctaaagtagaagaacaaacaccatccaaaagaaagaaattagacaagaaaaaggccaaaggaaacaaagaggaaaaggaggcagtgaatgaatcaaacattgacaagcatatagaccataaagaatctattcattcaatctggacactatcatcagattctgagtcattccacgatcatagcccaaaaagagatcatattgatcaggtggaaacctctcagcatgaaatatcagatgaaggagagtgtggggatggacttgtttttggtaatgatggaaagtttccatccaaaaagggttcaaaagagaagtcttcacaaaaacaaatacatgtagaagggcatacacc

SEQ ID NO: 26151 - DNA, 409 bp, Glycine max
  Clone ID: LIB3108-014-Q1-K1-E5
cgcctctgttctctgtcactgctgcgtctctcgtaaccatgcctaagcaaatccacgagattaaggacttccttctcactgctagaaggaaggacgcaaggtcggtgaagatcaagaggagcagagatgtggttaagttcaaggtcagatgctcgaagtacctctacacactttgtgtgtttgacccagagaaagctgataaattgaagcaatctcttcctccaggtttgagtgttcaagacctgtaaaggtacagggcgagagaccaagaagaagcaattcattgattcttctgaacttcgtttttctgtagttgaaacttgagattcttttcagtgtcttttatttttagatcattgctaggacatgtgtgttttcatctgttttggaatatgattcttgaatttat

SEQ ID NO: 26152 - DNA, 432 bp, Glycine max
  Clone ID: LIB3108-014-Q1-K1-E7
cccacgcgtccgcccacgcgtccgcccacgcgtccgctgctttggaggatactgacaagaaggatggttcagaagaaaatgcagctactaataagaaggctgattctgattctgaagaggaagaaaacgataatgagcaaaaagagaaaggcatctcaaacaagaagaaaaagcttcaacggaggatgaaaattgctcaactgaaacaaatttgctcaaggccagatgttgttgaggtgtgggatgctactgcatcagacccaaagttgctggtgttcttaaagtcttataggaatactgtacctggacctaggcattggtgccagaagagaaaatttttacagggtaaacgagggatagagaaaccagcctttcaacttccttgatttcattgctggcactggaattgagaaaatcagacaggcttatatt

SEQ ID NO: 26153 - DNA, 432 bp, Glycine max
  Clone ID: LIB3108-014-Q1-K1-E8
caaaactcaagcattgcatccctcttgatttgtagtttgttttgtgctttagataaaagttctgccaaatcaagaggggttttaagatcatagtgtgtgttttgcaacaatggctaagttctttgctgctatgatcttggcactctttgccatttccatacttcaaacagtggtaatggctgctaatgaacaaggaggccacttgtatgacaacaagagcaaatatggaagtggaagtgtcaagagttaccaatgcccatcacaatgctcgaggagatgtagccagacccaataccacaagccctgcatgtttttctgtcagaagtgctgcaggaaatgcctgtgtgtgcccccggggtattatggtaataaagctgtgtgcccttgctacaacaactggaagaccaaagaaagaggacccaagtgcccttg

SEQ ID NO: 26154 - DNA, 453 bp, Glycine max
  Clone ID: LIB3108-014-Q1-K1-F10
acttagagcagttttctctcggagacacattcattatcaagtgtgagttcatcataaaacaattgattgatatcttgccatcatttatggcttccttttggccattcttggcaattgtcatggccttaatggcatgcaattgttcatcattggcctctgctttttgacatagcatgcatgtttcaaccatttcatcagcacttacatcattgctaggtgcctctttatacttactttctactatgtcacctgatattgagcctttggtttctactttgtgatgttctgctttttttttacttgtgtttttattgttttttttttctgttttttctatgccctttttactcctgattttctttattttttttttgttttttttgggttttctattattactgtctattggttctttttttctgttcttttatgttttttttttcttcttgtttt

SEQ ID NO: 26155 - DNA, 321 bp, Glycine max
  Clone ID: LIB3108-014-Q1-K1-F4
cccacgcgtccgaaacgctgaacagttgattgttggtagccatggctgcagcagccaccgcgaaaccgcttctgtcactgtggtttatgcttctgctaccgtcgtttcttcggatcgccgtcgcttaccgacccggcgacatcgttcccatgagctgcatgggtcaataccactcctcgcgaaccgtgtggcaggacctcattggccgccactgccccatcttcgccgggaatcgcgaggggtggatgcccatacccaagcccacgggttacactggggctgatgctattaaaatatggtttcaggttggaggggaaaagt

SEQ ID NO: 26156 - DNA, 350 bp, Glycine max
  Clone ID: LIB3108-014-Q1-K1-F7
accttcgaaatattaaagtgtttgtttaaaggggagaagcggacatgaaaaaacaagggggcatcaaggcgtatagctgatgtgggttatggtacatttgagcatttcaggagtgttgtccaagttcaaccacaccactactacaacttctctgctgtgcgatggctccgtaaaggactgccttaacgttcaccacttggactcacagctttccactcatttcagcacccacttgcgcagaattcttgctggagaaaaatgctgcagaggtatacactcagactgcaggtacaggtgatcccaataattccaactgctgttcgaccgcaaccggttatcgttagtgtggg

SEQ ID NO: 26157 - DNA, 211 bp, Glycine max
  Clone ID: LIB3108-014-Q1-K1-F8
gagattacaaaattctcttccgtttcatgattagggtttcaccgttacagtgaaacatggcaaaaccaaagcgaatctctctgcgtatctttgcgctgctcctcttgatttccacctcttcgtttcagcttctccgcgcttccgatgacgccgatgatgatgcgatcttctatgattcgttcgacgaggattttgaagaccgttgggttgt

SEQ ID NO: 26158 - DNA, 314 bp, Glycine max
  Clone ID: LIB3108-014-Q1-K1-G1
cccacgcgtccgtctctcacgagtttgtataaggagagaagcggacatgaagaagcaattagcatcaaggcgtttgctgatgtgggttatggtacatttgagcatttcaggagtgttgtccaagtccaaccacaccacaactacaacttctctgctgtgcgatggctccgtagaggactgcctcaacgttcaccacttggactcacagcttcccaccatctccagcacccactttcgcagaatcctcgctggagaaaaatgctgcagaggtaacactcagactgcaggtacaggtgatcccaataatcccaact

SEQ ID NO: 26159 - DNA, 301 bp, Glycine max
  Clone ID: LIB3108-014-Q1-K1-G12
gtggaataaaaaataaagctctttgtgatggaaaccagattcatagccttgcatggacactttggaaagagaaaaatgctttacagttgattgactcaagcataaaggactcatgtgttatctcagaagtactgcgatgcatccatgttagtctcttgtgcttgcaacaatacccgggagataggccaaccatgacatcagtaattcaaatgttagggagtgagatggaactggttgagccaaaagagcttaggtttcttcaaagcaagattttgggatgaaggaaaaataaagctttaat

SEQ ID NO: 26160 - DNA, 430 bp, Glycine max
  Clone ID: LIB3108-014-Q1-K1-G2
ctagatcgtgagcgtctcacgagtttgtttaaggagagaagcggacatgaagaagcaattagcatcaaggcgtatgctgatgtgggttatggtacatttgagcatttcaggagtgttgtccaagtccaaccacaccacaactacaacttctatgctgggcgatggctccgaaaaggactgcctcaacgttcaccacttggactcacagcttcccaccatctccagcacccacttccacagaattctcgctggagaaaaatgctgcagaggtaacactcagactgcaggtacaggtgatcccaataatcccaacttatgttcgaccgcaaccggttatcgtaagtgtggggccgcaactgatcctggtcaatccaaccgatgtgctgatacaaaagcctttcacaggggttggcatatgtaaaccatttat

SEQ ID NO: 26161 - DNA, 260 bp, Glycine max
  Clone ID: LIB3108-014-Q1-K1-G3
cccacgcgtccgcgcagatattgtgattaatggcttgccatcaacggaaacccgtgaggtttttgaagaaattaccaggtcttggaaggggggattaaaaggccttgcatcattttcttaacaaaaggtgtggaggcttaattggggcctggaccaccgataataacttccacactcattatcaatctagccactggagtccccattgagaacattctttaccttggagggtctaacattggcttagaaatttacaacaa

SEQ ID NO: 26162 - DNA, 437 bp, Glycine max
  Clone ID: LIB3108-014-Q1-K1-G4
caaaattgactttgacttccaagattttgatatccctcctaccaaaggtaaaaatggcaagggtgggaataatggtaaaaacaataatgacaagggtcatggtagcaataatggcaatgtgggccaccacatgggccccatgggtcagatgggcccaatggttcagagaggtccaatgaatcagatgggcccaatggaccatatgaggaatatgaacatcaatatgccggcggtgcaaggattaccggcagccacggccgcagcagcgatgaacggtggttactaccaagggatgcagatgcagatgcaacaacctaacccttacaacatgcagcagcagcaacaacaacagcaactaatggccatgatgatgaaccaacaacaacagcaacaacagcaagcaaacatgaacatgtacccaccacacatgatgtatg

SEQ ID NO: 26163 - DNA, 152 bp, Glycine max
  Clone ID: LIB3108-014-Q1-K1-G6
gcgaggcttgcattgtctattgagttatcgagctaaggtacctatttcgggggtagcaataacgggtgctagcagaatatcatgcatctaagggctcgcgcatgaacattttggatacatcatgacctactcatggtttactgtcgcactgt

SEQ ID NO: 26164 - DNA, 236 bp, Glycine max
  Clone ID: LIB3108-014-Q1-K1-G7
aaaaaaaaaaaaaaaaaaaaaaaaaaaaaaaaaaaaaaaaaaaaaaaaaaaaaaaaaaaaaaaaaaaaaaaaaaaaaaaaaaaaaaaaaaaaaaaaaaaaaaaaaaaaaaaaaaaaaaaaaggggggggcccttttaaaggatccaattttccttccccgggcttgcaacgtataattttttttttggggtccccaaaatcaaattccttgccccgcttttaaaaccgtggggcct

SEQ ID NO: 26165 - DNA, 346 bp, Glycine max
  Clone ID: LIB3108-014-Q1-K1-G8
aaataactaggacaattgtgaaactttctgtgcaacgaaactgctaatgcaaaccaaatctcatgacaaaacacctgtgacacacaacaatacatataacactccagctttatggccatgtagtggccgattcagatgaacttcattacaaatcaaggggatagaccaatgttatatggatcacagacatgcgatgctgtaataaggactcgtgcgcgtaaacatatgctgcatttcaacttgcctacggatgttacacgagtgaactttggtcatacgcataaaccgtctactaacacgcttatctcgacgacatccactgcaagtcgaacgtgctctgtgcctt

SEQ ID NO: 26166 - DNA, 342 bp, Glycine max
  Clone ID: LIB3108-014-Q1-K1-H11
cctctttcttcctcttcctcagtagtgcgattttcgattctcttctctgcaactatgcctaaccctaaggtcttcttcgacatgaccatcggcggtcaacctgccggccgcatcgtgatggagctctatgccgacgtgactcccagcaccgccgagaacttccgcgcgctctgcaccggcgagaagggcgccgggcggagcggcaagcccctccactacaaaggctcgtccttccaccgcgtgatcccgaacttcatgtgccagggcggcgacttcaccgtcggaaacggcaccggaggcgagtcgatctacggcgccaaagttcgccgacgagaacttcgt

SEQ ID NO: 26167 - DNA, 404 bp, Glycine max
  unsure at all n locations
  Clone ID: LIB3108-014-Q1-K1-H2
gcagaaagcaagctcatcctagagttttaaaaatggcagcagcctcctccatggctctctcttccccatccttggctggcaaggccgtgaagctgggcccatcagcccccgaagtcgggagggtcagcatgaggaagaccgtcaccaagcaggcctcctccggaagcccatggtacggcccagaccgcgtcaagtacttgggcccattctctggcgagcccccgtcctacctcactggcgagttcccaggtgactacggctgggacactgctgggctttcggccgacccagaaaccttcgccagaaaccgtgagctcgaagtgatccactccaggtgggccatgctcggggccttgggctgcgtcttccccgaactattgtcccgcaacggngtcaagtttgga

SEQ ID NO: 26168 - DNA, 401 bp, Glycine max
  Clone ID: LIB3108-014-Q1-K1-H4
gaaacagtgtgatgaaaatgaaggtccttgttttcttcgttgctacaattttggtagcatggcaatgccatgcgtacgatatgttccctctccgaatgaacactggctatggtgcccgtactccggaggtgaaatgcgcaagttggaggcttgctgtggaagcacacaacatctttggctttgagaccattcctgaagagtgcgttgaagcaacaaaggaatacatccatggcgaacaatatagatcagactccaaaacagttaaccaacaagcttacttttatgccagagacctcgaagtccatcccaaggacacatttgtgttcagtatagatggcaccgtactctctaatattccatactacaaaaaacatggatatggggtggagaaatttaactcg

SEQ ID NO: 26169 - DNA, 436 bp, Glycine max
  Clone ID: LIB3108-014-Q1-K1-H5
cccacgcgtccgcccacgcgtccggaaagaaaggcgttagagcagagtgaggcatcatcagaatctgaatctcacatgggcgaacagacgctaggtcaagcacaacccctccccgcccccgatgctgccacggcccactccgaactaaacaatgtccctcagccgacaacctccccagctacgaaaatccccctccgtccccgcaagatccggaaggtctctccggacccctccacctccgaagcccccatcaaacccgccaaacctgttggccgcaacaccacctccaaagctgctccgcctcgagccctgactgtggtccctcgcatagtggctcgctcactctcctgcgacggcgaggtcgagatctcgctccgctacctccgcaacgcggaccccctcctctcccctctgatcgacattcaccaacccccaa

SEQ ID NO: 26170 - DNA, 358 bp, Glycine max
  Clone ID: LIB3108-014-Q1-K1-H6
gggcagcactccatcctcatggaaggttcattggtggagacacagtcaatccttgaagcagggtcagtagttccaccaggaaggcgaattccaacaggagaactgggggcaggaaattcaacccggtttgggaagactttgacccattaaaaaattttaaaaattcccaaactggccggtggttttaatgaactggagcaaaaaccattactcaaagttctttccttattccacagttttttgggaggtggaaaagttaaaaaagccttggggatttccggttgaaggtcctttttggtaatcctcaaaggaatcggtaacttgaagtttgcttgtgagggaattaggatttaaacca

SEQ ID NO: 26171 - DNA, 434 bp, Glycine max
  Clone ID: LIB3108-014-Q1-K1-H7
gtcaagaatggcaatgcgtgtgtctccttcagcttcaagtgcactctctctcctaaactgcaagcaaccacctccagtttcatgcatccgtgtaccttgtctctctcgctcctcgccgccatcgctctcctacaccttcaatcctcttaggtccttcatcggtcacggcggaagcagaagcccagggtttcgtgtccattgctacgctcctgctcctctcactcctcccaatctgcaatggatctctaccatttcctcagtggttttgatacatataccaaagtcaaaattatggtcaaagaaagaagataaaaaatgctatgtgagaaattgactttttaggaacttccatgatttctaaatgtaatcaagggaaaactaggacactgaccattgggaaccttcgccgtgggtaaaatttttcttctcaatta

SEQ ID NO: 26172 - DNA, 274 bp, Glycine max
  Clone ID: LIB3108-015-Q1-K1-A1
gcattagttctcatcaaaatcatcatttttttgtctcaatcttgtatcaacataactgaatctcagcctcacttttttttctcggataagtacatacatacatacatatgggtttttttcattaattatgatgcagaacagcctaataacaatagacaaaataacatgaaacacagtgaaattggggaaaacatgaaagaagaaagaaaatgatgattttgatgagaactaatgcaatttgactgcgtcgctcgggcgatatgtatatatatta

SEQ ID NO: 26173 - DNA, 453 bp, Glycine max
  Clone ID: LIB3108-015-Q1-K1-A10
ctctctctctcaccttcgagaacatcgacaaaaagataaagggtgaataattagcagctccttctagttccggtgtcggtgtgggtgtttgaatctggtgaaggatgtcaattgttccaatcaaccagggtgatgccaacggctccaaccccttcgcttcgtggggtcaattcgtggattttcctctccctccttccatctccggcttcttccccggcttggaattcggattcggattcggatcatccgtgaacacacgtgtggactggagggagactcccagagcgcacgtgtggaagctggtgcttcccggcttctccaacgaggacgtgctggttgagctccaagacgagagggtgctccaagtcagcgtggagagcggcaacttcgtcacgagttttaagggtccccgacaacggtaacctagaacaacttaaagccaacatgcgtcac

SEQ ID NO: 26174 - DNA, 451 bp, Glycine max
  unsure at all n locations
  Clone ID: LIB3108-015-Q1-K1-A11
cgcacattaagttatataacacatatttgcttgcttagaaatactattattgaagatatggggagtgtagattatgagtaccctttgggcatgaacaactttgagagagtgcaccaagtcgaggttccaccgccacagcccgttttcaagtctttaaagtactctntgaaaggagactttctttccctgatgacccctttgaggcagttcaagaacaagccagcttccaagaagttcatgcttggccttcagttcttcttccccattttcgaatgggctcccaaatacacctttcagttcttgaaagctgacctcatagctggcatcaccatcgctagcttggccattcctcaaggcatcagttatgccaagctcgccaacctcccttcaattcttggactatgtgggtagttcattcatactcatcatcaactcttaatcggaataaaaa

SEQ ID NO: 26175 - DNA, 372 bp, Glycine max
  unsure at all n locations
  Clone ID: LIB3108-015-Q1-K1-A12
aaccatggcaatggcaacccaagcctctctcttaaccccacccctatccggtctcaaagccagcgaccgcgccttcgtgccatggaagcaaaactccagcctctccttctccagcccgaagcccgctaagttctccaaaacaatcagagcagcagtcgccgactagaccacagaggcaccagcaaaagtagaggctgcaccggtcgggttcaccccaccagaacttgacccaaacacccctgtcctgatcttcgggggcagcaccggcgggctcctgcgcaaggcacacgtggaggagttttatgtcattacgtgggactcacccaaagaacagatctttganatgcccactggcagcgccgctatcatgag

SEQ ID NO: 26176 - DNA, 175 bp, Glycine max
  Clone ID: LIB3108-015-Q1-K1-A2
ctcgttctcgtagggagctccataccccgtatctgctaaaatacgctggatccatatgggcgtcctggaccacttgggggacgacaccgtcaccgggccaaggtcggaaaacatgttgggaagctaatgaaacaccggaccttgagtatgcgacctagctcccgcacagaaactg

SEQ ID NO: 26177 - DNA, 384 bp, Glycine max
  Clone ID: LIB3108-015-Q1-K1-A3
agaacacgtagttgagaactaagaaggagtttcaaatggcttcctcaatgatctcttcccgagctgttaccactgtcaaccgtgccggtgccggcatggttgctccattcactggcctcaagtccatggctggcttccccaccagaaagaccaacaatgacattacctccattgctagcaacggtggaagagtgcaatgcatgcacgtgtggccaccagttggcaagaagaagcttgagactcttttctacctgccagaccttgatgatgcacaattggcaaaggaagtagaataccttcttaggaagggatggattccgtgcttgaaatcgagttggagcacggtttcgtgtaccgtgagcacaacaggtcaccaggatacta

SEQ ID NO: 26178 - DNA, 451 bp, Glycine max
  Clone ID: LIB3108-015-Q1-K1-A5
ggtgaagtgaacacaatggagagaagggttggctatgaggtgctggtggctttggtgacccttttggttttctcatttgcttgtgccactgcttcatcatcaggaccaacaaaactccaccaccgtgtggagcaattcaggaggaatctgcttgctaatggccttggtagaactcctccaatggggtggaacagttggaatcatttcagctgtcaaattaacgaaaaaatgatcagagaaactgctgatgcccttgtttctactggtctgtccaagcttggatacacttatgtcaatatagatgattgctgggctgaattaaatcgggatgctaagggtaatctggtagcaaaaaattcaccgtttctttctggaatcaaagctcttgcagattattgtcacagcaagggtcttaagcttggaattattcagatgctgggtattttacttg

SEQ ID NO: 26179 - DNA, 128 bp, Glycine max
  Clone ID: LIB3108-015-Q1-K1-A6
cccacgcgtacgagcatagcttgtatacgttgccatttcagcgtagcaacatgatcattcccgagaagaaccgtaaagagatctgcaaatacctctatcaagagggagtttgctttgcgaagaaggac

SEQ ID NO: 26180 - DNA, 117 bp, Glycine max
  Clone ID: LIB3108-015-Q1-K1-A8
cacactcgtgcacttagattattaccccagtgatctgcagctgctttgtgtagatagcagggactatgattgatgtttgcccagtctctgcacccagaactaattaaccacaatcta

SEQ ID NO: 26181 - DNA, 56 bp, Glycine max
  Clone ID: LIB3108-015-Q1-K1-A9
gtaacggacacaggagatcaagcattgtatttcaaattggattctgcctatcctat

SEQ ID NO: 26182 - DNA, 282 bp, Glycine max
  Clone ID: LIB3108-015-Q1-K1-B1
gtgaaggacaaaggagatgatgcattgcatgacaaattggaatctgcctatcctagcgagggggagaacttataggtggaggatggtgagcatggtgatgaggcatatcttaagacctataatagcgaagatgatagtgtaattgacaggtgagtcgaaagtgataatatgtatcctgcaatctgcggaatttgcctcacgaagttgaaggctaaggatcatgcgagttgggggtattccttacacctgcatgaattattaatggcgctctatagaatggac

SEQ ID NO: 26183 - DNA, 247 bp, Glycine max
  Clone ID: LIB3108-015-Q1-K1-B10
ctcaggtactcgtagtagtttcactagactgtctagacgtacgactggacaaattctcaggggcattaacaactccgcctccgatgagcatcgacacaccatattcgacttgagtgactataccatttcaatggaccgcttcaattcgttacagcaccccttaatttcgcttgcgagggatttgtagtactgaattaataattaaggcttcgtctttggggtcgcaaccatgcttgacatcggtctt

SEQ ID NO: 26184 - DNA, 368 bp, Glycine max
  Clone ID: LIB3108-015-Q1-K1-B11
cccacgcgttcgcggacgcgtgggcaggtaagcaagcacaacacaaccccgaaatggcttctgcttctgttcccatggctttctcgctgagctctgatatcaacaacaacaagccttcatccgaagccttcttcaggccactacccctacggcaaccaaagaggaccctcttgaccacaaaggcagtgtcaaactccaaggctcagatcaatgcatctttgaaggagaaggcagttgcaggactcacagcagcttctgtgacagcatctatggtggttccggaggtggctcatgctgctggatatgagttctgcccttccctcaagaactttctgctaagcatctttgcttgtgggtttgttctagta

SEQ ID NO: 26185 - DNA, 393 bp, Glycine max
  Clone ID: LIB3108-015-Q1-K1-B12
cccacgcgtccgatactattttcttgtcgttgagaagcttcgcgaacgacagcaaagaaccctagaccgtcacagaaccattccatagccatgtctggtgttggccctctttctcaggattgggaacctgtcgtcctccgcaagaaggctcctaccgtcgccgccaagaaggacgagaaagccgtcaacgccgcccgccgctctggcgccgaaatcgaaaccctaaaaaagtataatgctgggacaaacaaagcagcatctagcggcacttcattgaacactaagaggctggatgatgatactgagagtctagctcatgagaaggtgccaacttgacttaagaaggctataatgcaagctaggatggacaaaagcttactcagtcttaacttg

SEQ ID NO: 26186 - DNA, 211 bp, Glycine max
  Clone ID: LIB3108-015-Q1-K1-B2
tgatgtttcaaaaaatttgcaaggtaaaaatcatttgatgcttagctagaataccccaaagggttgctaacaacagccccgctgtggggacatcatagaacgaatactatgctatgatcgccaaggctggagtgcataattacacatgggacaatgtggatctgatcattgcatgctcaaaatattacagagtgtgctgccttaacattct

SEQ ID NO: 26187 - DNA, 453 bp, Glycine max
  unsure at all n locations
  Clone ID: LIB3108-015-Q1-K1-B3
cttaattgactgcagcagagacttggtttaagaaaagagagtttcttgttcataactagggttgatcaattggaggagcagggttactctgatgactagttgctttcatcttttcagaaagaaaggatcttcctcaggcacacagttgaccggagttgatatagatgtgacaaaaccaggcatgatatttgaatttgtggaagccaaaagtgcaaggaaacaaaaaggcaaggcagaagtggatagtaaatcttcgttggctgaagggaagcaagacgagtcatcttcatcaggaaccatgagctcttttgctaccatgaccttcacagcaatttatgatagaagcaattagtttgattgtgactaggtagccttgtagttggtcctcaatgatatatttttctctcccgctctatcaaagntgccaatctttgctgcattttttgttacata

SEQ ID NO: 26188 - DNA, 244 bp, Glycine max
  Clone ID: LIB3108-015-Q1-K1-B5
tcgcgtacgcatccgtagcaaccttaccagcctttccatgcatagtatctcaaaacactcagggcatcaacaccatgacctcggaggtgcaacgtctcaccaaaaacaacgtgagcgatcaaacccattcaattgactgtatcaatccggaaaagcaccctttaatcttgtttgcgagtgatttcgatgactagatttagaattaacgctacgacattttatgacgcatccatgccgtacatcg

SEQ ID NO: 26189 - DNA, 454 bp, Glycine max
  unsure at all n locations
  Clone ID: LIB3108-015-Q1-K1-B7
gtgcgtgacaagctcgatatcacttccccatctatcttcaagtttcagaagacacgtgggtggatagcaacttagaacacaagtgaactcaaagtggaacaacccaagcttgtttcacagctcaacaacaatggcttctatctcatgcatcacccaccaccccatcacttccaagctcaataatgccttctcttcaccccacgtctctgcctcaaacttggcctcacggtttctgggcaccagaaaaagagttgggttgcatagcctcacctctagaataattggaccctctaatggctccaaagccacatgctggttcaggttcggcaagaacggtgttgatgccaaaggtgctggcatctatggcagccagggccgtgatgactttgatagagatgacgtggaacagtacttcaactatatggngatgctcgctgtagaaggaacatatgat

SEQ ID NO: 26190 - DNA, 456 bp, Glycine max
  unsure at all n locations
  Clone ID: LIB3108-015-Q1-K1-B8
cggaagaaaccctagccactctcccggcgtcacgatgcagatcttcgtgaaaaccctaacgggtaaaacgatcacgttggaggtggagtcttcggacaccatcgacaacgtgaaggccaagatccaggacaaggaaggcatccctccggaccagcagcgcctcatcttcgccgggaagcagctggaggacggccgcaccctcgccgactacaacatccagaaggagtccacgcttcacctcgtcctccgcctccgtggcggcgccaagaagcgcangaagaagacctacaccaagcccaagaagatcaagcacaagcacaagaaggtcaagctcggcattcttcagttctacaaggtcgacgattctggaaaagtccagaggctccgcaaggagtgccccaacgccgagtgcggcgctcgcaccttcatggccaaccacttcgaccgccactactg

SEQ ID NO: 26191 - DNA, 411 bp, Glycine max
  Clone ID: LIB3108-015-Q1-K1-B9
cggacgcgaccgtagccactctaccggcgttacgatgcagagcttcgcgaaaaccctaacgggtaaaacgatcacgtcggaggaggagtcttggcacaccatcgacgacgtgtgggctaagatccaggacatggaaggtatccatccggaccagcaccgtttaattttggtcgggagggatttgtaggacggacgtaccacttgacgctacaacattcataacgcgtccatgcttgacatcggcctgcgcctccgtggctgcgccaagagatgacagaagaatacctacaccatgcgcactaagatcaatcataagctcaagaacgttaagctcagtatactacagttgtacaagtgcagacgattctggaacgagtccgaggctctcgtaggagtgccccaacgccgagt

SEQ ID NO: 26192 - DNA, 274 bp, Glycine max
  Clone ID: LIB3108-015-Q1-K1-C1
gcgacggatgggtggttacaccatcggaaacggcataacgaatctacatagtttctgcctgagagcgttgaatatctccatacttgttcagctaacaagactatcgacaactacagaacctgctgtcgagaaatctggtactgaaacatgagactcatggttgcaacagtgcctgatgatgacgacaatacgtggccagcgcgagagaagccactgcttgaagaaagctgctacagcaaatgcgagaagcatgctgattcatacaagagcgaat

SEQ ID NO: 26193 - DNA, 237 bp, Glycine max
  Clone ID: LIB3108-015-Q1-K1-C11
gcgacggctacgttagagtgtgcaaaggcacgtaaggatgcgttctaggcgatagttatgaaactctaatgggtactttcagcgaacagccagtctataagacatgcgcctagctctggaaggagcttgcatacactgtgtagacagggtgactaccatgactttgaatgcgacatgctcagcaaggacttcatagtacgaggatggtgatcccaatcgatacaggcagggttggag

SEQ ID NO: 26194 - DNA, 454 bp, Glycine max
  unsure at all n locations
  Clone ID: LIB3108-015-Q1-K1-C2
accaagtacaccaacaccgtcgccggggaagggagggaacactccatgtccaccaccaaagtctcctgcacaggctacatgccccattgacacgctcaaactaggtgcttgtgtggatcttcttggtggcttggttcacattggcttgggagaccctgttgcgaaccagtgctgccccgtgcttcaaggcctggttgagcttgaagctgcggtgtgtctttgcaccactcttaagctgaagcttctcaacctcaacatttatgtcccacttgcccttcagcttcttgtggcttgtggcaagtctcctcctcctggttacacctgctccctctaaaccagtgaaaggattgaggaaaatatggtcaaaatcgacatgagaggatgtcgagccacactatctctcttctgtcctgattggaaactgctgtgtttgatntgctattatttgaaaaac

SEQ ID NO: 26195 - DNA, 370 bp, Glycine max
  unsure at all n locations
  Clone ID: LIB3108-015-Q1-K1-C4
attttatactatacccacattttgataattatttttctagttgataagccatggctactcgaggaaagcttgaggttgacgttgatctcaagtctaacgcagacaagtactggcaaacccttaggaactccactgaaatattccccaaggccttccccaatgattacaaaagcattgaggttcttgagggtgatggcaaatcacctggttctatccgccacataagttatggtgaaggttcaccacttgtgaagtcatcctttgagaagattgaggctgttgatgaagaaaagaaggtagtgtcgtacactatcattgatggagaactcctccagcactacaaaacattcaagggagacatntctgtgac

SEQ ID NO: 26196 - DNA, 278 bp, Glycine max
  Clone ID: LIB3108-015-Q1-K1-C5
tcgaaaaaaaaaagcaaaagaaaaaaaaaaaatttataaaaaaaaataaaggacagacaaatataggggataaaaagaattacaaacgcaagcatccaacgatcataaaatatactatcatgtaacataaaaacaaataaaatggcgggcggtttattatgtgggttcattggtaattctctggcgttttccaatttaatagctttttattagtatacccaaattctattttttggactatcttataaaccttctccgttggaaaatcctagcctttt

SEQ ID NO: 26197 - DNA, 323 bp, Glycine max
  Clone ID: LIB3108-015-Q1-K1-C6
aagaaaccctagcaccaaatacatccaaatatccaatgattcttttgtagtgtgttgtatgatacatgtgtagctccctgggagtcaataatggagaacataggactttacagacttgaaaaaagggattcaaatatccaaccttcaaaatccctgaacaattgttgtatgtgaaatcattacttctttcttttgtatccataaaagaagtgagattgtatattataaaatatgaaaacagaattgttctgtacaaccatctatttgtactttgatattgcatagaggaaacaggtcacagggaacagccattcatttcgagc

SEQ ID NO: 26198 - DNA, 443 bp, Glycine max
  Clone ID: LIB3108-015-Q1-K1-C7
ataactcgtcctttcctttgtcgtctcatttagaaaacatggacaccgtgacactgacactcctttctctccctccggttccggtccgtacagtgtccgcgactgcatcgacctcgtcctctgtccgtctcactcactcctactcctgctcggccaggcagaggctctcctctcacagaacaagactcaggttccggaatcattcctctgcggttccaaaacttacggtgacatgcggtgcggctgtgaccgagatcaacgagacccaattcaaagacacggtgctgaaggctaaccgtccggttcttgttgagttcagcgctacttggtgcggaccttgccgtctcatctcttccgccatggaatccctcgctaaggaatatgaagacagattaacggatgtaaagattgatcatgatgccaacccgcagctaattgaagag

SEQ ID NO: 26199 - DNA, 328 bp, Glycine max
  Clone ID: LIB3108-015-Q1-K1-C8
gttagggttcacaacttttccttttccttttgcttgcgaatctgaatcaaataatcaatcatccattcattattcatcatgtcgtcggcgaagaaaatcacgctgaagagttcggacggcgaggctttcgaggtggaggaggcggtggcgctggagtcgcagacgataaagcacatgatcgaggacgactgctccgacagcggcatccctctgccgaacgtgacgagcaagatcctggcgaaggttatcgagtactgcaagaagcacgtctaggccgcgaattctgaagacaaacccttcgaggacgatctcaaggcctgggacgctg

SEQ ID NO: 26200 - DNA, 167 bp, Glycine max
  Clone ID: LIB3108-015-Q1-K1-C9
ggcacccagagacgaggaagggcgtagtatgcgactaaatgctttacagagcttaaaacggggagctgttcaaagttccacgctctctcgctttcccaaaaactgctgctgtatccacggtcagtcttgtgacatctctgttaactgtagcatcttattagtcagtt

SEQ ID NO: 26201 - DNA, 340 bp, Glycine max
  Clone ID: LIB3108-015-Q1-K1-D1
gcgattgatggttggtcacaccaccgaagaaggcttcaggaatctacatagctttttcctcagagcgttgaaaattcccacactcgctcgcttccccaaaatttcacccctttcattcaattcttccctcttctctgctactgatccatccctcgttttctccgaacaatggctgctggtgtcactgtcaagtccgaggttctagaatcttctcctcctgaaggagtttgttccaacacggtggaaaaccacctggtccagaccaatttgtctgatgggtcacccaacaagtctgtgccagcatctggacttgatgcagtgattcctagtgcaaatcagc

SEQ ID NO: 26202 - DNA, 445 bp, Glycine max
  Clone ID: LIB3108-015-Q1-K1-D10
agaaaggcacttctatgatggcatggaaatccaaagagcggatgggtttgttgtccaaactggtgatcctgaaggacctgctgagggttttattgatccaagtacagagaaaatcaggacaataccattagaaattacggtgaatggagaaaaggcacctgtttatggatcaactttagaggagcttggtctatacaaggctcaaacaaagcttccctttaatgctttcggtacaatggcaatggcaagagatgaatttgaggacaactctgcctccagccagatattttggctattgaaagaaagtgagctaactcccagtaatgccaatatattggatggtcgatatgcagtctttggctatgtaacagaaaatgaggattacttggcagacctcaaagttggtgatgtcatagaattcattaaagtagtttctgggctggat

SEQ ID NO: 26203 - DNA, 385 bp, Glycine max
  Clone ID: LIB3108-015-Q1-K1-D11
cgagcgaagatgtcgggtcgtggaaagggaggcaagggtttgggaaagggaggagccaagaggcacaggaaggtgcttcgtgacaacatccagggtatcaccaaacccgcaattcggcgtttggctcgcataggtggtgttaagagaatcagtggtctcatctacgaggagacacgtggcgtcctcaagatattcctcgagaacgttattcgcgacgctggtacctacaccgagcacgctagaagaaagaccgttaccgctatggatgttgcttatgctctcaagaggcagggcaggactctctacggtttcggaggttaatttctagggtttgcatcggcgtagcaactgcttattggttatcgttgtaaatggttgcttttta

SEQ ID NO: 26204 - DNA, 418 bp, Glycine max
  Clone ID: LIB3108-015-Q1-K1-D12
actgggagtagaataccgtgttggcaagttcccgttcatggctaatagcagagctaagggaatcgacaatgctgaaggactggcgaagatattggctgaaaaggagacagacaagatattgggagtgcacattatggcacccaatgcatgagagcttattcatgaagcagcaatagcactacagtatgatgcatctagagaagacattgcacgtgcgtgccatgcacatccaaccatgatcgaggctgtgcaagaagcctcaatggccacttatgacaagcccattcacatgtaaaaagagcccactgctacttcttggtatcattatggtccaagaatgttacaatgactcggagatgatacatgctgtgataaatttagattcaggcttttaaatgcaaatgagccccttgtttac

SEQ ID NO: 26205 - DNA, 416 bp, Glycine max
  Clone ID: LIB3108-015-Q1-K1-D2
aggaggcaaaggaggtggtgggcgtgccaacgccagtgtattaccgtggagaaaatgaatgcctaaggggaatgatacctcctaacgccgagtgtggagacccaaagggcatgcgcatccagcaaaccatttacagggacactcctgctcctatcaactgccctaactgcgctcataccgctctcactacacgcagatcaaaggccagtctggcatgcatgtgctggatgcttgatgccaatgatgctagcactttgctttcttggcccttcaatggattgcctttggcataaatatcactactgtcctaaatggcaagaacaggctgctgattttgcgaaatcagatccgttggacgtgatggatccaccacactggactgacgagagctttgcattgtctggataggatgataa

SEQ ID NO: 26206 - DNA, 451 bp, Glycine max
  Clone ID: LIB3108-015-Q1-K1-D4
gtttttccaatagcccagaaattgggggagagggtccttgaaagctgtgcaaccaagcttaaaccctacttggttcaatcagtgaaatcattgggtatatctgtggatgattatagtgcagtacttgcttcaatatgccaagatacatctgatgacttggagaaaaatgatacatgtgttactagtgagcatgtggaagataagagtgagtcagcaaaacaatcactggaggagtcaacacatgtggttaaaaaagattcaagggaagttacatcctctcagcaagaaaatcccgatgatgtgaataaatctccaaagtcagtcatgagcaatggtgttgcatgtgttggagaagataatgctttagctgattccgagtccattaaaaaaaaagaggatgctgattggtctaatcactctgatggtttgaatacttttggtcatggggtgc

SEQ ID NO: 26207 - DNA, 448 bp, Glycine max
  Clone ID: LIB3108-015-Q1-K1-D5
gttttaaacaacagataatttggttggacgaggtgggtactcggaagtatacaaaggtgatctttcagatggacgaaccattgctgtgaagaggttggccaaggacaacaaggatcctaacaaggaaaaagagttccttatggaattgggtgttattggacacgtctgccatcctaatactgcaactttagtgggctgctgcattgaaaatgggctttatctgattttcaattactctcaaaatggaaatttggcaactgcactgcatggtaaagctggagatccactagactggccaatcagatacaaaattgccattggtgttgcaaggggccttcattatcttcataaatgttgcaaacaccgaaataattcaccgtgacatcaaagcttttaatgttcttctgggtcctgattatgaaccacaagataacgattttgggcttgc

SEQ ID NO: 26208 - DNA, 394 bp, Glycine max
  Clone ID: LIB3108-015-Q1-K1-D6
ctggcccggtcacacgcctgatgttattttgattggaactggttctgagttggaaattgctgctgctgctgctgaggatctaaggaaggaaggaaaagctgttagagttgtttcttttgttagctgggaactttttgatgagcagtcagatgaatacaaagagagtgttcttcctgcttcggtaacagttagagttagcattgaggcaggatcaacatttggttggcaaaagattgttggaagccaaggaaaggccataggcattgatcgatttggagcaagtgctccagcaggaaaaatatacaaagagtttggtatcatcaaggaagctgttattgcttcttgccaaagaactttcgtagatctatatgttgactttcttttaaagtttatc

SEQ ID NO: 26209 - DNA, 132 bp, Glycine max
  Clone ID: LIB3108-015-Q1-K1-D7
cccacgcgtccgttacgagggtgaagagtgtacaagaatgtgtcaaagggaaccgtacagatttttaagtcagtacggattacatacatcacatgctttaacatatgctcgaatctggtcaggaattgcctt

SEQ ID NO: 26210 - DNA, 431 bp, Glycine max
  Clone ID: LIB3108-015-Q1-K1-D8
attccccaaaattttctctgaagaagaagcaacaatgtctggtcgcggaaagggaggcaagggtttgggaaagggtggagcaaagaggcatcgcaaggtgctccgcgacaacatccagggaatcacgaaacccgcgattcggaggctagccagaagaggcggcgtgaaaagaatcagcggcttgatctacgaggaaaccaggggtgtgctcaagatcttcctcgagaacgtcattcgcgacgccgtcacctacaccgagcacgctaggagaaagaccgtcacggccattgacgtcgtttacgcgctcaagaggcatggaaggaccttctacggtttctgaggctgagggcttgggctttttttgggctcggttttgtttttctttggcttaataatgttttttggatattttgtttcttttaattgttttg

SEQ ID NO: 26211 - DNA, 322 bp, Glycine max
  Clone ID: LIB3108-015-Q1-K1-D9
accacgcgtccgtccacgcgtacgaaatttttggagtgccaatgtgaagaggaatagaaacttgcgccacaggcacaaaaatgccaccacattacaacgaggcgtataacaagatcgaacgagagcgaatatgttaccgagagaagaagagggggtacaggcgctggatgagataacgctctgaactgcgaatttcttgtatcggaagcgtactgacaggctcgatatgatgattcaacacaggacctggagtcctaagcaccctaagcttcggcaatatcttcacagacggacccgcgctgtgacagacgtagctatcaaa

SEQ ID NO: 26212 - DNA, 418 bp, Glycine max
  Clone ID: LIB3108-015-Q1-K1-E1
aacacacagcacaaagcaaagctcatccttgagttaaaaaatggcagcagcttcttccatggctctctcatccccatccttggctggcaaggccgtgaagctgggcccatcagccccagaagtgggaagggtgagcatgaggaagaccgtcaccaagcaggtctcctcaggaagcccatggtacggcccagaccgagtcaagtacttgggcccattctctggcgagcccccgtcctacctaaccggtgagttcccaggcgactacggctgggacactgctgggctttccgcagacccagaaaccttcgccaagaaccgtgaactcgaagtgatccactccaggtgggccatgctcggagcctagggctgcgtcttcccggagttgctgtcccgcaacggggtgaagttcggagaagcc

SEQ ID NO: 26213 - DNA, 265 bp, Glycine max
  Clone ID: LIB3108-015-Q1-K1-E10
gccacgcgtacggctcatacgacggacgtaagggtcaacgccagcttggctaccgcactgacaccctacatggatcaaatagcgaactactcgccgatatctctagacgaaggtagtgcagcacgtggctaaagatctaccgacacatcagatgacttgcaaacgaatgatacatgctctactagtcagcatgtggagaacatcagtgcaacaatcggacaatcactgacagagtcaacacatgtagctaaaataggttcatggg

SEQ ID NO: 26214 - DNA, 387 bp, Glycine max
  Clone ID: LIB3108-015-Q1-K1-E11
gtggaatgggccactccatggtcaagaacagctgagaactttgccaatgccactggtgagcaaggctacccaggaggcaaattctttgaccctttgagctttgctggcactatcaaggatggagtttacattccggatacagagaagctggaaagattgaaattggctgagattaagcatgccaggattgctatgttggccatgctgattttctactttgaggctggacaagggaagaccccccttggtgctctaggcttgtaaattaaacatttcatgtagataattgaattgagaggctagacagttgcaaatcaacctttgtttgtcccgtctgtgttacttcatgacaaattcaaattctatgatctaaaattggatgcattc

SEQ ID NO: 26215 - DNA, 172 bp, Glycine max
  Clone ID: LIB3108-015-Q1-K1-E12
gcggcgcgtgcgtttcattgttcgtaggtaagcaagaatagcgtcattgctagtgaacagtaacgttactcggtacggacttgcaactaaccgcggatcattgtagacgctagttgtgtaggagcttgcattgtatataccgacagggttgaaggcttggcattgtatgcca

SEQ ID NO: 26216 - DNA, 340 bp, Glycine max
  Clone ID: LIB3108-015-Q1-K1-E2
cccaagcattcgacttgattgtgcatctgacgttaatggatctgcattgacaacattaatgtatctagttgttgctacctaccgatgctaaactgtcatacgaagtgggtgatgagaagcaccgaagccatatacatgagactctgaaactctaatgcagataagactagcactagctgagacttaaattatgacattagtcgatgaatcatttggatcaagtcctcaaatttatatgctaaatatttgaccacatggcattattgatgcaactctgcatcatcttcgaagttaatatcaactgtagcgcaatttgaattcactggcgggcgaacattct

SEQ ID NO: 26217 - DNA, 449 bp, Glycine max
  Clone ID: LIB3108-015-Q1-K1-E3
cccacgcgtccgatttaataaagcaacaaacgcaagaccaaaaatcatctacagctagtttagctcaaaatcattatcaattcggaaagaaaaaagtcctttccaagatttcattgccatccatcatcaagaagatacaaatcatcacagacaaagtgctgttattactagaattgcattatacaggcttaagtgcagctatgaagaagtacccaaaaaaagtggttaaattagagccttagaaattaagtagacagtgtgattttgtttgcatagattgttttgtgagattttatagttatatatttcgtgagtccttttattttacgtttgcttaatctgagcccaataatgtggtggataaaaatgcgcttctaattcatgttatttgtcattttttcaccaagaaatgaattttaattaccatagatgcaataatttgctgtttc

SEQ ID NO: 26218 - DNA, 324 bp, Glycine max
  Clone ID: LIB3108-015-Q1-K1-E4
cttgttccttttgaacgttagaagtgctacagtacacacaaaggctgctcctcaggacgatgtgaagcctttgggtattgagggaagcccatttgtgtgcagggtccagattgtccttaagttgaagggagttgaatacaaatttcttgaagaaactttgggcaacaagagtgatttgcttctcaaatacaaccctgatcacaagaaggttccagtgttcgttcacaatgagcagcccataacagagtctcttgagattgctggatacattgatgcgacatggaagaacaaccccatcttaccttttgatccttaccaaaaagc

SEQ ID NO: 26219 - DNA, 280 bp, Glycine max
  Clone ID: LIB3108-015-Q1-K1-E5
gatgaagttactagcacagggcactctccgagtgcaatgaccactcatgataactgtgaaacctttaggagggataccgcagaagaagatgcaagctatggctggaaaaccaagaataggaagctattgtatggctattattatgacatacaattcatggatactgacagctcttagaatttgaactagatctgtggaactggagatgatgacgcaaaatcaagatagctcttgtccaacaatgaaggatctcttgtctggcaataatgagttgaaaaag

SEQ ID NO: 26220 - DNA, 206 bp, Glycine max
  Clone ID: LIB3108-015-Q1-K1-E6
gctgcacgtaccagtcaatggctctggcctaggtcaaatctcgctcgtgataacaggtgaggctttaggcaggctacccatcacaccgtagcatgtttcccctgtcaacccggatcctggcaggtaaatgccggttcttatgcagtccagcgttttatgtaacctgagcaatgttaatgctggaacatctattggttggtggtttg

SEQ ID NO: 26221 - DNA, 183 bp, Glycine max
  Clone ID: LIB3108-015-Q1-K1-E7
actacgcgtgcgataccttgttggaaggtacgcatgaattgctcataggcaagcggtcagaattgttactcggtacggactggctacgaccttggtatcaaagtagacgcaattaatggaggaggttgcattgttggtaccaatagggtggaagcctcgtcattatatgccattagcgctgca

SEQ ID NO: 26222 - DNA, 309 bp, Glycine max
  Clone ID: LIB3108-015-Q1-K1-E8
cccacgcgtacgactgcatgttgacaagttttctcgtatggctcaaaagttagaggtgggggagtctatacctgagggacaggctactaacttcatagcatcggagatagtaattattgttaaatttgcctttttgattctctatatattatatgttatatgatttattttttgtaacatttcttttctattttttttatctgtactttatcttttttatttttttataattttttatgatcttattttttattttatatttttttatttgattttatatattataacttattatcttccttttttttt

SEQ ID NO: 26223 - DNA, 447 bp, Glycine max
  Clone ID: LIB3108-015-Q1-K1-E9
attcattcaagattcagcaagtgcgttttggaagcagagaccgaaatacttcgagatggcccgtacaaagcaaactgctcgtaagtcaactggaggaaaagctcccaggaagcagcttgcaaccaaggctgcacgtaagtctgcaccaacaactggtggtgtgaagaagcctcatcgttatcgccctggaactgttgctcttcgtgagattaggaaataccagaagagcactgagctcctaatcaggaagcttcctttccagaggttggttcgtgaaattgcccaggatttcaagactgatctgcgttttcagagccatgctgtgcttgcattgcaagaggctgctgaggcataccttgttgggctctttgaggacactaacttgtgtgccattcacgccaagcgtgtgactattatgcccaaggatattcagctggcaagaaggat

SEQ ID NO: 26224 - DNA, 324 bp, Glycine max
  Clone ID: LIB3108-015-Q1-K1-F1
cccacgcgtgcgcacacacttggtactagccgtccatgcttcatggatccagatcactcttcatcttcatcaaaaggctcgccttctgcaaagttccatgccccacgcatctctttacaatcgagctctggtacccggttccaggatctgcaaacgaagctaagctttcctgctaattaagggcagatgtttgccatccggtacattagcatccagaacgcgcaggattcaggctacatgtaccgcacaaccagagacagcgtagaaggtgtgtgacatagtcaagaagcaatcggcactgccagatcaatcaggtgctactgg

SEQ ID NO: 26225 - DNA, 279 bp, Glycine max
  Clone ID: LIB3108-015-Q1-K1-F10
gctacgcgaacaggcccataaaacgtgcgtgaggatcactccggagcctggcaaccgcactggcgccacacatggatcagatagcgaactacacgcctatatctctagatgattgtatgcgcagcactgggctacatatgcaccgactcatctgatgacttgcaaacgtatgcgacatgctttactagtgagcatgtggaggacatgagtgcgacagtcggacattgactggcagagtcaacacatgaagctttaaaagattcatgggaagttacattt

SEQ ID NO: 26226 - DNA, 328 bp, Glycine max
  Clone ID: LIB3108-015-Q1-K1-F11
gctaaccaagaaggaactagggttttacataatacaagctctctctctctctctcgtcggttttcgtcaatcaaatccaatccaatatcaaatatgagtcgtcatcccgaggttaagtgggctcagaggcttgacaaggtctatatcacggtgcaattggctgattcaaaaaatgcaaaagtggatcttacgccagatggtatttttaccttctccggtagtgctggtgctgaagaccatcagtatgagctaaaactggagctctttgataaggttaacgttgaggagagcaaaattaatgtatgagagcgaagcatattcattgtag

SEQ ID NO: 26227 - DNA, 218 bp, Glycine max
  Clone ID: LIB3108-015-Q1-K1-F12
cccacgcgtccgatcttgaacaggccaaccattagcaggagattcatgcctgagaaagggtgctgctgagtatgctgctttggctaagaaccctgagaaggagtttttgaaaactattactggcaagaaggagaccctcaatgaccttacaattatagaaattctggcaaggcacgcatctgatgagttctaccttggggagagagatggtggttact

SEQ ID NO: 26228 - DNA, 319 bp, Glycine max
  Clone ID: LIB3108-015-Q1-K1-F2
cagaggctggcggctatgactggcgtgagccgttcatgcaccagggttgactgaaccgcatgagcttgaccgaaaaacgcgcctgctgaaaagttctaacttacacgcagccgagcagtgcggccgggtagtatcaagttggctgacgtgatgaggatccgacccgtgcgagctgcgcatgagcgcatatcggagaaggtggaggcgagcataaagaacgcgcaggaagcgtgcgccggctatgcgaccagcagcgagtgcttggaagcgtcggacgagtttgaggatcttagcgcggctgccagccacgccagggaca

SEQ ID NO: 26229 - DNA, 374 bp, Glycine max
  Clone ID: LIB3108-015-Q1-K1-F3
cccacgcgtccgatttcttcaagcaacaaacgcagtaccaaaatcatctacagctagtttagctcaaatcattttcaattcggaaagaaaaaagtcctttccaagatttcattgccatccatcatcaagaagatacacatcatcacagacaaagtgctgttattactagaattgcattatacaggcttaagtgcagctatgaagaagtacccaaaacaagcggttaaatcagagcctcagaaattaagtagacagcgtgattctgattgcatagattgctctgtgagatattatagctatatatttcgcgagtcctattattttatgtttgcttagtctgagcccaataatgtggaggataaaaatgcgcttct

SEQ ID NO: 26230 - DNA, 358 bp, Glycine max
  Clone ID: LIB3108-015-Q1-K1-F4
gtgggctaagattggatcaaaattgagttaaaataatcctgtttaattcgaattaaacatttaaagtccaagtcttacatttcaggtgaccaaactaacccaaccttttttctattttgctgccccaaatatttaaattaaattttatatagtacataaaatctttgtttggtttaattaaataaatcccaaaatgaatatattcaataagaagtcatttgtttttcttggttttggttattgcaaaatttaaaatttactggcagccaacctatcaagtgattcagccaatcaacggtgacccattcattggaagcctggaaaccccagttacatccagccctttgatcgcatggta

SEQ ID NO: 26231 - DNA, 145 bp, Glycine max
  Clone ID: LIB3108-015-Q1-K1-F5
cccacgcgttcgagcacgcgtccgtggccttgttcaaacaccctccctctctcaaggcgcggactaaattagggagcccaactctctctattatgacattctcggctattcatcgcctgcactcaatcaattttcatctatcttt

SEQ ID NO: 26232 - DNA, 433 bp, Glycine max
  Clone ID: LIB3108-015-Q1-K1-F7
cccacgcgtccgcccacgcgtccgcccacgcgtccgcccacgcgtccgcccacgcgtccgggccaccgtcacttctgcagccgttgctattccctcattcactggcctcaaggcaagcgcaggcaaagtgagtgccgcagttaaagtctcagctccccaagccacaaggttgggcatcaaggcttcgctgaaagacgttggagtcgctgttgtgtccactgccgcgagtgcagtgctggctagcaacgccatggccattgaagtgttgctgggtggtgatgacgggtctctggctttcgttcccaacaatttctccgtggcctctggggagaagatcgtgttcaagaacaacgcatgtttcccccacaacgttgtgttcgacgaggacgagattcctagctgcgtggatgcatggaaaatcttcatgagcgat

SEQ ID NO: 26233 - DNA, 394 bp, Glycine max
  Clone ID: LIB3108-015-Q1-K1-F8
cccacgcgtgcgcccacgcgtccgcccacgcgtccgcccacgcgtccgcccacgcgtccgggccaccgtcacttctgcagccgttgctattccctcattcactggcctcaaggcaagcgcaggcaaagtgagtgccgcagttaaagtctcagctccccaagccacaaggttgggcatcaaggcttcgctgaaagacgttggagtcgctgttgtgtccactgccgcgagtgcagtgctggctagcaacgccatggccattgaagtgttgctgcgtggtgatgacgggtctctggcttttgtttccaacaattgctccgtggtctatggggagaagatcgtgttcaagaacaacgcatgtttgccacacaacgttgtgttcgacgaggacgagatt

SEQ ID NO: 26234 - DNA, 74 bp, Glycine max
  Clone ID: LIB3108-015-Q1-K1-F9
attcaaccaagattcagcaagtgccgtcttttatgcagagacctatatactattagatgggggggttcaaatca

SEQ ID NO: 26235 - DNA, 357 bp, Glycine max
  Clone ID: LIB3108-015-Q1-K1-G1
cccacgcgtccgcacggaggttcacgaacctgatcagccacttatcaacgttgaagttgttgctcatgttacacgacctgagctactgaatagtgaggtatcaaatactttccatttcactttcactgtccgaccagaagccaaggcgatgaaaaatggattcaaacttcgcaatgtagtaccagcaacagaagaagaagcatggcgtatattagagcgcatagatgctgacaacttgaatgaattcttcagaacataagatgaaaaacaacatttagctcgtaaagtatttaaaatatccaccactaattatgtgagcagaagttcaaagattagcttttatataataaatttttc

SEQ ID NO: 26236 - DNA, 276 bp, Glycine max
  Clone ID: LIB3108-015-Q1-K1-G10
gtttttccaatagcccagaaattgggggagagggtccttgaaagctgtgcaaccaagcttaaaccctacttggttcaatcagtgaaatcattgcgtatatctgtggatgattatagtgcagtacttgcttcaatatgccaagatacatctgatgacttggagaaaaatgatacatgtgttactagtgagcatgtggaagataagagtgagtcagcaaaacaatcactggaggagtcaacacatgtggttaaaaaagattcaaggggagttacattc

SEQ ID NO: 26237 - DNA, 227 bp, Glycine max
  Clone ID: LIB3108-015-Q1-K1-G11
gttctggttttctttgatttcactgcatataagttttgttaagtaagttgtgttccttacttggtgcattttcaactgtgtagaatttaatatgatgtaatttgcttgtttgtacatccatattttgttatgcccttggttctatgaaatcttgcattaacttcttttttaaactgatataaaatattgtatgttaaaaataatatattgataatatatcaattatt

SEQ ID NO: 26238 - DNA, 365 bp, Glycine max
  Clone ID: LIB3108-015-Q1-K1-G12
cccacgcgtccgcccacgcgttcgcccacgcgtccggtaggactgaaagtgactgccctatggaaaatggctatgcccgtccagttgagggaatccatgtacttgttgacatgcaaaatatggttgttcttgaatttgaagatcgtaaacttgtcccccttccacctgctgatccactaagaaattatacttctggtgaaacccaaggaggagttgaccgaagtgatgtgaaacccttgcagattattcagcctgaaggtccaagttttcgtgttaatgggcacttcattgaatggcagaagtggaattttcgtattggattcactcctagggagggttttgttattcattcagtagcctatatt

SEQ ID NO: 26239 - DNA, 357 bp, Glycine max
  Clone ID: LIB3108-015-Q1-K1-G2
cagagaatggcaactatgactggtgtgagcctttcatgccccagggttttcttcaacgcatcagcctcaccgcaaaacgcgcatgctgtaaagttctcacttccacccagccaagcagtgcgaccgggtagtatcaagttgggtcgcgtgatgaggatccgacccgttcgcgctgcgcctgagcgcatatcggagaaggtggaggagagcataaagaacgcgcaggaggcgtgcgccggcgatccgacgagcggcgagtgcgtggcggcgtgggacgaggtggaggagctgagcgcggcggcgagccacgccagggacaagcaaaaggaaaaggactccgacccgctcgagaattac

SEQ ID NO: 26240 - DNA, 428 bp, Glycine max
  Clone ID: LIB3108-015-Q1-K1-G3
cccacgcgtccgattcaatttctctgacacagagaaaatatccccgttaagataagatgatgatgaaatcatcatattcttcatacctttctatattattcctatttttccttctccttggggataaatccctctccaaatccggtgcacgtttttctctaaccagagcagtgttcatgccgcaccacccagtgattggtggttcccaatgggatcaaaccgtcgagaccgtggaacagcaagagtctgctccacaaccaacgaagcaaatcaaaggcctctccaaaatcaaagactacttctccaacttcggctacctcctctcctccggtggcacattcaacgatgatttggaccaggcaacggtttcagccatcaccacctaccaacgattcttcaatctcaagatcaccggcgacttaaccaac

SEQ ID NO: 26241 - DNA, 53 bp, Glycine max
  Clone ID: LIB3108-015-Q1-K1-G4
tcggccacgcgttcgggcttggcactcggtcctcttattagcgaccgccattc

SEQ ID NO: 26242 - DNA, 75 bp, Glycine max
  Clone ID: LIB3108-015-Q1-K1-G5
gttctggttttctttgatttcactgcatataagttttgttaagtaagttgtgttccttaggtggtgcatttgcaa

SEQ ID NO: 26243 - DNA, 435 bp, Glycine max
  Clone ID: LIB3108-015-Q1-K1-G6
tcaaaatatggtttttggggatggaatttgtggcgtcaacctatgggtttcattgtttttctaatctcgtccctagcagaatgtgaaagattaccttttgatttaccggaagcggaagaagaactagtagcgggttatcaaaccgaatactcgggtatcaaatttggtttattttatgttgcttcctatttaaacctattcatttcttccttatttgtaacagttctttactttggtggttcaaatatctctattccatacatattcgtttctgacttttttgaaataaatcaaacatatggagtttttgtaacgataattggtatctttattacactagctaaaaactatttattcttattcctttctatcgcaacaagatggacttttgctaggctaagaattgatcaattattaaatcttgggtggaaattc

SEQ ID NO: 26244 - DNA, 376 bp, Glycine max
  Clone ID: LIB3108-015-Q1-K1-G7
agaccgcagacgaacactcgtacacagaccctttacttcggtcagatgctgagacagtggttcgactacactaaatccgtccagctcgaggacttcatggatgggcagatactgcaacttcagcagctttaggatgagaacaaccctgactttgtggtcgaagacgtgtttatcttctatgaagatattgaaaggcttctcaaagatctcacctttgccctagatcagaatggcgttgacttcaaaaacgttgatgctgatgtgcaccaggtaaagggtagcacttcaagcataggtgcacaaagggtgaaaaatgcctgcatagctttacggaacttctgtgaggagcataacacagatgcttgcgtcagatgtc

SEQ ID NO: 26245 - DNA, 95 bp, Glycine max
  Clone ID: LIB3108-015-Q1-K1-G8
aataaacaaaacgataatgaaataaagaaagttttaaaaaaataaaaaaaaaaaaaaaaaaaagagaaaaaaaaaataaaaaaaggatgggtggg

SEQ ID NO: 26246 - DNA, 263 bp, Glycine max
  Clone ID: LIB3108-015-Q1-K1-G9
attatttaagtttaaataatcatccgaatgtagcgagaatttgcatacaaaaaaaaaagaggtaataaaaaaaaaaaaaaaaaaaaaaaaaaaaaaaaaaaaaaaaaaaaaaaaaaaaaaaaaaaaaaaaaaaaaaaaaaaaaaaaaaaaaaaaaaaaaggaatgaaaaaaaataaaaaatataaaaaaataaataatatatggggggggttcttattataatatatattaatttgaatcttttttattttttaatttttttt

SEQ ID NO: 26247 - DNA, 359 bp, Glycine max
  Clone ID: LIB3108-015-Q1-K1-H1
cccacgcgtccgcccacgcgtccgcccacgcgtccgagctaagttgcagatgcaggtggacttgattacaaccaaacatggtatactgcagccaactgaaacaatttatgtgaaattagttaaagcttttctagaagctggcaagaccaaggatttagcagtgtttcttctcaaggcagaaagagaagattctcccttttccaatgacaactcagccttggttcatgttattaatgcatgcatttcacttggatggctggatcaagcacacgatcttctcgatgagatgcgtctagctggagttagaaccggttcatctgtatactcttctcttttgaaagcatattgccgggcaaata

SEQ ID NO: 26248 - DNA, 292 bp, Glycine max
  Clone ID: LIB3108-015-Q1-K1-H10
gtggactcggatgtttgcatgagaaaaatatatcaaacgagcgagaaagaatgaactagcttagcttgtcgtagaaattgagcgtgagattaatttcagagaaaaagaagagggaagaaaatgaaaaaaaaatctcttctgactgagccgttaaagtgtctattgttgtttagcttcgtacccttgattagtgttgaattaacgatcaaataaatattggtgcaatttattccctgattaatatgtatgcactatgcttaattccagagtgacggcctctttgtaatttctt

SEQ ID NO: 26249 - DNA, 51 bp, Glycine max
  Clone ID: LIB3108-015-Q1-K1-H12
cttccccgaccccttggggggggaaagataatgtcttggatttgggggacc

SEQ ID NO: 26250 - DNA, 321 bp, Glycine max
  Clone ID: LIB3108-015-Q1-K1-H2
cccacgcgtccgctcatcttcctctttttctcaaccaaaaggggttcaattctagctagggctattacatcgtccgcgaccatgaacatggcgatcgtgcttctgttcatggttttcgcagtttcatcagctttagacatgtcaataatatcacatgacaacgctcatgcggatagggccacgaggcgcaccgacgacgaggtgatgtcaatgttcgaggagtggctggtgaaacacgacaaggtgtacaacgcgctcggtgagaaggagaagaggtttcaaatcttcaagaacaatctgcgctttatcgatgaacgaaac

SEQ ID NO: 26251 - DNA, 386 bp, Glycine max
  Clone ID: LIB3108-015-Q1-K1-H3
caacactcatatccttatcctgtttctttcaatggaagtcatttctgcttctagcttgaatcccaacgctccgatgttcgtgccactcgcctatcggacggtggaggatttctccgaccagtggtgggacctcgttcactcctccccctggttccgcgactactggctccgcgagtgcttccaagatccccagttccaaaacgacgacgctttcgacttcgactttgacctagatctccaagatgaagatgaaagggaacgaaaggaagggaaggaggtggtgtcgttggggctgctgaaatggcgaagctgtggaggaggatggtcccaggcgccgaggtatgtggaaaaggctctcaggtttgtgaagcccaaggtgagcccac

SEQ ID NO: 26252 - DNA, 157 bp, Glycine max
  Clone ID: LIB3108-015-Q1-K1-H4
cacacgcgtacggggtggagaaggtgacagatgctacgtagccttcacgccggaacatgcaagcttcacgtacaggaaccagcttgtcgtccgagccatacgctattattaaatggcggaagcataccacaagaggggcatcctgaccatcaaagtc

SEQ ID NO: 26253 - DNA, 337 bp, Glycine max
  Clone ID: LIB3108-015-Q1-K1-H5
cggggaagatgaccccaagccaatacaccagtcatggcgcataagtagcggtgcactaagtgcagcaatgtctccacgagacaactatgcatcattgagacgcgaaaaccgtgagcttaaacttgaattggctcgactaagaatgagactaaatgatctggagagggagcatgtttgcatgaagagggatatggccaagtctggatcacgtaaatttatgagttctttctccaaaaaaaattggtaaacttagtctttttggacataattcttcaagagggatcaagtctccatccaagaaactctaaagaacagattcaaaggtgattgagagaac

SEQ ID NO: 26254 - DNA, 379 bp, Glycine max
  unsure at all n locations
  Clone ID: LIB3108-015-Q1-K1-H6
ggaggtaaaacaaatggtagtggccactctagccgaatctggcatgaatctttcagatgatgtgatcgaaagtattattgacaagacatttgaggaagctgataccaaacatgatgggaagattgacaaggaagaatggcgaaaccttgtcttacagcatccatcccttctgaaaaatatgactcttcagtatctcaaagatatcactactacatttcccagttttggttttcactcacaagttgatgatacttgaggcaaaccacagcatccatgtcagtttcagtgttcttgactgggaatgtcttagattgactcgtgaatgatgaggttctatgtgaaggattcngtaaggggtgatatggagttatttatattt

SEQ ID NO: 26255 - DNA, 241 bp, Glycine max
  Clone ID: LIB3108-015-Q1-K1-H7
cccacgcgtacgctcatcttcctctttttcttaaccaaaaggggttcaattctagctagggggttttatattttatggcaatcgggaacatggcaatgatgctagtgaacatggtgaatgcagtttcatcagctttagacatgtcaataatattacatgacaacgctcatgcggatagggtcacgaggcgcaccgacttatatatatattttattcttaatatggaacgtattaaattttt

SEQ ID NO: 26256 - DNA, 261 bp, Glycine max
  Clone ID: LIB3108-015-Q1-K1-H8
agcaagggtgcgtccgtcctcgagctgcttcccggcgaagatcagcctctgctggtctggggggattccctccttgtcctgaatcttagccttgacgttggcgatggtgtccgagctttcgacttctagggtaatagtcttcgtggtggtatgcagattttcgtgaagactcttacgggtaagactattaccctcgaggtggagagctctgacaccattgacaatgtgaaggccaagattcaggacaaggaaggcatccca

SEQ ID NO: 26257 - DNA, 334 bp, Glycine max
  Clone ID: LIB3108-015-Q1-K1-H9
caggaggcgaaaaatagcgactgccctgttgaaagcctgtgacatgctttccattttgtggggtttcgagtttcttgcccttcgagcttatgaagaagatctaggtgctcgcaaattgtacacaaatgctgggtaccaagttgtgtctcgtgatccaccatggacaagtaattggattggaaggaaatgtcgtgttcttatgatcaaaagaactagtttctccaaatagcttaatttaattagaattctcaagacatccaaacaagataacagaagcagcaaatgtattctaggtatatagcatgatttgttcattatcacttactcattgctc

SEQ ID NO: 26258 - DNA, 127 bp, Glycine max
  unsure at all n locations
  Clone ID: LIB3108-016-Q1-K1-A1
nccacgcgtncgcccacgcgtccgactttacaagtatgcaatgtaatatgacacgtgtagttgctcatgtttaatatacaagggcatctattaacatatatcaatattattggcctgttttgggttt

SEQ ID NO: 26259 - DNA, 278 bp, Glycine max
  Clone ID: LIB3108-016-Q1-K1-A11
acgaggatgaaaagtttaaaccaggattggtcaagttccgcacagtcgcagctaacataataagatccattcattatacttcatgaagtgcgagccacgttggtgaatccccgaagagggccgcggtagactctagagggggcgatgatgggggtgctagaaattgtggtgtgggcagcgaagagtggatcgttgcgggggttgaggacgtgcgttatggaaggcaaggaacaggattagaaagtgcgagtgcagtatgagccaggagtcatgcgctg

SEQ ID NO: 26260 - DNA, 418 bp, Glycine max
  Clone ID: LIB3108-016-Q1-K1-A3
tgttgatcgagataactagaaacagtgtgatgaaaatgaaggtccttgttttcttcgttgctacaattttggtagcatggcaatgccatgcgtacgatatgttccctctccgaatgaacactggctatggtgcccgtactccggaggtgaaatgcgcaagttggaggcttgctgtggaagcacacaacatctttggctttgagaccattcctgaagagtgcgttgaagcaacaaaggaatacatccatggcgaacaatatagatcagactccaaaacagttaaccaacaagcttacttttatgccagagacctcgaagtccatcccaaggacacatttgtgttcagtatagatggcaccgtactctctaatattccatactacaaaaaacatggatatggcgtggagaaatttaactc

SEQ ID NO: 26261 - DNA, 387 bp, Glycine max
  Clone ID: LIB3108-016-Q1-K1-A4
gagctgttgaagtaaggattatcagtgttgatataaagacagtacttgttttacatcgtgggtccaattttcatagcaaggaagggccctgcgcccgatgtgttacatcttcgaatgaacactggctgtggtgccccgtctactcaggtgaaaagcgcaagtagattgcttgttgtgtgagcacacactatctcttgctttgagaccatacctaaagagtgcgtagaggcatcaaatgaatatattcatggcgaacaatatttatcagacttcaaaacaggcaatcaacatgcttacttttatgccatagacctctaaattcatcccaaggacacatttgtgttccatataatatggaccggactctctaatattccatactacaaa

SEQ ID NO: 26262 - DNA, 430 bp, Glycine max
  Clone ID: LIB3108-016-Q1-K1-A6
aacagcttgagcgtcatgtggagacagagcgctttattggtgttcctgttattactagtccagcaaatttgtgctaccaatgagcaagagcatgtttgccccccttcttcctgtggcaaaatcaccaacataacttatccatttcgattaaaaggcgacccaaaaggttgcggtgacaacaggtatgagctagcttgtgaaaacaatgttacggtgttatatttgtactctggaaaatatcatgtgcaggctatcaactacaacaatttcacaatacatgtggtggatccgggtgttcaacagccatattgctcctccattcctcgctacttcttgtctcaatcaaatttcagtgcaattgatgaaggggatccatacctagcctttcaaaatcgagattattcttgggagtacgttttccagcatatag

SEQ ID NO: 26263 - DNA, 317 bp, Glycine max
  Clone ID: LIB3108-016-Q1-K1-A8
aaataacgtagggagttggatctgtggtttggttgcgatgcggcgtgttgcgaatcactgtccaatcccgatcgcttgatccagacagtgaatcagaatcagaatcataatcagaatcagagagaaacgatgagggcagtaagtgcgttaatggtggctcggatgttgacgcgggaccactcgctccctgtccttggcaacgaaagcatacccttcggatcggtgtggtggttcgcctatgccggcgtctcctgtttcctcgtcctcttcgctggcatcatgtcccggcctcaccctcggactcatgtctctgggcc

SEQ ID NO: 26264 - DNA, 428 bp, Glycine max
  Clone ID: LIB3108-016-Q1-K1-B1
acgaaaacatattattttcattttcatctttttttgagtatcaacaaatggcaaccactgtgatgaccactctcccccaattcagtggtcttagaccccaattctcagctgcccctgtgaagaacttggttgctgtgcaacccatgagtcgcaaggggaagggtgcattgggagctcgatgtgactacattggttcatccactaatctgattatggtggcttctacaaccctgatgctgtttgctggaaggtttggattggctccatcagcaaacaggaaagccactgcagggctaaagctggaggtgagggactcaggcttgcagactggtgaccctgctggcttcacccttgctgacaccttggcctgtggatctgttggccacatcattggggttggggttgttcttggtctcaagaacattggt

SEQ ID NO: 26265 - DNA, 401 bp, Glycine max
  Clone ID: LIB3108-016-Q1-K1-B2
cccacgcgtccgcccacgcgtccgaaaagggtcaaggcttacagagtcaccaaataatatgctcgttaaagacttcaggctaatttctattctttgccaaacagtcgttctttcacgttatgagattatacacttctggacttctaaaatgtggcggaggttttctttagaatgagtaatgtgatttttgtttacttaaaaaaaaaaaaaaaaaaaaaaaaaaaggaaaaaaaaataaaaaataaaaaaaaaaaaaaaaaaaaaaaaaaaaaacaaaaaaaaaaaaaaaaaaactaacactccaaataaaaaaactcaaactttcaaacataaaaacccaactaatttaactccttgttaacacctaaaaacattaaatttttaaaaagggggcgcccctt

SEQ ID NO: 26266 - DNA, 415 bp, Glycine max
  unsure at all n locations
  Clone ID: LIB3108-016-Q1-K1-B3
cccacgcgtccgctttttttcttcttcttgaaatggctctccaggctgcttctcttgttcctgcttctttctcggttcttaaagagggaaagagtggtgtgtctctcaaggactccaccttgttcggtctttcattttcagaacctatcaaagctaacttcagctcttctgcattgaggtgcaagagggaattcgaacaaaagctctgtgctgtgagggccgaaacagtggctacagcctctccagcagttaccaagtctacaccagaaggcaagaaaacattgaggaagggcagtgttgtgataactggggcttcatctggactaggcctggccactgctaaggctttggctgagacgggaaaatggcatgtaataatggcctgcagggattacctcanagctgcaagagctgc

SEQ ID NO: 26267 - DNA, 355 bp, Glycine max
  Clone ID: LIB3108-016-Q1-K1-B4
gagctgttggagtaaggtttatgggtgttgatctgaatacaattatgtttaacttggaaagcatcaaagacttggaagagttgaaggaatttgtcttggaccaatcagaggcatatgagatcaaaatgggggatcaattttttcgaagatctggagatccacctcttgatgaagttattgagaagtacaatagtgagaaagccaaagcagataatgctgattcagaggaaattgatccgaatgttaaaacagagttgtaattaaacggtatatagacataaactatgtttggttttgcgtcagttttaggaaaattgtgtcaaatttccatgttaacagtgaagcaacttcatat

SEQ ID NO: 26268 - DNA, 423 bp, Glycine max
  Clone ID: LIB3108-016-Q1-K1-B5
acacccacaagtcatcaaacttcaattgagtttcaaagagatcagtggtagctagtgtggtgcaattgtgttgatcaaggatggaacaaaagaagtttgtggcactattaatggtggttgtggtaatggcttcttctatgtggaaagggtccaaaggtcttagtctctgtaacatggatgaaggtggattggaggcttgcaagctctcagtgactcagccaaacccagttgatccatcccctgattgctgcaaggctttggctggtgctgacttgaaatgcctttgctcttacaagaactcatcagagttgccttttcttggaattgatcgaactcttgctacttcacttcctgcaaagtgcaatctcactcccccagataattgctcataattaagcttctttgaactattatttgtgctct

SEQ ID NO: 26269 - DNA, 373 bp, Glycine max
  Clone ID: LIB3108-016-Q1-K1-B6
gttttctgtgtcaccgaaactcgtttttttcaaaacacataaaacatctcgaacgcgctgtttacggctgcgggggtaaagtgcatcaatggcaggtcgcggcaaaaccttaggatctagcgccgccgagaaggcttcttcaaggagcagcaaagccggccttcaattccccgtcggccgaatcgcccgtttcctcaaggccggaaaatactcttagcgtgtcggcacttgctcccctggttacctcgccgccgtactttaatcgctcgtggctgatgaccttgaattggctggaaactcttttagagacatcttgttgacttcgttttgtgccgcgccacattcaattgtctgtgaggaacgactagtattt

SEQ ID NO: 26270 - DNA, 425 bp, Glycine max
  Clone ID: LIB3108-016-Q1-K1-B7
cccacgcgtccgcgtttatcaaactctatgtgtgagtagcatgttccaacaactcagctttttcagaacagccattactaccactgttcgctatgaaagatgacaaacaggctccagttcctgcttctacaaccgaaggacaacctatacgatgtaaagcggcggtttctagaagagctggtgagccgttggttattgaggacatcattgtggcgccgccaaagcctcgtgaggctcggattcgtattatttgttcctctctctgccacagcgacatcacacttcggaaccttcaggaccctcctgccattttcccaaggattctaggtcatgaggcaactggggttgtggaaagtgttgggaaggatgtaactgaagttacaaaaggtgatgtggtaattccagttatcctaccagaatgtggg

SEQ ID NO: 26271 - DNA, 397 bp, Glycine max
  Clone ID: LIB3108-016-Q1-K1-B8
cccacgcgtccggtagttgagaactaagtaggagaagcaaatggcttcctcaatgatctttttcccagctgttaccactgtcaaccgtgcctgtgccggcatggttgctccattcactggcctcaagtccatggctggctttcccaccaggaagaccaacaatgacattaccttcatcgctagcaacggtggaagtgcgcaatgcatgcatgtgtggccaccagttggcaagaagaagtttgagactctttcctacctgccagacctagatgatgcacaattggcaaaggatgtagaataccttcttaggaagggaaggatttctcgcttgcaattcgagttggagcacggtttcgcgtaccgagagcacaacaggtcaccacgatactactatgga

SEQ ID NO: 26272 - DNA, 425 bp, Glycine max
  Clone ID: LIB3108-016-Q1-K1-C1
aaggctttcatcctctcgacgctcccacagtcgaagcgaatgtcccatcatgctcccggcgtcaaaacgcgcctgaggggtgtcgttttcgacatggacggcaccctcaccgtcccggtgatcgattttccggcgatgtacagggcggttctgggcgacgaggagtacctgcggctcaaagcggaaaacccttccggcatcgacattttgggccacatcgaagggtggccgcctcacaaacagcgcaaggcctacgacgccattgctgaggtcgagcgtcagggtcttgaacgccttcaaatcatgcctggttgtgcagagctttgtgccatgctcgattctaagaaaataaggaggggtttgatcactaggaacacgaagtcagcagttgatttattccatgaacggtttgggattacattttc

SEQ ID NO: 26273 - DNA, 361 bp, Glycine max
  Clone ID: LIB3108-016-Q1-K1-C2
ggcttcttgtgagggcttcagacgagcctgcagcggcggcacccgcaaccaccacccctccagctgaagctgaagcaaagccaaaaccaccacctattggccccaagagaggtgctaaggtgaagattcttaggaaggaatcctactggtacaaaggcactggttcagtggttgctgttgatcaggaccccaacactcgctaccctgttgtggttcgattcaacaaagtcaactatgccaatgtatcaacaaacaactatgctttggatgagatcgtggaagtggaatgagtccaatttatttgtaattttgattctggtcatgctatcgcagttactagcctaagtttttttcatgcgac

SEQ ID NO: 26274 - DNA, 240 bp, Glycine max
  Clone ID: LIB3108-016-Q1-K1-C3
cttggtttcggtgttccaagttagttagaggcattgttgcttgcatagatctctgatctgaaaatgagtgcgtcgaggttcattaagtgcgtcaccgtcggcgacggtgctgtcggcaaaacctgcttgttgatttgctacaccagcaacactttttccacggactatgtgcccaccggttttgacaattttagcgcttatgtcgtggggggtggaagcaccggaaacctaagattgggg

SEQ ID NO: 26275 - DNA, 429 bp, Glycine max
  Clone ID: LIB3108-016-Q1-K1-C4
cggacgcgtgggaaaatttaaagaaatcaacacacacaaacacaacaacatatggaggtgctaagggtgcaaaccatagcttccaaatccaaagatgctgccatcccagccatgtttgttagggcagagacagagcaaccaggcatcacaaccgttcaaggggtgaaccttgaggtgccaattattgattttagtgacccagatgaagggaaagtggtgcatgagattttggaggcaagtagggactggggcatgttccaaattgtgaaccatgacatacctagtgatgttataagaaagttgcaaagtgttgggaaaatgttctttgagttgccacaagaggaaaaagagttgattgctaagcctgctgggtctgattctattgaagggtatggcacatagcttcagaaagaggggaatggcaagaaa

SEQ ID NO: 26276 - DNA, 331 bp, Glycine max
  Clone ID: LIB3108-016-Q1-K1-C6
ctcttaggcactttcttgttttctctcttaccctcatatccatcatcttccacacccatggagcgttctctgagcaatcaataatcaagttacccacagaccaaccaagggtagagaaactgacccacttgcattttttctaccacgacatcttagagggcaagaacatcacggtggtgaaaatcatcgagccatcatcgagcgaggttcgtgaagcaactgggtttggaaccactttcatgatggacaatgttttgaccgagggttcagagctgagctcgaagcacgttgggagggcttaggggctgtttggcttgtcctttttggagga

SEQ ID NO: 26277 - DNA, 424 bp, Glycine max
  Clone ID: LIB3108-016-Q1-K1-C7
gaagcattagcaaaagcaagaagaactagtctaagcagaaatggcctcttcagtgatggcatctgtggccctcaaacctgcccctttcactgttgagaagtcctcagttagaggccttccctccctctcaaggaactcctcttcattcagagttgtggccagtggtggcaagaagatcaagactgacaagccttatggaattaatggtggcatggctttgagggaaggagttgatgcatctggcaggaaaggaaagggaaagggcgtttaccagtttgtagacaaatacggtgctaatgtcgatggttacagtcctatctacgacaccaaggactggtctccaaccggtgatgtctacgctggcggtacgactggcttggctatctgggctgtgactctacttggtcttcttgctggtggtgca

SEQ ID NO: 26278 - DNA, 326 bp, Glycine max
  Clone ID: LIB3108-016-Q1-K1-C8
accacgcgtccgacacataagagaccacatctgtgactttgtctttcgaatcgtgttccatgcctcgcgcattgggacaatcatcaaaaacagaggcacatacgtgttgccattccacccaaattccgcgttcttcggctgatccaacgttttctttgttcactccaatgaacacccagaaaaggttctctataaggggtactatcggtggatagatcttttttaacgcactagttactgggatctgtgctgtgatctgtgccatcgtgatcggatgcatccttcattgggaccattttacagcaacgatttgtgccctgtgttga

SEQ ID NO: 26279 - DNA, 396 bp, Glycine max
  Clone ID: LIB3108-016-Q1-K1-C9
tcggatcgtctcaatcaggtgcttcggtggttccttgggttcaattgagatctttctaagcaggcattgtcccttgtggtatggctacaatgggaagttgaagcctctgatgaggcttgcttatattaacaccattgtctacccgtttacctcaatcccattgattgcttactgtacgcttcctgcattttgtcttctcacaaataaatttattattcctgagataagcaactttgccagtatgtggttcattcttctcttagtctccattttttaccacttcaattcttgagcttatgtggagtggggtcagtatagaagactggtggagaaattaacagttctgggttatcggtgggacatctgcgcatctctttgctgtgttccaagggcttc

SEQ ID NO: 26280 - DNA, 428 bp, Glycine max
  unsure at all n locations
  Clone ID: LIB3108-016-Q1-K1-D2
tgcatttgcagcacanaaacatcaacatggctgccaaactcactctatcttctcccttttccttcaaaacttcatttctgccaaaatcaccatcattttctctaggtttatactcccccagaactaatgttaccggtgtcaaagttcatgctaaattaggtggtggagatgaacaagccaagaaaggaggaaagaagaaattcataaccagagaggaagaaccacaacagtattggcagacagcaggagaaagggaaggagagaatcccatgaagacccctcttccttacattatcatatttggtatgtcaactccttttgtaatcttggcaattgcttttgcaaatggttggattaaggtacctgttcgatgagacagcacttcgttgtctactctactcctcgatcttcacatgttaattcacgaa

SEQ ID NO: 26281 - DNA, 370 bp, Glycine max
  unsure at all n locations
  Clone ID: LIB3108-016-Q1-K1-D3
ngcatgcgtaggacaaaaacatcaacaaggcttttaaactcacagcatctaattcattgagcaggaagactagaatggggcgccaatcaccatcatttgctgtacgtatacaccactccaaaactaatgtggaccggtgtgaaagaatatgctaaattaggtggtggagatgaacatgcctagatgggaggtaaggagaaattcctaaccagagaggaagaaccacatcagtattggcagacagcttgtgtatgggaatgtgagaattccatgtagaccctttttccttacaaaattatattcgttatgttaacttcttttgttatcttggcctgcgcttttgcaaactgttggattaaggtgccctgtt

SEQ ID NO: 26282 - DNA, 370 bp, Glycine max
  Clone ID: LIB3108-016-Q1-K1-D7
gttcaagaaggtgaaaagaggaaaatattaagccagtcctgcaggtacgagggggcctgcaatccttcatcggcgcaacgttcagcaattaaaagtagtagtagccaaaggcattgccatcctccatcttcatctttgattaatgctgcttcagcttcaaccttaacagtgaagtaaaaagctttgacagaaactcaggttctgaaatataggggtttagaattatgtaagcaacccaagataagcaaaaggaagaaaaatggttgctttgttttgtctctgttcgttgtaaaatgctttctttagtaaatgggaagtttctttgattctacattttttggactatgtattcttgaatcttgattaatgt

SEQ ID NO: 26283 - DNA, 338 bp, Glycine max
  unsure at all n locations
  Clone ID: LIB3108-016-Q1-K1-D8
cacaaacaactcttgagaaagaaagaatggctgccaacacattgatgagttctgccatctcagccttcccatctctcctttcctcctcaaaatccagatctgccgcagcagttcctctttccagctttgttgtcaccaatgcctcttcttctcgcttttccatgagtgctgattggatgcctggccagcctagacccccctaccttgatggttcagcacctggtgactttggattcgaccctcttcgtcttggtgaagtaccagagaatcttgagaggttcaaagagtcagaactcattcactgcagatgggccatgcttgctgntccagggattttg

SEQ ID NO: 26284 - DNA, 101 bp, Glycine max
  Clone ID: LIB3108-016-Q1-K1-E1
tcgtaaaaaagaaaatgttgggtttttttttttttttttcaaatatctaaaaaaaaaaaaagggcacgataataaaaggcgggggcacggacacctaaagt

SEQ ID NO: 26285 - DNA, 227 bp, Glycine max
  Clone ID: LIB3108-016-Q1-K1-E3
ctaccggccactcaacaacgtacgaggatcaagatcatgatcatgatcatgaatatgaatccgatgatgttgagttgtttcctgtgtcgtcgcaaacaactagcttcattgtaagagtggaccgtggcgaccaacaacaacaagcagaatgcaaatgatatatgttttgtgcaaaaaaaaaaaaaaaaaaaaaaaaaaaaaaaaaataaaataaatataataaaaat

SEQ ID NO: 26286 - DNA, 356 bp, Glycine max
  Clone ID: LIB3108-016-Q1-K1-E6
ctcagatctgatctcttgatccttatattcatggctgaaaaggtgaccatcatgaaactcaaggttgaccttgagtgtgagaaatgctacaagaaggttaagaaactttttggcaagtaccctcaaaaattcgggaccagaagttcgatgagaaggaaaacattgtgttcatcacagtggtgtgttgtagccccgagaagataagagacaagctttgctacaaaggtggaggctctatcaagagcattgagatactggaactgcttaagcccaaggccgagaagcctaaagcagactcttccatagctgagaagcctaaggccgagcccggtttatttactttttcattcatcggg

SEQ ID NO: 26287 - DNA, 380 bp, Glycine max
  Clone ID: LIB3108-016-Q1-K1-E7
atatgctcatctacttactgttggaggggcctataatgatgctccacataaaactcagatatcatgccgcactgatcgtgctggacttattgatgctgctccttggataagaattccatatccctttcaatggggagcaccttcatttgatgcaggtgaagcctttgccatgatgatggcatcttttgtttctcttgtagagtccagtggagctttcattgctgtatataggtatgcaagtgcaacaccattgccaccatctattctcagtcggggtattggttggcagggagttggcattctgttatcaggattattgggaacagtcaatggatcctctgtatctgtacaaaatgcatgtcttttggttttgacacgtg

SEQ ID NO: 26288 - DNA, 431 bp, Glycine max
  Clone ID: LIB3108-016-Q1-K1-F1
cccacgcgtccgcccacgcgtccgtggaattggaagccaccgccgctacttccccaccttctcgcgttctcctcatctccgccggtgccagccacaccgttgcccttctctctgggaatgttgtgtgttcgtggggtcgcggagaggacggacagttaggccatggtgacaccgatgataggcccttacccacgcagctcagtgcattggatgcccaacacattgattctattgcctgtggagctgatcatacccttgcgtattccgaatcacgcaatgaactctatagttggggatggggtgattttggaaggttgggtcatggcaattctagtgatttgctcattcctcagcctattatagcattgcaaggtctaaggataaagcaaattgcctgtggggatagccactgtttggcagttaccatggaa

SEQ ID NO: 26289 - DNA, 439 bp, Glycine max
  Clone ID: LIB3108-016-Q1-K1-F10
tgactttcaagcgcaggaatggaggtcgcaacaaacacggccgcggccacgtcaagttcattcgatgctccaactgcggcaaatgctgccctaaggacaaggctatcaagaggtttctggtgaggaacattgttgaacaggctgcagtcagagatgtgcaggaggcttgtgtctacgaacaatacacgcttccgaagctgtatgtgaagatgcagtattgtgtttcctgtgctatccactctcatgttgtgagggttcgatcccgcactgataggagaaagcgtgagcctccacagcgattcatcaggcgcagggatgatgcaccaaggcctggtcagcctggtcaagccccacgtcctgctggagtaggagctcctgcccgagcttaaaagaaaattccaagtttttggtgcttggttgttcaagtttatgttgcaaa

SEQ ID NO: 26290 - DNA, 322 bp, Glycine max
  Clone ID: LIB3108-016-Q1-K1-F2
cccacgcgtccgatttgagcttaaaccctatccgctcttctcttcattcttcactttggaaacaatcataatggcgttctgtaataaggttggaaatgtcttgaggcatggtgctgctcgcagcacacatgcccctgttgcgtccatgcttaattacatccgctgcatgtcttcaagcaagctttttattggaggcctttcatatggagtagatgaccagcctcttaaggatgcattttctggcttatggagatgttgctgatgcacaagttatacctgatacatactgtggaagatcaaggtgattttggatggtcaactc

SEQ ID NO: 26291 - DNA, 432 bp, Glycine max
  Clone ID: LIB3108-016-Q1-K1-F3
gtgtctctaagcttgccaacacagatcttagctgataactacttgtactcatcacctccaccagcagtacaccctccttacactccccacccagtttatcactctccttcaccacctcctaccaacaagccttacatctatgcgtcacctccccctccttaccactattagctagcatagctctatggatatgaagaatatgtgcaacgaataaaagaaagcgatagaataggaagaagaagcgcttcgcgatgcacgaaagagaagaattggaagcaaagtttcggcgttttgtcttttataaaaaaaatgttaaatcattataattttctatgatagggattggtttcttgtctttattcttttgtttatgaatatcggtgtattttaacagttgtaaagcactgcgccctcgctgcatgatcatgtagt

SEQ ID NO: 26292 - DNA, 367 bp, Glycine max
  Clone ID: LIB3108-016-Q1-K1-F4
tctttttctatcttggcaacagtattttgtttttacgcggcttcctggctatcgaggacgctgagcgtaacctcatcatcagacaatggcgctcaaaaccctatctactttctgtcacctctggctttcccaacaccagattccggacctacaagcctggcctgattatcttcgaattaccgcgctatcagaaaacgtgcttgcccggcgtcgatgctgaatgcaccggctctgctggtgctctgttcggcgagtagtttcttgaacgtcaaccgttcttctatgatgctgagcttattctgatagagaacgacttgattaagagaaaaaataaaaatgggctgcctgttcagaagattctagctta

SEQ ID NO: 26293 - DNA, 333 bp, Glycine max
  Clone ID: LIB3108-016-Q1-K1-F5
cttctttattttgtgactggattctcatttcagtttttgggttgatattgaatgaaaggaaattaagaacaatgtcttcccttttttgccaattacataattctaccgagaatgaagtgaaaagcactaaataaaaaaaaaaaaaagaaagaaaaaacaaaaaaacaaaaaataaaaaaaacttacccgcgcagcttattgcattgaatgcccaacacattgattctattgcctgtggagctgatcatacacttgcgtattcagaataatgcactgaactctatagttggggatggggtgattattgaaggatgcaacataactaatctagtg

SEQ ID NO: 26294 - DNA, 421 bp, Glycine max
  Clone ID: LIB3108-016-Q1-K1-F8
cccacgcgtccgcccacgcgtccggatgacgtggagtctatgattaaaactgcagttgatgcttggggaacagttgatgtattaataaacaatgcaggaataactagagatggtttattaatgagaatgaagaaatctcaatggcaggatgttattgatctaaatctcactggtgtttttctttgcacccaggctgctgctaagattatgatgaagaaaagaaagggaagaattgtcaatattgcatcagttgttggtttggttggcaatgttggacaagccaattatagtgctgcgaaagcaggagtaattggcctgacaaaaactgttgcaaaggaatatgctagcagaaacatcactgttaatgcagttgctccagggtttattgcatccgacatgactgccaagctaggacaagaca

SEQ ID NO: 26295 - DNA, 436 bp, Glycine max
  Clone ID: LIB3108-016-Q1-K1-G1
atgattggaagaattatcatataatgtgtaaaacaataatgtcacatgttttctttaaaaaaaaaaaaaaaaaaaaaaaaaaaaaaaaaaaaaaaaaaaaaaaaaaaaaaaaaaaaaaaaaaaaaaaaaaaaaaaaaaacaaaaaaaaaaaaaaaaaaaaaaaaaaaaaaaaaaaaaaaaaaaaaaaaaaaaaaaaaaaaaaaaaaaaaaaaaaaattttttgaaaaaaaaaaaaaaggggggggggctttttaaaagaaaaaatttttctcaccgggggggggggggtaatattttttttttgggggcccaaaaaaaaaaatcaggggccgggtttaaaatacctggggaggggaaaaacccgggggttcccaaaaaaaaacccctggaaaaaaaacccttttttcgcggggggggataaaaaaaaagacccccc

SEQ ID NO: 26296 - DNA, 395 bp, Glycine max
  Clone ID: LIB3108-016-Q1-K1-G11
gaccttggccgattacaacatccagaaggaatcaacccttcaccttgtcctcaggcttcgtggtggcatcatcgagccttccctcatggctttggctcgcaaatacaaccaggacaagatgatttgccgcaaatgctatgctcgtctgcaccctagggctgtgaactgccgtaagaagaagtgcggtcatagtaaccagttgaggcctaagaagaagatcaagtaaattctgggtgggatattgttggtctctactttcgttttgtttgtcttagaacagtgacttgtttggtatttatccgttctgcgtttgattaatgttaattggtttgagacaatagttttgaactagtcaattatatttctatgatgccatttttggccttagtcaatta

SEQ ID NO: 26297 - DNA, 361 bp, Glycine max
  Clone ID: LIB3108-016-Q1-K1-G2
ggcttcttgtgagggcttcagacgagcctgcagcggcggcacccgcaaccaccacccctccagctgaagctgaagcaaagccaaaaccaccacctattggccccaagagaggtgctaaggtgaagattcttaggaaggaatcctactggtacaaaggcactggttcagtggttgctgttgatcaggaccccaacactcgctaccctgttgtggttcgattcaacaaagtcaactatgccaatgtatcaacaaacaactatgctttggatgagatcgtggaagtggaatgagtccaatttatttgtaattttgattctggtcatgctatcgcagatactagcctaagtttttttcatgcgac

SEQ ID NO: 26298 - DNA, 426 bp, Glycine max
  Clone ID: LIB3108-016-Q1-K1-G3
tggaatcgagttcgcagagaaacctgattgtgctgaatcctccaaatgggtggcgtttgtggacaatgaaatccacaaggcatgtgtgggtattggtggtcctgaaggtcatcctggtcaaaacatttagtggcacatttagcattcagaaatataaatttggatacaaacttgtgttctgtatcactggctcaggcacttgtttagatattggaaggtttgatgccaaaaatggtgagggaggaagacgtttgaatctcactgagcatgaggccttcgacattgttttcatagaagcttctaaggttgatggaattatcaagtccgtagtttgaatcaaatcaaataatgtcaagggtagctagatagtgttgagttaatgcttaatcatatgtttgtcgctgtgatatgcattaagtactctgc

SEQ ID NO: 26299 - DNA, 248 bp, Glycine max
  Clone ID: LIB3108-016-Q1-K1-G4
cccacgcgtccgataataaaaacaagcttttaattataaattacaatagtattaaaattcaggggaatattatatgaaaaaaagcctagttattatatatattgaccctaaaataggggtttaggatatactttttatagggcggttttctactttttctactgctcttggtttctaatttattgttgggggggccctttttagtgtcctattctttttttcggttgttgtgataccattattttttt

SEQ ID NO: 26300 - DNA, 427 bp, Glycine max
  Clone ID: LIB3108-016-Q1-K1-G6
cttggttgggatacctgcaacctccgatttgatcattacagaacaaaaaagataccaatccaatccatccaaatggctctcaggattcacgttatttcccctttcttctcaatctccaccacctcccccgtcgctctctccacccacaaactcaccatccgacgaatcaactgcaccggcggcggagagggcggcatcaacgacgcatccctggcatcggagttggcggcgagggccgccagaatgaatgcgcattcggtgatggcggaggaggccatgcgcaagagcagaaagctcctcttcggagaactctgcgagtacatgggcctcgacgaagaccaggcccaacacaaatggacctatatggatgatgacgagaaattggttctcgtgaaagcgtttcttgcagagtggggttcccattttc

SEQ ID NO: 26301 - DNA, 423 bp, Glycine max
  Clone ID: LIB3108-016-Q1-K1-G7
gtacaattggtaaaggaagtagattacctttttaggaagggatggattccttgcttggaattcgagttggagcacggtttcttgtaccgtgtgcacaacaggtcaccaggatactacgatggacgctactggaccatgtggaagctgcctatgtttggttgcactgatgcttctcatgtgttgaaggagcttcaagaggctaagactgcataccccaacggcttcattcgtatcatcggattcgacaacgttcgccaagtgcagtgcatcagcttcatcggctacaagcccccaggcttctaagtgtgaaaaatttgcaaagcatttgtagccgccaccccactttgtttgtttgtacttaaactacattcccatttgtttttgctttttgagaatccatcatcctgtatatttggtttctgt

SEQ ID NO: 26302 - DNA, 51 bp, Glycine max
  Clone ID: LIB3108-016-Q1-K1-G8
gtatatacctgtttaattgtttagattatatctggttactcaataatattt

SEQ ID NO: 26303 - DNA, 308 bp, Glycine max
  Clone ID: LIB3108-016-Q1-K1-H1
gtggaggttcagggctgaagaaattaccttgtctttcagctcttgtaccatttagctaagatatttggctcgaattctcttaaattcggttctgcctagtagtactgattatcttttaatttgtatttgtgttgtgtttgactcctcctcctcctccatcgtgctctcgggacatattcatggagcctgtgtgttttccgcacgccactttgatatgttatacgggtgcattactgtattttgagtgattatttcaataatgggtggtactcttatccctgttgaaactttgagttcagtgcttgact

SEQ ID NO: 26304 - DNA, 282 bp, Glycine max
  Clone ID: LIB3108-016-Q1-K1-H10
gtagattgctttttgggtgatgtttagcaaaagataaaaactttgaatgtgaatatattacaaacatccgtgtttcattagtttgcaaaaaaaaaaaaaaaaaaaaaaaaaaaaaaaaaaaaaaaaaaaaaaaaaaaaaaaaaaaaaaaaaaaaaaaaaaaaaaaaaaaaaaaaaaaaaaaaaaaaaaaaaaaaaaaaaaaaaaaaaaaaaaaaaaaaaaaaaaaaaaaaaagggggggctttcttaaagaatacccagttatacgaggggggccttcaaag

SEQ ID NO: 26305 - DNA, 442 bp, Glycine max
  Clone ID: LIB3108-016-Q1-K1-H11
ggcgaacgaaatcggtgacagaaaagcaacaagcaatctcgatccccaaatcgtgaaatccgatgacgaccgctgcaagacccacatgggcacctgctaaaggtggcaacgaacaaggtggtactcgaattttcggtccctcacaaaagtactcttctagggacatcgcatcgcacaccactctcaagcccaggaaggaagggcaggacacacaggatgaattaaagagaagaaacctacgtgatgaactggaagatcgtgaaaggaggcatttctcatcaaaaaataaatcttatgatgacagggatcatggaaagggtagccatctgtttttggaaggatcgaagagagaaatggaagatcacattgttccacgtagtgttgatgcagatgattctgatgttgaagtcaaaagtgatgatgacagtgatgatgacgagga

SEQ ID NO: 26306 - DNA, 389 bp, Glycine max
  Clone ID: LIB3108-016-Q1-K1-H2
cagcaatcttggaaggtgataatttttctacaaactcgttttactattatgcatactacattggagcaaatgcctcctggattgtaatacccttgatcattgccatccgctgctggaggaagatctgtgcagcatttcgagttcaaggtggccagacaaaaaagcctaaagttcgttgaaggaaacattttcaggttattggtcttagagatcctgagctaataatgatgttttggggtagttgagataggagagattgttgtaagaattgtgacattgattctcttaaactgcatatctcagggagaaaaaaaaaatcccagtgtcatttgagaaggtgatgtttttaattttaagttttgaataagtattttcctatcattgatttg

SEQ ID NO: 26307 - DNA, 419 bp, Glycine max
  Clone ID: LIB3108-016-Q1-K1-H3
caacattcatccatcactacttccagcttttggaggcaagggattctatggcatgaaagtgcgcaaagcattaattgcttgtggagcaaggtttacttctattgaaatatctgaagcatgttttttcagtgaaacattgatgtagttggttcttgattaataatcactagttttatttttatatgatggttagggtttaaggtcctaccatacattttgttgatgaacactatgatacagggcgtatatcttgcacaacgtgttgacactgtgcttgccaatgatactgaaaaagagctggctgcaagggttctcaaagaggagcaccaattatatgtggaggtggtggaggctttatgcgaagaacgcgtggtttggaggcaagatggcgttcctctcatccaaagcaaagaaaaccc

SEQ ID NO: 26308 - DNA, 420 bp, Glycine max
  Clone ID: LIB3108-016-Q1-K1-H4
gctaacgcagtgaaactcaaaaacactagctagttaacactctctatggctggtgcccaattcctgaatctcttcaactcctcttcacgatcttccttggtcaagccctctaggccacttctctacaaccccattaagaattatgggcaagcaagcaaaggaaagcatagccgtttgatggaagagagggcaccttccacagctgaagaatttgagagggttgccgaggagaaggccaaggaagctcaaaagggggtggcaagtcagagtcttggcaaggcaattgatggtgcagaagaggcttcaataggtaagtcaaaggttgaatcagttaagaataggtacaaagggcatgaatgaaagcagggtttggttaccacaggagggggtgattattatatatataggaaccttttgtgc

SEQ ID NO: 26309 - DNA, 390 bp, Glycine max
  Clone ID: LIB3108-016-Q1-K1-H8
aacatgaaagtgagaggtggaaggggattttctcttgaagaactcaaggcagcagggattcccaaaaagcttgcaccaaccataggtattgctgttgatcatcgtcgcaagaaccgttctttggaaagtctgcaagctaatgtgcagaggctgaaaacatacaaggccaaattggttgtgttcccaagacgggcacacaaggttaaggctggtgattctactcccgaggagcttgcaaatgcaacacaagtccagggtgctttcttgcctattgtgagggagaagccaactgttgaacttgtaaaggttacagatgacatgaaggcatttaaagcttattacaagcttcgtcttgaacgcacaaacaaacgccatcatggtgccagactg

SEQ ID NO: 26310 - DNA, 283 bp, Glycine max
  Clone ID: LIB3108-017-Q1-K1-A1
tatggatgaggttgtatattttttgatgaaacatatatacggtgtactgtgccaaataccaacaataaaggacatgcaagaggtttcttctcactttatttcttccttaatgttatttaattctgtatatatacttacaactatttttgaattctgaatgcataataccatacatggttaacatttctatacctttgtatatatacttacatcatcaatttactttagtgccttcattgcaacaaatgctatactaaaaggaatggactactcattaattgtt

SEQ ID NO: 26311 - DNA, 392 bp, Glycine max
  Clone ID: LIB3108-017-Q1-K1-A2
ttttgttgtcctaatgagttgttttactcctgaaaaacccaccatgtctactctccaaatggttcctcttggcaagcttcgttaccaaaggctaaggcatgaaaaagggtgggatggtgaaagggaaaggaggccaaggagctggtttaggttcagaagggttcccattaggagaaggctcagactcaaaatttcaagcttgagaagactttggaggaaaagggctaggctggtttcttccatgagaatttcatatgccaaagtgttgaaaagattcaaggaaggtcaagtccattttggtgacctttttgctgggaactacttgttcatgcatgtcaaccctgccttactcaagtgccttgaaagggatttgtccctctcaaaaattgcat

SEQ ID NO: 26312 - DNA, 375 bp, Glycine max
  Clone ID: LIB3108-017-Q1-K1-A3
agatactaagctatatataaaccccttttgccttcttcatattcatacatagagatggctatgtatgaatatgaaggtggcatgtggaagacagggcttataatccaaggcattgtcatcaaaccaaagaactaagaatcaagtagatactaagctatatataaaccccctctgccatagtaacatgtaatgaagtattttattcccatatttagtactctctgatctctagttatagaatgaatagagacatgttcactctagttggcatctagagatccaagatagagaagaaaatatataaagattgtgataaaaaagaatgagatggagaaatatcgatatgcatttttaaaagtgttcttcatatcattt

SEQ ID NO: 26313 - DNA, 411 bp, Glycine max
  Clone ID: LIB3108-017-Q1-K1-A4
gttttagatcgtaaaaactaatcactacgaaaacaagagatatcgaagatggctctggccaaagctaaggagatcgtgtcgtccaattccgtcgtcgttttcagcaaaacctattgccctttctgcgtcgatgtgaagaagctcttcggtgacctcggtgccaattacaaggccatcgaactcgacactgaatccgatggaaaagagctccaagcagcattagttgagtggacggaccagcgaaccgtgcctaatgtgtttattggtggaaaccacattggtggctgtgactcaacaactgccctgcacactcatgggaagctggttcctctgctgatatctgctggaactgttgccaaatcaactgcttaaaggatctcccatttctaggtatgccgtttaataaaaatt

SEQ ID NO: 26314 - DNA, 159 bp, Glycine max
  Clone ID: LIB3108-017-Q1-K1-A8
tatggctaacgtggctgcagggtccaagaaggaatggcgtgacagtgacaaagcggtcacagaggaacataaagcatcacagcagatgagacttgacacaaagatgcttcaacagaacacacagcgacagatactttcgagactaaacctggacctgat

SEQ ID NO: 26315 - DNA, 151 bp, Glycine max
  Clone ID: LIB3108-017-Q1-K1-B1
cccacgcgtccgcgcttatgaattttaaaagcttattggactgccattatgttgcagctctagtctattgtaactgatttggcctggttataatttggaaggaaaacgggattggccggttggaaaaatcctggtgacctaatttaagtgg

SEQ ID NO: 26316 - DNA, 392 bp, Glycine max
  Clone ID: LIB3108-017-Q1-K1-B2
actgcctcttcctctcagattcagcaattttctattttctcctctcatggcttcagattccaaaaaggatttccctgctgatgacaaagctggaacagaagagagtaaaacatccaaagatgagacttcatctaaagattctccagcagaacaaagagcgacagctacttttggacctagacctggacctgctgggcctccaggcaacccttttgatctctcagcaatgtctggtctgctcaatgatccaagtatcaaggaattggctgaacagatagcaaaagatccatcgttcaatcagatggctgagcagcttcagaaaacttttcaaggagctccacaagatgctatccctagcttcgataatcaacaatatttttcaaccatgcaac

SEQ ID NO: 26317 - DNA, 407 bp, Glycine max
  Clone ID: LIB3108-017-Q1-K1-B3
ccgacacgttcgtcgtggtcgtcgacgacaccaagctcgtggacggcctcggcgggggcgggctggccatgccggtggaggtggtccagttctgctggaagtacaatctgcatcggcttcaggagcttttcaaggaagaaggtgtggaagcaaaattgagattggaggagagtgggaaaccctacgtcaccgataattccaattacatcgtggatttgtacttcaagactccaattagggatgcattggccgtaggcgctgaaatttccgctctggaaggcgtcgtcgagcatggcttgttcctcaacatggccacttctgtcatcatcgctggcaaatctggcgttgaagtcaaggccaagtgagactctgaaataattcgtttcttcttcttcttctcattcttg

SEQ ID NO: 26318 - DNA, 420 bp, Glycine max
  Clone ID: LIB3108-017-Q1-K1-B4
atccactttcactggaatcacaatcctgaaacaaaatcatcttagcatttaacataggactaggcaacatgaccaccacattggtaagaggtttctcggaagagcaagaagctctgttggtgaagtcatggaatgtcatgaagaagaattctggagagtagggtctcaagcttttcttgaaaatatttgagattgcttcatcagctcagaaattgttctcattcttgagagattcaacggtttctttggagcaaaatcccaatctcaagccccatgccgcgtctgtctttgtaatggctagctaaaattaaatacttatccaaatttcagttgaaccatttttaccatttattatataatccatgttttcttaattgggaatatcaaattaattttggttttggccttttataacttttt

SEQ ID NO: 26319 - DNA, 156 bp, Glycine max
  Clone ID: LIB3108-017-Q1-K1-B5
ccacgcgttcgtcgactcgttcgttcttatgaattataaaagcttattgtactgccattatgttgcagctctagtctattgtaactgatttggcctgtttatattttgaaggttaagcgttattatcagtttgtaaaatgcttgttgacatatttt

SEQ ID NO: 26320 - DNA, 270 bp, Glycine max
  Clone ID: LIB3108-017-Q1-K1-C1
aacttctgctacccactctcttcttccaagtccaaccacgcttttctctacagtcatgggcaaggtcaagatcggaatcaacggatttggaagaattggccgtttggttgccagagtcgctctgcaaagagaccatgtgggacctcggtggccgttaccgaccttttattaccaaccgttaacatgccttcattgttaaattccaacgtggttaacgacccctgaagcattaagatgtcaacctttaaggccagaaaacacctctttttt

SEQ ID NO: 26321 - DNA, 410 bp, Glycine max
  Clone ID: LIB3108-017-Q1-K1-C2
cccacgcgtccgatggccacccacgcggctcttgcttctacaaggatcccttcaaacacaaggttcccatccaaggcctctcactctttcccaacccaatgcgccttaaagagacttgaggtgacagaattctctgggcttagatccacttcatgtgtcacatatgctaacagtgctagagaatcttccttttttgatcttgtagcttcccaactcactcccaagcagaccaatggatcaactcctgtgaggggagagacagtggccaagttgaaggtggcaatcaatggtttcggacgcattggtagaaacttccttcgctgctggcacggccgaaaagactcaccccttgaagtcgttgttgtcaacgacagtggtggtgtcaagaatgcttcgcacctgctgaaata

SEQ ID NO: 26322 - DNA, 269 bp, Glycine max
  Clone ID: LIB3108-017-Q1-K1-C3
ttgcttctgaaattttgccagtatcagtaacaaataaggcacccattgtttcaactgcagcagccatgttagcttccaacttactatcactgaccatttctggtccagatataaatgctatagtgccaccccatctccagaaaactgcatgcaatttcaggttcaagcttgccctatcaaactgtatcccagttgtcttccacagttttgggatcatcaacttctatccatacagaaacattaacaccttctctcgtaaccccaggtca

SEQ ID NO: 26323 - DNA, 339 bp, Glycine max
  Clone ID: LIB3108-017-Q1-K1-C4
tcggaaaaggatttatgattagaggatagaattatcttaaagatagttctaacgtggttctaggagatcctctgtgtcaagcttgtatcacttgattggtttacacttgataaatccgcggatagaattgcccttcaccctaaatgtatggttcagtcataagctgggaaaactctttcatttatccttgtcattaatctccaggttcctgctaaaccaaactacagtctgcttctatattattcatctgacagaccgattaattaaaattctctgttagctaattttgtttatggatgtgatgcatttatgtactcaagattcatacttattccaagt

SEQ ID NO: 26324 - DNA, 237 bp, Glycine max
  Clone ID: LIB3108-017-Q1-K1-C6
attcccgcaggagccacgcctcccttaccattttcacacactcaggtcgttctcttacaaggatcccttcaaggggctgtggtcccatacaaggaccctcactctttttcaacccaatgcgccttaaagagactggatgttacataattctctggtctttaatccactttacgtgtcacactatctaacagtgctatagaatccttcattatagaacctttaactttccaactaact

SEQ ID NO: 26325 - DNA, 253 bp, Glycine max
  Clone ID: LIB3108-017-Q1-K1-C7
ctaaatgcgagccacgcatcactcgttcgtgaagttttgtcagtatggtttcatttttggctacttcactgcacattcggaatcatcaatgctaacggtctgcttattgtacatgaccacatgtggtccagcaagatattccatcttcacatcaatcgccattgtatcatatacattcttgaacctacatcatatcctttcgtattggataaagtttcacattgcaagccgtctctttttttatcttttattt

SEQ ID NO: 26326 - DNA, 424 bp, Glycine max
  Clone ID: LIB3108-017-Q1-K1-C8
cccacgcgtccggaaaaaagaaaaaagacatggcttccacttctgcagtggcattgggtatgccagtaacttatgccagccagaagagggtactggtgcctagctctgatgcattattcctcaagccactgcctctacgttcttattcttccaaggcaatggcagcatcaaaagtacccaatggaaggtttcaggtgagggcttccatgaaggagaaagttgtgacaggcctcacagcagctgcattcacagcctcaatgatggctcctgatgtggccgaggccgccgtttcgccttctctcaagaacttcttgctcagcatcgccgccggtggtgttgttgttgctgccattatcggtgcggtggtcggggtttccaatttcgatcccgtcaagcgaagctgatcgatatatcaagttcttaa

SEQ ID NO: 26327 - DNA, 394 bp, Glycine max
  Clone ID: LIB3108-017-Q1-K1-D1
tctcggtgttgttggattggaattggacagaaaacagaaacagaaaatggagagcggtccactaatttacccgatctgcccctctcgacattcttcctttcttctctctcaccaatctcccttcctatgcgaaccttctctctctctcaagcttcgaaagcagtttcctctcacttcgcagaatgttctggaagccgcctctcctctcaggccttccgccactctgtcttctgatccctacagtgagacgattgaattagctgatatagaatgggacaaccttgggtttgggcttcaacccactgattatatgtatatcatgaaatgcacacgaggtggaaccttttccaaaggtgaactgcagcgttttgggaacatcgagttgaaccccttc

SEQ ID NO: 26328 - DNA, 397 bp, Glycine max
  Clone ID: LIB3108-017-Q1-K1-D2
aaaacagcagagagaagagaagggctacacaaacacaatctctaatggcactcacggggtgggcttcttccactgccaatgcactcaaactctcttctgtctccagacctcatctcttgcctcctttttctttctccagatgcttatcttccgtcttggatggacttaagtacgctgattcacatgaatgggtcaagcacgaaggctcagtcgccaccattggtatcactgaccatgcccaggaccatcttggagaggtcgtgtatgtggagctgccagaaccaggtggcacagtttccaagaagtctggcttcggagccgttgaaagtgttaaagcaacacgtgatataaactctccaatctcggtggagatcgttgaggttaacaaaaagctcac

SEQ ID NO: 26329 - DNA, 384 bp, Glycine max
  Clone ID: LIB3108-017-Q1-K1-D8
cccacgcgtccgcccacgcttccgttttgttgcaagagtctgctctatgggttcacgtcctcaacaggaagaagttggggtcaactcaaaacaatggagataggttggtgtgattcaattgaagagatagtgtcttcaacagaggaaggggatgaatcagatgagaatgagataatatttcagcagctcaattgtttgaaacttgaagtattaagaaagctgagaaggttctacaaagggagtttaagtttcccgtccttggaggaattcacagtattgtattgcgagaggatggaaagtttgtgtgcaagtacaatcaaaacatacaagctgttactagtcaatcttgtggcacctttgcttaactttggatatgatatccca

SEQ ID NO: 26330 - DNA, 56 bp, Glycine max
  Clone ID: LIB3108-017-Q1-K1-E1
cccacgcgtcctaaaagccataatcctcacctttatctacacataatactaacaac

SEQ ID NO: 26331 - DNA, 417 bp, Glycine max
  Clone ID: LIB3108-017-Q1-K1-E11
gcgcacacactaaaccaaagtaagaggtatagtgttctaagagtgagcaacttgtgagaaatggcttccacggctgcacttctcttgtgtctcaatcatctctttttcactgtggttagttccacatatgtgccatgtcatccaccccccaaaactcccaaacacccacctgtcccaaagccaccatccccaaagcaagcaagctgccccaaagacactattaagttcgttgtgtctgctgatgtgttaggattgattaatgtgcaacttgggaagccaccaaagaccccatgctgcaacctaattcatggtcttgctgatcttgaagctgcagtgtgcctttgcactgctctcaaggctaatgagtcgggcatcaacctcaatgttccagtgaacttgagcttgcttctaaactac

SEQ ID NO: 26332 - DNA, 253 bp, Glycine max
  Clone ID: LIB3108-017-Q1-K1-E2
cccacgcgtccgaaaaggcgcaatctttacattatctcgacaaattgctagcaatagcgatggtcacattatgcgagctgtcgctctttacgaaagctgatctgctgaatcaactgttggtcctgaaagcggttctctccttgcttcgtgcagctaaggccacaggcttgccccctaacacgctatccaagatttaggcttcgaggttgaacattgaccatggtatgactgtgatttctcagaatcataatgc

SEQ ID NO: 26333 - DNA, 342 bp, Glycine max
  Clone ID: LIB3108-017-Q1-K1-E3
cgccgacgaaattatcggctacaacatcttgttctgtcctcttgataataacccatgtgcttgtgtagcggttcatttcgaccaattccgaaacaggcgtttggtggtgtctgaggttcaggaggatggcttatgggttatgttacagaaactttcatatgcatcaggattaactctttcatctgcatgaagcaccgcttgcccttaatagtcatatatgtactttcacgtactgagagacatgagtgagactaagtgaatgcttcatgctgtattcaattattgcatgcataaatgacataatctgagtttatgtctcataagaaataatagggcggtcgc

SEQ ID NO: 26334 - DNA, 358 bp, Glycine max
  Clone ID: LIB3108-017-Q1-K1-E4
tcttttgctatctaattttctgttcaagattcctaacttcccttctttaaaggaacgaactgtgcattcaatgtgttatgggtcgattcaatttctgttcgttgttactacgttgttttcatcataaaaatcgtgctcaatcatattaaagctgtctttttttaattttttttcaaatttaggaataaaacaattcatgtgaagtagtaattaatatgtttgatgtcgtcaggagttagttacaagtacaatggagttaagatcattgattttgcaaccaaacttgacacacttgtttccaacattcacatgctgtgtcaaactcaaaccttctttccagcatttacagaataatagt

SEQ ID NO: 26335 - DNA, 399 bp, Glycine max
  Clone ID: LIB3108-017-Q1-K1-E6
aattcccgcgcgagccagcgtccgggcacccgtaccgcacttgagattcaaacgctgtgttcttgaagtgtttggggtcgtggcactctatgcatcttcctgtactgcatcaagactcaagcaacgcaatggattgggcttttgtgcataaaacctgtgataagtgggcttctacgaacattggttattctggtcattcgttaaaagctgctttgcttattaattatgacccgactggaccatctagattattatctaccattgctgatcaagaagggatgagagccaatcccattgaattgagtcactttgtggacttcatcaaacaaaatatactccatacagaactctttcattattgggttcaatcagtacttgatcacgtcaattcatgagaac

SEQ ID NO: 26336 - DNA, 377 bp, Glycine max
  Clone ID: LIB3108-017-Q1-K1-E8
ggaactcttgtgaagtctatacttgtcttagcattgttttcactcttgtgtcttcatctgaatcaagtaagaagagcatggaggtggatttcaagtctccttcccttgaaaaaacagaagctgagcctcaagtagaagaaaacatgcgctttcacaagtctcttcaggagctaagagaattgcagtctcagttgcaccatgctgcagattattgtgaaacaactttcttgaaaagtgaagctaagagagatgtgttggaaaatacaaaagaatacatatgcaaggccatggttactgttgttgatcatcttgggaacgtctcggctaatcttgatgaccttatttctcaaacaaatgcattttctgaagctgagtct

SEQ ID NO: 26337 - DNA, 351 bp, Glycine max
  Clone ID: LIB3108-017-Q1-K1-F1
tctctctccaatggccaaagacctcgtaacggacattcaaagtgggttgcctcacagtgactgccacgacccacgctccgccccattctacgaccccgccgagctccgaaagtggtccttcttccgagccctcatcgccgagttcgtcgccaccctcctcttcctctacgtcaccatcctcaccgtcatcggctacaaccaccagacagccaccgccgccgagccctgcagcggcgtcggcgtcctcggcatcgcttgggcctttggaggcatgatttttgtcctcgtctattgcaccgccggcatatcagggggacacataaacccggcggtgacgttcgggttgttttt

SEQ ID NO: 26338 - DNA, 388 bp, Glycine max
  Clone ID: LIB3108-017-Q1-K1-F2
cccacgcgtccgcttttcggtcgaagcttatcctgtgttttctacccgtttttctgtgggtaaacattataatgagccaattctaaggcttcgttaaaaaaaaaaaaaaaaaaaaaaaaaaaaaaaaaaaaaaaaaaaaaaaaaaaaaaaaaaaaaaaaaaaaaaaaaaaaaaaaaaaaaaaaaaaaaaaaaaaaaaaaaaaaaaaaaaaaaaaaaaataaataaaaaaaaacaaaataaaataaaatgacactataaataaaaaaaaaaaaaatgggataaacttttaaattacccaaattaattccccttgtataaaatacccactttcctctgatgttgtaatataaaaaaatcttttaccgatcgatttttaaaacagttgcgt

SEQ ID NO: 26339 - DNA, 227 bp, Glycine max
  Clone ID: LIB3108-017-Q1-K1-F3
ccacacgccgatttataccttattcacatcctgtcttaatcaaacctatacggtgattggcaaatacaatatagaaccaaccaaataatcactaaacaatcccaatctcacatcaacaatattaatcttcatcaaaactttaataatatggtacacactggtaacaaatgactttattataagtatttttcctctcaagaatgtattgtatagtaattcaaccattt

SEQ ID NO: 26340 - DNA, 307 bp, Glycine max
  Clone ID: LIB3108-017-Q1-K1-F5
tcccaattacatttaattttaccttcacctcgttaatatctatctgggccgttacacctatctacgagtaagctcaaattgtgaaagcaccattcatgatgaatcatgttctatctttcatcataggaattatggcaagctctattttgatccaagttaaacatttattttcctgtcttatttctttgaataaaagactgtaatgttttatatctatgctacattgtttatgattcagatcatgttgattcaatttgattcattgccattttgcacgtcctgtacttatcttgttcaatttacttac

SEQ ID NO: 26341 - DNA, 282 bp, Glycine max
  Clone ID: LIB3108-017-Q1-K1-F7
aaatttttaaatatatataccaccaaatataatatggtcctggtcctttcatacggcatgcctttatttcatagataacatcatttcataatcatactcacctaactcctccatttcttctattccctctactttctctctaaccaaatcataatagtccataatcaatctttaccactctctgttcattatcaaactatacaactattatataaatctaaaccttctatttaatatattaacatctttaaccataactcctctaacaattcaattcacata

SEQ ID NO: 26342 - DNA, 202 bp, Glycine max
  Clone ID: LIB3108-017-Q1-K1-F9
atgctcccgggcgtcatggccgcatgattagcgtggtcgcggtctagtattaaccgtctagcacagattaggcctggtgcccgttcatatgacggaagtggcgactagcaacgttgtgcacgaagacttatggcgactagcttaacatgttgatcagcctcttattgactatataatcaatgtcctcgccgatgaatcattt

SEQ ID NO: 26343 - DNA, 223 bp, Glycine max
  Clone ID: LIB3108-017-Q1-K1-G2
ttcatacctaatcttaaaaatatttttctcctttattaattcatcaaattaatgtgcttattttcttaataaatacatactcatatttacccaaactgaacaaatacaaattaatatctactatatcaaaccttaaccacgaaattagataaataattaacaatgtcttcatatctctatattccaatttttcttactctaacatgctactttcttaactctt

SEQ ID NO: 26344 - DNA, 345 bp, Glycine max
  Clone ID: LIB3108-017-Q1-K1-G3
cactcatccttatacactatctataaaatatattatttatccatctgtcttcatctaatttctacagatattttcaaattcaagtgcatacaccaaccaattcatacattttcaatcccattctcacatcaacaattttaatcatcatcaaaactttaataattttccaatacttcttacaatatactttatccacattaatttcctcttaataattcattgtatattaattcaatctttatcatctcaaacatcttttataacacaacttcatcctcttcaaaaatcaaacctagctatatatacactcacaataaatcaaatcaatcttctttaatccttatt

SEQ ID NO: 26345 - DNA, 396 bp, Glycine max
  Clone ID: LIB3108-017-Q1-K1-G5
acctcctcagcttctacggctaccgtttccctatcttcctcacaatgctcgacatgctatcatgcgccgcttattcctacgcctccatcaacttccttgaactcgttcctctccagcacatccactccaagaagcagttcctcaagatcttcgctctcagcgccatcttctgcttctccgtcgtctgcggcaacacctccctccgctacctccccgtctccttcaaccaggccatcagcgcaacgaccccgttcttcaccgcgatttttgcgtttttgatcacattcaagaaggagactggtgaggtttacctcgccctgttgccgttggtgttcggtatcgtcgttgcgagcaacagtgaacccccttttcatttgtttgggtttcttgtctgtg

SEQ ID NO: 26346 - DNA, 400 bp, Glycine max
  Clone ID: LIB3108-017-Q1-K1-G8
cgtccaagcaaacccacattcattctgccatttttccattcacacacaaaaattcttatcaagtatgttgggagccaaaaaagctgagctacatccccagaacacattgcttcaaatcaagcatgatgacaagttcttcatcattcttttctcaaaggaaggttccatgtccaaaccctctttcataatggctgtgtcagtcccttttgtgtgtcagtctcatcctgtcaccctcaaatacactttctctgatgacactcttccacccctcactccttcaccttcctattttgttaactccaacataatatacatgccactaaagaaactctcaacatccaacatcttcttatcactctttccaaaactaaatctcaagaaaaaaaacattcttttaccc

SEQ ID NO: 26347 - DNA, 356 bp, Glycine max
  Clone ID: LIB3108-017-Q1-K1-H2
tcgacccagcgtcgacaacccattttatctggaataaccaacacaccaaaaattctcataaggatttgatgccaaaggctgacttatccccatacacaggctccaaatcaagcagatgacaagttcttcacaggcttctctcaaaggaaggtccatgtccaaaccctctttcagaatgtgctgtggcagtcccttttgtgtgggagtctcaacctgcaccctcaaatacactttctctgagacactctttcacccctcactcctccaccttcctatttggtaactccaacataaaaaacaatgccactaatgaaacgctcaatatccaacatcttcttagcacttttcccaaaact

SEQ ID NO: 26348 - DNA, 405 bp, Glycine max
  Clone ID: LIB3108-017-Q1-K1-H3
cccacgcgtccggctaaatccctagttagccgccatggtgaagtactcaagggagcgtgacaatccaaccaagtcttgcaaggctagaggcgccgaccttagggttcattttaagaacactagggaaactgcctttgcaatcaggaagttgcccttggttaaagctaaaaggtacttggaagatgttcttgcgcacaagcaggccattccgttcagacgtttctgtcgtggtgttggaaggacagctcaagcaaagaatagacactctaatggccaaggaaggtggcctgtcaagtcagcaaaattcatccttgatttgctcaaaaatgctgagagcaatgctgaagtgaaaggtttggatgttgatgcgctttacatttctcatatccaagtcaatcaagcaca

SEQ ID NO: 26349 - DNA, 317 bp, Glycine max
  Clone ID: LIB3108-017-Q1-K1-H5
taaatccctattttgcccacatggtgaattactcatctaagccgtacatgtcaaccaagtgttgcaaggctagaacgcaccacaccttaagttacattttaagaacactagtgaaactgcctttgcaatcaggaagttgcccttggttaaagctaaaaggtacttggaagatgttcttagcgcacaactcatagccatatcccgttcatacgctttctgtcttggtgttataaggacagctcaagctaagaatatacactctaatggccaaagaatgcgacccttcaagttagcattaattcattcttgatttgctc

SEQ ID NO: 26350 - DNA, 411 bp, Glycine max
  Clone ID: LIB3108-017-Q1-K1-H7
aatcccgatattcttccagatctcgaaaactatgtcaacgaccaggtttgggcgcaaacttatagcctggacgcgaatctctgccttcttcgcctctaccagtttgaacctgagaaaatgagttcccagattgtggcccgcatattggtcaaggctctcatggcaatgccggcgccagatttcagcctttgtctctttttgattccagaacgcgtgcaaatggaggagcaattcaagactttgattgttctgtctcactatttggagacaggaagatttcggcagttctgggatgaagccgcacaaagtcgtcacatagttgaagctgtgccaggatttgagcaggcaatccaagggtatgcaatccatgtcctttccttgacttaccaaaggattcctagaactgtgctt

SEQ ID NO: 26351 - DNA, 145 bp, Glycine max
  Clone ID: LIB3108-017-Q1-K1-H8
gaaagttatagtaggtcatcatggaccattagattgttttgatttttgggttttgacgttaattgagtctagcaatttttaatcgcaaaaaataaattgtatttgattttgaaatatttacttatcattattaaatcaccaatta

SEQ ID NO: 26352 - DNA, 321 bp, Glycine max
  Clone ID: LIB3108-017-Q1-K1-H9
gccacacttgcgcggacgcgtgcgcatgccgggaaaacttgtttctgatgtcatacgatgtctggagctgagactaatctgaaccttcatcactgatgagcatatgacccgcgattgcgctgttaggtagcgaattactgcctgtacccagttcatgctaagtgggcttgatgattagaactgtttaatccgaatcttaatgatgagcgacttaggcagattgtctaaagcaatggaaaaaggcatataccaactgtcgtgtcaaagttcatgatcaggatctaaggacgagacatcactacggtgttgccacatatactg

SEQ ID NO: 26353 - DNA, 448 bp, Glycine max
  Clone ID: LIB3108-018-Q1-K1-A2
cccacgcgtccgcccacgcgtccggaaaggatctcgaagacccaccaacgcacgaaagccgggatctttcagaaaatggattcctattcgaagggtgcataaccgcatggataagctcacactaacccgtcaatttgggatccaattcggttccttaggaggtatcgggaaggaattttggaatgtaataatatcgattcatacagatacagaagaaagggttctctattgattcaaacgctctacctacgagatagggatagagaaagaggaaaaaaccgaggatttcacatagtacttttggtcgaaaaatcgatctgatttttttcgtacttttcgctcaatgatgaaatgggtcagattctacaggaccaaaccttgtgggagttaaggaatgatggaagaaaagaaataaaaaaaagtaaataaaaatgcagtagaagagtcc

SEQ ID NO: 26354 - DNA, 133 bp, Glycine max
  Clone ID: LIB3108-018-Q1-K1-A4
cccacgcgtccgcccacgcgtccgtttgtttgctttagagagaagaaaacgtcgatcttagggcattatcctaatgagaatctctcttgatttcttactattccctttttcacattctcacactttcctctct

SEQ ID NO: 26355 - DNA, 440 bp, Glycine max
  Clone ID: LIB3108-018-Q1-K1-A6
cccacgcgtccgcccacgcgtccgcacacataaacttgtatgtatttgtgttccgacctgaggctctatataaaccctattcttgtagcactttactctccaagcaactaagcaagatatcatcacattgcagagaaaatacacattacattactaagtctgtgttcatttgagtagtagtgatggctagcctcaaggttgcatgtgtggttgctgtgatgtgcatggatgtggtggccatgagtgctgcacccatggcacaggccgcaatcacgtgcgggcaggtcgccggcgacatgtctccgtgcttcagttatcttcgaagcggcggaaaaccgtcgcacgcctgctgcaacggagtgaagtccctcagcagcgcggcgaagaccaccgcggaccgtcagggggcgtgcagttgcctgaaaaaccttgccaattat

SEQ ID NO: 26356 - DNA, 402 bp, Glycine max
  Clone ID: LIB3108-018-Q1-K1-A7
tcattctcatatcctcaatcaccccccctcgcactcgctcttcccttcctctggtggcgacaatgtcgactcctgctaggaagaggctgatgagagacttcaagaggctgcaacaagacccgcctgcagggatcagtggtgccccccaagataacaacataatgctgtggaatgctgtcatatttggtcctgatgatactccatgggatggaagcacgttcaagttgacactccaatttactgaggactatccaaataaaccaccgactgtacgatttgggtctcgcatggttcatccaaatatttatgctgatggaagtatttgcttggatatattacaaaatcagtggagtcctatttatgatgtggctgctatactcacatctatccagtcattgcttt

SEQ ID NO: 26357 - DNA, 52 bp, Glycine max
  Clone ID: LIB3108-018-Q1-K1-A8
tcaatctgatattctaaatcaccccacatattaatcactattcccttactat

SEQ ID NO: 26358 - DNA, 401 bp, Glycine max
  Clone ID: LIB3108-018-Q1-K1-B1
tcattctcataacctcaatcacccccccttttactcgctctttccttcctctggtggcgggaatgtctactcctgctaggaagaggctgatgagagacttcaagaggctgcaacatgacccgcctgcttggatcaatggtgccccccacgataacaacataatgctgaggaatgctgtcatatttggtcctgatgatactccattgtatggaggcacgttcaaattgacactccaatttactgaggactattcaaatataccacccactgttcgaatttgatgtctcgtcatgttttattccataaaattaagcctgatgggaagaattgttagggatattatttcaaaattcaaggggagtcctatctatttatgtggctggtatacttacaattattca

SEQ ID NO: 26359 - DNA, 445 bp, Glycine max
  Clone ID: LIB3108-018-Q1-K1-B2
gcgcccacgcgtccgaaagcattgaattcaaaaactaagttcatttcttgtgctttgctttattgctcaaggccaaacatgtcgaacacatgcggcaactgtgactgcgctgacaagactaactgcaccaagggaaacagctatggtgttatagtagagactgagaagagctacatcgagactgttgacatggatgttccagcagctgagcatgatgggaagtgcaagtgtggcactaactgcacttgcacggactgcacttgtggccattaaggaatatgtatgaaaatgtaattgccatgtgtttggcaatacatatctccaaataatgtaatcttcgtatgaataaatgtgtgctgatatcctacttcatggtctgtgtagtcatgcagtctgaatcatgtccagttcctgtcatagttattaacagccatggttgtggcat

SEQ ID NO: 26360 - DNA, 421 bp, Glycine max
  Clone ID: LIB3108-018-Q1-K1-B4
tccacgcgtccgcccacgcgtgcgaccacccgtccgcccacgcgtgcggtcacaggaaggtgcttcgcgacaacatgcagggcatcacgaaacctgcgattcgtaagctagcgagaagaggtggcgtgaagaggatcagtggtttgatctacgaggaaaccataggagttctgaagatattcttggagaacgtgattcgcgatgctgtgacctacactgagcacgctaggaggaagactgttactgctatggatgttgtgtatgctcttaagaggcaaggaaggaccctctatggttttggaggctaaaaagttcttagcgttataggattctattgcagccaaaaaataccttgtcttttgaatcggcgtgaagttttcgtttaagtttggtctgtaggatatgaaagttattctggtct

SEQ ID NO: 26361 - DNA, 364 bp, Glycine max
  Clone ID: LIB3108-018-Q1-K1-B6
cccacgcgtccggggaaagttaagatgaagaagatggtggctgcaatgatgctttttcttctcatttctacgcaaatgaagagcgttgagccggatgctgcggattgcttggatggttgcagtactgcctgtgttcaaagcgactcgaggcttcaagcacggtgtgaacgcaaatgcagcattagatgcggtccagattccacaatcaaggaggacatgagttgatttgagtatgtaaagtcacagcgcaagcaagcagtgtttcatcaccatagtcttatttagtccttgcttatacatataataacattttaaggtttgtctgatgttgtagtaacatctaaataaacatggatggcttttt

SEQ ID NO: 26362 - DNA, 439 bp, Glycine max
  Clone ID: LIB3108-018-Q1-K1-B8
cccacgcgtccgcaaagggctagcttaattagctagaatgaaacctcacgtttctggtgaaagctctaatttggccaaggagtctagcagatccgtcggagagaagctccaccaggtttgtaaggctgccatggtggcaatcaccaccgatggatccaaccaacgtagtagtaggcttctccccaatcaaaggttgagcctccaatcagaagacccaattagaaccttgatgttcttgggctcttggagtcacacgtagctaaatagattgaaccaaactcttttaactgttttaagtttggagaaaattgaacaacaaaactatgggtgggccaaaattcattcatatatgttgtcacacatataatattatactatgtcaatacatgcatggagtggcgtaaaaatcttataagcttccatagcctgatatatatat

SEQ ID NO: 26363 - DNA, 444 bp, Glycine max
  Clone ID: LIB3108-018-Q1-K1-C2
cccacgcgtccgcccacgcgtccgcccacgcgtccgtccacgcgtccgggcttgttcagtctttcttggaactttgttactctcacacatgtctcgctccgtgcctttggtttcaaccatttttgtcttgcttctgcttctggtgtcacactgagatgatggtgccaacaatggtggcagaagcacgaacttgtgagtctcagagccaccgtttcaaggggccatgtttgagtgacaccaactgtggctctgtttgcctaaccgaacgtttcactggaggacactgccgcggcttacgtcgcagatgcttctgcaccaaacattggtaattttaaaaaattaattaagagtgctctgatagaagatgatagatctatcatctttctactcgcgttgctaattaaccactttgtgtttgagaataatggttacccattctactat

SEQ ID NO: 26364 - DNA, 430 bp, Glycine max
  Clone ID: LIB3108-018-Q1-K1-C3
cccacgcgtccgggtgaggtagaacccttccacggtggtgactgcgcgatgggtgcctacaagtatgggtcagagctatggcgcaagaagcagtctgatgtcatgcgcttcttgcaacgggtgaggtgctgggagtataggcagcaaccttccattgttcgcttgacaaggtcgacccgacctgacaaggctcgtcgcttgggcttcaaggcttagcagggctatgtgatataccgtgttcgtgttaggaggggtggccgaaagaggccagtttccaaaggtattgtttatgggaagcccacaaaccagggtgttacccaactgaaatatcagcgtagcaagaggtcagttgctgaggagcgagctggacggaagctgggtggacttagggtcctcaattcttactgggtgaatgaggactttacttata

SEQ ID NO: 26365 - DNA, 344 bp, Glycine max
  Clone ID: LIB3108-018-Q1-K1-C4
ctcacgcgtccgtgtgaggtagaacccttgcacggtggtgactgcacgatgggtgcctacaagtatgtgtcatagctatagctcatagatgcaatctgatgtcatgcgcttcttacatcagatgaggcgctgggagtattggcagtaaccttccattgctcgcttgacaaggttcacccatatttactaggctcgtcacttgggacttatggctaatctggcctatgctatataccatgttctagttaggaggtgtggtagatagaggccatgtatctaaaggtattgtttatgggaagcctacaaaccatggtgttacctaactgaaatttcaacgtatcaag

SEQ ID NO: 26366 - DNA, 58 bp, Glycine max
  Clone ID: LIB3108-018-Q1-K1-C5
gtaagcaagcaaaaccctagcggcgcctgctttctttggtcgtgttttgcatcaagat

SEQ ID NO: 26367 - DNA, 434 bp, Glycine max
  Clone ID: LIB3108-018-Q1-K1-C6
gtaagcaagcataaccatatcggcgcctgatctattcgctcgagtcctgcatcaagatggagtgtcacatgcagcactcactggctgacatacttataggtcagactgcatccagaggtcttgtgacctagatcagagtgactcggttggaggatcagaacgggtacattatgagggacgtgaaaggacctgatatagaaggagacatgatgaccctactctagtctgaaacggaaccaagaagagagcgctagacggtctctgtaccttggcttgactgcaacattaaacaatgtcaatatttaacattagatatttattggaattagtctgtgctagacgcgttatagtaacatatataattgatctggatctactgtcattcgacttacagactgaatgctgtatgttgaaacatcaagattgaggtatgc

SEQ ID NO: 26368 - DNA, 85 bp, Glycine max
  Clone ID: LIB3108-018-Q1-K1-C7
tccacgcgtcctaactctaacaacccttattctcctcactctatcttatcctacactctggttttcataccctactcacctttcc

SEQ ID NO: 26369 - DNA, 427 bp, Glycine max
  Clone ID: LIB3108-018-Q1-K1-C8
gtggttggccaggcattttcaagctttatgatcaaatcctgaaagaagaaaaaaacataggacaattttgtctgttcatctaatttaatatgagaaggaacacttttactacagatgagaatctgcctcctatttcagtaaagttcttattcaactgattttggaatcagaaatgtgtgctacaaaacaaattatgtacatatgattctaataacttggtatatatcttatctcctatgttattgccaaaaaaaaaatatatttataatttactataaataaatattaaaaaatataaaaaatttatctttattattaattataaaatatattttatctatatattttatatcttaaatatataaaaagggggggctctttttaaattctcaatttttacttacccttcttttcgattaaaatatct

SEQ ID NO: 26370 - DNA, 448 bp, Glycine max
  Clone ID: LIB3108-018-Q1-K1-D2
cccacgcgtccgcccacgcgtccgcccacgcccgcccacgcgtccggtcaacaccttttctgctgaaggccgtttatttcaggttgaatatgcaatcgaagccatcaagctgggatcaactgcgattggattgaagacgaaagagggtgttgtccttgcagttgaaaagcgcatcacttcaccactgctggagccaagtagtgttgagaaaattatggaaattgatgagcacataggatgtgcaatgagtggattgattgctgatgctcgaacacttgttgagcatgcacgggttgaaactcagaatcataggttctcctatggtgaaccaatgactgttgagtccacaacccaagctctttgtgatctagctttgcgttttggtgaacgtgatgaagaatccatgtctcgaccatttggagtatctcttctcattgctggccatgat

SEQ ID NO: 26371 - DNA, 286 bp, Glycine max
  Clone ID: LIB3108-018-Q1-K1-D3
gttttgtatgtcttcaaggtggtatttgtctttcaagcatggggcgacctgtctcgtacgaaagagtgtgttgcttggaaggtgctgaatgaagaagagaatgctcattgtatgtgctttatgtttatgaactggtcttttgtttgacattttgttctgagtacagtagtgcttattgtaatctaaagtgttagataaagatttactcgacacttgagctttaaaaaaagatttatttacaaataatttaaactacgcaatagaaaatagattattgtagtatatt

SEQ ID NO: 26372 - DNA, 346 bp, Glycine max
  Clone ID: LIB3108-018-Q1-K1-D4
ctcacacttccgatcctactctaaatccttctatacaactatctatccggttatatatatggctaaagttattgcaaactatttcttttgcgatttgacttacgataagacataatcaaattcataccaacaactttaccaacgtctctccatatgtgaccatatatctgatatgcattcttataagcgaatttacgagagcctatactggagccatgtgactataattatgacgatgatatggtaaatgctctgctgattggctaacaactggacttaaacctagcatcaatcccatgcttaaacgcaagctgaacctataggggaacataatgtgcacactaat

SEQ ID NO: 26373 - DNA, 531 bp, Glycine max
  unsure at all n locations
  Clone ID: LIB3108-018-Q1-K1-D5
tcgtgccgttattctcgttcttctggtctaagggggtangccctgagtatcaccatnntgaacatatcggtgcaaggctttgtggccccgttacttggggcagcagctgagagggctgtcactttggaacctcattcaacttttcgttcagtgaagggatnnngtggtccaacgcactcgtagacctgcgagntctcttagctaggtcttacagcctcggtcttccaatggtttccaatgtcccattgccccttgggggacaactactcaaatggtttgccctcttcaaactgcgattcacatttcaaatcctttaataacataggagccatcggtgctcccctgagggatgaagaaatcgtnncatgctggttgaatctttggggaactgttaaacttgtccggtgatgaatcggtacctgtcaggctttcacttaattacttgacagccagaattccttctcacttgggaccaaacaacaatcataangaaagggcggtttgntgtcccatgcctgatccctgatgatc

SEQ ID NO: 26374 - DNA, 439 bp, Glycine max
  Clone ID: LIB3108-018-Q1-K1-D6
gcttcgacggcagcgttcctggctcggctctcggcgcataaggcgagggttcgggtcctggaccgtcgtgccctcaaagacactctcaactgggccgtacattgccacctcttctacgacgacgcttcaaacctacgctaaaggttcgaggagaacagacacgtggaagaccctgataccattgacaggctcatagcacgatgctgaatcttcctacatcaagtggcgccatcctgatccttatattgatccttgatctcgtggtggttgcaagtatactcgcaactcaacttcacctcaagggattgagatagtatataattatggccgacaagattatgactgacatctgattttctcttgcatgcttacactgcataatgattgaggagtgcatccctgcttatgatgctgaaaaattttatcacctgcgaaccag

SEQ ID NO: 26375 - DNA, 416 bp, Glycine max
  Clone ID: LIB3108-018-Q1-K1-D7
cattcattggcttcttccactcctcacaataacatcaacatggctgataagcaatcccagcgtaaacggtgcgtattacggccctgtaatccctccatcggagctgccacgtcaccaccaccgtggccgacgctgctgctgttgcctcttcagcttcttctggaagcttctccttgccatcgtcgtctgcctcgttgtcgtattcctcgtcttctgggctgtgttccagccacgcaccttctagctccatgttaccgacgccgaactcacccaattcaatctcaccaccaacaacaataatagcattgacatgctccgttacaatctcgttctcaatcttactggacgaaaccctaactattgactcatcatctactacgaccaagtggagggccacgtgtgctactaggggatga

SEQ ID NO: 26376 - DNA, 443 bp, Glycine max
  Clone ID: LIB3108-018-Q1-K1-D8
cggacgcgtgggaaaaaaaatggcaggtgaggtggtgaagaaggaagagtctctgaacctgaaagtcactaacaagagccatgttcaatcagaggagaaaatcggaagaaaagagtaccaattggtcacttctgatcttccctacttggccttttactacaaccagaagctcttgttttacaagggtgaagatttcgagggcatggtccaaaaactcaaagttggacttggagtggtgctgaaggagttccaccaacttgctggcaagttagggaaagatgaagagggggtgttcagagtggagtatgatgatgacatgcttggtgtggaggttgttgaagctgatgtagctgatgatgaaattggtgtggatgatctaactgtggctgaaattagtaacactaattagaatgagctgataccttatagtggtatcttagatt

SEQ ID NO: 26377 - DNA, 440 bp, Glycine max
  Clone ID: LIB3108-018-Q1-K1-E1
tgccgctccacttccaaggcaaactctgaaacctctctggttctctgtgacagcggaacaaattatatgatcatgtattcgttgacactgaaacccttcttcactcctcaattagtttcttcgtcttcttcaacttccacttcgtcctcttcgatttctctcgtgtccttcccatctcgttcggtctcatcaattagctttcccagaaatttaaagcacaaaggaagatttggtctcagagttgaagcatacgattcctccaataatgacacttccaaccctgccagtgctggcggcgactccaaaccccctaatggcactttgtcaaagagcaggagagaaattttactggaatatgttaagaatgtgcagccagaatttatggaattgtttgtgaaaagagcgccacaacaagttgtggatgcaatgcgacaaacagt

SEQ ID NO: 26378 - DNA, 440 bp, Glycine max
  Clone ID: LIB3108-018-Q1-K1-E2
ggcagaagtcctaggagtgtaaaacagagacgcaaaatgaagacgatcttgtcgtctgagaccatgaatattcccgacggcgtgagcatcaaggttcacgctaaggttatcgaggttgagggccctcgtggaaaactcgtgcgagacttccaccatctgaacttggacttccaacttattaccgacgatggcggtaaaaggaagctcaagattgattcttggtttggttctcgtaaaacctccgccgccatccgcaccgtcctcagccacgttgagaatttgatcaccggcgtcaccaagggataccgatacaaaatgagattcgtgtacgcacattttccgatcaacgctagcattggcaacaacagcaagtccatcgagatcagaaatttcctcggcgagaagaacgtgaggaaagtggacatgcttgagggcgtgtc

SEQ ID NO: 26379 - DNA, 443 bp, Glycine max
  Clone ID: LIB3108-018-Q1-K1-E3
cccacgcgtccggataactagaaacagtgtgatgaaaatgaaggtccttgttttcttcgttgctacaattttggtagcatggcaatgccatgcgtacgatatgttccctctccgaatgaacactggctatggtgcccgtactccggaggtgaaatgcgcaagttggaggcttgctgtggaagcacacaacatctttggctttgagaccattcctgaagagtgcgttgaagcaacaaaggaatacatccatggcgaacaatatagatcagactccaaaacagttaaccaacaagcttacttttatgccagagacctcgaagtccatcccaaggacacatttgtgttcagtatagatggcaccgtactctctaatattccatactacaaaaaacatggatatggggtggagaaatttaactcgaccttgtatgatgaatgggtta

SEQ ID NO: 26380 - DNA, 449 bp, Glycine max
  Clone ID: LIB3108-018-Q1-K1-E4
gtttcgttcgtcaccatgactttcaagcgcatgaatggaggtcgcaacaaacacggtcgcggccacagcaagttcattcgatgctccaactgcggcaaatgctgtcctaaggacaaggctatcaagaggttactggtgaggaacattgttgaacatgctgcagtcagagatgtgcatgaggcttgtgtctacgaacaatacacgcttccgaagctgtatgtgaagatgcagtattgtgtttcctgtgctatccactctcatgttgtgagggtttgatcccgcactgataggagaaagcgtgagcctacacagcgattcatcaggcgcaaggatcatgcaccaaggcctgttcagactggtcaagccccacgtcctgctggagtatgagcttctgcccgagcttaaaagaaaattccaagtttattggggcttgtttgttcagtcttatg

SEQ ID NO: 26381 - DNA, 442 bp, Glycine max
  Clone ID: LIB3108-018-Q1-K1-E6
cttagtcgcaaaatatgggtgcttctgacgacaacaacaacaactttctccaagttgtcttcaataactttgatgttcttgcactgcccttggttacgcttgtataccctttatatgcttcaattaaggccatcgagaccaagtctactactgacgatcaacaatggctcacgtattggattctgtattccattctcacaatctttgagctcacatttgtcaaagttcttgaactgcttcccatttggctttttgccaacttgatattcaattgctggttggttctgccttacttcaatggggctgctgttgtttataggaattacatcacaccattttatatgaacccccaaataccaattccacaaggctctgaaatctggtattatccgcaaaagaagtctatattcaatgagccatacgatgttctaagtgctgctga

SEQ ID NO: 26382 - DNA, 360 bp, Glycine max
  Clone ID: LIB3108-018-Q1-K1-E7
gtcaaccatggaggtgttctcttcaaggcttatatagttggtgatgctataaaggttgcagggcggttttcgttacctgatgttagcaactgggaactctccaaagatgctggtatatatcgctttccaagggtttcttgtactgcaacttttacggatgatgcagatttagatcctactggttgcaaaccttcctcaaaaacttttcttgaaaaacttgcttaagaactttgatggccaatgggtcttttcctatttaatctggattttaatccttagttttgaaccagggattacttttaccttaatgaccttaactaacttcctgtggattgggaaatgtcaaaatttgaacaccta

SEQ ID NO: 26383 - DNA, 442 bp, Glycine max
  Clone ID: LIB3108-018-Q1-K1-F1
cccacgcgtccgcaacagcagattattcttctttgtttctgttcttcttcatcagccgattcagctttgtccatggccaccgaaccaaaagcagccgccgatgacgtcaagatcgatctcttcgaagacgacgacgagttcgaagagttcgaaatcaatgaagagtgggatgacaaggaagaagggaaggaagtgactcaacagtgggaggatgattgggatgatgatgatgttagtgatgatttttctctccagttgagaagggagttggagagcaacaccgagaagaactaaaccacctgctagttattattgcttgatatgacatgcgctatgtcttgggttgggtgttcgagctcttggaaggagatgaaaactatgccttgtttggaaggaaatgtaagaacatagagacatgatttttctgtaccttcttgaatat

SEQ ID NO: 26384 - DNA, 448 bp, Glycine max
  Clone ID: LIB3108-018-Q1-K1-F2
ggaagagaagaaagtgctgaaaagagaaagttgttatccacaagacaacgtcatcaacattacacaaggcgcagggtggtctctgtgatggcaacctctttctctccgacagcctctgtcggctccatcatcttccaaaaccctcccaaaggccttcttcttctctcccagcagcagcaacaacgctccttcgcctcttctgcaagctatgcaactctcaagctccctcgcgccttcgcactttctccaagacccctcctttccaaagggagaacaacacttgtgagggctgctactatcgaagaaattgaagccgaaaaagccgcaattgaaaaagatgctaaaaccaggatggataggactattgataatgtccgtacaaatttcagttccataaagacagggagagcaaacccatccatgcttgacaaaattcacgtggaatact

SEQ ID NO: 26385 - DNA, 442 bp, Glycine max
  Clone ID: LIB3108-018-Q1-K1-F3
ggaagagaagaaagtgctgaaaagagaaagttgttatccacaagacaacgtcatcaacattacacaaggcgcagggtggtctctgtgatggcaacctctttctctccgacagcctctgtcggctccatcatcttccaaaaccctcccaaaggccttcttcttctctcccagcagcagcaacaacgctccttcgcctcttctgcaagctatgcaactctcaagctccctcgcgccttcgcactttctccaagacccctcctttccaaagggagaacaacacttgtgagggctgctactatcgaagaaattgaagccgaaaaagccgcaattgaaaaagatgctaaaaccaggatggataggactattgataatgtccgtacaaatttcagttccataaggacagggagagcaaacccatccatgcttgacaaaattcaggtgg

SEQ ID NO: 26386 - DNA, 369 bp, Glycine max
  Clone ID: LIB3108-018-Q1-K1-F5
gtggtaggcaagtaccaatgtaatgtcatatttgagactctgtgggtcaatttggtatggaagtttgtggaaaaaaaaaaaaaaaacaaaaaaaaaaaaaaaaaaaaaaaaaaaacaaaaaaaaaaaaaacataaaaaaaaaaaaaaaaaaaaagactaaaatgcatagattccaagatgtcaaacgcttacgtacacaatcatagaacttaatacatgataataataagccctaatttcaagtcattggacaccgaacaacaccgttaaaacagtaaataacggagacaaccctaacttaaatacatccgatatcatgcactttacctagttgcaataataaccaaatgtcaatacttcacaagccat

SEQ ID NO: 26387 - DNA, 443 bp, Glycine max
  Clone ID: LIB3108-018-Q1-K1-F6
atagcatagaagaagcagaaagagaagcattagcaaaagcaagaagaactagtctaagcagaaatggcctcttcagtgatggcatctgtggccctcaaacctgcccctttcactgttgagaagtcctcagttagaggccttccctccctctcaaggaactcctcttcattcagagttgtggccagtggtggcaagaagatcaagactgacaagccttatggaattaatggtggcatggctttgagggaaggagttgatgcatctggcaggaaaggaaagggaaagggcgtttaccagtttgtagacaaatacggtgctaatgtcgatggttacagtcctatctacgacaccaaggactggtctccaaccggtgatgtctacgctggcggtacgactggcttggctatctgggctgtgactctacttggtcttcttgctggtgg

SEQ ID NO: 26388 - DNA, 437 bp, Glycine max
  Clone ID: LIB3108-018-Q1-K1-F7
atagcatctattatgcagcaagtttatcattagcacattcaagatcaactagggggagcaggaatggcctcttcagtgatggcatctgtggccctcaaacctgcccctttcactgttgagaagtcctcatttataggccttccctccctctcaaggaactcctcttcattcatagttgtggccagtgattgcaataatatcaagactgacaagccttatggaattaatggtggcatggctttgatgtaatgagttgatgcatctggcatgaaaggaaaggtaaagggcctttaccagtttgtagacaaatactgtgctaatgtcgatggttacagccctatctacgacaccaatgactggtcttcaaccggtgatgtctacgcttgcctttctactggcttggctatctgggctgtgactctactttgtctttttgc

SEQ ID NO: 26389 - DNA, 365 bp, Glycine max
  Clone ID: LIB3108-018-Q1-K1-G1
caaactcactctatcttctcccttttccttcaaaacttcatttctgccaaaatcaccatcagtttctctaggtttatagtcccccagaactaatgttaccggtgtcaaagttcatgctaaattaggtggtggagatgaacaagccaagaaaggaggaaagaagaaattcataaccagataggaagaaccacaacatgtattggcagacagcatgagaaaggtaatgtgagaatctcatgaagacccctctttcttacattatcatattttgttgtgtcaatcttcttttgtattcttggcatttgctttttcaaattgggtggattatattttctcctgttttatttattacatttctttttttg

SEQ ID NO: 26390 - DNA, 72 bp, Glycine max
  Clone ID: LIB3108-018-Q1-K1-G2
acccactcgtccgcatactcactctatcttttcccttttcctttaaaactttattaatcacataatcaccat

SEQ ID NO: 26391 - DNA, 441 bp, Glycine max
  Clone ID: LIB3108-018-Q1-K1-G3
cccacgcgtccgctcctaagaagccatactactatcattctccaccacctccagtccacccgcacccttacccccatcctcacccccacccacaccctcatcctccttacgtttaccactctcctcctgcaccccctaagaagccctacaagtacccttcaccctcaccaccagttcaccctccctacattccacacccagtttaccactctcctccaccaccaccttacaagaagccttacatctatgcatcacctccccctccttaccactattagcatacctcttatcgatatgaagaatatgtgcaacgaataaaagaaagcgatggaaagcgcttcgcgatgcacgaaagagaagaaatggaagcaaagtttccgcgttttgtctttcataaaaaaaatgttaaattattattttctatgataggattggtttctt

SEQ ID NO: 26392 - DNA, 299 bp, Glycine max
  Clone ID: LIB3108-018-Q1-K1-G4
tcttacaaggctctactctactgcttcaacttctggtctaaaaaaatcaatgggggatcatggcttcgggtactctctctggagccaaaccagcccttcaagcaaatgggaaaagcttctctgaattctctggccttcgcagctcatcaagcttccttcccttttctagaaaatcttcagaggatttccattctgtcattgccttccagacctatgcagttggaagcagtggaggatacaagaagggtgtgacagaagcaaaactgaaagttgccataaacggatttggaaagattgga

SEQ ID NO: 26393 - DNA, 450 bp, Glycine max
  Clone ID: LIB3108-018-Q1-K1-G5
ccactagtaaccgccggcagtcgtgctggaattcgcccttagcgtggtcgctgccgttttaccattggagccctcaaaagagattctggacaatttataatcattatgaatgtggcattacaagactgcataatggtataatagctcatgacaagccataaacttctttgctcaaaactcttttaccgactcgattttcaaattttgtgatatggatctttctttggcatcatcagtagaaattcgctttcaccttcttgtataattctgtagtaacaaaatcaatcatggattctaatgaaccttcacaaaattttttcttgccttcaatggctttctgttcacataacctaattgtatacttcatgatttcagcttgcatctagttacgtttaactgaaaactcatcaaagatttttgaaagatctttccatgtaaaacgtataaatc

SEQ ID NO: 26394 - DNA, 382 bp, Glycine max
  Clone ID: LIB3108-018-Q1-K1-H3
tcgcccacgcgttcgctgactcgttggcggactcttgggctatgcagtcttttatgttatagtgtgattgggtctgtcatatatctgtgtatcaatggtggtctttctttgcaaggaagaatatggtgtgctcttggtcaatgactgtacttcatcttatgaattttgccacaacttttgaatctcaaattaatgtgactatgaccatgatgataatggcgtcattgattttgcccctgccgcatttaataattttttaaaacatgcataaatgatgaggatgatgatgtatatatttattattcagtgtaagcttcattctgtggtcttgcttattaattacattacatttttatttctttttgaataagttctaaagtta

SEQ ID NO: 26395 - DNA, 447 bp, Glycine max
  Clone ID: LIB3108-018-Q1-K1-H6
cactgaatgagaaaagtgacatctacagttttggaattgttctactggaattactcacaggtcgccctgcaatattaaaaggcaacggaataatgcacatacttgagtggataagacctgagcttgaaagacaagatttgagtaaaattatagatccaaggctacaaggaaaatttgatgctagttctggctggaaagctttaggaatagcaatggcatgctctacatcaacctccactcagagacctacaatgagtgttgtgatagctgagctgaaacagtgcctgaaattggaatcccctagtgatacttctgaaaaatttgtggcccctccaaaacaagtctacggcgaattttatagttcatctgaagcattttcctatgatagtcaatctatgacctatcctttcccaagatagtgcaagtatatacatgattccaccatcg

SEQ ID NO: 26396 - DNA, 265 bp, Glycine max
  Clone ID: LIB3108-018-Q1-K1-H7
cccacgcgtccgaaatgactccatctttgctattctcaactctctctctctaaggaacccgtcagagcatgaggtgagagaaacttccctgcccttccattttcctctcgattccttcgcctctgctatcgatcctttgctttaagagaacctaattcctgtctgtctctcccccttcaaattcccttccttttctatcatattcactctctctttctaaccgtacgttgcactttggttttgcatactaattccgtggcttaat

SEQ ID NO: 26397 - DNA, 426 bp, Glycine max
  Clone ID: LIB3108-019-Q1-K1-A1
cagaagaacaagtagttgagaactaagaaggagaagcaaatggcttcctcaatgatctcttggccagctgttaccactgtcaaccgtgccggtgccggcatggttgctccattcactggcctcaagtccatggctggcttccccaccagaaagaccaacaatgacattacctccattgctagcaacggtggaagagtgcaatgcatgcaggtgtggccaccagttggcaagaagaagtttgagactctttcctacctgccagaccttgatgatgcacaattggcaaaggaagtagaataccttcttaggaagggatggattccttgcttggaattcgagttggagcacggtttcgtgtaccgggagcacaacaggtcaccaggatactacgatggacgctactggaccatgtggaagctgcctatg

SEQ ID NO: 26398 - DNA, 426 bp, Glycine max
  Clone ID: LIB3108-019-Q1-K1-A12
aagaaagaggttgtagggtattgacaacacacaaaaactacaaagttaaaggggtgatggagaaaggaagtgtggttgaagttgcagcaccaagatctcccatgcagatgaagatgggggatgaattagaaggcaacaccagtgccctacgcactgctgagacgtttctgcgtttagttcctgttggtctatgtgtttcagcacttgttctcatgcttaagaactctcagcagaatgaatatggatctgttgattacagcgatcttggagctttcaggtatttggtgcatgccaatggcatttgtgcaggctactctctattttcagcggtgattgctgctatgccacgcccttccactatgcctcgtgcttggactttctttttgcttgatcaggtgctgacatacataattctagcggctggag

SEQ ID NO: 26399 - DNA, 275 bp, Glycine max
  Clone ID: LIB3108-019-Q1-K1-A2
aaaaaaaacaagtagtatgaaaactaagaaagataaacaaaatactataataatagatctattggaaaaatgctaccaatgttaagggatcagatgtcaatatggctgcttcatacactatcactaagatcatgggttgcttaactaccataatgtccaatattgttattacctttattactagcaacggtagaatattacaatgcatgctagtgttgccactagtcagcaagaagaactatgatactctgtactacctgccacaccttgatgat

SEQ ID NO: 26400 - DNA, 378 bp, Glycine max
  Clone ID: LIB3108-019-Q1-K1-A3
cccacgcgtccgagcagagaaacaaagttacaagtaaagtacattaagacgatcattaatggctactcttgcaaccttagctgctgttcaaccagctgcgctcaatggccttgctggaagttccctctgtggaactaagctctctttcaagccctctcgccacactgtcaaatccaagaacttcaggagtggtgccgtggtagcaaagtatggcgacaagagtgtgtactttgatttggaggatctgggcaacactacggggcagtgggacttgtatggctcagatgcaccttgaccctacaaccctcttcatagcaagttcttcgagacatttgctgctccattcacaaagaggggatcggtactcaagcttctgat

SEQ ID NO: 26401 - DNA, 450 bp, Glycine max
  Clone ID: LIB3108-019-Q1-K1-A5
ggccatgccatggcgcaagctaccaaaggttccctctacgaatgaatactggctatggtgagcgttcttcggaggtaaaatgcgcaagttttaggcttgctgtggaagcacacaacatccgagcctttaaaaccattcctgaagagtgcgttgaaccaacgaaggactacattaatggcgaacaatttagatcagactctaaaacagttaaccaacaagctttcttttatgctaatgaacgcgaagtccatcacaacgacatatttatattcggcatagataacaccgtactctctaatatcccatactatgaaaaacatggatatggagtggaggaatttaatgaaaccttatatgatgaatgggttaacaagggcgacgcaccggcattgccagagactcttaataattacaacaagctgttggctcttggcttcaagattgtattct

SEQ ID NO: 26402 - DNA, 450 bp, Glycine max
  Clone ID: LIB3108-019-Q1-K1-A6
ctctcggtgagggttttagggcacacaccgcagggagacggtttctttcactctctgcgatgggcgatggctgacgaggactatgaagatattgacatggggttcgttctctctctctctctttctctcacacacacagaaattagggttttccctaattcaatttgcctattgaaaatccttaattcccacagccgacgaggacactattttaattaactctcttgatcgtgactaaatgagcaatttctcaactcacggtacccccaaatgggattttttgcaccgtgtcgtatatttattccgggttccttttttttggcctgaggttttatttttggatccgttatggtaacacttgtagtttttctttttttcaaatgttcttctactggatttgatcacgtttgcctttttctttcaaacgtccattgtaaattattcttcatg

SEQ ID NO: 26403 - DNA, 462 bp, Glycine max
  Clone ID: LIB3108-019-Q1-K1-A7
gttcggattgcggcgacgtgagcggttcgctgcccgcgacgttgtgagaagtccactgaacgttatcatttagaggaaggggaaagtagttcatgttggtattcttgattctttgagacgggtgaaggagattgttaaagaggtaaatgccggtctcgagtgtggacttgggttagaagactttgatgattgggaagagggtgacattcttgaagccttcaacacatttcagaagaagaggacccttgaagaggcctcagcctcaatggcatctgccgtggagggagtaggagttgcattgtagaatgaacaatgatgtgttccactatgagattgattcctatcttgtgtttgaacacagtgcaaatgcattccaagttccagttgaaaaaaacatagtatttctctccagttggtattattacattggagagaggtaccaattccctcatcatttatatt

SEQ ID NO: 26404 - DNA, 347 bp, Glycine max
  Clone ID: LIB3108-019-Q1-K1-A8
ttcatgtcgatgttgacgtttggatggtgttggtgttgggggttgaagcctgggctggaatgtgaaggactggaggtctaggtggtggaataggtggaggcatttacaaaggaataggaattggaggaggcatttacaaaggaattggaattggatgaggcattgacaaaggcattggtagtggtgtaagtgctataggtggtgtaggcggtgtcattggtggtttcaagcatgttgaagctcaaaagccttgatcaatcaatcaactaatgaggtaattacgtacgtacaataattccagatttgtgatgatcatagtgatcattagtgtgacattttacagttat

SEQ ID NO: 26405 - DNA, 313 bp, Glycine max
  Clone ID: LIB3108-019-Q1-K1-A9
ctgagctgagaagagggagaagatgatcatccccggtcgatgttttacctgtggaaaggtaattggaaacaaatgggatacctatttggaccttctccaggcagattacagtgaaggagatgcactggatgcattgggactggttcggtattgatgtaggcgcatgcttatgacccacgttgatctcattgagaagttgctcaattacaatactttggacaagtctgatctcaattaagaagaaggctagaggaataacagatgaccaagatgcttctgttgcattccatgccctatggcaatgcatcaattt

SEQ ID NO: 26406 - DNA, 370 bp, Glycine max
  unsure at all n locations
  Clone ID: LIB3108-019-Q1-K1-B1
cagaaaaacaagtagttgagaactaagaagaaggaaatggcttcctcaatgatctcctccccagctgttaccaccgtcaaccgtgccggtgccggcatggttgctccattcaccggcctcaaatccatggctggcttccccacgaggaagaccaacaatgacattacctccattgctagcaacggtggaagagtacaatgcatgcaggtgtggccaccaattggcaagaagaagttcgagactctttcctacttgccagacctcgatgatgcccaattggcaaaggaagtcgaataccttctaaggaaaggatggattcctggcttggaantcgagttggagcacgggttcgtgtaccgtgagcacaaca

SEQ ID NO: 26407 - DNA, 360 bp, Glycine max
  Clone ID: LIB3108-019-Q1-K1-B10
cacaaagcaaagctcatccttgagttaaaaaatggcagcagcttcttccatggctctctcatccccatccttggctggcaaggccgtgaagctgggcccatcagccccagaagtgggaagggtgagcatgaggaagaccgtcaccaagcaggtctcctcaggaagcccatggtacggcccagaccgagtcaagtacttgggcccattctctggcgagcccccgtcctacctaaccggtgagttcccaggcgactacggctgggacactgctgggctttccgcagacccagaaaccttcgccaagaaccgtgaactcggcgtgatccactccaggtgggccatgctcggagcccttggctg

SEQ ID NO: 26408 - DNA, 196 bp, Glycine max
  Clone ID: LIB3108-019-Q1-K1-B11
aaaaaaaaaaaaaaaaagggagaaaaaaaaattaaaaaaaaaaaaaaaaaaaaaaaaaaacggggaaaaaacaaaaaaaacaaagaaaaaaaaaaaaaacacaaaaaccaaaaaaaaaaaaaaaaaaaaacatgaagcaccaccctcacgcacccaagactcctcaagcaagcccatcgtacacaccaccaccgag

SEQ ID NO: 26409 - DNA, 367 bp, Glycine max
  unsure at all n locations
  Clone ID: LIB3108-019-Q1-K1-B12
cgctgcagactctgctccacttgctacttcctctagaagaagcctttttcaaatctctctgggaccatacccaccccttttcttcattttgggtttctctcttctaagttatggcttctttgagacctaccctctctcaactttccctttcccaatccaattttctcagaaaatctacatggaacaatcatctaccttgttatatacacaaaaggatcgcaaagttgcaaacttttacctcttctaaatcttccactttcagggtccgctgtagttcttcagagaccaattagcaaaacaatggtgaagagcctncagagtcattatttatgaagggaattgagaggagaggtatgacccctacttc

SEQ ID NO: 26410 - DNA, 369 bp, Glycine max
  Clone ID: LIB3108-019-Q1-K1-B2
cccacgcgtccgcggacgcgtgggtttcactggaatcacaatcctgaaacaaaaacatcttagcatttaacatactactagacagcatgaccaccacattggaaagaggtttctcggaagagcaagaagctctggtggtgaagtcatggaatgtcatgaagaagaattctggagagttgggtctcaagtttttcttgaaaatatttgagattgctccatcagctcagaaattgttctcattcttgagagattcaacggttcctttggagcaaaatcccaagctcaagccccatgccgtgtctgtctttggtatgacctgtgattcagcagttcagctgcggaaggccgggaaagtcactgtcagagaat

SEQ ID NO: 26411 - DNA, 283 bp, Glycine max
  Clone ID: LIB3108-019-Q1-K1-B3
ctcttgtatcgatggcgtccaggaaagctctcgctcaaggactccttaacatcaccaaagtggcatcacaatccctcaccaattggcggatttcctcttactccatcatcggataagttgacccacgcgccgtcgagcccgatgatcccggagaaaatggccgcttccgttcgccgcaacttgtcagaagaaacctgctagacaagctcatgacgatgggtgttgaccacaaccggatccggttggatgggttgacgccggcgcagattcaaatggtggacac

SEQ ID NO: 26412 - DNA, 70 bp, Glycine max
  Clone ID: LIB3108-019-Q1-K1-B4
gtgtgatgcttcattcaattggtacactagaataatgtgtaaatattacaatatatctattagtatattc

SEQ ID NO: 26413 - DNA, 445 bp, Glycine max
  Clone ID: LIB3108-019-Q1-K1-B5
cgaacgcgcccggtcctcacctcacgatcggcacgctaggtattactagggttatcacgcctggcatgagactgaggcgacgctcgtgtgccggagagacgctagatttcaacgatgcgcgaggtgtaggcatgaatcaactgacgatgctgcctcatatatccatgcagcaactgacagactcacaacaagctgacgcttgccgcgaccaagctctgacgttacgacgacagaacggacaccggctgatcacgcgacagcgcgcggacaacgacgtgtcaacgtacaagagacgaatcacgatgatacatgacgtcttagatcgctagcactacgtactcgagaccaaccatatacatttaccaactcgatgcaagccttgtgagcagcaacatcttctagaggatacggtgcgtactggatcatcacggttactacacgcgca

SEQ ID NO: 26414 - DNA, 381 bp, Glycine max
  Clone ID: LIB3108-019-Q1-K1-B6
ctcaggtgaagcacgcacttgttgtcaaagttatgggtcgtactggatccagaggacaagtgacccaggttagagtgaagtttttggatgatcagaaccgtcacatcatgaggaatgtgaaaggacctgtgagagaaggagacattctcaccctactcgagtctgaaagggaagcaagaagattgcgctagatggtctcttttttttggcttgcctccaaattcgaacaaaagcaatatttttcttgatatttatggtagttagtcggtgctaaaggggttatagcaccctatcttattgttttggatctattttcattcgaattattgcttgaattttgtatgtttaaacttcgagaatgaggtatgctttggttaatat

SEQ ID NO: 26415 - DNA, 261 bp, Glycine max
  Clone ID: LIB3108-019-Q1-K1-B8
cccacgcgtccgtccacgcgtccggctgcgtagtggctggcaaattgtaagtaagaaagtgtgggggtagagtagcggcgtatcttattattatgtaatgtatatttataattaataagccattctgcgttagttggtaaaaaaaaacatacttaaaaaacaaaaaatgaatgataatgaacaaagaggacaactagaatgacaacaagagcaaatatgtaaagtggaagtgtcgagagttaccaatgcccatcacaatgc

SEQ ID NO: 26416 - DNA, 347 bp, Glycine max
  Clone ID: LIB3108-019-Q1-K1-B9
caattttctagggtttatacaattttcgatggcttcttcagatgttgagtaccgttgctttgtcggtgggctcgcttgggccactgacgaccaagctctcgagagagccttctctcagtacggcgaaatcgttgaaacgaagattatcaacgatcgtgagactggaagatccaggggttttggatttgtgaccttcgcctcggagcagtccatgaaagacgccatcgaagggatgaacggccaaaaccttgacggccgtaacatcactgttaacgaagctcagtcccgtggtggcggtggcggcggaggcggtggaagtggtggatattggtggggtcgcggtggtg

SEQ ID NO: 26417 - DNA, 243 bp, Glycine max
  Clone ID: LIB3108-019-Q1-K1-C1
cccacgcgtccggggaagaaaaacttagctactaaggaaggatcaaagagaatggctcaagcaatggcatcaatggctggcttgcgtggttcctctcaggctgtgttggaaggtagccttcacgtgagtggctccacacgcttgaatgtggggagtggaagcagggtggcctcagtcacacgtgcagggttcacagttagagcacaacaacaacaagtgaatggtgaggtacaaagcagccgt

SEQ ID NO: 26418 - DNA, 58 bp, Glycine max
  Clone ID: LIB3108-019-Q1-K1-C10
cacagggaaaagttcatcgggggactacaatatcacacaacctagtgtccatgcgaca

SEQ ID NO: 26419 - DNA, 433 bp, Glycine max
  unsure at all n locations
  Clone ID: LIB3108-019-Q1-K1-C11
ctaagatggcttcctttgtatccttcctagtgctgcttcttgcagcccttatcctcatgccgcaagggcttgctacttactacaaaccaattaagaagccaccagtgtacaagcctccagtgtacaagccaccagtgtacaaaccaccggtttataagccaaaaccaccggtttacaagccgaaaccaccggtttacaagccaccatataagaagccaccatacaagaaaccaccttatggaaagtaccctccagtagaggacaacacccatgcctaaagcaagcaatgaggtctattatctacttaataaataagaggaactgctttgtgttttctagcattgtgatttacaacttcgtagcaatgcatattctngactcttgcatgcacttcaatccttcgtagcattaatgatgtggccaagtcatcatg

SEQ ID NO: 26420 - DNA, 179 bp, Glycine max
  Clone ID: LIB3108-019-Q1-K1-C12
gaaaaggcagcctttctgcaccactccctgccttatcgccccatttccgttccaacatttgtgacagattagtagtatatgctttcaacaatggaagattagaaagcgccagtgtgcgcacgttagcacccaaccccatggattcctcttccccaattcgtaagggaaggaaactatta

SEQ ID NO: 26421 - DNA, 346 bp, Glycine max
  Clone ID: LIB3108-019-Q1-K1-C2
cccacgcgtccggccacgcgtacgtctctctccaagtctgcttgtagcagcacttcctagacaagcaagggctcaggcttgtcggtctcaaggtctgagatccgtgtgaaccgtgtgaaggcaaggaagagggcaaggcacagagcagcacaagataaggacaaggagaaagagaaagagcgtgattttaacattgcacaccaccatcaccaccacaatgtgaacaacatgtctcacactgcttccttcactgagcttatcactggtgggattgtgagcacggtaacagttaaccccaacacaacatcatcatcaacaacatctgcaacaagtactaatggatcat

SEQ ID NO: 26422 - DNA, 351 bp, Glycine max
  Clone ID: LIB3108-019-Q1-K1-C3
cgctgagagtttgaggcacagaaagatgtctagtcattcaaaaaggatggaactgcctcttgcaagtgaaacagcaagagaggagtaccatctaactccacaggatggggatatacatagccaaacaatggtactaaatggaaaagctctgagtgtaaactcagatggtgacattcctcctttggagcctatatatgtgaactcatcagagccaataagggttgctgctttctctattgtatttgcccatttacctgatgctgttgtttcagcctgtggctaaactaggtggcactaggggagaccaaaattggtttcacttggtggttgagctaattacatggaaaacat

SEQ ID NO: 26423 - DNA, 370 bp, Glycine max
  Clone ID: LIB3108-019-Q1-K1-C4
tgaaatttataaaaaaaaaaaaaaaaaacacattttctgtcataaatcatttcaatttaatccggttcaatccttgcaatttttgggtcaatttagctgttgcaactgatactctaacagtgttttattctatgcatctctttaccaaattgcccctgctcaaagttgaaattctatagtcactttttaattttttttttgttctgggtgtttttcttatctgtgttttgtttcaattgcgcgaggtgggtttttctagggtttggaggctatgccgaaagcgggttgaataagctcaggaatttgagattttgtgggtggtacttgacatggattgaggaatgaagcgactttgtcatggtatttggtt

SEQ ID NO: 26424 - DNA, 340 bp, Glycine max
  Clone ID: LIB3108-019-Q1-K1-C5
cagatacagaaattgcagaaatcctacgggttgtagttggtagttctccgtggtaacggatgttttctgttgaattcaagctttttgagcatattgaataattagttggctgggtagtaacccttattggcaactaaacaccaatggagctgatcattttttaagtgtaattaatcaaaaacttaataataaaaaataagctctgaagtgatacacttaactagggccaggctcaattgctcgagctgcgtttttctaggactatgaggctataccgaaagcaagttggaataagctcatgaattcaagatcttgtgcgaggatctcgacatggattgac

SEQ ID NO: 26425 - DNA, 461 bp, Glycine max
  Clone ID: LIB3108-019-Q1-K1-C6
gaaggtgtagacaaacacaatctctaatggcactcaggatgtgggcttcttccactgccaatgcactcaaagtctcttctacctccagacctcatctcttgcatcctttttctttctccagatgcttgtcttccgtcttggatggacttaagtatgcagattcacacgaatgggtcaagcacgaaggctcagtcgccaccattggtatcactgaccatgcccaggaccatcttggagaggttgtgtatgtggagctgccagaatcaggtggcacagttacccagaagtctggcttcggagccgttgaaagtgttaaagcaacaagtgacataaactctccaatctcgggggagattgttgaggttaacaaaaagctcacagagacacctggcctggtcaactcaagcccatacgaagatggatggatgatcaaagtaaagccaagtgatccatctgaatta

SEQ ID NO: 26426 - DNA, 326 bp, Glycine max
  unsure at all n locations
  Clone ID: LIB3108-019-Q1-K1-C7
gaanggcaggacttggtgggaatcgcgatgttacaagaaggcagaacagctgaaatatcgaggctctagctcgcttagctagggaagaacacaacaaagaacagaatgcccttttggagtttgaaaaggtggtaactgctaaacatcgagaggatgcgagagaccatgtacaccatcacttaggaggcaaaagatggtgggcaaaagaaggcttatgaagcctaagattgggagaagtcatggttgaactttgaggaagtgcaagtaggctaagctagtggctaaaacacctgtatagtctactgcttaatcatgttgctgaacag

SEQ ID NO: 26427 - DNA, 369 bp, Glycine max
  Clone ID: LIB3108-019-Q1-K1-C8
gaaaattttaaataggacttgttattacaaaatacaattgcattgctccttcggcgaattgggactggtctctttgccgaacttcagcgttttggtttgggagggaaaattctaaaacctaaaaaatttcaatctcaatcaactcaacgtctgtgatcccaatcgatcacatttaataccacccttcaggattaggtagtaattccgttcccttgaataaataacatgagcaccacagtgcaaagaactccaagatccagcaggcattctttatttttccaggatttggcttcacctgtttctgcccgtagaggaaaattttcgagtccaggtcaagcagctgcagtatcttcactatggcgtgagaac

SEQ ID NO: 26428 - DNA, 346 bp, Glycine max
  Clone ID: LIB3108-019-Q1-K1-D1
cccacgcgtccgcccacgcgtccggggaaataggatttatctcttggacttcgatggctgcttgtctgttattaaaatttcagaagcatggatgaatatatgggtgctaaaagattactggaaagatgaatggtgtatggtggataaggtgagtctgaggtgtatcagaggaatggtgccaggcatttttccaatcagtcagacaggtgaatgtgtttttttggcaactcataagcagattttggtgtatcatcgcaggactcaagtttggaaaagacatgtactctgtgaagtatagctcaacacttccattatggttttctgctcatgcatatcgcagcacaat

SEQ ID NO: 26429 - DNA, 431 bp, Glycine max
  Clone ID: LIB3108-019-Q1-K1-D10
ctgaggatgaagtccgtcatgcgggtgacctgggaaacatagttgctaatgcagagggggttgcagaggctacaattgtggataatcagataccactctctggccccaattcagtagttggaagagccttggtggtccatgagcttgaggatgaccttgaaaagggtgggcatgaactcagtttgacaactggaaatgctggtggaagattagcatgtggtgtggttggtttgactccagcataatcagtgcagcgaattttttgtagcagtcgtgttatgttatcagatattatgttctctgtgaagcatgatgactcactgttttcttcagttaccaatgtaaactgtaaagcataatgtccttctaaagatgagtgtgcaaatgaatcatgaaaacatgttgttagtcctttactggagattcatcgt

SEQ ID NO: 26430 - DNA, 359 bp, Glycine max
  Clone ID: LIB3108-019-Q1-K1-D12
ctaagctaaacaatttcatcaagcctgccatggcttcctcgtgtgcttgctctgccattgcagctgttgccatctccacaccaagttcccagaagaatggatcactcttgggaagcacaaaagcttcttttcttagtgggaggaaactgaaggtgaacagttttacagcaccagttggagcacgatccagcactacagcgtgtgcagatgctgagcctgataggcctctgtggttcccaggcagcacccctgctccgtggctagatggcagattgccaggagattttggctttgatcccctaggtcttggatcagatcctgagagcctgagatggaatgtccaagcagagcttgtgcac

SEQ ID NO: 26431 - DNA, 365 bp, Glycine max
  Clone ID: LIB3108-019-Q1-K1-D2
cccacgcgttcggccatacgctaggttatctagaggagaacatgaaggcgaatgtattctttggtgctgcagtagtattggtggcgtggccatgccatgacgcatgctaccaaaggttccctctccgaatgaaaactggctatggtgagcgatcttcggaggtaaaatgcgcaagttttaagcttgctgtggaagcacacaacatccgagcctttaaaaccattcctgaagagtgcgttgaaccaacaaaggactacattcatggcgaacaatttacatcagactctagaacagttaaccaacaagctgactatcatgctactgaacgcgatgtccatcacaacgacatatgtatattcggcata

SEQ ID NO: 26432 - DNA, 150 bp, Glycine max
  Clone ID: LIB3108-019-Q1-K1-D3
acgcgtccgcccacgcattcggacacgcataaagttatctagaatttaacacgggaacgtactaactgtatgaggtgaacctacaattgcataggagaactttactacatgaaagagtcatatactaagcccaacaatggaatctacttg

SEQ ID NO: 26433 - DNA, 129 bp, Glycine max
  Clone ID: LIB3108-019-Q1-K1-D5
cccacgcatccagagacgcgcacagtcaacacgaatctagcaacggtatgtgcacgctcgcggaagcggacctacgattgagtaggcgacactgcctggacgagctaggacgatacaaagccctacata

SEQ ID NO: 26434 - DNA, 396 bp, Glycine max
  Clone ID: LIB3108-019-Q1-K1-D6
cccacgcgtccggcaattgaagttgaagtcttgcccttctgtcttcaactccaaacacaagggatcatcatccatggctgcctccgtctccactgtcggagctgtcaacagagctcttttgaacctgaatgggtctggacctggggtttcagctcccagttcatccttctttgggagcagcttgaagaaggttattggctcaagggtccccaacacaaagatttcctctggaagcttcaagattgttgctgtagaagagaagaaagagattgaagagacccagcagaccgacaaggacagatggaagggtcttgcctatgatatctcagacgaccaacaggacatcacaagaagaaagggtttggttgactcccttttccaagctcacaagatgct

SEQ ID NO: 26435 - DNA, 455 bp, Glycine max
  Clone ID: LIB3108-019-Q1-K1-D7
gccgctcctttggcagtgaaccgtcctctgcttggtcttgacgagaatgtaccattagctgtggctcatccccaattcctaccgttcaaatggccacccaactgcaaactcccctccgtcgtccgaattcgatgctactcctcccctttcaacgacaaagccctcatttccatgacacctaacacttcccacctcaatcccaaccctctcgcttgtcgctttcacgcttcccagtttggagaacaggagagcaacaaatacgtggaagcctatgctgtacgacgaaatattcgtatgtctgctaataaagctcggacagtgatcgatcagattcgcggacgtaaatatgacgaaacacttatggtattagaactcatgccttatcgagcctgtgaagccattctcaaaatagcgctttcggctggagctaatgctagcaataatctgggtttaag

SEQ ID NO: 26436 - DNA, 293 bp, Glycine max
  Clone ID: LIB3108-019-Q1-K1-D8
aaatggaagaaaaggataataaagcttaaatctcaagcagtattgtcattaaggagaaagctgaaatttcaagcagttattgtcagcaacgaaaaggtttaaatagtgacagaacatactagagcttcatccgttgctagttgcactcgcgtacctcgattcctcccagggtggtgctgtttcgtgttctttttattggcggtaaaatgccagaagatattgtttaccaacaccctttgtttggtggcaagatatctagcacattcccccacaagatccaggatgtcagcagc

SEQ ID NO: 26437 - DNA, 175 bp, Glycine max
  Clone ID: LIB3108-019-Q1-K1-D9
aaaaggcagaaaaggatcgggaagcttaaatttcaagcagcattgccactaaggagaaagcggacatttcaagcaggtcttgccagccacgaagaggtttaaatcgtgacagaacatactagagcttcatccgctgctacgagcacatcgcgtacctcgattactcccagagtgg

SEQ ID NO: 26438 - DNA, 369 bp, Glycine max
  Clone ID: LIB3108-019-Q1-K1-E1
cccacgcgtccgcccacgcgtccggcgggtgaggtagaacccttccacggtggtgactgcgcgatgggtgcctacaagtatgtgtgagagctatggcgcaagaagcagtctgatgtcatgcgcttcttgcagcgggtgaggtgctgggagtataggcagcaaccttccattgttcgcttgacaaggtcgacccgccctgacaaggctcgtcgcttgggcttcaaggctaagcagggctatgtgatataccgtgttcgtgttaggaggggtggccgaaagaggccagttcccataggtattgtttatgggaagcccacaaaccagggtgttacccaactgaaattcagcgtacaagaaggtcagtgctga

SEQ ID NO: 26439 - DNA, 306 bp, Glycine max
  unsure at all n locations
  Clone ID: LIB3108-019-Q1-K1-E10
accaggctgcacaaaagggggccaactacactaacaacactctccctacggaacctgtcgtggcctacaccctactccggtgctaaccctacccacctctccggcaacccctactacctgcaaatacncaacttctcccaccagcccaccgccaagcgccaagcccgcgtccacgaactcaccgccacaacggcaccggctaaaatcaccaaactaggcgacgaaatcgcgggacttacactcgaggaagccaagaacctcgtcgacttcctccaggacaagctctgcgacttcacggcagcgttc

SEQ ID NO: 26440 - DNA, 414 bp, Glycine max
  Clone ID: LIB3108-019-Q1-K1-E11
ctcaaccattccttttgaggggagttcacataccagaaaaccgaagtgaagggaatgagaggggacagtcctgactccttctctttctctgccaaagttgcattcttcttttctttgttgccctataaaatacaagctatcatcatcagctacaaatagaattcaacaaaaacccacttcttatccacgcattaaagctttggaccttgatcaaaacacggttgtagctataagtgtaggcctagttagtgtggctgttgggattggcattccagtgtactatgaaacccaaatcgataatgctgcgaagtgttttgactttacgctataccattgattctaccttattctaattatcatctaatctaatgatttggcatttctagttgggtattgattacagcttctctttgt

SEQ ID NO: 26441 - DNA, 384 bp, Glycine max
  Clone ID: LIB3108-019-Q1-K1-E12
ctcacgcgttcgtccacgcgtccggaaacggttaggatgagaagtccttgaaggatttgaagctcaaggaagtgaagaatggaaggttggctatgttggcaatcttgggttactttgttcaagctcttgtcacaggtgttggcccataccaaaacctcctagatcatttggctgacctcgtgcacaacaacatcttgaccagtctcaagttccactgaatgtattatatgttattttacatattctttacgttgccaaaactcaactacctttctacctttctatatcatgtggacattatgttccttgatgtggcgctgtaagaaatgacatgtaaaacaactagaaacattcgacatctttcttgagtgatctctttgctcg

SEQ ID NO: 26442 - DNA, 366 bp, Glycine max
  Clone ID: LIB3108-019-Q1-K1-E2
ccacgcgtccgttctaagttaaatagtcgctcattgtttcatttaatctacaatggctgcttcaacaatggctgtctcttcatcatcattggctggccaagctatcaagcttgccccctccacccctcagcttggtgttggaagggttagcatgaggaaaacagcctccaagactgtttcttctggaagcccatggtacggcccagaccgtgtcaagtacttgggcccattctctggtgagcccccatcctacctcactggtgaattcccaggtgactatggttgggacactgctgggctttctgctgacccagagacctatgccaagaaccgtgaacttgaagtcatgcacttcagatggcccat

SEQ ID NO: 26443 - DNA, 359 bp, Glycine max
  unsure at all n locations
  Clone ID: LIB3108-019-Q1-K1-E3
gttagggaaaaaaataaataaaaaatagatatcatggcagcgagtgggggttgcagcagcagcttcttaacattgtcttgtgcaggtgcggcgcaaaatcaacacgcgtcacaccctagaacgttttttggagttcctcacaagaatcagagaaagaggaaaacaccgcataggttagttgtggttgcggtgactcaaggctctgctgaatcaagcaagtccgacgaaaaaatcccttcgtgggccaaaccggactccgatgaaccaccgncatggggtccgggatgagcccaacaccaaaaacagcaacaattcgcaacaagaagaagaaattgagatccccttctatgnctatttgc

SEQ ID NO: 26444 - DNA, 412 bp, Glycine max
  Clone ID: LIB3108-019-Q1-K1-E5
agcagactgcgagatcacaaaaaacacatggcaacaacactgaagaaaacaacaaccaaacaggaaacaaacacaacgaaagaacaacaaacaaacccaacaccggcaaacaagaaacccgatccctgcaaccggaggcctccacccgacgaaaggcccgagcaaccggacaacaaggtccaattgcctaacgcgagtgacaaatcggatccacagcgaaaaccgggcctggacccaagccagcccacatccaacctaacagcgaagagctacacggcgaaaaacccgaaagacccgacaaagaaaaccgtgcaaacgtctacgccacatgacatcactaaccacacccccattgcatccacactcgcatcccacgtaaacaaagggtaccacaaataaacgccgggaccca

SEQ ID NO: 26445 - DNA, 455 bp, Glycine max
  Clone ID: LIB3108-019-Q1-K1-E7
cccacgcgtccgatcccaaaccagcaaaaacctttcttcacaaaatggcctcaacaactctaacaaccctcaccctccgcacgctatcttatcctacaccctcctcttcttaccctacgcacctctccgccaaaccctcctccctccaattccccaatctctcccaccgcgccgccaccacgcgccgcccccgtgtcgtcgtctccgccgttgaggcgccggagaaaatcaccaagctcggcgacgaaatcgccggactcacgctcgaggaggccaagaacctcgtcgacttcctccaggacaagctcggcgtctccgcggcggcgttcgcccctgtggcagtcgccgcgggtgccggcggcgctgtggcggacgcgccggcggtggttgaggagaagacggagttcgacgtggtgatcgaggaggtgccgagcaacgctcgaatcgcggtgatt

SEQ ID NO: 26446 - DNA, 459 bp, Glycine max
  unsure at all n locations
  Clone ID: LIB3108-019-Q1-K1-E8
cggacgcgtgggctttcttccatcttcttcccttttcacgtcattatcctaaaaacttgcaggttttcacatcccaaacaacatgaagggaaggttcatgtttctgtcggtgctcctttgtgccacttttcatgtctccttctctattatcgacggtttagttgccaacggcaactttgagttgggtccaaagccctccgccctaaaaggaacagtggtggtgggcgggagccactcgatcccagaatgggagatctccggctttgtggagtacataaaatccggccaaaagcaaggggacatgttgctcgtcgtcccagagggtgcctacgcggtgcgcctagggaacgaggcctncatcaagcaaagaatcaaggtgatcaagggcatgtactactccatcaccttcatggtggctcgcacgtgtgcacaaaangagaggctcaacattttccgcac

SEQ ID NO: 26447 - DNA, 270 bp, Glycine max
  unsure at all n locations
  Clone ID: LIB3108-019-Q1-K1-E9
gggaggcaagggcaggcgggcgaagcncgccgcccncaccggcgctaactagacacgtcgagcaagacacggaaactgcgatgaaagtgcttcagcctggacccttgggaatcatagagcacacgttttccgccgacgaaattcgcaaggctaatgccacggtttctaaagcagcgaccaattggcgaaccaatgcgatcctcgaagactacaatcacgttttaaaagactatattcacaacacgtgaagccaattttagttcctcccgc

SEQ ID NO: 26448 - DNA, 381 bp, Glycine max
  Clone ID: LIB3108-019-Q1-K1-F1
agcaagcttgttctttcgccgccgtcgctcacaactcgcaaaccacaatgcctaagcagatccacgagattaaggatttccttctgacggcacggaggaaggatgcgaggtcggtgaaaatcaagaggagcagggatgtcgttaagtttaaggttcgatgctccaagtatttgtacacgctttgtgtctttgatcctgagaaagccgataaattgaagcaatctcttcctcccggtttgagtgttcaagacctgtagaggtgctgagtgcggcagcgtgcgtttgtttatctctgtgatgcctcatgctctagattatgtggcttgcttttaatatttggaaattgtatgaggatatgctggtttttacttgcctatgaaa

SEQ ID NO: 26449 - DNA, 416 bp, Glycine max
  Clone ID: LIB3108-019-Q1-K1-F11
cccacgcgtccgcaacaatggcttcctctcaattcctaatcatgaccacaatggcggtcttgctcgccgtcgtctccgccgctcacgccgccgatgcgccggcacctagccccacctctcccgcctccgtcatctctccgtccttcgccgccggttttctcaccgccgccgttgctctcgtcttcggatcttctctcaggatctgaacatgttgcgcttcggcctctggattttcattttctttctaatttttttttgtgtggatttatcagagatcgaggcttgactagtactagagtattgatgtgcagagactttatgtgttcgtttctggatcttaagtaattttgctatttcatggctattatcatttgttatcattggtttggtacataatgaattttatttgatattct

SEQ ID NO: 26450 - DNA, 357 bp, Glycine max
  Clone ID: LIB3108-019-Q1-K1-F12
ctttaataaattatgcgccgttgttccatactttgaaaaaaaaaaaaaaaaaagaaaaaaaggggaaagaaaaaaaaaaaagaaaagaaaaaaaaaaaaaaaaaaaaaaaaaaaaaaagaaaaaaaaaaaagaaaaaagagaaaaaaaaaaaaaaaaaggggggacattataaaggagcaaagctaacgaaccatgatatggaacagaataacgtttcaatgggggcaccaaaatgaaattaaagggccgtggtttaaaaacgtcgggacgggaaaaacctgggggtaaccaaactaaatccctttggaaaaaagacccttttcccaagggggcgaaaaggcaaagaggccgaaaca

SEQ ID NO: 26451 - DNA, 261 bp, Glycine max
  Clone ID: LIB3108-019-Q1-K1-F2
gttttcgattcgatcaactcactcacgcgcacgcctttcattccattccattccgatgcgatgacgacgacgaattccctcttgttctcccttgactggcacaatgaattctatcctacctatcatgatttctaccttctcccccttttcgctctcttcttcccttcccttcgcttctttctcgaccgattcatattcgagaaagtggcgagacggttgattttcggaaaggggcatgcggcgctggactaccattcagac

SEQ ID NO: 26452 - DNA, 377 bp, Glycine max
  Clone ID: LIB3108-019-Q1-K1-F3
atcatcatcattaaacatgggtggcagtgttagcaagagtaggaggatgagttctgagaaatatgtgatgaatttgaaggagaaagtgaggctcttgcaagaggagataaaggagatgatgtatgagagggagaaggagacaaggagatatgagagggacataatggtgttcactttcaaggaggcagattcgaagcaagaggggaagaggctgagagaggaagtgaagcaattgaggagtttggtggaagagaaagatgagaagataagagagattgaaggtggaaatgatggagaagaacagtgagacagagtgggaattgatgggaactaagctcttgggtgagcagatgaaaggagagagagcagggagagat

SEQ ID NO: 26453 - DNA, 404 bp, Glycine max
  unsure at all n locations
  Clone ID: LIB3108-019-Q1-K1-F4
ccctttcactctcgtagacatcacaaaccttccctccattcatcccacgcatggctgccatggactctagcgtattggcctgtagctatgccatatcaggtgcagcgtgttcggagctcaatgggaaggtcacttccgtggcctatgttgcatgctctggctacaagttgccattgatcaaagctgaggccagagttcctaaagccaaagaatctgaaggaggaaggagaggtgcccttgttctcttggcagctacccttttcacctctgcagcttccaattcttctgccaatgctgggatcattgaagattaccttgagaggagcaaggccaacaaggaattgaatgacaagaagaggttagctactactgggagcaaactttgcangagcttacaccgtgga

SEQ ID NO: 26454 - DNA, 77 bp, Glycine max
  Clone ID: LIB3108-019-Q1-K1-F5
gtaaatcaaaattataagagagaaaatggtgcttttgtactacagattactataaataaaaagcttttatggttttc

SEQ ID NO: 26455 - DNA, 436 bp, Glycine max
  Clone ID: LIB3108-019-Q1-K1-F6
ccactctggtgtggtgcagctgcacaacgtggaggacgtgcagaagctcatagaggaccacgggctggatcacaagctcatcgtgctcgatgtgggtctcaaacattgtgggccctgcgttaaggtttatcctacagtggttaagctctcgaggcagatggactcggtggtgttcgctcggatgaacggggacgagaacgagagctgcatgcagttcttgaaggacatggaagtcatccaggtccctacctttctcttcatcagagatggcaacattgaaggcaggtacgttggttctggcaaaggggagctcattggggaaattctcaggtaccaaggtgttcgtgtcactgattaattttcttactacacatacttatttctacttctattaagttcagctcaacaaacacatgtttactaaaccttctgagaa

SEQ ID NO: 26456 - DNA, 156 bp, Glycine max
  Clone ID: LIB3108-019-Q1-K1-F7
cccacgcgtccggttccaacgaatccataattgttgatgtgttcctctgcatgcccccaccgggcttacactaaaagacagcaggttcatggttaaacgatgtgttatccttgtatggacccattaaatagctcatttaagttgtggtttgccact

SEQ ID NO: 26457 - DNA, 400 bp, Glycine max
  Clone ID: LIB3108-019-Q1-K1-F8
cccacgcgtccgggagatcaagcaccaaacccaacacacacctctctctctctctctctctctcttgtgctgttgttctatttctcattctttcgcaagtgaatgttgaactgactctgcggttcggttcggttttttttttttctgtttatggatccgtgcgcgatgatgaacgagggttccttcgcgaacaatgcgagcggtaatacggcgccgtttagcttggcggagatctggcagcagttcccgccggcgattagtggcggcggtggattggggctcagaagcccgcagttcggtcacgggccatgagggcagtttggggatttcaccaccgggccgagccacggactcggacccagtaacagcagaaagcggcgcgactccaaggaggacgatt

SEQ ID NO: 26458 - DNA, 355 bp, Glycine max
  Clone ID: LIB3108-019-Q1-K1-G1
cccacgcgtccgcggacgcgtgggatagccactactgattcagaaactcttaggcatagcgaaaatgacaaccaccttcgcgaccgtcgcaggactcggtggtgcatcactgtcatccacctcatctcgtctcacctcagggtttgtgaaatcgccagtgagtgctaggaatcccttgaggaaagctgtggcaatgggaaatgggagggttacatgcttcgagaggaattggctgcgggcagattacagtgtcattgggtttggattgattggttggctagcaccctcaagcgtaccggctattcaacggtaaagtctgactggcctcttctttgagagcattggagctgagcta

SEQ ID NO: 26459 - DNA, 439 bp, Glycine max
  Clone ID: LIB3108-019-Q1-K1-G12
ctcttttgctttaccaaatgccaatttccaattcagaaccctaactccgttcgaagcaccaagatcgtgatggcaccaaaggcagagaagaagccagcagagaagaagcccgcggaggagaagaaatcgacggtgggagacaaggctccggcggagaagaagccaaaggccggaaagaagcttccgaaggagggaggcgccggcggagaagggaagaagaagaagagaaacaagaagagcgtggagacatacaagatctacatcttcaaggttctgaagcaggttcaccctgacattggtatctcaagcaaggccatgggaatcatgaacagcttcatcaacgacatcttcgagaagcttgcccaggaatcttctagacttgcccgctacaacaagaaacccaccatcacttcgagggaaattcagaccgcggtcaggc

SEQ ID NO: 26460 - DNA, 300 bp, Glycine max
  Clone ID: LIB3108-019-Q1-K1-G2
cccacgcgtccgctgacacgagctataggcactactgattcagagactcacaggcatagagagaatgacaaccaccgtggcgacggtggatggactcgggggcgcataactggcagccacctaatgtggcataacctgatggttcgtgacaaccgacgcagagtgctatgataccctagaggaccgctgtagcattggcatacgggacggttacaagcacactgaggaagtggctgctggcacatgaccgggtgattgcgctcggaacgattggtgggctaggaccatcaagcgtacagg

SEQ ID NO: 26461 - DNA, 291 bp, Glycine max
  Clone ID: LIB3108-019-Q1-K1-G3
cccacgcgtccgatcccaaaccagcaaaaacctttcttcacaaaatggcctcaacaactctaggaaccctcaccctccgcacgcgatcttatcctacaccctcctcttcttaccctacgcacctctccgccaaaccctcctccctccaattccccaatctctcccaccgcgccgccaccacgcgccgcccccgtgtcgtcgtctccgccgttgaagcgccggagaaaatcaccaagctcggcgacgaaatcgccggactcacgctcgaggaggccaagaacctcgtcgact

SEQ ID NO: 26462 - DNA, 386 bp, Glycine max
  Clone ID: LIB3108-019-Q1-K1-G4
cacgcgtccggaaaattttaaataggacttgttattacaaaatacaattgcattgctccttcggcgaattggcactggtctctttgccgaactgcagcgttttggtttgggagggaaaattctaaaacctaaaaaatttcaatctcaatcaactcaacgtctgtgatcccaatcgatcacatttaataccacccttcaggattaggtagtaattccgttcccttgaataaataacatgagcaccacagtgcaaagaactccaagatccagcaggcattctttatttttccaggatttggcttcacctgtttctgcccgtagaggaaaattttcgagtccaggtcaagcagctgcagtatcttcactatggcgtgagaactttggag

SEQ ID NO: 26463 - DNA, 361 bp, Glycine max
  Clone ID: LIB3108-019-Q1-K1-G5
accacgcgttcgggagtattattatttgatacgaaatacagagctcttcaaaacccaaacagcgaccgtactgcacaacttcaccactgagcaatggccgacgaggaacctgtcgatcagaagagatatctcgaagagtcttgcaaaccaaaatgtgtaaaaccattactagaataccaagcgtgcattaaaaggatacatggtgatgaatctgggcagaaacactgtactggacaatattgtaatgattggccttgtattgacaaacgtgttgcaccgaagctattcaccaaactgaagtaaatcgggaaggattcgatggctatcattgcattctgtgctgttttcattcccaaataac

SEQ ID NO: 26464 - DNA, 267 bp, Glycine max
  Clone ID: LIB3108-019-Q1-K1-G6
aaaaaaaaaaaaaaaaaaaaaaaaaaaaaaaaaaaaaaaagaaaaaaaaaaaaaaaaaaaaaagaaaaaaaaaaaaaaaaaaaaagaaaaaaaaaaaaaaaaaaaaaaaaaaaataaaaaaaaaaaaaaaaaaaaaaaaaaaaagaaggagcaaatttaaaaaaatataagtagaataaagtagaattccgaatcattaaataaataaaaggagaaccacacatgaaaaaaactccagagatctaaaaggcattctttatttttcca

SEQ ID NO: 26465 - DNA, 282 bp, Glycine max
  Clone ID: LIB3108-019-Q1-K1-G7
attatctttagtaggtggtgcattaattgagggttgcataattattgcaactcgttgcaactgtgaagttatgtatgctaaggaaatgaaaaagtttctttgttgctctattaatgtaaagtgtgaattacactattatagtataaattctatcaaaggtatcaattgaatttgaaaaaaacaaatgaactaaaagaaggataataaaagaactcttatctttattattgagttcattacatgatgctgactttaattaaaatgaccctggggatcatatat

SEQ ID NO: 26466 - DNA, 435 bp, Glycine max
  Clone ID: LIB3108-019-Q1-K1-G9
cccacgcgtccgcccacgcgtccgcccacgcgtccgcccacgcgtccgatcccctctccccggcggataaagagagagaagggtcccttcattctctcacacagaaaaatggcagcgtcagtttcgtgctcatggctaacccttccctcccaaatgaggagcctctccctcacatcctcttcttcatccctttgcatctccaattccgcttctctcagtttctccagaaacctctcacgccctttcttctcaaaaggtaactccttgtcgctaagcacagtactgaggcgcgcgtctgtggtttgcgaggctgcgccgaagaagaaggtggattcggcggtaaagagagcgcgccaagccgagaagcaccgcgtttacaacaaagctcgcaaatcggagattaaaacacgtaccaagaaggttttggaagctcta

SEQ ID NO: 26467 - DNA, 163 bp, Glycine max
  Clone ID: LIB3108-019-Q1-K1-H1
ccacgcgttcgaggaactgattatacctaccatgtgatgtatcatgtgtaaaatggatagtgttgcattgtggttagaccagtggactttgtgtcttgttcaattgaaactcttgacaatgttggtgtggcttgatggccaaactaatctgattcataggttt

SEQ ID NO: 26468 - DNA, 364 bp, Glycine max
  unsure at all n locations
  Clone ID: LIB3108-019-Q1-K1-H10
agaaacncgaagcnacgggggaacccaacnaccaccaccaccaccaggnnccgacacccccggaaccacacacagacacncnnaaaaaaagaaccaaacgccaagcaaaggcaaagcagggcaaccaccanggcaacgagagcngcaccgacccacgncacagccgcacccncngccacgaaaccccggcgggacgacaagaacaacaaggngcacacacgcaggccgaagagncaagcggacacncccncgaaggccgcngccgcagagaacggcgnngggaccgacgnggagccgacgccggagcaagccgangcggagccggagcagccnacgccggcggagggaaangccgnggggacca

SEQ ID NO: 26469 - DNA, 426 bp, Glycine max
  unsure at all n locations
  Clone ID: LIB3108-019-Q1-K1-H11
tttctttgcacgtcgggtctggaggacagaatccagaaaaaccagctcagagcagacgacgtcgtatcacgccccgccagaataaaacttatcacaacgtcgcgcagaaactccggtgaggtattctctgttctgatgaaacgtgatagtaaatcttcatctccgatttggtccttggattccaatctggaccgtatgattgaatcagcaaattggtgaacggtggtgattgattctctgagcctccgttctgatccaaagttgaacagcttctttattttccacacaaccggtaaaatgctcatgaacctccctgagctcagaaccgcggcgtcctcgaaggcgcgcatgaactcgccgncagctgtgccgtcgccgncgagacaagcggngtccacattgaacgctagcttgcacacgttatcg

SEQ ID NO: 26470 - DNA, 312 bp, Glycine max
  Clone ID: LIB3108-019-Q1-K1-H12
gttcaatacttaagattccttttcccatgcttgtatctactggaaaagaaaaaaaaaaaagtgttgttataaacaaaactgaataatatttgatctggaaggatttgttggacttagaaaaaaaaaaaaaaaaaaaaaaaaaaaaaaaaaaaaaaaaaaaaaaaaaaaaaaacaaaaaaaaaaaaggatccaaagcctaaaataacaaaccatgcaaagtgatagcttttatctagtgtaacctaacataaattaactggccgtcgatttacaacacaacgactgaaataaccataccgttacctaacttaa

SEQ ID NO: 26471 - DNA, 347 bp, Glycine max
  Clone ID: LIB3108-019-Q1-K1-H2
agggaactgattcatacctaccatgtgatgtatcatgtgtaaaatggatagtgttgcattgtgtttagaccagtggactttgttgcttgttcaattgaatctcttgacaatgttggtgtggcttgatggccaaactaagctgattcataggtttgttgttctgcgttattgcgtgggtttcgattaatgaaatttactgtgcgaatgagctaaagtggctcataaatgttctcttatctttattattgtgttcatttcatgatgctgactttattgaaatgaccctggggatcatatatagcattggtcttgttccatgtgatggaattattaagtaaagcagcatt

SEQ ID NO: 26472 - DNA, 404 bp, Glycine max
  Clone ID: LIB3108-019-Q1-K1-H3
gctaagcagtccaaagggcacaacacaacagagaaagaaaagagtaagagtatgggaggctcatggtcatggcagctcacatgtgccctcttgctactcttctccgccgtagtcaccgccactgaccacattgtgggtgcgaatcgtggctggaaccctggctttaactacactctttgggccaacaaccacactttctatgttggcgatcttatctcattcaggtaccaaaagaaccaatacaatgtgtttgaggtgaaccaaactgggtatgacaactgcactacagaaggggcagtggggaattggagcagtgggaaggatttcataccccttaacaaggccaagagatattacttcatttgtggcaatgggcaatgcttcagtggaatgaaggtttccgt

SEQ ID NO: 26473 - DNA, 324 bp, Glycine max
  unsure at all n locations
  Clone ID: LIB3108-019-Q1-K1-H4
cgccccacgcgtccgcccacgcgtccggttgagaactaagaaggagaagcaaatggcttcctcaatgatctcttccgcagctgttaccactgtcaaccgtgccggtgccggcatggttgctccattcactggcctcaagtccatggctggcttccccaccaggaagaccaacaatgacattacctccattgctagcaacggtggaagagtgcaatgcatgcaggtgtggccaccagttggcaagaagaagtttgagactctntcctacctgccagaccttgatgatgcacaattggcaaaggaagtagaatactttcttaggag

SEQ ID NO: 26474 - DNA, 391 bp, Glycine max
  Clone ID: LIB3108-019-Q1-K1-H7
gcgaacgaatcattcaagagacaacaagtgcgaattgttagcacagggggaaatactacgagataggccggacaaagcaaactgagcgtaagtcaactgaaggaaaagctcccaggaagcagctggcaacacaaggctgcacgtaagattgcaccaacaactggtgagtgagaagaagcctcattggtatggtcctgaaactgttgctcttcgtgagattaggaaataccacaagagcactgagctgctaataaggaagctttctttccagacgtcgagaagtgaaattgagcattatttcaagactgatctagcgattcagagccatactgcgcttgcattgcaaaaagctgctgagacataccatgctgaactctatgaagacactaac

SEQ ID NO: 26475 - DNA, 423 bp, Glycine max
  Clone ID: LIB3108-019-Q1-K1-H9
cccacgcgtccgctccgcggcttcaaccttgtagttattctctttcttcttttttagctatgcctctcttgaaaaatctagatctcgttcttccttgatctacgttacgcttttagtgaccggatctgtatggatctgaaccagatctacacgccgatggtggttttggcctggtctttcatagatctgatgcatggaggctcagatctactgtacagaggtgtgcgattcatgttcgtctctcttttggaatctgtttcgtagaaagtcgtttggtcttccatgtcgcatggctcttgaggtatttttttttgcagatactgtagataatcgatgagaagaacgcagatccagccgcttccgcttgttcgatcgctacagacgcttgtatcggattattcatgattgattcataagcagcat

SEQ ID NO: 26476 - DNA, 376 bp, Glycine max
  Clone ID: LIB3108-020-Q1-K1-A1
gcgctccgttacacctgtttgcctgtcactttgtctaaaaaggctcttctgctgctatgcttagggccgtttcagataccattttgaaagcacacaaaacccttcttgatcatggtgataaaggtaatcctcaaaaaatgcagcaggaaaaggagaggtggaaaggattcacgtaagaaagagctaggatcgaagcccaaattaaaattgctgaagctgctgctagaatgagggccaggaagagtcaaggcagcggagagaaaaggaaagagaagctgctcgagcagctatagaaaagatgaaaagaaccgttgatatagaacataatgtggagattattaaagaacttgaaagtttgagtggatgcactctatct

SEQ ID NO: 26477 - DNA, 358 bp, Glycine max
  Clone ID: LIB3108-020-Q1-K1-A2
gccgggcgtccatgattccctctcaaaaacatcaacatggctgtcaaactcactgtatcttctcccttttcctggagaaacttcatttctggcgaaatcaccatcattttctctaggtttgtgctcccccagaactaatgttaccggtgtcaaagttcatgctaaattatgtggtggagatgaacaagccaagaaaggaggaaagaagaaattcataaccagagaggaagaaccacaacagttttggcagacagcatgagaaagggaaggagagaatcccatgaagacccctcttccttacattatcatatttggtatttcaacttcttttgtaatcttggcaattgcttttgcaaat

SEQ ID NO: 26478 - DNA, 194 bp, Glycine max
  Clone ID: LIB3108-020-Q1-K1-A7
aattcccggtcgccgagcgtccgttagcccagcggtatcaaccaaaccgttcacacacccatttgattcagtttccatggcgagcctcaaggttggatttttggctgcagtgctctgcatggttgtggtgagtgcacccatggcacatgcagctatcacgtgcgggcaggtgacgagtagcctggccaattgca

SEQ ID NO: 26479 - DNA, 250 bp, Glycine max
  Clone ID: LIB3108-020-Q1-K1-B1
aaaactgaactatgcctattcaaacgtgccaatatctacgggggaaagggcatcaaatttattcctggtgattctcaagttttcctgattgccaacttaaaatgtaagccgtatttccacaaccaccttaatccctcaaagcttaccttaactgctatgtacacaaatcaacacaataaggacattgctcaataacctgttaataacaccaaactcacttccaaaaagccttactctatgtcccattttt

SEQ ID NO: 26480 - DNA, 324 bp, Glycine max
  Clone ID: LIB3108-020-Q1-K1-B2
cctatacccctcttatccgttccgttcagacagttcctttggggtcacacacttcctttgtgcgtgaccgcattgggagggtgagatccaacattgttcaatccaaagtcaacgcattccatggcgaatcctgcatccgcaagattctccgctcttcttcttctcgtttctttgctagtcaacatcttctccgaatcgcctgctccggctccgacttctaagccggatttgccttcgtcgtcttctcctacttctgctcctgcttcgaacccttcccctgccaattctcccgcatcttcaactcctgcgccttctcatcactcg

SEQ ID NO: 26481 - DNA, 415 bp, Glycine max
  unsure at all n locations
  Clone ID: LIB3108-020-Q1-K1-B5
gagagatgacgngaggactaaaaccgcggatttttcgccaattttgcagtttgaacaagagggcgttcacatcctggatgcactgctgccactgtatttgaacagccaggttctgagggcattgcacgagtccttggcgagtgaactctccggcagaatgagtgccatgagcaatgccacagataatgctattgacttgaagaagaacttgtccattgtgtacaatacggagcgccaggctaacatcactggtgaaattctggaaattgtggctggtgccaatgccttgcaatagtgcaatttgtaagtatcgtttacttattataatgatgggtggagggtgccctattcattttctaaatgtcgttatctaagacacttgtgcaatttttacgcttctgacgaaacttgaatg

SEQ ID NO: 26482 - DNA, 381 bp, Glycine max
  Clone ID: LIB3108-020-Q1-K1-B7
gcgaaacggggtggcctcaacaattccgtgtgtgtctcttctcttctctttgacatagactctttcttccgcgctccatggcgggtggcttccccgctcagcttcgaaaaccaaaaccgcatctctctccaaatgccatcgcatttgggtcaccaaagcttctgttgccgttgagcaacaaactaaggtcgctctcatcagaattggtaccagaggaagtccactagctctagcacaagcatatgagaccagagacaaactcatggcatcacaccctgacttagccgaagagggggctattgagattgtgattataaagacaacaggggacaaaatccttacacaaccacttgcagacataggtgggaggggcttgttcac

SEQ ID NO: 26483 - DNA, 415 bp, Glycine max
  Clone ID: LIB3108-020-Q1-K1-C8
cttttgtgatagagctttctctgtctctcgctcttatcgaagaagcagcagaaaatgggttgcgcgatgcaatgctgaagctatggcacttgtatttctatttgtgtccctcatcgattcccccaaacccctctatcttttcacgttccagcttatcactggaaccgattcaagagtgcgcgaaagaatcagaggatgatggttctttgtagcgtggacgaccggagcaacaacctaggttcccagaggaaaagaaaaattgtggaacacgtttgtctcctcaaagcaaagcaggatttatctgaagacgaagagaacgacatgcttgattacttgtacacaacgcagtaccaaatgggtggtgttgttgcaatttcattagggcgcatttctgctccaaatcctgagcgctaca

SEQ ID NO: 26484 - DNA, 124 bp, Glycine max
  Clone ID: LIB3108-020-Q1-K1-D2
ttcttaaagcggtttttgactaaaccaaaaccaccaccacgggaagccaccaacagcagaaggaccagcaaccccaccacctcatggcggcaatcatccacaacattcatcaacaacaaccacc

SEQ ID NO: 26485 - DNA, 395 bp, Glycine max
  Clone ID: LIB3108-020-Q1-K1-D5
gaacatcgagtgaggtataaaaataaaagggttgcattgtctgtttttcgtaaaaaaaaaaagaaaaaaaaaaaagggaggaaagaaaaaaaaaaaaaaaaaaaaaaaaaaaaaaaaaaaaaaaaaaaaaaaaaaaaaaaaaaaaagggccgcccgtttaaaaggaccaaattttactaccccggccatccaacaaaaaacctttttaaaagggcacccaaaataaaattaatggcccgccttttaaaaacgcctgaattggaaaaaccttgcgttacccaaattaaaccccttggaaaaaaatccccttttgccaagttgcctaaaaaccaaaaaggccctacccaaccgcctttccaaaaatttcccaaccctaaatggcaatgggacccccc

SEQ ID NO: 26486 - DNA, 450 bp, Glycine max
  unsure at all n locations
  Clone ID: LIB3108-020-Q1-K1-E1
ctgacatcgtcgcaagntccaataaagtcgttccactctcgcaggtgacatatctaactaagggggcttttactactggactcgaactacttccttactgccttcactgggaatattaaatgctgagtctgtagcttaacaaaccacatcttacattcatctttattcaacaaactatcgggtcctataccccatggtcctaccacaccttctccacattactgaaagtctgcactctcatcataatatcccatcaaaaaatcttttcttacaatcattatgccatgacacatagctgttttgattaaaagcttacctttgcaacattattagacacagtacaactggaaataatttgatataaaacagaaaaaccatagcctagactgaccattgcatatagatcattacgcattctataacactagtcagtgaaactcaaaccatacc

SEQ ID NO: 26487 - DNA, 288 bp, Glycine max
  Clone ID: LIB3108-020-Q1-K1-E2
aacactaaggaagcggacccatctaacacacggggcccaaactaccgatgtccgacatcgaactcccaaccttcacgtctcccattaagcgcggatggacttcttcaatctaccactcactagcgactaccttaactatcatcttcaaaccaactttacccaggaaccttaacccatttatttttattactatataaatctaaattacactcctttgctccatatttacaactatcattattatatcattcacatccccaaataccattatacataaactcctcaata

SEQ ID NO: 26488 - DNA, 258 bp, Glycine max
  Clone ID: LIB3108-020-Q1-K1-E5
taccacacgtcctcccaaaccctaaacgacaatttttaaaaggatggcggctgagaccacttctccatccacttccacttctgatacatacattttaaactttataacctttacctataggagctacatcacatttttacgcattctctacaacacaaacacccaataatccatttttaccctcataaatttgccatcttttcaaacataattaataaaattttattatccacaaattccttcattttacaaccttta

SEQ ID NO: 26489 - DNA, 373 bp, Glycine max
  unsure at all n locations
  Clone ID: LIB3108-020-Q1-K1-F1
aacaaantggggcaacaaccgaaggaaacaaancnaaataaaggggccaacacgacagttttcggacttctgcatcactacatcaactgaaaatattaaaaggagaatcggaagttgaatcaacttcttgatacactggactttaatcaacttttcatcttcacgaaaagccttaggagagcacctaatctctacaaactacttatggagtgcaactttccatctatatgcattcactctaacatgtcccattaacaaacgttaaagcactataaacatttcaaggaagggcatacaacgattcttattgcaacacattaacttagaagatggatttatattcaacatatcaacattcgtataaactatgaca

SEQ ID NO: 26490 - DNA, 227 bp, Glycine max
  Clone ID: LIB3108-020-Q1-K1-F2
accacaccaatgcctaaagccatcactgatttgctacaacctgattggaaggaagagaaagacacctctgtggatgtagggaaatttttattaaatgttcgtgtataaaagggaaaccaaggaccattatatggcactgatgttaatgttggttgttgatacagtggagtgaatgtgcacacatgaccaaagggtaagccatttcacctttgagtgtgcccacattc

SEQ ID NO: 26491 - DNA, 310 bp, Glycine max
  unsure at all n locations
  Clone ID: LIB3108-020-Q1-K1-F3
tacccanaaacctgcaccataaaccatgagttctaantcatccactccacntnnnccaggctcaaatcctagggctgcgtcttccccnaactattgtccctcaacggggtcaactttggataatctgtgtccttcaaggccaaatcccacatcttcaactatttttgtctggactacttgggcaacccaagccttgtccacgcccagagcatcctcgccatctgggccacccaagttatcctaatgcgtgctgtttatggttatcgtattgcttgtgtgcccctcggtgatgtcactgacccaatctacc

SEQ ID NO: 26492 - DNA, 409 bp, Glycine max
  Clone ID: LIB3108-020-Q1-K1-F5
cccacgcgtccggccacgcttccgataagaactaagaagtgaaattagccaaactaaagcaagggtatgataatgcggcatctggagggtttgttcctgattatagtcaaggataccaaaaagttgtggatgaagatacaagcaatacatcaagctcagggtcagctgtctctaactcagagagctgtgctcaatttggtgggactgatgttagtgatttgacaggtcctgctcagtcagtggtctgggatgccatggtgccttccaaaaagaggacatgtgcaggtcgtccgaagccctcatctgttgagaagctcacaagagacctgtgcactattcttcatgaacaacagtcttatttttctgcatcttctgaagaggatcttcttttttaaagtgatacaccaat

SEQ ID NO: 26493 - DNA, 349 bp, Glycine max
  Clone ID: LIB3108-021-Q1-K2-A1
gaagagagaaacaatggccaatgtttcaattccactcccacgaaacggtttctccaaaccgaattactcgacaaaacgcccatgtttcaccccttcagcttcaacactcagaatttcttgctctggagtggctgagtttgatggatctcatcagaaaaaaggagggttgtttaatttcaatggaatcaagggcgtggcttgtggtattcttgcagcttgtgctgttacttctgctgcatttcctgttactgctgctactcagaggcttcccccattgtcaactgagcccaatcgctgtgagcgtgcatttgttggcaacacaattggtcaagcaaatggtgtatatgat

SEQ ID NO: 26494 - DNA, 320 bp, Glycine max
  Clone ID: LIB3108-021-Q1-K2-A11
cgaggagagggtggtgcaggtcatgttgggtatcaaggtcgtcaagggagggaaacagctgaggttccgcgccgtcggcgtcgtcggctacaagaagggtcaggtgggagtcggagttggcaaggccaaggaagtcattgccgtggttcagaagtccgccgtcaatgccaggaggaacatcatcaaggtgcccatgactaagtactccactttcccccatagagctgatggagattatggagcggcaaatgtgatgcttagacctgcttctcccggtactgtggttattgcaggtgggtttgtgagaattgttcttgaaa

SEQ ID NO: 26495 - DNA, 431 bp, Glycine max
  Clone ID: LIB3108-021-Q1-K2-A12
cccacgcgtccggacttactgtgcttagattgtccacaatatatccacaagaaagaggaaagatatacttgagagagccgcgcagcttgatgttgttgtgacaaacaaaacagccagattacgcagccaggaggatgaatagtctaaatgactaaaaaagtcacttatctgtagtgattcagtagttcaatatcaaatttgcagtttaattttaaattgaattctgcttcaatggattttgcttattgagaaccaagtttgattctgttgtgtctcttgcaattcttatcttgccttgaaccctgtccactacatctttaggaacgaaaataaaagaaaccttaatctttcggtgtgtgaaaaaaaaaacacttcattataatttcttttactcatatttttttcaatatcttggtccatcttatcattat

SEQ ID NO: 26496 - DNA, 360 bp, Glycine max
  Clone ID: LIB3108-021-Q1-K2-A3
gcgattgaacacacacatagaaacccaacaacaagaatgtagaagatgattctaaccctcttcttcaataggattttatctctccggtccctctcccacgccttcgtggtggatttctgcgtagcagactacacaggccccaatggccccgcagggtactcatgcaagagcccagcaaaggtcacggtggacgacttcgtctactccggccttggcaccgccggcaacacctcaaacatcatcaaagccgcggtgacgccggcgttcgacgcgcaattccccggcgtcaacgggcttggaatctccattgcacgcctagacctagcagccggtggagtcattcctctttacacgcaccct

SEQ ID NO: 26497 - DNA, 210 bp, Glycine max
  Clone ID: LIB3108-021-Q1-K2-A6
gcagggaggggagggcacagggtaagacccaaccgaaaacctgagttcagggccagcagagaaagcgggcaccagaagggcgcgagagcaaaaggaatgagggggaagggcgaacaatggggggatgaaacaagaaataggcctcgaggaagggaagaaggaacgcaagaagaaaagcagaaagacatagggaggaaccgctaaaggaga

SEQ ID NO: 26498 - DNA, 342 bp, Glycine max
  Clone ID: LIB3108-021-Q1-K2-A7
cgcgttcggagacatgataatgcacagccacacaaaatttaatagaaagagcgatggatgtggggaagaacggttagcggtgggcgacttgttgacatggcttcttctacactcgctctgactctcagcctctccaccaccaccaccacctgcaccaccttctactcctatcaacaccggtttccatgtcctagaataaagttattttcttccaagcaccgttccttctccgtcttagcttctgcttccacctcaaattcgcttcaggctctcatattcgactgcgatggcgtgatcctcgagtctgagcacctgcatctgcaggcctacaacgatgccttt

SEQ ID NO: 26499 - DNA, 399 bp, Glycine max
  Clone ID: LIB3108-021-Q1-K2-A8
gaaaatggccagttacattcccttcacaagattctcacaaacaactcttgagaaagaaagaatggctgccggcacattgatgacttctgcctgggagccttcccatctctcctttcctcctcaaaatccagatttgccgcagcagttcctctttccagctttgttgtcaccaatgcctcttcttctcgcttttccatgaatgctgattggatgcctggccagcctatacccccctaccttgatgggtcaacacctggtgactttggattccaccctcttcgtcttggtgaagtaccagagaatcttgagaggttcaaagagtcagaactcattcacttcagatgggccatgcttgctgttccagggattttggttccagaggcattgggcttaggcaac

SEQ ID NO: 26500 - DNA, 236 bp, Glycine max
  Clone ID: LIB3108-021-Q1-K2-B10
cccacgcgtccgcaagctaggatgataatagtttgggcctggagcaagagaggcggggggcggaaaaggggaagagggggcggggaactatcgatgactccctagggggtgcctctcataaggcgtaagtggcagagcgccatgcaaccctgatgctcgaggacgctgggggtggttcagccatcgcggacaacgagcttacaaaagatgcaggcgtggacccaacggggcggggg

SEQ ID NO: 26501 - DNA, 286 bp, Glycine max
  Clone ID: LIB3108-021-Q1-K2-B11
cttactcaccgattgctagaatggtttttttatgctcagtcatctcttttaccatgctctggtctcttgctcttgcaggagagagccatgtccatgcatcgctacctgaggaagattattgggaagctgtttggccaaacactcccattcccactgcactgcgagagcttctaaagcctttccctgcaggtgttgaaaacgatgaactccctaagcaaattgatgatacacattacccaaaaacatgtcttctataaagaaaaaccttcattcaggcaaaacaatg

SEQ ID NO: 26502 - DNA, 413 bp, Glycine max
  Clone ID: LIB3108-021-Q1-K2-B12
tcgggggcggcggacgcgtccgacggaacaagagcttcactacacaactgagcccttcctcaacacgtcaaaaattcatctcagctatctgtagatcggagaaaccaaaaaaaaaaaatggagttcgacgagaagaaagcaatgatccgcgacgtggcgttacaagtcgttttcatctcgctcacgattttcagcttcctctggatgcacggcatccctcaaaacctctacgccaagctccgccaccgtcccccgaacccacgggccgtgcaagccaagcgccatttcgtcaaaggcgcgcagctcctcgcccaagccagaagatccaaaagcgcttcctccgcaacttccctcgccaaacaagccctagccgaggccgagaaggccatcgcgctcgaccccaagggacgccg

SEQ ID NO: 26503 - DNA, 298 bp, Glycine max
  Clone ID: LIB3108-021-Q1-K2-B3
gttcgtttcccccttcttcctccttcatcagcatagcattgttgtctcccctacaccatagaccctaaatccacgatgttggcttcagcatcctcatcatcctccatcttctccttcacccctaaaaccctaaccatacccccacagcaacctcgctttaccgtccgggcccactccaaaccccccattctccccaacctcaaaaccctcgccggcgccgcggtcttcgccgccgtcgcgctccaatttccctccaccgcacgtgcctcccctccgccttctctcgaaaccgaccacc

SEQ ID NO: 26504 - DNA, 171 bp, Glycine max
  Clone ID: LIB3108-021-Q1-K2-B5
gacacataacaccataatattgaaataccttctatttcatgctcttacaccatttcaaacgggcgggtctaattacttgcaagggtggcatttcacaacatggtaaaataaacttgtgctttgaacctgtttgcatttgctttatacaggaaactacttatgacatttttt

SEQ ID NO: 26505 - DNA, 446 bp, Glycine max
  Clone ID: LIB3108-021-Q1-K2-B8
agccctaactacgcacgcattcgtgagaaaactcaatatttttcgctcatggcactctcttctcgtctctgttccaaatccaaattgatctatggcaggcaaatacttctacaaaaggagcatgctattccagttcgtcactttgctaaagagtctgcccctcctgcccttaagggagacgagatgctgaagaacatttttgtggaggtgaagaacaaatttgagaccgccataggaatattaaagaaggagaaaatcaccattgacccagaagatccagctgctgcttctcattatgcaaaggtcatgaaaacaattatagagaaggcaagcttattgtcggagtcccaagacatactatccaccattgaaattgggacacaggatattccagatgctcggacctaacttttgacttgaaggaaataagagtcaagagaggtctt

SEQ ID NO: 26506 - DNA, 417 bp, Glycine max
  unsure at all n locations
  Clone ID: LIB3108-021-Q1-K2-C1
ngcgcacaaacaagntagatctttcgccgacgtcgttcacaactcggaaaccacaattccgaagcagatccacgagatttaggatgtccttctgacggcacggaagaaggatgcgagggcggtgaaaatcaataggagcagggatgtccttaacgtttaaggatggatgctccaagtatttgtacacgctttgtgtgtttgatcctgagaaagccgatcaattgaagcactctcttactcccggtttgagtgttctatacctgtaaaggcgctgcgtgcggccagcagcgcatgtttatctatgtggagcctcatgctctatatagtgcagcttgcttttatatcttggtcattgttatgaggatatgcttgtcttctatttgctaagaaaatgctggggttttattttgagcacga

SEQ ID NO: 26507 - DNA, 60 bp, Glycine max
  Clone ID: LIB3108-021-Q1-K2-C10
cccacgcgtccgaaaaaaaaaaaaaataattttttaaaaaaaaaaaaaaaaaaataagaa

SEQ ID NO: 26508 - DNA, 363 bp, Glycine max
  Clone ID: LIB3108-021-Q1-K2-C11
ggtatatctataggcatagtcactttcattgcagctccagcaagtctaacacttgaatttgaaggcaatggtggccatgcgggtgctgtccttatgcctaacagaaatgatgctggtctggctgcttctgaattagccctggctgtagagaggcatgtgttggattctggttcaattgatactgttggcactgttggtatcctggaactgcatcctggagcaatcaacagcatccccagcaaatctcacctagaatatgacacacgagacattgacgaggaaaagaaaaaataaagtggttgagaaaattcaccaatcagcaattaaaataaccaaaaacacgaggtgtcaagctctcttgat

SEQ ID NO: 26509 - DNA, 92 bp, Glycine max
  Clone ID: LIB3108-021-Q1-K2-C12
cacacgcgtacggtaaaaaaaaaattatttttatgaggcaacaactctacaaaagggatggggaaaagggaaaggggggggggcaaataaaa

SEQ ID NO: 26510 - DNA, 429 bp, Glycine max
  Clone ID: LIB3108-021-Q1-K2-C2
aggaactagaaaatccatacaatcttcaccaccaaaaagaaaataatggcaatggccagtgcaacaactctagccacaatcactgttgtggcggctagccccagtgttggcagcagaaggagtgggaagaggaatgtgaacttcatcagagggttgaattcttttggagggttgaaggctcagaacaatgtgacattactaggccttcctgtgtgcactgagcagtgctttgcaaaggtggtgagctcattgaaatatccatcatcatcatcacgtaaggggagaggtggaggtgctgccttttcaacatgcaatgctgctggtgagattttccagattgcagccatcatgaatggccttgtgcttgttggggtggcaatagggtttgtccttcttcgagtcgaagcgtttgtggaagagtctgaatga

SEQ ID NO: 26511 - DNA, 413 bp, Glycine max
  Clone ID: LIB3108-021-Q1-K2-C3
atcttcttctcttcgcgtagcgcgtcgtcccccgcatccacgtcgtttcatggttacgttattgttggtgggctgattctctctccgaacatcttctgagggcttctcggcgatgagtggagtaatacattctctggtgtttgattccgcgtttccatttttcaatttctctgtctcgcatgtaagaaatgtttgattggaacgacgaagagctcgctaacatagtatggggtgaggcgggtgagagtgatcatcatattgtgccttatccggaggcaagtgaagatcttaatgacaagaaagaatggaatcaggaagcttctgctactaaactgattgagcagaggagaatagaggctaaaactgattttcatcaaggaaagctaggaagcagttccaaacttgatattatt

SEQ ID NO: 26512 - DNA, 432 bp, Glycine max
  unsure at all n locations
  Clone ID: LIB3108-021-Q1-K2-C4
acggaacaagagcttcactacacaactgagcccttcctcaacacgtcaaaaattcatctcatctatctgtacatcggagaaaccaaaaaaaaaaaatggagttcgacgagaagaaagcaatgatccgcgacgtggcgttacaagtcgttttcatctcgctcacgattttcagcttcctctggatgcacggcatccctcaaaacctctacgccaagctccgccaccgtcccccgaacccacgggccgtgcaagccaagcgccatttcgtcaaaggcgcgcagctcctcgcccaaaccagaagatccaaaagcgctttctccgcaactttcctcgccaaacaagccctagccgaggccgagaaggccatcgcgctcgaccccaaggacgccgcctcgcacctnctcaagtccatggcgctcgaccttcagggct

SEQ ID NO: 26513 - DNA, 136 bp, Glycine max
  Clone ID: LIB3108-021-Q1-K2-C6
cacacacatcacctttatattagaaaaccatccttttcattcacttatacaacatcaaacggacagggctaattatgagcagggggggcatattacaactatccacaaaacacttgctctatcttcttataccaat

SEQ ID NO: 26514 - DNA, 432 bp, Glycine max
  Clone ID: LIB3108-021-Q1-K2-C7
gtttgttgtgagctataagctagtttatcgtgaggagaatatgaagttgtttgttggcttggttgctgcagtagtttgggtagcatggccatgccatggcgcaggctaccaaaggttccctctccgaatgaaaactggctatggtgagcgttcttcggaggtaaaatgcgcaagttttaggcttgctgtggaagcacacaacatccgagcctttaaaaccattcctgaagagtgcgttgaaccaacaaaggactacattaatggcgaacaatttacatcagactctaaaacagttaaccaacaagctttcttttatgctagtgaacgcgaagtccatcacaacgacatatttatattcggcatagataacaccctactctctaatatcccatactatgaaaaacatggatatggggtggaggaatttaatga

SEQ ID NO: 26515 - DNA, 432 bp, Glycine max
  unsure at all n locations
  Clone ID: LIB3108-021-Q1-K2-D1
cgcagacgccgngactagacactcatctcactcgcgccatcttagggtttctccttttgcggcgcaacatggttgccgctaagaaaactaataagacccatgagagcatcaacaacaggctcgctcttgtcatgaagagtggcaaattcaccctcggttacaagaccgttctcaaatctcttaggaactccaaaggaaaattgattatcattgctaacaactgcccccctttgagaaagtcagagattgaatactatgctatgttggcaaaagttggagttcatcattacaatgggaacaatgtggatttgggcactgcatgtggaaaatattacagagtgtgctgccttagcattattgatcctggtgattctgatatcatcaagacactggctggcgaccagtaaagtagtattgaagttccttgcttga

SEQ ID NO: 26516 - DNA, 115 bp, Glycine max
  Clone ID: LIB3108-021-Q1-K2-D11
catattcttatcgtacaaaacaattttttttaatttttcacaacaccaacaaaacggggagcggtaataccaaggcggtggaggttgattccttccttcaccatttataacaata

SEQ ID NO: 26517 - DNA, 425 bp, Glycine max
  unsure at all n locations
  Clone ID: LIB3108-021-Q1-K2-D12
gttagaacgcctaattgttaaccgtcctcatccctggggtctcctcattacttttattgagctgatcaagaatcctaggtacaatttctggaaccggagtttcataagatgtgcaccggagattgaaaaactttttgaatcagtgtcaagatcttgtggaggtccaaaaccagtggatgatagcatggtttcgggttgggtctgatttcccgtagtcttttgtggttgttagtcctgtgtaggttagccaaccatgttagttaggactatttatactgttgttaatctagcagtgttgtttttacattgtaaattatgttttagtgaaactctcttctttcagatgttatgaccatgtacttgtttatattgcagcatgagtcttaattccaaannanaaaaannaaannaaaaaaatataaaaa

SEQ ID NO: 26518 - DNA, 111 bp, Glycine max
  Clone ID: LIB3108-021-Q1-K2-D4
cgcacacgagaggataagaaagaaaaagcttgccactcaaacagcgagaacaaatcaaacgggccaggctaagaggagcaagacggccataccagcctcaatgtagaaaac

SEQ ID NO: 26519 - DNA, 427 bp, Glycine max
  Clone ID: LIB3108-021-Q1-K2-D6
caagagtgaaatgaattcaagctcaactattgaatcatattatgaatactacatcaattttgctctgtctatatattctgtggcatctgaatttatctagtgtggaatttccagaaagccttgttcggattataagatgaaggagataactggtagtggaatatttgtagccaatggagaagatgatgccttagaagatggcagtgccaacccaaataagactggagtacgtatgtatcagcaagcgatttctggaatcagccatatctcatttggtgaggaggagaatgtttctccaaaaaagcccacttctttgccagaggtggccaagcagcgtgagctaagtggaactttggaaagtgaagactctatattgaaaaagcaactctctgatgcaaagtgcaaggagcttagcggtcatgacata

SEQ ID NO: 26520 - DNA, 52 bp, Glycine max
  Clone ID: LIB3108-021-Q1-K2-D7
cacacacatcagcaaaaaactacattattatgcttaacaaccacaaaaacaa

SEQ ID NO: 26521 - DNA, 176 bp, Glycine max
  Clone ID: LIB3108-021-Q1-K2-D9
cccacacgtccgccttataatacattatcatgttttttaaccattcatacaataccgagcgctcaaattttaacaagggcgtagttaatttatacatccttttataaacaactattactcattatcctattaccattcttccaaacccacaattataaattacaattcttttcaaa

SEQ ID NO: 26522 - DNA, 257 bp, Glycine max
  Clone ID: LIB3108-021-Q1-K2-E1
ataagcaccctcaggagaaagagacgccatcagtgcaagaaccagaaaaccttagaaaaacgatctgagaaatctgaccaacgagaggaaaagaatgctgttgattttgatgcactaatggcgacaccaaaacaggcatattagctgcatcaacaacaactaccaatggtgcggcgagcgaggaacatggggacgatttacacctacgcgactccaatgagggatgacactgaagaggacatgtcaagatcatcttt

SEQ ID NO: 26523 - DNA, 436 bp, Glycine max
  Clone ID: LIB3108-021-Q1-K2-E11
acgcgtccgcccacgcgtccgcccacgcgtccgttcactcgtccgcccacgcgtccgagcagagggaggagcggcattaaaaatgcagatcttcgtgaaaaccctaacggggaagaccataaccctcgaggtcgaaagcagcgacaccattgacaatgtcaaggctaagattcaagacaaggaaggcatccctccgcatcagcagcgtttgattttcgccggaaagcaacttgaagatggaaggaccttggccgattacaacatccagaaggaatcaacccttcaccttgtcctcaggcttcgtggtggcatcatcgagcctttcctcatggctgtggctcgcaaatacaaccaggacaagatgatttgccgcaaatgctatgctcgtctgcaccctagggctgtgaactgccgtaagaagaaatgcggtcatagt

SEQ ID NO: 26524 - DNA, 438 bp, Glycine max
  Clone ID: LIB3108-021-Q1-K2-E2
cacactcctcaacacctgctccctcactcactcatctatggcatcaacaatatcagcaacggccatgatcaacgccaaatgcgggaacccaaaggtccccaaccccaccaagctcgcaccatcaaaaccttccctttacgtcaaccttccaaagggcctaatagcctcacccgaaaacaccaaactttccactgcgacagcaatcgcaggagcaatattcacaaccctcggaacctgcgacgccgctttcgccgttcaacaaatagccgacatagcagaaggcgacaaccgcgggctgacactgttgctgcccataattcctgcaataggatggcctctgtacaacattctgaaaccggcgctggaccaactgaaccgcatgcgcaacaccaaaggcgtgatcattgagcttgggcttggcggcttggctgtcttggt

SEQ ID NO: 26525 - DNA, 212 bp, Glycine max
  Clone ID: LIB3108-021-Q1-K2-E3
cccacacgttcggaaaaattgaggactgctttttattttatggtggccattataatctatgggttctgtcatttttcagatgaggaatatttaactggtttgcaagctatagatcaacaacttttgagtgttttaactatgaaacaaaatattttgttttggtgtatatgtgcttaataatattatgtattatagtataatcgatatcgtat

SEQ ID NO: 26526 - DNA, 317 bp, Glycine max
  Clone ID: LIB3108-021-Q1-K2-E4
cggacgcgtgggcggacgcgtgggcggacgttttttctttaccagctaacatttccagtgtgcccgtgtctcctgcccactgaaggcgaacccctaatggcttctcaagttcttcttcaacaggcactgtttgcccccaagctaagtttcccttcttcttctcgtaacgtcgcgttaatttttagggttccttccaccccaatttcatggcgttgcacttctctcattgctaagcctactttcgctgtgagagctgacttcaacggcgaaagcgctggtgaagccaccgaggatgttccttcgtataaatgtgatga

SEQ ID NO: 26527 - DNA, 142 bp, Glycine max
  Clone ID: LIB3108-021-Q1-K2-E5
tcgcccacgcgtccggttattggttttatttttttgtattttatatgctgagaagattttaagggtcgggttttatataaaaaggtggttgcttttaattctattttttttaataatttaaactaatttattaaaatttttt

SEQ ID NO: 26528 - DNA, 278 bp, Glycine max
  Clone ID: LIB3108-021-Q1-K2-E8
ggcaacaatcatcgccggcaccctatctactttattcactcgcacaagacatttgcggaagcgacctgtgggggccggggccggtaccgatcttggattgccagcaatggtcaaggcggggagagtgaggtgctccatggaggaaaagccatcaagcagctcaaacctagggatgggggcattcttgatagcagctgcagcgtgccgcaaccattgcaagcccaacagccatggcctttgttgatgagagacttagcacttaaggaactgtgctttcc

SEQ ID NO: 26529 - DNA, 391 bp, Glycine max
  Clone ID: LIB3108-021-Q1-K2-F1
acttgcacatcttgggtatgagtggactgtatcacaagatcagggtgaaggatcgttgttaactaaagaggaggaataaaaacatgacaagcatgtagactctgcctgacaaaatagccagtgctctaaacccagtggaatcacaatcttccaaacatctatctctgtctaccatggcagaacttgtgagtttcttgtttggtttgatttttagaaacttgcgagtttatagtactggccggtggttcccatttgatctacttttgcaatttagcactcacaatatcgaaagggcgcagtgaagcaagcattcttttctgatatctagccacaagcaccataaaaaaaatgtcaacaagtgattacgagttaataaagatcgagacgtttg

SEQ ID NO: 26530 - DNA, 203 bp, Glycine max
  unsure at all n locations
  Clone ID: LIB3108-021-Q1-K2-F10
gggaaaaaagggcgcatgaataaattatagttgggattagcacgaaaaatgaaaggaggggggaaaaagggggaaggcgctcactcacagncagagtcagttcgtgatggggctattgaacgtcaagagcagagggagcaagagtagaggcaacaccgccttccgaaaacccggagcgaaaataacatccgctcaccactaaa

SEQ ID NO: 26531 - DNA, 437 bp, Glycine max
  Clone ID: LIB3108-021-Q1-K2-F2
cacgcagcgaggtagcgtcttcttcttccgtttctctgcatcggtgtgaacaatggctacagacgctgcgatgaagcccacagagcccgggttggaggagtcccaagaacagatccacaagataaggatcaccctttcctccaagcacgtcaaaaacctcgagaaggtttgtgcggatttggttcgcggtgcaacggataagagactcagggtgaagggacctgttaggatgcccactaaggttcttcacatcactaccaggaaatcaccctgtggtgaaggtaccaacacatgggacagatttgaacttacggtgcacaagagagtgattgacctctacagttccccagatgtggttaagcagattacctctatcacgatcgaacctggtgtggaggttgaagtgaccattgcagatgcttgatcttgatccaaat

SEQ ID NO: 26532 - DNA, 224 bp, Glycine max
  Clone ID: LIB3108-021-Q1-K2-F4
aattcacagagcaacacatcgaaccaactatgtgcgttgcctcagccgcaatcacagccgcggcacgggcaagcagcgctggggcaggtgcagtgcttcggtcgcaagaagaccgtcctgtccgtaacctactgcaagcgcgggcgcggtctcataaagatcaacggctgtcccattgagcttgtggagccggagatccttcgctttaaggccttcgagcctat

SEQ ID NO: 26533 - DNA, 124 bp, Glycine max
  Clone ID: LIB3108-021-Q1-K2-F5
cccacgcgtccggacacgcgtccgcaagcgtcagtagcaacgcacaggaaaacactcaacgggaatgctgacaaagctgggggagcacaaaaggcaccatgacaaaacaggcaggagcaaggag

SEQ ID NO: 26534 - DNA, 76 bp, Glycine max
  Clone ID: LIB3108-021-Q1-K2-F6
cacacacgtgcggataaaaattaaacttcttgtttttcaaccacacagaacacacccatcgggccagcttaaaaag

SEQ ID NO: 26535 - DNA, 429 bp, Glycine max
  unsure at all n locations
  Clone ID: LIB3108-021-Q1-K2-G1
cccacgcgtncggttggttacgcggaataagaaggttagactgcattagaagaaaaggactactccaaatttgcagctctcatgaatcgaaattttgacctgcgaaggttaatgtttggagatgatgccctcggtgatttgaacctaaaaatggtagaggttgccagaaaggttggagctgcgtcaaaatttaccggtagcggaggagctgttgttgcattttgtcctgaggggacttctcaagtgaagcttctcgaggacgaatgtcaaaaagaaggatttgtgatactacctattgaacctcttccttctcgtctaaatgaaattgacttgaaaaccttgcaaataaagtaatctatattgagggtttgaaaaatagttctcaacaaaataaaaatttccatttactcaagaacgcgggtttaaagc

SEQ ID NO: 26536 - DNA, 356 bp, Glycine max
  unsure at all n locations
  Clone ID: LIB3108-021-Q1-K2-G2
atttagctaagatatttggctcgaattctcttaaattcggttctgcctagtagtactgattatcttttaatttgtatttgtggtgtgtttgactcctcctcctcctccatcgtgctctcgggacatattcatggagcctgtgtgttttccgcacgccactttgatatgttatacgggtgcattactgtattttgagtgattatttcaataatgggtggtactcttatccctgttgaaactttgagttcagtgcttgactttnaaaaaaaaatataaattaaattattattttattaaaatattttttaataattttattagaaaaacaatttcaaatttacatttcattatttttt

SEQ ID NO: 26537 - DNA, 424 bp, Glycine max
  Clone ID: LIB3108-021-Q1-K2-G3
ctgggactgattatagtgaaagggccatcaaccttgctcaaagccttgctaatcgtgatggattttccaatgtcaaatttttggttgatgatgtccttgagacaaagttggaacaagagtttcgacttgtcatggataaagggacgctagatgctattggattgcatcctgatggtcctgtcaagagaatgatgtattgggattctgtttcgaagttggttgctcctggtggaatacttgtggtcacatcatgtaacagtacaaaggatgagttggtacaagaagtggaaagtttcaaccaacgaaaaattgctactgcacaggaacttgaggcactgaagggtgaggagccatgcagagagcccccatttcagtatgtaagtcatgtccgcacatatccaacattcatgtttggtggatccgt

SEQ ID NO: 26538 - DNA, 198 bp, Glycine max
  Clone ID: LIB3108-021-Q1-K2-G4
agcaggcgagttgagagagaatgggaaggatgaaggggtatgttgagttcgaggagtcgccgccggacgatttcgatccggcgcatccgtacaaggacccggtggcgatgctggagatgagggagcacatcgtgagggagaagtggatccaaatcgagaaggccaagatcattatggagaagcttcgatggtgctacc

SEQ ID NO: 26539 - DNA, 173 bp, Glycine max
  unsure at all n locations
  Clone ID: LIB3108-021-Q1-K2-G7
cacaaacgcacacagaanacaaaaacatcgttttgagagaggcaaggccaaacaaagggggaggacgatcaagcgggagggggggcaaagaggccaaatcggccagatgacgagcagagcagaaaggaaggggcgataacctgaaagggacgaaacaccgaacagaggaccga

SEQ ID NO: 26540 - DNA, 336 bp, Glycine max
  unsure at all n locations
  Clone ID: LIB3108-021-Q1-K2-H1
cccacgcgtccgctctcccttgggtgccatattttacaatttttgaggcccaaaatttgtcattattttttcggatggatactgaagtcttgatcagtggcacccttccggtttacaattacataggtgttggtcattattattattattattattatgaattacacaggtgttgaaagttgaaactcgtaacgtgaaaactggttagcatgttaattcaaattgttttttatagcttnnnnaanaaaaaaataaaaaaaaaaaataaaaaccccccctaataaataaaaaaaataaaaaattttntgggggccgttttttggggggctttttttt

SEQ ID NO: 26541 - DNA, 117 bp, Glycine max
  Clone ID: LIB3108-021-Q1-K2-H10
aaaaaaaaaaaaaaaaaaaaaaaattaaaattttaaaaaaaaaaaaaaaaaaaaagggaaaaggaaaaaaaaaaagggggggagaaaaattaatacaaaaaataaaagaaaaagaga

SEQ ID NO: 26542 - DNA, 429 bp, Glycine max
  Clone ID: LIB3108-021-Q1-K2-H11
cccacgcgtccgcccacgcgtccgttcacgcgtccgcccacgcgtccgtccgcgggcatggcgacgagggcagcagtggcggcgccgcgcgtttttcggcggtttttctgcacaaactcagcctctccttctttccccttcgttcctacgccgcctcctggcgccacccccactccaactcgacccacggcggagcccaaccccaacctcttcgtctctggtcttagcaaacgtactactacagaaaggcttcgagaggagtttgcaaagcttggtgaagttgttcatgcaagggttgtaactgatcgagtctcggttactctaacggttttggttttgttcaatatgctacaatagaagaggctgcaaagggcattgaaagcatggatggcatgtttttggactgttgggttatatttgcagagtatg

SEQ ID NO: 26543 - DNA, 433 bp, Glycine max
  Clone ID: LIB3108-021-Q1-K2-H2
gtcgaagcgtggtcgtggtggttcggcggggaacaagttccgcatgtcgctgggtcttccagtggcggcgacggtgaactgcgccgacaacacgggggcgaagaacctctacatcatttcggtgaaagggatcaaaggccgtttgaaccgtcttccctcggcctgcgttggcgacatggtgatggccaccgtgaagaagggaaaacccgatctgaggaagaaggtcttgccagctgtcatcgttcgccagcgcaagccatggcgccgaaaggacggcgtctacatgtacttcgaagataatgctggtgttattgtcaatcccaagggagaaatgaaaggttctgctatcactggtcccattggaaaagagtgtgctgatttgtggcctaggattgcaagtgcagctaacgccatcgtttgagtggaatttctt

SEQ ID NO: 26544 - DNA, 428 bp, Glycine max
  Clone ID: LIB3108-021-Q1-K2-H3
cccatttttcacaccaccaagccaacagaagatgtttctccacattgttttcctcctttcccttctctcatccacttcccatgccactgtccaagacttctgtgtggcagaccttaagggtgcagacaccccttcaggctacccctgcaagccacctgcaaatgtaacttcagatgactttgtgtacacaggcttagctgaagctgcaaatgtcacaaacataatcaatgctgctgtgaccccagcttttgttgctcaattcccacgtctcaatggccttgacctctctgcagcaagattagaccttggtcctggtggtgttatcccactacacactcacctctgtgccaatgaactactcattgttctccaaggtcacatccttgctggattcatatcttcaggtaacatactttatcagaaggtgc

SEQ ID NO: 26545 - DNA, 131 bp, Glycine max
  Clone ID: LIB3108-021-Q1-K2-H5
cacacacatgctatgaaacatggaccagcgttactttttatgaacgggaaaaggagcagcgggctagctgattattatggcgggtggggcatccttcctatcacatcaacacatacacaaccgatccccac

SEQ ID NO: 26546 - DNA, 218 bp, Glycine max
  unsure at all n locations
  Clone ID: LIB3108-022-Q1-K1-A1
gtcgacccagcgtncgcccacgcgtncggaaaaaaaaaaaaaaaaattttaaaaaaaaaaaaaaaaagggaggaaaatggggaagaaaaaaaggttaagaaggggtgaatgcaaaaaaaaaagtcttgtataggggacgtaaataaattaaatggcgcgttaaaaagaaagaatgaaaaaaatgggttaaaaaaataataattgagggatccttttga

SEQ ID NO: 26547 - DNA, 328 bp, Glycine max
  Clone ID: LIB3108-022-Q1-K1-A10
aaaaaagaaaaacaagaggaacaagcttaaagatgtgactgtgagcgatggggaccaggaaagcacggaggacaaagttgataccactgatggcgagcagaagacacatgaggactctgaccaggaactgcctaaagacgagtctaatgagcaagaagtaaagaagaaaaggaggaagaagaaaaagaacaagaatgttgttgaggaatccaatgaccagttggttgaagtgaaagtggctgacgggatggatgatccaaaaccatccaaagctcgggagttccccaatgggttgatcatagaggatgtatcaatgggaaaacctgat

SEQ ID NO: 26548 - DNA, 440 bp, Glycine max
  Clone ID: LIB3108-022-Q1-K1-A11
cccacgcgtccgcaggcgtcaaggtggaatccagcagttgctagctgcggagcaagaagctcagcaaatcgtcaatgctgcaaggaatgcaaaaactgcgaggctaaagcaggcaaaagaagaggcggaaaaggagatagcagaatatcgtgctaagatggaagctgaatttcagcggaaggttgatgagagcagcggcgactcgggtgctaatgtcaagcgtcttgaacatgaaactgatgcaaagatcgaacacttgaagaccgaggcgtcaatcatatctcacgatgttgttcatatgcttttgaagcatgtgaccactgtgaagaattagagcgtccaacatgttgtgaggatgagacatgcatcaaaaagtattttcgataaatttgtgtgtttccgagtattaaaaccaatggacaaaactggtctttggttgg

SEQ ID NO: 26549 - DNA, 359 bp, Glycine max
  Clone ID: LIB3108-022-Q1-K1-A2
attctattaaagcatgggaagcgtggtagaatgcagagaatggtacttagctgcatattcccgtcacggtgtaccaaattccgataatctgaaactccgcaccgtcgctctctcattatcctctgattcaatccccgacggccacgtgtccctccagatcctctttctctccgtagacccctaccttcgcaccagactcaccggcaccctcgacggtctttacattcagcaatatccactcaacgaggtgattacagcatatggagttggcagggtaataggatctaaagacagcacgtacacggagggtcgatctatattaactccttctgcgccagtggctgagtactgtatcttac

SEQ ID NO: 26550 - DNA, 361 bp, Glycine max
  Clone ID: LIB3108-022-Q1-K1-A3
gcaccgaaggggttgggaagcaggcagagaagatccatggtgcacgtttccttctgccgaaactatgggaaaaccttcaagaagcctcgtcgtccgtacgagaaggagcgtttggacgccgagttgaagctggtcggtgagtacggacttcgctgcaagagggagttgtggagggttcagtacgctctcagccgcatccgtaacaacgccagaaatcttttgaccctcgacgagaagaacccgcgccgtatcttcgagggagaagcccttctccgaagaatgttccgttacggacttctcgatgagactcagaacaagcttgattacgtgttggctctcaccgtcgagaactttctcgaac

SEQ ID NO: 26551 - DNA, 76 bp, Glycine max
  unsure at all n locations
  Clone ID: LIB3108-022-Q1-K1-A4
ggagcccccgaggcgaagcnccncgcgagccnngaagaggcagngngcaagngccacgacngcggcgacgaagccg

SEQ ID NO: 26552 - DNA, 421 bp, Glycine max
  Clone ID: LIB3108-022-Q1-K1-A5
gtcaagaccattgaaattttacaattctgagattcatacagcggctttctgtttgccatcttttgctaagaggaagattggttctaaaacaaattgaaaatatttttcctgggattgaaggagcaaatgtggctgtaggcattcatcctttcactggattggtccatccatcaatgaaccttggaataagttaatatcttcaagatgacattgaagagcaactttacttctatttcatgaaatgagttgaagatgctggattcacttgctagtaatttactttattgacattatggaacttaattagcagtttaacaaactttttgtttaaacaaaaaacctggaaaaacactggaaaaacccacataaaaccgttgggaacaaaaatcccattaaccaaaatcagcaaaaagccaaaaag

SEQ ID NO: 26553 - DNA, 243 bp, Glycine max
  unsure at all n locations
  Clone ID: LIB3108-022-Q1-K1-A7
ttcaagaatagagaactgcgtagcgacccattagagaagatcgcgatcttctgaaacatgtgtggggaagaggaagaaaacgccgcagagctcaaaattggagacgagtttttgaaggcaaagtgcttaatgaactgtgaagttgcattgattcttgagcacaagtatgagcagcttcaacagacatncgatgatcccatgaatcaagtttctcaggtatttgaaaagtcactgcagtatgtg

SEQ ID NO: 26554 - DNA, 409 bp, Glycine max
  Clone ID: LIB3108-022-Q1-K1-A8
cccacgcgtccggttgacatgaacaaaagggctggtgagttgactgctgctgagttggatagtgtgatgactgtggtggcgaaccctaggcagttcaagatcccagactggtttttgaacagaaagaaggattacaaggatggcaaatactctcaagttgtgtctaatgctcttgatatgaagctcagggatgatcttgagagactcaagaaaatcagaaaccaccgtggtttgaggcattactggggccttcgtgtccgtggtcagcacaccaagactactggccgtaggggaaagactgttggtgtctctaagaagcgttaagctattatgtttggcttggagattagattttgttgagaaggaaagtttgaagtacactagacatgttttgcatcataccaacttt

SEQ ID NO: 26555 - DNA, 422 bp, Glycine max
  Clone ID: LIB3108-022-Q1-K1-A9
agcatcctggtggtgaacatacaggagaaaaagatagaacctttgaaacatcgtttatcagagaacaatgggctttgcaacagctgagaaggaacgagcaacaatcttggaggcctcagaggggcctgcctgagaaatctgtctcggttctacgtgcatggatgttccaaaactttcttcacccgtacccaaaagacaacgaaaagcatttgctagccattcaaagtggattgacgagaagccaggtgtccaactggtttataaatgcgagagttcgcctctggaaaccattgatagaggaaatgtactcggaggtaaacaaaaagaatcgtccaatagaaggatcaggctgcgatagcaggaactatgcaagcattgggaatcaaagaattcagatgaattgaattactgaaatattctta

SEQ ID NO: 26556 - DNA, 303 bp, Glycine max
  Clone ID: LIB3108-022-Q1-K1-B1
cttcacctccttagtttcgaaagcatggcttccctggcggcttccaccgcggctatgtcagaaatccttggaaaccccgttaacctcagatgcgcaaccaggtctgctccatcaccaactacacctgccaccttcaagaccgtcgcacttttctccaagaagaagccagctccacctccaaagaaaaagcctgccgctgtatcccccgccaatgaggaactcgccaagtggtatggtcctgacagaaggatcttcttgcctgagggtctcttggaccgatctgagatccccgagtacttgacc

SEQ ID NO: 26557 - DNA, 405 bp, Glycine max
  Clone ID: LIB3108-022-Q1-K1-B11
atttttcttcgtctgcgaccgatgaagaatattgaggaacagattggaaagtcttgacattagggttgttaagtcccttctggagattagcaggcaacattcttgggcagaaatagtccacaacaagctcatctgtatgttggcaaacatgttttaccaggcttctaatggacctgcaaaagctaatttagatgtccccgcattttatgttgaacaagttgttcttgttggaggaattagcttcatttgtctcaagataaatgaagtgtgcctggctactggagtgcgacccgtgaagaagaacaatactggtcagacagaagccggatcgaagacgatggatacaagccgagaagactcgaaaatcccggacggagaacaacgctggaagaagtgatgacgcgg

SEQ ID NO: 26558 - DNA, 430 bp, Glycine max
  unsure at all n locations
  Clone ID: LIB3108-022-Q1-K1-B12
gattcctgcacctgaggctgggagtattgtggtatgggacttgactgtactgggttgggaggtgaactacaaagaggaatttgtaccgagtgacgagggttcgtacacgatcatcattcagaaggggaagaagatggggtctcaggaggaggctgtgcggaattcgtttacaaacaatgagcctgggaagattgtcctgtcgatagagaacaaggcgctgaagaagaagaaggtcttgtacaggtacaagacgaagagttgttgagagatgtggagaagcagttcatttcttagtttcaactatgggaagggcggggtttatttgctccttagatagtnattgtgtgcccgatggatgggatagtatagaaaatgggatgggtcattcctttaggaccatattggcatttgtttcttgggttaatttctc

SEQ ID NO: 26559 - DNA, 405 bp, Glycine max
  Clone ID: LIB3108-022-Q1-K1-B2
caagtagttgataactaagaagaaggaaatggcttgctcaatgatctcctccccagctgttaccaccgtcaaccgtgccggtgccggcatggttgctccattcaccggccttaaatacatggctggcttccccacgaggaagaccaacaatgacattacctgcattgctagcaacggtggaagagtacaatgcatgcaggtgtggccaccaattggcaagaagaagttcgagactcttttctacttgccagacctcgatgatgcccaattggcaaaggaagtcgaataccttctaacgaaaggatggattccttgcttggaattcgagttggagcacgggttcgtgtaccgtgagcacaacacgtcacctggatactatgatggacgctacttgaccatgtggaa

SEQ ID NO: 26560 - DNA, 451 bp, Glycine max
  Clone ID: LIB3108-022-Q1-K1-B3
cccacgcgtccgaattcctacaatgctttctcaatgtgctttgggaatgaagctttgctagcggtattcccgttcaaacaagccctgcattcatcaaaggttgtttagtggtttggataacatatactgtgtcttcctgggtggcctgcacaaccttagcatgctcaacaagcagtatgggctatcaaagggaacaaatgaggccatgtttatcactgaagcatatcgaactcttcgtgacaggggtccataccccgctgatcaagtcctgaaagaacttgaaggcagctttggatttgtgatctatgacaacaaggatggaacagtttttgttgcatctggttctaatggccagattgggctctacatgggtgttgcagctgatcgttacatagttatttctgaacatctggagcttataaaagcaagctgtgctaaatcatttgcacca

SEQ ID NO: 26561 - DNA, 255 bp, Glycine max
  Clone ID: LIB3108-022-Q1-K1-B5
cccacgcgtccgctcctcttattggtattctggcaagactaggtggaggtcatggtggctatgaccagcttcttccagctgatgttccagctcctaaacctgctgttaccaatgcttaaccaacccccactcccaagacaactacttctacagcttcatggtcaggcccaatttacattgaacagaaaacgaccacctcatgggttgccaatggaaaaacttattacagatactcaacagtcgtgactaacaatc

SEQ ID NO: 26562 - DNA, 484 bp, Glycine max
  Clone ID: LIB3108-022-Q1-K1-B6
ctctattatcatatggacagcttgggctctccatgcaactgttaattttgggcaatacccttatggaggttatatcgtgaaccgtccaactctagccagaaggtttatcccagaagaaggaaccaaagaatatgatgagatggtgaaggatcctcaaaaggcatatctgagaacaatcacacccaagttcgagacccttattgacatttcagtgatagagatattgtcaaggcatgcttctgatgacgtctaccttggccaaagggataatccaaattggactacggattcaaaggcattggaagctttcaaaaagtttggaaacaaactggcagaaattgagggaaaaatcacacagaggaacaatgatccaagtctgaaaagccgacatgggccagttcagcttccatacacattgctccatcgttcaagtgaggaagggatgagtttcaaaggaattgccaacagtatctccatctaaaat

SEQ ID NO: 26563 - DNA, 353 bp, Glycine max
  Clone ID: LIB3108-022-Q1-K1-B7
cccacgcgtccggtggtgaccttggcaaacttgattatcgcttccacaaaacctgtggttcgagtctgcaccagttcccgttcccccacaccaaaactccccattcttcaaatttcactccccaaagccccaaccttgaaactgaaactgccaatttcaaagccccagatgctgtacctcctgggagggatagcaccactggtcttggccaaaccctccctatcataagaatctgagaaagcagcactctttgacttcaacctcaccctgcccataataatggtggagtttctgctgctgatgcttgccttggacaagatatggatcaccccacttgggaaattcatggacga

SEQ ID NO: 26564 - DNA, 478 bp, Glycine max
  Clone ID: LIB3108-022-Q1-K1-B8
ttccaaactccgccatggccactgccaccgtcgccgccgccacgtcatactttgtcggcacccgtctaaacaacgttaacacgacaaccttaaacaacggaagattccacgcgctcttgaacttcggcaaaaagaagacggcgccgcagccgccgccgaagaaaaaggaagtgaaagtgaaaccctccggagaccggctggtgtggttcccgaatgcggagccgccggagtggctcgatggaagcatgatcggcgaccgcgggttcgacccgttcgggttcgcgaagcccgcggagtacctgcagttcgacctggactcgctggaccagaacctcgcgaagaacatcgccggcgatgtgatcggaaccagggtggacgtcgccgaagttaagccgacgccgtttcagccctactcggaggttttcgggattcagaggttccgtgagtgcgaactcattcatggaacgtgggcaatgct

SEQ ID NO: 26565 - DNA, 482 bp, Glycine max
  Clone ID: LIB3108-022-Q1-K1-B9
gcttcttccgccactcagcacttcgctccctctgtgcttcaccaaccatggccgaaatcgaagcgtaccgttgcagatccctctcaaatcgacgtcaaacttttcaaccgctggagcttcgacgacgttgaggttactgatatgtctctggctgattacattggagtgtccccgtcaaagcatgctacatatgttcctcacactgctggtaggtactcagtgaagaggttcaggaaggcgcagtgccccattgttgagagactcaccaactctctcatgatgcacggaaggaacaatggaaagaagctcatggctgtcaggattatcaagcatgcaatggaaattattcacttgctcactgacctgaacccaattcaggtcattgttgatgccgtcatcaatagtggtccacgtgaagatgcaactagaattggttctgctggagtggtgaggagacaggcccgttgatatctcacccctta

SEQ ID NO: 26566 - DNA, 186 bp, Glycine max
  Clone ID: LIB3108-022-Q1-K1-C1
gaggaattgtacgttgcttggtttttgtaattatgcttgttagtatagtttgatgtaagtatgagaataagttgtgttggctagcatttttacgattaaactttagaatttcatctagagctcaaaaagctccaccaccattgaatgggattttccacaaccgataaacgatattaaaaaggctta

SEQ ID NO: 26567 - DNA, 321 bp, Glycine max
  Clone ID: LIB3108-022-Q1-K1-C10
ggcaaggcaagtgctctcattcagcatgagtggaggcccaagtcttttgtgactatctctgcggaagtagacactaaagccattgaaaagagttccaaggttgggttggctttggttctcaagccttgatgggattgttgtccttagtacttccatttcagatgttgattcaaatatgacgtggacttctttttgtctcacttgagaaatcctgaggatctgttagctttgttttaatgttcggatcctgaggatctggtagctctgatttaatgttccgtaagaataattctgctcggcaattggaaccctgagttttcg

SEQ ID NO: 26568 - DNA, 421 bp, Glycine max
  Clone ID: LIB3108-022-Q1-K1-C11
gctgctagttgctagtggtggttggggcagctactgatgttggttctatgtgatgtggtgatggccctctgggttgctgggtgtatgactttatgtggattgtgctgagggataattgatgaaggctggatgttggggaggtgatcaatgggtatcgagtaatgttgaggtggagtagaagctgctcagtaaggcacggtgctggttgccagccgtggtggttatcttgattatgatgtgtccataacgatggacgtgtgaggagaatggtaggtataggcgaattgagtatgttgaggcaaagtctcatttactcaggatcaagcttcactcacgtcggcgacatcctgctccctgatctatgattcttgacgtgacacagaatccagacttgatcacaatttgacatagcgattatgag

SEQ ID NO: 26569 - DNA, 369 bp, Glycine max
  Clone ID: LIB3108-022-Q1-K1-C12
cttcaatcaatcccctcaatcatcgtctctcgctctcagcaatggccggacgtggcaaggcgggcggctccgcagcggcgaagaaggcgacctcgaggagcagcaaggccggtctccagttcccggtcggccgtatcgcccgcttcctcaaggccggcaagtacgccgagagggtcggcgccggcgctccggtctatctcgccgccgtcctggagtatctcgcagccgaggttttggagttggctgggaatgcggcgagggataacaagaagactaggattgtaccgaggcatattcagcttgctgtgaggaatgatgaggagctttcgaagttgctggggatggtgactattgctaatggtggggtga

SEQ ID NO: 26570 - DNA, 277 bp, Glycine max
  unsure at all n locations
  Clone ID: LIB3108-022-Q1-K1-C3
gggcgacccacgcgtgcggccacgcgtccccccactcgtccgcccacattttcgtcctttcgttcggtaaatgtcttcagtgctatttggcattgtcactctgcattctcgacgacnaaacaatattacattgacaattggcttgaaaactctcttcactgttgtgggacttcttatgctagctatcgatctttacactgtcgttaccgatggtcttccgtttcgcaaagaacttctcacaccgtggatggcagccgctctgattgatttttatatc

SEQ ID NO: 26571 - DNA, 351 bp, Glycine max
  Clone ID: LIB3108-022-Q1-K1-C4
aaaacaataaatccaaagaaccccatctcggcatttcggattgcacaacaatacagtcacagaaacagagaaaaaacaaagaaaatggatgcagaaacggagtctccggcgccggaaacatcgccggcggtgatccacccggcagtggcaccaatctcctaccttctgggcacatggagaggccaaggagaaggaggcttccccactatcaattccttctcctatggcgaagagcttcacttctcacattcccccaacaagcccgtgatagggtacactcagaagacatggaaactcagctctggagagcctatgcatgctgagagtggatactggcgtcctaaacctgat

SEQ ID NO: 26572 - DNA, 289 bp, Glycine max
  Clone ID: LIB3108-022-Q1-K1-C5
cccacgcgtccggcagggacgagtcgaaatggctgaagcagagagtgtgcagattcctcacgtcaaacttggaactcaaggccttgtggtttcaaagttagggttggggtgtatgacccttagtggacgctataatgatccacttcctgaagaggaaggcatatctgttattaagcatgctttcagccaaggaatcactttttttgacacatctgatgtttatgggctcgaccatgctaacgaatttttgttcggaaaagctttgaagcagttacttaaagaaaagatc

SEQ ID NO: 26573 - DNA, 233 bp, Glycine max
  Clone ID: LIB3108-022-Q1-K1-C7
gcttcattgttcattctctaattttattttccaattaacgtgcatggtgtattttgataatggggttgcgtttcaatcaaggatgctttgcttggtttgcgttgctgttcccaatttggtgaatttttttatcggtaaacgttacttgataggttgacagtttttgttagtgtgagattcaacctttacctcacttgtgtcaccttttatcgctaaatcaatcttatatcttc

SEQ ID NO: 26574 - DNA, 434 bp, Glycine max
  Clone ID: LIB3108-022-Q1-K1-C8
cccacgcgtccgagttcggtgaagtgagtagtgagtgctgaatcgaatcgaatggattctcggaacatggcggcgagcgatcgcacagtgttgcaattctcttcatcatcttcttcttcttcgcacatcttgtccgcgaaggtccaccctctggtcatcttcaacatctgcgattgctatgttcgacgccctgaccaagccgaccgcgtcatcggaaccctactcggctccgtccttcccgacggaaccgtcgatatccgaaattcctatgctgttcctcacaacgagtctatcgaacaggttgcattggatatagagtaccaccacaatatgttaatatcccaccaaaaagtgaatccaaaggaaatcatagtaggatggtattcaaccggtcttggagtaactggtggtagtgcattaatccacgagtttta

SEQ ID NO: 26575 - DNA, 408 bp, Glycine max
  Clone ID: LIB3108-022-Q1-K1-C9
tggacttaagcttgtcaagcttagaggagaggccatgcaggatgcttcagatgctgctagtagtgccatggttagtattataggattggattcagagaaggttcaattgttgtgcgatgcagcaaatgatgaagtagacgagaaagacagagttcagattgcaaactttctttgtccaggaaattatgctgtctctgggggtgtgaaaggagtggaagcagtagagtccaaggcaaagtcatttaaggctcgaatgactgtgcgtctatcagttgctggtgctttccacaccagctttatggaaccggctgtctcgagattggaagctgcactagcggcaacagatgtaagaacgcccaggttaccagttatatccaacgtggatgcacgaccgcacacagatcccga

SEQ ID NO: 26576 - DNA, 373 bp, Glycine max
  unsure at all n locations
  Clone ID: LIB3108-022-Q1-K1-D1
gcccgaagccattaggccgagggcacgcctgtctgggtgtgcactagtttttgatactattgcgtggtagagccatatatttgtatataaatgaaattttgtctgttgcttttgcgtatgggtctggcatatttttggcttagcctggccttcattttgtctccatgtctagataaattgtatattctttaataccgtttaacatattcaccgaggtactagagaaatttgagaatgtgcattttaagttcacaagccaaaaaaatgttacattggacctttaccatgtcacatgggtattatggaaaaactgttgtccaatatggcaaggaaatgaaatgggcattctttttnaaaaaaaaaaannnnnacc

SEQ ID NO: 26577 - DNA, 210 bp, Glycine max
  Clone ID: LIB3108-022-Q1-K1-D11
accgaatgtgtattcgtctcatgttgtacttttataatgaatcctttgaatgtttagggtacccttttttttctttcctattcttgtacctgtttagggtacccttttgtagctgactattgtaaacaatatgtaatcaaagcagctaatcgtaatagtattgaatgtcatttgtgtacaatgacaagtgtgtaaagattttagtacgat

SEQ ID NO: 26578 - DNA, 374 bp, Glycine max
  Clone ID: LIB3108-022-Q1-K1-D12
cggactgctctgccggtctgacattgccacggcagtctgcgtgccgtcggatccaggctctggcgtcgctccgaggaggccggacaggacgatgcatgcaacccagatcaacgtcgaatattcacgccttcgaaactctcagagatttccaccggtcgaccacagacggctagtcaccctgccgatggtcaccaagagagaggcgattcccggaaaggctgcattgccacctccactcccgccggtcaccaatggccatcatgtctttcaggtggtggttatgagagtgtcaatccattgtcaaggatgtgcaggaaaggtgaggatgcatatgtcaaaaattgaaggggagccatccttagacagggagctag

SEQ ID NO: 26579 - DNA, 424 bp, Glycine max
  Clone ID: LIB3108-022-Q1-K1-D2
cccacgcgtccgcttttgctttaccaaattccaatttccaattcaaaaccctaactccgttcgaagcaccaaatcgtgatggcaccaaaggcagagaagaagccagcagagaagaagcccgcggaggagaagaaatcgacggtgggagacaaggctccggcggagaagaagccaaaggccggaaagaagcttccgaaggagggaggcgccggcggagaagggaagaagaagaagagaaacaagaagagcgtggagacatacaagatctacatcttcaaggttctgaagcacgttcaccctgacattggtatctcaagcaaggccatgggaatcatgaacagcttcatcaacgacatcttcgagaagcttgcccaggaatcttctagacttgcccgctacaacaagaaacccaccatcacttcga

SEQ ID NO: 26580 - DNA, 322 bp, Glycine max
  Clone ID: LIB3108-022-Q1-K1-D3
ccggcgaccacgcgtcgggcggaaattattttagcgaggaggcattaccagctttactgcagggataatacacagtgagcggaaaacttggcgactatatgatactcgccaagagataatatgaagagggaaccatgccgggtacaaataaagaaacactatttggtggacaagactggacatggtttgttttgccccgaagcaggcaaaggaggactacaaatattataatgtgactgtataatgaagcaacagaattgtcatttcttggggagctacttggagtttctttgtgtgatgtattttagattttactttatta

SEQ ID NO: 26581 - DNA, 212 bp, Glycine max
  Clone ID: LIB3108-022-Q1-K1-D4
ctttcaaagaaaaaaggagagtgcttagagagagagcaaaacatattattttcattttcatctttttttgagtatcaacaaatggcaaccactgtgatgaccactctcccccaattcactggtcttagaccccaattctcagctgcccctgtgaagaacttggttgctgtgcaacccatgagtcgcaaggggaagggtgcattgggagctcg

SEQ ID NO: 26582 - DNA, 200 bp, Glycine max
  Clone ID: LIB3108-022-Q1-K1-D5
atcattccttccatcatatctattcactcctttaacaatggccagcgaggcggtgaagaagggggcttttgtcaacgtgccagggactaacaagactcatgccaaacctgaggagcaaattgtaatgaaagagaaccagctggcaactatcgatcttccctacttgggctcatactacaaccacaagcggctgttttaca

SEQ ID NO: 26583 - DNA, 337 bp, Glycine max
  Clone ID: LIB3108-022-Q1-K1-D6
gatgttcaatgcctatgttctttaaggcttttttaagtggaaaggaagataggggtatgtgggacgtgccaggggtggaaaacagcaagatgaaattgctaacgcatgtttcatttgtggattgcccgggacatgatattcttatggctacaatgctacatggagcagcaataatagatggaccattgctactcatacatgctaataaaagttcccaaaacccacaaacatttaaccttttacttctttacaaaatcttccgtttacagccaataatattccttcaaaccaaggtaaacttgattaaaaaaattgtggcattaaataacattgaggc

SEQ ID NO: 26584 - DNA, 380 bp, Glycine max
  Clone ID: LIB3108-022-Q1-K1-D7
agtagttgagaactaagaaggagaagcaaatggcttcctcaatgatctcttccccagctgtgaccactgtcaaccgtgccggtgccggcatggttgctccattcactggcctcaagtccatggctggcttccccaccaggaagaccaacaatgacattacctccattgctagcaacggtggaagagtgcaatgcatgcacgtgtggccaccagttggcaagaagaagtttgagactctttcctacctgccagaccttgatgatgcacaattggcaaaggaagtagaataccttcttaggaagggatggattccttgcttggaattcgagttggagcacggcttcgtgtaccgtgagcacaacacgtcaccaggatactac

SEQ ID NO: 26585 - DNA, 264 bp, Glycine max
  Clone ID: LIB3108-022-Q1-K1-D8
cccacgcgtccggtcctagtgaggtgtgtgtatacaattactagcacatacacacagttgttaaagattataagatagtgatgaagaggaagttcatttcggtggttgttttgggagtatgtttggtgctgggaatatcccaatatgttgatgcaagaaacttggaggaaaaatcaaaggaagaggtcaagaagccagaaaattgcttagatggagggtccattggtggtgttggaggaattggagatgtgggtggaggtggtg

SEQ ID NO: 26586 - DNA, 352 bp, Glycine max
  Clone ID: LIB3108-022-Q1-K1-D9
catgcttaatcctggacagagagactggacgcgctaccagccatgggagccggtagaggaaatcgaagcacaccctcagagcacccctaaggtttgaaattttacctccttgtgtgttatgttatctgtgtgagatcgtccttacccgcaattgttagacattatgtgatgattgtgggaataaaagtggtcgactggattctgttgagttgaagcagctagccttgctgaacctggaatgaatgtaaaaactaacatatcctgtaagcttttctgaacttgtgtcaatgttccttacttgcactaaaaaactctatgccaccgcaagggtcaccgtccccgaggcctttct

SEQ ID NO: 26587 - DNA, 432 bp, Glycine max
  unsure at all n locations
  Clone ID: LIB3108-022-Q1-K1-E1
ggcgttactgatcctaggcctttccctcatgctccttttggtctcctctgaggtggcatccacgaatacaaaagaggaggcaaatggagtggatgatgccaaatatcccggtggaagctatggagggggttacccacgtcatggcggtggcggttatcctggccatggcggtggcggttatcctggccatggcggtggtggtggctatcctggtcatggtggtggccaccctggtcatggtggcggctaccctggccgtggtggtggatactgtaagcatggctgttgcggtggccggacatacaacggaggttgcagaacgtgctgctataacgctggcgaagctgttgctgcacaaactcaagataagactcacgattaagacgatgcacntctacttaattagtacttttgatattntaatttcatgaa

SEQ ID NO: 26588 - DNA, 345 bp, Glycine max
  Clone ID: LIB3108-022-Q1-K1-E10
cctctgcagaaatgtcagctgccgagctagcccccgccccagcccctgccaaggtgaccaagcgctaaggcgccaaagaagacctccgctccaaagaagcctgcagcccatcctccctacatcgagatgatcagcgaggcgatttccacgctgaaagagcgtggtgggtcgagccagtatgcaatctccaagtttattgaagacaagcataaggctcacctcaccggaaacttcaagaagctccttctcgtccagctcaggaagtccacagctgccggcaagctgactaaggttaaaaactcttacaaagtggctgtgaaaccagctgctgcaaagaagcctact

SEQ ID NO: 26589 - DNA, 346 bp, Glycine max
  Clone ID: LIB3108-022-Q1-K1-E11
tgttcctcgacatgtgtgtctggcggtgaggaatgatgaggagcttgggaggttgttgggtggggttactattgctcatggtggagttttacccagcatcaaccctgtcctgctgccgaagaagactggcaaggagggggtggagcccaagagtccgaagaaggcggctaagtccccaaagaaggcttaaatctgtgctctgggactgttagccgtagaagtcttaaagttgtgctcttaggctgttagctgtagatatatggcgtggatcagctggtctatgcattgtggtttctggtatttgactgtattccatgtttctatggtttagtgttaacatatgttt

SEQ ID NO: 26590 - DNA, 262 bp, Glycine max
  Clone ID: LIB3108-022-Q1-K1-E12
tgttcctcgacatgtctgtctgccggctagctatgatgagtagctctggaggttgtacgcaacgcgatactatcgctcatggcggacgtttacccaacatcaaccctgatcttctgtccatcaagactgtcaaggaggcgatgtagcccatgagtcccaataatgctgctaaccactcaacgaacgcttaaatctttgctctcgaactgttagctcaacaactcttaaacttgtgctcttaggctgttagctgtatatatat

SEQ ID NO: 26591 - DNA, 287 bp, Glycine max
  Clone ID: LIB3108-022-Q1-K1-E2
aagaaaccctagccactctcccggcgtcacgatgcacatcttcgtgaaaaccctaacgggtaaaacgatcacgttggaggtggagtcttcggacaccatcgacaacgtgaaggccaagatccaggacaaggaaggcatccctccggaccagcagcgcctcatcttcgccgggaagcagctggaggacggccgcaccctcgccgactacaacatgcagaaggagtccacgcttcacctcgtcctccgcctccgtggcggcgccaagaagcgcatgaagaagacctaca

SEQ ID NO: 26592 - DNA, 445 bp, Glycine max
  Clone ID: LIB3108-022-Q1-K1-E3
cgcgcgcgcgacggctgaatcgtcaccattggtatcattgaccatgttcaggaccatcttggagaggttgtgtatgtggagctgccagaaccaggtggcacactttccaagaagtctggcttcggagccgttgaaagtgttaaagcaacaagtgatataaactctccaatctcgggggagatcgttgaggttaacataaagctcacagaaacgcctggcctggtcaactcacgcccatacgaagatggatggatgatcaaagtaaagccaagcgatccatctgaattagattccttgatgggtgcaaaggagtacacaaacttttgtgaggaagaagatgcacgtcattaaagcttgaattgaattggctcctagaagtatgtgtgggactgactggtcttcatatgtttatgagcttattaccttcttgacagctttttaatat

SEQ ID NO: 26593 - DNA, 370 bp, Glycine max
  Clone ID: LIB3108-022-Q1-K1-E6
aaaaattattttattaatggacaaatcctattctaagggttatggcaaaaaaaaaaaaaaaggaaaaaaaaaaaaaaaaaaaaaaaaaaaaaaaaaaaaaaaaaaaaaaaaaaaaaaaaaaaaaaaaaaaaaaaaaaaaaaaaaaaaaaaaaaaaaaaagttaactgttttaaagaataaaaactaatataaactcgtaaaacaacaacatttccatttattaaaaactaaaaaattacttccatttccccagctattacaatatcccaaagggaaaaaccctgccttcctccaaaataattgccctctaacaaaattcccttttgcccagttttcttaatttcaaaaaggccaaaacctcttgtatttt

SEQ ID NO: 26594 - DNA, 200 bp, Glycine max
  Clone ID: LIB3108-022-Q1-K1-E8
aacattcattaaaaaaattattttaaccaattttacacacaaccaaaaactccgcaaaacttggcctttcttcccgggcaaggcgaacaaactacaaaaccccttcttaatatttacctttgccaaaaacgacaacgtcctacacaaaccccttatgtgttggaacaacttactaatcaaaccccctttgtttcccaaaa

SEQ ID NO: 26595 - DNA, 322 bp, Glycine max
  Clone ID: LIB3108-022-Q1-K1-E9
ggaagcgctttgtgaccatcgggggagttcccggcaaagagaacacttggttcaagatccagaaaacaggcaagtatgcatacaagctggtgtactgcccaagtgacgagaatgcctgcagcgatttaggcatttactacgacaaggaggccgggaagaggtggcttgctttgagcgactcgccattggaggttatgttcgtcaaacactgatcgtcactactcaacttcaaccctgcctgaactgtttgagcttggcttttgtgttaaatttgtatgcaacctttatgtatgaataaagtgggtgaggatcctttgtagcc

SEQ ID NO: 26596 - DNA, 278 bp, Glycine max
  Clone ID: LIB3108-022-Q1-K1-F1
cacaggcgcagacgcaaacgcaaacgcaaacgcaaacgcaaacgcagagcgtgatccattgacgaagatggtgcagcgtctcacctaccgcaagcggcacagctatgccaccaagtccaaccaacacagggtcggcaaaacccctggtgggaaacttcgttattaaaattccaaaaaaaagggccagggaccccaagggccccgtaattggaaaaagaattaagggaattccacactggagcctgcagagtacaagaagtcaagggtacccaaaaacc

SEQ ID NO: 26597 - DNA, 277 bp, Glycine max
  Clone ID: LIB3108-022-Q1-K1-F10
attggggcctacctgttcttctgtggttgctacgatctgtcctttggaaagaatcactactggctctatgtcttcttccaagcggcagctttcttcgtcgtcggatttggatatgtgggcacctttgtccaaggttcttagcaggccgtgaatggacataactaataaaatcttggagagtttatacttcatagtttcactgctgtcgtcttacaagaacatatatataaagtttgtagcctccttcgatgcccgctatcaccatatgagttactca

SEQ ID NO: 26598 - DNA, 381 bp, Glycine max
  Clone ID: LIB3108-022-Q1-K1-F11
cgcatggggtgtatttttttgccccggggtctcccctctctgtgtctctttctctgattgttgttctcggtcagatcttactcaggattctggagctcatccattcagcacgctatatcgccgtcggtgagaggtataattaaacatttttatagaagtatttatttaatttaatctatctgaattctcaaagcatacccaactttatttaatttgatccatctgaattctgaaagcctacccagcttaccatgttcacttaaattgcttgacgaatcaacttaccgatttgaattgagagcatatcactacttacgtatagctggctagttggttctactgcgtgttaatatttcaatttggtggagtttttagctttta

SEQ ID NO: 26599 - DNA, 356 bp, Glycine max
  Clone ID: LIB3108-022-Q1-K1-F2
cccacgcgtacgctttcttctcataactctgtcgccggaacaggcccaaatccaatggctggagagaagaaactttcgaacccaatgagggagataaaggtgcataagctcgtgctcaatatatacggtggcgagagtggacatcgtcttaccagagccgctaacgcgttggaacagctgagtggccaagcccctgtgttttgcaaatgaaggtacacggatcgttcctttgggattagaagaaatgagaacattgcatgctatgtcactgtcagacgtgacaaggcaatgcaacttttggagagtggtttgaacgtgaaggaatatgaacttctcagaaggaacttcagtgatac

SEQ ID NO: 26600 - DNA, 234 bp, Glycine max
  unsure at all n locations
  Clone ID: LIB3108-022-Q1-K1-F3
cggacgcgtgggcattaatacaggttcgtagtccacgtcttggagacaagttctacagtttgcgtggacaaaagggagttttgggatttctggagtctcaggaaaattttccttttacaagacaacgcattggtgctgatattgtgataaatccgcatgcatttncctcacgacaaactgctgggcaactcctataggctgctttatgaaaggggattgcttgtggtggtatac

SEQ ID NO: 26601 - DNA, 312 bp, Glycine max
  Clone ID: LIB3108-022-Q1-K1-F4
caaacacaaagaaaaaaataacccttagccattacaaccattatggacacctctgctattcagcaatcagcagtcactggtcaaactgctctgaagcatctcaatgagttcgttcgcaagaccggtggcgccggcaaaggtcgcactaacatgcgccgcaccttcaagagtgctcctcatagcatgcggtatggccctgaccgtcccaagtacttgagtgcatgctcggagcaaattacatcatacctgaccggagaatttcctggtgactacggatgggacactgctggattatcagctgacccggaaacc

SEQ ID NO: 26602 - DNA, 344 bp, Glycine max
  Clone ID: LIB3108-022-Q1-K1-F5
cccactcgtacatagaatggtagctagaatttttgcccatcgcaagtcatattaaatgtatgctacaattatgaaccggtattaacttataaataatagttacattctttaaaaaaaaaaaaaaacaaaaaaaaaaaaaaaaaaaaaaaaaaaagaaaaaataaaaaaaaaaaaaaaaaaaaaaacagaaaaaaaagaaaccaaaactaaaaaaaaaaaaaaaaggggcgggccctttaaaaaaaaaaaatttcaaccccattattagaagaaattaatttttttatttggggcaaaaaaaaaaaaaaaaagggggcgggtttaaaaacctcatgattggaaaa

SEQ ID NO: 26603 - DNA, 373 bp, Glycine max
  Clone ID: LIB3108-022-Q1-K1-F6
cggacgcgtgggcgggtcccatatcttcagcgagggtgggctggactacttgggcaacccaagccttgtccacgcccagagcatcctcgccatctgggccacccaagttatcctaatgggtgctgttgagggttatcgtattgctggtgggcccctcggtgaggtcactgacccaatctaccctggtggcagctttgacccattgggccttgctgatgacccagaggcttttgctgagcttaaggtgaaggaactcaagaacgggagattggccatgttctctatgtttgggttctttgttcaagccattgtcaccggtaagggtccattggagaaccttgctgatcaccttgcggacccagtcaacaacaat

SEQ ID NO: 26604 - DNA, 139 bp, Glycine max
  unsure at all n locations
  Clone ID: LIB3108-022-Q1-K1-F8
gnacttcgtaaacttaaattttttaaacgcttttattaatccaacaaaaaatgggcctttgggactaatcaaaaacaaactaagactggcccaaactgaagaaatacaaaaaaatgacttgagatcaagcctaaccacg

SEQ ID NO: 26605 - DNA, 425 bp, Glycine max
  unsure at all n locations
  Clone ID: LIB3108-022-Q1-K1-F9
attggggcctacctgttcttctgtggttgctacgatctggcctttggaaagaatcactacttggctctatctcttcttccaagcaacagctttcttcgtcgtcggatttggatatgtgggcacctttgtccaaggttcttagcaggccgtgaatggacataactaaaaaaatcttggagagtttatacttcatagtttcactgctgtcgtcttacaagaacatatatataaagtttgtagcctccttcgatgcccgctatcaccagaggagttactcatataaagaatctccagccttcgagcagcagttaccattaggaattctcgtgtgaatagtcngcagtcgaagtacatgtactgtggtttacaggaatctattagataggagagcccataaatatcaagattagacagttttgggctct

SEQ ID NO: 26606 - DNA, 434 bp, Glycine max
  unsure at all n locations
  Clone ID: LIB3108-022-Q1-K1-G1
ccactctctcttaattaaattaaaacaaaaaatgtgcgctgccatatccgaagtggaacaagaagagttgctcgaaaaattggaggtgttcaagatcaaaggcagggacaagcatggccgcaagatccttcgcattatcgccaaattcttcccagcacggttggtgagtgttgaggttctgaaaaagtacctggaggagagggttttcccgaagctgatggggaagaggaaattcgcggtgctgtacgtgcacaccggcgtccagaggagcgagaattttcccggaatctccggtctccggtggatctacgacgcgattccggcgaacgtgaaggagaatctcgaagccgtttattttattcacccgggcttgcaggcccgccttttcctcgctacattcngccgcttcctctttaacgctgggctgtatggaa

SEQ ID NO: 26607 - DNA, 393 bp, Glycine max
  unsure at all n locations
  Clone ID: LIB3108-022-Q1-K1-G2
ctattctcacttcaaacttgccaaacatggcttcagaactgtcatcatctaccaattgcgtggcaagcgcaggcacatgtttggcagcctttgccgccctccttctcctcttcctccgcggactacgccgccgacgatacaacctccccccaggcccaaagccctgagccatcataggcaacctaaacttaattgggtgccttccacatcggtcgatccacacgcttggcaaaaaatacgggcccatcatgcacgtatggttcggatcaagctccagggtggtgggctctgccgttgaaattgccaatgccgtnctcaaaacccacgacgccaccctcgtcggcaggccgaagatcgtggtgggcaaatacacaacctacaactactcggaca

SEQ ID NO: 26608 - DNA, 254 bp, Glycine max
  Clone ID: LIB3108-022-Q1-K1-G4
cccacgcgtccggcaaatggcttcctcaatgttctcttcctcagctgttaccactgtcaaccgtgccggtgccggcatggttgctccattcactggcctcaagtacatggctggcttccccaccaggaagaccaacaatgacattacctccattgctagcaacggtggaagagtgcaatgcatgcaggtgtggccaccagttggcaagaagaagtttgagactctttgctacctgccagaccttgatgatgcac

SEQ ID NO: 26609 - DNA, 289 bp, Glycine max
  Clone ID: LIB3108-022-Q1-K1-G5
cagaaacgccgcgttatttgttatcgctcattgcttcaccttttccgcatatgctgcaaggtttgaaatcacaaaccgatgcacatacactgtatgggctgcgtctgtgcctgttggaggtggcgtgcaattaaacccgggccagtcatggtgcgtggacgtgcctgcaggaacgaaaggggcccgcgtttgggcccgaaccggctgcaacttcgacagttcgggccgcggtggatgccagaccggtgactgcggaggtgtactcgacttgaaaacttacggtgcgcct

SEQ ID NO: 26610 - DNA, 362 bp, Glycine max
  Clone ID: LIB3108-022-Q1-K1-G6
cactctctcactcacaatcgtttactgacttttataacctttaaagacagaggcatggacgggcgaaccttcatcatgatcaagacacatggcgttcaatgaggccttattggcgagattattagcagatttgaaaggaagggtttttacttgacagggtctgaaactcgttactggggacgcgccttttgctgagaaccactatgctgatttgtctgcaaagcctttctttagtggtttggtggattacattgtctctggccctgttgctgccatgatctgggagggtaagaatgccgttacaactggacgaaagattatcggatccccaaacccacctcaatgtgagcctggaactattc

SEQ ID NO: 26611 - DNA, 170 bp, Glycine max
  Clone ID: LIB3108-022-Q1-K1-G7
cacaaacttgctgataatttttttcacagatttgtaaacctctaccacaaagggggcttcgggggatgttacaactcgatccagatacactgtatgcattgcttcttcatttactagactaaaatacaactctaacttctccaccataaagaccaacgactacatctacc

SEQ ID NO: 26612 - DNA, 389 bp, Glycine max
  Clone ID: LIB3108-022-Q1-K1-G8
cagagacttcagggaatttgtttccaccactttatatactcataacacaaagggtccattggagaagatgccgagcagaaacagtcccatcagaaggcctgaagaggcaactcaccccgacacgttgaaggcggctttggctgaattcatctcaaccttcatctacgtgttcaccggatcacgctccggcatcgcctacaacaagctcaccgacaacggcgctgccacccctgccggcctcatcttcgccttcatcgcccatgcattcgccctcttcgtcgccgactacgacagcgccaacatctgcggcggacacgtcaaccccgacgtaaacttaggtgccttcgtcggcggaaacataaccttcctccgcggcatccgctacgtca

SEQ ID NO: 26613 - DNA, 358 bp, Glycine max
  Clone ID: LIB3108-022-Q1-K1-H1
gtggaagctgcctatgtttggttgcactgatgcttctcacgtgttgaaggagcttcaagagggtaagactgcataccccaacggcttcatccgtatcatcggattcgacaacgttcgccaagtgcagtgcatcagcttcatcgcctacaagcccccaggcttctaagtgaaaaaaatttgcaaagcatttgtagccgccaccccactttgtttgtttgtacttaaactacattcccatttgtttttgctttttgagatttcatcatcctgtatttttggtttctgttttcggacttcaatggaaattaatggatgagaactaatgaataagctattgcgttgtgttgctttgtttcaa

SEQ ID NO: 26614 - DNA, 195 bp, Glycine max
  Clone ID: LIB3108-022-Q1-K1-H10
attgttatgtgtaggattttggaaaagcttggatttgtgtggcaaaatgaggaaaggatcagagctcaagaaggaaaagagatgttgcaagcttgatgaggatgtgctctcagatctataagtacccctcctcccccattggattgaggtaggaggtctcactccggcccgagtgggggaaggcacattgttggc

SEQ ID NO: 26615 - DNA, 473 bp, Glycine max
  unsure at all n locations
  Clone ID: LIB3108-022-Q1-K1-H11
attgttatgtgtaggattttggaaaagcttggatttgtgtggcaaaatgaggaaaggatcagagctcaagagggaaaagagatgttgcaagcttgatgaggatgtgctctcagatctataagtacccctcctcccccattggattgaggtaggaggtctcactccggcccgagtgggggagggcacattgttggccgtctttctctcggttttggaggaggcacattgngagagcatctacaagtgatttcggagtggagagttcatcatggttcttgtttgtgggtctttggtgagctttgagagagtcatgtaagtggagtttgtaagggttgagtcttattttataatgagtttttggttcggatttgtatacattcaaggatggccaaggcctagaatgggatttgagttcttgaggtgatccttcattggaggttatttaaactttcatcaatgaaatgttttaattg

SEQ ID NO: 26616 - DNA, 370 bp, Glycine max
  Clone ID: LIB3108-022-Q1-K1-H12
attgttatgtgtaggattttggaaaagcttggatttgtgtggcaaaatgaggaaaggatcagagctcaagaaggaaaagagatgttgcaagcttgatgaggatgtgctctcagatctataagtacccctcctcccccattggattgaggtaggaggtctcactccggcccgagtgggggagggcacattgttggccgtctttctctcggttttggaggaggcacattgggagagcatctacaagtgatttcggagtggagagttcatcatggttcttgtttgtgggtctttgttgagctttgagagagtcattgtaagtggagtttgtaaggtttgagtcttatttataatgagtttttggttcgatttg

SEQ ID NO: 26617 - DNA, 363 bp, Glycine max
  Clone ID: LIB3108-022-Q1-K1-H3
ttccatcgtcccttgctataccgcgatcgacacagatgaggttaacatcgacggatacaacggcagctctcgtgcaaccgcaacttcaggccatcagaaccggaaaatccgacacatccgacaatggtcttcgattctcacgaatcttcctaccgttacctgtcttcgtcaccgaacgaatactccgtttagctcctccggcgtgagagcacaggttgctactctggaggaagcaggaaccggagcaactcagaaagtggaagcgccggttgcagtggtgaccggagcttccagaggcattggcaaagcgattgcactgtcattacgtaaagcacgttgcaaggttctggtcaactatgcaag

SEQ ID NO: 26618 - DNA, 397 bp, Glycine max
  Clone ID: LIB3108-022-Q1-K1-H4
cccacgcgtccgatctccgcagcaatggtgaacgttccgaagacaaagaagacctactgcaagagcaaggagtgcaggaagcacacgctccacaaggtcacccaatacaagaagggcaaggacagcatcgccgctcagggaaaacgccgttatgaccgcaaacagtccggttacggtggccagactaagcctgttttccacaaaaaggccaaaaccaccaagaaaattgtgttgaggctccagtgtcagggatgcaagcatgtctcgcagcacgctatcaagaggtgcaagcattttgagatcggtggtgacaagaagggaaaaggaacctctctgttctagatggaatattagaatttgccatttcacacactctctctacctctctcacgtttta

SEQ ID NO: 26619 - DNA, 452 bp, Glycine max
  Clone ID: LIB3108-022-Q1-K1-H5
atcgagataactagaaacagtgtgatgaaaatgaacgtccttgtgttcttcggtgctacaatggtggtagcatggcaatgccatgcgtacaatatgtcccctctccgaatgaacactggctatggcgcccgtactccggaggtgaaatgcgcacgttggaggcttgctgtgcaagcacacaacatatttggctttgaaaccattcctgaagagtgcgtggaagcaacaaacgaatacatccatggggaacaatatatatcagacttcaaaacaggtaaccaacaagcttacttttatgccagagacctctaagtacatcccaaggacacatttgtgttcagtatagatggcaccgaactctataatattccatactacaaaaaacatgcatatggggcggagaaatgaaactcgaccttgtatgatgaatggcttaacaagggcaatgcacc

SEQ ID NO: 26620 - DNA, 446 bp, Glycine max
  Clone ID: LIB3108-022-Q1-K1-H6
cccacgcgtacggctagctaccacaaccaactcatacttggtcattggattggttccctttgggttgtggctttggttattttttttactttaacgtttggttaagggttaatgttccgaaataataaaggaaggttgttaaataaactggttaattggttggaaaattaaaataatatactaggttgttgttgtttcttcttgaagtgaagtatcattatatgaaagaagatcaagaataatgcattataatgtttacaagacagttagcatgttttctatatggatattgagtgggcagaacattgagtgatgtataaaaataaaattgttgcattgtctttttttcgtattagccaattaatacacttttatgaataagtatgtgtgtgttctatgtaaaaaaaaaacaacaccttttatgataaatgggtaaacagggataa

SEQ ID NO: 26621 - DNA, 368 bp, Glycine max
  unsure at all n locations
  Clone ID: LIB3108-022-Q1-K1-H8
cgacccacacgtncgnccacgcttacggntagctacttcaaccaatttatactcgcacattgcatagcttccctttggctgctgcctttgcttatctctgtacctctacgtcttgttcaagctttatgctccgtaatgattaacgaatcctctttaattaacttgataattagttagaagactaaaataatatactaggctgctgctgcttcttcttgacctgaactgtcatcatatgaaagaagataaacaatcatgcatttcaatcgttacaagacagtatgcatgtttactctctggatatcgagtacgcacaacatcgagtgatgcataaaaataaaactgttgcattgactttttatcgtatt

SEQ ID NO: 26622 - DNA, 264 bp, Glycine max
  Clone ID: LIB3108-022-Q1-K1-H9
atcacgcgtacgggtctatacaaatcatcacatctcgacaatatacgacaatagcactgcatgggcttcatggcctacaagacggtagtctgctaaatgtgaatgatccgccaagaaaaggccgcctacagaagaacccgcacattagtacttaacctacatgcgaatacgcctttgctttccgagatctcatcatacataaatatagatatatagatatagacatcaatagaaattaatggattatatctacttaattataga

SEQ ID NO: 26623 - DNA, 378 bp, Glycine max
  Clone ID: LIB3108-023-Q1-K1-A1
cccacgcgtccggcgattttggatcggaacctcttctgcggcgtagcaatgggacactccggcgtttggaattctcacccaaaaaactacggtcctggttctcgcacttgccgagtgtgtgggaatccacatggattgatcaggaagtatggccttatgtgctgcaggcagtgcttccgtagcaatgccaaggaaattggcttcatcaagtatcgctaaaagagctgttgtcacctacggaccaatattatgttctggcactaggatgttttgaagatgttatgtttgaagaaacttgagacttgcttttttcatctattttattatcagacataatgtgtggaacgaagaatacttttatataaattggtttgcact

SEQ ID NO: 26624 - DNA, 393 bp, Glycine max
  Clone ID: LIB3108-023-Q1-K1-A10
cccacgcgtccgcccacgcgtccgcccacgcgtccggaagaagagaatcataagaaagcaagaaagaaaatgggagtggagaagcagttgttgaggcctggcaccggtcccaagccaattcccggtcagaacgtcaccgttcactgcactggtttcgggaagaacggtgacctttctcagaaattctggagcaccaaggatcctggccaggaccctttcactttcaaaatcggccaaggttctgttatcaaaggatgggatgaaggtgtgcttggcatgcaaattggtgaagttgctcgtctccggtgctctccggattatgcttatggtgctggtggctttccttcttgggggatacagcccaactctgtcttggaaatttgaatcgaagtc

SEQ ID NO: 26625 - DNA, 441 bp, Glycine max
  Clone ID: LIB3108-023-Q1-K1-A12
ggtggcactgtggcagaagtcttaggagtgtaaaacagagacgcaaaatgaagacgattctatcgtccgagaccatgaatattcccgacggcgtgagcatcaaggttcacgctaaggttatcgaggttgagggccctcgtggaaaactcgtgcgagacttccaccatctgaacttggacttccaacttattaccgacgatggcggtaaaaggaagctcaagattgattcttggtttggttctcgtaaaacctccgccgccatccgcaccgccctcagccacgttgagaatttgatcaccggcgtcaccaagggataccgatacaaaatgagattcgtgtacgctcattttccgatcaacgctagcattggcaacaacagcaagtccatcgagatcagaaatttcctcggcgagaagaaggtgaggaaagtagacatgcttg

SEQ ID NO: 26626 - DNA, 436 bp, Glycine max
  Clone ID: LIB3108-023-Q1-K1-A2
cccacgcgttcggcggccaaaccctagctacctcttccttaatccctaatctctatttcgggctctctctttttctctgcaaaacaaaaatgtctcacttcggacgttcgggtcccccagacatttccgacacttactctcttctcgttctgaacatcaccttccgtaccaccgccgacgacctattccctctcttcgacaagtatgggaaggtcgtcgacatcttcatccccaaggatcgaaggactggcgaatcgaggggttttgcgttcgtgcgttacaagtatgctgatgaggctcataaggccgttgagaggctcgacgggagaatggttgatggtcgcgaaataacggtccagtttgcgaaatatgggcctaatgctgaaaggattcacaaaggaaggattattgaaacatccccaagatcaaggcgatc

SEQ ID NO: 26627 - DNA, 355 bp, Glycine max
  Clone ID: LIB3108-023-Q1-K1-A3
aaaaaacaatacataaataagaacgaaaaaatataaccatacaattaaataaaaaaactacgagtcatttatgaaatctatggactgatgatacattccaaatcatgaacatgacaagtctcattaattcgcatggatatcaacagcctaactctggttgctttatggtaaccataaaaaaaataccgacttagaagtgccctacctagatcatactaaaagacgatcgatctgttttcatttacaaagaatatacaagactcacctgaggttagacaaaatatgggccgtgagagttctatacctataagagaaaaaataaaaaatgtcagccgctctatacgaaccattgtta

SEQ ID NO: 26628 - DNA, 354 bp, Glycine max
  Clone ID: LIB3108-023-Q1-K1-A5
tcgttcacgcgttcgaccactctttctgggatttttccggtttgacccaaatataaatattttagtttaatgggagaatttatttagtgaaaatataaataaaaattattttaattaaatattttgttttttttgttttgttataaataaaattatttattattggatttttggtattaagttatcttttttataaattttttatgcaccatggtattctgtttctttaaaacttttaattttattaataaggcaaatggtttttttattaaattattggtatgaaaatatatttttttttttgataatttgttttttattttttttatttctgaagatttttttagatttttt

SEQ ID NO: 26629 - DNA, 303 bp, Glycine max
  Clone ID: LIB3108-023-Q1-K1-A6
gcggtcaaagaataatctcacagcaaaagtttcttcttaagataacaaaaacaaaaaaaattaggaagtgcgtacactctgcaatggatgcatgacccaaacacggaaatgcagaaagtggagtttgttactgtggggttccagcgttgagaaaaacctaattaacgaaccaaaaccctaaaatctggaaaaatggaatcgagcgttctggaatggctgggcgtggagataattggcgtgatgagccccgtctcgatctgcatgttccttgtggtcctactggtgtactccctcttctcggcg

SEQ ID NO: 26630 - DNA, 389 bp, Glycine max
  Clone ID: LIB3108-023-Q1-K1-A7
gcgcccacgcgtccgcccacgcgtcctgtctcactgagagaaactctctctctctctgtctctgtctctctagaaacccgattgcacgttttgcaatcgaactcgacaatggccaacagcaacctccctcgaagaatcatcaaggaaacgcagcgtttgctcagtgagccagcacctggtattagtgcctccccctctgaagagaatatgcgatatttcaatgtgatgatccttgggcctacccagtcgccttatgaaggaggcgttttcaagttagaactatttttgccagaagaatatccaatggctgctccaaaggttaggtttctaacaaaaatatatcatccgaacattgataagcttggcaggatatgtcttgatattctgaa

SEQ ID NO: 26631 - DNA, 100 bp, Glycine max
  Clone ID: LIB3108-023-Q1-K1-A8
gttttcctaaaattgtgatgttgatgcatggatggctctcgttcatttgcttgaagccctgcgggatatttaatcgttttgtcattaagattcaacaatg

SEQ ID NO: 26632 - DNA, 260 bp, Glycine max
  Clone ID: LIB3108-023-Q1-K1-A9
agcaattcgaattcccaatccaaaaccctaataccttcaaagaacctagtagtgaatcagtgatggcacctaaggcagagaagaagccagcggagaagaagccggtggaggagaagaagtcgacggtgggagacaaggctccggcggagaagaagccgaaggccggaaagaagcttccgaaggagggaggagccggcggagaaggggggaagaagaaaaagaggaacaagaagagcgtggagacatacaagatattcata

SEQ ID NO: 26633 - DNA, 436 bp, Glycine max
  unsure at all n locations
  Clone ID: LIB3108-023-Q1-K1-B1
gagaaacaccactataagggaagaaccttaaatgggaccatacatgttgtagctggtggtggtggagcaagcctttcagcatttacttccctcaaaaccaaatggagcatctttaaagactatgactatgggtttgtaaaactaactgcttttgatcattcaaatttgttgtttgagtacaagaagagcagagatggaaaggtttatgactccttcaaaatatcacgggattatagagacatcttggcctgcaccatggatagttgcccaagtataacaatggcatcttgattgatgaaatgatgaaagcttcaatgtatccagccgtgttgaagcagtgagttatgagtagacttagatgttgtatgcggcagcaagctgtcaccttgttcaacatggcttangtagaatgcacactcaatttaagctgcgagca

SEQ ID NO: 26634 - DNA, 300 bp, Glycine max
  Clone ID: LIB3108-023-Q1-K1-B10
attatttctctcctttttattcctacattctattccttatcattcaacttttatgggctggggccttttgcacatgcaaggtgaatctcaatttcgtgaatataattttaatctaattgtggaaaaatgaatgctgaatgtgcattgctataagattacaagacaagattggttttttttttgcgcttaattttaattgagcaagagtatattttttgctttacaataatgtggcttgagtgccaaaaccttgttatgggcatatcctcgatttttcttgttatatcttcatttcttttg

SEQ ID NO: 26635 - DNA, 446 bp, Glycine max
  Clone ID: LIB3108-023-Q1-K1-B12
aaaagaataacataggaaatctcataacagaaaatttattgcatttaaaaatcttaaaaaacagataaaaagaaaccaataataattgtttatactttttagatcaacatacttttttttttactttatttgagataaaagagtattaactacattaaacaagtgtcattaaatgacccgtacctcacttatgtatgtttggctgggatgatgaaaataataaagaaaatgaaaataaaaaacatatatttgaattaaaataggacgtaagtcatgtgagtctcatatgaaatttatattatttttttctgtatttatctttccccctaaaccaaatagagtcttaatgtgggactggattcacttatttagagaaagtcttaaatatgaatatagtcatgtaagtttatttattttttcaatttttttccttctaatttttttta

SEQ ID NO: 26636 - DNA, 284 bp, Glycine max
  Clone ID: LIB3108-023-Q1-K1-B2
cggcggtggtagagaccgtggttacggtggtgatggtggttctcgctactctcgcggtggggaaggcggtggatccgatggaaactggagaaattaggcatatgaccctgtaaattagggtttatgattaagttcaattattttaaggtgttgtctgtgtgtggtttaagtttcggtatctgtgttggtttcgtttcgtgttcctgtggttttcgtttttgacctacaattctagttgtgtttatagtcgatcgaatgaaatgatagtaagaaattatcgcatc

SEQ ID NO: 26637 - DNA, 441 bp, Glycine max
  Clone ID: LIB3108-023-Q1-K1-B3
ggaaaacagaaaatatctagtactgagagagattcctgaagatggagttaggaagctcctgtccaataaggagtctttggcctcatgtgacattgcagttcttgttcatgacaggtctgatgaatcctcatggagaacatcgtccgaactcttggttgaaattgctagccatggagaagataccggctttgaggtgccttgcctgatagttgcagctaaagatgatctggattcatttccaatggctatacaagagtcaactagggttagtcaagatatgggagttgaggctcctatacctatcagtgtgaaattaggagatttcaacagtctgttccgtaaaattgtaacggctgctgagcatcctcatttaagcattccataaactgaagctggaagaagccgcaagccgtaccacaagcttattaatcgatctcttat

SEQ ID NO: 26638 - DNA, 183 bp, Glycine max
  Clone ID: LIB3108-023-Q1-K1-B5
gacaaacactacattactagaacggatacttatagcctttcacttcgttctaaatccatcaattcgggatgaatatacggattgcctataccaacaaacacatgaaaatgaaacttctcatttttctacttggatataaatcatatctctctgtttgctataaggtattcatataaaaatgac

SEQ ID NO: 26639 - DNA, 455 bp, Glycine max
  Clone ID: LIB3108-023-Q1-K1-B6
cagaagcgtattactggtttagctttttcaaccaatcttaacatactggtttcatctggtgctgatgctcatctttgtgtgtggagtatagatacatgggagaaaagaaaagcaattccaatacaactacccgcaggaaagtcacctgtttggtgatacacgcgtacagttccattccgatcaacttcgcttattggtagttcatgagactcaattggcaatatatgatgcctctaagatggaacgcattcggcagtgggttccccaagatgttctgtctgcccccatatcatatgcagcttattcctgcaacagtcagttaatatatgctacattttgtgatgccaacattggtgtttttgatgctgatagcttgaggctcagatgtcgtattgctccatcaatatgcttgtcaccggcagctttaagtggaagtcaaggtgtgtatcctcttg

SEQ ID NO: 26640 - DNA, 380 bp, Glycine max
  Clone ID: LIB3108-023-Q1-K1-B7
gcgcccacgcgtccgatcacattactacaactacatgccatcaccatcatccatgggggaagaagataacactatcatacccacattcctcagaaaacctgcagaagaccagaacaacaacaactctcccaccccttctcacaagtctttgcatgttttccgccgcagcaggaggcggtggaggaaggaagtggcagtgaaagatgctgtgcaagaagaagaagatgaagaaaaagaagaaggagaagatgggggtgatgacagagaagagatagagaggaagattcatgcattacagaggattgtgcctggtggtgagtctttaagtgtggacaagctctttgatgaaactgctggctatattcttgctttgcagtacc

SEQ ID NO: 26641 - DNA, 431 bp, Glycine max
  Clone ID: LIB3108-023-Q1-K1-B8
gcgcccacgcgtccgcttattcatccttctcttctgaataatccagatctctttctgcccttttctccgtcacgcttttcgtgaccggatctgtatggatttgatccacatctacacgccgatggtggttttggccgggtctttcatagatctggtgcgtagaggctcagatctacggtaccgaggtacaacagagaatcgatgacaagaacgcagatccgacggtagatccagccgattccgcttgttcgatcgctacagacccctgtatcggatcattaagcagcgtgtctcgcgcgttctacacgtgttgccgatctcggatgttgtaaaattaagttatgatgtgaagctatggagtgggaaatatgtggatgtaggagatttcgggatgaaatggctaaaacgccttgtcgttggggttattgagt

SEQ ID NO: 26642 - DNA, 332 bp, Glycine max
  Clone ID: LIB3108-023-Q1-K1-B9
ctcatattcattccaatgtcaaatcctcaatctaaacaataaccgccgccagcccggccgcctgcagcggcgagccccctcctccctgcaaataaaccgcgccgtcgagtggaacgtcgccatccccctcctctcgccgttggcatcatctccgacgccgatcgagctaaaaccgccgtaagagccgccgcagagggagccggagaaggtcaccttgtcgttcaagaagtggcagcatcctgcggctcccttctgttacgagcccgctccaatggtgccgccctttgttcctgtgtagatgaacgaacgagagacgtttaagatgctatcta

SEQ ID NO: 26643 - DNA, 406 bp, Glycine max
  Clone ID: LIB3108-023-Q1-K1-C1
cccacgcgtccgcccacgcgtccgcaacactttccacttgtctccgaattagttatcttgagaaacattattcccattgctatatattatggctagcatgaaggttacatgggtggttgtgatcatgtgcatggccgtggtgggtgcaccgatgatggcgcaagccatgacatgcaatgatgtgacggtgaacatggcacagtgcctatcctacctgatgcagggaggaacaccttcaacactttgctgcagcggagtcaagaacattcttggctctgctgtcaccaccgttgacaaacaaactgtgtgcaactgtctcaaggcggatgctgctaggtacaacatcaatgaccagtatgctcaggcactccctggtttctgcaaggtcaatgtcccttacaagatc

SEQ ID NO: 26644 - DNA, 439 bp, Glycine max
  Clone ID: LIB3108-023-Q1-K1-C12
caaaaaggaaagctttgaggtttgttggacattttagagtggtgagaggatggtgggtgttatttcgttggtaacaggaatggctggtccaagtgggtttggatcagcttcaactgcagaacaggttactgaaggagttgatgccagcaacctcactgcaattatcacaggaggagcaagtggtataggattggagacagcacgagtgttggctcttcgaaaggtccatgtcatcattgcagtacgaaacatggtgtctgcaaaagaggctaaacaacaaatactagaggagaatgagtctgcacgagtggacataatgaagctcgacctttgctcagtgaattctattagatcatttgtggacaacttcatagctcttgatcttcctctcaacattttaataaacaatgcttgagtgatgttcttgccattcaagctc

SEQ ID NO: 26645 - DNA, 437 bp, Glycine max
  Clone ID: LIB3108-023-Q1-K1-C2
cccacgcgtccgcccacgcgtccgcccacgcgtccgcaagtagttgagaactaagaagaaggaaatggcttcctcaatgatctcctccccagctgttaccaccgtcaaccgtgccggtgccggcatggttgctccattcaccggcctcaaatccatggctggcttccccacgaggaagaccaacaatgacattacctccattgctagcaacggtggaagagtacaatgcatgcaggtgtggccaccaattggcaagaagaagttcgagactctttcctacttgccagacctcgatgatgcccaattggcaaaggaagtcgaataccttctaaggaaaggatggattccttgcttggaattcgagttggagcacggtttcgtgtaccgtgagcacaacaagtcacctggatactatgatggacgctactggaccatgt

SEQ ID NO: 26646 - DNA, 395 bp, Glycine max
  Clone ID: LIB3108-023-Q1-K1-C3
gaaatattaagtggaagagaaggaagcgaactaaatggtgggcattgtcactgccacttggatttgattcgtgtgcacatataacgtggggcatggcctacaccctttccaacactctcccactctcactcgccttcttcccagaccgcaccctccttcatccaccctacacacacctcttcctgtctcgccccctaagattcaaaagtctttgcgtcgtcaatctcaagagacctgttcccccgctaaaagcatcgatggcggagaccaacaacaacgttgtcgtcgaggtcttccaaaaagaggatcttgccgtgtccctggccaaatacctcgccgatctatccaacaaattcacttccgaaagaggggctttcactgtctgcttgtctggc

SEQ ID NO: 26647 - DNA, 417 bp, Glycine max
  Clone ID: LIB3108-023-Q1-K1-C5
atcatcatggccacctctgctattcagcattcagcattcgcaggtcaaactgctctgaaggagctcaatgagttggtccgcatgaccggtggctccggcaaaggtcgcaccaacatgcgccgtaccgtcaagagtgctcctcagagcatttggtatggccctgatcgttccaagtacctgggtccattctcagagcagatttcgtcatacctgaccggagaattccccggtgactacggatgggacactgctggactatcagctgacccggaaaccttcgccaggaaccgggagctggaggtgattcacagcaaattggccatgcttggtgcacttggctgcaccttcccagagatccttgagaagaatggcgtgaaattcggcgaggccgcgtggttcaaagctggttcacagatc

SEQ ID NO: 26648 - DNA, 449 bp, Glycine max
  Clone ID: LIB3108-023-Q1-K1-C8
gcgagtagttgagaactaagaaggagttgcaaatggcttcctcaatgatctcttcccgagctggtaccactgtcaaccgtgccggtgccggcatggttgctccattcactggcctcaagtccatggctggcttccccaccaggaagaccaacaatgacattacctccattgctagcaacggtggaagagtgcaatgcatgcaggtgtggccaccacttggcaagaagaagtttgagactctttcctacctgccagaccttgatgatgcacaattggcaaaggaagtagaataccttcttaggaagggatggattccttgcttggaattcgagttggagcacggtttcgtgtaccgtgagcacaacaggtcaccaggatactacgatggacgctactggaccatgtggtaacttgcctatgtttggttgcactgatgcttttcaggggtt

SEQ ID NO: 26649 - DNA, 441 bp, Glycine max
  Clone ID: LIB3108-023-Q1-K1-C9
cccacgcgtccggtaatggcagcgtcactacaagcagcagctactttcatgcaagccaccgagttgagcaggagcaacactttgcagcaaaagtctactcagtccatttccaaggcttttggtttggaacctgttggagctaaaaaggtcacatgctcccttcaggctgatcttaaggacttggctcacaagtgtgttgatgctaccaaaattgcaggattcgcccttgccacctctgccctcgttgtctctggggcaagtgctgaaggtgttccaaagaggctaaccttcgacgaaatccagagcaagacctacttggaagtgaaggggacaggaacagcaaaccagtgcccaacaattgatggtggattggactcatttgccttcaagccggggaaatacaatgccaagaagttatgccttgagccaacttcattcaca

SEQ ID NO: 26650 - DNA, 421 bp, Glycine max
  Clone ID: LIB3108-023-Q1-K1-D10
tcgcccactcgttctttagataactttatacagtttgatgaaaatgaatgtccttgggttctgggttgctacaattttggtagcatgtcaatgccatgcgtactatatgttccctttccgaatgaacactggctatggtgcccgtactccggaggtgaaatgctcaagttggatgcttgctgtggaagcacacaacatctttggctttgagaccattcctgaagagtgcgttgaagcaacatatgaatacattcatggcgaacaatatatatcagactccaaaacagttaaccaacaagcttacttttatgccagagacctctaagtccatctcaaggacacatttgtgtttaatatatattgcaccgtactctctaatattccatacttacaaaaacaatgatattgggtggaaaaattt

SEQ ID NO: 26651 - DNA, 450 bp, Glycine max
  Clone ID: LIB3108-023-Q1-K1-D11
gtgaaatggctggttcaattggaagcggagggaacacaagcacgggtgtggagtggcacgtgcgacctccaaaccctaagaatcccatcgtcttcttcgatgtcaccatcggtaacattcccgccggtcgaatcaagatggaactcttcgccgatattgcccccaaaactgccgagaatttcaggcagttctgcactggggaatacaggaaagcaggactgcctgttggttacaagggttgtcaatttcatagagttattaaggattttatgattcaggctggtgattttgtaaagggagatggtagtggatgtgtttccatctatggactcaagtttgatgatgaaaactttacggccaaacacactggtcctggccttctgtcgatggcaaatagcggacaaaataccaatggctgtcagttctttataacatgtgcaaaatgtgact

SEQ ID NO: 26652 - DNA, 429 bp, Glycine max
  Clone ID: LIB3108-023-Q1-K1-D12
cccacgcgtccggattgttgtgactcgttcttcttcgtcgttatcttcttcttttgttgtgtgtgtgtttgttttttctctcacctgaaaatgtcttgctgcggtggtaactgtggttgcggaagcgcctgcaagtgcggcaacggctgcggaggctgcaagatgtacccagacttgagctacaccgagtcaaccaccaccgagaccttggtcatgggagtggcaccagttaaggctcaattcgagagtgctgaaatgggtgttcccgctgagaacgatggctgcaaatgtggagctaactgcacctgcaacccctgcacttgcaagtgaggtgttggagagctaaagcttcaagcagagatggcccttataaataatgataaaaactatatgtagtttcaaaacttcaaaattatttagtatgtatta

SEQ ID NO: 26653 - DNA, 432 bp, Glycine max
  Clone ID: LIB3108-023-Q1-K1-D2
aaaatctagaacagcatcagaatcaatcagcatattctgtcttcttcttctgaaaacaaggatgcctcgcggtggtggcggtagctccggtggcggaagatctgctcattcagctcgaagtcatgcttcacggccagttaaccatgctccacctccagctcctgctcagagtgacaatcgtggatctctctttgggactgtagctgaaggattggcttttggttctggaagtgctgtggcacacagggctgtggattctgtattcggtcctcgaactattcaacatgaagtagcagctactgggcctcctcctgcttctgctgctaataagctgggcggtgatgcatgcaatgttcacgcaaaggctttccaagattgcctgaacagctatgagagtgacattagcaagtgccagttttacataaacatgct

SEQ ID NO: 26654 - DNA, 427 bp, Glycine max
  Clone ID: LIB3108-023-Q1-K1-D3
cccacgcgtccgaccaaatccactaatggctgccaccgcttccttacaccgtctttctcggcttcgattcatcgccaaaccccaacctttcctatctcctcattcaacaccatcccatttttctctcacccccaaaaccaagaaaccgaatcgattccgattccgattcctctcaatggctgcggaacccaaggaatcgccttccaacaaccccggtcttcacactacccctgacgaagccaccaagggttacatcatgcaacaaactatgttcagaatcaaggaccccaaagtgagccttgatttttattctcgcgtcttgggcatgtctttgcttaagagattggattttccggagatgaagttcagcctgtacttcatgggctatgaggatacaacaaaagctccaagtaatccaattgataaa

SEQ ID NO: 26655 - DNA, 395 bp, Glycine max
  Clone ID: LIB3108-023-Q1-K1-D4
gtttaaagcagagagataggagcataggttcatatcatggctaccattgttctccatcgagtcccgagaaagatcaggaagggccactcctccacttcacaccttatcatcagtcccatttatgtgggaacaagtgcccggaaaaccaatgccatgcagtgcccttgtgtccttctccaaccccaagtgcttggaactccctcccatgttgttcacaccttctcccgccactgtctttaaagtttccagcaacagatttcggtctccatctttcagaatgagcgccaattgctatggttctgatacaaaggtgcttggtgccatgtttctcaccaaagccaatgactacacctgtgttggttcttggagaaaaaaaaaccttcaaactcaataaa

SEQ ID NO: 26656 - DNA, 452 bp, Glycine max
  Clone ID: LIB3108-023-Q1-K1-D5
caaaaccctttcccaaaaaaataaaaaataaaaaatggaggaatccaaattcggccaaaggcgccagggaaagcgagttcgcgacgagtcggactcggtcctcaactcgcccgactcgttaaagcatccccgagccgagtctaacttgtccgagtctctccgagttgactcggacgagtttgaactcgcgcggctcgacccggttcttctcaacatgctgaatgacgcggagaatgtggcggagcgtgaacccaccgtgcttgactctgttattaagagtttcgaagaagaaatactttctccggttccgaacccgaacctagcatccgaggcagatgtgtttaagccgaacctagggtacttattggaagcatccgacgacgagctatggttgccgccgacggtggcgccaagcgaggatgtgttgaaacccgaaacagttgattcggatc

SEQ ID NO: 26657 - DNA, 391 bp, Glycine max
  Clone ID: LIB3108-023-Q1-K1-D7
gcgaaatcactctcatccaacttcatttctctctttccccagttgccacatctgaaggacaccgtcactcttgcgatgtaattactgagtacttgaggatggctccttttgcttttgcaacattgccctcttctcacatctgccgcctcccaaagcccacaaacttgaagtttcgagttcgctgccctactgccgcgtcttctccttcttcggtttccactacatcaaaagctgctggctttgatttgaagacatactgggccaacctaatggtgcagatcaatcagaagctggacgaaactatcccggttcagtttcctccgcagatatatgaagctatgaggtattcagtccttgccaaaggtgccaagcgagccccacctgttatgtg

SEQ ID NO: 26658 - DNA, 449 bp, Glycine max
  unsure at all n locations
  Clone ID: LIB3108-023-Q1-K1-D8
cccacgcgtccgaattctctcatttttcatttttcaaccaagaaaagcancaacgatgtcgggtcgcggaaagggtgggaagggtttatgaaagggaggagcaaagaggcatcgcaaggtgctccgcgacaatatccagggaatcacgaagcccgcgattcggagactggcgagaagagaatcagtggtttgatctacgaagagaccagtggcgtgctcaagatctttctcgagaacgtgattcgcgatgccgtgacgtacacggagcacgctaggagaaagacagtgacggccatggatgtcgtttacgctctcaaaaggcaaggaaggactctctatggtttccgaggctgagggtttggccttctttggtggcttttggtttgtgtaaatggaaagaatttgtgttttgtagtgattatatatgtaccttggattatcttctgctc

SEQ ID NO: 26659 - DNA, 434 bp, Glycine max
  Clone ID: LIB3108-023-Q1-K1-D9
gaacgatttgatggtttggaatgcatttcccaagcaacgagtcttcggttcgaaaccagcagagagagagaagaatcagagaatggcaactatgactggtgtgagcctttcatgccccagggttttcttcaacgcatcagcctcaccgcaaaacgcgcatgctgtaaagttctcacttccacccagccaagcagtgcgaccgggtagtatcaagttgggtcgcgtgatgaggatccgacccgttcgcgctgcgcctgagcgcatatcggagaaggtggaggagagcataaagaacgcgcatgaggcgtgcgccggcgatccgactagcggcgagtgcgtggcggcgtgggacgaggtggaggagctgagcgcggctgcgaaccacgccagggacaagcaaaaggaaaaggactccgacccgctcgagaattact

SEQ ID NO: 26660 - DNA, 258 bp, Glycine max
  Clone ID: LIB3108-023-Q1-K1-E1
gcaatgcatacgaacacccttactcatcattttcatttttcctccatatacgacatctccgttaacggccatgctatattggcacatcggaacataacatgtatgttacacctgttcctcctatcatgactactctctttgaccgaacacctcttattcatccacacaattcatccctttttccgactctctacataacgcaacgcctataactcattgtacacctacaaacaccgtatcaacttctctatcaatcaa

SEQ ID NO: 26661 - DNA, 383 bp, Glycine max
  Clone ID: LIB3108-023-Q1-K1-E11
cttcagtgtagtctgtaatcatgtcaggcaagtatatcatttctgctattcttggatcatgtggagttgcatgggtttgtgattattatgtttcacacaaaaagctatttggaggttctacccctggaactattacaaacaatgagtgggcagaagagactgacaaaaaattgcatgcatggcctcctactgccggtccaccagtggtcatgaatcccataagtcgccaaaatttcattgtcaagtctctgcgctgagtaataatttttgttgattgattttgagttaattggtgcttgctcatgccatatgcttccataaatgatgataatgcttgaggtaaaactcttacagttcaattagtgctttgaactttaaacatg

SEQ ID NO: 26662 - DNA, 225 bp, Glycine max
  Clone ID: LIB3108-023-Q1-K1-E12
cctaaacttactcaaagatgatattttgctttaaaacacgcttaacctttcgtggcccagggaaacttgcaagtccacagagcttatcatcactgacatatttgtttcatttcgctacactgacttgttttctaactttaacaaagtcaatgagccgataattcttgcgaagttactattgactacactaacctctgtcgtacatcatgttttataaatgaacta

SEQ ID NO: 26663 - DNA, 397 bp, Glycine max
  Clone ID: LIB3108-023-Q1-K1-E3
cttgcaccctttcacgctcaagctaaaattaaagtcacttactgcgataagaaggcagacgatcctgtgaaggtgtctggagttgaaatatcaccagaccctgtggagagtggcaagcctgctacctttaagatctcggctacttctagtaaagctatttatggtggagaagttgtaattggagtttcatacgttggggtgcctgtccatactgaaagaattgatctctgtcatgaagtatcctgtcctgttgccaatggcaattttttgatttctcacacccaaacattgccttcgattactccaccgggaccctactctttgaagatgacactgaagaatgatcgggacgaggtgttaacttgccttaagtttaaatttaaaattggctttggat

SEQ ID NO: 26664 - DNA, 357 bp, Glycine max
  Clone ID: LIB3108-023-Q1-K1-E4
ttgaacagactgaaagcccttcatactatttatgtcttcactacgatcaaggaattaaggagagaggtgtctttcagggagtgcatgacatattccatggttcacctgacaggttgcggtgtccagatgaaccaaggttaaacaacattggattcatagggaaaaacttggatgctaacgacttggaatatgggattcaaggcccgtttactctgatactaagaatttcactacagggctttacttttatctctttcgtccatatgatacacgttgaagatatacgagtgtgcctatcttccatgtagaactctattctgatcgactggatttttagtggcaaaaacgttccatttc

SEQ ID NO: 26665 - DNA, 347 bp, Glycine max
  Clone ID: LIB3108-023-Q1-K1-E5
aaaaaaaaaaataaaaatacaaataataaattttcaaatttcttaataaataaaaaaaataaaaaaatggtgccacttaaaaaaagagccagttccaacatttccttctccatttattgtcacttattccttttcttatctctccccaccattattactatctatgtcatttcttccttttcttacaacaattctatattcctttgcatccatctttatcctccacttctttttaattaaatcttttattctctttcttcctccataccttttttaatctcccattgttattaaaatatatcttcctttttttaatatgtttatttcctttcctttttataattttt

SEQ ID NO: 26666 - DNA, 429 bp, Glycine max
  Clone ID: LIB3108-023-Q1-K1-E6
caaatatggaatctgaagcactgatatggggtgacaaactcatactgaagggattgtcagggcatgggtttcatggagcactaccggaagaaaggaagctaggccagaagttcgtggtagatgttgatgcatggatggatctgaaagcagctggcaaatctgatcacttatcagatacaattagttacacagatatatatgatatagctaaggaaattcttgaagggtcacctcaaaaccttctggagtcagtggcacaaaaaattgcagtgactactctgacaaatcataagcaaatatctgctgttcgagtgaatgttgaaaagcctcatgtggcagttcaaggtccacttgattacttaagcgttgagatacttatacgcagaatcgatttggtagaatagaaatttcataggtttgttctctctg

SEQ ID NO: 26667 - DNA, 134 bp, Glycine max
  Clone ID: LIB3108-023-Q1-K1-E9
gaaatacattacttattttaaatcatctatttatcaacatgtcaccgtttctaggccatcggttacttttatgaggcagagattcccaactcttactggtgtcaatcttccatgccccacttttctcttcaacc

SEQ ID NO: 26668 - DNA, 400 bp, Glycine max
  Clone ID: LIB3108-023-Q1-K1-F1
gccacgcgtacgagaagaacaagtagtggtgaactaataaggagaagcatatggcttgctcaatgatctcttgcccagctggtaccactgtcaaccgtgccggtgccggcctggttgctccattcactggcctcatgttcatggctggcttccccaccaggaagaccaacagtgacattacctacattgctagcaacggtggaagagtgcaatgcatgcatgtgtggccaccaattggcaagaagaagtttgagactctttcctacctgccagaccttgatgatgcacaattggcacaggaagtagaataccttcttacgaagggatggattccttgcttggaattcgagatggagcacggtttcttgtaccgtgagcacaacagggcaccagtatacta

SEQ ID NO: 26669 - DNA, 365 bp, Glycine max
  Clone ID: LIB3108-023-Q1-K1-F10
tcgatttcattgatttctccctcttcgttctctctcagtgaccagagacagatgaggggggagggggctaagcgaaacgctgtcgttgcggcactcgcggcgttggtgctactcgcggcgagtgtggcggtggatgctcaggagaactcggacgtgaagacgctggtgaagtacaagcacgggaagaagtactgcgacaaaggatgggaatgtaagggctggtcaatttactgttgtaacctcaccattaccgattattttcagacctaccagttcgagaatctgttcttcaagcggaactcgccggtggcgcacgcggtcggattttgggactaccactccttcattgccgtcgtcgtgctttt

SEQ ID NO: 26670 - DNA, 412 bp, Glycine max
  Clone ID: LIB3108-023-Q1-K1-F11
cccacgcgtccgcccacgcgtccggagagagaaaaaatggcagagggtctcgttgtccgcggaaccatgcgcgcccacaccgacgtcgtgacggcgattgccactcccatcgacaactccgacatgatcgtgacggcgtcgcgcgacaaatccatcattctctggcacctcaccaaggaggacaagacctacggtgtcccccgccgccgcctcaccggacattctcacttcgtccaggacgtcgtcctctcatccgacggtcagttcgccctctccggctcctgggacggcgagctccgcctctgggacctcgcggctggcacctctgcccgccgcttcgttggccacaccaaagacgtgctctccgtggcgttctccatcgacaaccgtcagatcgtgtcggcctctcgtg

SEQ ID NO: 26671 - DNA, 133 bp, Glycine max
  Clone ID: LIB3108-023-Q1-K1-F12
caattattaaggtgaagataatttcggctctttacttgtaaagaatgaaattttgatatggtagatttagttgatcaatataattattgttttaatttaattccttgaattaatttaattattgttcttcgac

SEQ ID NO: 26672 - DNA, 221 bp, Glycine max
  Clone ID: LIB3108-023-Q1-K1-F3
attcgacccaacgacgctttaaatacttattatctctggttcaattacaaactgcaccaattggggtggcatttgaccatgagaaccaataataatattgaacttttctttactactaagttaatcttttctattcattatacaaaaaagacatctatggtcaactaattcgttatactaaaaaactattcatttctgctttaaacatttaatattacctt

SEQ ID NO: 26673 - DNA, 395 bp, Glycine max
  Clone ID: LIB3108-023-Q1-K1-F4
ctgcatctgcactaaaatatactattttgttgatttgtttttctgtttctgtcaatccttgcgaaagtctgcagaaaaaatgtcaaaagcaaacgcaaagaacaaatccccctccaccgagctccaccctccttacttcgagatgattgcggatgcgatatcgtccttgaaagaccgcacgggttcgagccagccagcgatagccaagttcatcgaggacaagcacagcaaagtgctccctcccaacttccggaaacttctctccgttcagttgaagaaactcgtcaaatcggagaagctttacaaggtcaaaaactcttacaaactttcttccgccacggacaaagagacccagaagaataccgaaaccgagcccaaacagaaggttgaaaaga

SEQ ID NO: 26674 - DNA, 443 bp, Glycine max
  Clone ID: LIB3108-023-Q1-K1-F5
agaacaagtagttgagaactaagaaggagaagcaaatggcttcctcaatgatctcttccggagctggtaccactgtcaaccgtgccggtgccggcatggttgctccattcactggcctcaagtccatggctggcttccccaccaggaagaccaacaatgacattacctccattgctagcaacggtggaagagtgcaatgcatgcaggtgtggccaccagttggcaagaagaagtttgagactctttcctacctgccagaccttgatgatgcacaattggcaaaggaagtagaataccttcttaggaagggatggattccttgcttggaattcgagttggagcacggtttcgtgtaccgtgagcacaacaggtcaccaggatactacgatggacgctactggaccatgtggaagctgcctatgttttgttgcactgatgcttct

SEQ ID NO: 26675 - DNA, 432 bp, Glycine max
  Clone ID: LIB3108-023-Q1-K1-F6
gatcgagataactagaaacagtgtgatgaaaatgaaggtccttgttttcttcgttgctacggttttggtagcatggcaatgccatgcgtacgatatgttccctctccgaatgaacactggctatggtgcccgtactccggaggtgaaatgcgcaagttggaggcttgctgtggaagcacacaacatctttggctttgagaccattcctgaagagtgcgttgaagcaacaaaggaatacatccatggcgaacaatatagatcagactccaaaacagttaaccaacaagcttacttttatgccagagacctcgaagtccatcccaaggacacatttgtgttcagtatagatggcaccgtactctctaatattccatactacaaaaaacatggatatggggtggagaaatttaactcgaccttgtatgatgaatg

SEQ ID NO: 26676 - DNA, 337 bp, Glycine max
  Clone ID: LIB3108-023-Q1-K1-F9
caaaaccgacgtatcttgtggtcgtatgccttgcactcattgcatatgtttggaacaccgtggtcttctgataaacactgatatcgactccttcttttgtcgctcgactacttgtccatcaatatactctttctgctctatccttcaactatgatgtgatcgttccatttacctcttcacttacacctgtccctcgacctcaaaagtaatctatagatatacatacagcacctttacatccccctaattttcttttgccccaccatttatcgttttggaggatccattgacacggctgcacttcttgattttggtgattcgggtcatgatttgatcg

SEQ ID NO: 26677 - DNA, 356 bp, Glycine max
  Clone ID: LIB3108-023-Q1-K1-G1
gcgcagaaagagaagcattagcaaaagcaagaattactagtctaagcagaaatggcctcttcagtgatggggtgtgtggccctcaaacctgcccctttcactgttgagaagtcctcatttagaggccttcccttcctctcaaggaactcctcttcattcagagttgttgccagtggtggcaagaagatcaagactgacaagccttatggaatttatggtggcatggctttgagggaaggagttgatgcatctggcaagaaaggaaagggaaagggcgtttaccattttgtatacaaatacggtgctaatgtctatggttacagtcctatctactacaccaatgactggtcttcaac

SEQ ID NO: 26678 - DNA, 427 bp, Glycine max
  Clone ID: LIB3108-023-Q1-K1-G10
gtttattcagcatatgtctcaaaggcccacgattcctcactcttcttccatagggtgcgggcttcactctcatctcctggtctccagtgagatgaaccctagctccaattggtcccattagttacctctttcctgcatctcatatatcccattctttctcattcacacagcatcatgggcgtcaaaggttttgttgaaggaggcatcgcttccatcatcgcaggatgttccacacacccacttgatctcatcaaggtccgcatgcagctccagggtgaaaacaatttgcccaaaccggttcaaaatctccgaccctgcttaattatattattacatcaagatctatcctggactatgaggatgatggaagctattttgtgtcgttataataaactattcttttatatctgcattcatttgtaataaa

SEQ ID NO: 26679 - DNA, 460 bp, Glycine max
  Clone ID: LIB3108-023-Q1-K1-G11
cccacgcgtccgggaaatgaacggtgagtttctgaaaaagatgtttgagaagattgattgggaggcttttgttgatgcatcacgagcaatgggatacaccgagctacctgaggaggccgactcttccatgctggattctgatgaatttctgaacaggtttcaccatgctctcttggaactccaccttgaagaaggtgtccttgtttgccctgagaccggacgtcgctttccagtcagtaagggcattccaaatatgcttcttcacgaggacgaagtctgagttttgtttttaatcatcaccttcacctatttagtggcactaggtttattgacactctatttaagaatgctggtaagggaactgcaatcaaaatttatagttgttgtgggcgtcaatattatcttccttttgtcgacaaatgttgtatcctttggctgggatatgctggcataatttttg

SEQ ID NO: 26680 - DNA, 205 bp, Glycine max
  Clone ID: LIB3108-023-Q1-K1-G12
gaaaaaactgtaagtgaaagtttctgtctcacatacattaattgctggaaaaatatcgtacgcatcgatatgaaaagaaaatatttgatacgcgaagacataattgaatgtatttttcaattatttctataagataaaatctatctatatcgattttatcttatagaaataattgaaattgaaatgaattttttcttgtattcgg

SEQ ID NO: 26681 - DNA, 400 bp, Glycine max
  Clone ID: LIB3108-023-Q1-K1-G2
gtgaaagccgccggagcgttggggatggtgctgtccaacaccgccgttaacggacatgagctaacggcggatgctcatttattaccgggcacctcagttgtgctgaatgccggtgacgctattaaaaagtatttggtttgagatgcgaaaccaacggtgaagattttttttgagggaaccaaagtggggattcatacatcggcggtggttgctgcgtttagctcaagaggtgccaacttgatcacgcctcagatcctgaagccagatctcatcgcgccacgtgtcaacatgctaacggggtggtctaaagccgtgtggtccaccgtgttgtccgtagataacaggcgcgtggatattaacatcatctgtggcacctacatgtcgtgccctcacgtgagcg

SEQ ID NO: 26682 - DNA, 425 bp, Glycine max
  Clone ID: LIB3108-023-Q1-K1-G3
gcggtgaaggccgcgagaaacctcgccaagttgtccctcttcaggcaattctacattgttgtgggtgggggcttgtacttcacccgcattgtggtctttgctttgaagaccattgccgcttataagtaccagtgggtgagtaatctagctgaggaggccgccagcctcgcgttttatgtcgtcatgttttatatgtttaggcctgtggagaggaatgagtactttgtgctcgatgaggatgaataagaggccgctgacatcgcgctcaaggatgaagaatttgaaccttgaaagaatgaaatatgttcgcttttaccgaatttcagtgcaatatggtttcatttccggatgacatggaaaatttgatgtttagagcaaagtgaagcatgcaatttatcaaaatgctgcctggatccatttttctt

SEQ ID NO: 26683 - DNA, 448 bp, Glycine max
  Clone ID: LIB3108-023-Q1-K1-G4
gcataatcaaatcaaccatggctaccctcattgctcccatcaccttttcgcctggtttagatgcagaagctcttagaaaagctttccaaggatgggggactgatgagaagaccgttatagcaatattgggtcacagaaatgttcatcagaggcaacaaatcagaaagatttatgaggaaatttaccaagaggacctcatcaaacgcctagagtctgagctctctggtgactttgagagagctgtgtaccgttggatgctggaacctgcagatcgtgatgctgttttggccaatgttgccatcaagaatggcagcaaaggttaccacgtgattgtggaaattgcttgtgtgctttcagctgaagaggtcttggcagtgaagcgtgcctatcacaaccgttacaagagatctttggaagaagatgtagctactaataccacttgtgacat

SEQ ID NO: 26684 - DNA, 204 bp, Glycine max
  Clone ID: LIB3108-023-Q1-K1-G5
gcgcttacaccttttatctcaagcgtactctcttttctctttttacctttatcccttctttaggggcatggtctcttataaatgctgcccaggcatctcttttcttcttataaaacctttatatcattattttttctcatatacattcattttaatcatcatatcattaatatttattctttaatttaccaataataccttatt

SEQ ID NO: 26685 - DNA, 444 bp, Glycine max
  Clone ID: LIB3108-023-Q1-K1-G7
gttctgccgcaaaaaaagatcgtgatgtcatggaaaagggaattaaggcttttgtttcttgcatccgtgcttataaagagcatcactgttcctatatttttaggtggaaagaacttgaaattggtaaattggctacgggatttggcttattacaacttccttcaatgccggaggtaaaacaccactcactttccacggatggatttgagccagttgaagatatcaatttggtggacattaagtacagggataaatcacgggagaaacaaaggaagaagaacctgcaagcaaagaaagaagccaaagagagagagccaaaacctcaaaaaccgaagaaaaccccaattgcacccactgccacgcggaagaaaacagcccgacagagacgtgctcagcagacaatggaagacgaggaagagttgatgcatgaataccgcttattga

SEQ ID NO: 26686 - DNA, 222 bp, Glycine max
  Clone ID: LIB3108-023-Q1-K1-G8
cccacgcgtccgggtttttatttggatgagaaaagaaaatagaaaagggaaatgggttacgtcctatttttaagtgaaaaaaaaaaaaaaaaaaaaaaaaaaaaaaaaaaaaaaaaaaaaaaaaaaaaaaaaaaaataaaaaaaaaaaaatgggcgtaatatataatatatttatattttcgcataaataaattaatctttatttaatttaataaaaattta

SEQ ID NO: 26687 - DNA, 438 bp, Glycine max
  Clone ID: LIB3108-023-Q1-K1-H1
gcagcagtaatttgattggtaaagggcattttggagagaggggagggagaaagatattcggatcgaggccttcttataaaaacacgagtaaaacgatatgtcgggtaagggtttgaactaaattgtgagaaacaacagagaaagtaagcaagaaaccgaagagaagaaaaaatgccgtgcctcaacctcaacaccaacgtgtccctcgacggcgtcgacacctcttccatcctcgccgaagccacctcctgcgttgccaacatcatcggcaaacccgcggcctatgtgatgattgtactgaaaggatcagtacccatagcttttggtgggaatgaacagccagcagcttatggagaattggtgtccattggtggtcttaaccctagtgtaaacaaggaacttagtgctgcaattgcttcaattctggaaaccaaattg

SEQ ID NO: 26688 - DNA, 418 bp, Glycine max
  Clone ID: LIB3108-023-Q1-K1-H10
tcgtccactcgtccggggagcccctactgaatcctcaacctggccaaccatctgggggtagcagaggtgataatagtggaaatcactcacatttttggagtgtgcggatgagagagaagtacggattgaaccatggtgataagagcagctaccaaccatgaattccaggcaatgagtgctactagccatcaagcaattcaatgctgtgttgacatctgagtatatgtgtatatctttggttttaatgttttgttttactttcatttgttctcaggaaaatctatgatgtaagcaatataatggtggtagtatatgtattttaaattatactagttattgattgaagattaaaaaatttgtacttataaagcttatgcaaagaaaaaaatgaaaaacaaaggcttcaattcaaatgacc

SEQ ID NO: 26689 - DNA, 339 bp, Glycine max
  Clone ID: LIB3108-023-Q1-K1-H11
cccacgcgtccgcaattccaatcaccaattcaaaacccttcttcccttggaacaaattgagagatcgtgatggcaccaaaggcggagaagaagcccgcagaggagaagaagtccacggtgggagacaaggctccggcggagaagaagccaaaggccggaaagaagcttccgaaggagggaggcgccggcggagaagggaagaagaagaagaggaacaagaagagcgtggagacatacaagatctacatcttcaaggttctgaagcaggttcaccctgacattggtatctcaagcaaggccatgggaatcatgaacagcttcatcaacgacatcttcgag

SEQ ID NO: 26690 - DNA, 249 bp, Glycine max
  Clone ID: LIB3108-023-Q1-K1-H12
gaaggcgtcttcataaacgcctttcttctccgtttccgtttcctcgttcgaattcgctttttgatctgcgaaaatgagagagtgcatctcgatccacattggtcaggctggtatccaggtcggaaatgcttgctgggagctctactgcctcgagcacggcatcgggcccgatgggcaaatgccaagtgacaagacagttggcggtggtgatgatgctttcaatactttcttcaacgagactggtgcttg

SEQ ID NO: 26691 - DNA, 394 bp, Glycine max
  Clone ID: LIB3108-023-Q1-K1-H3
gttggtggtcttaaccctcttgtaaacaatgtacttattgctgcatttgcctcaattctggaaaccgggttgtcagtgccaaagtcggggttcttcttgaaattctatgacaccaagggttccaacttctgatggaatggatctacattctgaaatccgaattccatgttacattggttgtggtaccttgtatgttggatggcgtgttcattatgtttcacccgtgtttatgtctatgtttccatcattatataagtacactcgggatttatggtagccttagcgcaaacgtgacctgcttaattgcaaggatatatggggatcatatgtgcttgacactttttgtgacaaacattatctgacaccgttttaaatgataatttgcgttgatgat

SEQ ID NO: 26692 - DNA, 126 bp, Glycine max
  Clone ID: LIB3108-023-Q1-K1-H4
gtaacacatattaaaactcttgaaaactttttaattatttctgcatttacctcacttttggggacgggttttttaacaaaaagaccatgaatatcatttaaactgtatgtcactaactatgacaaa

SEQ ID NO: 26693 - DNA, 427 bp, Glycine max
  Clone ID: LIB3108-023-Q1-K1-H5
ccacgcgtccgtccacgcgtccgcccacgcgtccgcactgcacctggaccccacattagaggaaatacattgagggcatactccataggtgacaagcaagttgatcttttacttcctggtactgcaaggttgagagtgcaattaggagtaaacatgccagctcaagcaacacgcaaacttcaggaggataaggtggaagaatcagaagtagagctttttgaggtttatgatgtggtcctatacatgggcataattgatatattgcaagaatacacagtgaaaaagaaacttgagcatgcctgcaaatcactgcaatatgaccctatgactatttcagtggtggaaccaaagacatatgctgaacgtttcatcaatttcatggagaaaaaagttttccctgagccagaaacttcttgaatatggatat

SEQ ID NO: 26694 - DNA, 328 bp, Glycine max
  Clone ID: LIB3108-023-Q1-K1-H6
cgcgtccgctttttgttaagattccaaatcatggcttctcttgctttatccactgctgctacttccctgggcatgggataaatgctaatagaccccatcaacctcattgtttccacaaggccatcttcatcttcctctagccctgcctccttcaagactgtggctcttttctccaaaaagaaagctgcaccttcaaaaaaagctgcagcttctgctcctgccaatgatgagcttgccaagtggtatggtcctgacagaaggatcttcttgcctgaaggtcttttggacccatcttatatcccttattacttttacccgaaaattcccc

SEQ ID NO: 26695 - DNA, 449 bp, Glycine max
  Clone ID: LIB3108-023-Q1-K1-H7
ctactactgcatctaactgaaatctaagtttcaattaactgaagcagacatgggggctcagagttgcatcattttggctttgttcatcactattttttccttctcaagcatggacacagcatttgcagcacgccatctcttgcagaatattccagggctaccagatttctctacaccccccaccttgccacctttaacaatcccaaatgtactatgcaatggatccatattcacattcttacccatcttatgtccaccatcttcaagcaccagttctactatcccttaaggcttcacttggagtttgatacataatttatgcactaatctctacgtactccatctgcatttcggttcaattctcattgcatggccttcctccgatctcgttacatgtttaataaagtgatatagataacactattttcacattgtatatcctacttaca

SEQ ID NO: 26696 - DNA, 309 bp, Glycine max
  Clone ID: LIB3108-023-Q1-K1-H8
gctattctgcatgtgaatcatcttgaaggggtgtgtatgtgttgaattatgtgggcacttgttgtccacaagttggagtttgtgaggctgttggttggagtaagcactttgattcttaatttttcatgtcttctaaggacttaccctcctctcttgccccccccttttctctctttaattaagcattttaagttgctataagcccttaagaagcattatgtttataaagggctcaagggtcctttttcaaagtgcttgaatattttgtaacaatttttttattttaaaaaaattattttattaatggac

SEQ ID NO: 26697 - DNA, 406 bp, Glycine max
  Clone ID: LIB3108-025-Q1-K1-A1
gggtcttctccaatccgaattagatcgccaacattctctctctcgtcgatactatttccgcgccttcctcctcggcttcttccttctcttctctctcttctctctcatcctctggtgtgccagccgacccatgaagcccaaaatcctcatcaagagtataaaatttgaccatctcagagttcaagctggttccgattccagcggagtagccaccgacatgatcaccatgaattccaccgtcaaattcacttatcgcaacactggaacattctttggggtccatgtcacatccacacctttcgatctctcctattcagatattgtaattgctacgggaaatgtaagtatatacacacaaattgatcacattattaatttaattatttgatttgacttgaattgatgt

SEQ ID NO: 26698 - DNA, 335 bp, Glycine max
  Clone ID: LIB3108-025-Q1-K1-A12
gagcgagcgagcagtttcaaagagaggatttgggattgggaaggcgagggattgcgctgcgtctcttcctcttctctttcgattcatccctcattcataatcttccaatccaacaacctcagcctcacactcacacatacacacatctgaacgcgtatcgtccctcccatggcttcaaagcgcatcctcaaggagctcaaggacttgcagaaagacccaccaacttcttgcagcgctggtccagtagctgaggacatgttccattggcaagcaacgattatgggtcctgctgatagtccttatgctggaggtgtattcctagtcactattcactt

SEQ ID NO: 26699 - DNA, 402 bp, Glycine max
  Clone ID: LIB3108-025-Q1-K1-A2
attcatttccatgatctccctctgtctgaccctttttctgttccacacttgcactggcctaccatttgtggacctcaatttccatgaagtggatgttatgaccaaaagggtttgcaccaagagcattggggagtgcttgagcttgacagagccggagatggattcggagaccaacagaagagttctggcaatgcagaaaaagtacattagctatgacacactcaagagagacatggttccctgtgatagggctggagcttcttactacaattgtcatgcaatacgagcaaatccttataatagaggctgtgaggtaattactgcttgtgcaagaggtcaagacatcaaaacttgatggaggaaagtcttctcccttctcttttgcccttcccctttctcttt

SEQ ID NO: 26700 - DNA, 367 bp, Glycine max
  Clone ID: LIB3108-025-Q1-K1-A3
tccacgcgtccgaacacgaaagcatagccaaaaccttttttcgaagtctctgattttcctaatggctccggcaaaggcagagaagaagccggcggagaagaagccagtggcggagaaggcaccggcggagaagaagccgaaggcggagaagaagatctcgaaggaaggagggagcgagaagaagaagaagcgcacgaagaagagcgtggagacctacaagatctacatcttcaaggtcctcaagcaggttcaccccgacattggtattttcagcaaggccatgggcatcatgaacagcttcatcaacgacatcttcgagaagctcgcccaggaagcgtcgcgtttggctcgctacaacaagaagccc

SEQ ID NO: 26701 - DNA, 314 bp, Glycine max
  Clone ID: LIB3108-025-Q1-K1-A5
agataattacagagtactatcctcatggtagtaggggtccggttgtggctctccgtctggctcccagacacgctgtgctgttgcctgaccttattactcacgttgacgaatatgcaccaccggtgataaatccgaaggctgctaataagatctctaatgaaggagggagcgagaataataaaaagcgcacgaagaagagcgtggagacctacaatatctacattttttaggtcctcaagcatgttcaccccgacatttgtgttttcagtctggccgtggtctttattaacagcttcatcaacgacattttttag

SEQ ID NO: 26702 - DNA, 151 bp, Glycine max
  Clone ID: LIB3108-025-Q1-K1-A6
ctcacaagaacatatcagatccactcatgttctttttatagaccgcttcagctatggcgtgcttaaatataactggaaatccagggcaagaactctgctgtcaagcacgtctagcacgatgttccagtgtgtacgcttgaacttttccaag

SEQ ID NO: 26703 - DNA, 408 bp, Glycine max
  Clone ID: LIB3108-025-Q1-K1-A8
aggcgacgcgtcaggcgtcctgtagctggtattacaacaccagattccgtgatgggtacctgcgcatagctcaaatgcgggcgcgccacggtgccatctttaacttaaactgtatcgagatgcgcgatcacaagcagacgcactaggccctttgtgcacctgagaagctggggaagcaagtggctctggcaacgcagaaggcacaggttccacttgcctgggaaaacgcgctgacacggtacgacgagtatgcacatgagcagatcataaaggcatcacaaatggatgttgatggtgagtctggggatagagagatgtgtgcacttacatacctgaggatgaatccgcatttgttttgaaccaaataactggaggaaagttgttggggtttgtgaaaaagatgaaaag

SEQ ID NO: 26704 - DNA, 425 bp, Glycine max
  Clone ID: LIB3108-025-Q1-K1-B2
tccacgcgttcgcccacgcgtccgctgcagggtattacaacacccgattccgtgatggctacctccccattgctcaaatgctggcgcgccacggtgccatctttaacttcacctgtatcgagatgcgcgatcacgagcagccacaagaggccctttgtgcacctgagaagctggtgaagcaagtggctctggcaacgcagaatgcacaggttccacttgcctgcgaaaacgcgctgccacggtacgacgagtatgcacatgagcagatcataagggcatcacaattggatgttgatggtgagtctggtgatagagagatgtgtgccttcacatacctgaggatgaatccgcatttgtttgaaccaaataactggaggaagtttgtggggtttgtgaagaagatgaaagaaggggagagtgcacac

SEQ ID NO: 26705 - DNA, 262 bp, Glycine max
  Clone ID: LIB3108-025-Q1-K1-B3
agaactattaaatcgtgaatgatgatcaactacctgaaattgctgaattgaagaataagagcggataacctaagcgaccatctattaataccctatttgtatgatgaatcagctacagctgccaatcaacctacccaagggagcttcttaaaactgttacctactcatccagaagttcctgagaagagtgaatctcaatgatccccacttgttatattttactggactcttacatggccatggaggaattaccaaatgctga

SEQ ID NO: 26706 - DNA, 433 bp, Glycine max
  Clone ID: LIB3108-025-Q1-K1-B4
acgcgtccgacataaccctggtctctgtctactcttcaattattcccaacctctcaccttttcatctgggtcttccttacctttgaccagagacagagcatctctcacattcacaacgaacgtttgctattcatcatgacatggtgaaagcaatcagagttcacgaactcggtggccctcaagttctgaagtgggaggatgtggaaattggagatccaaaagaaggcgaggtccgtgtgaggaacaaagccattggggttaatttcattgatgtctactttcgcaaaggagtttacaaagcccctgcttttcccttcactccaggtatggaagctgttggggttgtgacagctgttggtgctggactcactgctaggcaagttggagatcttgtagcttatgcaggtcaaccaatgggttcatatgctgaaga

SEQ ID NO: 26707 - DNA, 348 bp, Glycine max
  Clone ID: LIB3108-025-Q1-K1-B5
attctcaaggatccacaagatccttccactccaaatgcagtttcatacaaaacagcagcgagagagaaactgattaggcagggatacaacattgttgggatcattggagaccaatggagcgatctcctcggaggccacagaggcgaaagcaggacctttaagcttcctaatcccctgtactacattcagtagttccttcacctctcaacaatctagcttgctcctatctatctatatgtaataagatgcgttcaaataggggcactagcttcactttatgttgtttcagctgtgtgtcaacaagtcatgtaagagacttcactatgttgttttctctttcgtggcttt

SEQ ID NO: 26708 - DNA, 397 bp, Glycine max
  Clone ID: LIB3108-025-Q1-K1-B6
ccagaatcctggtctctgtctactcttcaattattcccaacctctcacctattcatcttcttcttccttacctttgaccagagacagagcagcactcacattcacaacgaacgtttcctattcatcagacatggtgaaggcaatcagagttcacgaactcggtggccctcaagttctgaagtgggaggatgtggaaattggagatccaaaagaaggcgaggtccgtgtgaggaacaaagccattggggttaatctcattgatgtctactttcgcaaaggagtgtacaaagcccgttcttttcccttcactccaagtatggaagctgctggcgttgtgacagctgcgggtgctggactcactgctaggcaggttggagatcttgtagcttatgcaagt

SEQ ID NO: 26709 - DNA, 280 bp, Glycine max
  Clone ID: LIB3108-025-Q1-K1-B7
cccacgcgtccgcccacgcgtccgatgaaaaaattagcaagcctataacaaaaaaatgagcgtgttattaaccattaaagcggaggcagacctacggtaaaccttaacaacatgcgtttgcatggtctacaaacatggaaagcgcattaaagggggggcgcgctctgggggtactaagtttacgaagcggggaggttgtagatattgcttatccaatagaaggccagagctcatgttaagatcaccgcccatttaaaatcaatctacacgtgacgaaaca

SEQ ID NO: 26710 - DNA, 238 bp, Glycine max
  Clone ID: LIB3108-025-Q1-K1-C10
gggaaaaaccttgtttgcagggtactacaaacgtgaagacctcactaaagaggttctgattgatgaatggttccatacaggggatattggagagtggcaacctaatggaagcatgaaaattattgatcggaagaagaatatatttaagctttcacaaggagaatatgttgctgtcgaaaacctggagaatatttacggtcaagtttttttctattgaatctattttggtttatggaaa

SEQ ID NO: 26711 - DNA, 387 bp, Glycine max
  Clone ID: LIB3108-025-Q1-K1-C2
cccacgcgtccgcaatttttctctcaaccggcccaatttagcataagcccagcatggccaccgcaacagcagcagccacctcgtccttcatggggacgcgcctcctggaggcccattccggggcggggcgggtgcaggcccggttcgggtttggcaagaagaaagccgccgccccgaagaaagtttccagggggtcgggctctagctccgataggcccctgtggtatccgggcgccaaggcgcccgagtacctggatgggagccttgtctgagactacgggttcgacccatttgggctagggaagcccgccgagtacctgcagttcgagttggactcgctggaccagaaccttgcgaagaacgtggctggggacatcattgggacca

SEQ ID NO: 26712 - DNA, 327 bp, Glycine max
  Clone ID: LIB3108-025-Q1-K1-C3
gctctatcttcccaaaatcatataattctctttcatctgaattttccctttcaaatctcttcctttgaagttttcgtagttctctgcatcatggatatggaacgcgtcttcgagtttcctcacactcacatggatcggcgcccgagaaagagagcgagattgggctgggacatccctgatgtccccaaggctcaagtaggattgttttgtggacaagatgttgggactatttcaagctttgctccttcaaggggtccctcagaaaataccactagttctctatttgttaagccagttgctcgaaatggttctccccctttggcgaga

SEQ ID NO: 26713 - DNA, 402 bp, Glycine max
  unsure at all n locations
  Clone ID: LIB3108-025-Q1-K1-C4
cccacgcgtccgcacaatccgaaggtggatggagacactgaaaacaatgttgcggagttactgtcagaagaactaactctacgggaaactgaagctttgaaaaatcagcatcgtgctgacatggctctgctggagtccaagaagattgcatcccagtatcaaaaagaagcagacaagtgtaattcaggaatggaaacatgcgaggaagccagggaaaaggccgagatggcactagtggcacacaagaagctcactgcattgtgggaactaagagcttgtcagaaaggatggaacgaagggcttgccaaatctaaaaaacagtctaaagggaaagtacagactgcttatacttggtgtgacctccatctaantattgcatagtagtttcagcggaatgatatt

SEQ ID NO: 26714 - DNA, 375 bp, Glycine max
  Clone ID: LIB3108-025-Q1-K1-C6
cccacgcgtccgcaatttttctctcaaccggcccaatttagcataagcccagcatggccagcgtaacagcagcagccacctcgtccttcatggggacgcgcctcctggaggcccattccggggcggggcgggtgcaggcccggttcgggtttggcaagaagaaagccgccgccccgaagaaagtttccagggggtcgggctctagctccgataggcccctgtggtatccggtcgccaaggcgcccgagtacctggatgggagccttgtccgaaactacggattcgacccattttggctagggaagcccggcgaataccttcatttcgagttgtactcgctggaccagaacctttcgaagaacgtggctggggaca

SEQ ID NO: 26715 - DNA, 216 bp, Glycine max
  Clone ID: LIB3108-025-Q1-K1-C7
ttctatcgcacgtggctacatactatgatagagatggaaagacttttcataccacagtagggggcatgaaatatcccgtgactatcaacctatggcaaccagattaaaatgctattgaatcggctacatgtttgcaagcccatcacacagaggatgcatttcgtgttaattattggacaccaaacttcctaataagagtagctagttattccacat

SEQ ID NO: 26716 - DNA, 287 bp, Glycine max
  Clone ID: LIB3108-025-Q1-K1-C8
gccgttccggtattgcattgtcgactcgagcgacccgtcagaccttcgaattattgttttaaccgtgccaatttagcgtacgcccatcatggccacgcgagcggcatcatccacctcgtacttccatggggacgcgcctcctggaggcccattcctgtggcggtgcggttgcacgcccagttcgggtttggcaagaagaaagccgccgcccccaatgaagtttccagggggtcggactctatctccgattggccccttgggtatcctggccccaaagctcctgcttg

SEQ ID NO: 26717 - DNA, 150 bp, Glycine max
  Clone ID: LIB3108-025-Q1-K1-C9
ggccagagcttacggttttactatagacctgccgcggagcgcaacttgacattgtgagacgcgaaggtgtcagaagcgaatgcgtacccttgaaattcctcataacatcaccatttacatcgacagcgctcactagaagattaagattga

SEQ ID NO: 26718 - DNA, 209 bp, Glycine max
  Clone ID: LIB3108-025-Q1-K1-D1
cccattctttggcgagcccccgtcctacctcactggcgagttcccaggtgactaccgctgggacactgctgggcttttggccgacccataaaccttcgccagaaaccgtgagctctaattgatccactccatgtgggccatgctcggggccttgggctgcgtcttccccgaactattggcccgcaacggggtcaagtttggagaagctg

SEQ ID NO: 26719 - DNA, 326 bp, Glycine max
  Clone ID: LIB3108-025-Q1-K1-D10
atccgatacatgatccaatgcactaggtgcatgtctaccatgtcctgcgtgctcatcgacacatgggacaacaacacgtgttggaacaacgacactgccacaacctactgtgccactgaccatggcacgcaaaaaagcaactttgcagcataaaccttcagaggattggagtgcaccgtcctagcgtagtagcacgtgtcggtgcccgctgtgatactctcctgcgactattggcaaggaaagcattcaagaatgacgatgcacaagagaagcagcagtagcagcaagaacaagactttccatggatgggtactagaagggttcaa

SEQ ID NO: 26720 - DNA, 289 bp, Glycine max
  Clone ID: LIB3108-025-Q1-K1-D12
tcccacttcatctcctccagcttcatcctccaatgctgcaaccgcaacccctcccgtttcgactcccacggtagcatctcctccgactaaagctgctgctccagctccagcaaccactccttcggtggccacaccttccgcggtcactccatctgcggctacacctcctgctgtgacaccagtgagctcgacgacagcgccagttacggtgagttcttcaccagcgcctgttccggtgagctcttcccctgcactggcaccgacaactacggcacccgtggtagcaccc

SEQ ID NO: 26721 - DNA, 230 bp, Glycine max
  Clone ID: LIB3108-025-Q1-K1-D2
cccacacgttcgaatttttctatcaaccggcccaatttagcataagcccagcatggccacggcagcagcatcagccacctcgtccttcatggggacgcgcctcctggaggcccattccggtggcggggcggttgcaggcccggttcgggtttggcaagaagaaagccttcgccccgaagaaagtttccagggggtcgggctctagctcctataggcccctggggtatccg

SEQ ID NO: 26722 - DNA, 168 bp, Glycine max
  Clone ID: LIB3108-025-Q1-K1-D3
cctaaaccttcccaatatcctgtaatacattctgatgttacttaaccccttcacaacctggcgggctactatctctctctaggccgtaacaggcgcccagatcgtggctcccgcttcacttacacgtccattggccgcccccccacaacgaatgcaggacacgtctct

SEQ ID NO: 26723 - DNA, 165 bp, Glycine max
  Clone ID: LIB3108-025-Q1-K1-D4
cccacacgtgcgcacagtgaccaggtagttgtacactgtccacccaccattattatgtcgcggggatacgtaccctcactactgcgcgctggacattctcggtgcctcattccctttgagcacgcgatgttaaggagtagccgcgtgtaagacctgggtaccaga

SEQ ID NO: 26724 - DNA, 408 bp, Glycine max
  Clone ID: LIB3108-025-Q1-K1-D5
gtgatttcagtgagtgatcggtgttcacttgatctcatcataatcgtcagcgtcaattgaagaagatgccgatcagaaacatcgccgtcggaaggcctgaagaggcgactcaccccgacacgttgaaggcggctttggctgagttcatctcaaccttcatcttcgtgttcgccggctcaggctccggcatcgcctacaacaagctcaccgacaacggcgctgccacccctgccggcctcatatccgcctacatctcccatgcattcgccctcttcgtcgccgtctccgtcggcgccaacatctacggcggccacgtctaccccgccgtcaccttcggcgccttcgtctgcggcaacatcaccttcctccgcggcatcgtctacgtgatcgcccagctcctcggctcca

SEQ ID NO: 26725 - DNA, 332 bp, Glycine max
  Clone ID: LIB3108-025-Q1-K1-D6
cttttgcgaactcaacttcgaactgaaatcaagcagcctatgccaaatacaaacacggggagctccacatccttctgtgccttcttgcgcgcgcgcacgatgtagtcccaccacggtgcgcatttcttacgctccaccctcgacctgtgacacgttttaagtccctctcaaatacggcttacgcagatccgtcgcctatagcagccttctggccggggacgactacaccgagtatttgatggattcggagagcaaccgtcgcattctagcatgaaggagctacataagctacggtgcgctgagaaggaacactgttccttgctcccgacttg

SEQ ID NO: 26726 - DNA, 419 bp, Glycine max
  Clone ID: LIB3108-025-Q1-K1-D7
tttatttccaacctttgatgaaccatttttctttctcacacctcactcactcatttgatggctcctctcacaaacttgcatggagcagtctccaagaccttaattcccatcacatgtcaccttccaaatgcacacaaaagcataacaaagagaggacaagtgattggatttctcggaagcaaaacacaccaaaaggatgcatcacagtgtgcagttcacgccacaagaagagcagcagcattaggccttgccactgtagtgcttacttggaaattcaatgacaagatttcattggctaaagataatggtcactggtatgaagatcacactcttcctggaccaactgtcactaacaatattgcatatgcgaaaacggtgacacgttcttttcttaagagggggatttacatagcatacat

SEQ ID NO: 26727 - DNA, 351 bp, Glycine max
  Clone ID: LIB3108-025-Q1-K1-D8
cgtgacgcgtgggcgccgatcacctaccgcgtgccgatggcctccgcacaggtgaagtccgccgtgctgctcgccggccttaacacgcccggcatcacgacggtcatcgagccgatcatgacgcgcgatcatacggaaaagatgctgcatggctttggcgccaaccttaccgtctagacggatgcggacggcgtgcgcaccatccgtctggaaggccgcggcaagctcaccggccaagtcatcgacgtgccgggcgacccgtcctcgacggccttcccgctggttgcggacctgcttgtttcgggctccgacgtcaccatcctcaacgtgctgatgaaccccacccgcacc

SEQ ID NO: 26728 - DNA, 370 bp, Glycine max
  Clone ID: LIB3108-025-Q1-K1-E1
tttatttccaacctatgatgaaccatatttctttctcacacctcactcactcatttgagggctcctctcacaaactggcatggagcagtcttcaagaccttaattccgatcacatgtcaccttccaaatgcacacaaaagcataacaaacagaggacacgtgattggatttcttggaagcaaaacacacctaaaggatgcatcacagtgtgcagttcacgccacaagaagagcagcagcattaggccttgcgcactgtagtgcttacttggaaattcaatgacaagattccattggctaaagataatggtctctggtatgaacatcaccctcttcctggaccaactgtcactaacaatattgcatatgcg

SEQ ID NO: 26729 - DNA, 384 bp, Glycine max
  Clone ID: LIB3108-025-Q1-K1-E2
cggacgcgtgggcgccgatcacctaccgcgtgccgatggcctccgcacaggtgaagtccgccgtgctgctcgccggcctcaacacgcccggcatcacgacggtcatcgagccgatcatgacgcgcgatcatacggaaaagatgctgcagggctttggcgccaaccttaccgtcgagacggatgcggacggcgtgcgcaccatccgcctggaaggccgcggcaagctcaccggccaagtcatcgacgtgccgggcgacccgtcctcgacggccttcccgctggttgcggccctgcttgttccgggctccgacgtcaccatcctcaacgtgctgatgaaccccacccgcaccggcctcatactgacgctgcatgaaatgggcgccg

SEQ ID NO: 26730 - DNA, 59 bp, Glycine max
  Clone ID: LIB3108-025-Q1-K1-E3
ctgaaatctgtatcaaagccagtgcacaatttatcattgcctcaccactaattaaactc

SEQ ID NO: 26731 - DNA, 233 bp, Glycine max
  Clone ID: LIB3108-025-Q1-K1-E6
gatcacctaccgtgtgccgattgcctccgcacatgtgaagtccggcgtgcttctctccgtccttaacactcccggcattacgacggtcattgagcccatcatgacgcgcgatcattcggaaaagatgctgcatggctttggcgccaaccttaccgtctagactgatgccgacggcgtgcgcaccattctccttgaaagtccgcgttagctcacctggcaatgtattgactttc

SEQ ID NO: 26732 - DNA, 231 bp, Glycine max
  Clone ID: LIB3108-025-Q1-K1-F1
caccctatggcaacggactttagttccatccccataattgatattagtccccttttggctaaggcagatgatccaaaaatggctgatgatcctggtgtgcttgaggttgttatcaattggataattgctttactgatgcagggttttcttactatttaagacatgtgttttttgtagtctatccactatagtagctatagttgttttcgcgctttttttttgaatttttat

SEQ ID NO: 26733 - DNA, 67 bp, Glycine max
  Clone ID: LIB3108-025-Q1-K1-F10
gacattctaccgcttgcacgagcgaacgcttatgttatgaagggggatgcgagctatcgcgatcaga

SEQ ID NO: 26734 - DNA, 187 bp, Glycine max
  Clone ID: LIB3108-025-Q1-K1-F3
ctgacacgtgcgtatgactgatgtgagcctttcatgccgcacggttttatttaacgcatgaggcgctcctcaaaacgcgcatgctgtaaagttcttactcttacccagacaatctgtgcgaccgggtagtatcaagttgggtcgcgtgatgaggatccgacccgttctcgctgcgcctgatcgcata

SEQ ID NO: 26735 - DNA, 236 bp, Glycine max
  Clone ID: LIB3108-025-Q1-K1-F4
cccacgcgtgcgtccacgcgttcgcacttgccatggcagcagcagcgtcaatgtgtatgagcttcaacctggcaacagcattcaagggtctctctttttcttcttcctcatcgctcttcgctggaagaggtagttattctctccgcgcgggtcccacctcggcggtgtctctgtccctgcgctccccggctgccatagataactcccacaatatgggggcggtcagcaccaaaaac

SEQ ID NO: 26736 - DNA, 378 bp, Glycine max
  Clone ID: LIB3108-025-Q1-K1-F7
gctaatcgagagatggttatggatttctgaaagatcaccttcccagccgtatccagggtggacctgaccagtgccggcgtggttgctccatgcaccggcctcaaatccatggctggcttccccactaggaagaccaacagtgtcattaccttcattgctagcaacggtggaagagtacaatgcatgcaggtgtggccaccaattggcaagaagaagttcgagactcttttctacttgccagacctcgatgatgcccaattggcaaaggaaggcgtataccttctaaggaaaggatggattccttgcttggaattcgaattggaacacgggtttcgtgttccgtgagcacaacaggtcacctggatactttgatggacg

SEQ ID NO: 26737 - DNA, 225 bp, Glycine max
  Clone ID: LIB3108-025-Q1-K1-F8
gcgatgcgagctatttgccgaatgttcaacggaaatacattatgtaattacaatctgagggtagaaccaagaaaattatagatagagtctatgtactcttatgctgtacaaggtgttcagatttaagtgtggtgaccaccatgcactgggtttgtggaaggtatggctccgtgtttctatgcatctggctggtactgtacttttcatcttatacagaatgacctt

SEQ ID NO: 26738 - DNA, 425 bp, Glycine max
  Clone ID: LIB3108-025-Q1-K1-G1
gttgagaactaagaagaaggaaatggcttcctcaatgatctcctccccagctgttaccaccgtcaaccgtgccggtgccggcatggttgctccattcaccggcctcaaatccatggctggcttccccacgaggaagaccaacaatgacattacctccattgctagcaacggtggaagagtacaatgcatgcaggtgtggccaccaattggcaagaagaagttcgagactctttcctacttgccagacctcgatgatgcccaattggcaaaggaagtcgaataccttctaaggaaaggatggattccttgcttggaattcgagttggagcacggtttcgtgtaccgtgagcacaacaggtcacctggatactatgatggacgctactggaccatgtggaagctgcctatgtttggctgcactgatg

SEQ ID NO: 26739 - DNA, 338 bp, Glycine max
  Clone ID: LIB3108-025-Q1-K1-G2
cccacgcgttcgcagctcttgacccaaattcaacggagatacatcataaaattacaattagagctagaaccaagaaatttcatagaagagtctatgaacgcagaggcagtacaaggtgttcagatttaagtgagggaccaccatgcactgggtttgtggaaggtatggctccggttttctctcgatctgcctggtactgtacttggcatcttatacagaatgaccttgtccatggatggggagtggatatgaagctaggatattgtgcacagggagatcgaactaaaaaggtgggagttgttgacagcgaatatgtttttcaccagggaatacaaact

SEQ ID NO: 26740 - DNA, 253 bp, Glycine max
  Clone ID: LIB3108-025-Q1-K1-G3
cttccgcttctcttctctgtctaaggggtgcccttagatcacattgaacaatggttaaggctgtggccggtcttggcatcagtgagggtgtcacatggaactattcacttcgctcaggagggaagtggtccaaccaccttttactggatctcttgctggtcttaagcctggtcttcatggttaccatgtccatgccttgggggacactaccaatggttgccttttaactggatcacattttaatcctattttc

SEQ ID NO: 26741 - DNA, 285 bp, Glycine max
  Clone ID: LIB3108-025-Q1-K1-G4
cttgaacgtatggaccatatatctggggctcacaatgcacactggattactcctattcgtgccgggtacaatattcagctagtttcttttttccgagactttgaaggatcaacttttgtcgttggcaaatgcaaaccatatcactgcaatgcaaaaatcgcctgaatttggccctgattttgctcttcaggcaaccttttatgattgccctataagaatcttcctcaaaggtttcaaaattagctgattctaatgattgatcagtggcgtttgaaccatttgatc

SEQ ID NO: 26742 - DNA, 245 bp, Glycine max
  Clone ID: LIB3108-025-Q1-K1-G5
gaacgtcgtgatgcgaaggggcttcctcaatgatctgatgccgaaatgctaccagcgcggtcccggccggggccagcatggttgctccattcaccggcctcaaatacattgctgtgctccccacgaggaacaccatacttgactttgcctacattgctagcaacggttgaagagctcaatgcatgcatgtgtggccaccaattggcaagaagaaggtcgagactctttcctacttgccagacctt

SEQ ID NO: 26743 - DNA, 144 bp, Glycine max
  Clone ID: LIB3108-025-Q1-K1-G6
actaagcaagatatcatcacattgcattgttaatacacattacattactaagtctttggtcatttgagtagtagtgatggctagcctcaaggttgcatgtgtggttgctgtgatgtgcatggttgttgtggccactattgcttc

SEQ ID NO: 26744 - DNA, 204 bp, Glycine max
  Clone ID: LIB3108-025-Q1-K1-G7
accacgcgtgcgatgacttgcatgctgagtaattccacattacatttctttatgctagggcacacgactagttgtgatacatggccgcaaagatgcattcgtgtcttctggactgtgcatagttgcggtggccagtagtgcttgaccaactgatctgcacctgacttcgtactggcaggtggctccctgcatttcttcggtctg

SEQ ID NO: 26745 - DNA, 372 bp, Glycine max
  Clone ID: LIB3108-025-Q1-K1-G8
gcgacgcgtcaggcgtccgggggggggaaaggtaaaatgaacaagatcgcggcgtggaggatgctttttcttctcatttctacgcatatgaagagcgttgagcctgatgctgcgtattgcttggatggttgcagtactgcctgtgttcaaagcgactcgaggctttaagcacggtgtgaacgcaaatgcatcattagatgcggtccagattccacaatcaaggaggacatgagttgatttgagtattgtaaagtcacagcgcatgctagcagtgtttcatcaccatagtcttatttagtccttgcttatacataaaaataacattttaagggttggtctgaagttgttagtaacatcttaaataaacatgga

SEQ ID NO: 26746 - DNA, 345 bp, Glycine max
  Clone ID: LIB3108-025-Q1-K1-H1
cggacgcgtgggcaggtggtggtggaggaggagtagtagctgtggcctcctctgtcttcttgtgccctggtagcttctccttaatcttgtcgaggagaagaaaggcttattagaaaagatgaaagagaagcttcctggttatcactccctgacagaggaggaaaaggaaacggaaaaggagagtggtgctcattgatatttaagattgagacaaggcttttttgttggttggagatgcatgactgtggtgtgctttgttttcatttcatcatatgacagccttgtgggtttctttggtgtttcttgatgcatacttaatacactccattattgtggatgtatctc

SEQ ID NO: 26747 - DNA, 300 bp, Glycine max
  Clone ID: LIB3108-025-Q1-K1-H11
cccacgcgttcgtccacgcgttcgcaaaaactaagttcatttcttgtgctttgctttattcctcaaaaccaaacatgtcgaacacatgcggcaactgtgactgcgctgacaagactaactgcaccaagggaaacagctatggtgttatagtagagactgagaagagctacatcgagactgttgacatggatgttccagcagctgagcatgatgggaagtgcaagtgtggcactaactgcacttgcacggactgcactttgggccattaaggaatatgtatgaaaatgtaattgccatgtg

SEQ ID NO: 26748 - DNA, 417 bp, Glycine max
  Clone ID: LIB3108-025-Q1-K1-H2
cccacgcgttcgtccacgcgtccggagaagggaaagttaagatgaagaagatggtggctgcaatgatgctttttcttctcatttctacgcaaatgaagagcgttgagccggatgctgcggattgcttggatggttgcagtactgcctgtgttcaaagcgactcgaggcttcaagcacggtgtgaacgcaaatgcagcattagatgcggtccagattccacaatcaaggaggacatgagttgatttgagtatgtaaagtcacagcgcaagcaagcagtgtttcatcaccatagtcttatttagtccttgcttatacatataataacattttaaggttttgtctgatgttgtagtaacatctaaataaacatggatggctttttaagatcaaattggttagggtagatgttgcgacttg

SEQ ID NO: 26749 - DNA, 430 bp, Glycine max
  Clone ID: LIB3108-025-Q1-K1-H3
cgccacttttgaatctattgaatcaacaatcatgtcggacgaagagcaccatttcgagtgcaaggccgacgcctgagcctccaaaacctaccctcagcaagccggtaccatccgcaagaacggctacatcgtcatcaaaggccgcccctgcaaggttgtggaagtttcgacttccaaaactggaaagcacggtcacgctaagtgtcactttgttggaattgatattctcactgccaagaaacttgaggatattgtgccctcttctcacaactgcgatgttcctcatgtgaatcgtactgattaccagctcattgatattgctgaggatggatttttgagtctgcttactgaaaatggtaacactaaagatgacctcaagctttccactgatgagagtctgctcactcagacttaagatggatttgctgag

SEQ ID NO: 26750 - DNA, 226 bp, Glycine max
  Clone ID: LIB3108-025-Q1-K1-H5
tcgcacactcaatagcaccacgaccaaccatattattagtgttgttcatatggttgttcaatccaggattcagtgtcattagcttgttgagctatctaaaaatgaagaactattcgtgaagtactttgtggatatgttccttctgttctataaatgagtggatgtgaaaaaacttatttgttagtaatcatgcttcttcatcaaatttttaaaaggattttttttt

SEQ ID NO: 26751 - DNA, 114 bp, Glycine max
  Clone ID: LIB3108-025-Q1-K1-H6
actaatcatgacatcatcacattgcagagaaaatacacattacattactaagtcgttgtgcatctgagtagtagagatggctagcctcaaggtagcatgcgtgggcgatgtgat

SEQ ID NO: 26752 - DNA, 368 bp, Glycine max
  Clone ID: LIB3108-025-Q1-K1-H7
tcatctacacgttcgctagttttagatgagcgagctctgtgcctcacacttgcactgtcctggcatttgtggacctcaatttccatgaagtggatgttatgaccaaaagggtttgcaccaagagcattggggagtgcttgagcttgacagatccggagatggattctgagaccaacagaagagttctggcaatgcagaaaaagtacattagctatgacacactcaagagagacatggttccctgtgatagggctggagcttcttactacaattgtcatgcaatacgagcaaatccttataatagaggctgtgaggtaattactgcttgtgcaagaggtcaagacatcaaaacttgatggaggaaaagt

SEQ ID NO: 26753 - DNA, 158 bp, Glycine max
  Clone ID: LIB3108-025-Q1-K1-H8
gccacgcgtgcgtgacaagagatcttcaaccctcacgaccaacattcccttatggcgcgcgggtatgtagcccctccactccctgctcgaccatgttggtgccccataaccaaggagcgtgtgacgtgtagaacgtgccggattcaaaaatgctttcg

SEQ ID NO: 26754 - DNA, 407 bp, Glycine max
  Clone ID: LIB3108-025-Q1-K1-H9
cccacgcgtccgcccacgcgtccgaataaactgaaaaacagtgaaaaccatatcgcactgtaccataacttccaccaccgtcaccggcgccgatcaccaccacttccggcgaatctacgctacaacaatcatgtttgaaggactacaagagtgagcatagcatggctttatccttttcttatgctatcacaaaaccgtttatgagggtccaagacaaaagcatgaactgtgaacttcagagaccaaaaaatggtgttgtagctttgattaagtgtgaatcaaaagagtcatcaccagaggtgccaggaaaaccttccaaggtggagatagggtcacccattattcttattgaagcttccaagatcatttaaaccgcaggttctatgccctgcctcagggcaaatttt

SEQ ID NO: 26755 - DNA, 195 bp, Glycine max
  Clone ID: LIB3108-026-Q1-K1-A11
gtcactgtctcgtcgcaaactatggataccatcaatcacccgagaaagacttatgacatattcatatatataactggatggaaagggcaaacgggacaaccgagagacacagccaaacttacagtggctttcgacctgcatactttcttactagcataaagtaagcttttacaagggtcttggagagtactggga

SEQ ID NO: 26756 - DNA, 422 bp, Glycine max
  unsure at all n locations
  Clone ID: LIB3108-026-Q1-K1-A12
gaaacaatggccaatgtttcaattccactcccacgaaacggtttctccaaacccaattactcgacaaaacgcccatgtttcaccccttcagcttcaacactcagaatttcttgctctggagtggctgagtttgatggatctcatcagaaaaaaggaggtttgtttaatttcaatggaatcaagggcgtggcttgtggtattcttgcagcttgtgctgttacttctgctgcatttcctgttactgctgctactcagaggcttcccccattgtcaactgagcccaatcgctgtgagcgtgcatttgttggcaacacaattggtcaggcaaatggtgtatatgataaaccattagatctccggcaatgtgatttcacaaatgagaaaaccaaccttaangggaagtccctgtctgctgcactcat

SEQ ID NO: 26757 - DNA, 195 bp, Glycine max
  Clone ID: LIB3108-026-Q1-K1-A2
ctacgcccttgcgtaaacaatcaaccactcttcccttcacgcgcccgagcaagctcagggtagaggtttaaaaaacggagcagcctcctgcatggcttacctcttcctcatccctggctggcaaggccgggaatctgggtccatcaacccccgaagtcgggagggtcaacattaggaagaccgtcaccaatcctg

SEQ ID NO: 26758 - DNA, 320 bp, Glycine max
  Clone ID: LIB3108-026-Q1-K1-A3
cctacgcgtacggcttaatggaaggccctcgagctcttattgcgttcatctgctcgcttgtgctattacgtttgcactctcacacaccatggctattgtctttctctgcaataatctctcttctcttcttcactctctcaactcctgccaaacccccatttccgcagttcttaaatttggagtctgatgtctccgccattgctggttaccgaagatgaaaggcagtgccatgcctcgatggtagcatctgcatctttaccatccctgaactgtttctccctaaatgaggccggatttaaagaatgcaattacctgggatt

SEQ ID NO: 26759 - DNA, 431 bp, Glycine max
  Clone ID: LIB3108-026-Q1-K1-A5
cccacgcgtccgcccacgcgtccggcttttttcatttgggcacacatggggttaaaaagttaatgggtctttaaatctttttatattattttttatttctacatataaaaaaaaaaatataaaaattgttgtattggactgcccataactttatgtcacgggctacttatatattactttcactctctctcctattatgagtcaaagctcatgaaaaaattgttgtttttttacaggaggggcttgtggatatggaaatttgtacagccaagggtatggcactaacactgcagcactcagcactgctctattcaacaatggcatgagttgcgggtcttgctatgagatgaaatgtgacactgaccccaaatggtgcctccccggtagcataatcgttactgccacaaacttttgcccccctaactttgcat

SEQ ID NO: 26760 - DNA, 173 bp, Glycine max
  unsure at all n locations
  Clone ID: LIB3108-026-Q1-K1-A6
cccacgcgtccnggcacgcgtgcggtataccctattcgctttaagtctgatgcaatctactaacggcggagctttactttttataactttcgtggtcttgcctatttgcctcttgagatgcccttgagtctcatatcatgtgccatcgcttatcgacaaagaggaggtcattg

SEQ ID NO: 26761 - DNA, 426 bp, Glycine max
  Clone ID: LIB3108-026-Q1-K1-A8
attctcctcatcttcctctttttctcaaccaaaaggggttcaattctagctagttctattacatcgtccgcgaccatgaacatggcgatcgtgcttctgttcatggttttcgcagtttcatcagctttagacatgtcaataatatcacatgacaacgctcatgcggatagggccacgaggcgcaccgacgacgaggtgatgtcaatgttcgaggagtggctggtgaaacacgacaaggtgtacaacgcgctcggtgagaaggagaagaggtttcaaatcttcaagaacaatctgcgctttatcgatgaacgaaactctctgaaccgaacctacaagttgggactcaacgtgttcgctgatctcaccaatgcggagtacagagccatgtacctgcgaacctgggacgacggtccgaggttggacttg

SEQ ID NO: 26762 - DNA, 292 bp, Glycine max
  Clone ID: LIB3108-026-Q1-K1-B1
tcgcccacgcgtccgattttctcccacaataactctgtaagtctctttatacttgaaggtagggggaatgttccggcccatggaaatattgctgaggtacttaatcaggtttatgcagatcattcaacaaacctacataacgttttttcacgcatagtttaaaccacaaagcattcagctgctgcaacgtcattagcctcaatcatgtttgctcctcaaggagaactatcctttaatgaaacattatccagatgtcgagcaaacaatgtgccaatctgactgatgtatagaa

SEQ ID NO: 26763 - DNA, 380 bp, Glycine max
  Clone ID: LIB3108-026-Q1-K1-B10
caaagcacttagtgctattcaataattacgaaaaaccaacagcgagtgttggttttgtttggtccaggctggaccagggaatgaatagagatgagaggctttcggttgaagagaactgagttaagcggcgaagccaaacgcagaattggcggcagaaattgccaccggaagcacgtcgaaaacgggtgaaccaaacacaaaatttcatccaccacttttctttttaatccccaactcaaatatgtgaagaaaatctcaatttctaaaatggaattcttagcactactgctagtagtagtgaaaaaaaacacatttgaaagtggtggaggtggttttttttctttttttcgcgtgtgttacttttaaaataggggagaaaa

SEQ ID NO: 26764 - DNA, 389 bp, Glycine max
  Clone ID: LIB3108-026-Q1-K1-B11
gcccacgcgtccgctcttccttgaaaactgtgctcaacacagcccctaagtgcctctgcgaggctttcaacagcagcgctcagttaggtttagccatcaatgtcaccaaggctgtcacgcttcccgctgcttgcaaactctctactccttctgccgctaattgtggactgtctgcaacgcctgctgctgctcctggcccctctcctacatctgctactgcaactattgggactccaggaggagctccatcatcaactcccgggaacgcagcatcagcattaatccccatatcagctggatcctctattgtttgccttttagtagctctatctctcgtttcactttcagagtagggacatgacattagagactattttcatgtcttttga

SEQ ID NO: 26765 - DNA, 341 bp, Glycine max
  Clone ID: LIB3108-026-Q1-K1-B12
cccacgcgtccggtttggctgtagctcagagctcgctctcctcgccgtttctctcatcgctagtttcaagtgtccttgtgacaatggtgagggttagtgtgttgaatgatgctctgaagagcatgtacaacgccgagaaacgggggaagcgccaagtcatgattaggccgtcctcgaaggtcattataaaattattctgggtgatgcaaaagcttgggtacattagtgagttcgagtatggtgatgaccacagggctgggaaaatcgggggtgaattgaatggcatgctgaatacgcgtggggttataagcccctcgctttgataaaaaaagggcgggccc

SEQ ID NO: 26766 - DNA, 380 bp, Glycine max
  Clone ID: LIB3108-026-Q1-K1-B3
cggacgcgtgggcggacgcgtgggccttgtcctacaaaaaaaaacatggttccagccccctcattcaagtatgttctcttcttttgttgtacttttgcctttaacttgttatccactcctgtccgtgccctcaacataggagctgaaaccactggagtcgctgtctctgtgggcaaagagtgcagtagacaatgtgagtcaagtttctgctcagtgcctccattattgagatatggcaagtactgtggacttttgtatagtggatgccctggagaaagaccttgtgatggccttgacgcttgttgtatgaagcatgatcaatgtgtgtcagccaaaaacaatgactacctaagccaagagtgcagccaaacattcataaa

SEQ ID NO: 26767 - DNA, 150 bp, Glycine max
  Clone ID: LIB3108-026-Q1-K1-B4
aaggagaagcaaatggcttcctcaaagaccgcttccccaactgcaaccactggcaaccacgccagggccggacaccttaacttaaacactgacaatatcttgctctggggctaccccaccagaaagaccaacaaagacatgacctccatt

SEQ ID NO: 26768 - DNA, 380 bp, Glycine max
  Clone ID: LIB3108-026-Q1-K1-B5
caggaataaaaatgagggctatttcgttgcttctgaacttttgaagaagatatgttcaactcgggtaggccttgagacaatattcaagtcccctgccctgctaaaacgattgcacagtcttgttgaggaccttacacggaagggaatttactagaaaagaaattctaaggctcctaggcctattaaagaaaacagagagagaagattgaaggaggctgctgagattctgaagctgataacaagcgcttgaaacttttttttccccccatcaagttctgatgtgcgattgtagaatatatatgcaaggaggtcaaagtttgtgcgcttctaatttacattctttcctcatctcgtggatttggaatgagcatttttttttt

SEQ ID NO: 26769 - DNA, 76 bp, Glycine max
  Clone ID: LIB3108-026-Q1-K1-B6
gcacactgcataccttatgtcttccgaattcgaagttaatttgcaaggaggctattgaaatggctcagatcacatt

SEQ ID NO: 26770 - DNA, 372 bp, Glycine max
  Clone ID: LIB3108-026-Q1-K1-B7
gatgctcaggagcggcacgctaacacagagtggtacagtcacctgtgttcatcacagtcacagacaatggttccaatcaattcccgtaaattatagattctgtgacgctgctcggaactctctatcatccaactccgccatcttcaagtggaaaagaacggctaattataatcgtaaccgttctggaatgggaaccttcaccacgcgcgcgttggcgcatccgctccataacgccgacgaactcatcgatttcggcgagacatttattttcgattgtgacggagttatatggaaaggtgacaaattaatagaaggggtgcctgaaacgcttgacatgcttcggtcaaagggcaaaagattagtttttgtcac

SEQ ID NO: 26771 - DNA, 382 bp, Glycine max
  Clone ID: LIB3108-026-Q1-K1-B8
ggcggcggcggtggcggcggcatttagtggaagtagtaaggatcaatggcagttgcagggaggcgcaacggcatgaacgacgaccaagaggaattagacgacaacgcccttttcgaagaacaaggtgccgtctaagacgacgccgatacccctcctcaccttcgcgacctctccgccgccgctcagctaggcgacgtccacgccctccgtatcgctcttgataacttgactggtagtattgatgagccactggaggatggggatactgctcatcatttgacatgtttatattgccactttgcttgggggcagctgctactagaaaggaggggcgaacattggaggctatatgatgaaaaattggtgctatttcctttgcacg

SEQ ID NO: 26772 - DNA, 364 bp, Glycine max
  Clone ID: LIB3108-026-Q1-K1-C1
actctcctccacaacttcacaactcacttcccttccttccctcccttcttcctcctctccactttctcgcaaatttcccctcactttccgggaaaaaaacagaactccaatcacacctcacaagctccctttttcagcaaggcctaccaccaccagagtggtgttggtgaagtctcaggccacagcacctgcttcttctgaggctgtggcagtgacacctgtgtcttctgagatgaaggcatgggtctatggggaatatgggggtgtggatgttctgaagctggactccaatgttactgtgcctgatgtgaaggaagatcaagttctaatcaaagttgttgctgctgctcttaaccctggtgat

SEQ ID NO: 26773 - DNA, 289 bp, Glycine max
  Clone ID: LIB3108-026-Q1-K1-C10
gctcaattcctctgctaccatcatccttcatctttgcgtcatggccagaggttccggtcaggctcagtcctccactggaacagccacgcgaccaggaccagcaggcatggctccccgcggttccgccgccgccaccgctggcatgcgccgccgccgtctcggcggaggaaacagctccgccagcaccggcgtctgaggcggcagcagcaacatgctgagggtctacacggacgatgctccggggctgaagatttcgccaacggtggtgcatgtgaagagcctctgcttc

SEQ ID NO: 26774 - DNA, 425 bp, Glycine max
  Clone ID: LIB3108-026-Q1-K1-C11
cccacgcgtccggaggttcaaagagtcagaactcattcactgcagatgggccatgcttgctgttccagggattttggttccagaggcattgggcttaggcaactgggtaaaggctcaggaatgggcagcagttcctgggggccaagcaacctacctaggcaatccagttccatggggcaccctacccaccattctggccattgaattccttgctatttcctttgtggagcaccaaaggagcatggagaaggacccagagaagaagaaataccctggtggtgcttttgatcctttgggatactctaaggaccctaaaacattccatgaatacaaagtcaaagaacttaagaatggacgtcttgctttgttggcttttgtgggattctgtgttcaacaatcagcttatcccggcactggacctttgg

SEQ ID NO: 26775 - DNA, 405 bp, Glycine max
  Clone ID: LIB3108-026-Q1-K1-C2
caaaccaacacctttcaaaatgcaaacatccttaacctttgctgcccccaacgttgtgcctttggcacaaacaaagagtttctcccatgttgccatcttccctaccaatttgaaagccccacgctcttgacctcgttactctccgatcagggttgcaatcgtggagcctgacacttcaactgtggactacaactctgcgttctcagtgtttccagcggaagcatgcgaaactgttggaggggaagcctgcatggcagaaatgtaccctgaagtgaagctacagccagaagctaagacaccacgagttgttacagagaacgttgagagagagtatcttgaatacgatgatcctaaaacggtatttagaggagaggcttgtgatgatcttggaggaactttttgtga

SEQ ID NO: 26776 - DNA, 305 bp, Glycine max
  Clone ID: LIB3108-026-Q1-K1-C4
cccacgcgtccgttcaaatgtttactttgatcaattcaataaatttggctgtaaaataagagatttctttttgcatgatttcatgagcattagatatgtctgtgcaccttacctgctaactgggatgaaagtcatgctatgtttggttggattattatccatttcgtcgcttttctaagaaatttatgggagttgactcaatgtctgtgtgtcaactataatagacgtgtgtccgccagttgacaacacattgtaatagtgcatttttgtttatttcaaagaacttaatgtggtgttaccttagt

SEQ ID NO: 26777 - DNA, 306 bp, Glycine max
  Clone ID: LIB3108-026-Q1-K1-C5
cccacgcgtccggaggaatgtttactctgatcaattcaacaaatctggctgtaaaataagagatttgttcttgcatgattgcatgagcattagatatgtctgtgcaccttacctgctaactgggatgaacgtcatgctatgtttggttggattattatccatttcgtcgcttttctcagaaatttatgggagttgactcaatgtttgagtgtcatctataatacacgggggtccgccagttgacaacacaatgttatagagcatttttgtttatttcaaagaactttattgtgggttacctttagt

SEQ ID NO: 26778 - DNA, 286 bp, Glycine max
  Clone ID: LIB3108-026-Q1-K1-C6
cccacgcgtccggagaatcgggctgactgtttcatttgctctgaattgcaaattaaccagcacgcgggttttgaatacattctagagcatcataaatgttttattgcaccagctcaatccagtgatgtacggcgctcacctggtattatggaatataatatatatgcatgcaactcggcaatatgggttgcagcgggcttgatattccttggaggcgtcatatctaataaggctgatatcatttgccctttatctatatatgtacattatttcgaaatattttcgt

SEQ ID NO: 26779 - DNA, 429 bp, Glycine max
  Clone ID: LIB3108-026-Q1-K1-C7
catgtcgccacttccaaggtgtggaaaccgttaaggcagatctatcgtcgaacaaagtgactgttaccggcaaattggatgccgagaagctgcgagataagatcgccgagagaaccaagaagaaggttgacatcatctcagctccgcccaaaaaagaagccgccgccacggaaaatccaccggagaagaaggttgaagagaagaaacctgaagagaaaaaaccagaagaaaaacctaaagagagtatggtggttttgaagatcaaactgcactgtgacggttgcattgcgaaaattcgaagaatcattatgaggttcaaaggtgtacaatcggtgagccttgacggaagcaaggacttggtgacagtgaagggaacaatggacgtgaaggagatggtgtcgtacctgaacgagaagctgaagcgaaacg

SEQ ID NO: 26780 - DNA, 177 bp, Glycine max
  Clone ID: LIB3108-026-Q1-K1-C8
gttgtgagttctggcaaacagaattaactgttaatggggatccgattcctactgatggggaacaagccgggccaaactctgcttgctcaatactacaaatatttgaccctagaacagcgacgtgcgctgacatgctaaatcgttcgcacatgccataagccgcaacccacagaaaat

SEQ ID NO: 26781 - DNA, 425 bp, Glycine max
  Clone ID: LIB3108-026-Q1-K1-C9
caagatgtttctccacattgtgttcctccttttccttctctcatccacttcccatgccactgtccaagacttctgtgtggcagacctcaaaggtgcagacacccctgcaggctacccctgcaagccacctgctaatgtcacttcagatgactttgtgtacactggcttagctgaagctgcaaatgtcacaaacataatcaatgctgctgtgaccccagcttttgttgctcaattcccaggtctcaatggccttgaactatctgcagcaaggttggaccttggtcctagtggtgttatcccactccacactcatcccggtgccaatgaactactcattgtgcttcaaggtcacatccttgctggattcatatcttcaggtaacatattttatcagaaggtgctgaaaaagggagagctcatggttt

SEQ ID NO: 26782 - DNA, 309 bp, Glycine max
  Clone ID: LIB3108-026-Q1-K1-D10
gcagatattaaatactatcatcaagggtaccaccaagcagagcaattgttgctgagtagagtgggtattgtgggactggaaccaaaatccctaccctgaacatagtaaagaagccagtgctaggatttgttagtgaagcaatggctcaaaccatgttgctcatgtctagtgtctctagcaattattccgtggatttgaagaaagaccttttcctccaattgcagagtcaaagtttaaggcctaagttctctcagctctcattcaacccactttcatcaacaacttcttccttttttttaccccgtacat

SEQ ID NO: 26783 - DNA, 419 bp, Glycine max
  Clone ID: LIB3108-026-Q1-K1-D11
tttcaaaatgcaaacatccttaacctttgctgcccccaacgttgtgcctttggcacaaacaaagagtttctcccatgttgccatcttccctaccaatttgaaagccccacgctcttcacctcgttactctccgatcagggttgcaatcgtggagcctgacacttcaactgtggactacaactctgcgttctcagtgtttccagcggaagcatgcgaaactgttggaggggaagcctgcatggcagaaatgtaccctgaagtgaagctacagccagaagctaagacaccacgagttgttacagagaacgttgagagagagtatcttgaatacgatgatcctaaaacggtatttagaggagaggcttgtgatgatcttggaggaactttttgtgagaccgagtatcagaagggtgtctact

SEQ ID NO: 26784 - DNA, 410 bp, Glycine max
  unsure at all n locations
  Clone ID: LIB3108-026-Q1-K1-D12
gatatattaaaccatagtttcacatcaatgaggtgacatgtcttttcaagcaggaatttagaacataaattggtggggttatgttgaaagtaaaaattctttgaatttttgtgtttgtctttgtgctggattgtatttacatttaatgttctggaaggtcgtgtgttttgttgctttccgttgactttgccttcctcttgcctcacagctgaactgaagaagaaacagtccaaaccaaagaggccaaccatcaagtcacttttcgaaacaccagaggcgtccgatacgtctgcaaatgatcaacctgctcaaggaagctttttgaagctcttgccaccccagttagaggtatctcctcatcgcgacaagaatctttctnccacgtcctaacaggccccaaccacatgatc

SEQ ID NO: 26785 - DNA, 429 bp, Glycine max
  Clone ID: LIB3108-026-Q1-K1-D2
attgcgatatttccaatgaagacggagctgaacaagagacacagagaccctccacgaaatgctgtctattattcctttggatatctcggtatcctcaactcttgccaaagtctcacctttcaataacagttttaagaaaccaacctctttcccatccaagctttcaccttcctctgatgaattctctctcctttctctctcccactcaggaatttgcagggctagtcaagttgttgatttgttcccaaccgtgtcccccgaaattattgtccgcgaggcaaggttggaggactactggggagtggcagagacgcactgcaagtgcttcttccctgaatattccttcccattagaatttgtgctgaggatagacagattggtggtggctatgttagcagctatgttagccggattctctaggcctagaga

SEQ ID NO: 26786 - DNA, 272 bp, Glycine max
  Clone ID: LIB3108-026-Q1-K1-D3
catacgctttcgtccatgaatgcggatctttgtaagcggcgcagataccctagttggggcgcgggctgtcatgacatgggatatctccgtagcctaaagaaatagcaaatagtgtagccttgcgctaacagatttaagaaatcaaccgtctttgtatcaaaggtgttgccttactcttataaagtggccttccactcttttttccaatcgggaattggcggagcatgccgaattgttattggaagtcgccaccccttgtcccaaataatttt

SEQ ID NO: 26787 - DNA, 136 bp, Glycine max
  Clone ID: LIB3108-026-Q1-K1-D4
cccacgcgtccgcccacgcgtccgcgcaatttatggtaaaatagaaattatgatgctcgcagagaaatagaacaaaaacataaattctctcctatgattaatgaaaaaaatattgttttctccttgcagctaagat

SEQ ID NO: 26788 - DNA, 224 bp, Glycine max
  Clone ID: LIB3108-026-Q1-K1-D5
cccacgcgtccgccaaattggaagcataccttcaactaacatagctcaatcagtgcctcaaacccttatttatataagttgcggatgggaaagttttaaagaggacagcaagtcattgttgtctagtaaggtatggtatttggaaaaagctcatgggtttaatttcttttctggcacccagagactttgcgttcttacagtgttcaacaggggccttccaaaat

SEQ ID NO: 26789 - DNA, 335 bp, Glycine max
  Clone ID: LIB3108-026-Q1-K1-D6
ggaaaccgtaagccgaccctggtatatgcctacaatacaatcccatttccaggcgtcttgggtgctgataccacttaccagtttgccaagccatgcattcttacacagaaaacttttcaccacatactatgtatacatcccagggatttccacacgcttctgattcatgtcctagaagaccaaaaacgcatgttcttgtgtagacagcggaagcctgctgatctgttggaggggaagcctgctggcacaaatgttccctgagtgaagctacagcagaagctagacccacgagtcgtacagagagcgtgagagagagtatctgatacgatgatcct

SEQ ID NO: 26790 - DNA, 376 bp, Glycine max
  Clone ID: LIB3108-026-Q1-K1-D7
gttgtgcgttagggcagacagaattaattgagaatggggatccgattcgtactgatggtgaacaagcaaggccaaactcggcttgctcaatactacgaatatatcaccctcgaagagcgacgtgccctcgaaggcgaaatcgttcgcaaatgcctcgcccgcaacgaacagcagtgttccttcgatgagcatcgcaactacaaaactgtatatcgtcgctacgcctctttgttttaactcgctggagttgactatgatgagaatgagctggctattttggaatttatacatctcttggtcgaaaccatggatcgtcatctcggcaatgcgtgcgagctacatattatgttccatgtagaaaaggcgcattgcatgt

SEQ ID NO: 26791 - DNA, 420 bp, Glycine max
  Clone ID: LIB3108-026-Q1-K1-D8
atgcaatctatgtccctgacgctgagcaagaggctctccaattcaaagcctctcttcagaatctcttccaacctcgtcgctcacgcatcctccgccacaacctctccgccgccaccttcgccgccagtcccctctccatccgccctcaacagcctcctcaccgctccgtggtccgccactcagtcacgcggaatcacgctctctggatctgatgttcgagtcgggaatctcattggaaaccgaggacgcgctcacgaggttctcaaactgtatcgccctcttgaaggaacgggcaaagccactcttgaggttccgcctcaaagtgtagctggttatgccacagttgctactacagaggatggcgccgaaaggaaggaacgaaacagtggattgagtaaggcaacgaagacaaagagagag

SEQ ID NO: 26792 - DNA, 389 bp, Glycine max
  Clone ID: LIB3108-026-Q1-K1-E1
ctctaatcactctagctgttgcaaatttctactatttttcaatggcttctgcagatgttgagttccgttgctttgttggtgggcttgcttgggtcaccggcaacgatgccctcgagaaagccttttcaatctacggcgacatcgttgaatcgaaggttatcaacgaccgtgagactggaaggtccagaggattcggatttgtgaccttcgcctcagagcagtcaatgaaagatgcgatcgcaggaatgaacggccaggaccttgacggccgtaacatcactgtcaacgaagctcagacccgcgccagccgtggtggtggtggaggcggtggtttcggaagtggtggtggatacaaccgcggtagcggtggatatggtggtgggtgtggc

SEQ ID NO: 26793 - DNA, 106 bp, Glycine max
  Clone ID: LIB3108-026-Q1-K1-E10
cccacgcgtccgtccacgcgtccgttcattttgtttgctattgttgtacgaaaataaagggtaaaaaaaaaattatggtggattattaataaaaaaaaaaaaatat

SEQ ID NO: 26794 - DNA, 313 bp, Glycine max
  Clone ID: LIB3108-026-Q1-K1-E12
cccacgcgtgcgcccacgcgtccgcccattcgtccgtgaaaaagtgaacactaaactttggaggttagaatattttgattatgaataactggcgactgggtgatgaggttttcttgagatgagattctctcttgagctcaaaagccaaaggaaattggacatttaaattgggagaaatttctcgtcttaaaaaatggtttacagcgaaagcattcataaactgttgggaggggaatccagcatgacattaaatgacccttgaagagaatctacatcctaaaatctggggcgcccctttttgatacacaaatct

SEQ ID NO: 26795 - DNA, 430 bp, Glycine max
  Clone ID: LIB3108-026-Q1-K1-E2
gtctctcattccttccatttcttctatcctagcccctagttcaaaattccaatccatcacactaggctaaaaaaatgtcattcacttccaaggtcattgccccgcggtgcaagaaacatgggaatgatgatgttgtcgatgctcctgctgccacaactttcattggaggaaatgtttgcaattggcatggagattttgtaaggtttgtccctattgcatacatggagggcgaccaccatgacgaccgtggttattactatgcttcaacagcataagctacatatatgtttgggtacctagtacgctatccaacttgtactgactgacatattataataaaatgtctgcttctattcttaattattgaagttggtgccaattgaaagcgggtaagtcaagaaaattacgtgttaggtgactttatgttgat

SEQ ID NO: 26796 - DNA, 191 bp, Glycine max
  Clone ID: LIB3108-026-Q1-K1-E3
gccacgcgtccggcccgccgtccgtatgctgaccagcagtagggggcctcggccccccaaaggcacgtgccgttggtgaccctcgtgaggcggataatccctacgagacgccgtgaaacgcaaatcctatcgagcggcgtgtagaatcttttgcagactaaataaagtgacatgggctgaatttgaatgga

SEQ ID NO: 26797 - DNA, 140 bp, Glycine max
  Clone ID: LIB3108-026-Q1-K1-E4
cccacgcgttcgtccacgcgtacggattttttatggcagtgcaaataaattagtggtcgcgggaggtgcctagacatcctggctctcctctgattaatgaaaaaatattgttttttccttgccatgaaaagactacaaat

SEQ ID NO: 26798 - DNA, 173 bp, Glycine max
  Clone ID: LIB3108-026-Q1-K1-E5
cccacgcgttcgtgaaaaaggagagagcatttattggaggacgatcgatgggcactacagtgtgcgcagttgctgagcctgacagacctttatggtttccaagcagcacccctccttcatggcttgatggcactctacctggatactttcgcttttaccctcttggtcttgga

SEQ ID NO: 26799 - DNA, 144 bp, Glycine max
  Clone ID: LIB3108-026-Q1-K1-E6
gccacgcgtacgtgtactcggagagagctttaattttcgaacgattgatggggagatcagggcgcgtagtttgaaaacttgccgggcaattaatcaatctaggcatctgacgttattcatggcttgtagactctctagccgaaa

SEQ ID NO: 26800 - DNA, 152 bp, Glycine max
  Clone ID: LIB3108-026-Q1-K1-E7
gccacgcgtacgactagtttgagatttcctgacaatgcaatcccattttcgggcggctttgatcctgataccaattaccagtttcccaatgcaaccatattaacacacaaagcttttcatcacatactagaccaacatgctatttattggca

SEQ ID NO: 26801 - DNA, 174 bp, Glycine max
  Clone ID: LIB3108-026-Q1-K1-E8
gacaaagacaaaggcggcagcgtttacaattacatgtgcaacacagagactgtcgaatggtggagagagcagagggttgcaactgcgtaagtgtaaccattatcctaattagctgaaaggtataggggggttatgaggttgttcaataatgacatagtgtgtgagagaatagaa

SEQ ID NO: 26802 - DNA, 414 bp, Glycine max
  Clone ID: LIB3108-026-Q1-K1-F1
gggctttttccggtttcgattcgatcattccccttttgttttatggaggtataggtagatgatgggaaaacgtgtctcaagagagcactttcaacccaggccgtgttctgggaagacagagaatttaaaaaacaccgtgtttattgatgtagatgatcaagttgatgatgtggatgtggtgatcatagattacaaagagttcatgtctaaatcacatggatctggtgcgtcgagtagagacagggtatgtacgccgcagagtgttattagcattgatgatgacgatgacgaggaaagtgatgatgcggagtttcccggaggtgttgctggaggtgttggggaattggatagcgatgcctgctctagtaaaaggtctcctccagacccaagtggctttgggaattctgtacacat

SEQ ID NO: 26803 - DNA, 339 bp, Glycine max
  unsure at all n locations
  Clone ID: LIB3108-026-Q1-K1-F10
ggaaacgacattgaacttgtttctaggtcatgtgctctcattaaccaaatgtcatgttaagaacaaggatatccggaagtttcttgatggtatttatgtcagcgagaagggaacaatattggaagagtagaggatgaaaacatttgtattggtttttggtttggagacccttttttggtaacttgtcaaacttttccttttgggattattttttgttaattttttatttctatatatgctttggtattgaatattctctggaattagtaatctttcatgcatttctatcanaaaaaaaatttaaaaaatattaaaattaaattataattatattattat

SEQ ID NO: 26804 - DNA, 337 bp, Glycine max
  Clone ID: LIB3108-026-Q1-K1-F11
ggaaacgacattgaacttgtttctaggtcactgtgctctcattaaccaaatgtcatgtgaagaacaaggatatccggaagtttcttgatggtatttatgtcagcgagaagggaacaatattggaagagtagaggatgaaaacatttgtattggtttttggtttggagacccttttttggtaacttgtcaaactttttcttttgggattattttttgttaattttttatttctatatatgctttgcgtttgaatattctctggaattagttattctttcatgcatttctatcttataaaagttttttttttttttttttttctgtttgtttttttatt

SEQ ID NO: 26805 - DNA, 433 bp, Glycine max
  Clone ID: LIB3108-026-Q1-K1-F2
tcgcccacgcgttcggagaaagggtgtgagaatggagagcaaagaggaagatgtaagggttggagcaactaagttctcagaaaggcaaccaattggtacagcagctcagggtgacaaggactacaaagaaccacccccagcacctttgtttgagcctggtgagctaaagtcatggtccttctacagagctggaattgctgagtttgtggccactttcttggtcctctacattaccatcttaactggcatgggtgtcaacaggtcacccttcaagtgggcctttgttggcattcaaggcattgcttgggcctttggtggcatgatctttgcccttgtctactgcacttgctggaatttcaggggggacacaattaaccccagctgtgactctttggtttttttttggcaaggtaacctgtccctcacatgggcg

SEQ ID NO: 26806 - DNA, 166 bp, Glycine max
  Clone ID: LIB3108-026-Q1-K1-F3
cttacgcgttcggagaaagggtgtgtgattttatagcaaagaggaagatgtaagggtcggcgcgactaaagtctcaaagcggccactcactggcacaccacgtcatagcgccttggacgtctaaccaacattcaatgcaccttccgttgagccacaacagctaaac

SEQ ID NO: 26807 - DNA, 362 bp, Glycine max
  Clone ID: LIB3108-026-Q1-K1-F4
gtgaatgattactttggtaaggatgtttggagatctgtgcatgaattaagctacagcaatgtaggaacatggatatacagagagcccttgacaggctttacaataaatgcgatggagcaggttcggtcaagaagaccaatgaaacatttggatgggtttttggcttggaaaccctttgttggtcacttgtcaaacttttccttttgggattattttttggtaattttttatttctatatatgcctttggattgaatattctctggaattaggtaaccttcatgcatttctttcggaagataaattagttggtttatttttagcatgtttaactttgttgttttttccttttgacttttttgt

SEQ ID NO: 26808 - DNA, 182 bp, Glycine max
  Clone ID: LIB3108-026-Q1-K1-F6
ctcttagattggaattggatcttcaggaaattgacgagtgccttgcttgttttgtaagcctcatgaaagtggcatccatctgttctaaagatttctcagatatttcattgagtattgtttttttttggttttctcttataacttattcatttttttatcttttttttacatctttttgtttc

SEQ ID NO: 26809 - DNA, 307 bp, Glycine max
  Clone ID: LIB3108-026-Q1-K1-F8
gatatattaaaccatagtttcacatcaatgaggtgacatgtcttttcaagcaggaatttagaacataaattggtggggttatgttgaaagtaaaaattctttgaatttttgcgtttgtttttggctttttgtttttcttttttgtttgttttctttttttttttttttttttttttttttttcttttttttgcttttttttttttttttttttcttgttttctttttttttttttttttttttttttttttttctttctcttttttttgtttttttttttttcttgtttttttattttttttgtttt

SEQ ID NO: 26810 - DNA, 386 bp, Glycine max
  Clone ID: LIB3108-026-Q1-K1-G1
atttccgggttggaccaagccgtccgaaccaatggaggtggttggcatgaagctaggaatggacatgcatattctgcttgttcggatgatggaggggttaaatgcaagtgtcctgcaggctttaaaggtgatggtgtcaaaaattgtgaagacattgacgaatgcaaagagaagaaagcttgtcagtgccctgaatgtagctgcaagaatacttggggaagctatgactgcacttgcagtggggatcttttgtatataagggaccacgacacttgcataagtaaaactgccagtcaagagggaagatcagcttgggctgctttttgggttattttaattggcttagttgtggctgctgcaagggcataccttgtgtacaaatatag

SEQ ID NO: 26811 - DNA, 417 bp, Glycine max
  Clone ID: LIB3108-026-Q1-K1-G10
cccacgcgtccgcgcaccttcaacttaacctattccacttgtaatcgtaaacgctttgctagaagaagagacaaagtgtgtctgtgtgtgtgagagagagagcaatggctggctcgtgggcacgccgttctctgattgttctagccatcatttccttcggatgtctatttgcgatttccattgctaaggaggaagccaccaagttagggacggtcatcggcattgatcttggaacaacctattcatgtgtcggtgtttacaagaatggccatgttgaaatcatagccaacgaccaaggtaaccgtatcaccccatcgtgggttgctttcaccgacagtgagagactcattggggaagctgtcaagaatcaggcagctgtcaacccagaaaggaccatctttgatgtcaagagactta

SEQ ID NO: 26812 - DNA, 300 bp, Glycine max
  unsure at all n locations
  Clone ID: LIB3108-026-Q1-K1-G12
acccacgcgaccggncgaacttttctattccctcaccaacggaccgagggtcaatttcaatttcaaggggctgggcagccattgccatggtctttcacggctcaagtgagaagaagagggaaagggaaagtggtaatgagcatggaggcaggcattggagagaagggcaccaagttgggtatgatgagctatttcgaatccgacggagaggttgttcctgaaactgtcgtgggtttcaaagaaggcaacatcggcacccagatcaaaactgaggccaccgatggatacgacgccgtacag

SEQ ID NO: 26813 - DNA, 289 bp, Glycine max
  Clone ID: LIB3108-026-Q1-K1-G2
gtttctgcgaggcttaagaaacctcgcagaaccaaagaaaactcactctcacacactttggttcacaaaaacctttcacttctattttcaatctttctaggtccttctcccatattatagtacccttttatcccaagttacttaaatttaaaacctttattactgctcatacttgtttttcgctttgttaagttttaagaaaaatggaggcacattctccagttatagccaagaagctatggaatgtgttgaggatcaccttcttcatgatcaggaagggcttggtgtc

SEQ ID NO: 26814 - DNA, 307 bp, Glycine max
  unsure at all n locations
  Clone ID: LIB3108-026-Q1-K1-G3
ctttctccctgtcttatttgttttgcgctgagttaagttcaatcggattttgcatacagctatataattatgctttagttnaaaaaaaaaaatataaaaaaaaaaaaaaaaaaaaaaaaaaaaaaaaaaaaaaaaaaaaaaaaaaaaaaaagtttcaaaaaaaaaaaaaaaaaaaaaaaaaaaaaaagggggggccgttttaaagaatcaaagtttatttacgcgggcatggaacgtaataacttttttaaaggggaacctaaatttaatttatgggccgctgttttaaaaaggtgtgtcgggaaaa

SEQ ID NO: 26815 - DNA, 119 bp, Glycine max
  unsure at all n locations
  Clone ID: LIB3108-026-Q1-K1-G5
ggtggagcgatttaggtggctnatgtcctataacgaacgtgacctcaacctgctaaatagctttgtggaggtaaccctccacggcctggttcttagacggactatggccgcttaggcca

SEQ ID NO: 26816 - DNA, 314 bp, Glycine max
  Clone ID: LIB3108-026-Q1-K1-G6
caacaccctcgaaaatttcaaggaaaatttaacacagcgtttttttcttcacgttgttgtgtgtctctctgataatttttcaagagcgaaaatgatgcacatgaccctttactggggcaagaaggtgacgatcttgatcgattcatggaagaccgattcctggacgagttacgtcctgagtctactcgcctgcctcgtcgttgccgcgttctatcaatacctcgagaatcgccggattcgcctgaagctcctcgccggcgaccggaggcccttgccggcgccggaaatccgcacccctcttcttcggtggggcg

SEQ ID NO: 26817 - DNA, 259 bp, Glycine max
  Clone ID: LIB3108-026-Q1-K1-G7
cccacgcgtccgtccttgcgccgcagtagtgttcctattcgttcatacagcgaagaagatgctaaacaatgtcatttatgcgaggggattttctttctcgaacgaggaagctcctgaagggttaggctaacgcgcaacctgcatggctcaaagccatggaactgctcatcccctaatctctgattcactctcttcaatcttcgcctttgcatttttctttgtccatttgagaatccgcaatctgggtttttatcactta

SEQ ID NO: 26818 - DNA, 335 bp, Glycine max
  Clone ID: LIB3108-026-Q1-K1-G8
cttggctgggctccaactatgacattgaagggatgggcttggaattacaatgctggggatcaaacatcaactggagaaagagaaggcaaagggtgttgatttatcatgctatggatcatccaaaggggttcagacttaaacctcaaatgaacttgactgccttcgggctgcatatggcaaagaatgaagcctctagttcgggcatgagctgtaaataacaaataatacgggtgaataatgcattaccaaacgaagggctggcttttatgtcgctatatgctagaggtccttggttacagattaaatattgtagagagagctggaactagctcatg

SEQ ID NO: 26819 - DNA, 371 bp, Glycine max
  Clone ID: LIB3108-026-Q1-K1-G9
tgaagttgttggcgaagaaggaggatcgattcgctcttgattcggccatcgaagagcttgttcacctcggcatgcaaagagaaatggcggcggagtctatttacaaagagagatgtgttcctgtgaatgatggtccaagttgggccaaatacatgttgatctctggttctcctgatgatgaatatgatatcatcactttgcaatatactgaggagggtttattatctgtagatgagaatagagagggtcgtgctgcagctttcggtgatgatattgcaattgaatgccttgctacagagttcaagagagagatatatgtggtgcaagcacatggttcagatgccatggtcgatgaagaaaattgtgttttc

SEQ ID NO: 26820 - DNA, 428 bp, Glycine max
  unsure at all n locations
  Clone ID: LIB3108-026-Q1-K1-H1
tcttgagtttggtcgtctgggatcagatctgctctctccgtttggattcaattcgacactttcctcgcctcaaagattaagcgaacaacatggttgtccttgctgcatccattgtgagcaaatctgggaaagtgctagtttctagacagtttgtggatatgactcgcataagaattgaaagtcttctagcagcatttcccaagttggtagggactggaaaacaacacacatatgttgagactgagaatgtgcgctatgtttaccagccaatagaggcactgtacctgcttctcgtaacaaacaaaaacaggcacatacttgaagattttgaaactctgagacttctctctaaacntgtacctgaatattcttactcccttgatgaaaaaggtgtttgcaaacatgcctttgagttgatttttgcattt

SEQ ID NO: 26821 - DNA, 385 bp, Glycine max
  unsure at all n locations
  Clone ID: LIB3108-026-Q1-K1-H10
ctttcttattctcttcctctctctctactctgagacacaaaggaaaattataagaaattatggctggttattcaaaagcttcagctctttggatcctttttcttctctttggcttctctgtagctaaggaaattttggttggaggtaagactgatgcatggaaggtttcagcctctgaatcagattcactcaaccaatgggcagaaaagtctcgtttccaagttggagactatcttgtttggaaatatgatggtggaaaagactcagtgttgcaagtgagcaaagagaactatgtgaattgcagcatctcaaaccccataaaggagtacaatgatgataccacaaaggttcagcttgagcatncagggccattctacttcatcag

SEQ ID NO: 26822 - DNA, 439 bp, Glycine max
  Clone ID: LIB3108-026-Q1-K1-H11
gacgccgccacgcgtcccgcgcaatgcgatacttggtgtgacacccaggcaggcgtgccctcggcctaatggcttcgggcgcaacttgcgttcaaagactcgatggttcacgggattctgcacccacgcgtccgcccacgcgttcgcccacgcgttcggcagcgacgagaccacagtccacaagacccagaagcaccaccgcgaccggcgaatccagccaccgtgtgcggcttcgaattgagtccgagaacgcagttagacaggctttatattgaaacttgagacttgaagggaagctgttataattggtcaggctttggatgtttaaacaattctgatcaagatccaagtttgccttctaattttgtcatagatttttcgttacagtcttcccatggcgtatcccttctcagatttcaagtactcagatggcctcact

SEQ ID NO: 26823 - DNA, 199 bp, Glycine max
  Clone ID: LIB3108-026-Q1-K1-H12
acgcacacgctttcatttgattatggcgaagttctacacagccgtcttgattccacccaacagagccagggactccgtgacttgatagatatgatatctctaaagattcagcacgctcacgttatgctactttgatcactactcttgggtgcgctttgggttgctattctgattaatggaaaatgggacttctatacgt

SEQ ID NO: 26824 - DNA, 256 bp, Glycine max
  unsure at all n locations
  Clone ID: LIB3108-026-Q1-K1-H2
gcgagcgccgccctttngggttttttttttttttttttttttcttttttttttttttttggttgggttttttttttttttggtttgttttttttctgggtcttggtttttttcttcccagatcaaaggttggtcatcactacttcttaaaggaggggggacaggatgaacatgaaaccccctttattttgccatgcggcaccaaaacgagcctgtcctatatatgtccccccctcctgacgaaaaaaaaatggggg

SEQ ID NO: 26825 - DNA, 321 bp, Glycine max
  Clone ID: LIB3108-026-Q1-K1-H3
gcgtccgctcaccctcattaccaacacgaaagcatagccaaaaccttttttcgaagtctctgattttcctaatggctccggcaaaggcagagaagaagccggcggagaagaagccagcggcggagaaggcaccggcggagaagaagccgaaggcggagaagaagatctcgaaagaaggagggagcgagaagaagaagaagcgcacgaagaagagcgtggagacctacaagatctacatcttcaaggtcctcaagcaggttcaccccgacattggtattttcagcaaggccatgggcatcatgaacagcttcatcaacgaca

SEQ ID NO: 26826 - DNA, 276 bp, Glycine max
  Clone ID: LIB3108-026-Q1-K1-H4
caaaaaccacttaattagtccttctcacattcaaaatcttgtgccagcaaatcaaacatggcatccatgactatgcttcagaccatgattcctaagaatgcaccgaacctccctcctcgcggtggtgcttcttgcaacaacactactaagatctcatttggtggctcacgtagggtactgtggaccgggattcaaaagaacaggaataataggtcttcttcgattgtagatgctgccgttggagatgttgcatctgatggcactgcctaccttgtt

SEQ ID NO: 26827 - DNA, 236 bp, Glycine max
  Clone ID: LIB3108-026-Q1-K1-H5
cccacgcgtccggtcgctccgcaccagttttaccgcacgaatatcttgttgtttggagcgatccgagaaaaactctgtaaacatgttggtttaccaggacctccttacaggtgatgagcttctctctgactccttccgttacaaggaaattgagaatggaatgctgtgggaagttgaggggaagtgggttgttaaaggagcagttgatgtaaacattgttgcaaacccttttgctt

SEQ ID NO: 26828 - DNA, 416 bp, Glycine max
  Clone ID: LIB3108-026-Q1-K1-H7
cccacgcgtccgggaaaattgaaatacatctactaagcattagatatatatcccgaaacgatgaaggctattattgttttcttcttactcttggcctctgtttttttccttcccagttcaactcttgctcgacaactactgcagaaaggaggggtgactggatgtacatcgaacccgaatataccttgctatccgccaccaaaacgagcatgtcctatatatattcgtaattgctgacgaaaattatatgtttctggactctaaagtttcactcaaatcgaggggagaagcaattaatgtcatgctgctatatatatatatatatagtttttatttggtgcctcatctttttaacactattcctgtgttaaaactcggtggtgtcacatctttgctttaaaattccgtgttctttt

SEQ ID NO: 26829 - DNA, 421 bp, Glycine max
  Clone ID: LIB3108-026-Q1-K1-H8
cccacgcgtccgcccacgcgtccggccagacctcgatgatgcccaattggcaaaggaagtcgaataccttctaaggaaaggatggattccttgcttggaattcgagttggagcacggtttcgtgtaccgtgagcacaacaggtcacctggatactatgatggacgctactggaccatgtggaagctgcctatgtttggctgcactgatgcttctcaggtgttgaaggagcttcaagaagctaagactgcataccccaatggcttcatccgtatcattggacttgacaacgttcgccaagggcagtgcatcagcttcatcggctacaagcccccaggcttttaagtcattgaaaaatttgcaaagcatctgtagccaccccactttgtttgttgtacttaaactacatttcccatttgtttt

SEQ ID NO: 26830 - DNA, 338 bp, Glycine max
  Clone ID: LIB3108-026-Q1-K1-H9
ctgaaaactgcacctgctgattttcggtgtcctgcaacaaatcaaaccagacattgtttcactcgctacatagagtttcatagatgcttggcagcaaagggtgaaaactcaagtgaatgtgagagatttgctaaatattaccgctccctttgcccgggtgaatgggttgaaaggtggaatgaacagagggagaatgggacttttccaggacctttttgaaatcatgtggcacttggatatccttccgaggcatgagaagcccttaacattctattctcttcacttggtgagtaattgggaataaagccagttggggatatttatttactttacaaaat

SEQ ID NO: 26831 - DNA, 405 bp, Glycine max
  Clone ID: LIB3108-027-Q1-K1-A2
cccacgcgtccgctcacgcgtccgcccacgtttccgaaaaatttcttagccaacacaaccgtcatgttcacggctgctattgagcaatcagcattcactggtcaaactgctctgaagcagctcaatgagttcgtccgcaagaccggtggcgccggcaaaggtcgcactaacatgcgccgcaccgtcaagagtgctcctcagagcatttggtatggccctgaccgtcccaagtacttgggtccattctcggagcagattccatcatacctgaccggagaattccctggtgactacggatgggacactgctggattatcagctgacccggaaaccttcgccaggaaccgggagctggaagtgattcacaacagaatggcaatgcttggtgcccttggctgcaccttt

SEQ ID NO: 26832 - DNA, 239 bp, Glycine max
  Clone ID: LIB3108-027-Q1-K1-A4
accacgcctacgctcctactatcgtaagctttatctcatccttattctatcaccaatcccgtaacttttaagcacactctatgcgctgcatcagtctctctcacacatcctacactttactctcactctctgacacctaaaatgcattgaccaatcagatcatacttgtcacatagcaatgacattagaaatactaatcaacaacacaagctcatagtgaaccacttgctacatacaat

SEQ ID NO: 26833 - DNA, 396 bp, Glycine max
  Clone ID: LIB3108-027-Q1-K1-A6
actgtttctacttaccttttctcttaatccttttacgacggcagccatggcaaccacaaggctctcttcaaaccccaaactgtcattcttcaacggaaagcccgtcacatattcttcccgcgtcgcgcccaccaccaaattatcctcatccaaacaaggcacaatttccatgtccctaaccccacccccctacgacctccagtccttcaaattccagcccatcaaagaatccatcgtgtcacgggaaatgacgcgccgctacatgaccgacatgataacctacgccgacaccgacgtcgtaatcgtcggagccggttcggccgggctctcctgcgcgtacgagctcatcaagaaccccgtcgtgagcgtggccatagtcgagcagtcagtgagccc

SEQ ID NO: 26834 - DNA, 409 bp, Glycine max
  Clone ID: LIB3108-027-Q1-K1-A7
cccacgcgtccgggttattgttgaagaatttttgtggctgcgacacggggatgtgaaaagtgctccattcagtactgattgtcaacctagcaatgatcagtctgaccataatgtagaaaattctgagtctcagcctgacaaggatctctccagtctcaaagcagaagttcttcctgcatctgaaacccaggcttctagtgccgatgcaaatgaagggtcattgcccaaccgtgaattagacaacacataagaacttgctaatagtgagtcagagaatcccaagttactgcccgacaaccaatcaagcaatgatgagggcccacacagcaatcagcatgttgagtctgaggcacgactcaacaattcattagcatacgctgaagcttcagctgatgataatctttgtagt

SEQ ID NO: 26835 - DNA, 425 bp, Glycine max
  Clone ID: LIB3108-027-Q1-K1-B2
gcattcccatcactcccatcgccctctcattgtacttcctatttctttcttctctctcaagcagaatgttaggtgctgtatgaactgattatggtgcatacacctatgagaatcttgagagagagccttactggccatcagagaagcttaagatttccatcaccggtgctgggggttttatcgcatcacacatagctcggcgcctcaagacagatgggcattacgttattgcttcggattggaagaaaaatgagcacatgactgagaacatgttctgtgatgaattccatcttgttgatctcaaggtcatggataactgtctaaagttacaaaaggtgttgatcatgttttcaatcttgctgcacacatgggttggatgggttttaattagtctaaccacttttgcattatgtacaacaacacaa

SEQ ID NO: 26836 - DNA, 352 bp, Glycine max
  Clone ID: LIB3108-027-Q1-K1-B4
cccacgcgtccggagagagagagagaggagaatgttgagtctttcagttgcttctccttcttcttcaaccatgtcctttctccgagagccattgaatggcattcagctccgtcgcactgccacatgctccatcccacccacgaagcgcagctcatttgtgccggtggtggtgatgtctaagaggacggaggaattgaaggaaattagacaaatgactacggaacgaattaacgaagaggttgtcgaccttaagggcgagcttgtcatgcttcgccttcagaaatcggctcgcaacgagttcaagtccagcgatttcggtcgcatgcgcaagaggattgctcgcatgcttact

SEQ ID NO: 26837 - DNA, 439 bp, Glycine max
  Clone ID: LIB3108-027-Q1-K1-B6
accacgcgttcgcttcattcatagacatggtttttcgacacttctgcaggcgatgctattcgctcattcactggcctcaaggggagcgcacgcaaagtgagtgccgcagttaaagtctcagctccccaagccacaaggttgggcatcaaggcttcgctgaaagacgttggagtcgctgatgtggccactgccgcgagtgcagtgctggctagcaacgccatggccattgaagtgttgctgggtggtgatgacgggtctctggctttcgttcccaacaatttctccgtggcctctgtggagaagatcgtgttcaagaacaacgcatgtttcccccacaacgttgtgttcgacgaggacgagattcctagcggcgtggatgcagggaaaatctccatgagcgatgaagaccttcttaatgcgcctggtgagacttacagcg

SEQ ID NO: 26838 - DNA, 159 bp, Glycine max
  unsure at all n locations
  Clone ID: LIB3108-027-Q1-K1-B7
accattcgtccgaacattttacacaattctagagcaccaaaaaggcgggcgaaccccagagcacaaaagggagcaaaggacgaaccgcccgagaacncagnggccacccccagcacaaaggaccaaaggaccaacagccagacaacccagacacaacac

SEQ ID NO: 26839 - DNA, 310 bp, Glycine max
  Clone ID: LIB3108-027-Q1-K1-C3
ttagcgaagaaaaacggcgacaattatcgggcgcacccgggccacatcaagcactcgcacaggacatgagctcaaacgacctgctggggcctcatccactaccgcacttggattgccagcaaaggccaaagcggcgagagtgaggagctccatggaggaaaagccaacaagcagctcaaacctagggacggaggcatcctacgaagcagcaacagctgccgaaaccatgacaagcccagcagccacagctttggatgatgagagactcagcactgaaagaacagggctcacccttgggcttagcaacaac

SEQ ID NO: 26840 - DNA, 282 bp, Glycine max
  unsure at all n locations
  Clone ID: LIB3108-027-Q1-K1-C4
cccacgcgtccgcagacgcatagatgccaatttattattgattgntaaataaagtgaactaattcatattatgaaaaattaaagaaaaattaagaaaaaaaaaagaaaaaaaaaaaaaaaaaaaaaaaaaaaaaaaaaaaaaaaaaaaaaaaaaaaaaaaaaaaaataaaaaaaaaaaaaaaacataaatatataaaaaaaaaaaaataaaaccactaaaaataaccaaacttaacaaacctatcataacaatataaaaactataaaaacagaaccccaaaa

SEQ ID NO: 26841 - DNA, 308 bp, Glycine max
  Clone ID: LIB3108-027-Q1-K1-C5
cccacgcgtccggagcatcaaagtatgaattaatgtgattagtaactgtacaaatatacagggtaaatttagagtattaatcgaattgctatgagcagcaaatttagggataaaatgtcacactaaattgctatgagcagtaaagaaaatttttttaattgcagaaaaccaacttgccttctttcccatactgccagaaaattgagggaccgcacgacacttaatttcttgtggatgatttcgataggtggtggactgatgaggaatctgcgaatgttctcttagaatccataagtcaagcatgacac

SEQ ID NO: 26842 - DNA, 135 bp, Glycine max
  Clone ID: LIB3108-027-Q1-K1-D2
ccggcaatattgcattaaattttttatccaagatcacacgtagatttatcgctttcttttgatataaagtgagcatgtgtaaacgggcgtgcgccagtgcgttcataatgatgacattttggtaaagctttattt

SEQ ID NO: 26843 - DNA, 363 bp, Glycine max
  Clone ID: LIB3108-027-Q1-K1-D5
cccacgcgtccgaacatgcaacacgaaagtttctgaagctgctgcatctggctattggtgggagggatgccggattaattatgaagagtgtagggtaagacacataatggtctcaaagatctctgatacaagaggtgaagcctgggtttcagcctttaatgaacaagcagagaaaattgttgcatgctcagctgatgaacttgataaactcaagtcggagcaaggggatattgatggataccaaaaaaagttgaaggaagcaacttgcgttcctcatcttttcaaagtcagtgttactcataatgagtataacaatgagaagcggcaaaggataacagtaaggacctgttgctccaatcaact

SEQ ID NO: 26844 - DNA, 369 bp, Glycine max
  unsure at all n locations
  Clone ID: LIB3108-027-Q1-K1-D6
acgccacgcgtccgaacatgcatcacgaaagttactgaagcggttgcagccgccganngaagggagggaagccggaaacatgaagcaagatgnaagggaccatacaacactgcgcacagcagacccgatacaagaggtgaagcctgtgggtgattacttaatgagcaagcatagaaaagatggccatgctcatgaactgaacctcaaaagctgacgtcgctactgcgaaatcatgagctgtacgaatccctataggaatagtcataaaggcaacaacatctggtcatataccgaattatggatatgaatttgagagtctagaaagcactgctggtacacttgtgacattcagagcattattatatacta

SEQ ID NO: 26845 - DNA, 457 bp, Glycine max
  Clone ID: LIB3108-027-Q1-K1-D7
acccacgcgtccgagctgatcgagataactttaaacaggctgtttaaaatgaatgtccttgggatctacgctgctacaattttggtagcatggggatgccatgcgtacgatatgttccctctccgaatgaacactggctatggtgcccgtactccggaagtgaaatgcgcaagttggaggcttgctgtggaagcacacaacatctatggctttgagaccattcctgaagagtgcgttgaagcaacaaaggaatacatccatggcgaacaatatagatcagactccaaaacagttaaccaacaagcttacttttatgccagagacctcgaagtccatcccaaggacacatttgtgttcagtatatatggcaccgtactctctaatattccatactacaaataacatggatatggggtggagaaatttaactcgaccttgtatgatgaatggtttaaca

SEQ ID NO: 26846 - DNA, 332 bp, Glycine max
  Clone ID: LIB3108-027-Q1-K1-E1
caaaaaaaataaaaatacaaaaaaaaaaaaaataaaaaatcaaaacaatacaaaacaaaataaaacataataaaaacatcaaaagatcaaaaaaaaaacataaaaaaccaaacaaaaaaaaaaaaaataaataaaaaaacaaaaaactaaaaaaaatacaaaataaaacaaataaaaaaatcaaaaacaaaacaaaaaaaaaaaaaaaaaaaaaaaaacaaaaaaaaaaaataacaaaataaacataaaaaaataataataaaaaaaacaaaaacaaaaaaaaaaaataaataaaaatacaaaaaataaatcaaaaaaaaacaaaataaaaa

SEQ ID NO: 26847 - DNA, 309 bp, Glycine max
  Clone ID: LIB3108-027-Q1-K1-E2
cgctccgccagcgcgtccttcgtcgcgggccattccgcgatgttttggccgcgtccgacgcggacgacatcgggatccttcaggtggtgccagatgttggcgaagccgaagaggaggacaacctgctgaacgccgagcaccacttcgcgagcttcaaggccaagttcgccaagacctacgccaccaaggaggagcacgatcatcgcttcggcgtcttcaagtccaacctccgcagagccaggctgcacgccaagctcgacccctccgccgtccacggcgtcaccaaattctccgatctaactcccgccg

SEQ ID NO: 26848 - DNA, 304 bp, Glycine max
  Clone ID: LIB3108-027-Q1-K1-F2
gcatggcaaggccatgcgtacgatatgtaccctctccgaatgaacactgctatgggcccgactccgatgtaaatgccagttggaggcttgctgtggaagcacacagcatacttggctttgagaccattcctgaagagtgcgtagaagcaacaaaggaatacatccatggtcaacaatatatatcagactccaaaacagttaaccaacaagcttacttttattgccagagacctcgaagttcatcccaaggacacatttgatgttcagtatagatggcaccgtacttctttaatattccatacta

SEQ ID NO: 26849 - DNA, 292 bp, Glycine max
  Clone ID: LIB3108-027-Q1-K1-F4
tgacggtggtcaactgaccgaggcagttcggcgtcgaccctacactgttgtactctttgatgagattgagaaagcccatcctgatgtattcaacacgaaagcatagccaaaaccttacttcgaagtctctgattttcctaatggctccgagtcccgatgccggagcggcgggatccgtttcgagctacgacgccatgatcggagcttcggttgtgctgtcattgatggctatcttgaagcattgaattccataatttcgttgggtttgtacaaaattgattccattcatata

SEQ ID NO: 26850 - DNA, 351 bp, Glycine max
  Clone ID: LIB3108-027-Q1-K1-G1
cgtccgaatggaaagaaatcaacatacacaaacactttaacatatggatttgctaagggtgcaaacgatagctttcagggccaaatatgctgccatcccagccatgcttgttagggcagagacagagcaaccaggcatcacaaccgttcaaggggtgaaccttgaggtgccaattattgattttagtgacccagatgaagggaaagtggtgcatgagattttggaggcaagtagggactggggcatgttccaaattgtgaaccatgacatacctagtgatgttataagaaagttgcaaagtgttgggaaaatgttctttgagttgccacaagaagaaaaagagtgaatgct

SEQ ID NO: 26851 - DNA, 419 bp, Glycine max
  Clone ID: LIB3108-027-Q1-K1-H1
cgcgtccgcccacgcgtccgcccacgcgtccgcaaaatttgcatcattcactatgacagcttccatccgtggcgttccaggcgtcaccaagcggttggcagtggcaacgcagaggagatcactcgtagtgaatgctgccaaagctgttgaagcggaaaaggtcagttatgacattgttcttggatgttagcaatggaatgaggtacttgatgttcgccgcggcggctgcggctgctgtttgctctgttgctgggatggcagtggcagatgagccaaaaccaggaaccccagcagtcaagaaaaagtatgctccgatttgtgtcaccatgccaactgctatgatttgtcgcaattgagggactcggattttattttaactttgatgatcggaaatgtgcatttgggttgtaataatgttt

SEQ ID NO: 26852 - DNA, 249 bp, Glycine max
  unsure at all n locations
  Clone ID: LIB3108-027-Q1-K1-H2
gcgtccgcccacgcgnccgcacatatacaaacaaggttcaagacaccaccgaccggagacattagaaacaccatcaggcagaccacggccaccacacagagcagacaacacgaacggaangcggccaaacctaatcaacccaaacagaacagacaacacaaaggcacctagcggacaagaagaaggagaaactcgataataacatcacagaaagaggatacgagccacacactaccactaataacagaa

SEQ ID NO: 26853 - DNA, 370 bp, Glycine max
  unsure at all n locations
  Clone ID: LIB3108-027-Q1-K1-H4
cgcgtccgattagagaaaaatggttgatttagttgatagtaataaatnngttttaaatnnataatnnntgaaaaattatcgttgtcattagtactcatgtggcttctaatggtttgtcaatacattctctttctttttttaatgaaaaatatttctaatataaaaataattaatataaaaaatattataaaaaaataaacgtcatttcaaactaggatctcattaatatgaatatggatggatggagtgattgttaaaagaaaaattatcttcaatcatctttctttcttgaagagacgtctccaatcatcttacttccttctccattacactgccattgattttcataaagaacatgacttcattcatt

SEQ ID NO: 26854 - DNA, 250 bp, Glycine max
  Clone ID: LIB3108-027-Q1-K2-A10
tcataactctcactttgactaaaatagtacaactcaccaaaaatttcagcaaatacctaaccaccttagggtctcttcatacatacctttactctttccccatgcaaatttgtgacatctttacacgaaaagtacccatctaggctacattatccaaaatcaacatttttctaaccatcaatatcaactctactgacacacttgtctttatcttctcacccgtcatgtctcaaacccaattcgacgatgg

SEQ ID NO: 26855 - DNA, 250 bp, Glycine max
  Clone ID: LIB3108-027-Q1-K2-A11
ttcccatttttcacaacacctacacaagatgtttcttcacattgcggtcctacatttccagcgatgatgcactttccatgccgggttccaaaacttctatgtagcacaccttaaaagttcaaacacccctttatgctaacccttcaatccaccttctaatgtcactctagatgactttgtgtacacctgcttaactcaaacttcaaatttcacaaacataaatcaatgcttcttttaccccaacttttgt

SEQ ID NO: 26856 - DNA, 388 bp, Glycine max
  Clone ID: LIB3108-027-Q1-K2-A2
cccacgcgttcgttcacgcgtccgtccacgcgtccgattaatcccttagccaacacatccatcggggccacctctgctattcagcggtcagcattcactggtcaaactgctctgaagcagctcaatgagttcgtccgcaagaccggtggctccggcaaaggtcgcactaacatgcgccgcaccgtcaagagtgctcctcagagcatttggtatggtcctgaccgttccaagtacttgggtccattctcggagcagatttcatcatacctgaccggagaattccctggtgactacggatgggacactgctggattatcagctgacccggaaacctttgtcagaaccggtagctggaagttgattacagcacatgggcaatgcttggtgc

SEQ ID NO: 26857 - DNA, 243 bp, Glycine max
  Clone ID: LIB3108-027-Q1-K2-A4
cccacgcgtacggtcttacgagcgtagggcttttctcatccatattctatctccacgccgctgagtctgtttcacactcattctatgcgtctatctctcggtcacaccctatactttactctctgtgtctgacagctaatatgcaaggtggaatgagatcactcttggcacatgggaatgtcattagaattgctgttctacaacgcgtgcgcatgttgaaccctctggtacagacaattgctt

SEQ ID NO: 26858 - DNA, 461 bp, Glycine max
  Clone ID: LIB3108-027-Q1-K2-A5
ctccaattagggtttttgtgatctgcagctactatgggtaagggaacggggagtttcggtaagaggaggaacaagacccacaccctctgtgtgaggtgtggccgccgcagcttccacctccagaagagtcgttgctctgcgtgcgcttaccccgctgcgcgcaccaggaaatataactggagcgtgaaggccattaggagaaagaccaccggaactggaaggatgaggtacttgcgtaacgtgcctcgcagattcaagagcggcttcagagagggtaccgaagctgcacccatgaagagaggagctgctgcctctgcctaagctttgaatgaatgacagcaattcttgctgggtcagtgaattataggagttaatgcttctgtgttggtgccaaactctttggaacacattttctttctggcgttttaatttcatttaatatgtagtggctttggatttcg

SEQ ID NO: 26859 - DNA, 380 bp, Glycine max
  Clone ID: LIB3108-027-Q1-K2-A6
actttttctacttaccttttctcttaatccatttacgatggcagccatggcaaccacaaccctgtcttcaaaccccaaactctcagtcttcaacggaaagcccgtcacatattcttcccgcgtcgcgcccaccaccaaattatcctcatccaaacaaggcacaatttccatgtccctaaccccacccccctacgaccttcagtccttcaaattccagcccatcaaagaatccatcgcgtcacgggaaatgacgcgccgctacatgaccgacatgataacctacgccgacaccgacgtcgtaatcgtcggagccggttcggccgggctctcctgcgcgtacgagctcagcaagaaccccgtcgtgagcgtggccatagtcg

SEQ ID NO: 26860 - DNA, 439 bp, Glycine max
  Clone ID: LIB3108-027-Q1-K2-A7
cccactcgttcgggttactgttgaagaagataatgtggctgcgacacctgatgtgaaaaatgctccattcagtactgattttcaacctagcaatgatcagtctgaccataatgtagaaaattctgagtctcagcctgacaaggatctctccagtctcaaagcagaagttcttcctgcatctgaaacccaggcttctagtgccgatgcaaatgaagggtcattgcccaaccgtgaattagacaacacaaaagaacttgctaatagtgagtcagagaatcccaagttactgcccgacaaccaatcaagcaatgatgagggcccacacagcaatcagcatgttgagtctgatgcacgactcatcaatccattagcaaacgctgaatctccagctgatgataatcttgttagttccgaagctacccttgaccataagcctgcg

SEQ ID NO: 26861 - DNA, 213 bp, Glycine max
  Clone ID: LIB3108-027-Q1-K2-B11
gtaccgaatctccaatttcgggctacgacccacgcgtattcatgatacgcctggaccgtcctacttttatttatgcaatagatatcgctgaactggaggccttattcgtatatgaaacgtgttcgtaaaaaaaggtgtcttatccaatgaatcacttgatagatcacctctgaagccatgaccatatgatcgtcattttaattgctatgatgc

SEQ ID NO: 26862 - DNA, 386 bp, Glycine max
  Clone ID: LIB3108-027-Q1-K2-B4
gagagagagagagaggagaatgttgagtctctcagttgcttcaccttcttcttcaaccatttcgtttctgccaaagccattcaatggcattcagctccgtcgcactgccacatgctccatcccacccacgaagcgcagctcatttgtgccggtggtggtgatgtctaagaggacggaggaattgaaggaaattagacaaatgactactgaacgaattaacgaagaggttgtcgaccttaagggcgagcttgtcatgcttcgccttcagaaatcggctcgcaacgagttcaagtccagcgatttcggtcgcatgcgcaagaggattgctcgcatgcttactgtgaagcgggaaagagaaattgaagagggtatcaataagaggttgt

SEQ ID NO: 26863 - DNA, 437 bp, Glycine max
  Clone ID: LIB3108-027-Q1-K2-B6
tccacgcgtccgcttcatccatagacatggccaccgtcacttctgcagccgttgctattccctgattcactggcctcaaggcaagcgcaggcaaagtgagtgccgcagttaaagtctcagctccccaagccacaaggttgggcatcaaggcttcgctgaaagacgttggagtcgctgttgtggccactgccgcgagtgcagtgctggctagcaacgccatggccattgaagtgttgctgggtggtgatgacgggtctctggctttcgttcccaacaatttctccgtggcctctggggagaagatcgtgttcaagaacaacgcaggtttcccccacaacgttgtgttcgacgaggacgagattcctagcggcgtggatgcaaggaaaatcttcatgagcgatgaagaccttctcaatgcgcctggtgagacttacagc

SEQ ID NO: 26864 - DNA, 68 bp, Glycine max
  Clone ID: LIB3108-027-Q1-K2-B8
tataagtagtatgatatatctgcaacaacccttttcgtcatgatcatcttccaagtaggttgacagaa

SEQ ID NO: 26865 - DNA, 233 bp, Glycine max
  Clone ID: LIB3108-027-Q1-K2-C1
tccacgcgttcgctccagttttcgttagagacactgtgtcatgatttctctgaatctaacacagacccgattgctacgaatggcatccatcaggggtcaaggtggaattcaacagttgctggctgctgaacaagaagcgcatagaattgtcaatgctgcaaaaaatgaaaaattggctagactgaatcaagccaaagaagaggctgaaaaggaaattgcctagcatagggcta

SEQ ID NO: 26866 - DNA, 420 bp, Glycine max
  Clone ID: LIB3108-027-Q1-K2-C11
cccacgcgttcgcccacgcgttcgcccacgcgttcgcccacgcgttcgcccacgcgttcgcccacgcgtccgcccacgcgtccggaacaagtagttgagaactaagaaggagaagcaaatggcttcctcaatgatctcttccccagctgttaccactgtcaaccgtgccggtgccggcatggttgctccattcactggcctcaagtccatggctggcttccccaccagaaagaccaacaatgacattacctccattgctagcaacggtggaagagtgcaatgcatgcaggtgtggccaccagttggcaagaagaagtttgagactctttcctacctgccagaccttgatgatgcacaattggcaaaggaagtagaataccttcttaggaagggatggattccttgcttggaattcgagtt

SEQ ID NO: 26867 - DNA, 301 bp, Glycine max
  Clone ID: LIB3108-027-Q1-K2-C12
ttcaatcaacaccaatcattcccttgggaatttcaaaaaaaaatcagaggcttataaaataaaacctttaacacaacacaatccaaaatattataaacagatacccaaaaatgtaaccatgattatttacactccattataaatataatatcaccacacacaactaagaatacttcactaaatcttcgttccttatgaccactatatattacatactgcttaagcccacaatattaccctttcattctccttcaagcatagttgttgtactaactattctgtacgtataaaaaatggaaag

SEQ ID NO: 26868 - DNA, 377 bp, Glycine max
  Clone ID: LIB3108-027-Q1-K2-C3
gacaaaagttgcgtatcaatagcatactcttactctgattcgttagtgaagaaaaatggcaacgatcatcgccggctccccaactacatcaatcactcgcacaggtcatgtgctcaaacgacctgttggggcctcatcctctaccgttcttggattgccagcaatggccaaggcggtgagagtgaggtgctccatggaggaaaagccttcaagcagctcaaacctagggatgggggcatccttgttagcagctgcagctgccgcaaccatgtcaagcccagcagtcatggctttggttgatgagagactcatcactgaaggaactgggcttccctttgggcttatcaacaaccttcttggttggatcccgtttggtg

SEQ ID NO: 26869 - DNA, 447 bp, Glycine max
  Clone ID: LIB3108-027-Q1-K2-C9
gtctgctgctacaaaagtctcccttccaatgatcatctgaaattacataggatttatagggtcatcaagaactcttcagcatcacaaaaggtgatttataatcaaaaagcaagggacagacacacagaagttgttatcttgaatcagaaaacatgatgctaagaagctcttcaacaccagttcttggatccctcctctcttccttcacagatagccctaacaacaatattcactcagaaacctgtcatgcactgaaacactttccaccaaccactgtcccacaacattatcacaaacttactttccaccaaactgggtcctctgcatgtggttcttctccaatctctccctcaattggtgagcttgaaaggcaaaacaaaggcttgatcagaagagtccaatctgatgggaacttgcaagacttggccttcttttcttgcaacaatg

SEQ ID NO: 26870 - DNA, 427 bp, Glycine max
  Clone ID: LIB3108-027-Q1-K2-D11
gaaatagaaaaattagaaaaagagtgtgctgaaatagagagttctattggctctgaatcagagtgaaaaactaaagatcgctgttgatctgctttcatgaaattcatgcagtccattggtcttttaagaaaggaagatgtgatgtcttctgttcaatctagacctttaggtgagctagaagaggagagggaaaaggcactatcaattctcaatattgctgtgagttcactttataatgacgttaagcatagaatacaaaatatatataatgatatgtctggaggaagaaatcaatacaatatgttgcagaatgactctggaactatttttgctgagtttgaagaacaagtagagaagtgtaatcttgtgacagagtttgttaatgatctatgtcaatttattgggaaaggaccactcttctgtgata

SEQ ID NO: 26871 - DNA, 61 bp, Glycine max
  Clone ID: LIB3108-027-Q1-K2-D4
agtaaacatagcctctattaacgctacaaattaacaattaacaaaacttatataatataaa

SEQ ID NO: 26872 - DNA, 359 bp, Glycine max
  Clone ID: LIB3108-027-Q1-K2-D6
tcgggctctgctagctggtgcggatgtgttggccttgtttgtgttttcgacaattggaagatatagtcatggactttctgttttggaccttgagacactgcgcactgctgacccttttattgcggtgtggtttttgggtgcttacttccttggaggttttggggaggatggccgcgggatgaacggtctctcgaagggtgtcgttgctactgcgaagtcatgggctgttgggatccctataggaatagtaataaaggcagcatcatcgggtcatctaccgaattatggttttgtatttgtgagtctgggaagcactgtttgtttacttgttacattcagagcattattatatactattc

SEQ ID NO: 26873 - DNA, 342 bp, Glycine max
  Clone ID: LIB3108-027-Q1-K2-D7
tgttgatcgagataactagaatcagtgtgattttaatgaaggtccttgttttcttcggtgctacaattttggtagcatggcaatgccatgcgtacgatatgttccctctccgaatgaacactggctatggtgcccgtacttctgaggtgaaattcgcaagttggaggcttgctgtggaagcacacaacatctttggctttgagaccatttctgaagagtgcgtttaatcaactaatgaatacattcatggcgaacaatttatatcatactccaaatcagttaaccaacatgcttacttttattccttagacctctaattccattccaaggtcactatttgtg

SEQ ID NO: 26874 - DNA, 453 bp, Glycine max
  unsure at all n locations
  Clone ID: LIB3108-027-Q1-K2-D9
ggccatataattttttttttatttgaaataatgtccgggatcatccacaagattgaggagacgctccatgtgggagggcacaagagagaggagcacaaaggagaacaccatggtgagcacaaaggtgaacacaaaggagaacaccatggtgagcacaaaggtgaacacaaaggagaacaacaccatggggagcacaaggagggacttgtggataagatcaaggacaagatccatggtgatggccatgacaagggtgagaaaaagaagaagaaggacaagaagaagaaggagcatggacatgaccatcatggtcatagcagcagcagtgacagtgattagatcttatatgttaagcacgtgtacggtacgatggtagtgaggagccagaatccctcttnctgctttatgatantaataaaataaaatagcgattccggaaatcatgtctgtagc

SEQ ID NO: 26875 - DNA, 311 bp, Glycine max
  Clone ID: LIB3108-027-Q1-K2-E2
cccacgcgtccgcttcgccgccgtggccaccgtcgcgattgcggtggccgcgttcgacgccggggacatgctgatccgtcaggtggtgccagatgttggcgaagccgaagaggaggacaacctgctgaacgccgagcaccacttcgcgagcttcaaggccaagttcgccaagacctacgccaccaaggaggagcacgatcatcgcttcggcgtcttcaagtccaaccttcgcagagccaggctgcacgccaagctcgacccctccgtcgtccacggcgtcaccaaattctccgatctaacttcgggcgagt

SEQ ID NO: 26876 - DNA, 325 bp, Glycine max
  Clone ID: LIB3108-027-Q1-K2-F11
acggccacgcgttcgagtatcaagcatcacgattatcacagatccatttactccaagtccagggtcagtcactatcccacttctggggagtgcccaagaatctgaagttgatatcgatggccatgatattcatcgtccaagcagtattcgtgccttgcttacgactccaacacacactgatcatcgtttgtggcgtaagtctgatgattcattcatgcactctgtatttagtggctatggttatggtcctgtataacctggctcaccaactgaacgttatggccatcaatggacgttgacagaaaaaatgccattaaatttgtaa

SEQ ID NO: 26877 - DNA, 404 bp, Glycine max
  Clone ID: LIB3108-027-Q1-K2-F2
tctcccacgcgtccggatcgagataacttgaaacagtgtgttgaaaatgaaggtccttgttttcttcgttgctacaattttggtagcatggctatgccatgcgtacgatatgttccctctccgaatgaacactggctatggtgcccgtactccggatgtgaaatgcgcaagttggaggcttgctgtggaatcacacaacatctttggctttgagaccattcctgaagagtgcgttgaagcaacataggaatacatccatggcgaacaatatagatcatactccaaaacagtttaccaacatgcttacttttattccatagacctcgtagtccatcccaaggtcacatttgtgatcagtatatattgcaccgtactctctaatattccatactacataaaaacat

SEQ ID NO: 26878 - DNA, 390 bp, Glycine max
  Clone ID: LIB3108-027-Q1-K2-G1
aatttaaagaaatcaacacacacaaacacatctacatatggaggtgctaagggtgcaaaccagagcttgcaaatccaaagatgctggcatcccagccatgtttgttagggcagagacagagcaaccaggcatcacaaccgttcaaggggtgaaccttgaggtgccaattattgattttagtgacccagatgaagggaaagtggtgcatgagattttggaggcaagtatggactggggcatgttccaaattgtgaaccatgacatacctagtgatgttataagaaagttgcaaagtgttgggaaaatgttctttgagttgccacaagaggaaaaagagttgattgctaaacctgctggggctgattctattgaagggtattgcacaaagct

SEQ ID NO: 26879 - DNA, 332 bp, Glycine max
  Clone ID: LIB3108-027-Q1-K2-H11
tcgcgcacgcgtacgttgacctatcttggtgtagatttgaagtttataccttcaaattattggaaccattttatatagccttggggttctgagtctctgctgctatggctctacacgttcttcttgtgttgatgttgttgctgatgtccagccttagatacgctacatctgatccatatattgaatacgatatactagaagcatacgaagacctgaaattttctgatatcgagccacttatcatgagagtctcttacagaaggctaatgcaagatatggattgactctagtcgtgcttgactagatgcagtgcacatttgaggcccaacttg

SEQ ID NO: 26880 - DNA, 386 bp, Glycine max
  Clone ID: LIB3108-028-Q1-K1-A1
aagacgcagacagtcccgtgctaaagctgaatcagaaaaaaaggctgcaaggaatcggaagccatacttgcatgaatctcgacatttgcatgcactgagaagagcaagaggatgtggaggtcggtttttgaattcaaagaaagatgagaatcaacaggatgaggttgcatcaactgacgaatcacagtccactatcaatctcaattctgataaaaatgagcttgcaccatcagatagaacatcctaaaactacagaaatggtgatgctgtagattgcagggatctgttgtgtatatctatattgggagatgaatctccaaccaacagtatcctcagatatctccctattattcattctgtcgtacaacgccataggtataagtata

SEQ ID NO: 26881 - DNA, 368 bp, Glycine max
  Clone ID: LIB3108-028-Q1-K1-A10
cgattctctcatgggcacaggagaaggaaggagctgatgaatccgataagatcttcgttaaacagacagaagacttcattacgtggctaagagaagcttctgaagaggaagacgaagaagatgaagattgagcgtgactagatgagtttcggttttttttgcggtggacgggaagcagcatcaggtttcaggaaagcttggattcaaatcagtgtactaagattataaaatttgtgtaggtctttaagcctgaacttggtgagagagacatggttctggtcttttgttgatgttgttccgagtaacaaaagttagtctcgtacaatacttgaaatgaagaacgttacctggtcagtgccaatatttgc

SEQ ID NO: 26882 - DNA, 417 bp, Glycine max
  Clone ID: LIB3108-028-Q1-K1-A2
gagaaatttcaggtgaattcgccccatggtcagccacgccacatcagaagggtatatagttcaatgacaacatatattggagggttagagttcgaagttattgtagtatatacaagctggttttttagtacgggcaatcaatgattcagaatattgttatcgtttgatttctttggtttgtagtcttgtagagtttcttatttgttctctgtaccctcggcagaagaggagggaaaaaaatagcacccccacggccccacctactctctttatatattttttctgtcaaacttagcagcagcaacaatgaagtcatttctcattaggtgggttttccgtgaaactaagaagtcccaaaactgtcaataatgggttccgaatgatggatattttaagttaaaagtagttagattagtg

SEQ ID NO: 26883 - DNA, 86 bp, Glycine max
  Clone ID: LIB3108-028-Q1-K1-A3
cccacgcgtccgcatgccatttatgtacccaagtgattgatgccttaaaagcaaacgtctcaattccaatttactctattaattgg

SEQ ID NO: 26884 - DNA, 408 bp, Glycine max
  Clone ID: LIB3108-028-Q1-K1-A4
gcactcattctttcattctcattgccgtcacagagagagacaagaaacaatgaagttgaaccctagggtttcctcaagccgtcgcaagagccgcaaggctcacttcaccgctccgtcgagcgtgcgccgcgtcctgatgagcgcgcctctctccaccgatctccggtcaaagtacaacgtgcggtccattccggttcgcaaggacgacgaggttcaggtcgtgaggggaacctacaagggccgcgagggcaaagtggtccaggtctatcgccgcaagtgggtcatccacatcgagcgcatcacccgcgagaaggttaacggctccaccgttaacgttggcattcacccttccaaggttgtcgtcaccaagctccgaatggacaaggaccgcaaatccttgctcgatcg

SEQ ID NO: 26885 - DNA, 344 bp, Glycine max
  Clone ID: LIB3108-028-Q1-K1-A6
cctgcagatagcagccatttgtcaagaagctggaatgcatgctgttcgcaagaatagatatgtcatactgccgaaggacttcgagaagggttacaggacaaacgtgaagaagcctgatactgactttgaattttacaagtgatgatgttgtagctttgagattggtgtgtgtactcgcgaagttaaatatacagtgaagggggtacatttctagaggaatcacgatcatgagaaatgatgcaatgtttctgtttcttgttgacctttcatcttattttgtaatttagattatttaatttactaaatatattaattgtggaagctaaatgttgaagtcgtactgc

SEQ ID NO: 26886 - DNA, 221 bp, Glycine max
  Clone ID: LIB3108-028-Q1-K1-A7
cccacacgtactcttacctggtttcctttctaccatggctgctaaaacacaggctgggattcacgctcgtgcgaacgaccctgacatccactgcgacgcgtccttcaattcatctttcccacgattatgcctatcgagaacaatctccagggcatactcccgcgataaatctagcgattactcttgaaataccgattcaagcacaaatttccattcataca

SEQ ID NO: 26887 - DNA, 260 bp, Glycine max
  Clone ID: LIB3108-028-Q1-K1-A8
cttacgcgatcgtctatacctcgtctgacacgtcctcgacttcaaacgttcttggacggcaagcgagtcatcctatgtcgactgctacgctgcctcggcatggctatcggaaggcatagtggacaccctgaactgtggctatacatatatcaccaggtggcggtttaaagacgcactttagacaataatgatattattgacacccatttctatagcctaaatggatatctcttaatggacgaaagctataggtttaaccg

SEQ ID NO: 26888 - DNA, 426 bp, Glycine max
  Clone ID: LIB3108-028-Q1-K1-A9
attcatgaaaggaaaacctgaggagccgaagtgtggcttcagtcgcaaagtggttgagattctcaagcaagaggaagttcagttcgagagttttgacattctctccgacgacgaagtccgacagggcctcaaggttttctcaaactggtcgagctatccgcagctctacatcaaaggggagctgattggagggtccgatatcgtgttggagatgcagaagagtggagagctgaagagcgttttaaccgagaaagggattgttccgaaggaaaccctcgaggacaagttgaggaaactgatctcctcggaacctgtgatgctcttcatgaagggtataccggatgctcctcgttgcggttttagttcgaaggttgttgacgccctcaggaaagatgggattggctttgggtcttttgatattttgag

SEQ ID NO: 26889 - DNA, 118 bp, Glycine max
  Clone ID: LIB3108-028-Q1-K1-B1
tcgcccacgcgttcgcttacttcccctatggctcgtcactccttgctcttagccctcctgcgcttcgccgccgtggccaccggcgcgatggccgtggccgcgttcgacgccgacgaca

SEQ ID NO: 26890 - DNA, 329 bp, Glycine max
  unsure at all n locations
  Clone ID: LIB3108-028-Q1-K1-B11
tcgggggaatgagttggaaacacacaanttttgtgtaaccagcacctgaaagttttgcgtcatgattgtgcggcaattgagctgcaacactgagttgcatgctgatctccgcgaacgggcttggattgccaatgctgtataagaactttccagtcttggatttgggaggttgttcgttttaatcgagttgcattacatcctttcttttttcagctttctttttttctattagttcctttcttatttttttttctatcattttctcagcttgtattgtaaatttttttttttctatattctgttcttttatttctttttttttttttttt

SEQ ID NO: 26891 - DNA, 357 bp, Glycine max
  Clone ID: LIB3108-028-Q1-K1-B12
cccacgcgtccggctagctcggatctctctcgatccttggccatgacgaagcgcaccaagaaggctgggattgttggcaaatatggtactagatatggtgccagtttgcgaaagcaaattaagaagatggaagtgtcccagcatgcgaagtatttctgtgagttttgtggaaagtattctgtgaaaagaaaggcagtagggatttggggttgcaaagactgcgggaaggtgaaggctgggggtgcttatactctcaacactgcaagtgctgtcactgtgaggagcaccatccgtcgtctgagagaacaaactgaaagttgatcaagagaagcaactatatcagtgtccctagtttta

SEQ ID NO: 26892 - DNA, 423 bp, Glycine max
  Clone ID: LIB3108-028-Q1-K1-B2
ctgacattgcttctcctccacacacgctcagagacacacacttttgcagtcacattgagaatggggcgtgttcgcacgaagacggtgaagaaatcctcgcggcaagtgatagagaggtactactcccgcatgacgctggacttccacacgaacaagaaggttctggaagaggtggccatcattccctccaagaggctccgcaacaagatcgcggggttctccacccatctcatgaagcggatccagaagggtcccgtgcgtggaatctccctgaagctgcaggaggaggaacgcgagcgtcgcatggacttcgtccccgatgtctacgccatcaggaccgaccagatcgaggtcgacaaggagacgctcgacatgctcggcagcctcgggatgtccgaggttcctggcatcgttcaagtggat

SEQ ID NO: 26893 - DNA, 386 bp, Glycine max
  Clone ID: LIB3108-028-Q1-K1-B3
cccacgcgtccgccaaggacaagaaggtcactgctctcaaggagaccaagaagcgggtggaggagaggttcaagaccggcaagaataggtggttctttaccaaactcagattctgatctcgcaatcgtgaggttttattattagggcttttggaatgttgccttttttttaatattgtattcttgttttgcaaatcttatcaaaactattattctgctcttaagatttgtcgtcatcgtcttcttcttttgttaattaatgcatttgccttcttttaatttacggggaaaaaaaaataacaaaattaaaatttcatttatttattttattcttttcaaaatttaattttataaattaaatttaatatttcaattataaaataaaaa

SEQ ID NO: 26894 - DNA, 241 bp, Glycine max
  unsure at all n locations
  Clone ID: LIB3108-028-Q1-K1-B4
tttggaaagtgttgtttttctttttttcatttgcattgcaaagcaaaaaccttgcaaattgcaatggcttccaacaaggttattgccaccatcttggttctttctctccttgcctactcaacatcattcaccaatgcatgtggcacatgccacccaaaacctactccttctacccctgctncatcagggaagtgccccaaggacacattgaagctatgggtgtgtgctgatgttctaggac

SEQ ID NO: 26895 - DNA, 352 bp, Glycine max
  Clone ID: LIB3108-028-Q1-K1-B5
ctgttcttatattattctctaacaggcggggtggattcaaaagaaataaatatgatacaactttttgcaataaaaattgcaagatatatatcaaagagaaaaatctcttctaaatttagtgccaaagaaacaatcatgaatgtcctgagtactgtgaattccctatataaacccttttgatgacccaacagtctcttcaaatcatcaaagcccccagaagaatccacacaacacatgaaacaccttcaattcctagcttctccctaacctttattctcactaacatcatatcactatacttttaccttaacatgactaggtaccaccatccctactactactacttgtggga

SEQ ID NO: 26896 - DNA, 409 bp, Glycine max
  Clone ID: LIB3108-028-Q1-K1-B6
cccacgcgtccgttgttctcttctttctttcgatcagggtttcccctcgtctgcggggtcgtttcgttctcgaataatcgatctacgataatgactcgcggtagccagagggatcgtgatcgcgaaagggctcaggctagaactggtgctaaaggcaagcagaaagatgatggattgacccctgaacagcgcagggaaagagatgcaaaggcgctgcaggagaaggccgcaaagaaagcggcacagggtgcaggagggaataatgcagctggaagcaaaaaaataggcaataattcaatgagtagtttgagtttgccgtttgttgattgtggacatggaatttgtggaaattttatgttgcattattcatggagtatgatgtgtttattaatgtaacttgcgacggaag

SEQ ID NO: 26897 - DNA, 390 bp, Glycine max
  Clone ID: LIB3108-028-Q1-K1-B8
cccacgcgtccgcctacgcgtccggtgatctccaagggcaagttgtcgaagctggaaggtgttagtgtgaagattgaagtgttgtggctcaaaatcgtggagctaactcgcgacggcgatgacctccaattctcggtgggtgttgcctctgctggcttcagcgtcgacagcttctccgagagcccccagtgtggctgtggattcgcttgcgacaatttcaatcaaaatggtgatgtttcttctctttagaattcggatctgttactatgtttcttccgtccttaattaattattgaacagcatcatcatgttgttttcctttgcgtaaattatgactatggtagacaccatacaaattgatgtaagacaactagcattggctgcatcctc

SEQ ID NO: 26898 - DNA, 192 bp, Glycine max
  unsure at all n locations
  Clone ID: LIB3108-028-Q1-K1-B9
actggaggtacagcgagtccgcacggcacccggcggccatgccgncgncggccgtcggccctgtgaagcgcccgcgggccgattattccgatatgcctgttggtccggaaatgcatggctactattgagatgatggaagaggatctggacaacatgcaattagggacactgattctatcaatgcgtcttatg

SEQ ID NO: 26899 - DNA, 325 bp, Glycine max
  unsure at all n locations
  Clone ID: LIB3108-028-Q1-K1-C1
cccacgccgtacgggggaagatgaacttgtagatggatggaagcnggtgctgccgctgggggatcataagcgggcaatgctgctagcgtcatggcgaaaccgctcagtacttacatgtcacagaatcacgcgctatggtcagaccatatagcaccatcggcgaactgatatcgtgggaccgtggccagtggatacgaagtggacacagaagctctgtgcgagcaagctctctacactccaattatacatcgtgtgtatttgccagatgacattgttgaaggaaagataatacttgctgcacctggaatttaacgaactggtgttc

SEQ ID NO: 26900 - DNA, 425 bp, Glycine max
  Clone ID: LIB3108-028-Q1-K1-C10
gtggaatcaactgtgaggccttacttaatggatgtcatttactgttggtcaaagggggcaacatttgcagaagtaatggaaatgacggatatcttcgagggaagcgttatacgacttgccagaaggctggatgagtttttgaatcagttgcgcggtgctgcccatgctgttggagaggtggatcttgagaagaagtttgaaaagagctgtgaaagcctccggcgaggcataatgttcgcaaactccctgtacttgtgatgaggtgctgggcgcccgtctttgtgcttgtctcataccatccaaataggtgttacattttgttggaaatggtgctctgtacattgtatttgtgggattaactttgacattttgtcgaatgtgtcgccaacttgcatgaaaactatgttgagcgcttaaaaattgaa

SEQ ID NO: 26901 - DNA, 422 bp, Glycine max
  Clone ID: LIB3108-028-Q1-K1-C11
atgatgttggggatgaagaagttgtggatatcggagatgatgagatgccagtgagaaattacccctcagtggaaattgataaggataatgctagttctggcagtgattcctcatcttctagctccagtggctctgattcggatagctcgtctagtgattctgatggtgaaggggaagcgcagtctccagcagtaggttccagatcatctccatgaaactgagatctttctgatgtagagaagaggataggagatgtatgatttgtaaaaagggagcacagagaaaatgttagaataggttgttgcattagatcagcatggggagatgtgctcagcttatgtgttctagttttggtatggggaaatgtgctcagcttatgtgttttagcttttggttggaatggttgaaagaatgctggtctc

SEQ ID NO: 26902 - DNA, 374 bp, Glycine max
  Clone ID: LIB3108-028-Q1-K1-C12
cggacgcgtgggcggacgcgtgggagaagactgaaaaggggttattgtctgagaagttgggctgccttggtgtgagtgtgtatctttgtttcgagtgtgctgttcttactacattcaggttttcctgatgtctcactagacaaaactgtctcggcaacttccctgacattggtaaggggttagggaaactaggtgagatgatggtcaaaatgttgtccgatgatctttgattataaaggctaacataaattcgatcagagagcatattgccttggctgttgactggtggttggttgtaagttggtaaaccgactactaattaagattttacctttgtatggttgggtaggtggtacaataaaaatgcctcattg

SEQ ID NO: 26903 - DNA, 421 bp, Glycine max
  Clone ID: LIB3108-028-Q1-K1-C2
cccacgcgtccggcttctacttctcactttaaccattttcataaaccaaagaaaaaagggtcactccttttttttcgttgtaacacaacatgtcttcctcagaaggtgtctttgaattgggaattgatttctcggaatcaaacaatgttcttctcatgtcactaatggaagaaacccaagaagaagagtactatggcgatgatagacttgtgaccatgattcagtcattggaggcagagatcactgacactgaaatgggtcaaatgtatgagatgggacacgtggatagtcaagattgctccacgtcagtcagtgatcctaatcaatgggttgacatggaattgatctcttccttgccttttgatgagatgaatgcatggatcccttgtggagatgacatgatggaacatgcagcaatgga

SEQ ID NO: 26904 - DNA, 349 bp, Glycine max
  Clone ID: LIB3108-028-Q1-K1-C3
cccacgcgtccggcaacaacaacaatataagtcaaagaatctctgcgttgtcatcacgcttcgctagatccagccccatcatggcttcagagaagcaagcggctcttgccgtcactccctctgatgctgatgctcctaccatatttgacaagatcatcaataaggagattccttctactgtggtttatgaggatgacaaggtgcttgccttcagggacataactcctcaagctcctacacatattcttatcattcctaaattcaaagacgggttaaggggcctatccaaggctgaggaaaggcacttggaaaatcttggccgccttctgtacactgccaagctggttgc

SEQ ID NO: 26905 - DNA, 421 bp, Glycine max
  Clone ID: LIB3108-028-Q1-K1-C4
catactcttactctgattcgttagtgaagaaaaatggcaacaatcatcgccggcaccccaactacatcaatcactcgcacaggtcatgtgctcaaacgacctgttggggcctcatcctctaccgttcttggattgccagcaatggccaaggcggggagagtgaggtgctccatggaggaaaagccttcaagcagctcaaacctagggatgggggcatccttgttagcagctgcagctgccgcaaccatgtcaagcccagcagccatggctttggttgatgagagactcagcactgaaggaactgggcttccctttgggcttagcaacaaccttcttggttggatcctgtttggtgtctttggtctcatatgggctctcttctttgtctacactttcacccttgaagaggatgaagagtctg

SEQ ID NO: 26906 - DNA, 371 bp, Glycine max
  Clone ID: LIB3108-028-Q1-K1-C5
catactcttactctgattcgtttgtgattaaaaatggcaacaatcatcgtcgggacggcaactacatcaatcactcgcacaggtcatgtgctcaaacgacctgttggggcctcattctctaccgttcttggattgccatcaatggtcaacgccctgagagtgaggtgctccatggaggaaaagccttcatgcagctcaaacctagggatgggggcatccttgttagcagctgcagttgccacaaccatgtcatgcccagcagtcatggctttggttgatgagagactcagcactgaatgaactggacttccatttgggcttatcaacaaccttcatggttggatcctgattggagtcattggtctcataat

SEQ ID NO: 26907 - DNA, 379 bp, Glycine max
  Clone ID: LIB3108-028-Q1-K1-C6
atttcgttttcgtggatgctgattatgtcaatgactcgaactaccacacgagggtacgtggagcttgtgaagattgcaggactgatcggttacgataacaccatatgggctggatctgtcgctgtaccacccgatgcaccattgatggattacattaagcctcatcgcaggcatgtgatggagctaaacaagtatctggctcaagattcgagcgatcgagattcgccagctcgtcgtgggtgatgggattaccctgtgacgacgcatcatctgatcattaactcttcatctagatcttacatgacagatattagtattattaaaacaggttgcgtgaatggagcagatctcaaatgttctactgtgttttctagatctt

SEQ ID NO: 26908 - DNA, 160 bp, Glycine max
  Clone ID: LIB3108-028-Q1-K1-C7
aattttctaacatcctcttattttttctttaataaatccttctagaatctttcggatgggttatattcaatcacaataggccttcaaagaatctatcccattatgccgtatcttcatctattacaggttcccaatacacaatagctactgcacataccat

SEQ ID NO: 26909 - DNA, 368 bp, Glycine max
  Clone ID: LIB3108-028-Q1-K1-C8
atttagtggcaatctctgatctttctgaacacaaagatcccttcaaaatttcagcatggccggctaccccaaccagccgtccagctacggctacggctacggcgcgccgacgccgtcccatccctacggcgctcctcagcccccgcaatcctacggcgcgccgccttccgctcagccatactctgcagcgccctacacccagccgtccgggccctacaataaacctccgaagaacgagtcccactgtcacagcggcggaagctgcggttgctactcggcaccgtcagctactgcgtacgcgagcccgttcgtctggctagtgccgaccgtgttccctccatggacagaccctaacgttgttgcatgct

SEQ ID NO: 26910 - DNA, 182 bp, Glycine max
  Clone ID: LIB3108-028-Q1-K1-C9
tcgcccacgcgtccgcccacgcgtccgaaaaaaaaaaaaaaaaaaaaaaaaaaaaaaaagagaaaaagaaaaaaaaaaaaggggaaaaaaaataaaaaaaaaaaaaaaaaaaaaataaaaaaaaaaaaaattaaaaaaaaaaaaaaaaaaaaaaaaaggccaatcatttaaaagttccaaaa

SEQ ID NO: 26911 - DNA, 262 bp, Glycine max
  Clone ID: LIB3108-028-Q1-K1-D1
ttaatttccattgaagtccgaaaacagaaaccaaaaatacaggatgatgaaatctcataaagcaaaaacaaatgggaatgtagtttaagtacaacaaacaaagtggggtggctacagatgctttgcaaatttttcaatgacttagaagcctgggggcttgtaggcgatgaagctgatgcactgcacttggcgaacgttgtcaaatccaatgatacggatgagaactaatgaataagctattgtgttgtgttgctttgtttcc

SEQ ID NO: 26912 - DNA, 326 bp, Glycine max
  Clone ID: LIB3108-028-Q1-K1-D10
cccacgcgtccgcccacgcgtccgcccacgcgtccgcccacgcgtccgcttcgagccgaggacagttggttgaagagctcagacaagtacttggctaagtgtgccgttacatctatacttttctctggcatttggaagcgatgtatgatgtcgataatcaagtgcctttttccttgttactgtagcagatgtagatacatggtaatgttgagggggagatttagaaagttttttagataatagctgactgggaattttatttctaatgtaaattgtttacttttcgtacataatttattccgtcttaatttattttagattttact

SEQ ID NO: 26913 - DNA, 416 bp, Glycine max
  Clone ID: LIB3108-028-Q1-K1-D11
attcaacagccgaaaccctcgtcgccggaaccctagacgccggaatctccgccagagccgccaccggagcctttgtcgcaaaaatcttattagtcgagagtaatgggagcaaaggaggtggagcgggtggacggccggacaccaaaccagctgcggccactcgcctgctcacggaacttactcaaccgcgcccacggctctgcgcaatggtcacaagggaatacgattgtattggctgctgtttatggaccaaaagctggaacaagaaagggtgagaaccctgagaaagcctctattgaggttatttggaaaccaaaatccggacagattggaaaaccggaaaaggagtatgagatgatcctcaagagaactctgcaaagtatctgtctattaactattcacccaaatacaacgac

SEQ ID NO: 26914 - DNA, 419 bp, Glycine max
  Clone ID: LIB3108-028-Q1-K1-D12
gaaattgggagtccgtccaccaaaaggagtgctcttatatggtccccctggaactgggaagacactaatggcccgtgcatgtgctgcacaaactaatgcaactttcctgaagcttgcaggtccccagcttgtccagatgttcattggtgatggagcaaaactagtccgcgatgcctttcagcttgcaagggaaaaatctccctgcattatatttatcgacgagattgatgctattgggaccaaaagatttgatagtgaagtaagtggggatagggaagtacagcgcacaatgcttgagttgcttaatcagcttgacggcttcagcagtgatgaccaaataaaggtgattgcagcaactaatcgtgcagacatcttggatcccgctctcatgcgatcaagtagattggatcgaaagattg

SEQ ID NO: 26915 - DNA, 425 bp, Glycine max
  Clone ID: LIB3108-028-Q1-K1-D2
cttcttcttccttcccttctctcattcaagacaggcctgtctttgctgcccctgcccccatcatcaccccaactgtgagagaggatatggcaaaggaatacgagcaagctattgaagaactccagaaattgttgagggagaagagtgaactcaaagccacagctgctgagaaagtggagcagataacagcttctctgggaacatcatcatctgatggcatcccatcatcagaagcctcagacaggatcaaagctggtttcattcacttcaagaaggagaaatatgacaagaatccagctttgtatggtgaacttgccaaaggccagagccccaagtttatggtgtttgcttgctcagactcaagggtgtgcccatctcatgtgctagatttccaaccaggagaggcctttgtggtcagaaatgtt

SEQ ID NO: 26916 - DNA, 422 bp, Glycine max
  Clone ID: LIB3108-028-Q1-K1-D3
cccacgcgtccggttttcctcttctgaatccaccgccaccgcagcgtggacggaatgagagtgcagccatagcagcagcagcagcagttattgaagtgctgctctagtttgaggcacaatgagattggagaaatgctggttttgctcttcaaccgtataccccggacatggaatccagtttgttcgtaatgatgcaaagatttttcggttttgtagatcaaaatgccacaagaactttaaaatgaagagaaatcctcgtaaggtaaagtggaccaaggcatatcgtcgagtgcatggaaaggatatgactcaggactcaacctttgagtttgagagaaaacgaaacaggcctgaaagatatgacaggaatcttgcggagaatgtcctgaaggccattcctaagattgataaaatcagagtca

SEQ ID NO: 26917 - DNA, 391 bp, Glycine max
  Clone ID: LIB3108-028-Q1-K1-D4
ctcactcgtcatgcatagacatggccattgttacttctgcagccggtgctcttacctgattcactggcctaaatgcaagcgcaggcaatgtgagtgccgtagataaagtctcagctcaccaagccacaaggatgggcatcaaggcttgactgaaagacgctggagtcgttgatgaggccactgccgcaagtgcacagctggctagcaacgccatggccattgaagcgttgctggcttgagatgacaggtctatggctttcatgaccaacaatttatgcgatgctctctggggacaagatcatgttcaagaacatcgcatgttttccaaacaacggagcgttcgacgaagacgagattcctatcagcgtggacgcaccgaaaatctacatga

SEQ ID NO: 26918 - DNA, 413 bp, Glycine max
  Clone ID: LIB3108-028-Q1-K1-D6
tctgtgtagaatgcctctattattgtctgtcggctacacacagcgatagatagatagttgagaagagaagcattcataggcgccaattgtgagtgagagagaaggtgatggagaagctactgttccatttacttgggagagatagagagagagagatctggtgcttgaccataactgtcattgctacggttatctcactgagcacatgtcgacacgaagggcatcgccattggaatcgcatacaaaatgcactcaccccagttcaccaccattttcataaagcttcactctaagctctgctaagagatgagagcaggaaagaaagcgccaaagtggttgaatctcaggccaagttcttgatcccggactcaatcaacggcttgaatttcgacgtaacggcgcacattaagatg

SEQ ID NO: 26919 - DNA, 272 bp, Glycine max
  Clone ID: LIB3108-028-Q1-K1-D7
tgtttttcgctcaagccttttctctctctctttcttacgagttgcaaataaagctcgcctttttctccggatcaatgagcgatcatctggtgctgttcgtggaccggctggtgcgacccgtgccgatggtccagccgctggcccaacagccctccgagcccgcgacgcccgttgatgaggcggcggcggggccatccgggtcgtctccggcggcggaggaagacggtgacgacggcggagaggatgcgcccctgctgcagctggcggagtgt

SEQ ID NO: 26920 - DNA, 413 bp, Glycine max
  Clone ID: LIB3108-028-Q1-K1-D8
ctcgatgatgcccaattggcaaatgatgtcgaataccttctaaggaaaggatggatggcttgcttggaattcgagttggagcacggtttcgtgtaccgtgagcacaacaggtcacctggatactatgatggacgctactggaccatgtggaagctgcctatgtttggctgcactgatgcttctcaggtgttgaaggagcttcaagaggctaagactgcataccccaatggcttcatccgtatcattggatttgacaacgttcgccaagtgcagtgcatcagcttcatcgcctacaagcccccaggcttctaagtcattgaaaaatttgcaaagcatctgtagccaccccactttgtttgttgtacttaaactacattcccatttgtttttgctttatgagatttcatcatcct

SEQ ID NO: 26921 - DNA, 420 bp, Glycine max
  Clone ID: LIB3108-028-Q1-K1-E1
attttcgagtgtggggtctgaatcacagtccacacaaacgaaccgaaccaagaacacctattttcccacaccactttactttctctgaggcttgagaagaagacaatggtggcttgcgaaacatgaagaggggcactgtgttatgcatgttcaatggcatgtcattgtgcttcttacaatgccttttcattttcaccaaccagagagttcttcgccaccaaccacatcatgtcaaaaccatcatccactactactagatgcagaccctttctcttgtccatcaccaatgccacaccatcctacaacacccttgtttctgaggctgttaggctcttggttccttcagcaagatttgaaccttcaaaactgaaggttgttctattggaagatcagataaacaaacatgcaagttttactcct

SEQ ID NO: 26922 - DNA, 368 bp, Glycine max
  Clone ID: LIB3108-028-Q1-K1-E12
tgatgatccactgttcaagctggtttcaaagttgtatgaagttgttccacccatgcgtattgaattggggaaggtcaagaacccatggcccaatgttgatgctcacagcggagtcgtgctgaatcattttggtttaacagaagccaagtattttactgttctgtttggtgttgcgaggagcatcggtgtaggcccccagctcatattggaccgaattcttggtttacctcttgaaaggccgaagagtgtcaccatggcatggctagaagagtactgcaaaaatgctgcaaaatgagctttctgtgttaggactggaaatttcagactaataatggaaataccttttgagagatcagccatatgtgatc

SEQ ID NO: 26923 - DNA, 422 bp, Glycine max
  Clone ID: LIB3108-028-Q1-K1-E2
cccacgcgtccgccaaaaaccagccttcgctgaagaagtggtcgctgttcctgcggagaacccaccatctgaagccgaagctgaaaacatcgaagcagagaaggcccagagtggtgtagaagacaagatttcccagtcggtttcgttcaaggaggagaccaacgtggttggcgacctccccgaggcgcagaagaaagcccttgatgagctcaagaagcttgttcaagaagcgctcaacaaccatgagctaactgctcccaagccagaaccggagaagaagaaaccagcagcagagaagaaggaggaagttgaagtgacagaagggaagaaggaagctgaagtcatagaagagaagaaggaagtggaagtgacggaagagaagaaggaaattgaagtaacagaagagaagaagaaagctgaag

SEQ ID NO: 26924 - DNA, 130 bp, Glycine max
  Clone ID: LIB3108-028-Q1-K1-E3
cccacgcgtccgtttttttttatttttttttttttaatttttttttttttttttttagaatttattttttttattttattttttttacatttttatatttattatcaaatattatatataatacattatt

SEQ ID NO: 26925 - DNA, 330 bp, Glycine max
  Clone ID: LIB3108-028-Q1-K1-E4
cccacgcgtccggagaacttgaggtggtacgttcaagccgagcttgtgaatggacgtggggccatgttgggtgttgcaggaatgttgcttcctgaggttttcaccaagtttggaatcatcaatgcccctcaatggtatgatgctggaaaatcagagtactttgcatcttcctaaacctttttcgtgatcgagttcattttgttcaactacgtcaaaatccgaaaatggcaggacatcaaaaaccttggctgtgtaaaccaaaaccccattttcaagcattacagctttgccccaacataagtgtggataccttgtaagtgtgttcaaccc

SEQ ID NO: 26926 - DNA, 417 bp, Glycine max
  Clone ID: LIB3108-028-Q1-K1-E5
cccacgcgtccgagaaacttgaggatattgtgccctcttctcacaactgcgaggtggctcatgtgaatcgtactgattaccagctcattgatattgctgaggatggatttttgagtctgcttactgaaaatggtaacactaaggatgacctcaagcttcccactgatgagagtctgctcactcagataaaggatggatttgctgagggcaaggatcttgttgtgtctgtcatgtctgctatgggtgaggaacagatttgtgccctcaaggatattgggccaaagaactagcttttggtgcttgttgcttgttatttctattttctatttaagcaaagatatttttgtaagccttttatattggtttgttcaagacctggcgtatagattctagtcagactagtcttaacaatggttt

SEQ ID NO: 26927 - DNA, 88 bp, Glycine max
  Clone ID: LIB3108-028-Q1-K1-E6
acccacgcgtccgattaaaaaatttaatttaaaaaaaaaaaaatataacaaaaagaaacgcaacatttgtaaatacaaactgaaaaca

SEQ ID NO: 26928 - DNA, 195 bp, Glycine max
  Clone ID: LIB3108-028-Q1-K1-E7
taatttgtaaaggaccatacttcaatctttgtgtacccattgttgtattggcaacaagtccttgtataagatgtctagttctttaaaaaccacttattgaaaaaatcacccctgtccttcagtctgaattttatttaaagaaatcaccgaaatctgcaccttcctatcttgtaatatttgcacaactacaacttt

SEQ ID NO: 26929 - DNA, 418 bp, Glycine max
  unsure at all n locations
  Clone ID: LIB3108-028-Q1-K1-F1
aaacaaagaagagagcaaaatgaagagtgcgatttgtgggagaatcctctctcccaagcacgtcttcaaaccaggggacacacattcaatttgtaaaggaccatactccaatctttgtgtacccatggttgtattggcaacagggcctggtataggaggtggggtgctggaaaagccagttattgaaaaagtcaaccctggccgtgagtctgaaattgatttaaagaaatcacggaaaatcggacccgccctaatcgngtaatattgcacaacgacaactttaataaacgggaatacgtggtccaagtgctgatgaaggtcatccctggaatgacccttgataatgcagttaatatcatgcaggaagcacactacaatggattgtcagtggtgatcatctgtgaccaaaccgatgctg

SEQ ID NO: 26930 - DNA, 309 bp, Glycine max
  Clone ID: LIB3108-028-Q1-K1-F12
gatcgtcagtctagcgatcaattgggggattgctgggaattcaagtgtatgtacatggatgccgagatggttcttctagagctggccattgttgttgctatatttatctcgacttagactttagccatcaagttgtggtggcagttaatagtaatgttggggctgaatttttattttcaaaatttaaactgtggttaactttagttttgtttatcccttctgcagggtaatgttatacagcattattctggaccttctgtagagtgattcagtgtaagtttatgacattgggctctcatattgcatgct

SEQ ID NO: 26931 - DNA, 402 bp, Glycine max
  Clone ID: LIB3108-028-Q1-K1-F2
cccacgcgtccggttgataaaaccctaattgaacccttcttctaaagttgtgtggcaggtgcagcgcggtggttcacacttcacacggagaacggagtcggaggatccgttttcgcatgcctgcaaccccaccgagtaacaaaggaagaatctctaccctcttcgctttcacttctcgccaagtttagttaagcaaccagacaatgaagcacactgacaatggagctttcaactcggaacacaaagttcttcttcaccaatccattgcccgttacttgaaacacagtggcttctccaaaaccctaaaaaagtttcgctctgaagcgcaattcgagaaaaatgatttgaagggatccccagttgatctggaagaaatgtgcctcacgtattttgaaatatgtg

SEQ ID NO: 26932 - DNA, 379 bp, Glycine max
  Clone ID: LIB3108-028-Q1-K1-F3
tcggctaaacaacgtcacctaagagatctacttcaaaacacaaccaaaatcttaaatttcgggggacccttttaatatgtagttttctttaaaaaaatcattttcctttaaacttcaaatttagagttctctctctgaatcatccccagcaatggcttgtgcatttgaagcaaccttagcagccaacgcctatgtcttttcttccaggagattctccttgaagcttcaaaagaacacgtagagaaagttttctttgttcactgttatagttgattctgatgaatctgattgcaatgacgaagaatgtgccccggataaagaaatacggaaggtcaccgtggaatggttagcttgggagaagaccaaagtaatgggtaca

SEQ ID NO: 26933 - DNA, 385 bp, Glycine max
  Clone ID: LIB3108-028-Q1-K1-F4
gtgatttttctttttttctcatttgctttgcaaattgcaatggcttccaacaaggttgttgccaccatcatggtgctggctgtccttgcctactcaacatcattcaccaatgcatgtggcacatgccacccaaaacctaccccttctcctcctcctccatcatgaaagtgccctaaggacacattgaagctaggggtgtgtgcagatattctacgtcttgttactgttgttgttggttcccctgtctccagcaagtgttgtgcattgcttgaaagtttggctgatttggatgctgcactttgcctttgcactgctattaaagccaatgttcttggaatcaacttgaatgtgcctatcacactcattgtgctactcattgcttgcc

SEQ ID NO: 26934 - DNA, 250 bp, Glycine max
  Clone ID: LIB3108-028-Q1-K1-F7
gaacgaaaaggaattccaatggctggggtcctcttgacgatggtgccgcttcttcattgcttcctcttcctctcacctcgttcgcgcttccgatgactccgacgacgccgtaatttcgatactattgttgttgtcgtcatgtcgtgatgcatctctgattctacaatgcttgtgtccttcacatcttctacgaatcgttcgacgaggattttgatctaccgtggattgtatccgacaactatgattacaa

SEQ ID NO: 26935 - DNA, 423 bp, Glycine max
  Clone ID: LIB3108-028-Q1-K1-F8
cctaatatgtgtccctaataatgcatcactcattaaactcttttctttactagaagaaagatatgtatactccaagatcagagtcagacttcttaacaaaaatgtccccttagtacctaagcatcctaattcctatccatgttgaaaatcataaacttttccttttgctagaaaaataactaaattgacccaactagtcttttgtctagtaccataatacactaaaacatgaatcatccacattatctaaaaacattactatttcaagatcagccatataagttacattataatttatatatacaaaagttagaaagattcctaaaaatactgtcattcgagattattattattattatatcattatgatttttttatatataaaagatagagaattgaatatatgaattatattaaaattta

SEQ ID NO: 26936 - DNA, 365 bp, Glycine max
  Clone ID: LIB3108-028-Q1-K1-F9
ttttgtttttgttttatggattatctagttgtggttaagttatatgtttggatggattttggtcaatgttttgatgaattgctgagatatattctatggtgtttttggatgttttaaagtagttgaagttaaaaaaaaaaaaaaaaaaaaaaaaaaaaaaaaaaaaaaaaaaaaaaaaaaaaaaaaaaaaaaaaaaaaaaaaaaaaaaaaaaaaaaaaaaaaaaaaaaaaaaaaaaaaaaaaaaatttaattaaaaaaaatttttttcataaaataaaaaataaaatatcatattaaaaaaaaaaggggggccctttatggaacccctttttttatttcccttttttgtaaattatttacttttt

SEQ ID NO: 26937 - DNA, 296 bp, Glycine max
  Clone ID: LIB3108-028-Q1-K1-G1
cggacgcgtgggtgagaggtgtaggattagtgggagctggaaacagcgaaagtgaagtaccactacttttaacgttattttacttattccgtgaatcggaagcggggcactgcccctctttttggacccaactcgtctgagaagtgaggccgaggcttgaggaatatgttgctactctatttgatttatctttgttgttttttatttatttttaatttgtatgttttgattgtgttctgtgaacggtttttgttagctttatatcaaacttgaaattttgcatacaatatctaact

SEQ ID NO: 26938 - DNA, 230 bp, Glycine max
  Clone ID: LIB3108-028-Q1-K1-G10
aggccccagctgccaagccgaagcctgcgcccaaggctgcggcgaagccgaagccggctcctcggccggcgccaaaggctcgccctgcaaaggccgccaagacctccgccaaggacgctcccgcaaagaaggctgctgctccggcaaagaaggcaatagtcccaccaccggctaaaaaggctgtgcccgcaaaaaaggctgttccggcggcaattcctaaaaaggccgtt

SEQ ID NO: 26939 - DNA, 259 bp, Glycine max
  Clone ID: LIB3108-028-Q1-K1-G11
gttaacttgacttagtagttctttttcaatatatggtaccgtttcgtccattttgtggcaaaaaaaaaaaaaaaaaaaaaaaaaaaaaaaaaaaaaaaaaaaaaaaaaaaaaaaaaaaaaaaaaaaaaaaaaaaaaaaaaaaaaaaaaaaaaaaaaaaaaaaaaaaaaaaaaaaaaaaaaaaaaaaaaaaaaaaaaaaaaaaaaaaaaaaaaaggggggcccctttaaaaaaaccaaattttctaacccctggtttgca

SEQ ID NO: 26940 - DNA, 400 bp, Glycine max
  Clone ID: LIB3108-028-Q1-K1-G2
accacgcgtacggacgctcacacagaatcatgatccctaagagcagcagcctctagggtcagctcaaatgggctcttcagtgacagcatctgtggccctaaaacctgtccctaacactgttgagaagtccttagtgacaggccttacctatctctcaaggaactcttcttcattcacagctgaggccagtgtcaagaagatcaagactgactaaccttaaggaactaaacgtggcatggctttgaacgatggaactgatgcatctggcacgaactgaaaaggaaagggtgtttaccacattgtagactaatactgggctaatgtctatggttacagtcctatctacgacaccaaggactgggctgcaaccgatgatgcctacgctggtactactactggc

SEQ ID NO: 26941 - DNA, 412 bp, Glycine max
  Clone ID: LIB3108-028-Q1-K1-G3
cccacgcgtccgagaaacttgaggatattgtgccctcttctcacaactgcgatgttcctcatgtgaatcgtactgattaccagctcattgatattgctgaggatggatttttgagtctgcttactgaaaatggtaacactaaggatgacctcaagcttcccactgatgagagtctgctcactcagataaaggatggatttgctgagggcaaggatcttgttgtgtctgtcatgtctgctatgggtgaggaacagatttgtgccctcaaggatattgggccaaagaactagcttttggtgcttgttgcttgttatttctattttctatttaagcaaagatatttttgtaagccttttatattggtttgttcaagacctggcgtatagattctagtcagactagtcttaacaat

SEQ ID NO: 26942 - DNA, 381 bp, Glycine max
  Clone ID: LIB3108-028-Q1-K1-G4
cccacgcgtccgtgtttcataaaggatctaaacttctgattggagaacttccttctagacttgatggatcagcaagagtaaaggcacaacctcaagacgactctaaggctacattggctccaaagataaatccagatgaatcatggctattctttgatcaagaagcatctgttctacacaataaggttcgtgccttttcagggtggccaggaactagagcaagagtgttagtggttgagaaaaatggtcagcagaaaactttggagattaaaattataaccacacgagttcgcagtcatgaaagtgtgcagttcgatgaagcagatgacattgcattcgttgagggtgcgttggtatttccatgtggaaggggcaccacac

SEQ ID NO: 26943 - DNA, 414 bp, Glycine max
  Clone ID: LIB3108-028-Q1-K1-G8
cttacgcgtccgcttaaatagtttttttcttcttcggagcaattctaactaaaacacgtaattctaccaaaatcatctgatttcatttatttaaatatattccaaacttcaatccactcacattgttcatgcaaccgttattcatttttctttccttttctttttactaacatcattattctactttgctgtatctgagctgctgaacttcaaagcgtggcagcacatcctgctcttcttcttcaccatcagaatcctccagaagaccaatcctctcctctctgcaaataccagcgttgtcagtggaaaatgcattatcttcttttaacaagacagatggtcctatattgatatcaagtccaggttccagtacaggactgcccccaaggccaaattcattcagagtcatcaagt

SEQ ID NO: 26944 - DNA, 422 bp, Glycine max
  Clone ID: LIB3108-028-Q1-K1-H1
cccacgcgtccgcccacgcgtccgattgaagcaactgtcatgcctgaagattatcgagacaggaaggtttggatactatgtaatgactgcaatgacacaacagaagtttacttccacattcttggccaaaaatgtggtcactgcagatcatataatactcgtgcagttgcgcctccagttcttccccaatgaccagattcttgggttcaagaagggaaaactgtcagcagaaaattaaagttagcaccctgttattattatagagggctattgaattaattgagcatcaaaagtgattggtgtattgtgtcctagatagttttcttaggttattcttcctccaacatatggagtgggattgttgtctcttggttattgggctggtatgaacatctttatactgtaacagaaggaaaacattt

SEQ ID NO: 26945 - DNA, 432 bp, Glycine max
  Clone ID: LIB3108-028-Q1-K1-H10
ggtccttgtgtctccggtgctcatagcactatagttacagcaagggctggaaaggatctagttgccagtctcgtatcaggattgcttacaattggtcctcgatttggtggagcaatcgatgatgctgctcgatacttcaaggacgcacatgacaggggtctatctccttatgagtttgtggaaggtatgaaaaagaaaggaattcgagtaccagggattggacacaggatcaaaagccgagacaaccgagacaagagagtgcagttgctgcaacaatatgctcatgctcacttccctgcggtaaaatacatggaatatgctgttcaagttgagacctatactctcacaaaggcaaacaacctggttctaaatgttgatggtgcgattgggtctcttttcttggatctccttgcgggcagcggaatgttcaac

SEQ ID NO: 26946 - DNA, 313 bp, Glycine max
  Clone ID: LIB3108-028-Q1-K1-H11
gtcccgatttagttatttcttttctagataaaaaaaaaaaaaaaaaaaaaaaaaaaagaaaaagaaaaaaaaaaaaaaaaaaaaaaaaaaaaaaaaaaaaaaaaaaaaaaaaaaaaaaaaaaaaaaaaaaaaaaaaaaaaaaaaaaaaaaaaaaaaaaaaaaaaaaaaaaaaaaaaaaaaaaaaaaaaaaaaaaaaaaaaaaaaaaaaaaaaaaaaaaaaaaaaaaaggggggaaaaaaaaaaacctgaagttacaaaaattataataataaaaagaaaaccccctttagcgagttcaaaaaaaaacaaaaag

SEQ ID NO: 26947 - DNA, 372 bp, Glycine max
  Clone ID: LIB3108-028-Q1-K1-H7
gcttactatttgtcagtttaatttaaaaagagctatgattaataaatcgatcgtgacatgtgacaacagaggagccctaaattgaagagaaaagtgaatattgagagttatggtttaagcgacatcagagaataaggcatcatgtttccggtaatgttcatgctcaagcctgacaaagctgcagcactttagcagctgaaatctcatgcagacatgttctgcacatgagttgttgttattcgagtcaccccttacaatcttcatttcctctgctccgataaagaggaacttaagctcaagctttatcttctcaatctttcccgtcagtgcatctttaagattaggatgtgtccttgggtttgggacaatcat

SEQ ID NO: 26948 - DNA, 420 bp, Glycine max
  Clone ID: LIB3108-028-Q1-K1-H8
cccacacacaccttgttttcctttctatagagacacacagagagagcaataaagcaccgttcaatggctaccactaccactaaagtttacattgtttactattctatgtacggacatgttgagaagctagctgaagagattaaaaaaggagctgcttctgttgaaggagtagaagcaaagctatggcaggtacctgaaacactgcctcaagaggtccttgggaaaatgggagcacctccaaagagtgatgtaccaattattacacccaatgagctacctgaggctgatggcttattgcttggtttccccacaagatttggactgatggctgctcaattcaaagctttcctggatgcaactggaggtctatggcgcacacaggcactagctggaaagcctgcaggaatctttacagcactg

SEQ ID NO: 26949 - DNA, 336 bp, Glycine max
  Clone ID: LIB3108-029-Q1-K1-A10
ttcccatttttcacaccaccaacacaagatgtttctccacattgtgttcctccttttccttctgtcatccacttcccatgccactgtccaagacttctgtgtggcagacctcaaaggtgcagacacccctgcaggctacccctgcaagccacctgctaatgtcacttcagatgactttgtgtacactggcttagctgaagctgcaaatgtcacaaacataatcaatgctgctgtgaccccagcttttgttgctcaattcccaggtctcaatggccttgaactatctgcagcaaggttggaccttggtcctagtggtgttatcccactccacactca

SEQ ID NO: 26950 - DNA, 397 bp, Glycine max
  Clone ID: LIB3108-029-Q1-K1-A11
ttcccgtttttcacaccactaacacacgatgttactccacattgtgttcctccttttccttcggtcatgcacttcccatgccacggtccaagacttctgtgtggcagacctcaaaggtgcagacacccctgcaggctacccctgcaagccacctgctaatgtcacttcagatgactttgtgtacactgtcttacctgaagctgcaaatgtcacaaacataatcaatgctgctgtgaccccagcttttgttgctcaattcccaggtctcaatggccttgaactatctgcagcaaggttggacctttgtcctagtgttgttatcccactccacactcatcccggtgccaatgaactactcattgtgcttcaaggtcacattcttgctggattcatatct

SEQ ID NO: 26951 - DNA, 353 bp, Glycine max
  Clone ID: LIB3108-029-Q1-K1-A3
cacatttttctcattctgaattttcttgcttttccacttcagtataaaaaatcatggcaggaggactgacagatgatcagattgctgaattccatgaagcctttagcctcattgacaaggattctgatggattcattactgtggatgaattgacaaccattatccgatcattagaagggaatccaacgaaagaagaaatccaaaacatgattagtgaggtcgatattgatgggaatgggagtatagattttgaagagttcttgaatattatgggaagaaaaatgaaggaaactttagctgaagagctgaaagaagcattcaaagtatttgatagagatcaaaatggatacata

SEQ ID NO: 26952 - DNA, 403 bp, Glycine max
  unsure at all n locations
  Clone ID: LIB3108-029-Q1-K1-A5
cccacgcgtccgcacggatggcggcgacggctacggcggaagcgaaaacctactggtgccacgagtgcgacatgagcgtgtccctgactctcccaccctcccctctcctctgccctcactgccacacccacttccttgaactcatggactccccaagcctctcccaagaaaacgacgccgaatcatccctcttcgatgtcgtctttcaagacgcactcttactcctcaaccctaaccctaaccctaaccctaagccacttcccttcaaaccccttcccctccccttccttcacgtcaccccctncctcctctcctccctcgaccccaacggcgtcgntctctgcgccgtctgcaaagaccaaattaccctcaacgcccaagccaaacaattgccctgccaaca

SEQ ID NO: 26953 - DNA, 244 bp, Glycine max
  Clone ID: LIB3108-029-Q1-K1-A6
gcagactggacattggactcggagcactctatggtaacgctattcttcatgaataggataggaggcgaatgatctatcgtgacatgaaagcatatcttatactattagatgtggagtacgatgccaatcatgttgatcagagcactcgcagcagatggtcgctcgacgagaccacacagatgtatctacaagagatagttgaacatatcggtatactgctcctgaacatgagatgaatggacat

SEQ ID NO: 26954 - DNA, 245 bp, Glycine max
  Clone ID: LIB3108-029-Q1-K1-A7
gcgtccggcctaccgtctcttattctcactattatatttctcgctcgtactaatcttatgtttggtatggctcgtactcttgcaaaacatgttgctagcaagcacgcgccattatgagttaagcgcctatacctcatacgtctagataattactccatcatcatgcactaccaattctacacctacgatgtgtacctctagacgctctactgcttcatttaacctctgataatcggcaatgaacg

SEQ ID NO: 26955 - DNA, 273 bp, Glycine max
  Clone ID: LIB3108-029-Q1-K1-A8
attcactgagtcaaattcaaacgaaaacgaaactcgctcgcactcatagttagttacgcatcgcaagcacactgccaaaaatggcggggcgcaagcacgcgccctcctccttcacgcgcctcgacgacgcgcgtcttgcgcattcctcctcctcctccgtcgccggggtccgcgccctcgaggagcgcgtcgaggcgcgccaccgcgagatccaggccctgctcagcgacaaccagcgccttgccggcatccacgtggcgctcaagcaggacc

SEQ ID NO: 26956 - DNA, 434 bp, Glycine max
  unsure at all n locations
  Clone ID: LIB3108-029-Q1-K1-A9
cccacgcgtccgcacaaggcagaaagcaagctcatcctagagttttaaaaatggcagcagcctcctccatggctctctcttccccatccttggctggcaaggccgtgaagctgggcccatcagcccccgaagtcgggagggtcagcatgaggaagaccgtcaccaagcaggcctcctccggaagcccatggtacggcccagaccgcgtcaagtacttgggcccattctctggcgagcccccgtcctacctcactggcgagttcccaggtgactacggctgggacactgctgggctttcggccgacccagaaaccttcgccagaaaccgtgagctcgaagtgatccactccaggtgggccatgctncgggcctngngctgcgtcttccccgaactattgtcccgcaaaacgggtcaaagttggagaagctgtgtg

SEQ ID NO: 26957 - DNA, 382 bp, Glycine max
  unsure at all n locations
  Clone ID: LIB3108-029-Q1-K1-B1
cccacgcgtccggtcagttatgacaacaatgatagcaatggaaggaggaacttgatgttcgctgtggctgctgctgctgttttctctgttgctgggatggcagtggcagatgagcctaaaccaggaacctcagaagccaagaaaaagtatgccccggtttgtgtcaccaatcctacagctaggatttgtcgcaattgaggatctcctgtttcattttacctctgatgatcggaaatgtacgttggggatgtagtaatgtttttgatttaatatgatcctcattgtactagatgttcataaaactatncacttttgcttgtctatttgtgtctncaagttaatgggtaacccaggaaatgatggcgcttaaaaaaaaaaaaaa

SEQ ID NO: 26958 - DNA, 294 bp, Glycine max
  Clone ID: LIB3108-029-Q1-K1-B10
cccacgcgtccgcccacgcgtccgagtactactacaagggaagaaaaacttagctactaaggagaggatcaaagagaatggctcaagcaatggcatcaatggctggcttgcgtggttcctctcaggctgtgttggaaggtagccttcacgtgagtggctccacacgcttgaatgtggggagtggaagcagggtggcctcagtcacacgtgcagggttcacagttagagcacaacaacaacaagtgagtggtgaggtacaaagcagccgtagggcagtgcttacacttgttgctg

SEQ ID NO: 26959 - DNA, 350 bp, Glycine max
  unsure at all n locations
  Clone ID: LIB3108-029-Q1-K1-B11
ctccctctgttaccccatttgcgcaagtctaatatggtccctcgggcatcaaaggatgtcccaactagctttcgttatcctccaatgaccaagaaaccgcaatggtggtggagatcattagcatgcctcccatacctcatgcctctccatgagacatggatgtatgccgagacggcatacaatcttcacccgtttttggaatgctttgaattctatacgtacccttttcttatggcaattgggagcctgcctagctggtttcttatggcatacttctttgttgcatatcttggaatcgtgaggagaaaagagtggcctcatttcttcagatntcatgttgtgatgggaat

SEQ ID NO: 26960 - DNA, 433 bp, Glycine max
  Clone ID: LIB3108-029-Q1-K1-B12
caatttagcataagcccagcatggccaccgcaacagcagcagccacctcgtccttcatggggacgcgcctcctggaggcccattccggggcggggcgggtgcaggcccggttcgggtttggcaagaagaaagccgccgccccgaagaaagtttccagggggtcgggctctagctccgataggcccctgtggtatccgggcgccaaggcgcccgagtacctggatgggagccttgtcggagactacgggttcgacccatttgggctagggaagcccgccgagtacctgcagttcgagttggactcgctggaccagaaccttgcgaagaacgtggctggggacatcattgggaccaggaccgagctcgcggacgtgaagtccacgccgttccagccctacagcgaggtgttcgggctggaaaggttccgcgagtg

SEQ ID NO: 26961 - DNA, 263 bp, Glycine max
  unsure at all n locations
  Clone ID: LIB3108-029-Q1-K1-B2
ctttcgcttattttattatcgttttcctttctcccgagtgttctcctttcttgcttccttctccggccatctttatcctgatggcgtcgtctctgggaattgcttgccggggaaacaacgcccaattaaggatcccaaagcagcggtgtggttcgggtcttcaagccgcgtgctccctcgctatggggcgctcgatcgcgagggtggngaggatcacgggcggcatggccacggccacggcggtgatgaccacggccacggcg

SEQ ID NO: 26962 - DNA, 302 bp, Glycine max
  Clone ID: LIB3108-029-Q1-K1-B3
ggaaggttgaagaagaagcatgacgaagaatgggaagaagcaattgatgtcatcggcgccgtggagaggcgaggagagtgaagaatccttcaaagagggaaagctgaaagtgacgaggcagggtgatggcacttccaccatgcacgtccctgcctccaagtccaagcatcatcaccatgacctccacgacgacctcggaatcgagattgatcctgaactacgctacagcttccagcgcaattttcagtttcttcagcgtgtctttagcattgacactatggtgaaacctcttccctctgtca

SEQ ID NO: 26963 - DNA, 354 bp, Glycine max
  unsure at all n locations
  Clone ID: LIB3108-029-Q1-K1-B4
gtaagaagccaaagaccgaagatagtgtcacttcttagttcacaaatgaggttttgaaattaattttcatcaatctagaggtcatggaattccatgcttgtggttactaaagaatccatttgtcttcactaaattttgcagagtggcgagtaaaagtagaaaatgtgcttgtttctcaattaacaactaggtaaattgctgagggaagattaaggcactttgcatcaaattagatatcagaatctggcattttattttttgggattatggaaattgtatcgtgtggaataataattattttcggtgacttttgnatttggtgtttcctataatcggaagttccaattcttgagc

SEQ ID NO: 26964 - DNA, 339 bp, Glycine max
  Clone ID: LIB3108-029-Q1-K1-B5
gccacgcgtccgcaaaaacacacacacacacaaattctcaaacccaaatcccaagtctgctaaaaccctaattcgcagtgaaaatgagagaaatcttgcacatccagggagggcaatgcggtaaccagatcggagcgaagttctgggaggtgatatgcgacgagcacggcatcgaccacaccggaaagtacagcggcgactccgagctccaattggagcgcatcaatgtttattacaatgaaagccagcgcggaaggtacgttccacgcgccgttctcatggatctggagcccggcaccatggactccgtcagatccggcccttacgggcagaactttc

SEQ ID NO: 26965 - DNA, 298 bp, Glycine max
  Clone ID: LIB3108-029-Q1-K1-B6
atgtttcgctgctattgatgtggactatgcgttcctcgtaatccaattaattaagaacgaaagtattaaattataaaaaaaagaaaacaatacaaacaacaacaaaaaaaaaacacaaaactaaactaaatcatacaagaaatacaaacaaaaatctccctcgctctcgaacgctaaccaacaactatgtaaattaccaccgcaacaataacgcacttcgcatcaaattagacctcaaaatctggcattgtactcagttgcgattattcgaaatagtatcgcgtggaataatatctat

SEQ ID NO: 26966 - DNA, 94 bp, Glycine max
  Clone ID: LIB3108-029-Q1-K1-B7
ggcttccatttttttttctgtattttataccacaggctcctctgaagcttatatctgccatgaaaggtagccgtgagaaacatggggggatcac

SEQ ID NO: 26967 - DNA, 351 bp, Glycine max
  Clone ID: LIB3108-029-Q1-K1-B8
ctctttcttcctcttcctcagtagtgcgattttcgattctcttctctgcaactatgcctaaccctaaggtcttcttcgacatgaccatcggcggtcaacctgccggccgcatcgtgatggagctctatgccgacgtgactcccagcaccgccgagaacttccgcgcgctctgcaccggcgagaagggcgccgggcggagcggcaagcccctccactacaaaggctcgtccttccaccgcgtgatcccgaacttcatgtgccagggcggcgacttcaccgccggaaacggcaccggaggcgagtcgatctacggcgccaagttcggcgacgagaacttcttgaaaaacacac

SEQ ID NO: 26968 - DNA, 220 bp, Glycine max
  Clone ID: LIB3108-029-Q1-K1-B9
gcgtcgccacgcgtcgaccgttcacatattgagtcagactgaagctttctgatgtagggtggtcatgggcgttagtgtggagcgattgttggtaattcgtacgaacgaacctacctgtaatgcttgtgagtacctcacgcagttttaagactatggcgttagcacgagttgagcaatacagtttatgccttaatgttgccgacgcgcctcactgtgattc

SEQ ID NO: 26969 - DNA, 290 bp, Glycine max
  unsure at all n locations
  Clone ID: LIB3108-029-Q1-K1-C1
ctttctttcaattccctcacactctccccattattctcctcttcttccacttttgctcttcccaccaccgctgcttcaagagtacacgtgattctgcccccgaagcccttgaacggtgttcgattctccgcacccaaaaggaggactgacgcggtggtcgtctccgccgncgccgaggactcgatttcgccgccggttcctccggcggagagcgagaaagagaatgtttccgtggagaagcttncgttggagtcgaagttgaaggagagagaggagcagaagctgaggat

SEQ ID NO: 26970 - DNA, 266 bp, Glycine max
  Clone ID: LIB3108-029-Q1-K1-C10
tgaacacacacatagaaacccaacaacaagttttaagatgatgattctaaccctcttcttcaggatcatgttatctctcctctggctctcccacgcctccgtggtggacttctgcgtatcagactacacaggccccaatggccccgcaaggtactcatgcaagagcccagcaaaggtcacggtggacgacttcgtctactccggccttggcaccgtcggcaacacctcacacatcatcaaagccgcggtgacgcccgcgttcgact

SEQ ID NO: 26971 - DNA, 405 bp, Glycine max
  Clone ID: LIB3108-029-Q1-K1-C11
aaaaagaataaaaagaaaaccaaaaaataatttcaatggaaatgatggcaacggaacgtgtgggttatgttcactgcaacttctgcaacaccattctagcggttagtgttccatacatttgtttgctaaccatagtgacggttagatgtggacattgtgccaatttgttatcagtttacattttagcttcacttcaagtatttccctttcaagaccctcagaaacagcacctaagctttcaagaacttatcagcattgaactgggatcatcttcaaaatgtagcaaaatagcgccatttgaggcagtagagcatgaactacctaggattccttccattcgttctacagagaagagacatcgtgttccttctgcttataatcgcttcattaatgaggaaattcaaa

SEQ ID NO: 26972 - DNA, 281 bp, Glycine max
  Clone ID: LIB3108-029-Q1-K1-C12
cgaagcttctcttcctcgccactctctctctctctctctaagaccccaaaacaaaaccgtgcgtcctatttattttccgatgggttttccggtcggttacgtggaggtgttcttcccgaacccgttcctgcacacgctggccctcctcggcctcctccgaaacctcgtattcttcctcttccacctcctcggactctccgacttcttcgaaaccgaggtcgcctggccggacccccgcccctcagacacggcggaggcaccggccccttcgtgtcggcgct

SEQ ID NO: 26973 - DNA, 343 bp, Glycine max
  unsure at all n locations
  Clone ID: LIB3108-029-Q1-K1-C2
cccacgcgtccgcccacgcgtccgcccacgcgtccgatttttagaagaacagcaagaaaagggaagggaggagaggggagagaaaatgccaatattagaaggttgtagatggaattagtgaacatacccgctcaaagcgacacccaaattacacgcacaaccacacctttaaattctccgcagaaggaaaaaaaggaaaaaagataaagaagccaaaagtccctcgttccatttccccctttcctccgcccggcgagaaaatgagagaaatcctncacatccagggcggccaatgcggcaaccagatcggagccaagttctgggaagtaatctgcgacgagca

SEQ ID NO: 26974 - DNA, 418 bp, Glycine max
  Clone ID: LIB3108-029-Q1-K1-C3
cccacgcgtccgcccagattaaggtggagacagagggagaggagaaaataaacaacagctatcagagcatatataaacagttcattgaaattctaaattcacttggagttgaaccagtggagacagttggaacaccctttgatccattgctacatgaagcaattatgcgcgaggattctgatgaatttgaggatggcatcataattcaagaattcagaaagggttttaaacttggtgagcgtctcttgcgtccatcaatggtgaaggtattaacttggtcaagaactctgaaggcttgaccaggaggcacggaaggaggaccacggaaccattgaatttctgaagaccggtaaccaaaccagggccggacaaaaaccgaatcttgaaagggcaaaacttttggctgaattcaagtttg

SEQ ID NO: 26975 - DNA, 379 bp, Glycine max
  Clone ID: LIB3108-029-Q1-K1-C4
gctatgttaaatgtagtggtcaagtttttctgatacaattgcttgtgcttaagttgtatgtattcttctgtttccccttgaccaatgaatacagagctgcaagtttagcagattcttcacccacctcagtacctctggcatttcgggttgagccgaaacccaaaagtgggatcaggcagcaagatttgctgaagaaagtcgttgagattaaacctaagcggccaagatgtgatagcaatcagtcaacccctgctagtaatgctcctgttacaaatcgtaagccttatcacgattcttcaaaagagaaagagcagtctttaccgggaacaaagaaagtgaggaacaatctttggctggatcaaagaaagcaaaggaacat

SEQ ID NO: 26976 - DNA, 247 bp, Glycine max
  Clone ID: LIB3108-029-Q1-K1-C5
cccaaatcgaataagatagataggtgaaaatggcgcagtgtgtggccaacacattcgtgcaaggaaaaccctttcttccagttgcagcagctcccactaaaaatgttcggagagcggttcagtgcggtgtgtggtgcaagaagaaggagatacacccgcaattctacgaggaatcgaacgtgtactgcaacggggagctggtgctgacgacaggtgggacccacaacgaatacgtggtggacgtgtg

SEQ ID NO: 26977 - DNA, 303 bp, Glycine max
  Clone ID: LIB3108-029-Q1-K1-C6
ctggcaagcacaacaagatgtccatcacagatgctgattctggaagaaaagtggtagatccggaattgttagaggcaatccaggtgacaatatcgaataatatgactcagtatcaaccggaatcaagcgctcaagtagctctgggagcagctattggacttgtgcctaccaaagagcatgatgacgtggagatagcacccgagattaccatttatgatgacggacgagatcgaaatttgttgaatgtggatacagatgatcgtgctgcatatactgaggatcatgacgagactattacagaca

SEQ ID NO: 26978 - DNA, 463 bp, Glycine max
  Clone ID: LIB3108-029-Q1-K1-C7
catcttaagtgccgcagcaactcattctgtttcttcagtttggtataactttagccgaggtcaggaggagcactagctaagttcacaatttcaaaatggctaggggactaaagaagcatttgaaaaggctcaatgctcctaagcattggatgcttgacaaactgggtggtgcatttgcgcctaaaccctcatctggaccacacaaatcgagggagtgccttccccctaatccttattctgcaaaaccggctgaagtatgctctgacataccgtgaaatcattgctattcttaatccgcgccatggtcttggtgatggccaagtcaggactgacaagacttaccctgctggtttcatggatggtggttcaatcccaaaaaccaatgaaaactttcgcctgctctatgacactaaaggccgattccgtcttcattccatcaaggatgatgaagcaaagttcaagc

SEQ ID NO: 26979 - DNA, 235 bp, Glycine max
  Clone ID: LIB3108-029-Q1-K1-C8
gaacgatggtttgaggatgagggctcatgtgctgctttaggagctgagccacatgatcgtaggactgaaccacttgacctaggcaaacgatgtgacactcctagcatttggactttctagataagcaccctggatattccttctttaccaaggaagccttcgttgtgccatgcatcatgtaatggcggaagaggctcatgagactatgcctcaactgatgtaccatgacttcatg

SEQ ID NO: 26980 - DNA, 382 bp, Glycine max
  Clone ID: LIB3108-029-Q1-K1-C9
ctcggctccatcgtcgcctacctcctcctggtcttcgtcaccgcctccactgttccagcattgggactctccgctggagttggagttggcaacgccttggtgtttgagatcgtgatgaccttcggtctggtgtacacggtctacgcaactgccattgaccccaagaagggcaatatggcaattattgctcccatcgtcattggtttcattgtcagcgctaacattatgttgactggggccttctctggagcgggcatgaaccccgatgtgacatttgtgcctgctgacgtgagctggacctggaccaaccactggatctactgtgccggtcctctcatcagtggaggaatcgctggccgtgtttacgaggatgtctttatca

SEQ ID NO: 26981 - DNA, 240 bp, Glycine max
  Clone ID: LIB3108-029-Q1-K1-D1
aaacactgaatgaggatgaggatgagaatcaaacgtcattgaaacaacaccttttactcagacagagccgttaaccaaatgccacaatggcaacggcgccgttaactctccatctctgttgccttggccgaagcttatgcaaaacgctctttcttactccctgccccgccgctcttgggagctctcctcacgtcactttccgaggcaagttccgccgtcgaatctctttgtcccggcgct

SEQ ID NO: 26982 - DNA, 463 bp, Glycine max
  unsure at all n locations
  Clone ID: LIB3108-029-Q1-K1-D10
gcatgattgtcaccggcatggaggtggcagatattgatggctccccaaggatgggtccgacggttggggcgatgatgatatcagggcagaaggcggctcatttggcgttgaaggcgttggggaggaacaatgcaattgatggaacgtgtggagttggaagggaagaaccccagcttattttcgcttctgcagacactgaggaaattgttgatgcttaaacttactttcaaattagctagatatatagctnttcttttcttttctttctgtttggtccctacttaattatgattttaattttggaataaatgaacaacatgtgaattatgaaggagacaatacttggtggtacattgtatttggacagcacgtgccacgtatagcggaagaaaccatatattatcaaggatgggagagatagacgccacttaattnttttcatctattctcaatcgatgaaaag

SEQ ID NO: 26983 - DNA, 192 bp, Glycine max
  Clone ID: LIB3108-029-Q1-K1-D11
cccacgcgtccgccctcattctttcacttgatactaattagtgtgacttttgatttttttaagtgattactttttctgtatctggcatcaatgagtttggacgttctaacttctaaaaaaaaaaaaaaaaaaaaaaaaaaaaaaaaaataaaaaaaataaaaaaaattaaaatgtcttattatttaaaatat

SEQ ID NO: 26984 - DNA, 460 bp, Glycine max
  Clone ID: LIB3108-029-Q1-K1-D12
aaacccactaagatggcttcctttgtatccttcctagtgctgcttcttgcagcccttatcctgatgcctcaagggcttgctacttactacaaaccaattaagaagccaccagtgtacaagcctccagtgtacaagccaccagtgtacaaaccaccggtttataagccaaaaccaccggtttacaagccgaaaccaccggtttacaagccaccatataagaagccaccatacaagataccaccttatggaaagtaccctccagtagaggacaacacccatgcctaaagcaagcaatgaggtctattatctacttaataaataagaggaactgctttgtgttttctagcattgtgatttacaacttcgtagcaatgcatattcttgactcttgcatgcacttcaatccttcgtagcattaatgatgtggccaagtcatcatgagcatcatacttatttcttt

SEQ ID NO: 26985 - DNA, 406 bp, Glycine max
  Clone ID: LIB3108-029-Q1-K1-D2
caagaatggcacaaattaacaacatggcacaagggatacaaacccttaatcccaattccaatgtccataaaccccaagttcctaaatcttcaagttttcttgtttttggatctaaaaaactgaaaaattcagcaaattctatgttggttttgaaaaaagattcaatttttatgcaaaagttttgttcctttaggatttcagcatcagtggctacagcctgcatgcttcacggtgcaagcagccggcccgcaaccgcccgcaaatcctctggcctttccggaaccgtccgcattcccggcgacaagtcgatctcccaccggtccttcatgttccgcggtctcgcgagcggtgaaacgcgcatcaccggccttctggaaggcgaggacgtcatcaatacgggcaaggc

SEQ ID NO: 26986 - DNA, 235 bp, Glycine max
  Clone ID: LIB3108-029-Q1-K1-D3
cccacgcgtccgcccacgcgtccgcccacgcgtccgattcatgtcgatgatgaaaatcacgcgcgtttggtgttgacaaatgatgatccactagtggttgagtttctgaaatatgatcccttctggccccagaataatctagtgcttcctacaagtcaatgagagactatataaatgctttggttgtaataaattattgtcagactaaataaaataatcaaagcttatcctttcc

SEQ ID NO: 26987 - DNA, 388 bp, Glycine max
  Clone ID: LIB3108-029-Q1-K1-D4
gccgcactggcgaagtactcaagggagcctgacaatccaactaagtcttgcaaggctagaggcgccgaccttagggatcattttaagaacacaaggcaaactgcctttgcaatcaggaagatgcccttggtcaaggctaaaaggtacttggaagatgcacttgctcacaagcaggcaattgcattcagacattgttgtcgaggagttggaaggacagtccacgctaagaatagacactctaatggccaaggacggaggactgtcaagtcagcataattcattcttgattagctcaaaaatgcttaaaagcaatgctgaagtgaaaggtttggatgttgatgcactgtacatttcgcatatccaaagtcatcaagcacagaagcaaaga

SEQ ID NO: 26988 - DNA, 455 bp, Glycine max
  Clone ID: LIB3108-029-Q1-K1-D5
caggcttctaagtgtgaaatctcaaaaagcataaacaaatgggaatgtagtttaagtacaaacaaacaaagtggggtggcggctacaaatgctttgcaaatttttcacacttagaagcctgggggcttgtaggcgatgaagctgatgcactgcacttggcgaacgttgtcgaatccgatgatacggatgaagccgttggggtatgcagtcttagcctcttgaagctccttcaacacctgagaagcatcagtgcaaccaaacataggcagcttccacatggtccagtagcgtccatcgtagtatcctggtgacctgttgtgctcacggtacacgaaaccgtgctccaactcgaattccaagcaaggaatccatcccttcctaagaaggtattctacttcctttgccaattgtgcatcatcaaggtctggcaggtaggaaagagtctcaaacttctt

SEQ ID NO: 26989 - DNA, 386 bp, Glycine max
  Clone ID: LIB3108-029-Q1-K1-D6
cccacgcgtccgagttgagaactaagaaggagaagcaaatggcttcctcaatgatctgttccgcagctgttaccactgtcaaccgtgccggtgccggcatggttgctccattcactggcctcaagtccatggctggcttccccaccagaaagaccaacaatgacattacctccattgctagcaacggtggaagagtgcaatgcatgcaggtgtggccaccagttggcaagaagaagtttgagactctgtcctacctgccagaccttgatgatgcacaattggcaaaggatgtagaataccttcttaggaagggatggattccttgcttggaattcgagttggagcacggtttcgtgtaccgtgagcacaacaagtcaccaggatac

SEQ ID NO: 26990 - DNA, 148 bp, Glycine max
  Clone ID: LIB3108-029-Q1-K1-D7
gctccctatgatcccaagtatcacgaagagttttttagaaacaatgctcgtgccaatgagagaaacatgctcaatgacaggcctcgtaatgctgacaggtcaagaaactttgagaggaggagggaaaatgtggtaaacagagacatgc

SEQ ID NO: 26991 - DNA, 404 bp, Glycine max
  unsure at all n locations
  Clone ID: LIB3108-029-Q1-K1-D9
cccacgcgtccgcttctcttcacagaagcgtttaaacataaggcttgactagagaaagagagagagagagcttcgaatcgaaactcagaagtagaaagaaacacaaatcacaatcgctatggctaggtacgaccgagcaatcaccgtgttctcccctgacggccatctcttccaggtcgagtacgccctcgaagccgtccgcaagggcaacgccgtcgtcggcgtccgcggcaccgacaatgttgtcctcggcgtcgagaagaaatccaccgccaaactccaagactccaggtcggtgaggaagatagtgaatctggacgaccacattgcgctggcctgcgcggngctgaaagccgacgcacgcgtgctcatatacagggcacgtgtggagtgccagagtcaca

SEQ ID NO: 26992 - DNA, 307 bp, Glycine max
  Clone ID: LIB3108-029-Q1-K1-E1
gattggatcagataaatccgttgttattcatgagcaaaactagggtttttgtcatagtatcccatggaagtctttgtgagaaaaaggtccctgatggaagtcatatgaaatgttgggtgctgttggagttgtgtgacattctgtattttgtctctcggaagtaggattctttcggggattgtcctgttggtagagaaagtgggaaatgacttcatttttgtgtttcttgcagctactagagtgtaatctggaagaaccaaatggtaccaatgataatattgatcacctactgcatactatggatttt

SEQ ID NO: 26993 - DNA, 402 bp, Glycine max
  Clone ID: LIB3108-029-Q1-K1-E12
caatttccccctattttgatagtgcatttcttttagtagtgatataaaaagtgcaattttgagctattagatactcatttttcataatttctgtaattgcaaagcaaccgcagtttaatatacatgcttaagagtttaattttatgtataccctggttgtctccatcttctctttgaaaaatgtgaatgtgattaggaaaacattaattatatacgtgtacggtggaattggaattattgatattgagttcatcttgaggctgtcatgttcccatttccccaaagtttggacatggttaagtaaatattcttttaaagattattaatagattatgggtttgctattaacattttttggaagattaatctcgtagtgtttgactattggaataacctgctttt

SEQ ID NO: 26994 - DNA, 87 bp, Glycine max
  Clone ID: LIB3108-029-Q1-K1-E2
catttgtcacattattattcacatctccatctagatctctctctctctctctcccaagaaattcatcaacagacttgtgattaattt

SEQ ID NO: 26995 - DNA, 361 bp, Glycine max
  unsure at all n locations
  Clone ID: LIB3108-029-Q1-K1-E3
cccacgcgtccggaagcgagcgaagatgtcgggtcgtggaaagggaggcaagggtttgggaaagggaggagccaagaggcacaggaaggtgcttcgtgacaacatccagggtatcaccaaacccgcaattcggcgtttggctcgcagaggtggtgttaagagaatcagtggtctcatctacgaggagacacgtggcgtcctcaagatattcctcgagaacgttattcgcgacgctgttacctacaccgagcacgctataagaaaggaccgntaccgctatggatggtgnttatgctcctaaggaggcagggaaggactctttacggtttcggtggtaaatttctagggtttccatcggcgt

SEQ ID NO: 26996 - DNA, 269 bp, Glycine max
  Clone ID: LIB3108-029-Q1-K1-E5
cccacgcgtccggcttgggatctagcagagtgcatgaaaggaggcacagtatctaaggctggggttccacatgatcgaccgcaacggcgacgggagaataacgaagaaggagctgaacgactcgctggagaacctgggcatcttcatctctgacagggacctgagcctaatgatccagacgatcgacgtcaaccgtgacagttgctaggacatggacgaggtagcggagctgaatcagaccatcatggaccaacaccacagtgacgagg

SEQ ID NO: 26997 - DNA, 361 bp, Glycine max
  Clone ID: LIB3108-029-Q1-K1-E6
gtgcgcagaataaaatttctcatcgacgatgtcgaataccttacaacgcgcccttcgcgccaccatggcccggccgttctccaccggcgcattggccgaaattaagcgaggcgagatcggaatggtttctggaattcctgaagaacaccttcgtaggagggttctaatttactctcctgctagaactgcatctcaacaaggatctggaaaggttggaagatggaagatcaacttcttatcaacccaaaagtgggaaaatccactgatgggctggacattcactggggacccctactctcatgttggtgaatctggcttgacttttgattgccaacaagccgcaaaagcatttgcagagaaa

SEQ ID NO: 26998 - DNA, 183 bp, Glycine max
  Clone ID: LIB3108-029-Q1-K1-E7
agacatcgtatgcaatctctgacagatttctttatatacatagtatcgctcattacggggcgactttccttaatccataggcagatgctccttgtcaaccactataccattccagaactcattcttctgtataactatatcacagctactacttatgtactgagtgatatcttctactatgac

SEQ ID NO: 26999 - DNA, 476 bp, Glycine max
  unsure at all n locations
  Clone ID: LIB3108-029-Q1-K1-F12
gtgtctttaaggagagaagagtttcactgtttaagtgggacggttatcatcaacataattctgtcttttggagtttgtctgctgttgctgctgctgccgtcttatttggacaagaaacaaatagaaattgacacaattggtgtttgtatatttttgataggaggaagcggcaataacatgatatatcatgtgctgtaattttttcttaaattaaatctcaagttagagagcagatttttgagttctgaccatcatgttcatttgagactgttgatggtgacagatgcaggtgttgattnttttcttctttttcttattttattatcgaatgatatgatattttaagggtggagggttgattggaaatggttgcttcgagaaatanggagcttgngctgtgctntttttttttttttttttcttctggagcacaatttattagtaattatttataaaaagccttacttgtttttttt

SEQ ID NO: 27000 - DNA, 346 bp, Glycine max
  unsure at all n locations
  Clone ID: LIB3108-029-Q1-K1-F2
cccacgcgtccgcccacgcgtccgcccacgcgtccgattgttttcttcatatcttccttgtcactgcccgtgtgtcgccgccatggccaccgtcaccacccaagcctccgccgcaattttccggccatgtacctcgaaatcgaggtttttgaccggctcttccggtaaacttaaccgggaagtgactatgcggccaatggggtgccctccttctgcctctttcaaggttgaagccaagaagggagagtggttacctggcttggcctncccaacttacctcaatggcactcttcctggtgacaatgganttgaccctctngggctagctgaggacccagagaacttg

SEQ ID NO: 27001 - DNA, 450 bp, Glycine max
  unsure at all n locations
  Clone ID: LIB3108-029-Q1-K1-F3
gtggtccagttctgctggaagtacaatctggatcggcttcaggagcttttcaaggaagaaggtgtggaagcaaaattgagattggaggagagtgggaaaccctacgtcaccgataattccaattacatcgtggatttgtacttcaagactccaattagggatgcattggccgcaggcgctgaaatttccgctctggaaggcgtcgtcgagcatggcttgttcctcaacatggccacttctgtcatcatcgctggcaaatctggcgttgaagtcaaggccaagtgagactctgaagtaattcgtttcttcttcttcttctcattcttgtctctgtattaatttttggtttcagtggaataataattattaatggcgtattttgaaaaaaaaaaaannnantaaaaaaaaaaaaaaataaataaaaattaaaaaaattaaaatttaataaaa

SEQ ID NO: 27002 - DNA, 313 bp, Glycine max
  Clone ID: LIB3108-029-Q1-K1-F4
acaacaatgggttctatgtgcttatgctagttgggatagtggttagcactatggttgctacctgtgctggtagcttctaccaagactttgatctaacatggggtggtgaccgtgctaagatattcaatggtggccagcttctatcactttccctagacaaagtctctggctctggcttcaaatcaaagaaagaatacctatttgggaggattgatatgcagctcaagctcgttgccggcaactctgctggcactgtcactgcttactacttgtcatcccaaggccaacacatgatgagattgatttcgagttt

SEQ ID NO: 27003 - DNA, 258 bp, Glycine max
  Clone ID: LIB3108-029-Q1-K1-F7
aattttcattattcaaccttgatctttatatagcccgcaacaccgagagagatgacaaaaagaaaaaaaaaaaaaaaaaaaaaaaaaaaaaaaaaaaaaaaaaaaaaaaaaaaaaaaaaaaaaaaaaaaaaaaaaaaaaaaaaaaaaatttaaagaaaaaaaaaattattacactttcatgggagttaaaattttttttttgggaaaaactaaatataattaaattgtaataggttttaaaataaatttactgttaaa

SEQ ID NO: 27004 - DNA, 417 bp, Glycine max
  Clone ID: LIB3108-029-Q1-K1-F8
cccacgcgtccgcccacgcgtccggaacatgtagttgagaactaagaaggagaagcaaatggcttcctcaatgatctcttccgcagctgttaccactgtcaaccgtgccggtgccggcatggttgctccattcactggcctcaagtccatggctggcttccccaccagaaagaccaacaatgacattacctccattgctagcaacggtggaagagtgcaatgcatgcaggtgtggccaccagttggcaagaagaagtttgagactctttcctacctgccagaccttgatgatgcacaattggcaaagggaagtagaataccttcttaggaagggatggattccttgcttggaattcgagttggagcacggtttcgtgtaccgtgagcacaacaggtcaccaggatactacgatggac

SEQ ID NO: 27005 - DNA, 456 bp, Glycine max
  Clone ID: LIB3108-029-Q1-K1-G10
gctcttcccaccacctctgcttcaagagcaaacgtgattctgcccccgaagcccttgaatggagttcgaatctcgacacccaaaaggaggactgagtcggtgattgtctccgccgccgcggaggacgcgagttcggctgtggagggtgggtcgccgccgcctcctccggcggagagcgagaaagagagcggcgcctccgtggagaagcttccgttggagtcgaaggtgaaggagagagaggagcaaaagctgaggatgaagctggcgaagaagataaggttgaggcggaaaaggcttcttcggaaacgcaagttgagaaagagggtagatggccaccttctaagatgaagaagttgaagaatgtatgattggcaatttcaatgtgccttttttttttttgcaggtttatttaagcttcattggtcattttctcattttattttcaaattaatgtgt

SEQ ID NO: 27006 - DNA, 258 bp, Glycine max
  Clone ID: LIB3108-029-Q1-K1-G12
tctgacttttgttccgaatttatatctactgagaaaggaataccacgatcagtaccttgtatcaatgttcgcggtactttctgccttaactatcggttccacaactgcttctacttcttcgccatatagttctgcttctaaggtccattctttccactcttcttcacgcttacagctccacttcaactagctcaaacaaaccaataatctctttgtgatagatttctcttcttcttatttcatcccttgcaaattcat

SEQ ID NO: 27007 - DNA, 373 bp, Glycine max
  Clone ID: LIB3108-029-Q1-K1-G3
ggctccgccgagtggggcggtggcgccgccgggttactacatggcgttcgcagtgaaccagggagtacccagcattgcaaagtggatacacgtgtcataagtcgtaactgtgaagtaacgaagtctctttgatgcattttggaaattgaaattgtatttaaatttatttattttctttttttggggggcaagtgggggattaaaaatttaaaattgagattcttcaattgttaataggaattggggactgggaagtcggtaagtgtgactggtgaattgcaaattcattttttttaagccccacaaccagaaggggaaatgcaaatgatgttttaatgggaatttcgcaatgcatggatgattgatttaatag

SEQ ID NO: 27008 - DNA, 315 bp, Glycine max
  Clone ID: LIB3108-029-Q1-K1-G4
gctatgttaaatgtagtggtcaagtttttctgatacaattgcttgtgcttaagttgtatgtagtcttgtgtttccccttgaccaatgaatacagagctgcaagtttagcagattcttcacccacctcagtacctctggcatttcgggttgagccgaaacccaaaagtgggatcaggcagcaagatttgctgaagaaagtcgttgagattaaacctaagcggccaagatgtgatagcaatcagtcaacccctgctagtaatgctcctgttacaaatcgtaagccttatcacgattcttcaaaagagaaagagcagt

SEQ ID NO: 27009 - DNA, 328 bp, Glycine max
  Clone ID: LIB3108-029-Q1-K1-G6
gctatgttaaacgtagtggtcaagactttctgatacaattgcttgtgcttaagtcgtatgtggtctgctgtttccccttgaccaatgagtacagagctgcaagtttagcagattcttcacccacctcagtacctctggcatttcgggttgagccgaaacccacaagtgggatcaggcagcaagatttgctgaagaaagtcgttgagattaaacctaagcggccaagatgtgatagcaatcagtcaacccctgctagtaatgctcctgttacaaatcgtaagccttatcacgattcttcataagagatagagcagtctttaccgggaac

SEQ ID NO: 27010 - DNA, 358 bp, Glycine max
  Clone ID: LIB3108-029-Q1-K1-G8
tcgaatttttcctacattctccgttacttatgtttacttgattgtgtcatgttctttatttccaataaaggttattgtaggccccatgtgttgttgaactactatactgtgcgaatggtgcatgcttgctggaccagtatgtatgcctcagtgcgttttgtgatgtgcggttctaatgtaattttgcttttggttgttgatgattatgttatatgttgtcttgataatataatagtagtactgcttttctgttgtgtctaaaaaaaaaaaatcgtaagccttatcaagattcttcaaaagaagaaagagcagtctttaccgggaacaaagaaagttgaggaacaatctttgtctggat

SEQ ID NO: 27011 - DNA, 479 bp, Glycine max
  unsure at all n locations
  Clone ID: LIB3108-029-Q1-K1-G9
cccacgcgtccggctcatttacacacctctccaacctttcactttcagctttatttgaatccctctctctcctttccaaatggccagcgttgaggttgcacatcaaacaccaacaacagttccagaaaatgaaacaaccgaggtaatcaagacccaggaaacaaccccggaaccagtaccagccactgaggctcctgcaacagaacaagcagcagctgaggttcctgctcaagaagaacaacaagcaactgaggttcctgccccagaatcaaccaccgaagcaccaaaggaagaaaccaccgaagcaccaacaacagaaacagtagaaacaacaactacagaagaagccaagccagaggagcctaaagaagttgcagttgagaccgangaggtggtgacaaaggagacagaggaagagaagccagcagcagaagagaaatcagaggagaaaactgaagaagtgaaagaagaagcagaag

SEQ ID NO: 27012 - DNA, 382 bp, Glycine max
  Clone ID: LIB3108-029-Q1-K1-H1
gcttaggttatttgactatattcaaggtaagaataactacaagcagaagattgagatgacagcacctgtgatcagtgaagtattacccagtgatggacccttctgtgagtcctcatttgttgtgagcttctatgtgccaaaagagaaccaagcaaacccgcctcctgcgaagggccttcaagttcaaagatggaagaccgtgtttgtggcagttagacagttcggtggatttgtcaaagattctagtgttggggaggaagctgctgccttgaaggctagcattgctggaaccaagtgggctgatgcagttgagaaaagccagaagagagctggccatgcttctgtttacacggttgcgcagtacaatgccccttttgatatg

SEQ ID NO: 27013 - DNA, 248 bp, Glycine max
  Clone ID: LIB3108-029-Q1-K1-H10
cccacgcgtccggtcgttgtttatgttcctttttaagttctctgctgcgaacacttgtcaatgaagaagcaagcaacatgcatgaatggaaatgattaatgtgttatttataatcggcttgctttttcttcttccctttgaagtgttagtgaataaatattctaggtgtgttctaagccagaattgatggcaagtgcttttgtaagccaggaataaaatcaagataacgatttactattatctaaaaa

SEQ ID NO: 27014 - DNA, 476 bp, Glycine max
  Clone ID: LIB3108-029-Q1-K1-H11
atcaaagccatgtccacctccaacttttctattgatctctccgtctccctatccttgtttttgttgctacttaccaaggcacactctaccgataccgtttctttcaccttcaacaagttcaacccagtccaaccaaacattatgctccaaaaagatgctagtatttcatcctctggggtgttacaactcaccaaagttggcagcaacggcgtgcccacctcgggatctctcggtcgtgccctttacgctgccccaatccagatttgggacagcgaaaccggcaaggtagccagctgggctacatcctttaaattcaacattttcgcacccaacaaatcaaactcagctgacgggcttgccttcttcttggcacccgtcgggtctcagccccaatccgacgatggatttcttggtcttttcaacagtcccttaaaggacaagtctctccataccgtggcgattgagttcgatacttt

SEQ ID NO: 27015 - DNA, 346 bp, Glycine max
  Clone ID: LIB3108-029-Q1-K1-H12
gatcccggtggccttttccctctctttctctggaaaattcccccgattttctcgagaaagtgagacggaattatgagctttcaggacatcgaggctgggcggcccttcggttcgaggcgcgggttgatgaacgggaagcaagacccgacgcaagcggtggctgccggaatattccagatcaacaccgccgtctccaccttccagagactcgtcaacaccctcggaacccccaaagacacccccgacctccgcgaaaaactccacaagacaagactacatattgggcaattggtgaaagatacatcagctaaacttaagcaagccagtgacattgatcaccatgctg

SEQ ID NO: 27016 - DNA, 338 bp, Glycine max
  Clone ID: LIB3108-029-Q1-K1-H2
gccacgcgtccgcggaaccatggtgagcacctccttcatgaggaagcaacctatgacgaccgagagcctaaagacattccccaacgctctttttggtctgaaaggtggacgaggtggtcgtgtaacttgcatggcctcgtacaaggtgaagctcataaccccagaaggagaagtggagtttgaatgcccagatgatgttgtcattgttgacaaggctgaagaagaaggcattgaacttacctactcgtgcagggctggttcttgcgtttcatgtgttgggaaactcgtgaaaggtgacgtggaccagtcagatggtagctttcttgatgatgaacaaa

SEQ ID NO: 27017 - DNA, 381 bp, Glycine max
  Clone ID: LIB3108-029-Q1-K1-H3
ctttgttttactctgctgtgtatcagtcaaaatacgctggaactggggcagcagttgagtatgctgttttgcatcttaaggtgtctgagattgtggtcattggacacagtgcttgtggtggtattaaggggcttctgtctttcccatatgatggaacctactctactgattttattgaggagtgggtcaaaattggcttgcctgcaaaggcaaaggtgaagacacaacatggggatgcaccttttgctgagttgtgctcacactgtgagaaggaagctgtgaatgtttcccttggaaaccttctaacatacccatttgttagagatggcttggtgaacaagacattgtcactaaaaggaggatactattacctttgttaag

SEQ ID NO: 27018 - DNA, 137 bp, Glycine max
  Clone ID: LIB3108-029-Q1-K1-H4
aattcccgacccgagcgtcccaatccatgaccgtgaccatggcggctgcgtttacaagtacaagtgcaacactgagactgtgaaaggttgaaaagagcagaggtttgcagttgcgtaagtgtaaccctaatcctaat

SEQ ID NO: 27019 - DNA, 72 bp, Glycine max
  Clone ID: LIB3108-029-Q1-K1-H6
cttccttgaagatacataacattttggcttttggccttttaaggaatggattatttatttggagttatattt

SEQ ID NO: 27020 - DNA, 243 bp, Glycine max
  Clone ID: LIB3108-029-Q1-K1-H7
ctagactcttctttttctctaagtctaaggggtgccctgagatcactttgagcaatggtgaaggctgtggcagttcttggcagcagcgagggtgtcactggaactattttcttcactcaggagggaaatggtccaaccaccgtaactggatctcttgctggtcttaagcctggtctccatggcttccatgtccatgccttgggggacactaccaatggttgcctgtcaactggagcgcatttc

SEQ ID NO: 27021 - DNA, 188 bp, Glycine max
  Clone ID: LIB3108-029-Q1-K1-H8
cccacgcgtccggcagtcgttacagagactccataacccgaaaatgcctttcaagaggtacgttgagattggaagggttgctcagatcaactatggcaaagagtatgggaggctcgtggttattgtcgatgtcattgaccagaatagggctcttgttgatgctcctgacatggtgaggtcccaaagtg

SEQ ID NO: 27022 - DNA, 292 bp, Glycine max
  Clone ID: LIB3108-029-Q1-K1-H9
acaattactactttctctctctttgtaacttgtaagcatggagtcctcaaagatctatgcttacctcttcctttgcatgctcttcctctcctccgccactcccattctcggttgtggctactgtggcaaaccccccaaaaagcacaagcctggtaaaacaccaaagacacccacagtacccgttgttaagccaccagtcacaatccctcccattgttaagccaccagtcacaatccctcccattgttaatccaccagtcacaatccctgccattgttaatccaccagtcaca

SEQ ID NO: 27023 - DNA, 362 bp, Glycine max
  Clone ID: LIB3108-030-Q1-K1-A1
ctcagaaatcaaaagcctacttcaagagatatcaagtcaagttcaagagaagaagagagggaaaaaccgattaccgtgccaggattcggttgattaatcaggacaagaacaaatataacactccgaaataccgatttgttgttcgctttagcaacaaggacattgttgcacaaataatatctgctagcattgctggcgatattgttcttgctgcagcatatgcacatgagctgccacgatatggtcttgaagtagggcttacaaattatgctgcagcttattgcactggtctcctgttggcccgaagagtcctcaaaacacttgaaatggatgaggagtatgaaggaaatgttgaggctact

SEQ ID NO: 27024 - DNA, 364 bp, Glycine max
  Clone ID: LIB3108-030-Q1-K1-A11
gcctagtcatactctgtatcatattatttcgataatcatccatagttactgaagaaaatggcaaccatctccgctgctatcacaaccccatcgatcacccgcgcatgtctagtgcaaaaacgttctcttgggttctcatctcccgttcttggtttgccagcaatgggtaaggtgggaagagtgagttgctccatggaggaaaagccttcttctgtgaaggaaagcagctcaagcatgttggggatgggggcatctttgatggcagcggccagcgccgcagccatgtcaggcccagccatggccttggtggatgagagacttagcactgaaggaaccgggctacccttcggcctcagcaacaacc

SEQ ID NO: 27025 - DNA, 253 bp, Glycine max
  Clone ID: LIB3108-030-Q1-K1-A12
caccggccctcgtttcttcacactctgccgtgctctttcggcgcatgtcaagagattcgcaagagaaagtgagaaaaaaaatgagtcgaggaagtgcaactgctgcgaaaggcaagaagaagggtgcgacattcaccattgactgctccaaacccgttgaagacaagatcatggacattgcgtctctcgagaagttccttcaagagaggattaatgttggtggcaagggccgtgcttttggggacttcattaa

SEQ ID NO: 27026 - DNA, 314 bp, Glycine max
  Clone ID: LIB3108-030-Q1-K1-A2
gagaaattagaggcatttcggtggcagttgttgagaacagaattagaaatgaaacagatgcgggcacatgtggaggggcaggtaaaggatgtgacacagcttaaacatggacagatgagactggagaacctactggtggaaaaaggagaataactggcttccctgaaagagcaatttggattaaaattgaaggccttaaaaaattacttaaatttggcttcacaatcattagaacttgcacaatatgctggctggtcaagaatcaagggtggcaagagaaaaccaggtgaaaaagtgcttgaaacaatggaaac

SEQ ID NO: 27027 - DNA, 333 bp, Glycine max
  Clone ID: LIB3108-030-Q1-K1-A3
acgcagacagtataggcatttcctacgcatgcgttttgatcagatgtataaatgaaacatatgctgtcacgtttatacggacacgttgaccatgtgacacatcttacacatcacaagattaaactggataccttactgttttatagacatgatgaactgacttccctgaaagatcactttgtatcagaattcttccctctaaaaaataactactataacatttcacccttaagcgcgccagcaatatatgctatctgattataactcatggttctgcacataattccacttgaaaaactgctacatacaatgtacacttttctttattaatat

SEQ ID NO: 27028 - DNA, 263 bp, Glycine max
  Clone ID: LIB3108-030-Q1-K1-A4
cccacgcgtccggttctattgaaggttcttttacatttatacccggcagattggcagacccagaaggagacccttttctagctacagtggctcggttcccgctccagctgccagactatatattctgattttgattctggatgggattgaagtatctctaatggcaattgcagctctcagatattggttgggtgtattatggccctttcgggagagggttttaaggtggacctggacaatttccctatctattagagaagcca

SEQ ID NO: 27029 - DNA, 318 bp, Glycine max
  Clone ID: LIB3108-030-Q1-K1-A5
tctccctctgcgcatgaattgggaacattcgacaggtagagtttcttcaatggctcctaaagttgataagaagaacgacccagaggcacaggccttgaaaactgctaaggcagataagtctggtgctacctttaagaagaaggcacagaagatccgaacttgtgtcactttccacagaccgaggacattgaagaaggataggaaccccaagtactctagcattagcgcgccttcaagaaataagcttgatcattatcagatcctgaaatactctttgaccactgaatcctgcatgaagaagattgaggacaacaacac

SEQ ID NO: 27030 - DNA, 352 bp, Glycine max
  Clone ID: LIB3108-030-Q1-K1-A6
caaaaatggcatcattcaccatgacagcttccatccttggcagcccagccgtcaccaaccggtcggcagtagcaacgcagaggagatcactcgtagtgaatgctgccaaagctgttgaagcagaaaaggtcagttatgacaatgacatggatggtagcaatggaaggaggaacttgatgttcgccgcggcggcggctgctggttgctctggtgctgggatggcagtggcagatgagccttaaccaggaaccccagaagccaagaaaaagtatgctccgatttgtgtcaccatgccaactgctaggatttgtcgcaattgagggactcttggttttattttacttctgatgat

SEQ ID NO: 27031 - DNA, 406 bp, Glycine max
  Clone ID: LIB3108-030-Q1-K1-A7
cccacgcgtccgcccacgcgtgcgatggactgaaatgaattgaagaaaagttctcttgctaataccatactgatactatggcctacaaaccaattatccattcttctgattttaatttattggcaaaatgtaatattcccgtaaatggactacattgtttaaaattaccataatgaagggaagctacgctcttcaaattcaatattatttcatttcaagtgtcaatgatgtatcttacataaatattatataccatcaatagctaatacacatttctaagctataagctgctccattcacaaagaggggattgttactcaagtttctgatattgggaagtggttccacccttgcatacttcagtgcaacagcctcaggtgacattctaccaatcaagaaaggacca

SEQ ID NO: 27032 - DNA, 300 bp, Glycine max
  Clone ID: LIB3108-030-Q1-K1-A8
acgcgtacgcgtgcgaacttggatatcgtatcgaggagctatgcctatggtctgccaggaggaaacgcttgtggaagcggcgctccgagttctgaacaccgccgacccgctcagtgaggcgcgactgggcgactctggtggcttcgcggcggctctatggcgacttaccagaacggtaccaccctttcggctcccatctcacgctatctgatcgcccctcaagactatcctatgtctgtaccgttcttcgtgctcaccatcttgcaatcttcaatgttcggcgaaatgctgcgatgagac

SEQ ID NO: 27033 - DNA, 416 bp, Glycine max
  unsure at all n locations
  Clone ID: LIB3108-030-Q1-K1-B1
ttaagaagatcattaatggcttctcttgcaaccttagctgctgttcaaccagctgcgctcaatggccttgctggaagttccctctctggaactaagctctctttcaagccctctcgccacactgtcaaatccaagaacttcaggagtggtgccgtggtagcaaagtatggtgacaagagtgtgtactttgatttggaggatctgggcaacactacggggcagtgggacttgtatggctcagatgcaccttcaccctacaaccctcttcagagcaagttcttcgagacatttgctgctccattcacaaagaggggattgttactcaagtttctgatattgngaggtggttccacccttgcatacttcagtgcaacagcctcaggtgacattctaccaatcaagaaaggaccacaact

SEQ ID NO: 27034 - DNA, 410 bp, Glycine max
  Clone ID: LIB3108-030-Q1-K1-B10
tagcataagcccagcatggtcaccgcttcagctttaggcacctcgtccttcatggggaggcgccgtctggaggcccattcgggggcggcgcgggtgcaggcccggttcgggtttggcaagaagaaagccgccggcccgaagaaagtttccagggggtcgggctctagctgcgataggcccctgtggtatccgggcgccaaggcgcccgagtacctggatgggagccttgtcggagactacgggttcgacccatttgggctagggaagcccgccgagtacctgcagttcgagttggactcgctggaccagaaccttgcgaagaacgtggctggggacatcattgggaccaggaccgagctcgcgtacgtgaagtccacgccgttccagccctacagcgaggtgttcgggct

SEQ ID NO: 27035 - DNA, 297 bp, Glycine max
  unsure at all n locations
  Clone ID: LIB3108-030-Q1-K1-B11
cccacgcgtccgaccactttcccaggttcaccaatgacaatcaaagctctaagaagaagaagctcttgtaccgcttgaaggtcaagccttcttctgactgagaatcttatcattgttatgtacatccataagggagatggagaagagcagtgcctacatgggttacttgattacattcttgcattcacttctatctgccaagatgttcaaagcttcaaagatgtggactttgctgctagaagaggaaagtnntaatgataatcgtgatcatgtgtttcaatcatatataatctttct

SEQ ID NO: 27036 - DNA, 299 bp, Glycine max
  Clone ID: LIB3108-030-Q1-K1-B12
tttagcataagcccagcatggtcaccgtttcagcattagccacctcgtccttcatggaggggcaccgtctggaggcccattggggggcggcgcgggtgcacgcccggttcgggtttggcaagaagaaagccgccggcccgaagaaagtttccagggggtcgggctctagctgcgataggcccctgtggtatccgggcgccaaagcgcccgaatacctggatgggagccttgtcggatactacgggttctacccatttgtgctaaggaagcccgtcgagtacctgcagttctagttggac

SEQ ID NO: 27037 - DNA, 198 bp, Glycine max
  unsure at all n locations
  Clone ID: LIB3108-030-Q1-K1-B2
cccacgcgtccgaaggaaatggcctacatacccttagatgaggataccaaggtcaagggaaaggcagccattgatgttgtgtgcaacccattggggaaatctggaggagctctgattcagcagttcatgatcttaactnttggttcactagctaactcaaccccatacctaagaagggtccttctggtgattggtctt

SEQ ID NO: 27038 - DNA, 412 bp, Glycine max
  Clone ID: LIB3108-030-Q1-K1-B3
aggaaaatgagtagtgaggagcagcagcagaagaagaataatgaagaaggggaagaagaagcgttgaagccgttggagatcgagaacggtcttcgcctagtcccgcgcgtgaagctcaacctcacggtgtacccttccacgcccctcacactctcccacccaatcgacgaatggaagatgaagcgcgcactcatcgacttcctccactcctcccactccctcacgctccccgaggacgacgacctccacctcacgcgcctcaaggacctcaagaaacgcaagcgcgacgaccccgtcgccgccggaacgctccgcatatgggacctctcttccttccgaacggagaatcaccgcttccgattaacggagaagcttaacgggatcgaactcaacctcgagggcgttaagttca

SEQ ID NO: 27039 - DNA, 247 bp, Glycine max
  Clone ID: LIB3108-030-Q1-K1-B4
cccacgcgtccgatcgacgttgaatcccaaaaccataagcacgcaaacaatgtggcagatttggcaacataaagctctcaatagcacatacacagattaattgatagtgcttgcccccaggctaaaatatttcccttgatttagtttcttggatttgatcttaatgtaattggcaatgttataaatattttgggttggagatctgatcttattctatttaatataatgtgattttaatgcacaaata

SEQ ID NO: 27040 - DNA, 315 bp, Glycine max
  Clone ID: LIB3108-030-Q1-K1-B5
acgatctcatgagaggcaacactagcagagctgcactgtagccaaccagctgcgctaaaggtgcgcgctcgaaggatgcgtatctgggaactaagctgtctctcaaggcgatatctccacactgtgagatccacgaacttcaggattgacgccgtggtagcaaagtctggtgacaagagtgtgtactacgattcggaggatctgggtaacactactgggcaatgcgacttgtatggctcacatgcaacttcacgctacaaccggtcttagagcaaggtctgcgcgacatttgctgctccattgacaaacagggga

SEQ ID NO: 27041 - DNA, 215 bp, Glycine max
  Clone ID: LIB3108-030-Q1-K1-B7
cttcactcttcactctacactcccaaccctattcaaacgcaaaccattcattcattcagttcggtaactcacctcaccatggccgcatccattacattggccaggctcgtctcttccaccctcaccactgtctacctcttccacacccatatccctgcctttcaaactctactatctccgactcctcaaccgacttcatccaatgccactcatat

SEQ ID NO: 27042 - DNA, 363 bp, Glycine max
  Clone ID: LIB3108-030-Q1-K1-B8
acctacgcgtccggcctcaccagcgagcagacgccaacttcgcttgatgctgacaaaatgggcgacaatcgcgcacttcatgcctcgacatgctcctggacatcatccttcctcctgtcggcgtcttcctgaaacattgctgcaaggtataaatctggatccgcatggtgcttaccctggtaggctacatctctggaattatctatgctgtctatgctatcaccaagtgatacatcatattcatcattataattctgagtggacaatgaataatttgacaaattaaaggaatactgctatgcatgtacctcatcaactgcaatgttgacataccagtataatgcttccattctaaatggacaa

SEQ ID NO: 27043 - DNA, 347 bp, Glycine max
  Clone ID: LIB3108-030-Q1-K1-B9
cccaaacgttgaaatccctcactggtacgcctacggaggaggaccactctctccgttcatctgttcttcttccaatgctgacacgtgctcattattattctcctccgaccatttccgaatgttccagttcaaggtccgcatctgtccacgtggcaggtcccacgattggacggagtgtccctacgcccaccctgccgagaaggctcgtcgccgtgacccccgcaagtaccactactacggcaccgtctgccccgattaccagaatgcgaactgcaagaggggcgacacttgtcaattctcgcacagcgtcttcgaatgctggctccatacttctcgataccggaccc

SEQ ID NO: 27044 - DNA, 435 bp, Glycine max
  Clone ID: LIB3108-030-Q1-K1-C1
ctttgttgcacttagaggacaaaagtcagatataagtgtatgtcactttactgccagaagagtgggatgccatggaaaatgttttaacccgcaaagtatgaagaagcaagggaggaagagaagttacgaaatcagcgtgaggatttcagtgacatggtggcagagaatgagaagaggaagaagagaaagatgcaagaaaaggagggcaagttcaagaggaataaggagtttaagttctaaaggtggtttcgtgtctttttcttttgcagaaaaaatgggggacccggaagttatccattcatcagattggcattttccaccaagggaggattggttgatagctctgttgtatggcatttctttcacatgttgctgtctgcaagtagctttcattgttttggttaggaacatactactcgtaatacgatgaaacac

SEQ ID NO: 27045 - DNA, 476 bp, Glycine max
  Clone ID: LIB3108-030-Q1-K1-C10
ccggaaatcgttcctatcatcacttctcaaatctcgaaccctctcgttcgtgccgatcactaggtcacacttcatcaatggcgggtagaggcaaaaccctaggatccagcgccgctaagaaggccacctcaaggagcagcaaagccggcctccaattccccgtcggtcgtatcgccaggttcctcaaggccggaaagtacgccgagcgcgtcggcgccggagcccccgtctacctcgccgccgttctcgaatatctcgctgctgaggttttggaattggctggaaacgctgcgagagataacaagaagactcgaattgttccacgccacatccaattggcggtgaggaacgacgaagagttgagcaagcttctaggagatgttaccattgctaacggcggtgttatgcctaacattcacaaccttcttcttcccaagaaggctgggggctcatccaagggtgctgctgctgacgat

SEQ ID NO: 27046 - DNA, 159 bp, Glycine max
  Clone ID: LIB3108-030-Q1-K1-C12
cccacgcgtccgcatacgtgtattcttagtttgcatatagtccaaagttgtcacataccattcccttattcttttattcctgtgtaaaattggttttgtgctgcttagtttgatattgttgcagatttggtgattgatatgcatgtcaattaatgtttt

SEQ ID NO: 27047 - DNA, 435 bp, Glycine max
  unsure at all n locations
  Clone ID: LIB3108-030-Q1-K1-C2
ctccgagcctcaacagcagcaaagcaaattcgcagttggtaagagaaaatggccgacgatagcacagctacctgcatcgacatcctccttgccatcatccttcctcctcttggtgtcttcctcaagtatggctgcaaggtagaattctggatctgtttggtgcttaccctttttggctacattcctggaattatctatgctgtctatgctatcaccaagtgatagatcatattcatcattttaattttgggtggacaatgaataatttgtcaaattaaaggacgacggctatgcatgttcctcatcaactccaatattgatattcctgtataatcctttgatctcagatggacaaatgtgattctttnttgttttctgtctatcggtctcaatattcctttttcatggttgtgtttttaataatcgttataatta

SEQ ID NO: 27048 - DNA, 473 bp, Glycine max
  Clone ID: LIB3108-030-Q1-K1-C4
cccacgcgtacgaacttggatatcgtatcgtttagctatgcctatggtctcccaggagcgatggttagtggaagcggcgctccgagttgggaacacctttctcttcggacctgacggcgccactcagatgacttgatccttatatgtatatatcatgtattcttatcctttgcttttctaattctatctatatctcggatttttcattttcgttattattgatttttcatttttgttactcatattgttttgattacttttgttatatttttgataactatttttatttttgtacttttatttattatttattattctttttttttttctttttttattctttattttttattttttgttttctgttatttcttttttttttttttttttatttttttttttatttttttgtttttttttttatattttttctttttttttttctttatttttttttttatttcttttttttt

SEQ ID NO: 27049 - DNA, 287 bp, Glycine max
  Clone ID: LIB3108-030-Q1-K1-C5
cccacgcgtccgcacagaattgcccggtatctagatatgcatagataaagaggaattggatttcactggcgaacgttatgaatacctgcactattattatgaattccatgccagttccttctcctttgttgataaagtcccttaaaacatttccatcgttcaaatgctgaaccaggacctaaaataagaagggaagtgaaaatgtgaaggacacattatctggggtggtggacgagcaagttgaagagttctggattagaaaggagaccaaggttttgctggatggc

SEQ ID NO: 27050 - DNA, 394 bp, Glycine max
  Clone ID: LIB3108-030-Q1-K1-C6
ccacgcgtacgaaaaaaaaaaaaacagcaaatttaaaagaaaataaaaaaataaaaggagaaggaaatagaaaaaacaaaataattgaaataataaaataattaattaaatgtaataaataaaaaaaaaatgaaaggtaaaatgtgtggatcttttaggtgcttaagcttttcgtactacgtttttcgacttatatatgcttgctatgctatctgtaaatgatatatcatatccataattttaattttgagtacccagtgaatcctgtgttaacttaactgacatccgttatgcatgttcctcattaactccgatattgatattcctgaatgatcctttgatctcacattgacaaatgtgaatgtttcttgatttctgtctattggtctcaata

SEQ ID NO: 27051 - DNA, 137 bp, Glycine max
  Clone ID: LIB3108-030-Q1-K1-C7
caaaggggacgtagcaaagtactcatactgatatgcaagtgacttcatcagtgatctagtgcgcatctgatgcaactgtaagccgagcaaccgttgtcaatgctggtgaatgatctgaagatcaggacttatgatgt

SEQ ID NO: 27052 - DNA, 397 bp, Glycine max
  Clone ID: LIB3108-030-Q1-K1-D1
cgcgtgcatagcagagtcagagacagagacgcagccatggggcggagacctgcgaggtgttataggcaaattaagaacaagccataccccaagtcacgtttctgccgtggtgttcctgatcccaagatcaggatttatgatgttggtatgaagaagaagggtgttgatgagtttcctttctgtgtccatctggttagttgggagaaggaaaatgtttcaagtgaggccctggaagctgctcgcattgcttgcaacaagtacatggccaaatttgctggaaaggatgctttccacttgagagtcagggtgcacccattccatgttcttaggatcaacaagatgctttcgtgtgctggtgctgataggctccaaactggaatgagaggtgcttttggaa

SEQ ID NO: 27053 - DNA, 216 bp, Glycine max
  Clone ID: LIB3108-030-Q1-K1-D11
acgacccgccgctctttgggaattgctctctcaattcttctcataaggctaatcctcctggcgagagtcaccaactacacgggcctttggtattcctattccctctactgctgatcgtcaaacatacttctttctcactcttctcttctatcccttattcttacttatattctttcattcataatccaactcactttatcttttctctactgtctt

SEQ ID NO: 27054 - DNA, 456 bp, Glycine max
  Clone ID: LIB3108-030-Q1-K1-D12
cgcaactgcaaatccttccaacggttttccatctgctccaccacctccttctcctcgtccaggcgctccatcactactggctccgccaccaggtggaccacctccctcacctcctcccccaggaagcctatcaagaggtggaatggacggtgacaaagttcaccgagctccacagctcgttgaattttatcaaacattgatgaaaaggtatgcaaagacggattcttcatcactattagatacttctgcacgtaatgcatctgatgctaggagcaacatgattggcgaaattgagaatagatcatcattcctcttagctgtgatagctgatgtagaaacacatggtgattttgtcatgtccttggcagctgaagttcgagcatcctacttctcagatattaatgactaggtggcctttgtgaactggctagatgaggatactcccatcttggttga

SEQ ID NO: 27055 - DNA, 331 bp, Glycine max
  Clone ID: LIB3108-030-Q1-K1-D2
cccacgcgtccgcccacgcgtccggctttgtgttttctagcattgtgatttacaacttcgtagcaatgcatattcttgactcttgcatgcacttcaatccttcgtagcattaatgatgtggccaagtcatcatgagcatcatacttatttctttgtgaatgtaaatcaaaattataagagagaaaatggtgcttttgtactacagattactataaataaaaaacttttatggttttcaaaaaaaaaaaaaaaaacaaaaaaatataaaaaaaaaaaaaaaaaaataaaaaaaaaaattaataaaataaaaaatatatacatataatactat

SEQ ID NO: 27056 - DNA, 441 bp, Glycine max
  Clone ID: LIB3108-030-Q1-K1-D3
cccacgcgtccgcccacgcgtccggccagcgtaagaagaatggcttctcaaagtttgagtttaccaccaacacatattccttacaataggataattgggaagcttgattccaagtttttgttgtggccttcttgtgctcatatcaaacccagaagaatttctacctcaattcgagcaatgggttcctccgcttcttcccactcccagtcacaatatgcagacagcgttgaatctgaagcaggagctgatactattgactataaatctttaaccgatgaagagtggaagaagcggctcacaaatgaacagttctatattactcgtcagaagggaactgaaagagctttcactggggagtactggaatactaaaaccccggggatttaccattgcatatgttgcgacacacctttattcgaatcatctactaagttcaatagt

SEQ ID NO: 27057 - DNA, 400 bp, Glycine max
  Clone ID: LIB3108-030-Q1-K1-D4
cccacgcgtccgcccacgcgtccgcccacgcgtccgcttctctcggcgtcgccatggacgaagaagaggtgcgcaagatcttcagcaagttcgacaagaacggcgacggcaagatctcgtgcgcggagctgaaggagatgatggcggcgctgggatccaaaacgacgtcggacgaggtgaagcgcatgatggcggagctggaccggaacggcgacggctacattgacttgaaggagttcggcgagttccactgcggcggcggtggcgacgggagggagctccgggaggcgttcgagctgtacgatctggacaagaacgggctgatctcggcgaaggagctgcactccgtgatgcggatgttgggggagaagtgctccctcagcgactgccggaggatgat

SEQ ID NO: 27058 - DNA, 206 bp, Glycine max
  Clone ID: LIB3108-030-Q1-K1-D5
gtgatatttcaaaatgaattccaccggctaattaaaaaaaaaaaaaaaaaaaaataatgagaaagagaaaaaatacaaaacataaacggacaaacgtataataacgtcccaccctttattcgctccccactttctttcatgtgctttctcctcattaactctgattttgtgtcacctatgtttgtttctctggctctctcttaaca

SEQ ID NO: 27059 - DNA, 364 bp, Glycine max
  Clone ID: LIB3108-030-Q1-K1-D6
ctctagggaatcaagaaaattattataccctttaagatgaaaccgtacctacgttcaatattcctattattccttatccttctcgaccaatccatttcggcgagtgctttttttaatggattgctaaacattgaaaagtggccctttagcgagaaaagtttgaagtggggaaaggtagggaaggagacgatagatagtatcaatgactatttaaaaaaagagcttgagtcccctcccgcactaccgaagcaaatcaatattgaagttgaaggcctgtctgtcgtcaagtattacttatctgactacggctacattgaatcctctgggccatttaacaatattttcgaccaggaaacaatgtcag

SEQ ID NO: 27060 - DNA, 283 bp, Glycine max
  Clone ID: LIB3108-030-Q1-K1-D7
acgcttggattcgtacattacatccacttttggttgatgattggtgcaatgtatcgtatgagcgtgacacccaatgttgaagtgtgtcataaaatggagctggctgtgatacgatgctagaagcatctatatacgacatatttatcgtgaaaagcattctggctgaactgcgacggacgaaagtgatcactcaaaataaaaacataaaacgaaaatgcagaaaaagaactagctgcaccatccgcatttgcaaatgaaatcaaatatcgaaactcgaatgaaa

SEQ ID NO: 27061 - DNA, 351 bp, Glycine max
  Clone ID: LIB3108-030-Q1-K1-D8
cccacgcgtccgaccacgcgtccgctcacgcgtccgcttctctcggcgtcgccatggacgaagaagaggtgcgcaagatcttcagcaagttcgacaagaacggcgacggcaagatctcgtgcgcggagctgaaggagatgatggcggcgctgggatccaaaacgacgtcggacgaggtgaagcgcatgatggcggagctggaccggaacggcgactgctacattgacttgaaggagttcggcgagttccactgcggcggcggtggctacgggagggagctccgggaggcgttcgagctgtacgatctggacaagaacgggctgatctctgcgaatgagctgcactccgtga

SEQ ID NO: 27062 - DNA, 456 bp, Glycine max
  Clone ID: LIB3108-030-Q1-K1-D9
catttcctttcgaattgaggaagggtaaggtgtcttggatggccaagtcatctttgttagctgtcacgttgatctgcgccgtcacggtattggtggcgatgagtcggtggccgacagccgtgggcggcggggaccaccacttgggaatgggatgggtttccagcacgtgcaaggggaccattgctgagtgcctggtatgggaggagtacgagttggattcggagatcaaccggcgcatcttagccaccaacaagtacatcagctacgttgcgctgcataggaacactgctacctgctctcgacgcggagcctgctactacaattgccgacccggagcacaggccaatacttacagccgtggctgcagcgccattacgaggaatggagactgaaggtttgtcttctcaataaaatgaagttcgatctaataatatctaatacacatactaattaaaa

SEQ ID NO: 27063 - DNA, 375 bp, Glycine max
  Clone ID: LIB3108-030-Q1-K1-E1
gtgaatgaagtatccattacagacatataccctcgctaaaggattgttttcatgttttctttgaccaatccaggatatgtttaaatgtgtcaaaccatggtgttgctgttatacaatcctagtgcatatatattgtaaatattaatagttaaaagaattctgtcaaaaaaaaaaaaaaaaaaaaaaaaaaaaaaaaaaaaaaaaaaaaaaaaaaaaaaaaaaaaaaaaaaaaaaaaaaaaaaaaaaaaaaaaaaaaaaaaaaaaaaaaaaaaaccccaaaaaaaaaaaaaaaaaaaaaaaaaaaaaaaaaaaaagggggggcctttttaaggggcccacttttttcaacccgttttttaacacctaatttttttt

SEQ ID NO: 27064 - DNA, 357 bp, Glycine max
  Clone ID: LIB3108-030-Q1-K1-E12
caatttccccctattttgatagtgcattccttttagtattgatataaaaagcgcaatcttgagctattagatactcatttttcataacttctgtaattgcaaagcaaccgcagtttaatatacatgcttaagagtttaatttaatgaataccctggttgcctccatctcctctttaaaaaatgtaaattgaattagaaaacattcattatatacctgtaccgttgaattggaattattgatattgaattcatcttgaggctttcatattcccattttcccatagtattggacatgtttcactaataaatctcttaagtattatgagtatataatgggtttgctattaacactttttt

SEQ ID NO: 27065 - DNA, 365 bp, Glycine max
  Clone ID: LIB3108-030-Q1-K1-E2
aacttaaggtttcaaacctaggaagttggaagtcatggcagcaacattgatggcagcaacaacaagttctggtactcttaaagcaactcctttccttggccaaggcaagggtgccaatgccaatgctcttagggatgttgtctccatgggaactgggaagtacaccatgggcaatgatttgtggtatggaccagacagagtgaaatacttgggacccttctcagctcagaccccttcatacttgaaaggagaattccctggggattatggatgggacactgctggcttatctgctgacccagaagcatttgccaagaacaaggctcttgaggtgatccatgggcgatgggccatgcttggagcac

SEQ ID NO: 27066 - DNA, 54 bp, Glycine max
  Clone ID: LIB3108-030-Q1-K1-E3
gtacttcttaccatcaccattctgttctgacttctgcttatgaacatctacaaa

SEQ ID NO: 27067 - DNA, 399 bp, Glycine max
  Clone ID: LIB3108-030-Q1-K1-E4
cccacgcgtccgattaagttcattttcctccctttcactctcgtagacatcacaaaccttccgtccattcatcccacgcatggctgccatgaactctagcgtattggcctgtagctatgccatatcaggtgcagcgtgttcggagctcaatgggaaggtcacttccgtggcctatgttgcatgctctggctacaagttgccattgatcaaagctgaggccagagttcctaaagccaaagaatctgaaggaggaaggagaggtgcccttgttctcttggcagctacccttttcacctctgcagcttccaattcttctgccaatgctgggatcattgaagattaccctgagaggagcaaggccaacaaggaattgaatgacaagaagaggttagctactac

SEQ ID NO: 27068 - DNA, 425 bp, Glycine max
  Clone ID: LIB3108-030-Q1-K1-E5
cccacgcgtccgcacacaagacaaagcgcggtgaagctgctcttgcacgactgaaggtgtacgagggcattcctcctccttatgacaagaccaagaggatggttgtccctgatgctctcaaggtgttgaggcttcagaagggacacaaatactgtcatctgggccaattgtcatctgaggttggatggaactactatgataccatcagggaacttgagaagaaaaggaaggagagagcacaattgtgttatgagaggaagaagcagcttgccaaattgagggtgaaagctgagaaggttgcagaggagaagcttggttcccaaattgaaatccttgctcctgttaagtattaagtagtatctagttagtgtttcaaggtttggtttgaggtgtataacgaattgaactacatttcaattttgctg

SEQ ID NO: 27069 - DNA, 162 bp, Glycine max
  Clone ID: LIB3108-030-Q1-K1-E6
cgaagttggaagtcatgttaaccacattgatggcaaccaccagggatttgtggactcttaaagccacttctttcctttgcccatggcaagggtcccaatcccattcctttaaggattgttgcttcaatcgaacctgggagagccacctggggcaataattgg

SEQ ID NO: 27070 - DNA, 404 bp, Glycine max
  Clone ID: LIB3108-030-Q1-K1-E7
acggtacttcttaccatcaccattctgttctgtccactgctaatgaatatcttcaaatccgttttggccgaggacccggatcctgcacgacccggatccaaccatgcatcgccagacaaagcaccggatccccattccccgccccgatcgaatgccaccgagtccgctgccggaggaggcggcggcgacggttggaacttcggcggcctcatcaaaacccttacatcgaaatcggaatccataattgagacctaccgtcgcgatctgcaggaattcggcaccggtttgaagaaagagatcgaggtcgcgcaaggttctctcgggaccgtgggccacgtcatcgatgagttcggaaacaccgtcgtgaaaggaacggctcaaatcatatctcaaggtaaagacgc

SEQ ID NO: 27071 - DNA, 287 bp, Glycine max
  Clone ID: LIB3108-030-Q1-K1-E8
cccacgcgtccgaggagatgctcaggagcagcacgctaacacagagtgttacagtcacctgtgttcatcacagtcacagacaatggttccaatcaattcccgtaaattatagattctgtgacgctgctcggaactctctatcatccaactccgccatcttcaagtggaaaagaacggctaattataatcgtaaccgttctggaatgggaaccttcaccacgcgcgcgttggcgcagccgctccagaacgccgacgaactcatcgattccgtcgagacatttattttc

SEQ ID NO: 27072 - DNA, 466 bp, Glycine max
  Clone ID: LIB3108-030-Q1-K1-E9
ggttgatttacttagaggacaaaagtcacattaagcggatgtcactttactgccaggggagtgggatgccatggaaaaggttttacccgcaaagtatgaagaagcaaggtaggaagagaagttacgaaatcagcgtgaggatttcagtgacatggtggcagagaatgagaagaggaagaagagatagatgcaagaaaaggagggcaagtccaagaggaataaggagtttaagttctaaaggtggtttcgtgtctttttcttttgcagaaaaaatgggggacccggaagttatgcattcatcagattggcattttccaccaagggaggattggttgttagctttgttgtatggcatttctttcacatgttgttgtctgcaagtagctttcattgttttggttaggaacatactactcgtaatacgatgaaacaccttatacagcgctgattctttagttggaaacac

SEQ ID NO: 27073 - DNA, 301 bp, Glycine max
  Clone ID: LIB3108-030-Q1-K1-F1
gtacttcttaccatcaccattctgttctgtccactgctaatgaatatcttcaaatccgttttttccgaagacccggatcctgcacgacccggatccaaccatgcatcggcggacaaagaaccggatcccaattcccggccccgatcgaatgccaccgagtccgttgccggaggaggcggcggcgacggttggaacttcggcggcctcatcaaaacccttacatcgaaatcggaatccataattgagacctaccgtcgcgatctgcaggaattcggcaccggtttgaagaaggagatcgagg

SEQ ID NO: 27074 - DNA, 218 bp, Glycine max
  Clone ID: LIB3108-030-Q1-K1-F11
cacgcttatttacacacgtctgtttactcttactttcagcttgatctaactcgcgtgttcgccatttcaaatggagagcgtgcacattgcacattaaacacctacaacagttacagacaatgaaacaaccgtattaatcaagaccctctaaacaacccttaaacctgtaccaaccactgatgctccttcaacagaacacgcattctctttacgttact

SEQ ID NO: 27075 - DNA, 440 bp, Glycine max
  Clone ID: LIB3108-030-Q1-K1-F2
cccacgcgtccgcccacgcgtccgctcaattccattctcttctctgagtctcaacctaattccccattcatccatctttacgtgtttgttggattccatggccaaaagctccttcaagcttgaacatcccttggaaagaagacaggctgagtctgctcgcattagagacaagtatcctgatagaatacctgtgattgttgagaaagcggaaagaagtgacatcccagacatcgataagaagaagtaccttgtcccagcggatttgactgttggtcagtttgtttatgttgtccgtaaaaggattaaggtcagtgcggagaaggctatttttgtttttatctacaacactctacctccaactgccgctttgatgtcttctatttatgaggaaaataaggacgatgatgggtttctttacatgacatacagtggagagaaca

SEQ ID NO: 27076 - DNA, 456 bp, Glycine max
  Clone ID: LIB3108-030-Q1-K1-F4
cctgacccttgtgtatcaaaaaaaaaaaaatttaaaataaaaataaaaaataaaaaaaaaaatggataagaaaaacacaaaaaaaagactaaaataacatatcaataaactcctcttcatataaaatatatttccaattgtttcaataaaatcactattgacaatccttattgtattaatttttccatttttttaaatcaaagtgtttattcatttttcagtaaacgaatatttaaagtcttttaccaatttttatacttttactgttctcatttcatttcttacagttctatttataacacctatgacttgtctttaaccctttatttctacttctttcttttctactttctttttttatattatcttttactatactttttcttttatctttttatgtcacttttttttacttctctatatctcttttttatttaattttttataatttttttt

SEQ ID NO: 27077 - DNA, 330 bp, Glycine max
  Clone ID: LIB3108-030-Q1-K1-F5
cccacgcgtccgctttggacaaagttgtccgtactgatgatgcatatgagttcgccaagattataccaaatcacatgttacatatcatatacagagctgatcattcattcactaatcatcaagataaataacctcggttgttgtgaacttcataaaggaaaccttgcaccaggataggagtactgctaactagatcttgcagtttcaagccagttgaattcctactgatgaccaatattttttcttggcatggattaaccctgctttgaaggtctaccacataattgaggtcttctaagttttggctatttaaataacggattctgcatt

SEQ ID NO: 27078 - DNA, 446 bp, Glycine max
  Clone ID: LIB3108-030-Q1-K1-F6
acgctattattcacccattcgataaatattattcttttcatatgagcactcaacctaattcgagattggatgccatctttatatgggagctaaatttactgacgcaaacactccttcaagcttgaacattatttggaaacataacatgatgagactggtcgcattataaacacgtatcctcgatagaatacctgtgattgacgaaaaagcataaagaagcgacatatcagacattgatcagaagaagtaccttgtaccagcggatttcactgctggtcagttagcttatgttgatcgtaaaaggattaaggtcagtgctgagaaggctatcattgtttttatctacaacactctacctccaactgccgctttgatgtcttctatttatgaagaaaataaggactatgatgggcttctttacatgacatacagtggatagaacactt

SEQ ID NO: 27079 - DNA, 281 bp, Glycine max
  Clone ID: LIB3108-030-Q1-K1-F7
aagggctcagaatgcacgtaacatatggaacaggcctcttaagagcgtttatattagtgattgtggggagctgaaagtgacaaagccttccctcacgccttctttgccataatttatttccatgtatgtatatattatccgaggggatttcatgttactggtctatgtaaaatcacactcacatattctttgaaaataaatgatgaataaaaccacaagcaagcaacatgaatgacttttgaagttgaaaaaaaaaacgctatagtctaacaaaaaaataa

SEQ ID NO: 27080 - DNA, 411 bp, Glycine max
  unsure at all n locations
  Clone ID: LIB3108-030-Q1-K1-F8
gcagaaatggcctcttcagtgatggcatctgtggccctcaaacctgcccctttcactgttgagaagtcctcagttagaggccttccctccctctcaaggaactcctcttcattcagagttgtggccagtggtggcaagaagatcaagactgacaagccttatggaattaatggtggcatggctttgagggaaggagttgatgcatctggcangaaaggaaagggaaagggcgtttaccagtttgtagacaaatacggtgctaatgtcgatggttacagtcctatctacgacaccaaggactggtctncaaccggtgatgtctacgctggcggtacgactggcttggctatcntggctgtgactctactnggtcttcttgctcgtggtgcacttcttggctacaacacaagt

SEQ ID NO: 27081 - DNA, 325 bp, Glycine max
  Clone ID: LIB3108-030-Q1-K1-F9
gcatagatggcctcttcagtgattttatctgtttccctcaaacctgcccctttcacgcttgagaagtcctcagttagaggccttgcctccctctcaaggaactcctcttcattcatagttgtggccagtggtggcaagaagatcaagactgacaagccttatggaattaatggtgtcatggctttgagggaaggagttgatgcatctgtcatgaaagtgaaagggaaagggcgtttaccagtttgtatacaaatactgtgctaatgtcgatggttacagtcctatttactacacctatgactgttcttcaaccggtgatgtctac

SEQ ID NO: 27082 - DNA, 385 bp, Glycine max
  Clone ID: LIB3108-030-Q1-K1-G1
agaaaggtgttgaacaaggtcctcagattgacgtggaacaatttgagaaagtccttaggtacataaggtctggaattgaaagccatgccacccttgaatgtgggggtgatagattgggctcaaaaggcttctttgtccagccaactgtcttctcaaatgttcaggatgacatgttgatagcacaagacgaaatctttggcccagttcagtccatcttgaaattcaaggacattgatgaagtaatacgacgggcaaataaaacacgctatggtctagcagcaggtgtgtttactaagaacgtgagcacagccaacacattgatgcgggcactgagagctggaactgtgtggattaattgctttgatgtttttgatgctgcaattcc

SEQ ID NO: 27083 - DNA, 323 bp, Glycine max
  Clone ID: LIB3108-030-Q1-K1-G10
ctccacgctttcgccagcacctgtgcttcaagagcactttagattctgcccccgaagcccttgaatggagttcgagactccacacccataagggaggactgagctccctgattgtctccgccgccgcagaggacgcgagttcggctgtggagggtgggtcgccgccgcctcctccggcggagagcgagaaagagagcggcgcctccgtggagaagcttccgttggagtcgaacgtgaaggagagagaggagcaaaagctgaggatgaagctggcgaagaagataacgttgatgcggaaaatgcttcttcggaaacgcaagttg

SEQ ID NO: 27084 - DNA, 471 bp, Glycine max
  Clone ID: LIB3108-030-Q1-K1-G11
tgattgcctccctctgctgccgtccctaatctgaaggctcccgccatctgcgatcggatttcatggctccaaagaaggacaaggctcccccaccttcatccaagcctgccaagtctggcggtggcaagcagaagaagaagaagtggagcaagggtaagcaaaaggaaaaggtgaataacatggtgctcttcgatcagggtacctatgacaagctcctctctgaggcacccaaatacaagctcattactccttccattctctctgaccgtttgaggattaatggatcacttgcaaggaaggctattagggaattgatggctagaggttcaatcaggatggtgtctgcccatgcaagtcagcagatttacactagagctacaaacacctagatgtactggttataatttatgtagtattgatgcacctctgaagtgaaattttggtttttctggttgagacgtacctcatgct

SEQ ID NO: 27085 - DNA, 220 bp, Glycine max
  Clone ID: LIB3108-030-Q1-K1-G2
cccacgcgtccgatcacaaaagcggtgaccatggcaaccatgattatggcttccacaaaaccgttggttccagtctgcaccagttcccgttcccccacaccaaaactccccattctccaaatttcactccccaaagccccaaccttgaaactgaaactcccaatttcaaagccccagatgctgtccctcctgggagggatagcaccactggtcttggcca

SEQ ID NO: 27086 - DNA, 359 bp, Glycine max
  Clone ID: LIB3108-030-Q1-K1-G4
gcaacatataagtgcacagcactgaaaacggtgtccatcaatcaatcagcagggaagaaaatgaatggatggagcgatgtggttaacagcggaacccattctacaactatgcttcccactcccaatctcagtcccaaacaagctctgcaattgcagcttatccataacagcaacaaccaacaccaacaccaacgccgaaattactactactctcactcaaactcctaagccaaagccgaaccctacgtcgacgttgaagaagcgaaagaagtaccggaagctatatcccggaaagaccaccgggctttaccgaagagatgacgttcgtcgtcatgagactcctgaccaacgacaccgtt

SEQ ID NO: 27087 - DNA, 444 bp, Glycine max
  Clone ID: LIB3108-030-Q1-K1-G5
attttatactatacctacattttgataattttctttgtagttgatagccatggctacccgtggaaagcttgaggttgacattgatctcaagtccaacgcagacaagtactggcaaacccttaggaattctactgaaatattccctaaggccttcccacatgattacaaaagcattgaggttcttgagggtgatggcaagtctcctggttctatccgccacataagttatggtgaaggttcaccacttgtgaaatcatcctttgagaagattgaggctgttgatgaggaaaagaaggtagtgtcgtacactatcattgatggggaactcctccagcactacaaaacattcaaaggagacatttcagtgactccaattggcgatggatgcgaggtgaagtggagtgctgcgtacgaaaagggtagcccatgatatttctgatccaa

SEQ ID NO: 27088 - DNA, 313 bp, Glycine max
  Clone ID: LIB3108-030-Q1-K1-G6
acggaaaaacacgtagttgagaactccgtagaatgcaatggcttcgttaatcgatctcctggccaggtgataccaccgtcaaccgtgccggtgccggcatggatgctccattcaccggccttaaatccatggctggcttacctacgaggtagacctacaatgacattacctccattggttgcaactgctgaagagtacaatgcatgcaggtgtggccaccaattggctagaagaagtacgagactctgtcctacttgccagacctcgatgatgcctaattgtcataggaagtcgaataccttctaatgaaagg

SEQ ID NO: 27089 - DNA, 266 bp, Glycine max
  Clone ID: LIB3108-030-Q1-K1-G7
acgacaaaaacaagtagttgataactaagtttacttgaaatggctaactcaatgatctcctgcccaggtgttaccacctttatccgtgccgactccctcatggttgatccattctaccggacttaaatacatggctggcttcaccacgaggaagaccagcaatgacattccttccatagctagcaacagtcgtagcgtacaatgtatgcatgtgtggacacgactatactagacatagttcaatactctttgctacttgccatacc

SEQ ID NO: 27090 - DNA, 305 bp, Glycine max
  Clone ID: LIB3108-030-Q1-K1-G9
cccacgcgtacgagttgatggtgtatcataaacctttttatttttgtttccctggttgtaatatagtctgaattaatttcttgtcaaaaaaaaacaaaaaaaaaacaacaacaaatacaaaaaatgaaacaaccaaaagaaaacaaaaaccaaaaaacaaccaaaaaaaacaaaaccaaacaaaaaaggcccccccatttaaacaatccaaatttaaagacccttcctagcaacaacaaaactcttctatagggtcccctaaaataattaaccagcccagcacttaaaaacgacaccaccggaaa

SEQ ID NO: 27091 - DNA, 355 bp, Glycine max
  Clone ID: LIB3108-030-Q1-K1-H1
tgaagaacaatcactgttatctgctaataaggatactttacatcccaattacagaattccttgtcagattggtaaatcatctatggaaaaagacttacttgagttagaagcaaatcagagacatgactatatgggcacgatgaacaatttggttcctgggatgtcagacatgtcagagcaagtggaaagcataacaaattccatggaactgcccgcaattgcccatagtagacatagctcactgagcagtgcacgtggtgatggtggttcatttggtcgtgagatgggtttgaataatccacgtggagatgaggtttctggtgacaggataccttcttctacaaaagggtttgat

SEQ ID NO: 27092 - DNA, 475 bp, Glycine max
  Clone ID: LIB3108-030-Q1-K1-H10
cccacgcgtccggtttcttacaaggctctactctactgcttcaccttctgctctagaaaattcagtggtgatacatggcttcggctactctctctgtagccaaaccagcccttcaggcaaatgggaaaggcttctctgaattctctggcctccgcagctcaggcttccttcccttttctagaaaatcttcagaggatttccattctgtcattgccttccagacctatgcagttggaagcagtggaggatacaagaagggtgtgacagaagcaaaactgaaggttgccataaacggatttggaaggattggaaggaacttcttgaggtgctggcacggtcgcaaagactcccctcttgatgtcattgccatcaacgacaccggtggcgtgaaacaagcctctcaccttctcaagtacgattcgatcctcggaaccttcgatgctgatgtcaagcctgttggcagcgacatcatctc

SEQ ID NO: 27093 - DNA, 340 bp, Glycine max
  unsure at all n locations
  Clone ID: LIB3108-030-Q1-K1-H11
gcgtatcaanatgccatggcntcacctcgcaacttttctctattcgggttctctcccccgtctccctagcnctgggctttattggtgcctacccttagccaagtgcacactttcgaccgattaccggtttcatttcacctttcaacaaggttccaacccaagtccaaccaaccattatgcttccaaaaagatgctagtatttcatcctctggggtgttacaactcaccaaagttggcagcaacggcgtgcccacctggggatctctcggtcgtgccctttacgctgccccaatccagatttgggacagcgaaaccggcaaggtagccagctgggctacat

SEQ ID NO: 27094 - DNA, 269 bp, Glycine max
  unsure at all n locations
  Clone ID: LIB3108-030-Q1-K1-H12
ttttccctctctttctttgaaaattcccccgattntctcgagaaagtgaaactggattatgagctttgaggacatcaagctctgccggcctcttcgtctaagcgcgcgtttataaacaggaaacaagaccccacacaagcggtggctgtccgaatatttcacatctacaccggcgtctccacctttcacagactcttcaacaccctcttaacccccaaagacaccccccacctcctcgaaaaactcctcaagacaagactacatatttt

SEQ ID NO: 27095 - DNA, 325 bp, Glycine max
  Clone ID: LIB3108-030-Q1-K1-H2
cccacgcgtccgctctctgtgtatttccctacctctcccttcaagatgcagatcttcgtcaagaccctcaccggcaagaccatcacccttgaggtggaaagctctgacaccatcgacaacgtcaaggccaagatccaagacaagggaaggatccccccggaccaacaacgtcttattttcggccgaaaggaacttgaagaccggcggacccttgctgacttccaccttcaaaaagggaggtccttttaacttggtcttcggcttccgggtggccttgcaaactttcgttaaaacattaaccggcagaaccttaaccttagaggtt

SEQ ID NO: 27096 - DNA, 239 bp, Glycine max
  Clone ID: LIB3108-030-Q1-K1-H3
agtgagcgtatgaatcgaccacacaaaagtggtcagggcttgtctgattacagttctcagcttgcattgtcatctactctgtcattgcatgggaaccgataaaaccttggtcgaaaaaccatggctgaagaagatacaacttgcaagacccatcattttcgaggataacacagggtgactatctatctagcgcccttgacagcacccagcagctagctgtacgcttacattggacaatt

SEQ ID NO: 27097 - DNA, 224 bp, Glycine max
  Clone ID: LIB3108-030-Q1-K1-H4
ctcaatgggttcttcttctattacaacatcgcgcgcctacgttcaatattgctattattccttatccttctcgaccaatccatttcggcgagtgctttttttaatggaatgcttaaccttggaaaggggccctttagccagaaaaggtttaaatggggaaagggaaggaaagggaccctttatatggtccaagggtcttttaaaaaagagcctttgtgcccttt

SEQ ID NO: 27098 - DNA, 377 bp, Glycine max
  Clone ID: LIB3108-030-Q1-K1-H5
tgagaactaagaaggagaagcaaatggcttcctcaatgatctcttccccagctgttaccactgtcaaccgtgccggtgccggcatggttgctccattcactggcctcaagtccatggctggcttccccaccagaaagaccaacaatgacattacctccattgctagcaacggtggaagagtgcaatgcatgcaggtgtggccaccagttggcaagaagaagtttgagactctttcctacctgccagaccttgatgatgcacaattggcaaaggaagtagaataccttcttaggaagggatggattccttgcttgtaattcgagttggagcacggcttcgtgtaccgtgagcactacatgtcaccaagatactacgat

SEQ ID NO: 27099 - DNA, 365 bp, Glycine max
  Clone ID: LIB3108-030-Q1-K1-H7
acggccgatgccaaacttgctgtgaataagaagggcgccgtcaccaagactaggaaacccgccggaaaggggaaggcagcgaaagatcctaacacgccaaagaggcctccaagtgctatcttcgatctcatggaggaattcaggaaggtgttcaacattgaacatccagacaacaaagcagtgtctgctgtgggcaaagctgctggagcaaaatggtagacgatgtttgatgctgaaacagcaccttatgtggcaaagtctgagaaaaggaaagtggagtacgagaagaacatgagagcttataacaggaaccatgcgtaaggtacaactggtgaagatgaagaagaatctgacacgtttgcatc

SEQ ID NO: 27100 - DNA, 282 bp, Glycine max
  Clone ID: LIB3108-030-Q1-K1-H8
atgggttcttcttctattacaacatcgcccgcaaccatgaccatggctgcgatcgtgctcctgttcacggtctttgccgtttcctacggcctagacatgtcgataatctcgtacgacagcgcccacgcggacaaggccgtcacgttgcgcaccgaggaggagctgatgtccatgtacgagcagtggctcgtgaagcacgggaaggtgtacaacgcgctcggcgagaaggagaagcgcttccagatcttcaaggacaacctgcgattcatcgacgaccacaac

SEQ ID NO: 27101 - DNA, 237 bp, Glycine max
  Clone ID: LIB3108-030-Q1-K1-H9
atagcattcgagcttctattaccactattactgctacacccataaccatgaccatggcataggccgcacaatcatggactacaatctgccggcatctcttactatcactatgcacatattgcgctatcaacagaccaaactcatgacatggtcaccattgtctcaccgatgagaatctacattgcacttaccatcatttgatcaccttacactgcatctttaaccactgactccgat

SEQ ID NO: 27102 - DNA, 395 bp, Glycine max
  Clone ID: LIB3108-031-Q1-K1-A10
gcagaaagcaagctcatcctagagttttaaaaatggcagcagcctcctgcatggctcggtcttccccatccttggctggcaaggccgtgaagctgggcccatcagcccccgaagtcgggagggtcagcatgaggaagaccgtcaccaagcaggcctcctccggaagcccatggtacggcccagaccgcgtcaagtacttgggcccattctctggcgagcccccgtcctacctcactggcgagttcccaggtgactacggctgggacactgctgggctttcggccgacccagaaaccttcgccagaaaccgtgagctcgaagtgatccactccaggtgggccatgctcggggccttgggctgcgtcttccccgaactattgtcccgcaacggggtc

SEQ ID NO: 27103 - DNA, 388 bp, Glycine max
  Clone ID: LIB3108-031-Q1-K1-A11
cccacgcgtccggacctgacctagggtttttttatcattcctcttccgaattccagggtaagctttggatctccgatcggagccttacccatcttttcttaatcttcaaggaaccctttgggacactaaagtttccaaattgaagaggaaaaaaaaaaagagcttgctcggagagagtgagactgagagggaagatttggatcaggattcgggggtgagatatctgaggatggttacttatggtgaaaaggtgggctaatgagtagggagtagcatggaagataaagcaagcaagtagtttgatcagttttgaattttgataggctcatattacaatatggaggatgagagtgggcttgaactcaacttgggtttatcttttggaggc

SEQ ID NO: 27104 - DNA, 320 bp, Glycine max
  Clone ID: LIB3108-031-Q1-K1-A12
ggggtcatcattgttatattcaccaccagagcctctcttcaagaagagcagaacccagggacaacaaatgaatttgtcaccacttaaacggttcattatcggaattgttggcacctctccttaattaattaataccctttcacaaaccaaaaaaaaaaagtcttaatatttatttactgtggtaattaatctttccatgcatgctgctgaactatagtgccttcccctctctatgggtatctcttcatttccaacaacgtgccacattcatttaacatatcttgaagaggcaaggtggaggttcaggaatgagtggtcta

SEQ ID NO: 27105 - DNA, 361 bp, Glycine max
  Clone ID: LIB3108-031-Q1-K1-A2
taccggcccggaagacccacgcggacggaggcgcctgtactctcgaagaagatcttgaagaatagggtgaagaagttcaagagggctcacagggacaggaaaatttctgtcaagacaaactggcgcagaccaaagggtatcgattcccgtgttaggagaaagttcaagggatgcactttgatgccaaacattggttatggttcagacaagaagacccgccactatctccctaatggttttaagaaatttgttgttcacaatgtgaaggacttggaactgctcatgatgcacaacaggacttactgtgctgagattgcccacaatatatccacaagaaagaggaaagatatagttgagagag

SEQ ID NO: 27106 - DNA, 244 bp, Glycine max
  Clone ID: LIB3108-031-Q1-K1-A4
acccacgcgtgcggaagataaagaggatcacaaggctcttttcttaatttctccaaacatccatggcttggttgtttcgtatttttttaaatgctatgtatcaaaatgttttttttcgtaccctatcacaagatttgctataataaaaggtggtcattactctttttatcacatgtttattcgtgaggtctaatcttctagcatgaatcttctaacccctcacacttactcaatctaaacaaaa

SEQ ID NO: 27107 - DNA, 331 bp, Glycine max
  Clone ID: LIB3108-031-Q1-K1-A5
caagaatgagggagatattgcacgtgcaaggtgggcaatgcgggaaccaaatcggttccaagttctgggaagtgatatgcgacgaacacggcatcgaccccaccggaaagtacaccggcgacgaggcctccgatctccaactggagaggatcaacgtctactacaatgaggcctccggcggaaggtacgttccccgggccgtcctcatggatctggagcccggcaccatggacagcatcagatccggcccatacggcaagatcttcaggcccgacaacttcgtcttcggccagtccggcgccggcaacaattgggccaaaggccactacac

SEQ ID NO: 27108 - DNA, 284 bp, Glycine max
  unsure at all n locations
  Clone ID: LIB3108-031-Q1-K1-A6
gcgcccacgcgtncgcccacgcgtncgaagaaagaaactacagaaaagaaatggcttccagttctgcaggttcaatggctatgccagtaacttatgctagccagaagagggtggtgcctagctcggatgcattcttcaagccactgcctctacggtcttccaaggcagtgacagcatcaaaactcaatggaaggtttcaagtgagggcctccatgaaggagaaagttgtgacggggctcaccgcagctgcattgacagcttcaatgatggttcctgatgtggct

SEQ ID NO: 27109 - DNA, 407 bp, Glycine max
  Clone ID: LIB3108-031-Q1-K1-A8
ccaagggagaacgtggcaaagcaagtgcctgagcagaacggcctcacacactttgaggctggtgatacacgtgccaaggagtatgtcagcctcctcaaatccaatgaccctgttggattcaacattgttgatgtcttggcttggggctccattggccatgttgttgcttactacatcttggccaccactagcaatggctatgaccctgcattctttggctgatttaatttcatcatcatgttgttccaactgtgtttcttgcttactttttagtatgtaatgtaatcaatgtcatgatgtataggttctctctaaagatccaacaagttcagcatatgctaatttgatcactattttcggctgcaatttggtttgctattatgattaatggaaaatgggacttcttt

SEQ ID NO: 27110 - DNA, 368 bp, Glycine max
  unsure at all n locations
  Clone ID: LIB3108-031-Q1-K1-B11
caggacattgtcaagcttgttgacaccttccctggccaatccattgatttctttggtgcactgagggccagagtatatgatgatgaagtgaggaagtggatttctggtgttggtgttgacagtgttgggaagaagcttgtgaactcaaaagatggacctccaacctttgagcagcccaagatgactctggagaagctcttgctgtatggtaacatgcttgtccaagaacaagagaatgtcaagagagtccaattggctgacaagtacttgaacgaggctgctcttggaaatgctaacgaggatgctattcagaggggaactttcttccagtcttgaattggaggcaaagcanacttggcaagtaaata

SEQ ID NO: 27111 - DNA, 364 bp, Glycine max
  Clone ID: LIB3108-031-Q1-K1-B12
cacgcatccgcaggacattgtcaagctttttgacactttccctggccaatccattgatgtctttagggcactgttggccggagtgtatgatgattaactgaggaagtggatttctggtgttggtgttgacagtgttgggaagaagcttgtgaactcaaaagatggacctccaacctttgagcagcccaagatgactctggagaagctcttgctgtatggtaacatgcttgttcaagaacaagagaatgtcaagagagtccaattggctgacaagtacttgaacgaggctgctcttggaaatgctaacgaggatgctattcaaaagggaactttctttcaatcttgaattggaggcaaagcaaac

SEQ ID NO: 27112 - DNA, 404 bp, Glycine max
  Clone ID: LIB3108-031-Q1-K1-B2
gttttggtcgagaacagtgggagatgcatcaaaaatgacagtgatgaaaaggttcttgcaaatgggactgcttggattcctaatctagtccaaacaatcacagatattgcattgaaccaaagtgagtctattcacgttgacaagaatttgattgaagggccaaatccgaatcagagaggaaaattatggactcctcttgtgtttgctatccaatacttccttatcatgaagccaataaaaggactgatcgagaaggacattgcaaatgagagaaagccaacatgggagagacgtgatgccgctttccggaagagagatttatattagctgcacttctgtgcccatgaaattccatggatgcttagcttcctttgctagcacattcggttacttttgtctgttct

SEQ ID NO: 27113 - DNA, 346 bp, Glycine max
  Clone ID: LIB3108-031-Q1-K1-B3
aaatggtaatgatgattctcaggccacagaattggcttcttcagctcaagagaagaagtcttatgcgtctattgtgaaagtccaaaaagagggttcagttgcaactaaagtctatgtgcctactaatacactaaagtcagggcctaacaaaactgagaacaaggtagttgagtcagtagaatctactgaagtgtctgaagcagctttggatagtgttaacaaccctgaaagtagtgatgctcatgaggaagttgaggggcactccatttacattcgaaatttgcctttaaatgtgacggctgctcagttggaactggagtttaagaaatttgggcccatcaagcca

SEQ ID NO: 27114 - DNA, 332 bp, Glycine max
  unsure at all n locations
  Clone ID: LIB3108-031-Q1-K1-B4
gcgtgcgccacgcgtncgnccacgcgtncggaatggagcaaccatgccggcaccggcacggttgacagtgggaacagctggggaagagatcattgaggaagccatttgcttctccttcttagttctcaactacttgttcttctgctgccagatcttgatgatgcacaattggcaaaggaagtagaataccttcttaggaagggatggattccttgcttggaattcgagttggagcacggtttcgtgtaccgtgagcacaacaagtcaccaggatactacgatggacgctactggaccatgtggaagctgcctatgtttggntgcactgatgc

SEQ ID NO: 27115 - DNA, 337 bp, Glycine max
  Clone ID: LIB3108-031-Q1-K1-C1
gatcgagataactagaaacagcgtgatgaaaatgaatgtccttgttttcttcgttgcgacaatttgggtagcatggcaatgccatgcgtaccatatgttccctctccgaatgaacactggctatggtgcccgtactccggaggtgaaatgcgcaagttggaggcttgctgtggaagcacacaacatctttggctttgagaccattcctgaagagtgcgttgaagcaacaaaggaatacatccatggcgaacaatatagatcagactccaaaacagttaaccaacaagcttacttttatgccagagacctcgaagtccattccaaggacacatttgtg

SEQ ID NO: 27116 - DNA, 365 bp, Glycine max
  Clone ID: LIB3108-031-Q1-K1-C12
aagagttcttgcttactttaccaagcactaaaagtatgcggcttcggttgatttccagggtggtgtatacgtgtcctatctatctttgctttactcaatcttgcagtggtggcaacaccatgcaaaaaccttgcccgggggacgtttactggaagtataaactttctactactccaatgccgaaagccattacagatattcttgacccaaatttggcataagacgaacgcgcctttacagccgtaggaaaggaaaacctctacgttaacccaagtaaatcaaattcaggatgtacatcatttaacatatgaaaaggatgagtgaacgcccacacacggaacggttagcccaacaaaggcacatct

SEQ ID NO: 27117 - DNA, 254 bp, Glycine max
  Clone ID: LIB3108-031-Q1-K1-C2
cagtgaggttgcgacaatcgtttgtgcaatcacgatatcaccggtctcaactctctcggctctgcggctcgtcggacgcaatgcgacgccctctccgtgcaagccgcgtgccgataaacccttaacggcacttactagcgcggggcggaggcagatgctgatttttcttacggcgacgaccgccttgaccgccagggaagccgcgtccgtagcgcacgacattccctcgttcgagatactgcatagtctgaaaa

SEQ ID NO: 27118 - DNA, 390 bp, Glycine max
  unsure at all n locations
  Clone ID: LIB3108-031-Q1-K1-C3
attcagtgaaacactanctagggtattgggagctctcgttgtttcggagttagggacgttactcagccatggccactgctacgaatgccnncntcgccccaccacgccagctcttccagaaggaagctgacatccagatgatgttggccgccgacgtccacctcggcaccaagaactgcgacttccaaatggaacgttacatcttcaagcgccgcaacgacgggatttacattattaaccttgggaagacgtgggagaagcttcagctagcagctagggttatagttgcaattgagaacccccaggatatcattgttcaatctgcaaggccttatgggcaaagagcggttctgaagtttgctcagtacactggtgctcatgctattgctg

SEQ ID NO: 27119 - DNA, 327 bp, Glycine max
  unsure at all n locations
  Clone ID: LIB3108-031-Q1-K1-C4
cccacgcgtncgcggacgcgtgggctctgtccccgctgcgtctctcgtaatcatgcctaagcaaagccacgagattaaggatttccttctcactgccagaaggaaggatgcgaggtcagtgaagatcaagaggagcagagatgtggttaagttcaaggtcagatgctccaagtacctctacacactttgtgtgtttgacccagagaaagctgataaattgaagcaatctcttcctccaggtttgagtgttcaagacctgtaaaggtactgggcgagagatcaagaagaagcaattcattgattcttctgaagtttgattctctgtag

SEQ ID NO: 27120 - DNA, 115 bp, Glycine max
  unsure at all n locations
  Clone ID: LIB3108-031-Q1-K1-C6
cggggcgacccacgcgtgcgactataccaataattttctaccaattttttcaagttcaangaaaaaatcattactgggtttcttcgccactataaaagggaggaaaaactcacta

SEQ ID NO: 27121 - DNA, 383 bp, Glycine max
  unsure at all n locations
  Clone ID: LIB3108-031-Q1-K1-C7
ccggctggagccacgcatccgcccactctttctnttccttaccctacttttgacgtatccaaaccttaagttttttagtaggtctgagcagtctggttagaacctttggtcttatatagtcaagctttatgtctggattagaccatcaaattcctactgccttccatccttttgctgatgcaaatgctgatgactcgcttgctggttcaaaggagtatgtgcatattcaccttcaccagcgaaatggtaagaaaagcctgacaaccgttcagggattgaaaaaagaattcatctataacaagatacttaaagacgttaagaaagagtttctttgcaatgtaacagttttttatgacccataactaggacaggttatttaaact

SEQ ID NO: 27122 - DNA, 398 bp, Glycine max
  Clone ID: LIB3108-031-Q1-K1-C9
aaagacagaactccctttgagaagttgcctgataactacttctgccctgtttgtggtgctccaaagcgaagatttagggcctatgcaccggctgtcactaaaaatgacaatgacacagctgttagaaaggcacgaaaagcagaactacagagagatgaagcaattgggaaggcatttcctattgcaattgtcgtgggaattgcagtgcttgcaggattatatttctatctgaacagccaatactaggctgaatgaatgttcgattgcagtgccctttaacatggggtgtagtttgttccggttctttcccttttcttttgttcattctgttgtaagcaccaaagtggccatacaataaattgtacaattattttgagagagaagaatggtcatgttta

SEQ ID NO: 27123 - DNA, 340 bp, Glycine max
  Clone ID: LIB3108-031-Q1-K1-D1
tctctcttacacacccaagcactactactactactttctttctagatatgggttctggtgctgtgcaactgtttctgatcttggggctcttggctagctcatgcttagcccaagccccaggtgctgcaccgtcacaaccacccactacaaccccatcaccaccaccacccagatcagcacctgcaccagcacccaccacaccagcaactccaccaccagcagcaacaccaacaccagcaccagcaccaccaacggctgcacctacacctgcttcctctcctgcagcctctcctccttcaccttctcctacagtgacaccaagccccaccttttctaacac

SEQ ID NO: 27124 - DNA, 364 bp, Glycine max
  unsure at all n locations
  Clone ID: LIB3108-031-Q1-K1-D11
cccactcgtccgnaaatttaaaaaaattaaaaaaaaaaaaaaaaaaaaagaaaaaaaagaaaaaaaaaaagaaaaaaaaaaaaaaaaaaaaaaaaaaaaaaaaaaaaaaaaaaaaacccaaaaaaaaaaaaaaaaaaaaaaaaaaaaaaaaaaaaaaaatcccccaaaaaaaaaaaaaaaaaaaaaaaaaaaaataggggcccccccctttaaggacccaaaattttcttccccctttttcccacgtttattttttttttttggcccccaaaaaaaaaataaacccccccttttttaaacccctgtgccttgaaaaacccccgtgtttcccaaattaaatttcttttaaaaaaacccccttttt

SEQ ID NO: 27125 - DNA, 115 bp, Glycine max
  Clone ID: LIB3108-031-Q1-K1-D12
cccactcgtccgctattttttatgatttaaaaaaaaaaaaaaaaaaaggggcaattttgaaaatttaaaaaggaaaaaaaaaaaatttccttccaatataaaaattccaaactta

SEQ ID NO: 27126 - DNA, 159 bp, Glycine max
  Clone ID: LIB3108-031-Q1-K1-D2
gtaaaaaaaaattattacacaccttattttctactatttttaccccctataaaaaaaagggatacttgtacatttttaacggcacatcatcttcacactatcatctaactcaatcttaaactcaatctccaaaccttacaacaaacgcttccacccact

SEQ ID NO: 27127 - DNA, 380 bp, Glycine max
  Clone ID: LIB3108-031-Q1-K1-D4
gcttgatcagacatactacaaatacgttctcgaaacaccatatgctctcacaggcacacacaatcttgcaaaagcaacagcaaagggaaacactgttgttttgtttgtggttagtgccaatgacaagcagtggcaaacttctgaggagactctaaaagccgtgcttaattcctttgaagtttagttttctgtcaaaggtaaataagagaagtttatttctttctagtttttgtttatacaaaattactcagaaagaattgcattggccaccatttcaattttttgtgttccgaggttaaactttaacttttaacagtctggcatttttctttttagtatatacctaattgagtgaatgacatatgtatttgatatttttt

SEQ ID NO: 27128 - DNA, 268 bp, Glycine max
  Clone ID: LIB3108-031-Q1-K1-D6
aacaaataaaaaatattcccttagctttttcaaccatcaagaccccctctgctattggccaattaggatccactggtgagactgctctcaaacacctcaatgagttcgtactgaataccgctagcaccggcaaatgacctactaacatgcgccacaccgtcaagagtgctcctcagagcatttcttatggtcctgaccgtcccaagaacttggctccattctctacatcaattccataatacctgacctcagaattctctggtgacta

SEQ ID NO: 27129 - DNA, 204 bp, Glycine max
  Clone ID: LIB3108-031-Q1-K1-D9
cccacgcgtccgaaaaaaaaaaaaaattaaaaaaaaaaaaaaaaaaaaaggaaaaaaaggaaaaaaaaaaaggaaaaaaggaaaaaaaaaaaaaaaaaaaaaaaaagaaacaaaaaaaaaaaaaagactataaagacacgaaaaaaagaaaacaaaaatacaaaaaactagcacttggaaaaaaaacacacaaaacttggaaaa

SEQ ID NO: 27130 - DNA, 342 bp, Glycine max
  unsure at all n locations
  Clone ID: LIB3108-031-Q1-K1-E1
cccacgcgtccgattccnctctntcgtatttcgatactttgatcagatccacaacacttcttcatgcatgacgcttggttcttcaggatccagtgtcgtggttccaaggaacttcagattgctggaggagcttgagaagggagaaaaaggaataggagatggcacagttagttatggaatggatgatggtgatgacatttacatgcgctcttggactggaaccattattggtccctataatactgtacatgaaggaagaatttatcaattgaagctgttttgtgataaagactaccctgaaaagcccccgagcgtccggtttcattcacggatcaatatgac

SEQ ID NO: 27131 - DNA, 336 bp, Glycine max
  Clone ID: LIB3108-031-Q1-K1-E10
aacaccctcccaaaacaagcccaaattttggctcagaatctaactatcgcacctaaggggacatgggttgcatctacagctttcttagatagagcatatgctttgacatctttacttgtttctagttcgggtaacataaacatagctagagtgagtactaagcactactaaacgcccgagttcgatgtggcgtgccagagttagggttagatctagcttggaaactgcggagtccacaaaaacagtgacacatgtcactgatgataacaaggatacctcctggccgatcgataaagctgccatggataaaaccgttggccttgacatgtacacaca

SEQ ID NO: 27132 - DNA, 262 bp, Glycine max
  Clone ID: LIB3108-031-Q1-K1-E11
agcatcttcaacagacttgagaagattatagttcaatccactagtgttgggcacccggggcaagagccgagagggctcactctacctcaccttctacctttcctagggtattgataagcgcccctctgtctgctgacctacacacgaagtacaacgtgctatctcatcccattccgcatggagtacgaggtgcagttggtgcgctaatcatacaactatttcgagaacaacgtgacccacgtttaccgtcgcacgtgggtca

SEQ ID NO: 27133 - DNA, 385 bp, Glycine max
  Clone ID: LIB3108-031-Q1-K1-E12
cgtctgagctgtctgtgcaaatttgcgttgttcttcgcggcacacctgactcactggacggtaagtatggcggacaaggctgttacaatccgaacccgaaagttcatgaccaacaggcttctttccaggaagcagtttgtcgttgatgtccttcatccagggagggcaaatgtttccaaggctgaacttaaggagaagctggctaggatgtatgaagtgaaagaccctaatactgtatttgtcttcaaattccgaacacattttggaggtggcaaatccactggatttggtttgatttatgatacagtggagaatgccaagaagtatgagcccaaatacaggcttatcaagaacggccttgacaccaaagtagaaaagtcaagga

SEQ ID NO: 27134 - DNA, 279 bp, Glycine max
  Clone ID: LIB3108-031-Q1-K1-E2
gagatcactcctgttgaccaaattattattgatgcactggaaagtctgaaaagcaagggctatatgtgatatccatgctgctgcagaaggactgagtgcactgttacaagacgtgatagcgttaatattattcttctggcattgctacgacttattggacatgccatttatgtacccaagtgattgatgccttaaaagcaaacctctcaattccaatttactctattaattggccctatctaactgacatgaaggaagaatttatcaattgaaggggcg

SEQ ID NO: 27135 - DNA, 362 bp, Glycine max
  Clone ID: LIB3108-031-Q1-K1-E3
gaaactcttgaacttggatttgattaccatgtggccaattcttcatctggtggcaatagaatcctgggcaggccagggaacaatagcaccataacatatctcaggcttggaattgatggcaacattaggttctacacttacttccttgatgtgcgtgatggtgtatggcaagtgacctacactctatttgatagagattctgatgagagtgagtgccaattgcctgagagatgtgggaaatttgggttgtgtgaagataaccaatgtgtggcttgtccattggaaaatggactacttggttggagcaacaattgcactgccaaggctgtgacatcatgcaaggctagtgattttcactacta

SEQ ID NO: 27136 - DNA, 344 bp, Glycine max
  Clone ID: LIB3108-031-Q1-K1-E5
ttcagattacattgcataaatggcatcattcaccatgacagcttctatctttggctggccagctggcaccaaacggtcggcagtggctgcccacaggacattactcgtagtgagtgctgccaaagctgaaggggaaaaggtcagttatgacaacaatgatagcaatggaaggaggaacttgatgttcgctgtggctgctgctgctgttttctctgatgctgggatggcagtggcagatgagcctaaaccaggaacctcagaagccaagaaaaagtatgccccgggttgtgtcaccaatcctacagctagcatttgtcgcaattgaggatctcctgtttcatttt

SEQ ID NO: 27137 - DNA, 249 bp, Glycine max
  Clone ID: LIB3108-031-Q1-K1-E6
tacattttttaaatcgcattattcaccattacagctcctatcataacctggccaacttgcaccaatcatacggcagtagctacccatagtacattactcctagtgagtcctgccaaagctgaatgtgaaaacgtcagttattacaacaatgatagcaattgaaggaggaacttgattttctttgatgcagatgctgctgttttctatgatgcttgtatttcaatttcatataagcctaaaccatgaacc

SEQ ID NO: 27138 - DNA, 357 bp, Glycine max
  Clone ID: LIB3108-031-Q1-K1-E7
gacatatacctcattatttacaatccatctgcaacaaacataactaagcgcaactaggttgataagacatatttaaaaccttctcttcaattaaaatttcaaccgaaacctatctaaccaataagcttggtcgctttaaccccatcaacatgttgaatacccttctctgcaaatgcatcactttcgcatcaacatcacgttaccctattttacaccactacccattaccattttctctgcgtttctacaccacaaccacttcaaattcacgctcctttgcggtatcctacctcatccacaattttggattcttccctgaatctgcttccaaagtttctgaaaaccacaaaaattatt

SEQ ID NO: 27139 - DNA, 386 bp, Glycine max
  Clone ID: LIB3108-031-Q1-K1-E9
caatagttgcacccaccataacattcatgttctcaggcatgaacgtgaccctgccagaggacaacattctcatacacagcactgcgggcagcaccacatgcttggccatggcttcggctccagataacgtgaactcagtgctcaatgtcatagccaacatgcagcaacaaaaccaccgtgtgctctatgacgtgcccaattcaaggcttggagttgctcgtgaactttgcactaaataaaatggttaacacctaagttgtcatgatactttggtgacaacgatattgtcaaattaattggctattgcaaagtcttttgggtattgatatttcttctatattggtgagtttggatttaggataatggtaatatataataaggtttca

SEQ ID NO: 27140 - DNA, 336 bp, Glycine max
  Clone ID: LIB3108-031-Q1-K1-F11
gccggggggagccacgcatccgtcccaaagctctctgctttttggtggcacagatcccttgctgggtttgagttcctcggtttggattctggcccaaatggcttcctttgatcgattgtttaaccgccaaagaggtcttcatgagatccttggtggtggtcaagttgcagatttaattctgtggaggcgtaagaaccttactgtggggatattgttggtcacactaggtgtttgggttgtgtttgagagatctggttatactcttctgtctcttatttctaatgttctccttctcctcattgtcattctctttctttgggccaaatcagcagatat

SEQ ID NO: 27141 - DNA, 395 bp, Glycine max
  unsure at all n locations
  Clone ID: LIB3108-031-Q1-K1-F12
ctcacttccttaaaagtgaaagtgaaagttaggtttttgtatgaaggtgatgcttaggtgtattggacaattacatttggcctgggacatagtggcgtttagtttttgtggtactttgaatacagaacgagcattgttgaagtgttcgttttgattgatgtagtcttttcaacaatttagtatttccctgttaggtttccatttgacatcttaaatgttatggttttatttgatcgtaattattctgctgtttctttgtgnaaaaaaaaaatataaataaaaatttattattatattgataatataaattaaataatatttataatttaaattattaatattttattctatcttatttgattttaatttattttcatttaatggttttttttttt

SEQ ID NO: 27142 - DNA, 321 bp, Glycine max
  unsure at all n locations
  Clone ID: LIB3108-031-Q1-K1-F3
nncgccacgcgtnncgccacgcgtncggcagcaactccactcaattgtatgcattgatccatggctagagacattaatattgtacttttgggaatagtgttggtagtggtgagattgaaaggtgcagaggcacagcgggcgttctttgtgtttggggattctcttgtggataatgggaacaacaactttttggcaactacagctcgagcagatgctcctccttatggcattgattacccaaccggaagacccactggccggttctctaatggctacaacattcctgacttcattagtcaatcacttggggccgaatccaca

SEQ ID NO: 27143 - DNA, 264 bp, Glycine max
  Clone ID: LIB3108-031-Q1-K1-F5
gttacacgtccattttaacatactcttttacacatttttaaaaaagatctatatacgaactattgtgcagaccacgtggtcgcaatttcctcaaactaaattgcaaacactcatataaggctcgtaagccagcaaactgttttttattaaaccatatactgtttaccagtttagaacaacctttttattttgtgaaatagagcatacactaatcgaagtctctctaacagaacttgttcaaaatacttaactcatcatcttaca

SEQ ID NO: 27144 - DNA, 433 bp, Glycine max
  Clone ID: LIB3108-031-Q1-K1-F6
atcggaacctctttttcggcgtagcattgggacacttcaacgtttggaattctcacgcaaaaaacgacagtcctggggctcgcacttgcctagtgtgtgggaatccacatggattgatcaggaagtatcgccttatcgtctttaggcagtgcttatctttttatgcctagggaatacacctacttttttattgctacaggagcatctgatacttattgttatatcatatattaccccacttggatatctactgatcgtttctttaatttctactatatttttgtcttttttatctatttacttttgttccatatttcattgtctttttttgatttctatcttaactttgaaatattttttattttttgtcacatttgctttttttgttattctttattttttttgtcaatttttcctattttttatttttttt

SEQ ID NO: 27145 - DNA, 329 bp, Glycine max
  unsure at all n locations
  Clone ID: LIB3108-031-Q1-K1-F7
cacgcatccgctgaatataancttacttttctggcattttcctacttaacaaaaaacggcctcatatgtatatttcaacgcttttgcgaccctaccaacccaaatagtactcctatgaacctcttccatatctccaaacttgcaatcactatattgaacacctaatttactactcaacgattggcttactaatacctactaatagcacttgcaaaacacacttctattattcgtttaaacaaaatatctgacatcaaactctatacgtacttgttttttcacaacgaaaactattttattgacaaaaaaattatccagagaacaatact

SEQ ID NO: 27146 - DNA, 385 bp, Glycine max
  Clone ID: LIB3108-031-Q1-K1-F8
gaaaaacaagtagttgagaactaagattaaggaaatggcttcctcaatgatctcctcgccagctgttaccaccgtcaaccgtgccggtgccggcatggttgctccattcaccggcctcaaatccatggctgacttccccacgaggaagaccaacaatgacattacctccattgctagcaacggtggaagagtacaatgcatgcaggtgtggccaccaattggcaagaagaagttcgagactctttcctacttgccagacctcgatgatgcccaattggcaaaggaagtcgaataccttctaaggaaaggatggattccttgcttggaattcgagttggagcacggtttcgtgtaccgtgagcacaacaggtcaccttgatactat

SEQ ID NO: 27147 - DNA, 187 bp, Glycine max
  unsure at all n locations
  Clone ID: LIB3108-031-Q1-K1-F9
cccactcatccncctattttttcgaattaaaaaaataacataaaaaaagggacaactggaaaaatatgaaggccgacaagccaaaccaaaaccaacataaaaaactacaaacacctgcctcaaatacatggccggcctttttaaagaggcaaacctactatgaccttacatccattgttataatcct

SEQ ID NO: 27148 - DNA, 376 bp, Glycine max
  Clone ID: LIB3108-031-Q1-K1-G1
agaaaatggcggtacctctgctctcgaagaagatcgtgaagaagagggtgaagaagggcaagaggcctcagagtgacaggaaaatttccgtcaagacaaactggcgtagaccaaagggtatagattcccgtgttaggagaaagttcaagggatgcactttgatgccaaacatcggttatggttctgacaagaagacccgccactatctccctaatggttttaagaaatttgttgttcacaatgtgaaagacttggaactgctcatgatgcacaacaggacttactgtgctgagattgctcacaatatatccacaagaaagagaaaagatatagttgagagagctgcgcaacttgatgttgttgtgacaaacaaaac

SEQ ID NO: 27149 - DNA, 363 bp, Glycine max
  Clone ID: LIB3108-031-Q1-K1-G10
ctcactctggcagcggcactctcggtggctataatctttctgtggtgagttgtcaagatgtacacatcaaggaagaaaatccacaaggataaggatgctgagccaactgaatttgaggaatcagtcggacaggcattgtttgatctggaaaataccaacaatgagctgaaaagtgatctgaaagatttatacataaactcagctgtccaaattgatgtttctgggaaccgcaaggctgtggttatccatgtcccctacagattaaggaaaggattccggaagattcatgtcaggcttgtgagagaacttgagaaaaagtttagtggaaaggatgtaatcctgattgccacccggaggatattg

SEQ ID NO: 27150 - DNA, 250 bp, Glycine max
  Clone ID: LIB3108-031-Q1-K1-G11
cgatgttggagtcaggagcaatacaatgcaagttgatgcctgcatgatgagattaagattgcaacatttgtggtgcggtattcattatgcggttatgaaacatttctctgaacagattggggagcacggcatcgtgattcttgactgttatcatacataacattgatgctaatgattattttgggggaaatcatgtatacaatgtacaatacagtcaatgccagaattataggaaagcaaacttgtatag

SEQ ID NO: 27151 - DNA, 395 bp, Glycine max
  Clone ID: LIB3108-031-Q1-K1-G12
gcctatgcctatagatcttaatgaagatcacacccaccacgtcttcagtacaagccgtcaagcctcttcttcgtcttcttctctatctttttctattctcttcaacccggatcatcaaggtcaaggaggatcttgttgccactgggaatcaaagcacttacaaagtgatgaagaggcccagaagattgttccttctagtgaatcatgggagcatccagtatctgaaaaggatgaaaacagaagtgatctcaagctgagagtttggaagaaagaagataagtgtgaaaattttcaagttgaagaataattcaactaagtggatgcctttaaagatgagaatgatgcggaggatgatggtgtcagatcaaacgggttttgatacagaaggcatgatc

SEQ ID NO: 27152 - DNA, 338 bp, Glycine max
  Clone ID: LIB3108-031-Q1-K1-G2
cccacgcgtccgtttcctttgggtttatggagtgagcgtggaagaggaaagagcaagcagcaacagctcgtggcggttccgattatttattaagatcaatgttgcatgcagtatctgcccctagcttttgtttaagctatcccgggaaccttcattatcctccttcttcagttcaaaaaacatgtttttctgttcgttgttcggtttcacagacaaaaaatggagctaaagtggaatatactccttggctcattattggcttgggcaatcctggtaacaaataccatggcacaaggcacaatgtttgatttgaaataattgatagcctttctcgagca

SEQ ID NO: 27153 - DNA, 239 bp, Glycine max
  Clone ID: LIB3108-031-Q1-K1-G4
aagagttcttgcttttaaaaaaaaattataaaaaatataaaaaaaaaaaaaaaatagggaaaaatagaaaaataaaaaagcctacaaaacataaaaaaaaaaattaaaaactataataataaaatcaaaaaatcaaaaaggcccccctttttaaagaatccaattttacttccccgtccttgcaaagaatagttttttttttgggccccctaatttaaattcattgccccccgttttaa

SEQ ID NO: 27154 - DNA, 338 bp, Glycine max
  unsure at all n locations
  Clone ID: LIB3108-031-Q1-K1-G5
gcgcccacgcgtccgcccacgcgtncgctcaagaggaagcacttgctgagcctcaccacggccttcgtgcagagtcacagtgttaatacaattttcaacaagcattgcagacacaaggagaagactaagagactcactattgtcaatgagctcggtggtcaatatgaggacacttttcatgatgtcaaaaagcaaatactcaattatttcacatacaaggctgtgaggactgttcttcaacagttgtatgagatgaacccacctcaatataggtggttctataatttcgttgcaacaaacgacccagcagatgggaaacattttatacgatccctcgc

SEQ ID NO: 27155 - DNA, 332 bp, Glycine max
  Clone ID: LIB3108-031-Q1-K1-G6
gcgatcagactttcgtttacaccttctctttagaacactctcttgcttagcctcaccacgggcttactgcagagtcacagggttaatacacttttcaacaaccattgcatacacaaggagaacactaagaaactcactattgtcaatgagctcggtggtcaatatgatgacacttatcatgatttcaacaagcatatactcaattattttacatacatagctgtcaggactgttcttcaacacttggatcagatgaacacaccttaatatacgtagctctataatttcgttttgacaaacgacccagctgatgggaaacattttataccatc

SEQ ID NO: 27156 - DNA, 386 bp, Glycine max
  Clone ID: LIB3108-031-Q1-K1-G9
aaaaaaagattctatagatatataactaatattctttagaataatcaagagggaatatgaaattcaaataaattttagatagaaaaaagacttaaaaaggaggatttgaaatgcgagatctaaaaacatatctttccgtggcaccagtagtaagtactctatggttcggggctttggcgggtctcttgatagagatcaatcgtttttttccagatgcattgatattcccttttttttcattctagttattgacacggaaaggggtgaagaagattatagatccaattaagtattaaatatatgtaattaatatgtaattaatctcctcttctttatttcggcttttatttcttcttttttttacaatttgaatagaataagttagg

SEQ ID NO: 27157 - DNA, 230 bp, Glycine max
  Clone ID: LIB3108-031-Q1-K1-H1
cactggtttgacgcttactttatcatctgctttaccatttgatttgctggcaccctcttcttcacgggagctgaaaaaaatgggagaaagtgctttgttctctgtgtagagtttggcagagaaagataacaacattttttagccctttataatgccagttccacttgccccatacccaacaccaccagctccatatacaccaccagctaatggtgtacagagtcaacttg

SEQ ID NO: 27158 - DNA, 313 bp, Glycine max
  Clone ID: LIB3108-031-Q1-K1-H10
cccacgcgtccggttgtttctcagccgtctcggctagggttcggaaacgaagaacggttctgttttcttttcgcgatgagggccaagtggaagaagaagcgtatgaggaggctgaagaggaagcgccgaaagatgagacagagatccaagtagtgcgttaaacctagtttgtttccgttgcttttacaattgcttatgttgtcaaataggacacccagatgttagtggcactggtctttcctttttgatgttttgatacattatgttggattttatttcgtcttatggtcttagctgaaaacaatgctgttac

SEQ ID NO: 27159 - DNA, 323 bp, Glycine max
  Clone ID: LIB3108-031-Q1-K1-H11
cccacgcgtccgcccacgcgtccgcccacgcgtccggtgaatcagcacgcgacattcagctgagctttttgtgaggattccaaagcatggcttcccttgcagcatccactgctgctgcttcccttggcatgtcagaaatgcttggaaaccccatcaacctcagtggtgccacaaggccagctccatctgcctctagccctgcctccttcaagactgtggctcttttctccaaaaagaaggctgcacctccaaaaaaagctgcagctgctgctcctgccaatgatgagcttgccaagtggtatggtcctgacagaaggatcttc

SEQ ID NO: 27160 - DNA, 375 bp, Glycine max
  Clone ID: LIB3108-031-Q1-K1-H12
tgaagtctgctatgtgttcagtggtgtttgtagcacttcttcttctggcggatgtggggcccatggctgaggctgtgacatgcaccccaacagagttgagtccgtgtcttgcagcaatcacttccggtgctaaaccttccaatgcttgttgcacgaagctgaagcagcaaaaaccatgcttatgtggctacctcaaaaacgctagcttgaagcagtatgttaactctcctaatgcccgaaaaaccggtgcttattgtgggattccctttccaacttgttaattaattaagccttcttataattaaagtgtgggatatatatatatatatatatatatatatatatatataaacagcttaatttatacacactttg

SEQ ID NO: 27161 - DNA, 315 bp, Glycine max
  Clone ID: LIB3108-031-Q1-K1-H2
tccgggtttactccccttttttttcatttataaaaaaaaaaaacaactcgttttttctgtaactttataggctgctttaccatttaatttgctggcaccctcttcttcacgctatctaaaaaccatgctaacaaacgcttcattctctgtttatacttttttatagtaagatcacaacatattttactcccctttaattcccaacccacttactccataaacaacaccaccacctacatatacacccttacataatattctacatattccacttttctttttttcgaacaaaaaccttctaattttcccatctaa

SEQ ID NO: 27162 - DNA, 372 bp, Glycine max
  Clone ID: LIB3108-031-Q1-K1-H3
gaaaaaaaaaattttttttaattttaaaaaaaaaaaaaaaggaaaattgaaaatttaaaagctacgaaaccaaaaaaaaaaataacaccaaaaataaaaaaaaggcccccccctccccacctaaaccggaagtttcctcaccgtcttaaacttttttcgaaaaaccccagcctcccccctttttttaaggctcctaccagtcctttttaatgctggcaaaatggtgtttttttttttcccccactttttttgtttgcccaaaatctgtcccataaacccaacctttccaaaaaaaataaccttcatttcccccttttggaaacccgttgggtatttcttcttaaataaaactgatttcattttccttaaaaa

SEQ ID NO: 27163 - DNA, 355 bp, Glycine max
  Clone ID: LIB3108-031-Q1-K1-H4
cacgcgtgcgtttacgcgtccggttttctggttctttaaagaagaaacctttctctttgcgcgtgtggcgttctggtctccaatcctgctccatccccactgtgtgatctgatcctaaaccttatagccatgactaccatggagattaagctatggaatgacaagcgcgaaagagaaatgtatgacaactttggggagctttatgccattatcaaagccactgagaggcttgagaaggcctatgttagagatataatttcaccgcaggaatatgagttggagtgccagaagctcatagctcatttcaaaaccttagctttcacccttaaagacactgtgcctagcattgagcgat

SEQ ID NO: 27164 - DNA, 87 bp, Glycine max
  Clone ID: LIB3108-031-Q1-K1-H6
cggaagacccacgcgtgcggtaagttttgttctgatacttacaaattaagagagatcaatcaaaagctgattgacagcttcattgtt

SEQ ID NO: 27165 - DNA, 360 bp, Glycine max
  Clone ID: LIB3108-031-Q1-K1-H8
attcagcaagcaagacccctcatttccgtggttaacaaggctgcctctgtatcttcgcgcgtgacagcacccagcgtcggcgttcggtttcggctggacaatttggggccgcaaccgggttcgaggaagagggctaagagaaagggtagaggaatatccgcagggcaaggggcaagttgtggttttgggatgagaggtcagaaatctcgatctggacctggcgttaggaagggtttcgaaggtggccagatgccgctttatcgccgaatccccaaactcagaagaattgcaggaggtatgcatgcgggattgcccaaatatgtccatgtaaatctgagagacatagaagatgcttaattt

SEQ ID NO: 27166 - DNA, 364 bp, Glycine max
  unsure at all n locations
  Clone ID: LIB3108-031-Q1-K1-H9
catttctaggtgccatcataataactaataacccaacctctcgagagtttgttatatgattactgataaattgttggtgggggtggcatagttgcagttggaaatcgaaagaagagaaaagaaattggatagtgattatttgggttcgttatcgttgaaacgttttctcaaatctggtgtggtgaataacatcacccctcacactcactcaacctaaacaaaatgcagagccagagaaccacgccgctaaggaaccctcacacctncacctccgatctcctaacgtggtccgaacaacctccgccggaatcctccgcctccggctaccgctctcgccagccttctgataaaatcggtgaggttc

SEQ ID NO: 27167 - DNA, 418 bp, Glycine max
  unsure at all n locations
  Clone ID: LIB3108-032-Q1-K1-A1
cggaagaggaaaaactagaaaagatcccaacagtgagaagccgagcgattttgtttaccttcgaagagatgaagcatttggtcacttgaagtcatcagattttctcgcttatggaatcaaatctgtatcccaagatgtcttgcctgtcttgactgatgcattcgatggaaatattttgagccttgagtttgataattttgctgaagtgcacaaactctatgaaggtggagttacactacctacaaactttcttagcaagatcgcccctataccagtgatcaaggaaatttttcgaactgatggcgaacagttcctcaagtatccaccacctaaagtgatgcangtggataagtctgcatggatgactgatgaagaatttgcaagagaaacgattgctggtttaaatccaatgtcatta

SEQ ID NO: 27168 - DNA, 428 bp, Glycine max
  Clone ID: LIB3108-032-Q1-K1-A11
ccacgatcaccaccgcaaagcaatgggcgctatactttctgccttaactggcggtgccgcaacggcggcgacgtcttggccggagagttctgcttctagggtccagtctttccactcttcggcgcgctggcagctccacttcaacgagctcaaagaaaccaataagctcgttgtgatagatttctcggcgtcgtggtgcggcccttgcaaattcatagagccagcgattcacgccatgtccgaaaagttcaccgacgttgacttcgtcaagatcgacgtcgatgaattgccggatgtggcgaaggagtttaatgtggaggcgatgccgacgttcgtgttgtgtaagaaagggaaggaagtcgacaaggttgtgggcgccaagaatgacgagctcgaaaagaagattgagaaacatcgatcgcaatctt

SEQ ID NO: 27169 - DNA, 473 bp, Glycine max
  Clone ID: LIB3108-032-Q1-K1-A3
acggtggccaccagttggcaagaagaagtttgagactctttcctacctgccagaccttgatgatgcacaattggcaaaggaagtagaataccttcttaggaagggatggattccttgcttggaattcgagttggagcacggtttcgtgtaccgtgagcacaacaggtcaccaggatactacgatggacgctactggaccatgtggaagctgcctatgtttggttgcactgatgcttctcaggtgtcgaaggagcttcaagaggctaagactgcataccccaacggcttcatccgtatcatcggattcgacaacgttcgccaagtgcagtgcatcagcttcatcgcctacgagcccacaggcttctaagtgtgaaaaatttgcaaagcattcgtagccgacaccccactttgttagattgtacttaaactacatttccatttggttttgctttttgagatttcatcatcctgta

SEQ ID NO: 27170 - DNA, 307 bp, Glycine max
  Clone ID: LIB3108-032-Q1-K1-A4
agcaagggagaatcaattcctcatcgttgcaatttttctttcactctctagattctcatctttcctctcttctaccccttcagaaaaaaccatgtcttcatattatatgtatatctagctcttcattttttcttgctcaagattatgctgtaaaattctgaaactcacagtttcagccacattttagacttaaagatctgcgcgttgacccttggcaggttcagcttttggagttgttcatcctcataagcctttgattagtccaagtttttcttttttttctctctctctctctctcaagttcaaa

SEQ ID NO: 27171 - DNA, 476 bp, Glycine max
  Clone ID: LIB3108-032-Q1-K1-A5
gccccaccgagtttcctgcctcaaatcaatgcgatgaagacaatgcaggggagagtggtgtgctccaccagcgacaagacggtggcagtggaggtggtgcggctggcccctcacccaaagtacaagaggcgcgtgaggaagaagaagaagtaccaggcccacgaccccgataaccaattcaaagtcggcgacatcgtccagctccagaagaccaggcccatcagcaagaccaaggcctttctcgcactccccgttcccaaaaggccctccagcaggcccgaggcccagcccgaggaactttccattcccttcgagtcccagccctaggagactccagagtcacccctcaatttcactctctcacgcctacttttgcattctctttcgtgcttatgtgttgtaatttggatgctgctagtattttgtactgctctatagtgtaccttcactgtatgtgcaattcttatcattctagc

SEQ ID NO: 27172 - DNA, 421 bp, Glycine max
  unsure at all n locations
  Clone ID: LIB3108-032-Q1-K1-A6
aattactactttctctctctttgtaacttgtaagcatggagtcctcaaagatctatgcttacctcttcctttgcatgctcttcctctcctccggcactcccattctcggttgtggctactgtggcaaaccccccaaaaagcacaagcctggtaaaacaccaaagacacccacagtacccgttgttaagccaccagtcacaatccctaccattgttaatccaccagtcacaatccctcccattgctaatccaccagtgacagttccacccgttgtgcttgcaccaatagtgaagcccccgggttttctccctgcaattcttaacccacctggtacaccaacaccgtcgacggggaaaggagggaacactccatgtccaccaccaaagtcntctgcacaggctacatgccccattgacacgct

SEQ ID NO: 27173 - DNA, 401 bp, Glycine max
  Clone ID: LIB3108-032-Q1-K1-A7
cccacgcgtccgtaataccttcaaagaacgaagtagtggatcagtgatggcacctaaggcagagaagaagccagcggagaagaagcccgcggaggagaagaagtcgacggtgggagacaaggctccggcggagaagaagccgaaggccggaaagaagcttccgaaagagggaggagccggcggagaaagggggaagaagaaaaagaggaacaagaagagcgtggagacgtacaagatatacatattcaaggtactgaagcaggtccaccctgacattggtatctcaagcaaggccatgggaatcatgaacagcttcatcaacgacatcttcgagaagcttgctcaggaatcttccagacttgcccgctacaacaagaagcccaccatcacttcaagggaaa

SEQ ID NO: 27174 - DNA, 132 bp, Glycine max
  Clone ID: LIB3108-032-Q1-K1-A8
accgagcgacggtagttgcttcatggtacgtgctgatggatcaatgattgcacgaggccttagacaaatatgcagcggactgcaggcctgaggctgataagatcacgactggagctatgatgcttgatgggg

SEQ ID NO: 27175 - DNA, 425 bp, Glycine max
  unsure at all n locations
  Clone ID: LIB3108-032-Q1-K1-B1
cccacgcgtccgaatgcattgatcaatgtacagaaggctgttaataaaacatttactgccgaggctgagaatttacctataatatcaaccagtgtagcatttggagtttacatggttgtaattagcaacctcaggtaccaagtacttgcaggaattattgaacaacggattctagaaccactactacaccgaaacaagcttatactaaccgcaacatactttaccattagaactgccaatacctactgnggttcgctattgtgggtggattttgctcgatgggttggagtccagaagataaaggattgaacattattttttgccatactgcaaaccttaaactaattctccattgttattagaatttgacaggagagactgaaaatctaatgccaggtgtcaattaaaacttgacgtgttgatac

SEQ ID NO: 27176 - DNA, 310 bp, Glycine max
  Clone ID: LIB3108-032-Q1-K1-B10
cccacgcgtgcggtggaatctaggcctatgaatccatagagatcacggttttcaaacatcagggaacgtagcagcagcggtaacagctcgtaggacatgggctcattcggaaggatcgccggccgcaatatcagggcaaattacagatgaaaagcaacgataaactggcggtgataattgtgattccaagccggcaggaaatcatataaatggtggttctaaagtctgatcgataactgcctatattggtatctcatttgaattcattgtctcacgattgtccaaagatcactaccgacatgagagacag

SEQ ID NO: 27177 - DNA, 398 bp, Glycine max
  Clone ID: LIB3108-032-Q1-K1-B11
tcgaccacgcgtccgggaaatcaaagttgtctctgaccgcaaccctgccaaccttccttggaatgatttggggatagacttggtgattgaagcaactggggtgtttgtagacagagaaggtgcagggaaacacattcaagcaggagctaagaaggtgctcattactgctcctggtaaaggagacatccccacatatgtggttggtgtcaatgagtatgattacagccctgatgaacccatcatcagcaatgcatcttgcaccactaactaccttgacaaagggtgcaaggctgataaacattgtttccgtgatcatcctcatcactctcacccatggctgcctcatccaccatcaacaacttcctctctttcttcttacgcacaaaaccaccaccacc

SEQ ID NO: 27178 - DNA, 293 bp, Glycine max
  Clone ID: LIB3108-032-Q1-K1-B12
cccacgcgtccgaaaaaaaaaaaaaaaaaaaataaaaaaaaaaaaaaaattaaaaaaaaaaaaaaaaaaaaaaaaaaaaaggaaaaaaaaaaaaaaaaaaaaaaaaaaaaaaaaaaaaaaaaaaaaaaaaaaaaaaaaaaaaaaaaaaaaaaaaaaaaaaaaaaaaaaaaaaaaaaaaaaaaaaaaaaaggggcgacctctaaaaaaacaaaaatataatcacccaaagttataaacataaaaccctttataaagaagacaaaaaacaaattaacaggggccgcatataaaaa

SEQ ID NO: 27179 - DNA, 277 bp, Glycine max
  Clone ID: LIB3108-032-Q1-K1-B2
ccgagttcaccccagccactcgccttccgtttccgccgactcacaaccggcgtcgcctcaagactcctccgtcgttccaaaaccgccgttgccaccctcgtcggagaagccagtgcctccgcctggaacctacgtcatcaagatccctaaggaccaagtctatcgcgtcccttcgccggagaacgctcgccgctacgaccaatacactcgccgtaaacaccgtcggagccgatgctgctgctgcttcagctggctcatcggaatcctcttcattctc

SEQ ID NO: 27180 - DNA, 291 bp, Glycine max
  Clone ID: LIB3108-032-Q1-K1-B3
accacgcgtcctgattcacttgctggttgaatccggcctctcactatcgacatcatctcgagagatcactgttgatccataacagtctacaataccttattatgagaagcctgcgacgacatacgtaatcctatgtgcaccaaatatctgattggaccaattctacacgcataccttgacttcatatgctcaccgatccatccaatacattctccttagacgattcagcaatcgttgctgctctacctacagatgcctcatattgtgccatattgtctacatccactttct

SEQ ID NO: 27181 - DNA, 310 bp, Glycine max
  Clone ID: LIB3108-032-Q1-K1-B4
gcttcttccgccactcagcacttcgctccctctgtgcttcaccaaccatggccgaaatcgaagctaccgttccagatccctctcaaatcgacgtcaaacttttcaaccgctggagcttcgacgacgttgaggttactgatatgtctctggctgattacattggagtgtccccgtcaaagcatgctacatatgttcctcacactgctggtaggtactcagtgaagaggttcaggaaggcgcagtgccccatgttgagagactcaccaactctctcatgatgcacgggaagaacaatgggaagaagctcatg

SEQ ID NO: 27182 - DNA, 320 bp, Glycine max
  Clone ID: LIB3108-032-Q1-K1-B5
aaaaaagattctaaagaaatataactaatattctatagaataatcaaaaagaatgttaaattcaaataaattttagatagaaaaaagacttaaaaaggaggatttgaaatgcgagatctaaaaacatatctttccgtggcaccagtagtaagtactctatggttcggagcttcggcgggtctcttgatagagatcaatcgtctttttccagatgcattgatattcccttctttttcattctagttattgacacggaaaggggtgaagaagattatagatccaattaagtattaaatatatgtaattaatatgtaattaat

SEQ ID NO: 27183 - DNA, 293 bp, Glycine max
  Clone ID: LIB3108-032-Q1-K1-B6
atagaacgagatgacaaaattgaacatacgttctgccttaggtatatgtatgcaaatttcagaaaaaagatttggaggaggagctatgcttagagagttggtgatggctgcttcaaaagctacatatttggaggcatatgaagagaaaatgaaccaaatcagagagataaacaatcaggcatatgagtggctcgctactgaattgcttaagaagacatgatgtaagtatgcttttagtgcgtactacaagcgtgatgttatgatgaataacatgtataagcgttctaatagtg

SEQ ID NO: 27184 - DNA, 348 bp, Glycine max
  Clone ID: LIB3108-032-Q1-K1-B7
cggacgcgtgggttctcaacagcaggagcaattacagcagcagagtaacagacaaagaaaatctggagctgccaatagcactggtactggtaacactgctgctccgtccgctacttcatcaccatcaacacatacacctggtgatggattaaatacagcaagcagcttacagcatgttaacagtgtccaaaagagcatgatgatgtatggtacagagacaacaggaggccttgcatcatcgtcgaatttgctggacgacatggatcgatttggagatgttgatgctttaaatgataatgtcgaatcctttctatcaaatgatggcgtaaatggtggaaaactctattg

SEQ ID NO: 27185 - DNA, 219 bp, Glycine max
  Clone ID: LIB3108-032-Q1-K1-B8
gcttagcaagcctacatataagtggaaacaatttctgtatactgcccaccctcaaggagcttttcaaactgttacatttaaacttactacactgaaagcagttgagacatctgcctgagcatcattcatgatacgacttgccatcagctacttacatgctgccatggataacatatctatctagtggcagagatgcatgattatacatggtcaactgct

SEQ ID NO: 27186 - DNA, 468 bp, Glycine max
  unsure at all n locations
  Clone ID: LIB3108-032-Q1-K1-B9
ttcccggattagctccacccgtaccctactctctgaagatgacactgaagaatgttcgggacgaggtgttaacttgcattaagtgtaattttaaaattgtttttggatcttttgtgtctgatatgtaaagtgtcctttgcatgcctgatctgggggaacttttttgctttgttgtgaagtgttttattgtattttgtactggatatcacctttcaattcgagtcgtatcttgtaaggccaatgttctctagtgtcagagtaatgtcaatgacattagactcatgatgttgtataaggtccatgactggaaatttttctttctgtatgatttgcacagtacaatccatagttctaaattgcggtcgttgctgctatgatgcagattgcagcatgaaattaatatatgattgcaccgaatgcananaagaatctatagttaatataataatcagatttatcttttatttt

SEQ ID NO: 27187 - DNA, 409 bp, Glycine max
  unsure at all n locations
  Clone ID: LIB3108-032-Q1-K1-C1
attcccttcacaagattctcacaaacaactcttgagaaagaaagaatggctgccaacacattgatgagttctgccatctcagccttcccatctctcctttcctcctcaaaatccagatttgccgcagcagttcctctttccagctttgttgtcaccaatgcctcttcttctcgcttttccatgagtgctgattggatgcctggccagcctagacccccctaccttgatggttcagcacctggtgactttggattcgaccctcttcgtcttggtgaagtaccagagaatcttgagaggttcaaagagtcagaactcattcactgcagatgggccatgcttgctgtttccagggattttggttccagaggcattgggcctaggcaactgggtaaagggctcangaatgggc

SEQ ID NO: 27188 - DNA, 104 bp, Glycine max
  Clone ID: LIB3108-032-Q1-K1-C10
agtagtagtagtagtgtggtttcatggtttgtaacgagtgtgtttttcctacatgttatcatggatggttctgttagtggtatgggatgcatattttcacttgg

SEQ ID NO: 27189 - DNA, 457 bp, Glycine max
  unsure at all n locations
  Clone ID: LIB3108-032-Q1-K1-C11
aacaaaatatcgtcgactacctgtggtagatgatgatggaaagctggttggacttattacacggggaaatattgttaaggcggctctactatcaaaacgtgctggagagtggtgatagtgtttgtgaaaagttattcaaatagatttgcttgcaggttgtgctgatgatggtcagcgtaacctctatatttattagctacggataatgttaatgtatgtagttatacctagtagatatttagactattacaaatgtatatggcacaagccgaaggaggagctgaaggcaacttttgatggccttgtgagatcttagtggtgtataaaaaaccatagagggaagtgatttatcgatcacctgtattaagttatcaaccttgtgtcggtacattggatngtttggttcaagctangagatactacatccttgtctttatgcagtctctgataactgaca

SEQ ID NO: 27190 - DNA, 364 bp, Glycine max
  Clone ID: LIB3108-032-Q1-K1-C12
tcgcaactagtaacaaagatccaacatgcatatcaatcactctctctgtctttcaatcaaaacaggggtgagatttgaaggaggattctgagcagtatgctgagaaagcaaagactttgccaccgactcaatcaaacgaatacttgcttattctttatggattgtacaagcatgccaccgttggacctgtcaacaccatccgtccgggaatgttcaacatgaggaacagagctaaatgggatgcatggaatgctcttgaagggaaatccaaggacgaagcaatgagtgattacatcactaacgtgaaacagctgctggaaacagtcggtatgcctgcttgataacattgtcatgccttgctttc

SEQ ID NO: 27191 - DNA, 288 bp, Glycine max
  Clone ID: LIB3108-032-Q1-K1-C2
cccacgcgtccggcctttccatggactgcttcataccccctaaggaactccacaaggactacccacaagaagatctagattggagatcacccttgcatagatgatgatgatcatgaattcgtgatcccaaacaaaccttggttggaggagtttttgtattttttttctaaataactgttgttattgatattgctaactgttactactattacttaacatatatatgtagattgctttgtaatagtgtattactgattttgggcatatatttaacagatctcatctatt

SEQ ID NO: 27192 - DNA, 317 bp, Glycine max
  Clone ID: LIB3108-032-Q1-K1-C3
cccacgcgtccggcagcaaatgtctctaataactagctgctccattcacaaagaggggattgttactcaagtttctgatattgggaggtggctccacccttgcatacttcagtgcaacagcctcaggtgacattctaccaatcaagaagggaccacaacttccaccaaagcttggtcctcgtggcaagatctaatttgacttgtatcagagctccatctatagagttcctttgtaatagttatttttctggcttgcataatgtgtaagtatgcttgcagactactattcagagatgcttctttccagtctaattgat

SEQ ID NO: 27193 - DNA, 314 bp, Glycine max
  Clone ID: LIB3108-032-Q1-K1-C4
cccacgcgtccgctctctctctcgatcaatcatggctttgcccaatcagcaaaccgtcgattaccctagtttcaaactcgtcatcgtcggtgacggtggtacaggaaagacaacgttcgtgaaaaggcatcttaccggtgaatttgagaagaaatacgaaccgaccattggagtggaggttcacccattggatttcttcacaaactgtggaaagattcgcttctactgctgggatactgccggacaagagaagtttggtggcctcagggatggatattatattcaatggcaatgcgccattatcatggttgatg

SEQ ID NO: 27194 - DNA, 389 bp, Glycine max
  Clone ID: LIB3108-032-Q1-K1-C5
cccacgcgtactgattacggcgatggtagtggccattcgcccagcaaagaatcctgtttgcgtgaaaggtcatgtctactgtgacccttgccgtgctggttttgagacctcagcttcaacctacattgctggagctgtgattatgtcgcaatgcaagatcactgctagcaacgacgttgtgtacaccaagaatgcgtacactgactcaaccggagcagacacaatagtacgtggatgatgatcacgcagatcagatctgcagtgccaaacttgaaaacagtcctcacagtcaatgcatggaagtcaccctatgccgggacgaagccgttgtgattctgacccggtacaacggaattgcctgcaacgataggttccacaatgccataggc

SEQ ID NO: 27195 - DNA, 461 bp, Glycine max
  Clone ID: LIB3108-032-Q1-K1-C7
ccctcctcccatcatcactcgcttcccactccagaagctacgtgccaagcatcaggaccaggaccaccactcgtcggcggagctgtccgccgtggcgaacccgtcccacgcgcatgcgaacacgctcttcttccggtcggcgtacaacgtgcaggtggtggtggacgagaacgagccggaggagaggctcctcaaccggttccggagagaggtcatgagagccggagtcattcatgagtgcaagcggagacggttcttcgagaacaagcaggaggaaaagaagcgcaagaaccgcgaagctgccaagcgtaagagcagaagcaggcgctctcaatcgagatttcaaccacaaaacaagccggatgttgcagcaaccaagaaggaagaggatgatgataactgggatcttccagaagtagacgctccatatatttcaaccgcatgatccactcacattctgt

SEQ ID NO: 27196 - DNA, 327 bp, Glycine max
  Clone ID: LIB3108-032-Q1-K1-C8
atggattcctagattggaattctagttagagcacagtttcgtgtaccgcgtgcacaacaggtcaacaggatactacgatggacgctactggaccatgaggaagctgactatgataggatgaactgatgcttctcatgtgttgacggagctcaaagaggctaagactggatacaccaacgggttaatccgattaatcggatccgacaacattcgacaagagcagtgcatcatcttgattgcctacaagcccggagccttctaagcgtgaaaaattagcagagcattagtagccggcaacctacttagcttgatagcacttaaactaca

SEQ ID NO: 27197 - DNA, 435 bp, Glycine max
  Clone ID: LIB3108-032-Q1-K1-C9
ccctagcaagcggaacaatggcagacgttgaggtcgatgtggcggctgcagcagcagcagggcagccgaagaagagaacgttcaagaagttcagtttcaggggcgtggatctcgatgcgcttctggacatgtccaccgatgaactcgtgaagatgttcagtgctcgcgcacgtagaaggctccagagaggcctgaccagaaagcccatggccttgatcaagaagcttcgcaaagcgaaaagagaagctccaccaggtgagaagccagaacctgtacgcactcacctacgcaacatgattattgtgcctgagatgattggtagcattattggagtgtacaatggcaagacctttaatcaggttgaaatcaaacctgagatgattgggcattatctggcaaaggtttctattcatacaaacgccgttagcacgggag

SEQ ID NO: 27198 - DNA, 259 bp, Glycine max
  Clone ID: LIB3108-032-Q1-K1-D1
cccacgcgtccgtgagaagtgtgagcctgagaccagagcttcacattccaatttgttcttcaaacccttcatcatgtgtcaaacccatcaaattagtggtagcatcatcgtatgggaaaaatttgaaaaatccaccttccaaatttgcaatcactcttagagagcacagaacaactttggagcatgcggcgaggttgccattactgaaacatgaattccggtattgtggtaatgggagcggtgtgtgtggtggggatat

SEQ ID NO: 27199 - DNA, 353 bp, Glycine max
  Clone ID: LIB3108-032-Q1-K1-D10
ctttgaacgacgcagaaggttcatccaatctccgaatcctttaatcgcattgcaaccatgtcgaggagaaaggtcagagagccaaaggaggaaaacgtgactcttggcccagctgttagagatggcgaacatgtctttggcgtcgctcgcatatttgcctcctttaatgataccttcattcatgtcactgatctgtctgggagggaaacgcttgtccgcatcactggtggaatgaaggttaaggctgacagagatgaatcatctccttatgctgctatgcttgcagctcatgatgttgctgccagatgcaaggaacttggcattactgctctttatatcaagctccgtgccac

SEQ ID NO: 27200 - DNA, 388 bp, Glycine max
  Clone ID: LIB3108-032-Q1-K1-D11
tcgaccctcgcgtccgcccacgcgtccgggtaattgaaatccactttctcttcttttcttgtttcttacacttgttgcgtttgctcaaaattaagcatgtagtgttaaaacctcttactcttttcattttgttattttttgtactaatgctgaaaatgaatactatattagacctggaagctttagagattgaagagggctctcctaggagtcaagggtctgaaaccccaagttcaaggtccagcacttctgattcggagagtcagggatcttttgctgggacacctaataacaataaccagtggcgtggtttctttaaactactcaagacaggatcccacatgcctttccatacttttcacccacttaaaaatgttccaaaactgac

SEQ ID NO: 27201 - DNA, 387 bp, Glycine max
  Clone ID: LIB3108-032-Q1-K1-D12
cccacgcgtccgcttggacgcaaaaatggcacctgcaacactgtctctgtctctcctcctcctgttctcactcagcatcgccgtaaccgttagatcgagcgactacgactacgattgtgtgtacactgcatacgttagaaccggttcggtgttgaagggcggaacggactctaagatcgggctgaagctgtacgacaagtacggctactacatctacattaaaaacctcgaagcatggggcggcttgatgggcaagggctacgactacttcgagcgcggcaacctcgacatcttcagcggaaggggaccctgtcttgacggacccgtctgtgccgttaacgttacttctgacggatcgggttctcaccacggctggtaccttaacta

SEQ ID NO: 27202 - DNA, 399 bp, Glycine max
  Clone ID: LIB3108-032-Q1-K1-D2
cccacgcgtccgaccaagagttggaagcaaggaggggtagactcagccaactagagaaaatctacatggatatgacaatgcagaaggagttgcagaaaaaaggtaggaagcgcaaactacgtgaagacgagattgtttgtccaacaactaaaccggtatacatgtggcgtgctgaaagaaagcgttgaaagagttaataatcctgaggttcttttttgccttttcacaattttgcatgatgatttaatactactgggttgggtccggagttggacaatttacatgtcttagatgaagcaccaacattcctagctgcagagtcgaatgtgggatcactgtcgttgccaacaactggcgctttcttggttagaattcctttatcatgtaaccattttcttt

SEQ ID NO: 27203 - DNA, 422 bp, Glycine max
  Clone ID: LIB3108-032-Q1-K1-D3
tgactagaaatcccatattttccccccacattaactcacccaacccctctttctatagggctggcatagcagagtttgtggccactttcttgttcctctacatcacagtgctgactgtgatgggtgtgttcaaatctaagagcaagtgttccactgtgggtatccaaggcattgcttgggcttttgggggaatgatctttgctcttgtttattccactgctggaatctcagggggtcatattaacccagcagtgacgtttgtgctgatcttggcacgcaagctctctctgacaaggggcaatttttacataatcatgcagtgcttgggagctatatgtggtgctggtgtagttaaggggttcgagccacacctctatgagaggcttggtggtggtgccaacacaatcgctaaagggtacacc

SEQ ID NO: 27204 - DNA, 373 bp, Glycine max
  Clone ID: LIB3108-032-Q1-K1-D4
ctcaattcctcatcccaccacgcacacacagtcacaaactcccttcttcttcttccaatggccgccacagacgtcacggagcccacgtgggccgagctcctgggccgcgacaactgggcgggcctactagaccctctccacccctctctccgctccctgatcctccggtgcggggacctcatccaagccacctacgacgccttcaacaacgacaagaactcgctctactgcggcgccagccgctacggcaaggcctccttcttccgcaaggtcatgctggacttgcccgagaattatgacgtcgcggcgttcctctatgccaccgcaagggtcaccgttcccgaggccttcctgctgcactcgctctcgcgcg

SEQ ID NO: 27205 - DNA, 319 bp, Glycine max
  Clone ID: LIB3108-032-Q1-K1-D5
cccacgcgtccggcttccggcgatggttgtggccattcgcccagcaaagaaccctttttgcgtgaagggtcgtgtctactgtgacccttgccgtgctggttttgagacctcagctaccacctacattgctggtgctgagattatgttgcaatgcaagagcagggttagcaacgaggttgtgtacacgaagaaggggtacaccgactcaaccggagcatacacaatgtacgtggatgaggatcacgcagatcagatctgcagtgccaagcttgtaagcagccctcaccctcaatgcaaggaagtcaccccaagccgcgac

SEQ ID NO: 27206 - DNA, 420 bp, Glycine max
  Clone ID: LIB3108-032-Q1-K1-D6
ctcacgcgtgcggcttacggcgatggttgtggccattcgcccagcaaagaaccctttttgcgtgaagggtcgtgtctactgtgacccttgccgtgctggttttgagacctcagctaccacctacattgctggtgctgagattatgttgcaatgcatgagcagggttagcaacgaggttgtgtacacgaagaacgggtacaccgactcaaccggagcatacacaatgtacgtggatgatgatcacgcagatcagatctgcagtgccaagcttgtaagcagccctcaccctcaatgcaaggaagtcaccccaggccgcgacgaagccgtcgtgattctgacccgctacaacggcattgccttcgacgataggttcgccaatgccatgggcttcatgtctcaggaggttgcttctggctgtgc

SEQ ID NO: 27207 - DNA, 395 bp, Glycine max
  Clone ID: LIB3108-032-Q1-K1-D7
cccacgcgtgctgcttacggcgatggttgtggccattctcccagcatagaaccgtgtttgcgtgaagggtcctgtctactgtgacccttgccgtgctggttttgagacctcacctgccacctacattgctggcgctgagattatgttgcagctgcaagagcagggctagcaacgaggttgtgtacacgaagaaggggtacaccgactcaaccggagcatacacagtgtacgtggatgatgatcacgcagatcagatctgcagtgccaagcttgtgagcagtcctcacccgtaatgcgaggaagtcaccctaagccgagacgaagccggtgtgatgtctacccgctacaacggcattggctgcgacgataggttcgccaatgccatgggcttcatg

SEQ ID NO: 27208 - DNA, 284 bp, Glycine max
  Clone ID: LIB3108-032-Q1-K1-D8
cccacgcgtacgtatcaggacgataccagttccagtcatgccatctaacacagctgatgacgtggaagatccattgtactgccacatttgccttgctagtctgaatagcactgatgcgaacatacacagatattattactatgatctggcgaagcaatagcatggatagcacatattttgagaaccataaaaaagcttccatcgacgatatgccagtatactcattgaacctcaattacgatgactcatatagaaactaatgatccagaactgaaaacattgaa

SEQ ID NO: 27209 - DNA, 429 bp, Glycine max
  Clone ID: LIB3108-032-Q1-K1-E1
gggaaggtgagcagtaatggtcatggatgttgcaaatcagggccaggctatgcttccccactggaagccatttctggtcccagagagtctctcatttatgtaacctctgtctacacagggaccggaatagagaagccagactatttggcgacagtggatgtggatccaaactctccaacttattccaaagtcatccataggcttcctgttccttatttaggtgacgaattgcatcacacaggctggaattcatgcagctcttgccatggagatccttcagcagaccgacgatttctcatcgtacctgcactcgtatcaggtcgagtatatgtggttgatgtgaaaacaaatccaaggggctcatctttgcacaaagttgtcgagcctgccgatatcatacagaagactggattagcttatccacacaca

SEQ ID NO: 27210 - DNA, 265 bp, Glycine max
  Clone ID: LIB3108-032-Q1-K1-E10
tcgacccatgcgtacgctttgggcgacccataacgttcagccaatcttctaatactttaatcgctttgcaaccatgtcgaggagaatggtcagagagccaaacgaggaaaacgagactcttcgcccagctattagagatggctaacatgtcttaagcgttgatcgcatattagcgtcctataatgatacctcaattcatgtaactgatctgactgggagggaaactctattcacaatcactgccggaaagaacgttaaggcttac

SEQ ID NO: 27211 - DNA, 343 bp, Glycine max
  Clone ID: LIB3108-032-Q1-K1-E11
ggaagctccaacactgaagtgaagagagaaacaatggccaatgtttcaattccactcccacgagaacggtttctccaaacccaattactcgacaaaacgcccatgtttcaccccttcagcttcaacactcagaatttcttgctctggagtggctgagtttgatggatctcatcagaaaaaaggaggtttgtttaatttcaatggaatcaagggcgtggcttgtggtattcttgcagcttgtgctgttacttctgctgcatttcctgttactgctgctactcagaggcttcccccattgtcaactgagcccaatcgctgtgagcgtgcatttgttggcaacaca

SEQ ID NO: 27212 - DNA, 350 bp, Glycine max
  Clone ID: LIB3108-032-Q1-K1-E12
caatgctctagggtttatacaattatcgatggcttcttcagatgttgagtaccgttgctttgggggtgggctcgcttgggccactgacgaccaagctctcgagagagccttctctcagtacggcgaaatcgttgaaacgaaggtctgtttgttgcaggcatcacatctgatctcacacgattcggattcggaattttctcgatccctttctgatctgtgatctctgatctgcttgcgttacttgatcttatgatacttgtgttactatatgagtcttttattactctcacgccaatacgtacgttcatcatcttcctttcaccacatgcgaagatcgatcggttactatt

SEQ ID NO: 27213 - DNA, 214 bp, Glycine max
  Clone ID: LIB3108-032-Q1-K1-E2
ctcacacctccgataaaccatggccacccttgagaatcttagcaatccttacgatcaccttgcttttgaatgactcagaatctgcaagcccattgtgcacatgccctttcacatttccaataggttgtgctgcttatttgtgctccaatctttcagtgatatgagaacattctgtccagactttagtatgtcatgtgtctatgactctttacct

SEQ ID NO: 27214 - DNA, 314 bp, Glycine max
  Clone ID: LIB3108-032-Q1-K1-E3
cccacgcgtccgcccacgcgtccgctcgtcttcaatcctttcgttattctcttattcatccttctcttctgaataatccagatctctttctgcccttttctccgtcacgcttttcgtgaccggatctgtatggatttgatccagatctacacgccgatggtggttttggccgggtctttcatagatctggtgcgtagaggctcagatctacggtaccgaggtacaacagagaatcgatgacaagaacgcagatccgacggtagatccagccgattccgcttggtcgatcgctacagactccctgtatcggatca

SEQ ID NO: 27215 - DNA, 193 bp, Glycine max
  Clone ID: LIB3108-032-Q1-K1-E4
gataagcattcgcaggatcctaaccgcagatcctaatcaatggaaatggaatcatactcattattatttgagcgacatctatcacactgcctggcacacaggttctgatattgatagctgtggcttcctatcgatgctctactgttagaaaatcacatatgggcagcatcaccgagtactgatgaatctcatt

SEQ ID NO: 27216 - DNA, 213 bp, Glycine max
  Clone ID: LIB3108-032-Q1-K1-E5
ctcacacgtaatgctgacgctcagtaatctgtttaaacactctgatttatattgctcttgcgggaaagagccaagttaatgcatcgctagcctgcgaagcacattgacatgccgtatcaccaagcactctaactaccactgcactccgagagcttataaaggccctggctgcaagtgatgagatacgtaaactctctaatcatattgaccata

SEQ ID NO: 27217 - DNA, 151 bp, Glycine max
  Clone ID: LIB3108-032-Q1-K1-E8
cccacgcgtccgtctgaagataagagaccttcatggactatcacattaactgggtgcgaacgggtaaatgccgagcaagtgaatcggttgccctccgcgttctaattgaactcaggcgaaccgtactgaggggaggaccgtgcccaagttc

SEQ ID NO: 27218 - DNA, 163 bp, Glycine max
  Clone ID: LIB3108-032-Q1-K1-F1
tcggtttgatttcattcttgtttgattggcaacttgtgttgttcccaatccaagagttatgggattggcctctgttgtccacaacggcgtccgaattccattcaacttggagcacattcacactccttccttcagatgctctgcactttaccaccccatctct

SEQ ID NO: 27219 - DNA, 274 bp, Glycine max
  Clone ID: LIB3108-032-Q1-K1-F10
gacccacacagccgcccaagcgaccgctacccagcgccaacaagcctaacgacaacgatgagagccatcacaagagcgaacccacaccacacgccaggactcagcaactacccacaataaccataacaaactaccgagtcaacaccatgacgatgactcactgagtaacactgcaaccgacccaaaccttaactacaaaccagagatcagaatccaaacccaccccggcgaccgagcctacaaccgactcagcaacgccacaaaacttactaac

SEQ ID NO: 27220 - DNA, 405 bp, Glycine max
  Clone ID: LIB3108-032-Q1-K1-F2
agacggagaaggtctttctgaagccgtagttgagactgagatcgatcatctgtcttagttagatttcgtagcagagagagaatgggagaggtagcgcgtggaggttgttgccctccgatggatctgttccgttcggagccgatgcaactggttcagctcatcatccccatcgaatccgctcaccgcactgtctcctacctcggagaccttggcctccttcagttcaaagatctcaatgcagacaagagtccttttcagcggacctatgcagctcagataaaaagatgtggaaagatggctcgtggattgcgttttttcaaggaccaaatgttaaagcttgtgtttcaccaaaatattccacaacaccagttgatttgaacattgatgaccttgaggtaaagctta

SEQ ID NO: 27221 - DNA, 423 bp, Glycine max
  Clone ID: LIB3108-032-Q1-K1-F3
ggacaaacaggccgtaacagaagcaaacttaaagaaggctggctaccacacatgggaaaaattaattctcaaggatccacaagatccttccactccaaatgcagtttcatacaaaacagcagcgagagagaaactgataaggcagggatacaacattgttgggatcattggagaccaatggagcgatctcctcggaggccacagaggcgaaagcaggacctttaagcttcctaatcccctgtactacattcagtagttccttcacctctcaacaatctagcttgctcctatctatctatatgtaataagatccgttcaaataggggcactagcttcaactttatgtggtttcagctgtgtgtcaacaaggtaatgtaggagacttcactatggtggtttctctttcgtggctttaataaaata

SEQ ID NO: 27222 - DNA, 316 bp, Glycine max
  Clone ID: LIB3108-032-Q1-K1-F4
ctcacgcatccgctgatcaagagactggaaatgacactgtgtataacactgtggataacaacgcatttgtaagtataacaactgcaattgcctctgacaggcactttgaatcaagcagtcacctaacagaagtgaccactgcagcaagcaccaactcgaccttctctgggactgatacatgaagtgcatctgaacaatcttctgcagtgatggtatcagagtctgtccaagcttatgacagaactccaaacacaacaactaacgcagatgtcgatgaagctctgacagatggattaaagcagagtgtcgatcggac

SEQ ID NO: 27223 - DNA, 279 bp, Glycine max
  Clone ID: LIB3108-032-Q1-K1-F5
ctctgtcattacccaacaagaaagtcctaagcttataggatcactaatccaaactgcaccatggtgtcctcagacgaatactgatccatgataacaacactacgcattaactctaacacattctaaatgccatcatctgaagccatgcataccttgcttacgatgtatgagaacctacgcatggattaccagagactgatctaccatagtgagcactaccatcaaatgggttattgccaatggacgtcatagagcttgagttaaaccaaaccttgacat

SEQ ID NO: 27224 - DNA, 270 bp, Glycine max
  Clone ID: LIB3108-032-Q1-K1-F6
ctcacgcattacctctcaccttaatcctcagctaatactttcaccataccaagctataccacggacgcttctaactatgtctgatcctcgatcttcacctacggattaacttcaacctatctatctcacaaactataacaatcatccatcaaatcaatccgatgcattataacattcgctagcacaactagagattgatctactagagtgtgcactaaattcaattgactgatcaccattagtacttgatagcgctcgcataaactcaag

SEQ ID NO: 27225 - DNA, 436 bp, Glycine max
  Clone ID: LIB3108-032-Q1-K1-F8
aaaacacgtagttgagaactaagaagaaggaaatggcttcctcaatgatctcctccccagctgttaccaccgtcaaccgtgccggtgccggcatggttgctccattcaccggcctcaaatccatggctggcttccccacgaggaagaccaacaatgacattacctccattgctagcaacggtggaagagtacaatgcatgcaggtgtggccaccaattggcaagaagaagttcgagactctttcctacttgccagacctcgatgatgcccaattggcaaaggaagtcgaataccttctaaggaaaggatggattccttgcttggaattcgagttggagcacggtttcttgtaccgtgagcacaacaggtcacctggatactatgatggacgctactggaccatgtggaagctgcctatgtttgcctgcactgatgc

SEQ ID NO: 27226 - DNA, 431 bp, Glycine max
  Clone ID: LIB3108-032-Q1-K1-G1
agaccgcgtccgaccagagaatggctactatggctgtggtgagcctttcatgccccagggtggtcttcaacgcatcagcctcaccgcaaaacgcgcatgctgtaaagttctcacttccacccagccaagcagtgcgaccgggtagtatcaagttgggtcgcgtgatgaggatccgacccgttcgcgctgcgcctgagcgcatatcggagaaggtggaggagagcataaagaacgcgcaggaggcgtgcgccggcgatccgacgagcggcgagtgcgtagcggcgtgggacgaggtggacgagctgagcgcggcggctagccacgccagggacaagcaaaaggaaaaggacttcgacccgctcgagaattactgcaaggacaacccggagaccattgagtgcaaaacttttcgaagactgagcatgcatgct

SEQ ID NO: 27227 - DNA, 511 bp, Glycine max
  unsure at all n locations
  Clone ID: LIB3108-032-Q1-K1-G10
tcgacccacgccgtccggccaaataggacagtagaccagagagaaggggaaatataagattagggattacggtggttgcgccagtcgcgaggcatgtgccatggcgtgttggtgagcctcaacacgcattcatacatncgccttcttctttttcgttttcatctcccaaaccttattcttcctccaactatgcaccacctctcaccctccttccacgatttcggaggcacctcgttcgtatggctcccgacgaggagaagatgactcgccgttcccctctcgatttccccatcgagtgggaaaggcctaagcctggacgaagaccggatatattccctcaatttagtccaatgaagacacctttgccgcctccgttgcctgcagatcctccagaagaggatgaagaggaggaagaaaagaaagaggaagagcatgaacctgataaggaggagccagataagccagacaagccagaatagcaatagtgtgtagtaaatgactagtcttgatt

SEQ ID NO: 27228 - DNA, 354 bp, Glycine max
  Clone ID: LIB3108-032-Q1-K1-G11
tcgaccacgcgttcgccaatagaagcaacagacagaagggaattaaacatacgattaggtgtcgcgcactctgaggcatggccatggggttggtgagcctcaacaccattcatacatcgccttcttctttctcgtttatcatctcccaaaccttattcttcctccaactatgcaccacctctcaccctccttccacgatttcggaggcacctcgtacgtatggctccctacaaggagaagatgactcgccgttcccctctcgatttccccatcgagtgggaaaggcctaagcctagacgaataccggatatattccctcaatttagtccaatgaagacacctttgccgtcttcg

SEQ ID NO: 27229 - DNA, 407 bp, Glycine max
  Clone ID: LIB3108-032-Q1-K1-G3
ccctcctcccatcatcactcgcttcccactccagaagctacgtgccaagcatcaggaccaggaccaccactcgtcggcggagctgtccgccgtggcgaacccgtcccacgcgcatgcgaacacgctcttcttccggtcggcgtacaacgtgcaggtggtggtggacgagaacgagccggaggagaggctcctcaaccggttccggagagaggtcatgagagccggagtcattcaggagtgcaagcggagacggttcttcgagaacaagcaggaggaaaagaagcgcatgaaccgctaagctgccaagcgtaagagcagaagcaggcgctctcaatctagatttcaaccacaaaacaagccggatgctgcagcaaccaagaagggagaggatgatgataactgggatc

SEQ ID NO: 27230 - DNA, 256 bp, Glycine max
  Clone ID: LIB3108-032-Q1-K1-G5
ctcacgcattatctattacctatatcataattttatagaatcatcatcttaaggggtacaagggattcttcaaaatatttcagttcatatctattcacactacggcttaacttgaacaattattactgataaatgaaatcaatcgtcctcatatcattcctaggtcctaaaaggttctctaaaacaactagacattgatctaccatagtgatcaataaattcaatttactggtaatctatgtaatagataatgttt

SEQ ID NO: 27231 - DNA, 323 bp, Glycine max
  Clone ID: LIB3108-032-Q1-K1-G6
ctcacgcgtgcgctcgcacgtaactgatcaggttacagggttggttgcttaaggcgtgcaagggattcttctatggatgtgagttcatagatgatcacctaggggttgacatgaccgatgctgactgaggaacgatagcaatgccccatcgtgcaacaccgaagggtcaaatgagtctctcaaacaactagagattgacatatcatgacctgcaatacatgcatgtggccgcttacctatggaatagataatgctgctatactgtctagccaagcgatacctaaagctactggggacatccaaattgaccgaagctccaacat

SEQ ID NO: 27232 - DNA, 177 bp, Glycine max
  Clone ID: LIB3108-032-Q1-K1-G7
cccacgcgtacggacacacattcatgcgctgtttacagtgctggttgcattcggcactacacggaatattgcatgtatgccacttcatagctcatcacctggaggttgacatgacacatgctcagttaggcctaacaataatgcccaattatgcaacaccaaatcgtcatatggttc

SEQ ID NO: 27233 - DNA, 426 bp, Glycine max
  unsure at all n locations
  Clone ID: LIB3108-032-Q1-K1-G8
gatcgagataactagaaacagtgtgatgaaaatgaaggtccttgttttcttcgttgctacaattttggtagcatggcaatgccatgcgtacgatatgttccctctccgaatgaacactggctatggtgcccgtactccggaggtgaaatgcgcaagttggaggcttgctgtggaagcacacaacatctttggctttgagaccattcctgaagagtgcgttgaagcaacaaaggaatacatccatggcgaacaatatagatcagactccaaaacagttaaccaacaagcttacttttatgccagagacctcgaagtccatcccaaggacacatttgtgttcagtatagatggcaccgtactctctaatattccatactacanaaaacatggatatggggtggaagaatttaactcgaccttgtatga

SEQ ID NO: 27234 - DNA, 474 bp, Glycine max
  unsure at all n locations
  Clone ID: LIB3108-032-Q1-K1-G9
gcggacgcgtgggtgcggcctctcaccgcacgcactagcactgtctcactctctcacgcacgcgtcatctcaaacttctgcgcactttttcacggatctgatctaactaagttctcgccatgaatcgccaccacgatcccaatcctttcgaggaagaagaagtcaatcctttttcgaatggtggtgctgctcctgcatccaaatcacgtattccaccattagcatctcagccactgggctttggtcaaaggcatgatgctacagttgatattcctttggatactacaaatgactccaagaaaagaggtcaagagctagctgcttgggaagcggatttaaaacggaaagagaaggaaataaaaagaagagaagaggctgcttctagagctggtgttcctgttgatgataagaattggccctncaattttcccaatcattcatcatgatattgccaatgagataccggtcatgctc

SEQ ID NO: 27235 - DNA, 229 bp, Glycine max
  Clone ID: LIB3108-032-Q1-K1-H1
acgccgttgtttttgttgtaattagatatataattgtaattgaaacccagcttggatctaaaaaagaaaaaaagaaaaaaaaaaaaagaaaaaaaaaaaaaaaaaaaaaaaaaaaaaaaaaaaaaaaaaggaagaaaaaaaaaaaagaaaaaaaaaaaataaaaaaaagaaagcaaagaaaaaaaaaaaaaaagaaaggaaaggaaaaaaaataaaataggcggaaggt

SEQ ID NO: 27236 - DNA, 492 bp, Glycine max
  Clone ID: LIB3108-032-Q1-K1-H10
taccggtcacgcgttcgcccacgcgtccgtgattgctgaagcattgagcagagttggtagaaagggtgtcgtgacccttgaggagggaaagagtgctgataacagtctgtatgttgttgaggggatgcaattcgaccgtggttatatttctccatacttcgttactgacagtgagaaaatggctgttgagtatgagaactgtaagttgctgttagttgacaaaaagataaccaatgcacgggatcttatcaacatactggaggatgctattagaagtggacaccctatattgattattgctgaggatattgaacaagaggctttagcaactcttgtggtgaacaaacttagaggatcactgaagattgcagcactgaaggcccctgggtttggagagcgcatgagccagtaccttgatgatattgccatcttgactggaggtactgtaatcagagaagaaggtggccttacttttgacaaagctgggaaaga

SEQ ID NO: 27237 - DNA, 360 bp, Glycine max
  Clone ID: LIB3108-032-Q1-K1-H11
cccacgcgtccgtgattgctgaagcattgagcttagttggtagaaagggtgtcgtgaccctggaggaggtaaagagtagtgataacagtctgtatgttgtggatgtgatgcaattcgaccgtggttatatttctccatacttcgttactgacagtgagaaaatggctgctgagtatgagaactgtaagttgctgttagttgacaaaaagataaccaatgcacggcatcttatcaacatactgtacgatgctattataagtggacaccctatattgattattgctgaggatattgaacaagaggctttagcaactcttgtggtgaacaaacttatactatcactgaagatcgcatcactta

SEQ ID NO: 27238 - DNA, 253 bp, Glycine max
  Clone ID: LIB3108-032-Q1-K1-H12
tatttcagtactctgaaaaattacaacaacctggggtctcttgtactaaggggtatattctcgacacgaagaacactggacacacaggccgcaacataatcttacttaaagaaggctgactaccacacatgaaaaaaattaattctcaaggatccacaaaatccttacaatccaaatgcaggataatacataacagcagcgagagaaacactcataaggctgctatacaacattgccacgatcattggacacc

SEQ ID NO: 27239 - DNA, 387 bp, Glycine max
  Clone ID: LIB3108-032-Q1-K1-H2
gaagaacaagtagttgagaactaagaaggagaagcaaatggcttcctcaatgatctcttccccagctgttaccactgtcaaccgtgccggtgccggcatggttgctccattcactggcctcaagtccatggctggcttccccaccagaaagaccaacaatgacattacctccattgctagcaacggtggaagagtgcaatgcatgcaggtgtggccaccagttggcaagaagaagtttgagactctttcctacctgccagaccttgatgatgcacaattggcaaaggaagtagaataccttcttaggaagggatggattccttgcttggaattcgagttggagcacggtttcgtgtaccgtgagcacaacaggtcaccaggatacta

SEQ ID NO: 27240 - DNA, 362 bp, Glycine max
  Clone ID: LIB3108-032-Q1-K1-H3
acgcacacgcgtgcgtccacgcgttcgcccacgcgtccggtcatcgacgatgttgacactgataaggactggaaaattaattaccaggagtttgtggctatgatgagaaaggggatcctggatattgatgagaaagagaaaccacaataattgtgtgatgtgacatgaagacaaaagtggtttctggatttttcttgctgatttctgctggggatgaattatcactctcgaatttgtcacctggcatgtgtctgcttaattcatgtgacactatatggcattcaaaatgcctaactttgcatagctgatataaataaactgcgatatgtgaacaataaatgaaactatcatcatttcaagac

SEQ ID NO: 27241 - DNA, 257 bp, Glycine max
  Clone ID: LIB3108-032-Q1-K1-H4
cccacgcgtgcggcttcatacgtatcatcggattcgacaacgttcgacaattgcagtgcatgggcttcatggcctactagcccgcagtcttctaagtgtgaaaaatttgcaaagcatttgtagccgccaccccactttgtatgtttgtacttaaactacatacccattacgttcatgctttctgagatttcatcatccagtatctttgggttctgattacggacttcaatggaaattaatggatgagaactaatgaa

SEQ ID NO: 27242 - DNA, 422 bp, Glycine max
  Clone ID: LIB3108-032-Q1-K1-H5
attgctttctctttggttcctagctcgcactctctctacgcacgcctcaacatgccttctctgctccattcattatgtctccgtcgttggatcttccccccaagggtggcttcagttttgatctatgccgaagaaacgcaatgcttcaaaacaagggcctcaaagccccaacctttctcaaaactggcaccactattgtcggtttagttttccaggatggtgtcattcttggggctgatactagggcaactgaaggacctatagtggctgataaaaactgtgagaaaattcattatatggcacccaacatatattgctgtggagcatgcacagctgctgatacagaagctgtaacagacatggttagctcacagctgcaactacatcggtaccatactggtcgggaatcaagagttggtacg

SEQ ID NO: 27243 - DNA, 336 bp, Glycine max
  Clone ID: LIB3108-032-Q1-K1-H6
cgcacggccgccctggttcctatctcgtaagagaacagaataagctacttaaggcatgaaacagattattctaaatgttttagttcatatatgttcacctatgggatgacatgaccaaataatactgatcaatgaactcaatgcacctcagaacaattattaggcccaaatggttctttaaagcaactagaaattgccataactgatgcttcaatagatgcatcttcctcgttgcttttacaatagaaaatgatcgcatacttgccagtcatgcgatttcgaaagctacttgggacatgcaaatcaaccgatacagcagcattgaaatgtaatata

SEQ ID NO: 27244 - DNA, 352 bp, Glycine max
  Clone ID: LIB3108-032-Q1-K1-H7
cccacgcgtgcggacggacataaatgagctgggtgcacggtggattgcagtattcattgcacgcacaattgggtgtatgccatttcatagaacagcgcgaggaggattagataacagatgtgcagagaggcccaacaattaggcccaattatttaacaccaaattgtaaaggattctttaaagcaactagaaattgcgataactgctgcttcaatagatgcatcttgcccctttcttttactatggaaaatgttcgaatacttgccagccatgcgattccaaaagctacgtgtgacatgcaaatcaaccgtaactgcaacattgaaatgtaatatattgccaaatgtgggat

SEQ ID NO: 27245 - DNA, 442 bp, Glycine max
  Clone ID: LIB3108-032-Q1-K1-H8
cccacgcgtccgcccacgcgtccggccaatttgtttatctttagtaccacctagtcacaaaacatataccatgtcgaatttgagtttccttcaatttcatagtagcaactcgttggggcactcctcttttcaacccaatagtccaaacccgaacaacaacataaaatcatcaaaacagacatcaaatgtagggtgcaatattcagccaaagtcagaggaaatgaaatgggtgttcgacaagtttgacaccaacaaagatggcaagattaccctcgaagagtacaaagcagcagtgagaacaatggggtggggaatcgaaggcactgagactgatgagtcttttcaggtgatggactctgatggagatggcttcattgacttcaaagagttcatggacatgttcaacgtggaagagagggtgaaagagacggagatcaagagt

SEQ ID NO: 27246 - DNA, 380 bp, Glycine max
  Clone ID: LIB3108-032-Q1-K1-H9
tcggaacatattatcatttcctctcaggatttcctattttttcttttgagtcttaacaaatggcaacaaccactgtgatcagggccactctcccccaattcaggggtcttagacctcaattctcagctgcccctgtgaagaacttggttgctgtccaacaacctatgaggcccaaggggaagggcgctttgggagctcgatgtgactacattggttcatccactaatctgattatggtggcttctacaaccctgatgctgtttgctggaaggtttggattggctccatcagcaaacaggatagccactgcaaggctaaagctggaggtgagggactcaggcttgcagactggtgaccctgctggcttcacccttgctgac

SEQ ID NO: 27247 - DNA, 432 bp, Glycine max
  Clone ID: LIB3108-033-QI-K1-A10
cttacaccgaatcacgaggcgacaacatcgacatggagggtctcatcaacggcttcatcaacgttgctctcggagctgatggtggcgatcgggaagaacaacaacacgggagagacgaccgtagtagaagctcctgggctgaagtcgtctcccaggatcaacaagatcaccctcttcctcatcaccaacacaaggaacaatatcgtcctcagtacgaggagccccaatctcaaagttcctacaaaccccagaaggtggatgaaggtgaagatggatggcagactgttggtagaaagccttcaaggcatccacataaggttcaaaaggacaactggaacagctataaacgacctgctgatgagcaagaatactctaatgaggttgaagttggtgctgatgtggagccctcagaagatgaacttgctgatctgg

SEQ ID NO: 27248 - DNA, 180 bp, Glycine max
  Clone ID: LIB3108-033-QI-K1-A11
acgcacacgcgtccgaaaaaaaaaattagagaaacacgactaagtaaaaaaaggaaccgactcgtaagctcgcgcaatggatccatactaagagacttacgtgctgaaggcgacacgtgggacgaaggctcatctgatgaatgaacagaatgaccagacggccgcacttgacgagcttcg

SEQ ID NO: 27249 - DNA, 89 bp, Glycine max
  Clone ID: LIB3108-033-QI-K1-A12
cccacgcgtccgacaaaaacaattatcgtaataccctgataaaaactaaaggaataacgggtattctttctctaaagaagccattctaa

SEQ ID NO: 27250 - DNA, 326 bp, Glycine max
  Clone ID: LIB3108-033-QI-K1-A9
gagattggaaagttaaaatggcatttggagctaagaatggcgtgtgttttcccttctgtttttttcataactttcttggttatatgttctgccactgctcggagccctattttcttctcaagtgagtttccttttcatttcatcttattttgtgtatctccctttaattttttaggtaattagtaatatctagctaggagagaaaacactaaatggaagactttgatatatttgttcatcatccttttttttttgtggttgttattagtttaaagaactaaagtctcgttggaatattatattttgccctttgaaaggatggattt

SEQ ID NO: 27251 - DNA, 177 bp, Glycine max
  Clone ID: LIB3108-033-QI-K1-B10
aacaagcgaacgactaatcttaccagctagttctaatattactactattgtcctgttgacgttttgcaacctatgtggacaatatgtcctctcaccatatctacataccctataattttaggacttgattacctattaattgtactactatcacttcaaactccattaagcttttac

SEQ ID NO: 27252 - DNA, 392 bp, Glycine max
  unsure at all n locations
  Clone ID: LIB3108-033-QI-K1-B11
gatgaaatgaggaagaagcttcatggtgattcttcaacggttgaactcaataattccggttcggttccttccaagggtgcaagttccccttctgatgcaagatcatgtgtatcatccataggggatgcttctggtagtgttaaggaagttgatgtggatcatgagtacttgtccacagatcagggcgttccttatcctgccggcggctattacggttactactatccaggttatggtggcttctatggagagtcagacaaccaagggtactatgttggtgccgatgccgtggatcttcagtaccctgtcatgcaagcagataatggttcttatgtctatctcgtgccaggatttcagactggctaccctttatactatcatnctctaagtcc

SEQ ID NO: 27253 - DNA, 228 bp, Glycine max
  Clone ID: LIB3108-033-QI-K1-B9
aacaagagaagcattaactgacgctagaagctctagacggcgcatatatggcctgttgggtgatgtcttccgtggccctcaatcctgcccgtctcagtgttgagacgtactcagttagagggcgatcatccctctcaatggaactcctgttcattcaaagtcgcgtccattggtgacaagatgatcaatacctacatgcgatagtaaactcatggtggcatacctttg

SEQ ID NO: 27254 - DNA, 228 bp, Glycine max
  Clone ID: LIB3108-033-QI-K1-C11
tcgctagttgttggaaagacaccttctccagcttcacagtggctgacgttgtggtcaatggggcggctgcagcagcagcggggcagccgaagaatagaacgtgcaagaagttcagcttcaggggcgtgcatctcgatgcgcttgtggacatgtccaccgatgaactcgagaagatgttcagtgctcgcgcacgtagaacgttccagataggtcttaccacaaagccca

SEQ ID NO: 27255 - DNA, 190 bp, Glycine max
  Clone ID: LIB3108-033-QI-K1-C12
gcactgcatgtgtttaactcatttcttaggccgcattaattagctgcagcatgcacggatcagctgctatttgtttaattaatttctaaatatttctaaaaaaaaaaaaaaaaaaaaaaaaaaaaaaaaaaagataaaaaaaaaaaaaaaaaaaaaagaaaaactaaaaaaaataaaaaatatatagaac

SEQ ID NO: 27256 - DNA, 266 bp, Glycine max
  Clone ID: LIB3108-033-QI-K1-C9
tcgcccactcgtccggtctgtcgattctttgaatcctttcatgcatgctcgtaggtgtttgggtcatggttgataactgttcaactactgcaaggttggtttcacagaaatgggctccccaatttgattacatcctaacccagcttgccttggtggctgaggacaatggagcacctatcaaccaagacctaatcagtaacttcctgtcagaccaagtgcatggtaccattgaagttagtgcttaactgatacctacagttaacatt

SEQ ID NO: 27257 - DNA, 428 bp, Glycine max
  Clone ID: LIB3108-033-QI-K1-D10
cccactcgtccgcccacgcgtccgatcaggaggaggaggtggtggagggaaatcatcgtggagttcatcaacatcgtcatgggtacccacaacctcagtgtcggcatctggaaagaggattcagagggaaatggttgaactcaacaacgaccctcctcctgattgctctgctggccccaagggcgataacctctatcactggattgccaccattattggaaccccagaaacaccctaccaaggtggcatctttttccttgacatcaaatttccaattgattatcccttcaagccttccgaggtagtattcaaaacacgcatttaccactgcaatgtagaccctgatggccgtgttagtatgggaatattgaaggatgattggagtccagcactaacaattactaaggtgctactagaagttagatcaa

SEQ ID NO: 27258 - DNA, 305 bp, Glycine max
  Clone ID: LIB3108-033-QI-K1-D11
cgcacaacactgaaagtaacgttagaaacgagaaaactttgcattattcacagttttggaaactcactcacagtagtagaagggagtcctacatcttctagcattaaacaagaagaaaaaaaaaatcaacattttgggtttttcatttggctgcaacttttggtctctctgtagaatctcattccaattggagttcatcctctaaaaggaaaggtggtgtttggaatctgggaaaatgggtttgttttctgggatttttatgggggtgttgttcggcatcgcattgatggctggatgggcacgca

SEQ ID NO: 27259 - DNA, 250 bp, Glycine max
  Clone ID: LIB3108-033-QI-K1-D12
tttttggtcgacccaggcgttctctctcactactacagctaacatagcaaacttttataccctttcatattgaaacttagggcgacttacaaccacttgtacatcatactgctacatgtcgactaattcagcaaaaacaaaagatctactaaaacgttagaatgtgcataatgttcctaacttcagcttctacatgaacaagtataacattcacaattaataatgtattagtaccgacattcttttaaat

SEQ ID NO: 27260 - DNA, 253 bp, Glycine max
  Clone ID: LIB3108-033-QI-K1-D9
ttttgtttcaatgctgtagctttgagaataatccccgcttggaaggtccagagttgtggggactagtaagttatgacacaaactgctcgtgaataacgtgatgtggtaggatctcaatctgcgttgaattatatatatgtattctaaaattcaagtgtattacctcatagtgtcacgggaagtggtctatgtaatgcctggcatattgtagatcacgatctagatgacatgatatccgcattactcgaatatc

SEQ ID NO: 27261 - DNA, 217 bp, Glycine max
  Clone ID: LIB3108-033-QI-K1-E11
gttatccaccctgccaaggtttcaaggagttcatcgcagaatgctgcttcagttgctgggatggttttgaccacacaggccatcgtggtggaaaatcctaatcccaaggcacctgtgtctggttccccacatggccttaccgcttaatttttaggatatctaggctactgcttagaacagttttgtgcagaatattgaaagaccctaattgttcgaa

SEQ ID NO: 27262 - DNA, 424 bp, Glycine max
  Clone ID: LIB3108-033-QI-K1-E12
gccacgcgtcctcccacgcgttcgttcattttccctcactttgtcgctccccaaacgggcctgtctctcctccaatggccgaccagctcaccgacgaccagatcgccgagttcaaggaggccttcagcctcttggacaaggactgcgatggttgcattactaccaaggaacttgggactgttatgaggtcacttggtcaaaacccaactgaggcagaactgcatgatatgataaacgaggttgatgctgatggcatcggaaccatcgatttgccagagttcctgaacctgatggctcgcatgatgaacgacaccgactcagaggaagagcttaaggaggcttttcgagtgtttgacaaggatcagaatggtgtcatctctgcagcttatcttcgacatgtcatgacatatcttggggagaagct

SEQ ID NO: 27263 - DNA, 424 bp, Glycine max
  unsure at all n locations
  Clone ID: LIB3108-033-QI-K1-E9
cttatctcatgtcacccaagttctcctatctgaactctctagttgagagaaagaagcctcaagaaaccacagatgaattggccattgtgaaagcagctgcatgggcatggtaccaacatggttcaggctctgaaggaaaggctaagagtgagtttgatgtcacaagaactcaacgtatggccaggccttcacgttacaagttagaagctatgagaatggctaaggaagcaccctcaaattcaattcacaccaattataaacctcttcttgatacatatgaagttcaatgcatttcaaggcaattggacaggcttattgtagagtctggccacaacaaacttggcaacagcatcaatgcanataataatgatggtaaggataatgctaatagaaggatgaagaataagaaggggatgagtaaagg

SEQ ID NO: 27264 - DNA, 214 bp, Glycine max
  Clone ID: LIB3108-033-QI-K1-F10
tgataatacgagcgttgatgcctgatggcatacggaaccatcgactttcccagaagttcctcatacctgatggcgtcgcaattatgacaagacatccgacttcagtaggatggagctttaagggaggccttttccgttgtcgttttgacatagggatcatgaatgggtttcattctcttgcagctgagcttctgccatgtcatgacattatctt

SEQ ID NO: 27265 - DNA, 422 bp, Glycine max
  Clone ID: LIB3108-033-QI-K1-F12
ctctttagttctctctctaaaggtctcgtgagtgaaagagagtagtgttgctataaggtcaaacgtctgcagaaagctacaatgtcatgtcctgagtgttgatcaaacccaccaggtctgaaccccaattcatgagctggccatgttgaaaaactcgctgatctcaattcctatctattcggttcccctaattccattgtcattcttctcatctacgacatttatggctatgaaacaccaaatttgatgaatattgcagacaaggttgcatctgctggttattatgtgggagttcctgacttcttacatggtgatccatataatcctgagaatgctagcatgtctatgcgtgtttggttaaaagatcatggcacggacaaaagatctgaatctgcataatccataattgaagctttgaaaag

SEQ ID NO: 27266 - DNA, 432 bp, Glycine max
  unsure at all n locations
  Clone ID: LIB3108-033-QI-K1-F9
cccacgcgtccgcccacgcgtccgttcattttccctcactttctcgctccccaaacgcgcctctctctcctccaatggccgaccagctcaccgacgaccagatcgccgagttcaaggaggccttcagcctcttcgacaaggacggcgatggttgcattactaccaaggaacttgggactgttatgaggtcacttggtcaaaacccaactgaggcagaactgcaggatatgataaacgaggttgatgctgatggcaacggaaccatcgatttcccagagttcctcaacctgatggctcgcaagatgaaagacaccgactcagaggaggagcttaaggaggctttccgtgtgtttgacaaggatcagaatggtttcatctctgcagctgagctccgncatgtcatgacaaatcttggngagaagctgacggacg

SEQ ID NO: 27267 - DNA, 296 bp, Glycine max
  Clone ID: LIB3108-033-QI-K1-G10
gcctgcgccgctgctcaaacgacgtcgtccagctagacctctccaccccaacaacaggcaccaccaccaccaccaccaccacaaacaacacaaactcttcttctttctcctcttcttgttctctctccatcgacgtggacgaatcaacggaagcccgcatccagcgcctgatctccgagcaccccgtcataatcttcacgcgctcctcctgctgcatgtgccacgtcatgaagaagctcctcgccaccatcggcgtcaaccccaccgtcatcgaattggacgaccacgagatcgct

SEQ ID NO: 27268 - DNA, 261 bp, Glycine max
  Clone ID: LIB3108-033-QI-K1-G12
ctggggctttctactccaattctatatgatttttacaactatagatctaataaccctgaatactatttactgatggaggaaacaattcaatttcgacttccaacctatccattttacttttcttctttcattgtccgttttttatgactatcacatagtatttgtaactaaatcacttgctggctggccaattcttaatcctatttttggtcattgaaattctctcatattgatctttaccattcattctatcattggttt

SEQ ID NO: 27269 - DNA, 293 bp, Glycine max
  Clone ID: LIB3108-033-QI-K1-G9
tgatatctggggctatcgatttctcaattagcaaaccatcagaggttgatgttgttggggctgttttaataataacgatctacacttgaatatcttcgtacactgatttctcttttacagtgaaaggctctcatattaccagtgacgaaaaatagtagcatttctaccaaggaacttgggactgttatgaggtcacttggtcaaaacccatctgaggcagatctgcaggatatgatggacgacgtttatactggatcgctacttaactatcgattctttagagttcctaaacc

SEQ ID NO: 27270 - DNA, 417 bp, Glycine max
  unsure at all n locations
  Clone ID: LIB3108-033-QI-K1-H10
gtcttcgccaatcgcctgcgtctctctctgaattgactagcttaaatggctggtcctgggattgcccatgctaccttgaaaggtccgagtgtggttaaggagatcataattggaataacacttggcttagctgctggtggtgtgtggaagatgcaccactggaatgaacagaggaaaaccaggaccttctacgatttactggaaaagggtgagattactgttgttgcagaggaacagtgaaaatgttcttgttttgttgcctatgctctccatttataggctnttttttcccgtgttatattcaattggctcttcaaatgtaaatgagccaacatactatgagattgaaaagaataagtttcttgaactgattgaatactatgtttgcctgtaaaagtttcatgcacttatgttttt

SEQ ID NO: 27271 - DNA, 428 bp, Glycine max
  Clone ID: LIB3108-033-QI-K1-H11
aggaactagaaaatgcattcaatcttcaccaccatattgaacatcatggcgatggccagggcaacaactctagccacaatcactgtcgcggcggctagccccagtgttggcagcagaaggagtgggaagaggaatgtgaacttcatcagaggcttgaattcttttggagggttgaaggctcagaacaatgtgacattactaggccttcctgtgtgcactgatcagtgctctgcaaaggtggtgagctcattgaaatattcatcatcatcatcacgttaggggagacgtggaggtgctgccttttgaacatgcaatgctgctggcgagacttttcagattgcagtcatcatgaatggcctcgtgcttgttggcgtggcaatagggtttgtacttcttcgagtccaagcgcttgtcgaagagtctgagtg

SEQ ID NO: 27272 - DNA, 429 bp, Glycine max
  Clone ID: LIB3108-033-QI-K1-H9
cttgctacataattggttatatttctgaaaggcgtcgtataaacagttaaagtcctcactaatttttgtttgatagaagaaacaattcaatttcgacttccaacctatccattttactttttttctttcattgtccgttttttatgacaatcacaaagaaattgtaactaaatcacttgctggctggccaatgcagaatcctatttttgggcatggaaatcctctcatatggatctggaccatgcagtcaagcagtggattcgaagtggaaattggttgacaaatgcttgaattcacgtcaatcaaggtttcccagtgttggaaatggtggagtttattataccaataccatttctagaagcgggtcagtgagatttcatgatactaataaggagcttcaaagagattttgggtctctgagtgctcttg

SEQ ID NO: 27273 - DNA, 348 bp, Glycine max
  Clone ID: LIB3108-034-QI-K1-A1
cccacgcgtgcgcttcgttgcgagctataagctagttgatcgtgaggagaatatgacgttgtgagctgtctttggagctgcagtagttatggtagcatggccatgccatgtcgcaagctaccaaagggtccctctacgaatgaaaactgcctatggtgagcgatctttacatgtaaaatgcacaagaagtaggcttgcttgagaagctcacaacatgcgagcctttaaaaccattcctgaagagggcgttgaaccagcagacgactacattaaaggctaacaatttacatccgactattaaccagtttatcgacaagcgctctagtatgctagtgaacgcgaagtcca

SEQ ID NO: 27274 - DNA, 415 bp, Glycine max
  Clone ID: LIB3108-034-QI-K1-A10
tggcttggaacctttgggctgatttatgtgcttgattatgtgcttgtccctccgcgttctgctatcaccatcagtacaccgcaaaagctccccggcgcctggtccccggccgcaaccagaatacccctatccagccggaccagcagcatccgcgaaaaatccgcaatgcgaaaccggagaggtcaagtataaacgtcctcgtccgacgccaagcgcctcttcgccaacgcgcaccacgtatggaactgagaggcaacgatgagggcaaaaaaacatcgacaaaaccgagactatcatgcaagagcacggtatggaaccggaccgaggttaccgaacgttacaactcaaaaaacttactttaaggatatacccgcgcctaacacagacggtattgcatctctcaacaccttacatc

SEQ ID NO: 27275 - DNA, 310 bp, Glycine max
  Clone ID: LIB3108-034-QI-K1-A12
tggcttggaacctttgggctgatttatgtgcttgggtacggagagatccccgaagactatacctggccccccgaggggtcccgacgacccaccccgcaagaaagaagggcggagaaccaccgcgcacccggagcccgaactcccttccgctaacgaacgtacgatctccagtctcgccctccttgcctcaaccgaacgccgatatctccgacaggaatagagaacaaagccgaccctagcccagcccccatatcgtaaaaaaaaaataaaagaacatacctacggtgaataacacagactagatcctaag

SEQ ID NO: 27276 - DNA, 371 bp, Glycine max
  Clone ID: LIB3108-034-QI-K1-A2
gaaaaacgtgatcaaagctgtgaagaaactcttgttgcggtccaaaacgaaaaggaagaaagggacccatggccatgagcatgctcctcactattgctgcagctgctattgttcctcatccatccaaccatcagctccacccttaccttcatcctcatgccttgattctgaatacagcaactatggaacattcttaccaaccccggagccggagccggagtcggaaccgcaaccacaagagattgccagcctaaactcatcggatcagcaatatatggcatcaggttcggaacctgtttatggcattccagtcccggtcattcatgcatgtcgaacagaaagatcatctggccaacttggatgtcttttta

SEQ ID NO: 27277 - DNA, 247 bp, Glycine max
  Clone ID: LIB3108-034-QI-K1-A4
aacacgcatacacaaacacttcgccaacacttacaccaccaccacccctcctactcaaacgggcacattcaaaagacaaacggccccaccacacatcaatcactacctacgcaagaccgctcacgccagcaaacgtcgaactaacatgcacctcaccgtaaacactactcctcacaccacttattatacccctaacccaaccaaaaacctgcaaccatcctccgagcacattccatcatacctaacc

SEQ ID NO: 27278 - DNA, 333 bp, Glycine max
  Clone ID: LIB3108-034-QI-K1-A5
ctgaaggtggccagcctggccaaatataatttgtttgagcattttatttgcatccccattgtgacctgctatgtgagtttttttgttcatgttatttgggccattgtggctgatgaagcatatttttgtgagccgaatttgcaggatacttcggctttattaattattactttattaggaataggaagcttttagccttcagttacttggaagcagcattcaatcagaacctttccacttcatgctatagagcaagaagccaggtttttaagagcatagaagtcaaattacacttattaacaaatatatagaatatgctcaaagttgtaattt

SEQ ID NO: 27279 - DNA, 387 bp, Glycine max
  Clone ID: LIB3108-034-QI-K1-A6
caaagaaaaaaaaaaacccttagccaacacttctcatcatggccacctctgctattcagcaaggagcattcactggtcaaactgctctgaagcagctcaatgagttcgtccgcaagaccggtggcgccggcaaaggtcgcactaacatgcgccgcaccgtcaagagtgctcctcagagcatttggtatggccctgaccgtcccaagtacttgggtccattctcggagcagattccatcatacctgaccggagaattccctggtgactacggatgggacactgctggattatcagctgacccggaaaccttcgccaggaaccgggagctggaagtgattcacagcagaatggcaatgcttggtgcccttggctgcaccttcccagaga

SEQ ID NO: 27280 - DNA, 207 bp, Glycine max
  Clone ID: LIB3108-034-QI-K1-A8
aaaaaaaaaaagaaaaaattaaaaaaaaaaatataaaaacaaaaggacggacgatctaaagagaccaatttaaaggacgcgtgcaaccggccggatggcttagagatccaggcatccaaacgcaagcctgcggccgcctatctacaacgtcgggacagctaaaaccatgcagtggccaacttaatcaccttgaggacagggaaaacc

SEQ ID NO: 27281 - DNA, 406 bp, Glycine max
  unsure at all n locations
  Clone ID: LIB3108-034-QI-K1-A9
tggcttggaacctttgggctgatttatgtgcttggcttcttagcccctgccagagatatcgcgcttcgcccctctcgaactcaatatagatttgaccgtcatgaacggtacttaataggggctaaggcggaacctaatagccgtcggtcgtcgaataagaagtgtaaagaaccgctaacgtcgtaaaaaacgaaaaaccggtcagatcgaagtaagttaaagaagaggtcgaaaaggaaaccgttgagcacagggtcaagccggagcatgagccctaaaagaaagcgctatagagcagcggagacctcggcgtcaacgcgaagagatccgagtaagagatagaagaaaagacctactatttgaaaatcgangtcgagaggacactangggacgccgctcntacgtc

SEQ ID NO: 27282 - DNA, 356 bp, Glycine max
  Clone ID: LIB3108-034-QI-K1-B1
gggctacccgctgagattaagcgtatcaataagcggcggaaatgagactaacaaggattaggttagtaacggcgagcgaaccgggaaaagcccaccatgaacatcggtcgacctaggcgtacgaattgtagtccggataagcgtgctcagtggaggaccgctcccaagtgccatggaagggggccccagagagggtgagagccccgtcatgcccggaccctgatgtaccacgaggcgctgacagcgagtcgaattgtttgcgaatgcaacccgcatcaggcggtaaattacgtgcaaggcttaatgctggtgatcgacgaggatgaagatgagggtatcgtccatattgatcagtg

SEQ ID NO: 27283 - DNA, 374 bp, Glycine max
  Clone ID: LIB3108-034-QI-K1-B10
ggttcgaacctttgggctgatttatgtgcttggcgacatatactatacccctctaaagcaacccaccaaccaacaaacaaacggtggtggtggtgcgtagcgatcgcgtcatctttattcacgaccttgattgttattaatgccatttgtcgtctcgtccagttcctctcgttcatcagtcgtattaatatctaaattatcccgtctccactccgttccaattatcctctagtgccttgaatactcctctcgacctagattacagtcctcctagacgaactacctactgcatacgttaacgacgtagccatagacccgaaagctaaacgttacgtctccgaaaataaccctatagcatccccccacggctgcgg

SEQ ID NO: 27284 - DNA, 448 bp, Glycine max
  Clone ID: LIB3108-034-QI-K1-B12
gttggaacctttgggctgatttatgtgcttggttaaagagagcgagcgcgcagggccttacaccttaactggtagaaactggcactggaaggaatgagaggcggtggtaggtgactatagttacggatatgcctatggcgaccctaggaataaggctcggagcacgagtggcggtttccatcgctggataaagtatcggacgtgtactattgctaccgttacgcctggtgccgcatctactcgtacgtttactgtcacgaaacgtgtcgcatctgagtaatgatcataccatttcgcctgctttaccttcctctaatcgcggcgtaagaatcccggaatcaaagatcacaacgactacgacttacgacctactaaccgtactatcggcgcctatactacgctaagtaatacccacccgccaaacgtcgagaacacactagtcccaaag

SEQ ID NO: 27285 - DNA, 156 bp, Glycine max
  Clone ID: LIB3108-034-QI-K1-B2
gccacgcgtgcgctgacacctacaccatcgccaggcgccagcttaagaggatggcttagcggggggcaacctctgtgatcttcacaccttcatgcactggctcttgctcatgaccattgtatatgctgccgactgcttgatagcatgaccctaagc

SEQ ID NO: 27286 - DNA, 419 bp, Glycine max
  Clone ID: LIB3108-034-QI-K1-B3
cataaataaaagtaatgagtgtttgagaaagagaaagagaaaggaacacactaagcagatgtggatgggatgcaaatagctctacctattgttggagttattgcggctgcagctgcgaccttctatgcagtaagctttgctgaacttagagagaaatcgtttagagatttggaagaatctgaatatgaagatggcgtttataggccatcccctagctcccgagagaggcgtgccagaagacaagctaacacaaataacaaaagatgaatgacttcattcaatcatctatgcttttaccaaaggtgtggtgtggtggaattgcttccacgggaccgattttctatcatcattgtttaattttaaaaagtttccaaatgagatatacttgtctatttagtttgggtggctttcatattctt

SEQ ID NO: 27287 - DNA, 458 bp, Glycine max
  Clone ID: LIB3108-034-QI-K1-B5
gcgaccacgctgtccattctttgccaccctcaatctctgtcctttggcgacctccatccagccatgaacttctccgacaacctccttcgacattggagtaacataataagatggaccagcaaaaccaaaataacactccagatggttcaggagaggtgcctttgaagcgtaaacgtggtcgtccacggaaatacccaaagccagattcagaggagagttcctatatcctagttagtcaaaatagaaggcagaatcctgttcgtgctgaacaagctccagtacctcctggatttgaaggggttaatggaaatcaacagcttcaaaggggtcaagagaatcattcaaataatgcaatggtgggccagctagtttccggtgtaattgaggctgcatttgatgcaggatatttgcttagtgttagagttggtgattctaatactattttgagggggctaatc

SEQ ID NO: 27288 - DNA, 452 bp, Glycine max
  unsure at all n locations
  Clone ID: LIB3108-034-QI-K1-B6
gtttgttgtgagctataagctagtttatcgtgaggagaatatgaagttgtttgttttcttggttgctgcagtagttttggtagcatggccatgccatggcgcaggctaccaaaggttccctctccgaatgaaaactggctatggtgagcgttcttcggaggtaaaatgcgcaagttttaggcttgctgtggaagcacacaacatccgagcctttaaaaccattcctgaagagtgcgttgaaccaacaaaggactacattaatggcgaacaatttagatcagactctaaaacaggtaaccaacaagctttcttttatgctagtgaacgcgaagtccatcacaacgacatatttatattcggcatagataacaccgtactctctaatatcccatactatgaaaaacatggatatggngtggaggaaattaatgaaaccttatatgatgaatggg

SEQ ID NO: 27289 - DNA, 459 bp, Glycine max
  unsure at all n locations
  Clone ID: LIB3108-034-QI-K1-B7
ccctctcgttcgtgccgatcactaggtcacacttcatcaatggcgggtagaggcaaaaccctaggatccagcgccgctaagaaggccacctcaaggagcagcaaagccggcctccaattccccgtcggtcgtatcgccaggttcctcaaggccggaaagtacgccgagcgcgtcggcgccggagcccccgtctacctcgccgccgttctcgaatatctcgctgctgaagttttggaattggctggaaacgctgcgagagataacaagaagactcgaattgttccacgccacatccaattggcggtgaggaacgacgaagagttgagcaagcttctaggagatgttaccattgctaacggcggtgttatgcctaacattcacaaccttcttctttccaagaaggctgggggctcatccaagggtgctgctgctgacgatgactcttanatagggattcac

SEQ ID NO: 27290 - DNA, 282 bp, Glycine max
  Clone ID: LIB3108-034-QI-K1-B8
cccacgcgttcgacttgaacctgaccaaaggttctctcttatccattttattactatcgggggattgtttcacactgcacatatcgcagacttgcacgcgctctgttacagcctgaactgagaatctcattgaggctctagaaagtggtgatcagtatgtcaaagaatccaatagattgctttgatcttctaattggaaagatgctagctggactagtagagactgagtcgtttgcctaggcagcccctatgacaggtgtcaactttatggctctcttgact

SEQ ID NO: 27291 - DNA, 453 bp, Glycine max
  Clone ID: LIB3108-034-QI-K1-B9
tggcttggaacctttgggctgatttatgtgcttgtataactctaaatattctaatcctaccctctcgtcttaaagctctaactccccacttaaagatctaaacgggtacggttataactataacgggaggaaattataaccttcttactatcttatgttatcataatatttataaggcgccttcccctcgtaatcatacctctccgggcgtagtcctcagtcgtactccttctatttctctctcgtgttctacctttctctctcgtggtcctcctcctacttcctcctaggctcccatgaccgtgggtgtggctcttgggcgtgttgttgcggggatcaataggcggcatctcgtatatacggcggttatcgcctcaatggtcactccctaaggcctcgccctggcggcggcgcccatgaggattggtgacccctcgggctaaccgaagctcc

SEQ ID NO: 27292 - DNA, 311 bp, Glycine max
  Clone ID: LIB3108-034-QI-K1-C1
ccatactcaaacacgcatatactgtgcgaagagaatggaggatggaagtgagaactggaattgtcaagggcaacaagaagctgaatgcttcatccatgtgtgtgagaggcgtctataacatgttgatggagagagtcaacagtagcctaaacaagaaaccgttcgctgctctctgtcgcgtagatcccaccgagtacctattggttgggactacctcagaagctactgatgctgtgtaaactgctggtaactcctatagctataactggtacactcgcatcgttggattacctgatgcatagacggctatt

SEQ ID NO: 27293 - DNA, 184 bp, Glycine max
  Clone ID: LIB3108-034-QI-K1-C10
aaaccagaccacacacccgcaaaccacctggcctagtccgcccaataaaacaaacacaggccaaatgcgacccccaaggacaaaaaaaaaaaaaaaaaccaaaaaaccaaacaaaaaaaaaaaaaagacacaaaaacacaaaactcccatcgaaacataacggaacaagaagccgcacacaacg

SEQ ID NO: 27294 - DNA, 450 bp, Glycine max
  Clone ID: LIB3108-034-QI-K1-C11
gcttggaacctttgggctgatttatgtgcttgaccctctaaacactaagccacgatgagcccgtatcccgtagagacggaaaagaaagagagaaagactacggcggtcgcggacgagagttaagagagtacgtacgtatctcttcggcgtactattaactccacccttgaaattaataagtccgcctcgtcccacgctaggttattcctcgtccctcatcttccggacgttgtagggcacaatccccttcttgacgccgccgacgtcacggaaaagcatagcacgtatccggtcaacctagctacggaaagagtcgaagtcgcccgtagagatccgaatgtcatcaacactaacacggagagagcggccggcgcaggatacgttaagaacgcaacacgtagcgtcgctaagaaatcagaggtcgatattccggctacgggaatctacggt

SEQ ID NO: 27295 - DNA, 342 bp, Glycine max
  Clone ID: LIB3108-034-QI-K1-C12
tggcttggaacctttgggctgatttatgtgcttgtcaagaaggagaagtaaacggtccttctaacgactctccttttagtcgccattatcgctaattgcgttggcgttggtacggccgtcttacctatcggttctaagcttacggtcggtccttttattagaaagattaataacgataccattcttaccgtcagtaatggcggaagagcgtaacgtacgtaggcgcggttattagccggtaagaagaagcccgagatctcccttcattcgttagattccgacgacgtataaccggtaaaagaagcagaacattcctccaagaagggacggaccttccgtccg

SEQ ID NO: 27296 - DNA, 445 bp, Glycine max
  Clone ID: LIB3108-034-QI-K1-C3
aaagaacggcatcagcaacaataaggaatgcagttgtcacgggagcaaacaaagggataggagttggaatatgcaagcaattggtatctaatggcatcacagtggtgctaacagcaagggatgagaaaaggggtcttgaagctgttgaaaagctgaaagagtttggtgtgtctgatcaagtggtgtttcatcagcttgatgtgactgaccctaaaagcattgaatcccttgcaaatttcatcaaaacccagtttggaaaacttgatatcttggcgaataatgcaggaattcatggagcatatgttgaccgagatgctttagctgctgctggggaaaaagttgccaatgttgattgcagaaaaatctcaactgaaaattttgaagctgccgaagcaggcattagaacacattactatggagtcaaattaatgtgtgaagcacttat

SEQ ID NO: 27297 - DNA, 100 bp, Glycine max
  Clone ID: LIB3108-034-QI-K1-C4
tttaatcgtctcgtctctattctctacgcgaatattggatttgaggaattcaatgtacaagctgaggttgaacctaatactatatttatttcttcctatc

SEQ ID NO: 27298 - DNA, 377 bp, Glycine max
  Clone ID: LIB3108-034-QI-K1-C5
cgaagcgaaatttccacctgcatcatcttcaaacctgcgcttgttttgaaccgatttgcgcggctttgttagtgaagcacatcgagtgcatactgtcgaacaggcatggcaagcctgttgacaacatcaagcatcacctattctcctctcaacaatggttccaaggatttcagaaaggcagggaattcttctaaaggaaggtgttgcataaaagcaatggcgattgagaaatccttggaggaattgtacaatgtgaacgtggacagaaaagcgtctactgagaaactagctgagcttggaatttcaaaatggacggtgtggaagactgagaaaagctagttgccatgagactggcacgtagaccaactggtgtacat

SEQ ID NO: 27299 - DNA, 215 bp, Glycine max
  Clone ID: LIB3108-034-QI-K1-C6
tccacgcgtccggcttccatactcaactacgtatcattgtctagatgaagtaatagatcgcgctgcgtttaactcgtaatctcatcaatcacttgctgaaaggaagcatcctcttcccaaatgagaccggccttaatggtagacccaagagtatggacctaatcctactactagtgtgcaatacaactgtgaacctactataatttaacctgtcc

SEQ ID NO: 27300 - DNA, 422 bp, Glycine max
  Clone ID: LIB3108-034-QI-K1-C7
tctggtcgttttggatcatctggtggctatggttcacgtcaatcaggaagtacatcagggggatcatccagtgggtctaggtttagtcgctcggatgattttgggggatttggtggttcacatcgctcaggtggttctggagattttggctcacgtgagcctagtggctttggtggttctcgtggtagtaatcagaacaatagaagaccttcttaacttaattaacatatatattaaaaaatgcaccatccttatttatggtggcttagttcttgtagagtttgcttctgtcatttcctgtaaaacttatcggtctcttggctaatccttagattactaaagattttagaagaccgaaattctacagccattggattgttctcgtctgttctgggactttttggcccagtctcagctgtgta

SEQ ID NO: 27301 - DNA, 377 bp, Glycine max
  Clone ID: LIB3108-034-QI-K1-C8
gccacgcgtacgatgttcgcacagtgcgcgagtatgcgaatggagcaagctgagaccaatggggtgctcaggaccctctgctgtgcgtgtctcggcataccgagcacccgtctggttttgcatacgctctatgtgacttcaccttaaccatctctatacgcgcccttatttctagctcacgcgcccttatttctcccttactgcggccttatcagtctcgtcgtttcttcgacgtcaaaggctacgccagggagctttcgatggtgggcaacaccgtaccgtatttggaatgcaaaggctgcgcttgaccagcagtttctgaacgagaaactatttgattacattgggaagaaataaggcgtgctcttcgtctaccc

SEQ ID NO: 27302 - DNA, 454 bp, Glycine max
  unsure at all n locations
  Clone ID: LIB3108-034-QI-K1-C9
ggcttggaacctttgggctgatttatgtgcttgtggatgtgcgggggaagaacactcgagagcgagacatagaaaagaaaaaggaaatttcagtcggacaggctaaatactactacgctggatgaagagtattaccctgagcttaaggtagatgttggcgttcttaaaattcatttctagtaagttggcattacctgtaagaatggtcatactgctactaaaggatgttttcgtaaggccgcggaagccctgatccttaaaatcggaaagtatggctatgttaagcgttatcccgccggaaccgacacccctatcgttaagaaatccgaggacaccgcgtttctcctctataatcgcgacgccttctacgcgaactgcatcgaccattagtctaccgacaccgtcgaggacggacccccgagctcgtccatcgaanacgggaatattaaagacg

SEQ ID NO: 27303 - DNA, 365 bp, Glycine max
  Clone ID: LIB3108-034-QI-K1-D1
tctgggcgttctgcctcacctgccggctcttttacacgtcactcaccgaatacaatcatggggagcactctaagggtataggtatactacctcggttgatccagcctgaagcgctaatgcacatcgcttagggagtccctgagattctgtctcccgcgagcccgctcacactggagggctgcttcttaacaaatagtccactatacagacctgtgcaacggcatgaacatgtaggtacgaagatgcaccctccatagttatcgtgacttagttctagtggagtgagctgttgtcatcacctgtaacactgatcagtttcttgtctaatccgaggactactcacgatattgcatcactgctttgca

SEQ ID NO: 27304 - DNA, 390 bp, Glycine max
  Clone ID: LIB3108-034-QI-K1-D10
tggcttggaacctttgggctgatttatgtgcttgagagaaataaagccagaagcaaagaagactacggtcctctcagtaattccggtcgtcgccgaattagtcatgactaacggttccgtcggaagcctttctctcggaatcaagtctctccctaagtttctctgttatagcgctaaacttaagaatcctaggagcggcgttgcggcagtaaagcacggcgataagagcgcgcatcccgacccggaggactcgggtaatatcatagggtagcgggatccgcacggtctagacgtattcctatttcataatttctcctagagtaagcctccttagatacccgtcgtctttcctataaagaagggaccggcatctaaggcctcgacaccggg

SEQ ID NO: 27305 - DNA, 286 bp, Glycine max
  Clone ID: LIB3108-034-QI-K1-D11
aacctttgggctgatttatgtgcttgactcgactctaaccggcgttccgtactatctcactcataagaggggagaatcctcgtaccgaacatgcgaattagtcgcgtaatcgacaattaccggataaagttagctgcaacaggccagaaagcgacccagtaaataatatcgagtacgaattcataattttcgaaatcatagtacacgagaagggtagcagtacgtcttaacagggctcgaggctacgcttcgacatcttaaggcctcagactgtgggtcgaaaaat

SEQ ID NO: 27306 - DNA, 402 bp, Glycine max
  Clone ID: LIB3108-034-QI-K1-D12
tggcttggaacctttgggctgatttatgtgcttgtgtccaagactatttaagagagaattcaagatatataatataatatatagagagagcccgaggaagaaactactacggtcctagtagtactcgggcccgcgtcgctctccaacgccgtagtccttattataaatctaagggcggctccgcctaatataaagaattatgtcctcaggtcctccgcgagggtcctagatgagttcgtagtggtggtatttgtaattattattttcttagtcgaagtcgaagtaaagttaaaattattattcaccggttttaagaaaagcgtcaaagcgaaaacctccaagaaggaacttcatcggcattaaagtatccgcctaacggccgtcggcgactaagattttaat

SEQ ID NO: 27307 - DNA, 452 bp, Glycine max
  Clone ID: LIB3108-034-QI-K1-D2
gaaatcacgaccatgtcgtcgcagaatcagaataggtcgttggagcaagctggaccctacggctccggtggacaggtgggagtgagagtagtgaattggagtggttccgataggctttgcataagccctaagcgagatcacaagcccgaaaactatgacgaccttcaattcgagttcaatcctaatatcttcgcctctctcgagcactatttgcctcctcatatgctcaacctctcacgtgatgttaagcttcactacatcaggaacattcttcttcgctatttgcctgagaatgaccgcatttggattcaaaagctgaaggaatacaggctaaagatcatattgaattatccaccgctgcataaggagatatttactatggatgctgagagctttttcgtaccatcatttctcagagcaataaaagaaaacacagaagcgagttttagaag

SEQ ID NO: 27308 - DNA, 427 bp, Glycine max
  Clone ID: LIB3108-034-QI-K1-D3
accacgcgtccgaccacgcgtccgaccactcttacaaaaatcttaacatttacaatgaagcgatccactctattcctattcctattccacctggctcatgctgctctgactgacgaagctactttcattagagatggcctcaaatcctattcccagcttgatctccctcactcggtttttggttctgaaagtgtagccttcgattgccatggtaaaggaccatatgttggcgcgtctgatggtggaatcctcaagtggcaccagacaaagagagagtggattgactttgcatttacctcgccacacaggaaccagaaattacgtgatgggttaacaaatgacaagatggaatcaatgtgtggaagaaccttgggcctcaaatttaacactttaacttgtgaactgtacattgtcgatgcatactttg

SEQ ID NO: 27309 - DNA, 394 bp, Glycine max
  Clone ID: LIB3108-034-QI-K1-D4
gttgagaactaagaggaaggaaatggcttcctcaatgatctcctccccagctgttaccacgggcaaccgtgccggtgccggcatggttgctccattcaccggcctcaaatccatggctggcttccccacgaggaagaccaacaatgacattacctacattgctagcaacggtggaagagtacaatgcatgcaggtgtggccaccaattggcaagaagaagttcgagactctttcctacttgccagacctggatgatgcccaattggcaaaggaagtcgaataccttctaaggaaaggatggattccttgcttggaattcgagttggagcacggtttcatgtaccgtgagcacaacatgtcacctggatactatgatggacgctactggaccatg

SEQ ID NO: 27310 - DNA, 458 bp, Glycine max
  Clone ID: LIB3108-034-QI-K1-D5
cccacgcgtccgcccacgcgtccgcccacgtttccgaatttcttcacatttacaatgaagcgatccactctattcctattcctattccacctggctcatgctgctctgtctgacgaagctactttcattagagatggcctcaaatcctattcccagcttgatctccctcactcggtttttggttctgaaagtgtagccttcgattgccatggtaaaggaccatatgttggcgtgtctgatggtagaatcctcaagtggcacgagacaaagagagagtggattgactttgcagttacctcgccacacaggaacaagaaattatgtgatgggttaacaaatgacaagatggaatcaatgtgtggaagacccttgggcctcaaattcaacactttaacttgtgaactgtacattgccgatgcatactttgggcttctggtggtaggaccaggtggtggtgt

SEQ ID NO: 27311 - DNA, 308 bp, Glycine max
  Clone ID: LIB3108-034-QI-K1-D6
gatgagaactaagaggaaggaaatggcttcctcaatgatctcgctgcccagctgatactagcggtaaccgtgccagttccggcttggatgctcgatttgccgtgcttaaatccatggctggcttccccactagcgagaccaacaaggacattactttgattgctatgcaattgtggaagagtactatgcatgcaagtgttgctcaccaattgtcatgatgaagttctagactctttgctacttgccagacctcgatgatgcccaattggcataggaagttcgataccttctaaagaatggatggattc

SEQ ID NO: 27312 - DNA, 382 bp, Glycine max
  Clone ID: LIB3108-034-QI-K1-D7
aaaaaaaaaaaaaaaaaaaaaaaaaaaaaaatataaaaaaaaaaaaaaaaaaaaaaaaaaagggaaaaattaaaaaaaaaaaaaaaaaaatataaaaaaaaaaaaaatataaaaaaaaaaaaaaaaaaaaaaaaagggccgccctttttaaagtttcaaagtttccttccccttccttccaactttaaattttttttttggggcccctaaatttaatttaattgcccgttttttaaaaccctcttacttggaaaacccttgcctttcccaaatttaatccctttgataaaaatcccctttttcccacttgtctaattaccaaaaggccccatcccgattccctttccaaaaatttgcccaccctaattgtcaattgaaaccc

SEQ ID NO: 27313 - DNA, 388 bp, Glycine max
  Clone ID: LIB3108-034-QI-K1-D8
gttgagctcttataaggagggtatgcccacatcatggatcgcctgctcagctggcaccaggggcaaccgtgccggagccagactggcttcttgatttacctgccttaaatccatggctggcttcctcacgaggaagaccaacaatgacattacctacattgctagcaactggataagagtacaagaccatcataggtgtatctttattgtcccctgaaaattgaagggcatgcgatactttctatacaactactgttcgaatgcatctttggctgtagcatacgttttcttgatgggacatacaacatggatagcataaccttcttttagccttttgaagaatatacttcgcatcaatggtcgttgatcgttattggggaaaaactat

SEQ ID NO: 27314 - DNA, 419 bp, Glycine max
  Clone ID: LIB3108-034-QI-K1-D9
ggcttggaacctttgggctgatttatgtgcttcgttatgtgcttgtatgtacagcacacacacacaacgccagcatagtagaaatctgccgacgccccccctccgccacaccacacttttaatagaattttcctaccgtcagactcccccaatcacacaacgttatcaccgactttccgaccaaaaaaaaaaaaaaaaaaagggtggttgtctcagaggacttaagtccatgcatgtgcgtacgtgatgctacagtctcctcacagcgctattcaaacctaacctatcggttgctgccccataatgctgcgatcgggaaaatttcggtgccatttaatccaactgttccgtagtatactttttccctgttagtcggtgcaacagtgaagaggtttgtattgactgtttcctttaatagc

SEQ ID NO: 27315 - DNA, 341 bp, Glycine max
  Clone ID: LIB3108-034-QI-K1-E1
gacactcgtaacactgattcaagaatgagctttgcacagctctttgggcgttgtagactggtcttgccattacagaccagctagtgactcaagtactaacctttcatttgacgctagcttacaacaaacatcatcgggcctatatagctttagtcatggccaagactatcgaccaacgcttttgggtttcttcttcgcttctactttaagagtcctacctgctattatctcactgccactgtcgttactgacatcgtgtctcattctaaactcactgataccggtcactaccatcttgaggctaaaagaggaaggtatggcgatcccgagcttttaaacta

SEQ ID NO: 27316 - DNA, 457 bp, Glycine max
  Clone ID: LIB3108-034-QI-K1-E10
tttgggctgatttatgtgcttgaataggctcgcgacgtttccagacgcctcgccttgtatgtgtgtcatatcgacgcacctagtgagctcacagttccggttgataggcttgggcaactcccgaaaccctactgcgacggggacagactaccgtaaccgccggctcctaatgaggaaccttcagcaagtgtgagctactagtctgtgccgatcatgctttcgtttcccgcatatattgcttgctgtcttcattgaccgaacggcttggcgaagcgcctggaccgtcgtgattccagtggcctgtccctttcgatgccgcgagaagcttatcgaattccactacccaaaggaagtagaagcctccccgaaggaagtcacccaagaatagaccgaatctcccccatcataagaataggccgaaaaaaaccggacaactacccaacaattcccccacccc

SEQ ID NO: 27317 - DNA, 473 bp, Glycine max
  Clone ID: LIB3108-034-QI-K1-E11
ggcttggaacctttgggctgatttatgtgcttggcgttagacaaacttctttagtgccttctttgtagtacgctcgctagcttcgactgcgccggagcgaggggttggctcttagttcccaacgtttcagtagtcaaccccgagaatttcaacgtcaggaattccctaattttgttcttagcaaccagaaagtcgcacttaaaactcgcgatattagacctcgtaacatcggtgttaaaactcgtagttacagtcgtatccagcctcctccccgaatagttattcctagtatgagaaatcacgacattaaagctaaccaaagcgagcttagcaacgtttaaactaaatttcgagaaaaacgataaggagaacctcgcgagtattagagcggaactctccattacataggaagacgcgaaagaggacgaaaccgaagacgaggaaagctccgcgacctatttacacgaatgttc

SEQ ID NO: 27318 - DNA, 418 bp, Glycine max
  Clone ID: LIB3108-034-QI-K1-E12
cttggaaccttggctgatttagtgcttgtcggatgtcacgactcgaaggtaggatccgaagaatgttccggaaaagaccacccggaaagaaccacgaaggacggtcctaccgacgcgacgtagctaggaagccccgaccattgcgcgatcccagaaagcccgacggactgaccagacataaatacgtacgaagtacgttcctagaccgacaaagaacgtagggcatctatagcctacggcctcctagatttagccactttcgccggagacgtactcgagcccgttaagaccacattaaattataagtcaaccactacagaaggagtcgactacctacatatcaactactaagacgaaccagttctcggcgccgcgaattgtacaaaagaaattccggcttaccccctcaacgacgcgc

SEQ ID NO: 27319 - DNA, 408 bp, Glycine max
  Clone ID: LIB3108-034-QI-K1-E2
aagccttcgctggagctgatataaggagtgtatgcacagaagctggtatgtatgctatccgtgcccggaggaagactgtaacagagaaagacttccttgatgcagtaaataaagtcatcaaaggataccagaagttcagtgcaactcccaagtatatggtctacaactgagttattctttcatcttttcccgagaccatagtagttttatctttattttcccctgaaaattgaagggcatgcgattctttctatttaactcctgtttgaatgcatctttgtctgtagcaaacgtttccttcatgttacatccaaaattgagagcaaaaccttcttttagccttttgaagaatatacttgttatcaatggtagttgttcgttattggggaaaaactatcctcgtattgc

SEQ ID NO: 27320 - DNA, 455 bp, Glycine max
  Clone ID: LIB3108-034-QI-K1-E3
atttaactcattccagtggcaggagtggccacggcgctgtgtggcggtgacaaccatgggggactcatctgaagaccttgaccagcttctcgatcgtgctttgcatgattctgagtccttcaaccttaatcctcccgctgccaggggtgaagcaactgccaatagcaagacggagagtccttctttgccgtcggaggttcaaggatagggcatgggtctacccgatgtgcgaacgaagaaggacgggaaacactaggcttcccaaaaccagctccctgtatgaggcgctcaacaagctcagggagcaggccagagatgctgtgaaggcgctggtgtctatatgcctacccactgacgacgatctacgtaaagatgccttgaccgacgattgggtcatgcaatttgagcagcttgctggctctcatgacatggaatcctttgaggagaccatgatg

SEQ ID NO: 27321 - DNA, 403 bp, Glycine max
  Clone ID: LIB3108-034-QI-K1-E4
agccttccgttgaaccttccgtgaaccatcaaagcccactagtattgattgatacacaaccactgacgggagcatactgaggacagagaagaatgtccactatcacattgcctaaaaccagaagactatgcctcacataagatctcagcactatctctacaccacctacaacagacccataatgactttattgataacagctgagctgcattcaactgtataatgaaaatacgtggtaggtattgtatatggtgctaaactaacatcttcttggctgagttctgaagaatataccatccatgcatgtctttggcatagtaatggtctgactttggatatggatattaccaaaacttattatggacacaaggtgaacttgatgcacgcatgacacatgcaatga

SEQ ID NO: 27322 - DNA, 463 bp, Glycine max
  Clone ID: LIB3108-034-QI-K1-E5
cccacgcgtccgattgttattagaatgtgcaaagcacaatccgaaggtggatggagacactgaaaacaatgttgcggagttactgtcagaagaactaactctacgggaaactgaagctttgaaaaatcagcatcgtgctgacatggctctgctggagtccaagaagattgcatcccagtatcaaaaagaagcagacaagtgtaattcaggaatggaaacatgcgaggaagccagggaaaaggccgagatggcactagtggcacaaaagaaacctaatggattgggggaactaagagcttgtcagaaaggatggaatgaagggcttgccaaatctaaaaaacagtctaaagggaaagtacagactgcttagacttggtgtgacctccatctagttattgcatagtagtttcagcgaaatgatatttagtaattagtactggtagtagcaaatcatcacatatag

SEQ ID NO: 27323 - DNA, 251 bp, Glycine max
  Clone ID: LIB3108-034-QI-K1-E6
ctgaagcttacgtggaccatcgaagcacagtagcagtgatggatggactaccgccgcgggggaagagctgtgcagagaagagacgtccattgaatgacatgccatgaaagccataggacggatgacctctacatatggagcgccactacccaagtataggcgctacaaacgagggacagcatcggacatgagagcgaccacggacagaccatctacacgctgcgatgagacacgaatggtcggcgaatatg

SEQ ID NO: 27324 - DNA, 408 bp, Glycine max
  Clone ID: LIB3108-034-QI-K1-E7
ggggacaaataatcacctagagctgttggataagatgaatgtaagagtggcagaagagtgggaagggttcggtgacttggcttcagggttgagggtttttgtggagcagttgaaatgcaagagtggtagctttaacgagtatgttgagcagattgataacattgagaagcaagtaactgagtttgaagctgtggtctctatgcttgataagtacgttgtattgttggaatcaagagtgcaatctgtgtaccaaaacaaaatccatcttcccattccacaatgatgtaaaaattttacttttcatgatcaacatttaccttgttttctagtttcaattgaaagaattgatagatttatcatttaccttgcttcctagttccaattgaatgaattgatagatttaccatt

SEQ ID NO: 27325 - DNA, 423 bp, Glycine max
  Clone ID: LIB3108-034-QI-K1-E8
ctcacgcgtgcgcccacgcgtccgattcactctcagacattagaatggctcgccaatcaagcactaaatcagttcacgatttcacagttaaagatgccaggggaaatgatggtaatctcgccgattacaaaggaaagggccttctccttgtcaatgttgcctcacaatgcggcttgactaattcaaactacacagagcttaatcaattgtatgagaaatacaaagggaaaggacttgaaattctggcattcccgtgcaatcagtttggggctcaggagccaggaactaatgaagagattgtggagtttgcttgtactcgcttcaaagctgagtttcccattttcgacaaggtggatgtgaatggtgacaatgctggtacactgtacaagtttctgaaattaagccaaagtggactctttgggg

SEQ ID NO: 27326 - DNA, 401 bp, Glycine max
  Clone ID: LIB3108-034-QI-K1-E9
tggttggaacctttgggctgatttatgtgcttgagaaaatttcagtttaattggactcctatgatcaggagacggtaaagctgaagaattatattgtctataattagcttcataaggtttacaagaacggtactaaaaagttaaagaggtactgttatatccttattaaagggacggacttaaagccctcgaggaattagaggcatgtgaggaagtacaataagaagagtggcgaaatagttattgaagaagagcaaagcgttatctctaaacgggttcaccaggacccgacccgccacccaagttttacacgccccgcgctgaactcactcccagcagcacagctacccccacgagccaatccaacttagagagaacgtagcatccatctccacagtact

SEQ ID NO: 27327 - DNA, 460 bp, Glycine max
  Clone ID: LIB3108-034-QI-K1-F1
cccacgcgtccggctttcttagttcttactagtccaagtgaagaatgttgagagaggaaatgtcaaagttgaacaaagacagtcatggaggctgacacctgacagtgcgatgaaaaatagcatgagggattgacgtgccttcttcccgaatggttctctgactaaggagcagaagaaggttttgtgaattgtttgtaagcttagtgtgtttgctgccaagccaattggtccaaattatctgttttcatcatatatgtgtgtgtacctggcattttgctgaccattatgcgggcacattcgacacgtctcaagtttttgtgagctcctctactgaccagtatcaattctcatcctgatatagcatacttggatagtgaaacatacaatacaatagatacaatcaccctttaaacctatttatgaatattaattcaaatgaaaattctaaccctgctatatt

SEQ ID NO: 27328 - DNA, 292 bp, Glycine max
  Clone ID: LIB3108-034-QI-K1-F10
gcttgactgtatcttgtctcttgtatcttgtcaccctattccttctgatcgtattctacgtgtatgtgcccccggacttgaccgtaccgaactaaactcgacaattacctctaccgtttgctcgcaactacgctatgacagcacactaccctcgtcacctccggactacccgaaaccgtacgttcccaacaccacctcgcgctacagaaaaacatctccctaagcctcatttaccctatcaccatcaataacccgtccatacaaaagatccatcccccaccgtccgtaccgc

SEQ ID NO: 27329 - DNA, 438 bp, Glycine max
  Clone ID: LIB3108-034-QI-K1-F11
aacctttgggctgatttatgtgcttgtagcgacggcgaagttactagaagtagaaaagaacccggcctagcttataatactcgccggcgaacggatctatcggatccacaggtttccacctcgggggagtaagaaagtcgcacgccggtaactcgtacgctagcaccatcgaagtcgacacctgcagggcgcccgaagtacccggctaggccgagtcagcttagtcgttctccgacgaaagcgggtatcgtaaaggccccggtcccgcgtagcccggcctcagactgtgagtggttgtctcagaggacttaagtccatgcatgtgcgtacgtgatgctacagtctcctcacagcgctattcaaacctaacctatcggttgctgccccataatgctgcgatcgggaaaatttcggtgccatttaatccaactgttccgt

SEQ ID NO: 27330 - DNA, 424 bp, Glycine max
  Clone ID: LIB3108-034-QI-K1-F12
ggcttggaactttgggctgatttatgtgcttggcccggcggaaacctaccggtccgcggcaagaggttaaccacccaaacccgttcatatagggaccctcaacccaagacccccgcacatacctgcgcacgaacttcttccaccattagtagccgaagtaactcgtcccctccccctttacctccctcacaacaactcctgggaggccccgacggagacccaggcgggttcggacatagccggctgccccagactttgggcagaacacccataccaccacccacacacgaaacgcaaggatacttcgttacctaagacacgccgtaaccgcacgttccgaacgggtccccatacaaaaaaaaaaaacaacccaccaacaaaaaaaccaaaaacaaaacaaaaaaaaaaagggtggttttcccca

SEQ ID NO: 27331 - DNA, 441 bp, Glycine max
  Clone ID: LIB3108-034-QI-K1-F2
ctcgctctgtttctgtctctgtgtttgcggttgaggattccgaacgagcgaccttcttcggttctcgcaaagtttaagtcatcatgggtaaggaacagactcacatcaacattgtcgtcattggacatgtcgactctgggaagtcaactaccactggtcatttgatctacaagcttggaggtattgacaagcatgtgattgagaggttcgagaaggaggctgctgagatgaacaagaggtcattcaagtatgcctgggtgcttgacaagctcaaggctgagcgcgaaagaggaattaccattgatattgctttgtggaagtttgaaaccaccaagtactactgcacagtcatcgatgcccccggacatcgtgactttatcaagaacatgattactggtaccttccaagctgattgtgctggccttatcattgacttcacca

SEQ ID NO: 27332 - DNA, 445 bp, Glycine max
  unsure at all n locations
  Clone ID: LIB3108-034-QI-K1-F3
accacgcgtacgacatagcacatcgccaagtttaaccttgagttaaaaaacggcagcagctgcttccatggctctctcatccccatccttggctggcaaggccgtgaagctgggcccatcagccccagaagtgggaagggtgagcatgaggaagaccgtcaccaagcaggtctcctcaggaagcccatggtacggcccagaccgagtcaagtacttgggcccattctctggcgagcccccgtcctacctaaccggtgagttcccaggcgactacggctgggacactgctgggctttccgcagacccagaaaccttcgccaagaaccgtgaactcgaagtgatccactccaggtgggccatgctcggagccttgngctgcgtcttcccggagttgctgtcccgcaacggggtgaagttcggagaggccgtgtggttcaaggccggg

SEQ ID NO: 27333 - DNA, 457 bp, Glycine max
  Clone ID: LIB3108-034-QI-K1-F4
cccacgcgtccgcccacgcgtccgcggaaccggcgttggatttggtttcggcgtaggtttgcgtttcggtataggatggggtttcggaggtatgccattgaacttattgggtcttggtgcacgtggaggttgtggcgttggagtagggcttggttgggggtttggtactgcctttggtagcaagtatcgttcctcacgggtcacatttcaaggagtggattttgatagcaaggagaaagttaacagcacggagttgtcaaaacccaggaccgaagttggaggtgcacggtagcgtttgtactttgtaaattcctggttggcctatggagataaattgaatttgtaataacatgaagcctgtggagatagtacttgtgacttccgattattggcctttcaaatcgtagtagcactacagtgcttgttacagctctcatttcttggatactgcttgcac

SEQ ID NO: 27334 - DNA, 454 bp, Glycine max
  Clone ID: LIB3108-034-QI-K1-F5
aacactcataacacaaagcacaaagcaaagctcatccttgagttaaaaaatggcagcagctggttccatggctctctcatccccatccttggctggcaaggccgtgaagctgggcccatcagccccagaagtgggaagggtgagcatgaggaagaccgtcaccaagcaggtctcctcaggaagcccatggtacggcccagaccgagtcaagtacttgggcccattctctggcgagcccccgtcctacctaaccggtgagttcccaggcgactacggctgggacactgctgggctttccgcagacccagaaaccttcgccaagaaccgtgaactcgaagtgatccactccaggtgggccatgctcggagccttgggctgcgtcttcccggagttgctgtcccgcaacggtgtgaagttcggagaagccgtgtggttcaaggccgggtcccagatc

SEQ ID NO: 27335 - DNA, 421 bp, Glycine max
  Clone ID: LIB3108-034-QI-K1-F6
cccacgcgtccgcccacgcgtccgctctctttcaattccttcacactctcccctctccagggaccattactcccctcttcttccacttttgctcttcccaccacctctgcttcaagagcaaacgtgattctgcccccgaagcccttgaatggagttcgaatctcgacacccaaaaggaggactgagtccgtgattgtctccgccgccgcggaggacgcgagttcggctgtggagggtgggtcgccgccgcctcctgcggcggatagcgagaaagagagcggcgcctacgtggagaagcttacgttggaggcgaaggtgaaggagagagaggagcagaagctgaggatgaagctggcgaagaagataaagctgaagcggaaaaggcttcttcggaaacgcacgttgagaaagaagggtacat

SEQ ID NO: 27336 - DNA, 456 bp, Glycine max
  Clone ID: LIB3108-034-QI-K1-F7
cccacgcgtccgaaacccactaagatggctttctttgtatccttcctagtgctgcttcttggagcccttatcctcatgcctcaagggcttgctacttactacaaaccaattaagaagccaccagtgtacaagcctccagtgtacaagccaccagtgtacaaaccaccggtttataagccaaaaccaccggtttacaagccgaaaccaccggtttacaagccaccatataagaagccaccatacatgaaaccaccttatggaaagtaccctccagtagaggacaacacccatgcctaaagcaagcaatgaggtctattatctacttaataaataagaagaactgctttggggtttctaacattgtgattaccactttctaagcattgcatattcttgactcttgcatgcacttcaatccttcgtagcattaatgatgtggccaagtcatcatgagca

SEQ ID NO: 27337 - DNA, 428 bp, Glycine max
  Clone ID: LIB3108-034-QI-K1-F8
aataggctatgccattaacgctaacaacactttgaagattttggaacatttgatgcactggggttgtggtgctgtgcttgttagtgggaatgagcttaggttggctcttcgtgctggctttgatcccacgaggtgcatctttaatgggaatgggaaaatcttggaggatttggtcttggctgcccaagaaggtgtgtttgtcaacattgatagtgagtttgacttggaaaacattacagaggctgcaaaaagggctggaaagaaggtcaatgttttacttcggattaaccctgatgtggatccacaggttcatccttatgttgccactgggaataagaactctaaatttggcattagaaatgaaaagctgcagtggtttttaaatgcaatgaaagagctttctaatgagctcaaacttgtaggggccc

SEQ ID NO: 27338 - DNA, 276 bp, Glycine max
  Clone ID: LIB3108-034-QI-K1-F9
ggctcggaacctttgggctgatttatgtgcgtgtttatgtgcctgtttatgtgctcctgggtcctgatgctattacttctaatgcggcgacgaattttatttgtattggttctacttcgatgtcgtaggaaacgggtgttgatactgaagctactaatttgtgttccgttggtggtgaagatgcggtggattcgtgtgcctgtcttcctatgtcgaaaggtgctatggcgtttgaagattgtgtgttcctgacgactgatgaacacttgacctctg

SEQ ID NO: 27339 - DNA, 380 bp, Glycine max
  Clone ID: LIB3108-034-QI-K1-G1
cccacgcgtccgattttagccaatagaatacagttgattagggaacaaaacactaggcccagaatagcttaataaaagaaaatggagcaaaaacagaagttgcaagaccacgaaatatcaagcttataaaaatttccaactatcattttgtaatctttttaagaatgcagagtggatatgctcagttgccacccacgcgtccgcccacgcgtccgaaaaaaaaaaataaaagaaaacaccatacaagaaactcaccttatggaaagtaccctccagtagaggacaacacccatgcctaaacaagcaatgaggtctaataatctaacttaaaaaataataagaactaaaaaaaggggcgcccgctttaagaggcccaactt

SEQ ID NO: 27340 - DNA, 328 bp, Glycine max
  Clone ID: LIB3108-034-QI-K1-G10
tggcttggaacctttgggctgatttatgtgcttgtttatgtgcttgtttatgtgcttgacctcctacttacagatacggttattgctatcctcggagttgccgtcacctttctacctatcggttctaaggtaagtgtaggtaaagcgagcgttgtagccaaagctctagtcttttaagttataaggccgggtactaaggtcctgtcgaaagatgccggagctgtcgccgcggttatcgttgtgagcgtagcgtcggtcagtaatgttacggttacccgaacgccgtcgggcggcgacgatgggctctcggtcccttgctttaataacc

SEQ ID NO: 27341 - DNA, 363 bp, Glycine max
  Clone ID: LIB3108-034-QI-K1-G11
gcttggaacctttgggctgatttagtgcctgtattatctcacttttcataattttcctctagtcacgtctaggaaagagcgggacccctagctttctataggtatcctccgcgaagttagcgaagaggtagacgacggggaagagtaagggaacgagaaccgtacgttaagttattagtaccttcgtcgacagagctttcgatacgggtaaaagatagtctacgaactcgtcctcctccggcgttaccctatcttttctcgtcggaacgtccacctttcatattcatccccccgctttcttaggcctaggcctcctagtcggcggcatcgccgttaaggacgtcgccggaaacgacgcaaccg

SEQ ID NO: 27342 - DNA, 445 bp, Glycine max
  Clone ID: LIB3108-034-QI-K1-G12
tggcttggaacctttgggctgatttatgtgcttggcctcagactgtgagtggttgtctcagaggacttaagtccatgcatgtgcgtacgtgatgctacagtctcctcacagcgctattcaaacctaacctatcggttgctgccccataatgctgcgatcgggaaaatttcggtgccatttaatccaactgttccgtagtatactttttccctgttagtcggtgcaacagtgaagaggtttgtattgactgtttcctttaatagccgtgtaattcgaacggtgaacgggatgtgtttcgcagtggtgtaccaagtgtggtgggcgcggcggccatgtgtaatgcgattggcatatccgttagtgtttcaatgtttggcttccctgtccctcctttccttccctctggtatgccttgttgtcccctttgctaagtctcaaactgggg

SEQ ID NO: 27343 - DNA, 449 bp, Glycine max
  Clone ID: LIB3108-034-QI-K1-G2
cagaaacaaacaaaagaggcagaagatgttgtgggtggacaaatatcgtcccaaaaccctgggccaggttatggtccacaccgacatcgctcgcaatctcaagaaattggtaacggaacaggattgcccccatttactcttctatggcccatctggctccggcaagaaaaccctaatcatggctcttctccgccaaatgttcggacctggtgccgaaaaggtgaaggtggataataggacctggaaagtggatgctgggagtagatctcttgatttagagctgacaacattatcaagtgccaatcacattgaaatgagtccgagtgatgcaggctttcaggacagatacattgttcaggaagtaatcaaagaaatggctaagaacagaccaattgatactaaagggaagaaaggatttaaagtacttgtgctcaatgacgttgacaaac

SEQ ID NO: 27344 - DNA, 346 bp, Glycine max
  Clone ID: LIB3108-034-QI-K1-G3
acgggccgtaagagaggtgaatgtcagcgaacttgggcttgtgacgccggctgggaaagcggggtgttgtaaatacgctcaggtcacaaataacccagaaaacgatggttgcataaatgctggtttgcttgattaaagtcgcatcagggttccaacttgatttcagaggcagtggtctggtacctctcctatgatttttttttgggcacaggttctaaaattcttgtttggattgtcaatgcaatgatctgatcttgcactttgacatttgagataactattgtacaagagttaagccaaacaaatgtgataaatttatatagttcattcgcaagacaaattttta

SEQ ID NO: 27345 - DNA, 407 bp, Glycine max
  Clone ID: LIB3108-034-QI-K1-G4
cctagcccctcttctcttcattcttcactcatgaaacaagcataatggccttctgtaataaggttggaaatgtcttgaggcagggtgctgctcgcagcacacaagcacctgtttcatccatgcttaattacattcgctgcatgtcttcaagcaagctttttattggaggcctttcatatggagttgacgatcagtctcttaaggatgcattttctggctttggagatgtggttgatgcaaaagttataactgacagagactctggaagatcaaggggatttggatttgtcaacttctccaatgatgagtctgcaagttcggcactctctgcaatggatgggaaggatctagatgggcgaagcattaaggtatcctatgcaaatgatagaccttctggacctcaatct

SEQ ID NO: 27346 - DNA, 185 bp, Glycine max
  Clone ID: LIB3108-034-QI-K1-G5
acgacgcgtacggaatatgccaatatggtttcttcgacgaaataactagacattgttcacggagtacttaaattaaagctaatggagcaagatcctaactaccaagacctcgatatatcaatcttataacaatctacaactgtacaagcagaaaactctacaaaacagcggcatagatatgctaa

SEQ ID NO: 27347 - DNA, 329 bp, Glycine max
  Clone ID: LIB3108-034-QI-K1-G6
cagaaacaaacaaaagaggcagaagatgttgtgggtggacaaatatcgtcccaaaacccggaccagtttatggtccacaccgacatcgctcgcaatctcaagaaattggtaacggaacaggattgcccccatttactcttctatggcccatctggctccggcaagaaaaccctaatcatggctcttctccgccaaatgttcggacctggtgccgaaaaggtgaaggtggataataggacctggaaagtggatgctgggagtagatctcttgatttagagctgacaacattatcaagtgccaatcacattgaaatgagtccgagtgatgc

SEQ ID NO: 27348 - DNA, 436 bp, Glycine max
  Clone ID: LIB3108-034-QI-K1-G7
gcgacgcgtacagcgtaggaaatgaaatccctaatcagaagaagcgcagcttcaaacgagtagcggacaccaaccatgggtcggatgcacaagccgaggtaagggtatatgctaattctgctatgccctacaaaaggacaccttctagctggctcaagatctcttcgcaagatgtctaataaaatatctgcaagtttgcgaagaaaggcttgaccccgtctcagattggggtcattctcagagattctcacgggattgctcaggtcaatagcgttactggcagcaaaatccttcgcatactcaaagctcaccgagttgcgcctgaaatttcagagggactgtaccattgatcaagaaggcagtttcaattaggaagcatcttgagaggaacaggaaggacaaggactccaagttcaggttgattcttgttgagagc

SEQ ID NO: 27349 - DNA, 414 bp, Glycine max
  Clone ID: LIB3108-034-QI-K1-G8
cccacgcgtccgggcaattattcaccgagatattaaagcatctaatatccttcttgatttgagagtttgaacccaaggtttctgactttggcttggcaaaaatcttccctaacaacgatcgttgcattagtcacctcaccactcgagtgatgggaacctttgggtatctagctccggagtatgcatcaagtggtaaattgacagataaatcagatgtatattcctatggcatcatgcttttagaacttataaccggacatccaccaatcactacagcaggatcaagaaatgagagcctcgtcgactgggctaggccattgcttgctcaagcactacaagatggtgacttcgacaatcttgttgatccaaagttgcagaaaagttacgaagctgatgagatggaaagaatgatta

SEQ ID NO: 27350 - DNA, 318 bp, Glycine max
  Clone ID: LIB3108-034-QI-K1-G9
acctttgggctgatttatgtgcttgagagcccgccgcgagtcacaagtcagcccactgcgaggagaacacgaaacccgccgcccctcccgccgtcgtagcagccccggcagtacggttacgttacggtgtaagtcattaaaggcccttcctcttcaacgaaaatcggtcaccgcgagtgcctcctggatgcaaaacgtctaagccccaagtccgtccccgaaatatataatacctgcattcccaaaattaccttcgaacagccttcccaaataataaacgatccttccaacggttaataacccaaactaaatccccaa

SEQ ID NO: 27351 - DNA, 437 bp, Glycine max
  Clone ID: LIB3108-034-QI-K1-H1
gtgtgcagaagagcgtcgcagttgtaaccctaatcagaagaagcgcagcttcaagcgagtgacagccaccagccatgggtcgtatgcacagccgcggtaagggtatatcctcttctgctttgccctacaaaaggacacctcctagctggctcaagatctcttcgcaagatgtcgaagaaaatatctgcaagtttgcgaagaaaggtttgaccccgtctcagattggtgtcattctcagagattctcacggtattgctcaggtcaatagcgtcactggcagcaaaatccttcgcatcctcaaagctcacggacttgcgcctgaaattccagaagatctgtaccatttgattaagaaggcaggttcaattaagaagcatcttgagaggaaccaggaaggacaaggactccaagttcaagttgattctttgtgagagcag

SEQ ID NO: 27352 - DNA, 322 bp, Glycine max
  Clone ID: LIB3108-034-QI-K1-H10
ggcttggaacctttgggctgatttatgtgcttgtttatgtgcttggtattatacctattcgagtcccccgcgaggaccttaaagtacggtccggtccgtagtacttatcgtcgtcgtcctttccggtacgctagaaacgtccggaaattttactaattctagcggcgttataaggttagtcttactcgttctcagtttcgttcttcctaagatcgcggtctcccctcttaaaaagaaggtcgtattcctaaaaaaagtcgtagtcgtcgtcttcgttaacgacgagtccgttaagcggcacggcttcgatagaaagactcct

SEQ ID NO: 27353 - DNA, 241 bp, Glycine max
  Clone ID: LIB3108-034-QI-K1-H12
tttgggctgatttatgtgcctcgttatgtgcctgtataatatactatggtatcgcaccaccagcaaccgcgccgcgccgcgcggagtacagagaaggactaagaaaggacaagaagaaagagggaacagggccagggccagggccagggccaggccgaggacgttgaagaataagggaaagggaggcaagaataggaagaggggaaagaatgaagtggatgatgagaagtgagagtcggcg

SEQ ID NO: 27354 - DNA, 320 bp, Glycine max
  Clone ID: LIB3108-034-QI-K1-H2
gccacgcgtccggctgcagcgccagacctagctcatggtacaggagctgcacgggctgaggactgcatgtaccgtgtaccacgcactgtagtcattcatgaccttatttcgcgacatgcgcaggcttatggacggatggaggtggtatgacgaagaccatctaggtcgcgaagcttatccaggggatgtcatgacactaagcttcacgctttcggaatacgagccggatctacagagagtgaattatgctgaaggatgctgactgcttgaccgataagtgaaacgtcatcgggaagaggattacctaatatgcctactaa

SEQ ID NO: 27355 - DNA, 305 bp, Glycine max
  Clone ID: LIB3108-034-QI-K1-H3
cggacgcgtgggcggacgcgtgggcggactcgtgggcggacgcgtgggcggacgcatggagtacgaccgtggtgtggatgagttatttttgtaagaataaaatttaggtataacatgttaagtatttcctgaggttttaaaatgactgaaggcaaacaaaaaaaactgaatagaataggggagaatgccatatcggctattgcagaggtcaatatcttttatgatgacgtcattatgctgtttctacataccaaaggtcaagcattcattgctgctaatacttgcaatagttgtggttctccaca

SEQ ID NO: 27356 - DNA, 458 bp, Glycine max
  Clone ID: LIB3108-034-QI-K1-H4
aacacatacactactctctctctctctcttattgtatggccgccaattccagtagccgagggatcaccgccttagggaagcgagtcgccaaccggatctggacttccaacgcacctcctctcacttcaaggaggggagcatacagtagcggctcagtgtacgacaagaaccctgatgatgagatccagtctgggcaggtcccagacgatgtgatccaggcggcaacacaatccggcaaatactgggccccacatccacagactggggtatttgggccccccggaggaggtgaccaaactgcttctgccattcactctgatgcgctggaggagaaggcctggtttcgccccaccagtctcgaggatttcgagaagcctcacacccttccttaacaaccattggaggacatcatattataatactaaataaataaacactgggtcagcctttaggtgtgt

SEQ ID NO: 27357 - DNA, 294 bp, Glycine max
  Clone ID: LIB3108-034-QI-K1-H5
cggacgcgtgggcggacgcgtgggcggacgcgtgggcggacgcgtgggcggacgcgtggggtacgaccgtggtgtggatgagttatttttgtaagaataaaatttaggtataacattttaagtatttcctgaggttttaaaaaaaaaaaaaaaaaaaaaaaaaaaaaaaaaaaaaaaaaaaaaaaaaaaaaaaaaaaaaaaaaagagttagaaaaaaaataaagatgatttcgttgtccataaaatctaattgattggctaaaagttttaaaacgtaattgtctggaaaatcct

SEQ ID NO: 27358 - DNA, 152 bp, Glycine max
  Clone ID: LIB3108-034-QI-K1-H6
gccacgcgtacggctgtggctgctgatctagcttatggttcgggagctgaatgggctgagtggtgtaagtaccgtgtaccaagcactgtagtcatttatgaccttatctcgcgacatgcgcaggcttaaggacgggtggatgtagtatggga

SEQ ID NO: 27359 - DNA, 150 bp, Glycine max
  Clone ID: LIB3108-034-QI-K1-H7
cccacgcgtccgaaaaaataaaaaaaacattttaaaaaaaaaaaaaaaaaaaaattaataaaggataaatatatcgataaacatcgctaatgaatactatcattaaccttctttttaaacaatcactttcttcataacatatgtctttac

SEQ ID NO: 27360 - DNA, 372 bp, Glycine max
  Clone ID: LIB3108-034-QI-K1-H8
aacacatacactactctctctctctctcttattgtatggccgccaattccagtagccgagggatcaccgccttagggaagcgagtcgccaaccggatctggacttccaacgcacctcctctcacttcaaggaggggagcatacagtagcggctcagtgtacgacaagaaccctgatgatgagatccagtctgggcaggtcccagacgatgtgatccaggcggcaacacaatccggcaaatactgggccccacatccacagactggggtatttgggccccccggaggaggtgaccaaactgcttctgccattcactctgatgcgctggaggagaaagccctgttttgccccaccagtctcgaggatttcgaga

SEQ ID NO: 27361 - DNA, 469 bp, Glycine max
  Clone ID: LIB3108-034-QI-K1-H9
tggcttggaacctttgggctgatttatgtgcttgcttatgtgcatgaaatttatcaagacggtccgtcccgcacttccttcagcgtcgtcctccgtagattccacttcgacgttctacgggtccgtcatccatcataaattaaccaagaagttattagcgcataagttcttagcgcataagttattagcgcataaattattggcccacaagttaaaattattggcccataagttgaaattattggcccataagttattacacaagaagttattacataagaaattattccacggaaagcatttcttagcagaggataatatttacgttcaaagtaagtaacgaggctcaccactcatccaacaaacaagaggaatcgtcccgcgcacctcagtaccgcgacccataatcctgcagtaacgtacacctccgatctccgtacgtatcctaacgtcctgcagtaccaacgac

SEQ ID NO: 27362 - DNA, 323 bp, Glycine max
  Clone ID: LIB3108-035-QI-K1-A1
cccacgcgtccgcttagctacacacgactatatcttactcgaggcgttacctaccttggcgtgtctatctataaccacgacatgtgcaccatacatgatgcaatggactattgcacaatatactaacaaatcatatggtgcattaatacactataatctgtgaccactgaatttatgtgcgaatactagaacaacttacatgagaaaacaatggtctaaatatagaatgatattaatcgctaagtggacataacgattgatccacgtttacgcacaaaaactgatggtgaacgtgctaagtattcttacactgatactctgtt

SEQ ID NO: 27363 - DNA, 419 bp, Glycine max
  unsure at all n locations
  Clone ID: LIB3108-035-QI-K1-A10
cgtccggatcgagataactagaaacagtgtgatgaaaatgaagtccttgttttcttcgttgctacaattttggtagcatggcaatgccatgcgtacgatatgttccctctccgaatgaacactggctatggtgcccgtactccggaggtgaaatgcgcaagttggaggcttgctgtggaagcacacaacatctttggctttgagaccattcctgaagagtgcgttgaagcaacaaaggaatacatccatggcgaacaatatagatcagactccaaaacagttaaccaacaagcttacttttatgccagagacctcgaagtccatcccaaggacacatttgtgttcagtatagatggcaccgtactctctaaatatccatactacaaaaaacatggatatggngtggagaaatttaactc

SEQ ID NO: 27364 - DNA, 333 bp, Glycine max
  Clone ID: LIB3108-035-QI-K1-A12
cccacgcgtccgctccctccagtgcctgaactacctgcagttctctaaagtaccaattcctgaagtaatagggaataacgccaaaataatcccttgagtacctatgatctatccagtcactactacttattttgtcacttgctaaattaacttgttgttgccatcccagggtggttctggttctgttggggtttaatttctgtcattcaattacatgctatgttcagtttatatgttgcttcagtcagttgaacttcagcatattatttattgtgacctgtgtaatgtaatgtatcaacttatcttctagttcaataaattctggaatttctg

SEQ ID NO: 27365 - DNA, 281 bp, Glycine max
  Clone ID: LIB3108-035-QI-K1-A2
cccacgcgtccggagtaatagaaacctctcagcccctctccgatcaaatggccaccgtaatcgacggcaaagccgttgcgcaaaccatccgatctgaaatcgccgacgaggtgcgccagctctctcaaaaatacggcaaggttccgggattagcggtggtgatagtagggaacagaaaagattcacagagctatgttggaatgaagagaaaggcatgcgctgaattgtgaatcaaatcctgcgatgtggaccttcccgaacaaggtttccaaagctgacct

SEQ ID NO: 27366 - DNA, 171 bp, Glycine max
  Clone ID: LIB3108-035-QI-K1-A3
cttcgtgagagttgcttacattgacacagaaggaactttccgaccagaccgaattgttcccatagctgagagattagagatggatcctggggctgtactgggcaatgttatatatgctcgtgcctacacttatgagcatcagtacaacctcctccttggtttggctgcaaa

SEQ ID NO: 27367 - DNA, 341 bp, Glycine max
  unsure at all n locations
  Clone ID: LIB3108-035-QI-K1-A4
cccacgcgtccgcgaacactcttcttcaatcaagcgaaggtggtctcgattgcaagtgatccacgatacactctacgcttcacanaaccttcaaacccaattccacagaattcttctgcttcaccatgccaccaaagcctgtagactatgggtcaataaatgaaaacgtgaaggaagagtcaatatgctgtcagaggtgaattatacctttgagcttctgaacctaagaaagagggccaaaaggattatctgtactaaatggtggcaacccgcatgcatttgggacagaaaccactgagctttcctttgccaggttgttgctttgggccaagttccattcc

SEQ ID NO: 27368 - DNA, 215 bp, Glycine max
  Clone ID: LIB3108-035-QI-K1-A6
gctggcttcaataattcatatagtaaatggtgactgggcatcccttgtccgtgctctggttgatatggatgttgtgaggccagagacaaatatacgacttgttaccctggaactcgaacaagccttgggagaagtagaatttaaagaaggaattcctgatgtgaagtttagcagggttctgggaaagatttggactgtagcactcaagcatcatt

SEQ ID NO: 27369 - DNA, 165 bp, Glycine max
  Clone ID: LIB3108-035-QI-K1-A7
cccacgcgtccgcccacgctttcgctaaaaccctaatcctgtggcactgaaagtgtgagatggcaagaggcagtgcctcttgagtgcgcacgcctcgcagtgcgcctgttctccaccacgagcacagccaccgtgttcgccggcactttacccaaaccctgatca

SEQ ID NO: 27370 - DNA, 220 bp, Glycine max
  Clone ID: LIB3108-035-QI-K1-A9
cccacgcgtccggaaccatggcttgttgagctttatgcaccatggtgcccctactggcaggctatggaggaatcttatgttgacttagcagacaagttagcagggtcaacagggatgaaggttggaaaatttagagcagatggagaacagaaagaatttgcaaagagtgaactgcaattgggaagcttccctacgatattatttttcccaaagcattcgt

SEQ ID NO: 27371 - DNA, 403 bp, Glycine max
  Clone ID: LIB3108-035-QI-K1-B1
agagcttgtaggttattgctcagagtatggacaacacctcttggtctatgagtttcataaaaacggatcactgcgatgacttccttcacctaccagatgaatatagtaaaccattgatatggaattcgcgtgtcaagattgctttggggactgcacgtgctctagagtacctacatgaagttagttcgccatcagttgatcataagaatattaagtcagccaacatattactggatacagagctgaatgctcatctttcagatagtggattggcaagttatattccaaatgcggaccagatattggaccataatgttggatctggatatgatgcacctgaagttgccttggctggtcagtatactttggaaagtgatgtctacaagcttggagttgtcatgtt

SEQ ID NO: 27372 - DNA, 158 bp, Glycine max
  Clone ID: LIB3108-035-QI-K1-B2
aaaaaaaaaaaaaaaaaaaaaaaaaaaaaaaaaaaaaaaaaaaaaaaaaagaaaaaaaaaagggaaaaggaatgaagggaggtgggagaagaaggaaagaagaggaaagaaaaagaaaaaaaaaagaaaggaaaggtaaaaaaaaaaaaacttgatag

SEQ ID NO: 27373 - DNA, 388 bp, Glycine max
  Clone ID: LIB3108-035-QI-K1-B4
cccacgcgtccggaaaatcctcacccattttcttcgtagccaaacactctgaaattctcagttatgtcgtggcaagcgtatgtggatgatcacctactgtgtgaaatcgaaggtaaccacctcactcacgccgctatcatcggccaagacggaagcgtttgggctcagagcaccaacttcccttcattcaaacctgaagaaataactgccatcaataatgactttaatgagcctggatcacttgcgtcatctgtgttggatatcggtggcaccaaatacatggtcatccaaggtgagcctggggctgtcattcaagggaagaagggtcccggcggggttacttgcaaaaaaaccggtccggccttgaacattggcatttatgatgaac

SEQ ID NO: 27374 - DNA, 158 bp, Glycine max
  Clone ID: LIB3108-035-QI-K1-B6
gagtttatggccctcgtcttttcttcgctacggaacacatgctcaaaatcggttcctcttatgtagatctaccttcgtcgtcgagctgatgcagtgtgtgggaaggtaaccacctgatggacgccgctatcatcggccaagacggaagcgtatgggct

SEQ ID NO: 27375 - DNA, 208 bp, Glycine max
  Clone ID: LIB3108-035-QI-K1-B8
ttggagaaaagctttcaaggcctgaaattcttgcatccacaactgatgctcgatacctcagacagataggaattcctgtgctcggtttctccccaatgaaaaatactcccatcttgcttcatgaccacaatgagcacttaaaggatactgtgttcatgaagggaattcacgtatactagtctctgataagttccttgagtacatttac

SEQ ID NO: 27376 - DNA, 401 bp, Glycine max
  Clone ID: LIB3108-035-QI-K1-B9
gggaccatgaagttgagcagttcatttgttgatcctggattagagtggaggctctgtgttagcaaaagtggcaagaggcagcgcaaggagaggagagtgaccattgtcaatgaacttggaggacaatatgaggacacttttgaagatgttaaagcgcaaatgctcaactatttcacatacaaggctgtgaggactgttcttcatcagttgtatgagatgaatccacctaaatacacgtggttctataattttgttgcttcaaacaaaccagcatatgggaaacgttttattcgatcccttgggaaggagcaacaagagcttgctgaaagagtgatggtaactcggcttcacctttatggaaaatggctcaagaaatgtaatcatgctgaaatatatcaaga

SEQ ID NO: 27377 - DNA, 171 bp, Glycine max
  Clone ID: LIB3108-035-QI-K1-C1
agacgatttatgacgccttcagagagccaatgtgtcttcatagtttcatacctagcaaaatttctacgcgggcttgatggtaactgactgggatcaggagtcatcctaagagaaattgatgtacgagtctatagaagactcggacaatcattacctcatctgctactaact

SEQ ID NO: 27378 - DNA, 390 bp, Glycine max
  Clone ID: LIB3108-035-QI-K1-C11
caatctatgcattcaccaattgggtcgacattttgatacagttgtacgctctttaacagtgatgtgacatgggagcttggtagttgcagcaaataatcacgggacatgttatgtgtggcgcttgttgcgagggactcagacaatgacaaactttgagcctcttcacaagctgcaagcacacaagggatacatcctcaaatgtcttttatcacccgagttctgtgaaccccacaggtacttggcaactgcatcttctgatcatactgtcaaaatatggaatgttgatggttttaccctagaaaaaactcttataggtcaccaacgctgggtgtgggactgtgtcttctccgtggatggcgcctaccttattacagctttctctgatacaac

SEQ ID NO: 27379 - DNA, 386 bp, Glycine max
  Clone ID: LIB3108-035-QI-K1-C12
cccacgcgtccggatgatggaagtgattttctgtgagaatttccggtattcaccactctccatcttatcgtcttctccttcacctcgttgccatctctctgttccatcttcttctttgaggattaaaccttcttcttcatcttcatcatcatcatctgtgtcttgttctctcatggagaatcaggagacccaacgcatcaaattcatggactttccgttcgtttcatctgcccagaagaacctcatggttgatctcgtttcaacacttgagaatcgctttcactctcagcttcttccttgcacactcccctctgatgttcagtattaccaaagccaaactgccactgcccaaacttcccttcatattaaaccagctcataatgacc

SEQ ID NO: 27380 - DNA, 170 bp, Glycine max
  Clone ID: LIB3108-035-QI-K1-C2
gcagaagcaaaaaatggagccattattttcttcagcagcagcaatatgtgtggtgactgtgttggtagctgtgaggcccatatggtcactgaagatgctggacttattgtggcttaggccaaagatgtttgaaaggcttcttatagcgcaaggctttcatggtgacccat

SEQ ID NO: 27381 - DNA, 417 bp, Glycine max
  unsure at all n locations
  Clone ID: LIB3108-035-QI-K1-C3
cccacgcgtccgctcataacaaagcacaaagcaaagctcatccttgagttaaaaaatggcagcagcttcttccatggctctctcatccccatccttggctggcaaggccgtgaagctgggcccatcagccccagaagtgggaagggtgagcatgaggaagaccgtcaccaagcaggtctgctcaggaagcccatggtacggcccagaccgagtcaagtacttgggcccattctctggcgagcccccgtgctacctaaccggtgagttcccaggcgactacggctgggacactgctgggcctttcggagacccagaaaaccttgccaagaaccgtgaactcgaagtgatccactccaggtgggccatgctcggagcctngggctgcgtcttnccggagttgctgtcccgcaacggggt

SEQ ID NO: 27382 - DNA, 400 bp, Glycine max
  Clone ID: LIB3108-035-QI-K1-C4
ccgaaattggattgagtgggaggaaaacagaaaagacagcttgcagaagagcaggtttgcgcgtattcgtgctgtcactcattgcaaacgtcagatcgtgtgtgcctctctgtctgtcttcctctttctctctctctctctcaagtctcaaactaaatttaaactctcatttgaagctaacaaacaacaaagatcaacggatctatctaccttcagtcatggtgtgttctttcaaccaacgcttttgggtttcttctttgctttttcctcttggcggcctttttggttcttcttttaattccaatttgctttctgacaccggtttcgaatcttaacccacgcataccggtcggaaccttctttaagctaaaaagggttggtctgggaatttcgagttttt

SEQ ID NO: 27383 - DNA, 418 bp, Glycine max
  Clone ID: LIB3108-035-QI-K1-C5
gcaggaattaggaatattcgacaggtagagtttcttcaatggctcctaaagttgataagaagaatgatccaaaggcccaggccttgaagactgctaaggcagttaagtcaggtgctacctttaagaagaaggtaaagaagatccgaacttctgtcactttccacaggccgaagaccttgaagaaggacaggaaccccaagtaccctcgcattagcgccccgccgaggaacaagcttgatcaatattcagatcctgaaataccccttaccactgagtctgccatgaaaaaagattgaaggcaacaacactttggttttcattgtcgacctgcgtgccgacaagaagaagatcaaggatgcggtgaagaaaatgtatgacatccaggccaaaaaagtgaacaccttgatcaggcctgatg

SEQ ID NO: 27384 - DNA, 255 bp, Glycine max
  Clone ID: LIB3108-035-QI-K1-C6
cccacgcgtccgcccacgcgtccggagataactagaaacagtgtgatgaaaatgaaggtccttgttttcttcgttgctacaattttggtagcatggcaatgccatgcgtacgatatgttccctctccgaatgaacactggctatggtgcccgtactccggaggtgaaatgcgcaagttggaggcttgctgtggaagcacacaacatctttggcttttagaccattcctgaagagtgcgttgaagcaacaaaagga

SEQ ID NO: 27385 - DNA, 361 bp, Glycine max
  Clone ID: LIB3108-035-QI-K1-C7
gcgtcagtgatcaacattaacatgtgaatgcctaagccataagacgaacattcggaagcgtgtagtgaaggatgcgaaagaggctcagaaaccatctaatacgggtctgcttgatggactgaacaagggtcacgacgtcaccaagaaggaattgcctccacgcgcaggagaacaggaggggaaaacaggcgagagggagcactgtgtgagagagcagagagataggtaaagccagttagaggttaagagagcgtaaactgtctgcagaacttggaaggtacaagagaaaaaagttgcaaagagaaaactcggaacacacaaacgcgcaaagaagaagcgagaggaaaaggccagtgttctc

SEQ ID NO: 27386 - DNA, 408 bp, Glycine max
  Clone ID: LIB3108-035-QI-K1-C8
cccacgcgtccgcccacgcgtccgcagaggataatgttgatgaaatcaagtcaaagcttgatgctgctgacgagtctgtgtccaatattggagagcacatatcaggaggttctagtggcggttcctcagctggtggttctcagggtggggaccaggctcccgaggcgggatactgggttgtgaagaagttaggtgaagatttgtttgtatgcgctgttagtgaggtattgtgtctagagttagggatgatatgagcttttttcatttagcatatgatataaggttttttgtacttagaggttggagttcattttttacttcatgtacttctggagaaccaaattatgctgtttgaataacggtatttaaatttttgcctattgaccggtgacgcattttttacttaaa

SEQ ID NO: 27387 - DNA, 416 bp, Glycine max
  Clone ID: LIB3108-035-QI-K1-C9
ccacgcgtccgttcttctgcgcggtgctgttctcttttgttgattgggtttttattctcttctttctgagaagggcttggggttgttgtgtttcgaaataatggcgactacgaatccctttgattcgttgggcgacgacgccgaggacccctcacagttgatcgcggcggagcaactgaaggccgcggcagccgcggccaccgcgccacccaagaaggaccaggccaagcccggagctcgcagcggcgcgccggcccagttgccgtcgaagccgcttcctccctctcaggctgtaagggaggctaaaaatgaaacttcttacggcggtcgtggtggtggccgaggaggtggaagaggatttggacgcggccgtggtggcggcggtggcttttggccgtgatttttccaatgatgat

SEQ ID NO: 27388 - DNA, 437 bp, Glycine max
  Clone ID: LIB3108-035-QI-K1-D1
cccacgcgtccgcaatcgcctctcgcttcgatgctacgctgctcgcgccgccttcgacagagttcccgttctcaatcccatcgtcgaaatggacggtgatgaaatgacgaggattatatggaggatgatcaaggataaacttatatttccttacctggatttgaacataaagtactttgatttggggcttcaaaatcgtgatgctactgatgacagagttactgtggaaagtgctgaagccactctcaagtataacgtcgctgggaaatgtgcaacaataactcctgatgagacccgagtgaaagaatttggactgaagtctatgtggagaagccccaatggcacaattaggaatatcttaaatggtactggtttccgtgaacccataatatgctgcaacataccgagaaatggttcccgatggaaaaaccccattg

SEQ ID NO: 27389 - DNA, 173 bp, Glycine max
  Clone ID: LIB3108-035-QI-K1-D2
tcgttaatgccaagtatcatcaagaccaaatttgggccagagagcatgtgggacgtgctgcaagcggtgcaattgtgggccttcgggagcctataggcattttgaaaggtgatcatgctatgcaaatatgaccacccacggtggaaaacataaatgtccataattaattatat

SEQ ID NO: 27390 - DNA, 264 bp, Glycine max
  Clone ID: LIB3108-035-QI-K1-D3
cggacgcgtgggcagtcatatgaaaaatcatcttcgaatgatacatatgataattttcacaatgtttttggaaaaatcgccatggtttttgtatcatttagtcgtgtgaactcatttaattaactgagtcaatttcgtgccctcagtcagtacactcaccacctgcgcgctggcctcactcagctcaccctcttcgtcactcaccctttcatgccggtccgccctgtcatcgaacatatttggcccgcattcaattactaccgt

SEQ ID NO: 27391 - DNA, 175 bp, Glycine max
  Clone ID: LIB3108-035-QI-K1-D4
cccacgcgtccgcccacgcgtccgcccacgcgtccgagcccccaggcttctaagtgtgaaaaatttgcaaagcatgtgtatccgtctgccctacttttgtttgtttgtacgtaaactacattcccatttgtttttgctttttgagatttcatcatcctgtatttttggtttctgt

SEQ ID NO: 27392 - DNA, 334 bp, Glycine max
  Clone ID: LIB3108-035-QI-K1-D5
cccacgcgtccggaacataccaatctacaataaacgatgattctcattatctccctcatgttttctcttctgtctttctcccatgcttctgtcctagatttctgtgttgcagattatgcaggtcctattggacctgcaggatattcctgcaagaagccttcaaaggtcacagcagatgattttgcttacagtggccttggcattgctggttgcacctgagacattatcaaagctgcagtgacccctgcgtttgatgctcagtttgctggtctcaacgggcttggcattttcccagctcgtttggacttagcagcatggggagttataccacttt

SEQ ID NO: 27393 - DNA, 388 bp, Glycine max
  Clone ID: LIB3108-035-QI-K1-D7
cccacgcgtccggaacaaagcacttagtgctattcaataattacgaaaaaccaacagcgagtgttgtttttgtttggtccaggctggaccagggaatgaatagagatgagaggctttcggttgaagagaactgagttaagcggcgaagccaaacgcagaatctgtggcagaaattgccaccggaagcacgtcgaagacgggtgaaccatacacaaaattccattcaccacttgtcttgtcaaatcccaacttaaattttggaaaaaaatcttaatttctaaaatggaattcttatcactactgctagtagtagtaaaaaaaaacaattagaaagtagtagagtggtttgttttctttttttcgtttgttttacttttaagatgggtga

SEQ ID NO: 27394 - DNA, 392 bp, Glycine max
  unsure at all n locations
  Clone ID: LIB3108-035-QI-K1-D9
cccacgcgtccgatgaaatgagaataggcagcagaagcggtatagaatattatctcgtttttcactttgcttctcactcctccttttctctctctctacgtttccatggagcctccaccttcctattcctattccccattcccgttctcgcttgagcgccacccacaaatacaaatgcacgatcccatactcttcttcctcttcttcgcttctctctcctctcttctcttcctctctttctctctcttcaagcgcttctcaacaaaaagagaacacanaaaccatactcaaaaagtgcccagcttgttggaagaggaacacagacccaagaagaagaggaagaaacctaagaagaagagaacccaagctgacgacgccgncaattcgggttc

SEQ ID NO: 27395 - DNA, 259 bp, Glycine max
  Clone ID: LIB3108-035-QI-K1-E1
cccacgcgtccgcccacgcgtccggtcacagggaagaaagagcgtcgagaaggttcagttcagatccgccgtctccaccatggcaactcccaaggcatcgtcgaaatggaccgagaacatttcctcaatagcagctcgcatcttcttccttctcatcatctttcagatccctcttttcagggtgacttgcagatctggcatgtgtacaacccctttgcatgtcacgtcgtcacaattaattgcaagtgagatctttcct

SEQ ID NO: 27396 - DNA, 425 bp, Glycine max
  Clone ID: LIB3108-035-QI-K1-E2
tgaacatgaaccctactattgatgggtttccttcaaaagatgttggtactcagccatttgacattgctggaatggtatatggatcacaggcagcaagggggtatgcgcagggatcatcacctcctggatggctgcatatgcagataggaggtggtttcgagagaacaacataattcagagaagcctcattgggaatgacagatgaatcgataggattgattgtctatttaaaaaacaaaaaaatagtgggttgattacagtgtgcttttttaacaacctagtcaactgttgtcgaatgtgtgagggttgcattttccattgttatagtatgaaaatatttatagaaagtgcatcttaatcgcatgttcttccattgtattagcaattagcaagtagaaaacaatcttagtgtggttttcgttttt

SEQ ID NO: 27397 - DNA, 347 bp, Glycine max
  Clone ID: LIB3108-035-QI-K1-E3
cccacgcgtccgcagaagaacaagtagttgagaactaagaaggagaagcaaatggcttcctcaatgatctcttccccagctgttaccactgtcaaccgtgccggtgccggcatggttgctccattcactggcctcaagtccatggctggcttccccaccagaaagaccaacaatgacattacctccattgctagcaacggtggaagagtgcaatgcatgcaggtgtggccaccagttggcaagaagaagcttgagactctttcctacctgccagaccttgatgatgcacaattggcaaaggaagtagaataccttcttaagaaagggatggattccttgcttggaat

SEQ ID NO: 27398 - DNA, 232 bp, Glycine max
  Clone ID: LIB3108-035-QI-K1-E5
cgcagagagagagagatccatcgatcaattaatttccaatggccgatcagctcaccgacgaacagatctctgagttcaaggaagcctttagcctcttcgacaaggacggcgatggttgtattaccaccaaagaacttgtgactgtgatgcggtcgcttgggcagaacccaactgaggctgagctgcatgacatgataaatgaggttgatgctgatgggaatggtaccattga

SEQ ID NO: 27399 - DNA, 434 bp, Glycine max
  unsure at all n locations
  Clone ID: LIB3108-035-QI-K1-E6
cccacgcgtccgtgcagatatcaccacctacaccactctgataaggacactaacttctgcctcttcatgcctctctttgatgctcttggcaataccctcaacaaaaaatcatggcaatcacccaaactaccaagttcaggttcaggaaacggtgacacggtaccccattttgttttcctggcacatatggttgatgtgtcatccagtatgcatgtccaattcgtctttcgatcctttgcttcaatgccatacaccacaagggtcctcctggttccaagctttgccggtacttttctagttttgctagcaatgtgggcttggtccaggcctttttagttaagttctactatctcagaggaagacttcaccatacgtgggttggacctagatgtggctttcagtatttctttgccattgctactgnaggaatcaat

SEQ ID NO: 27400 - DNA, 421 bp, Glycine max
  Clone ID: LIB3108-035-QI-K1-E7
attgcatttgagtatatctgttgtagactttgtagtatactactgaaagatggattcgaagacgaaagtagcaatacttattcctggcatgttagccatactccttttcatctcctcagaagtggcagccagggacttgaaagaggagggggttcttaaagagacatgtaaagttgtgatgccaaattagttggtggagggtttgcaggctcttgtcggggctcacctactcctgtctatcctggtcgtggcattcctggtcgtggctttcctggtcagggctttcccggtcagggcttccctggtcagggcttccctgttcaaggctttccctttcccggtcagggctacccttttggtccctggtcaaggcttttcccgtcaaggctttcccggtcaaggctttccctggtcagggctt

SEQ ID NO: 27401 - DNA, 72 bp, Glycine max
  Clone ID: LIB3108-035-QI-K1-F1
caacatgtgaattatgaaggagacaatacttgttgttaaaaaaaaaagaaaagctatatatctagctaattt

SEQ ID NO: 27402 - DNA, 245 bp, Glycine max
  Clone ID: LIB3108-035-QI-K1-F10
ccccatgccgcaggaattcaccaaggcattctttcacaaaaaacggcttcttccatcatcagcaccttccactaaaaacgaacctaaagccgttcattccaacgtctatttcatgaacaacgatatacaccctcacttctaccaacaatctaacgtgtactgcaacggccacctggaactgactacatataatacccataaacaataccttatggtcttatatactttgaaccaccccttctacc

SEQ ID NO: 27403 - DNA, 408 bp, Glycine max
  Clone ID: LIB3108-035-QI-K1-F2
ccctctttcaccgcagtgttagggtttctgtagcctccaaccagaaagagagggaaatggctcccaaacatcctagtacgggtttgtttgttggattgaacaagggtcacgttgtcaccaagaaggagttgcctccacgcccttcagatcgtaaggggaaaacaagcaagcgagtgcactttgtgaggaacctcattcgagaggttgccggctttgcaccttatgaaaagcgaataactgagttgctcaaggttggaaaagataagagggcactgaaagttgccaagagaaagcttggaacccataagcgcgcatagaggaagagagaggagatgtccaatggtctccggaagatgagggctggtggagctggagacaggaagaaataagtcttggttactttttcta

SEQ ID NO: 27404 - DNA, 443 bp, Glycine max
  Clone ID: LIB3108-035-QI-K1-F3
cttttcccctagattcagccacagttggaaaaaaaaaaaaaagttgttcgagatggcacgtacgaagcaaactgctcgtaagtccacaggaggaaaggcacctaggaagcagctcgcaaccaaggctgcacgtaagtctgcaccaactactggtggtgtgaagaagccacatcgttatcggcctggtaccgttgctcttcgtgagattaggaaataccagaagagtaccgagcttttgatcaagaaggttcccttccagaagctggttcgtgaaaatggtcaagactttaagactgatctgcgtttccagagccatgctgtgcttgcattgcaagaagctgctgaggcataccttgttggactctttgaggatactaatctgtgtgccattcacgctaagcgtgtaactattatgcccaaagatatccagctggcaagaagga

SEQ ID NO: 27405 - DNA, 180 bp, Glycine max
  Clone ID: LIB3108-035-QI-K1-F4
aaaaaaaaaaaaaaaacaaacacaaaaaaaaaaaaaaaaaaacacaaaaaaaaaaaaaaacggccacagagaaaaagaagaacagatgaaacaaaatagagaaaaaaaaataaaagaaacaaacaacaaaaaggggcagcccttctagcgcacccaaccttccgccccctaccagccaac

SEQ ID NO: 27406 - DNA, 404 bp, Glycine max
  Clone ID: LIB3108-035-QI-K1-F5
cccacgcgtgcgcccacgcgtccgctggtgtgtcttcgctgagaagattgtctgtaccgggtgaagtatgttagcccttgcagtaaagcttctagtgatggtgcaaggctaatgttgctgggtgaaagtggtagaatcgtcagcgaggtgaaaccggttgatgacagttgtctagtagctgagacctcacagatttgttctctgcaactgcttattacggtagctttatcgtcaatgctgcttacagtggcactgatagaaagggtattcttgctgctgatgaatcaacagggacagttggcttgcgtttggccagcatcagtgtagagaacattgaatccaacaggctagctcttagggagctgcttttcactgctcctggtgttctttaatatctcagtggt

SEQ ID NO: 27407 - DNA, 192 bp, Glycine max
  Clone ID: LIB3108-035-QI-K1-F6
tctcaagcaaccatggcaatggcaacccaagcctctctcttaaccccacccgctctccgggctcaaagacggcgagcgcgcctgcgtgccatggaagcgaagcgtgcagcctctccttctgcagcccgaagcccctcaagttctccagaacaatcagagcagcagccgtcgacgagaccacggaggcaccag

SEQ ID NO: 27408 - DNA, 164 bp, Glycine max
  Clone ID: LIB3108-035-QI-K1-F8
ctagaaacagcgtgaggaatttgacggtcccaggattcttcacatctacaggggtggtagcatggtgatgcgaggcggtcgatgtgttgcgtgttaggaggaacactggctatggtgcccgtactccggaggtgaaatgcgcaagttggaggcttgctgtggaa

SEQ ID NO: 27409 - DNA, 213 bp, Glycine max
  Clone ID: LIB3108-035-QI-K1-G1
cccacgcgtccgcccacgcgtccggttgtgttcgacgaggacgagattcctagcggcgtggatgcagggaaaagtctccttgagcgattaagaccttctcaatgcgcctggtgagacttacagcggtactttggatgctaagggaacctacagtttcttctgttcgccttacctttgaacttgtatggtgggaaaagtcactgttaattaatt

SEQ ID NO: 27410 - DNA, 414 bp, Glycine max
  unsure at all n locations
  Clone ID: LIB3108-035-QI-K1-G12
tctgaatcagaaatatactcggagaaagaaactgaatcgcttacgcacgcgttaacattaccactttcttgcttacagcacagcacttctgctaacctttcgtcttcaatttccctttggatttcattcattagatggattcgagttcggggcatcaagaattcgattatttgtttaagttgttgatgattggagactctggggttggcaagagtagtcttcttctcagtttcacctccgatgcttttgaagatctctcccccactatcggtgttgattttaaggtcaaatatgtgatgatggngggtaaaaagctgaagcttgcaatttgggatactgctggtcaggagagattcagaacactgnacagttcttactacagaggggcacaagggatcatcatggnttatgatg

SEQ ID NO: 27411 - DNA, 179 bp, Glycine max
  Clone ID: LIB3108-035-QI-K1-G2
cccacgcgtccgcccacgcgtccggtttgatacttaaacatgatgcgtcacataattatgaaaaaaaaaaaaaaaaaaaaaagaaaaaaaaaaaaaaaaaaaaaaaaaaaaaaaaaaaaaaaaaaaaaaaaaaaaaaaaaaaaaaaaaaaaaaaaaaaaaaaaaaaaaaaaaaagaaag

SEQ ID NO: 27412 - DNA, 437 bp, Glycine max
  Clone ID: LIB3108-035-QI-K1-G5
ggggtgtcccctctcactctgtgactgtcgctggcagctcatgtgttccttgttaagatgtgtggtttgattttcttgatagaacaagaaaaaaaggtaaagatgaatagctacagctactatgggtaccaagagaagaacaccttgacaagctgtgaggagactaagtttaggttattgatttggcccatacctggttgattgggttatatttactagtttttcatcaacacagaagtcgtaccctcgatgcaccccatcatcagcttccaacctgaggtggaagattcatgagttgtggcagcgcttctggacatgctccttcccaaagaaaattgctatctggaaagatccggaagccaagaggtagcatcatcaccaccatttttctctggaactccttctagcaaggcctttaaccctttaatccaagatga

SEQ ID NO: 27413 - DNA, 293 bp, Glycine max
  Clone ID: LIB3108-035-QI-K1-G6
cccacgcgtccggaatggatcattcttgggaagcacaaaagcttcttttcttagtgggaggaaactgaatgtgatcaactttacagtgccagttggagcacgatccagcactacagtttgcgcagttgctgagcctgataggcctctgtggttcccaggcagcacctctgcttcatggctttatggcagtttgccaggagaggatggctttgatcctgtgtgttttgcgtctgatcctgagagcctgtgatggtatgtccaagcagagcttgtgcactgcagatgggccatgt

SEQ ID NO: 27414 - DNA, 406 bp, Glycine max
  Clone ID: LIB3108-035-QI-K1-G8
ctgcatcggaagaaaccctagccactctcccggcgtcacgatgcagatcttcgtgaaaaccctaacgggtaagacgatcacgttggaggtggagtcttcggtcaccatcgacaacgtgaaggccaagatccaggacaaggaaggcatccctccggaccagcagcgcctcatcttcgtcgtgtagcagctggaggacggtcgcactctcgtcggctacgacgtggataaggagtccacgcttgagctggtgcttcggcttcgtggcggcgccaagaagcgcaagaagaagacctacacgaagccctggaagatcaagcacaagcacaagaaggtcaagctcggcattcttcagttctacaaggtcgacgattctggaaaagtccaaaggctccgaagggagtgccca

SEQ ID NO: 27415 - DNA, 390 bp, Glycine max
  Clone ID: LIB3108-035-QI-K1-G9
cccacgcgtccgcagggaatgaaacacatgatgctgattttggagatatcaacaaacgtactattctcagctatagttcaaagtaattgatttgctatttcaaggatagtagatgttgcagatgccaagctccttgggtttcactaatgatacataacatagacttgtaatgtagtatgcttctagttggttattgttcttttaagatgtagctgttctaggttcactgactggtgtgcctcttttgttggaatggctagtagaaaacaaatttgattttacttatataaagaaatggaattgtgttcacagaaacaatgaatagtgttcactgactggtgtgcctctattggttgaatggctagttaaaattaaaattgatttacttat

SEQ ID NO: 27416 - DNA, 174 bp, Glycine max
  Clone ID: LIB3108-035-QI-K1-H2
cccacgcgtccggcgagttttaactgaatttgaatatgcttttttaatccccaaatacatttttaatttatttacccttgacaaaaaaaaaaaaaaaaaaaaaaaaaaaaaaaaaaaaaaaaaaaaaaaaataaaaaaaaaaaaaaaaaaaaaaaaaaacaaaaaaaaaaataa

SEQ ID NO: 27417 - DNA, 280 bp, Glycine max
  Clone ID: LIB3108-035-QI-K1-H9
acaacagcccgtccgccgatgtcatcaaggaaatccttggctccgtcggagtagaagcagatgaagataggattgaatccgttttgtctgaacttaagggtaatgatatagttgagcttattgctgccggcagggaaaagttggcctcggttccttctggtggtggtggtgccagtgccgtcgtccgaactcctgggggaggtgctgctgctgctgcttctgcttgtgatgcaaataacgaggaaaaggttgacgataaaagatgaatctgatgatgata

SEQ ID NO: 27418 - DNA, 369 bp, Glycine max
  Clone ID: LIB3108-036-QI-K1-A10
gggccttttaggcaaccccggtaacggcccttccttcaagaaccttattaatttcttctaactctttcagaaaccttaattcaaaaactttggcaacattaacgaaattccattctttaacccttttttaattaacgaaaaaacccccttctattgccttttctttccccacaccaattaagttcctcaaaatgagagagtgcgcccacaacgcccctctaaagttcgcctctccctataaaatttttctttccttcgcgaccgcaccaaagacattctcagcgtcgccctagacctcctcttttgcgtctgatgaggcgccctaaccgcctacaccatgtacctagtctggtccgtcttattcacgcg

SEQ ID NO: 27419 - DNA, 419 bp, Glycine max
  Clone ID: LIB3108-036-QI-K1-A12
ggctgtggcagttcttggcagcagcgagggtgtcactggaactattttcttcactcaggagggaaatggtccaaccaccgtaactggatctcttgctggtcttaagcctggtctccatggcttccatgtccatgccttgggggacactaccaatggttgcctgtcaactggagcgcatttcaatcctaataacaacgagcacggtgcccctgaggacgagaatcgtcatgctggtgatcttgggaatgttaatgtcggtgatgatggtaccgttagcttcagtattaccgacagtcagaaattcctctcactggaccaaactccatcataggaagggctgttgttgtccatgctgattctgatgaccttggaaaaggtggtcatgagcttagcaaaactactggaaatgctggtggcag

SEQ ID NO: 27420 - DNA, 342 bp, Glycine max
  Clone ID: LIB3108-036-QI-K1-A2
cccacgcgtccgcccacgcgtccgttcaaagaaaaaaggagagtgcttagagagagagcggaacatattattttcattttcatctttttttgagtatcaacaaatggcaaccactgtgatgaccactctcccccaattcagtggtcttagaccccaattctcagctgcccctgtgaagaacttggttgctgtgcaacccatgagtcgcaaggggaagggtgcattgggagctcgatgtgactacattggttcatccactaatctgattatggtggcttctacaaccctgatgctgtttgctggaaggtttggattggctccatcagcaaacaggaaagccac

SEQ ID NO: 27421 - DNA, 394 bp, Glycine max
  Clone ID: LIB3108-036-QI-K1-A3
tcgaccacgcgtccggttgaagacatccgggctaagggtggaaatatcaccagggagccgggtccagttaagggtgggaagtctgttattgccttcgtgaaggatcctgatggttatgcttttgagctcattcaaagatcttccacccctgagccattgtgtcaagtaatgcttcgcgttggtgatttagagcgctcaattaagttttatgaaaagactttgggtttgagggtggtaaagaagactgatagacctgaatacacgtatactatagctatgcttgggtatgcagaggagcatgagacaactgtgttggagctgacatataactatggtgtcactgaatacaccaaaggaaatgcttatgcacaggttgctattggtactgatgatg

SEQ ID NO: 27422 - DNA, 384 bp, Glycine max
  unsure at all n locations
  Clone ID: LIB3108-036-QI-K1-A4
ancncatagagagagagagccccgagagagagaaaggangaagatcacggcatcgnaggggcttaaatgcacaggtgagggttccgatcccgttattctggcgaacgcttccgacgtcagccacttcggttacttccagcgttccagcgtcaaggagttcatcgtcttcgtcggtcgcaccgtcgcccgtcgcacccctcagggccaacgccaatccgtacaacacgaagagtacaaggtgcacacatacaacagaaatggtctttgcgcgttgggatttatggatgatcattacccgattcggagtgcgttttctcttctcaaccaggtaatagatgaatatcaaaaaaacttttgcgagtcatggagaaatgcttatgaaga

SEQ ID NO: 27423 - DNA, 173 bp, Glycine max
  Clone ID: LIB3108-036-QI-K1-A6
aaaaaaaaaaaaacaaatataaaaaacttataaaaaaaagaaaattcatagacaaaaagggtggacatttcaaacataacgttctctttctttcaatttcatacattttctatcctgttagctaacttctattcactaatcgagggtttacaacaccctttttttaaataccc

SEQ ID NO: 27424 - DNA, 373 bp, Glycine max
  Clone ID: LIB3108-036-QI-K1-A7
atttatgtagatgtagacaagtaagtaggaagtagagagcatgacttgaggtgaactgtgagttgtgcttatgacagtcactatgcattgtgctcccccctccttccctaaagtgcaatttacaaatgcatttgccaagaggttcggagctgttcaaaatgagaggggcaaaaagaaggacttgtctcctcaagatgctgcattgttgatccagatcagctttagagcttacttgatccgtaggtcaaaggctcttcgtgcccttagagaactggccattgcaaaatctaaattaaaggaaatcagagcccagttcaataacttttcctaccgacgtcatgtagcttgtaatgcggaggaacgccagcgattt

SEQ ID NO: 27425 - DNA, 434 bp, Glycine max
  Clone ID: LIB3108-036-QI-K1-A8
gcccagtctttcacttctttagcaagggtggagagcatagaagatcttcccaagaaaggcgcaccttatagtaagagaatgaaatcatgcaaaagttttgggggaggcttggatagtcagagactattgtgcagtccaaagtctacaatatcaaagaaaacttcaagagggtcttttgcatctgtactaagcaaaagaggaagtttcctaggagggtctagatattccattgcagttcaacaaaagaacttttgaaattcaaaatgttaaagagttattgcttatttcatgtacaaaatccggaaaattttgagtcctgcagcttcagcttattgagtcaaagccatatatgatcagttagctacatatttgagattcattattggtttgttatccatgggggtatgatccttgtcttttacagtcattactac

SEQ ID NO: 27426 - DNA, 307 bp, Glycine max
  Clone ID: LIB3108-036-QI-K1-A9
gtgcctgatatacccccttcacataacaagattcaattaacggcaactatgactgatgtgaggcttgcaagccccagagccttcttcaacccatcaccctcaccggaaaacacgtacaccatatagttcgcagttacactctgccaaggcatgctacttgttagtgtcacgatgtgtaaattgatgaagatcctacccgttcgcgcatcttcagatctcatttcttaaaacgtgttggatagcttaactaactcgcaagaggcgctctcctataacccaactaccatttagtgctcctcgcctttat

SEQ ID NO: 27427 - DNA, 306 bp, Glycine max
  Clone ID: LIB3108-036-QI-K1-B1
aacaattgctctattatttaacctagaattaacaaacgtacagcttccacattatgacgagtaaacataattaagatgatcgaaatacaaagtgacagtgaaaacactcttattacttgcaaaccgatcgagagcatccaaatacagacatacagccaataataaccatagacaagtattgtctatcttattcaaaagcacaatagataagcaaatcacacccaagttcgagaccctcatggacatagcagtgatagagaaattgtcaaggcatgcttctgaccacgtctaccatgggcaaaggga

SEQ ID NO: 27428 - DNA, 420 bp, Glycine max
  unsure at all n locations
  Clone ID: LIB3108-036-QI-K1-B10
gtagtctgcaaattgcagatgaaatttggaacgtgcatgatccggtgctgtagtctctacattctgtgatggcaccaaaaccgataacgagtcccgtccacgattcgtggtacccaacactctccgtcttcactctcgccatcggcctcgtcttaaccgcctctttcttcatttatgaagcaacatcttctaggaaaagtcggtcacttgttcaggagctgacaactggagcagtggcttcagtcttcttgggttttgggtacctgttcctcctacttgcttctggcgcatatgtctaaaatataaacattgaatcggatgaaattttgccaagcagatagctntaaatgaaaaattgcattggacgttatagtttgatatctgactctaagtcatgttcataatctatcgatgacaatg

SEQ ID NO: 27429 - DNA, 421 bp, Glycine max
  Clone ID: LIB3108-036-QI-K1-B11
gtagtctgcaaattgcagatgaaatttggaacgtgcatgatccggtgctgtagtcggtacggtctgtgatggcaccaaaaccgataacgagtcccgtccacgattcgtggtaccccacactctccgtcttcactctcgccatcggcctcgtcttaaccgcctctttcttcatttatgaagcaacatcttctaggaaaagtcgttcacttgttcaggagctgacaactggagcagtggcttcagtcttcttgggttttgggtacctgttcctcctacttgcttctggcgtatatgtctaaaatctaaacattgaatcggatgaaacttggccaagcagatagctttaaatgaaaaattgcattggacgttatagttagatatctgactctaagttatgttcataatctatcgatgacaatgt

SEQ ID NO: 27430 - DNA, 443 bp, Glycine max
  Clone ID: LIB3108-036-QI-K1-B12
gagcctccgggcatcaacaacagcagaatcatcatgagttcggtacggcgtcgtttcttgatcacgccgggccgcttgagttttcttcgctgcagcataaagctgggcatcagggagggtttggaccgttggattggcaacccggtggggatcaaggtttgtttgatcttcctaacactgttgatcaaccttactggacacaccacactcattggtctgatcaagataatccttcttctctctttcatcttccctgaaagtactcaagaaatttctctttttttttgttttttatgacctgagaggaaaaaagcgtaaaagaatatttgtttggagtctaaagcaacgtagaaaaacaaattggaagagaacctggaaggaacttctaattaaaatatgtaaatttctggtttttttacttttctttttttggggaggtgatt

SEQ ID NO: 27431 - DNA, 442 bp, Glycine max
  Clone ID: LIB3108-036-QI-K1-B2
accatacacggcctctaaattccggatttgaaagcgagaaccatataattaattgacctatggaaggagagaggttttgaggtgtggggtcggtgatggacggtggtggagtgaactacaaccctcgcaccgtggaacaggttttccgggacttcaagggccgtagagctggcatgatcaaggctctcaccactgatgttgaagaatttttccagcagtgcgatcctgagaaggataatctttgtctgtacggattccctaatgagcaatgggaagttaatttacctgcggaagaagttcctccggagcttactgagcctgcattgggcataaactttgctagggatgggatgcaagacaaggactggctgtctttggatgccgatcacagcgatgcatggttacttgcagaggctttctactttggggcacgatttggctt

SEQ ID NO: 27432 - DNA, 237 bp, Glycine max
  Clone ID: LIB3108-036-QI-K1-B3
taacaaccgctctagcaactcagctacctttctcaatgataccttctccaactgttggggcggtaaaccctgccgctagcctccatgcaagctacatacactggcctaaagtccatatatggataccacaccatattgaccaacaacgacattacctccattaatagtatcagaacacgagagccttgcatacagttatggccaccacttttcattaatacgctcagactctttcct

SEQ ID NO: 27433 - DNA, 431 bp, Glycine max
  Clone ID: LIB3108-036-QI-K1-B4
cttcaccgcgctttctgcaccgccaccgagcccgtcaccaccgtcaccgtcaccgtttcgatcaagtccatttcggaggatctgtacaaggaagtgaagctaaagaatgtggtggagaagttcaagaaagcctcggacatcgaccgcttccgcaaaaaaaccggcatctacgaagacaccgtccgccgcctcgccggcgcccgacgcttccggtggatccgcgacatcctcgagcaccagaagcagtactccgacatctccaacgagggcttctccgcgcgcctcatctccctgtacggcaagtccggcatgaccaagcacgcgcgcaaggtgttcgacgaaatgccgcagcgaaactgcagccgcaccgtgctctccctcaacgcactcctagctgcgtacctccactcccgcaaatacgacatcgtcgg

SEQ ID NO: 27434 - DNA, 377 bp, Glycine max
  unsure at all n locations
  Clone ID: LIB3108-036-QI-K1-B5
gttgagaactaagaaggagaagcaaatggcttcctcaatgatctcttccccagctgttaccactgtcaaccgtgccggtgccggcatggttgctccattcactggcctcaagtccatggctggcttccccaccagaaagaccaacaatgacattacctccattgctagcaacggtggaagagtgcaatgcatgcaggtgtggccaccagttggcaagaagaagtttgagactctttcctacctgccagaccttgatgatgcacaattggcaaaggaagtagaataccttcttaggaagggatggattccttgcttggaattcgacgtggagcacggnttcgtgtaccgtgagcacaacaggtcaccaggatactacg

SEQ ID NO: 27435 - DNA, 445 bp, Glycine max
  unsure at all n locations
  Clone ID: LIB3108-036-QI-K1-B6
aaagagaagcattagcactaggagcagcaacaactagtctcagctgaaatggcctcttcagtgatggcatctgtggccctcaaacctgcccctttcactgttgagaagtcctcagtgagaggccttccctctctctcaaggaactcttcttcattcagagttgtggccagtggcaagaagatcaagactgacaaaccttatggaattaatggtggcatggctttgagggatggaactgatgcatctggcaggaaaggaaagggaaagggtgtttaccagtttgtagacaaatacggtgctaatgtcgatggttacagtcctatctacgacaccaaggactggtctccaaccggtgatgtctacgctggcggtacgactggcttggctatctgggctgngactctacttggtcttttagctggtggtgcacttcttgtctacaaca

SEQ ID NO: 27436 - DNA, 369 bp, Glycine max
  Clone ID: LIB3108-036-QI-K1-B7
ctcacgcgttcggtcagggttttggtttttgtaaggcgaaaacagtgagagcggtgtggtgcttagtgctcacaccaattaccaatggcagtggagaagacggagcaagaactccagaacgagatcgatgagcttcttatccaacagtgcgagatttcggaaaggcttagagatcctcgaggtcttcgcataggtgccttgccaggttctcctgctctccgcactaacggtgttcgccaacgaccctttattcgacctggagacaggaacgattctgaagatcaacctccttgcaagcgtcgactttcatgtgccgtcgttaacgtggatgatggggacttgcctgaagatgctgatgcaggacaagaa

SEQ ID NO: 27437 - DNA, 424 bp, Glycine max
  Clone ID: LIB3108-036-QI-K1-B9
gcataagcatcttctcagagcttcttagttctcacccttcattcttttcttcagcaaatcagagaaaaacacagaaatttaaggaatggcaggtgcaagagccagtggcatgatgaatggtggaagaagcttcccaaggaggttctctgggcgtccaattccaaagcgtggacaagtcaaagttggaatagttgtcgggcttgcaaactctgttgtttccattttctctcgcagcagagccacccgaggatgtgctacacctactcacctcgctcactagcttccaactcattcgggctaccccaaaatttttgatctttttgttcttgtaaaaattggggtcttttttattcccttctatgatcttgttcatatgtaaatctctttcttttttcctatcaaagaatccaatcgcctcttgttt

SEQ ID NO: 27438 - DNA, 130 bp, Glycine max
  Clone ID: LIB3108-036-QI-K1-C1
tcccactcgtcctaaaaaaaaaaaaaaaataaaaaaaaaaaaaaaaaaaaaaaaaaaataagaaaaaaaaaaaaaaaattaaaaataaaaacataataataattaactaaaacattttaaaattaaataa

SEQ ID NO: 27439 - DNA, 279 bp, Glycine max
  Clone ID: LIB3108-036-QI-K1-C10
aattaccgacgcgacccacgcgtgctgccattcgtccttaggaactcccacccaccctgggaccaaagaaaggatgcctggtggtgaggtcttgagatcaagtgccttatacaccttttattgtgaatgcatatactagtacaccatcggcctcacctcttacctcttaacgtaccacatacgtgactatgtcgtccggaaccttaacgttgcaattcacagagtattgccccacagatttctaccatggcacggccataacattactggaatgtgacc

SEQ ID NO: 27440 - DNA, 419 bp, Glycine max
  Clone ID: LIB3108-036-QI-K1-C11
atcgctctctcttctccaaaattcctcatcctcctcctcctaatctctgccataccgatgggaatcatcgacactctagagcgagccaaacccgccacccacgtataccactaccacagtaacggctgattccgagaatgcgccaattgggattctcataaccgccgcttcattgcttccttcttggaatgtggtcttgatcacgttttgctgcctgagaaggattatgagtcatcgccgccattggacgaagacaccgtggtcaaagagacccacttggccggaaatgcccacatgggaccctcgacattgacgcacctataaatcgagtcctcgtcgttaacgatgacgtgatcggtaatcgatacggcgcgcttgcagcatatgatctctacacctggaatcgcctctttttaacc

SEQ ID NO: 27441 - DNA, 429 bp, Glycine max
  Clone ID: LIB3108-036-QI-K1-C2
cccacgcgtccgccatccgctgcaaagaagccttcccagcctaaggaatctaagcccaagcggaaggatgaaccaaagaaagcagctaaaccagagcctaaacaagaagcagaaccagaggaggaggcacccaagcccaagcccaagaatcctcttgatcttcttcctccaagcaagatgatcttggatgactggaaaagactctactcaaacaccaagaccaacttccgcgaggttgcaatcaaaggattttgggacatgtacgatccagagggatattctctgtggttctgtgattacaaatacaatgatgagaacacagtttcctttgttacgttaaacaaggttggtggatttcttcagaggatggatctggctcgcaagtatgcatttggaaagatgctggtgattggatcacaggcaccattt

SEQ ID NO: 27442 - DNA, 503 bp, Glycine max
  unsure at all n locations
  Clone ID: LIB3108-036-QI-K1-C3
taccggttctcggacattcccgtggtcgactccacgtccgtccggtggctgttctcttcaatggccgttctctggctacnttctatcctagcacctccttctccttgtccttccggtcgtttcccgcaaacctttgagaacacaaaagtgttctatttcccttctgattcgtgcagatgcaagggtggtcaagcatgagacactccgagagcaagtaagagtgaagggtcatctaatgctcagtcttcaagtgctgctgctcctaaacccaagaaacccgtctattccttgaagaaaggtcagattgtgagggtggacaaggagaaatatctcaatagcgtcaattatctttctgttgggcacccaccttattacaaaggattagattacatttatgaggaccgtggtgaggtcctgggatgcgtatatttgaaacgggagaatatgcacttattgcgtgggtagggtttcccactgcttcagcatggctttctacggacatg

SEQ ID NO: 27443 - DNA, 434 bp, Glycine max
  Clone ID: LIB3108-036-QI-K1-C4
aaaaaatccatttggaaaaaggaaagataatcttcctattgctgttcctagtgcgaatggagctccaccaacaatgacttatcagtagcttgaaggggatgtactctgttctttatgctccgacaaatattactacataataggatgcatcttgcagctgtcacatgcatccattgatcatcaagtcatcgccattagcatccttgctcatgtgaatgaatgcagtggcatcatcatatacatacatttggctatgttaatactaatcggacatgcatatcttggcaacatgcgttggttcctggattactttcgtaggtgtttagattatgtatgttatcacctgtagaattgatgcatgggtctaagttttgtttaaattgcgggctttatggtcatatactttgtgtacattggcattaggaatgttattc

SEQ ID NO: 27444 - DNA, 406 bp, Glycine max
  Clone ID: LIB3108-036-QI-K1-C6
ctcgtcactagctctgtgcattcttctctcgctctctgccttccatcacactcggcatggcctttcccaagatagtagaagatggcagacactgaggatattcaacctcttgttcgtgacaatggaacaggaatggataaggctggatttgctggagatgatgccccacgtgctgcgtttcccagcattgtaggtcgtcctcgtcacactggtgtgatggctggcatgggccaaaaagatgcatatgttggtgatgaggcacaatctacgaggggtattttgactctcaagtaccccattgaacatggaattgtgagcaattgggatgatatggaaaagatttggcaaactttgcaagagcatacaccgtggaattcggtcgttgcaagttccctgagaacttcac

SEQ ID NO: 27445 - DNA, 321 bp, Glycine max
  Clone ID: LIB3108-036-QI-K1-C8
gtaggaggtggtgtcctaggctgaagaggattccactcaagctttagaactacacagagtggcctgtctcttaacatagatgtgtcaactacaatgataatttctcctgggcctgtggtggatttcttaatttccaatcaaaatgtgagagatccttttcaactcgactgggctaaagccaaaaggaccctaaaaaatctgaggattaaaactagcccatccaatcaagaattcaaaatttctgggctcattgaactcccatgcagagagcagacttttactttgaaaggtaaaggtggctgggatgcttgctgaggtatg

SEQ ID NO: 27446 - DNA, 435 bp, Glycine max
  Clone ID: LIB3108-036-QI-K1-C9
cccacgcgtccggagggagtcagagaaaccctaggtaagaagaaaagatgccggctggtcatggtttgagatcccgcaccagagattccttctctcgtcctttcaggaagaagggaaccatcgccctcaccacatacctgagaacctaccacgtcggcgactatgttgacgtcaaggttaacggtgccgttcacaagggaatgccccacaaattctaccatggccgcaccggacgcgtctggaatgtcaccaaacgtgctgttggcgtcgaagtcaacaagcaggttggcaacagaattatttctggaagaggattcatgtgcgggtagagcatgttatgccttcaaggtgcactgaggagttccgcctcaggaagattaagaatgatcagctaaaggccgaagccaaggtcaagggtgagaagatcagcaccaa

SEQ ID NO: 27447 - DNA, 201 bp, Glycine max
  Clone ID: LIB3108-036-QI-K1-D1
cacgacaaacaccagcacgggaaagggaggaggaaaaaaaaaaaaaaaaaacagaaacaaaaggaaaaaaaaaaaaaaaaaaaaaaaggacaagaaaagaaaaaaaaaaggggagaaaaaagcgaacacagacacgcggacaaccggaaagcaaagaaaggacagcggacacccaaagaaacaccggggaagcacaaaacc

SEQ ID NO: 27448 - DNA, 417 bp, Glycine max
  Clone ID: LIB3108-036-QI-K1-D10
aaaacacacatcttcaagaactaatacaatcttactgaatgtacaattcatatcagtcagagattataccaccgggcatcgttccttggccaaaatggttactccattcaccggcctcaaatccgtggctcgctttacaacaaccaagaccacctacgccatcaccctacattcttagcaactgtatgaagacaacaatacatacttgagtggccaccaatttacaacaagaagactgagaataccttctacttaccaaacctaaatgatcccgcaattacataacacgattttccaatacctcataaaagaaaagataggacccctcgctatcgaactcttataacaatcacgcattctgataccgtaatcacaacagctcatctgcatactattatacacgctactggaccatgt

SEQ ID NO: 27449 - DNA, 428 bp, Glycine max
  Clone ID: LIB3108-036-QI-K1-D11
aatctatgaagcttgggttatttataatttcctatcactgtgtctcgaatgggttggggggcctggatcagtagtcctaagtttaacaggtcgggttctaaagccatcatggtttctgatgacctgttgcttacctcctctggcgcttgatggtcgttttatacggaaatgcaagcaagggtgtttgcagttcgtgattttgaagcccattttacttgttgttacacttatactttatgcaaaggggaaatataaggatggaaatttcagtccaaagcaatcatacttgtatcttacaaatcatctatacgttctcatacacaatggctctctatgctcttgttttgttttatgtggcatgcaaggatctgcttcaaccattcaatccagtcccaaagtttattataataaaatctcgtgtattccta

SEQ ID NO: 27450 - DNA, 441 bp, Glycine max
  Clone ID: LIB3108-036-QI-K1-D5
cgcagaattagaagcttttgcccaattcgcttctgatctcgataaagctactcaaaatcaattagcaagaggtcaacgattgcgcgagttgcttaaacaatcccaatcagctcctcttaccgtggaagaacagataataactatttatactggaacgaatggttatcttgattcattagaaattggacaggtaaggaaatttcttgttgagttacgtgcttacttaaacacgaataaacctcaattcaaagaaatcatatcttctaccaagacattcactggggaagcagaagtccttttgaaggaagctattcaagaacagatggaactctttttactacaggaacaggtagaaaaaaattgattaatcatttaataactttataatttcactttcaaattcttataattagtatcttttaatatctttttatttcattt

SEQ ID NO: 27451 - DNA, 412 bp, Glycine max
  Clone ID: LIB3108-036-QI-K1-D6
gtttgagactctatcctacctgccagaccttgatgatgcacaattggcaaaggaagtagaataccttcttaggaagggatggattccttgcttggaattcgagttggagcacgggttcgtgtaccgtgagcacaacaggtcaccaggatactaccatggacgctactgtaccatgtggaagctgcctatgtttggttgcactgatgcttctcaagtgtagaaggagcttcaagaggctaatactgcataccccaacggcttcatccgtatcatcggattcgacaacgttcgccaagtgcagtgcatcagcttcatcgcctacaatcccccaggcttttaagtgtgaaaaatttgcaaagcattcgtagccgtcaccagactttgtttgtttgtacttaaactacatgtccat

SEQ ID NO: 27452 - DNA, 400 bp, Glycine max
  Clone ID: LIB3108-036-QI-K1-D7
cccacgcgtccgggaaagttctttgtacagctccgctgctgatgttgacaaacaatcaagggtttcttctagttgtcaattcaatgggcgagaggaaaaaagctcagcttctgccccaatggacagggaaaagtttgaagtaaagaattcttacggtggtgattctaccagtcagaagatgaactcttattccctaaatgttacagatgagaaagtgcaaagggtgtctcctccacgcagaaaagggactaaggaggagaaatctgaaagatctgtaaattgggtaaaacgggatgtcgatggttatgatcattccaccacaagctccaaacagcagagcacaggaaattataacattaccactggatcggggcagtctgaaacagaatcctcttctaat

SEQ ID NO: 27453 - DNA, 397 bp, Glycine max
  Clone ID: LIB3108-036-QI-K1-D8
tctagccattcgaattcccaatctaaaaccctaataccttcaaagaacgaagtagtgggtgcagtgatggcacctaaggcagagaagaagccagcggagaagaagcccgcggaggagaagaagtcgacggtgggagacaaggctccggcggagaagaagccgaaggccggaaagaagcttccgaaggagggaggagccggctgagaaggggggaagaagaaaaagaggaacaagaagagcgttgagacgtacaagatatacatattcaaggtactgaagcaggtccaccctgacattggtatctcaagcaaggccatgggaatcatgaacagcttcatcaacgacatcttcgagaagcttgctcaagaatctttcagacttgcccgctacaacaaga

SEQ ID NO: 27454 - DNA, 414 bp, Glycine max
  Clone ID: LIB3108-036-QI-K1-D9
aaaacacacatcttcatgaactaatacaatcgtactgaatgtacaattcatatcagggagagatgatagcaccgggcatcgtgccttggccaacatggttgctccattcaccggcctaaaatcggtgggtggctttacaagatcgaagaccaccaacgccagcacgctacttgatagcaacggtatgaagagaacataagcatgcttgagtggccaccaattgacaacaagaagactgagactaccttgtacgttgccaaacctaattgatgcccaatagcaacaggatgtccaataccgtcgtttatgaaaggataggacccctcgcttggaatcttagaacaagcacgcattctggatgcgtgagcacaccacgccatgtgcatactattatgcacgctactggaccatgtt

SEQ ID NO: 27455 - DNA, 347 bp, Glycine max
  Clone ID: LIB3108-036-QI-K1-E10
agtgtgctggaattctcccttacgatcggccgccccttctatgcactcatatataatacatcatatgtagcatgtttataaggcgtaatctgccttaatattccatatgtggcttgtggtggggctaatttttgaaattttcctcatcttatgatcatatactggcaaaggaaaaaaattttgcgatgtaacttttgaccatttacctgtctcacttcatgaaaaaacttaaataaatatacatttaactgtcgttcttacctacaaaaaattaaaatatcccatatacttcctctaaactattcttattttataaactcactttgccgtgatttataaaacttcat

SEQ ID NO: 27456 - DNA, 428 bp, Glycine max
  Clone ID: LIB3108-036-QI-K1-E11
cccacgcgtccggtgatttcagtgagtgatcggtgttcacttgatctcatcataatcgtgagcgtcaattgaagaagatgccgatcagaaacatcgccgtcggaaggcctgaagaggcgactcaccccgacacgttgaaggcggctttggctgagttcatctcaaccttcatcttcgtgttcgccggctcaggctccggcatcgcctacaacaagctcaccgacaacggcgctgccacccctgccggcctcatctccgcctccatcgcccatgcattcgccctcttcgtcgccgtctccccctcggcgccaacatctccggcggccacgtcaaccccgccgtcaccttcggcgccttcgtcggcggcaacatcaccttcctccgcggcatcgtctacgtcatcgcccagctcctcggctccatcgtcg

SEQ ID NO: 27457 - DNA, 440 bp, Glycine max
  Clone ID: LIB3108-036-QI-K1-E12
aaaaaaaaaaaaaaaaaaaaaaaaaaaaaataaaaaaaaactaaaacaaaaaaaaaagagaaagaaattaataaaacgaacatgccactcaataacatcttccatagtaacacctaaatactcttctctccccgacactttacaacctgctttctgtgaattcatttgaccctccatatttattttccttgcatcacacttccccttcgcctactacaatattacactaaaacgccctcacacatctcccttcctaatagttccgctacattgaacatgcattggcactctccctgtacctctacaaattaaccccaacatttgttttggccacgtgcaccgtgacctctacttttgccacttccctagcggcaacatcttcttctttctttgcttcctttatttcatcgtccatctgctttcctcgataagctcttaat

SEQ ID NO: 27458 - DNA, 394 bp, Glycine max
  Clone ID: LIB3108-036-QI-K1-E5
aaaaaacttgtgcctgcgacgaccaggggtttctgacagtgtggcaacccttgtaaagatggagaactaggcttgtgcttacatggcagattgggacacatcgcagatattttacagctcatgatgatgatatccctagtgcacattttgaaaatatggatgattgacaatgagtactttggttcatttttttcacattaggagtttggggttattacatggatagatgaatgtctgcagtgccattttatatgacgattaaatacaggatagatatttatatttaaaagtgacacccatgatagtttgttacttgcgtatgtattaatttctactcttgctagagatattcgatgactatgattgtcggtttgagcacaaatactcattctga

SEQ ID NO: 27459 - DNA, 445 bp, Glycine max
  Clone ID: LIB3108-036-QI-K1-E6
cagcggtatgcaatgtggagttgatacaaggagacacaattgtcatgggatccgacgggcttttcgataatgtttttgatcatgaaattgtgccaaccattgttagatacaaagatgttgcagaggctgcaaaggcattagctaacttggcaagcagtcatgcaatggattcaaattttgattctccctattcgttggaagccaggtctaggggttttgagccacccttatggaagaagattcttggaatgaagcttacaggtggaaagcttgatgatatcactgtaatagttggtcagattgtgagttcatgagatttgctaataatgaaagaagacaaagtcctgattgctgagatcactagagaagggtttgccttaagtatactgcggcaactaaattttggtgatgctctgagaaataaggatctattcattgaagtgag

SEQ ID NO: 27460 - DNA, 443 bp, Glycine max
  Clone ID: LIB3108-036-QI-K1-F1
tgcttgtttttgcagcgccgtaaaacctctgtgatattagatgcatcgaagtacatacggggtttaaagcagaagttgcaagaattgaaccaattagcagttgctgcaactcaaaaagacattgagtatggtccaatgcctatgcttaaagtggaacaacaagaggaggggtatctgatcaaggtgttgagtcaaaggagttgccaggggttgttggcgtttatattggaagcctttgaaaggcttggtcttgtggtgctccaggctagggcttcttgtgtggagagcttttgtttagaagcatttggaatcaaagagagcaatgaagatacccgtcttgtggatacacaagtagttgagcaagttgtatctaaagctataaatgattggaggaaagttacaaagcaatgttgatccagaaatgaactgtcctaataagaaca

SEQ ID NO: 27461 - DNA, 434 bp, Glycine max
  Clone ID: LIB3108-036-QI-K1-F10
cccactcgtccgcaatcactgattcaaagcattttgcttatatagaatactcaaaggctgaggaggcaactgctgctctggcattaaacaacatagatgttggggggcgccctttaaatgttgaaatggcaaaatcacttccaccgaaaccatctgttgcgaattcttcacttgcttcatcatctcttcctctgatgatgcagcaagctgttgcgatgcaacagatgcaattccagcaagcactgcttatgcaacaatctatgactgcacagcaggctgctaaccgggctgcaaccatggaaaatctgccacggagttagcagcagcccgagctgcagaaataagtaagaaattgaatcctgatggagttggaactgaagagaaagagacaaagcagaagtccagatcgccctctcctcctcatggaagatctc

SEQ ID NO: 27462 - DNA, 395 bp, Glycine max
  Clone ID: LIB3108-036-QI-K1-F11
aatgtattgtgggattctattctaagattttgagaatgtctagctgtgggtgtggaagcagctgcaactgtggcagcaactgcggttgcaacaagtactcttttgacttgagttacgttgagaagacaaccacagagactctagttttgggtgttgggcctgtgaaggcccaattggagggtgctgaaatgggtgttgcatctgagaacggtggctgcaactgtggatcaagctgcacctgtgacccatgcaactgcaagtaacgtcaagatgtataaccttgaagcagagatagcttggtaatatatgtatcaacaaataataagaagtagaagttgcgtttggagctttataataaagtgtttgcttaggaactgaagagaaagagacaaatc

SEQ ID NO: 27463 - DNA, 398 bp, Glycine max
  unsure at all n locations
  Clone ID: LIB3108-036-QI-K1-F2
ctgnctttgagcagaagaatgatatagcaaaggctgtggaggaggagcttgagaaggcgatgtcaacctatggatttgagatagtccagactctcattgttgatatagagcctgatgttaatgtcaagagagcaatgaacgagattaacgcagctgctagattgaggttggctgcaaatgagaaggctgaagcagaaaaaatactgcagatcaaaaaagctgagggagaagcagaatccaaatatctgtcaggactcggtatcgctcgccaacgtcaagccattgtggatggactgagggacagtgtgcttgctttctctgagaacgtgcctgggacaacagctaaagatgtcatggacatggtgctggggactcaatactttgacaccatgaaagag

SEQ ID NO: 27464 - DNA, 432 bp, Glycine max
  Clone ID: LIB3108-036-QI-K1-F4
cccacgcgtccgtctttctgcaactccaaaatgtcttccataggggcaaaaaatctagcgctcgcctcagcctttttgctccttttggtcggttttgcaacctcagacatcaaccaagacaaagcagaatgtaccgacaaacttcttggtctagctggttgtcttccctatgttggtggtgaagccaaagtccccgccatggattgttgctctggtatcagagaggttattgacaagagcaagaggtgcctctgcatcctcatcaaggatcgtgatgaccctaatcttggcctcaagatcaacgtcacccttgctctaagtttaccagatgcttgtcaaacacccaccaatataactcagtgtgttgatcttttgcatttggcacctaactccacggaagctaaggtgtttgagggggttaaaaatgccttg

SEQ ID NO: 27465 - DNA, 436 bp, Glycine max
  Clone ID: LIB3108-036-QI-K1-F5
cttagatgaggataccaaggtcaagggtatggcagccattgatgttgtgtgcaacccatgggggaaatctggaggagctctgattcagcagttcatgatcttaacttttggttcactagctaactcaaccccatacctaggaggggtccttctggtgattgttcttgtctggttatcagcggccaagtcgcttgatacccagtttactgcattgcgccgagaagaagaacttgagaaagagatggaaagagcagcagctgttaagataccagtggtggccaaggatgaggatgaaaatggttctcttaaaagtgttccactgttaaatccaacagctggtgactcctcaagtatattgaattgaactcaactcacagtatttaaagcttaaactacattgaattgcaaggcatgaggagtaagccaaactcatgag

SEQ ID NO: 27466 - DNA, 388 bp, Glycine max
  Clone ID: LIB3108-036-QI-K1-F6
cgtccgttcttgttagtgcaattccgtaaaacctctgtgatattagatgcatcgaattacgtgcggggtttaaagcagaagttgcaagaattgaaccaattatcatttgctgcatctcatttatacttttagaatactccaatgcctatgcttaaagtggaacaacaagaggaggggtatctgatcaaagtgttcagtcaaaggaattgccattggttgatgtcctttatattggaaacctttgaaaggcttggtcttgtggtgctccaggctacggcttcttgtgtgtagagcttttgtttacaatcatttggaatcaaatatatcaatgaagatacccgtcttgtggatactcaagtagttgatcaagttgtatctaaagctatta

SEQ ID NO: 27467 - DNA, 437 bp, Glycine max
  Clone ID: LIB3108-036-QI-K1-F7
cactgatctccattcccattccatggcttccactgaatcatcccctttcaagaaaattgagagtcaaagggatgacactacatttgacgcatatgtggttggaaaagaggatgctcctggaattgttgtgattcaggagtggtggggtgtggattacgaaattaagaaccatgccgtgaagatttctcagcttggtagtgggtttaaagctcttattccagatttatactgaggaaaggttggtctggatgttgctgaagctcagcatttgatggatggtcttgattggcaaggtgctgtgaaagatattgctgcttcggttaactggcttaaagcaaatggctcatagaaggctggtgtaactggattttgtatgggaagtgctctgtctattgccagttcttggcttggtcaagaggttgacgcttttgtagcat

SEQ ID NO: 27468 - DNA, 331 bp, Glycine max
  Clone ID: LIB3108-036-QI-K1-F8
gaggatttggtgaatctgagagactacgcagtcactgcagatgatcagggaaataagtgggctttatcactctttgctggtgcacctgctaataatgcaaatggatcatgggaagccttcccgtcaaatggacagccagaagtgacttcagcctggcaaaccccgtgcagcagatcctgagaaagctgattgggaattggcattggtagagactgctagcaatttttcaaagcagaaggcagctttaggtggtgggttggatcctctattgttgactggtatgtatgatcaaggaatggtgaggcagcttgtcaacactacccaactgaat

SEQ ID NO: 27469 - DNA, 347 bp, Glycine max
  Clone ID: LIB3108-036-QI-K1-F9
tgaaaaaaaaacctttaaatcaaaacaaaacaatcaaaaactaaaaaaaaaaaaaaaaaagggtagaatatattaatataataaataactcaaacatatgcaaccatgcctcaattttcttaaaagaataatttccataacgtatcccatgctactttacgatattctactatacactagatcattaaccaattcttcatccattgaagacttgattattaacattcgcttgcctgctttatcatccaacttgtgaatactacccattaacatctattctaagtctatatggttttagatacacgcacactaaccttcccacaaatattgtcctattagatatgact

SEQ ID NO: 27470 - DNA, 339 bp, Glycine max
  Clone ID: LIB3108-036-QI-K1-G10
gaaatatgagccttccaagaggatttctgctaagaaagcaatggaacatgcttactttgaggacttggacaagaggcacctttagaacgaataaattggtccaagatttggaagtagaattttatgactaccaatttactctatgcttctctcgagcgtgtatcctaatgcgcttaaggagtggttgaccttgctatttatttaatagctgcttctatgtcttttattcattctaatggaaatatcgaggtgttttcgtgtcacagaagaagtgaaggacaaggcctccaatggagaaccaaaggcgccgctcatcgacgtcacgcagttcgggtactt

SEQ ID NO: 27471 - DNA, 298 bp, Glycine max
  Clone ID: LIB3108-036-QI-K1-G11
gaaccatctcccacacaatgctcactccacaatgaacattccctccaacacactctattacctctaattggcctatgacgctctccacgaacctgtctttgcggttctcaaaacttcaaatcctgaacgaccattctacgattttgcagcatgctgcattccacatcttgccattaccctcaaaattcacagtgcctatttcagaccctgccctgcatggaccatatgcttccttgacacaccaaaacaacaacttggtgatgctgctgctgccaatagatcaaaccctgaagactac

SEQ ID NO: 27472 - DNA, 434 bp, Glycine max
  Clone ID: LIB3108-036-QI-K1-G12
cccacacgtccgccctccctcaaatcccaaaccagcaaaaacctttcttcacaaaatggcgtcaacaactctaacaaccctcaccctccgcacgctatcttatcctacaccctcctcttcttaccctacgcacctctccgccaaaccctcctccctccaattccccaatctctcccaccgcgccgccaccacgcgccgcccccgtgtcgtcgtctccgccgttgaggcgccggataaaatcaccaagctcggcgacgaaatcgccggactcacgctcgaggaggccaagaacctcgtcgaaccctcctccaggacaagctcggcgtctccgcggcggcgttcgcccctgtggcagtcgccgcgggtgccggcggcgctgtggcggacgcgccggcggtggttgaggagaagacggagttcgacgtggtgatcga

SEQ ID NO: 27473 - DNA, 341 bp, Glycine max
  Clone ID: LIB3108-036-QI-K1-G2
gttatagtggaaggctaaagtggctcgagaggttcgcatatgtgaacaccacaatctatgcagtcacttccattccccttctcatgtattgtaccttacctgctgtctgtctactgactaacaagttcattattccacagattagtaacattgcaagtatatggtttatctctctctttctttgcatctttgccacgggtatccttgagatgaggtggagtggtgttggaatcgatgagtggtggagaaatgaacactttagggtcatcgctagtgtctcggcccatctttttgccgagttccaaggtttactaaaagggcttgctggaattgacactaac

SEQ ID NO: 27474 - DNA, 339 bp, Glycine max
  Clone ID: LIB3108-036-QI-K1-G3
cggctagagctgtcccaaatgcacatgctcctttctcctttggtactcttctgtgaacggagttgattctcatggggtgggctgaaagcaagacatgggtggacttcttcaacccagactcacagtcagtggaatgggccactccatggtcaagaacatctgataactttgccaatgccactggtgaacattgctaccctatacgcaaattctttgaccctttgagcttgtccgttactatcaaggatggagtttacattccggataccgagaagctcgaaagattgaaattggctgagataaatcatgccaggatagctatgttggacatgctgattt

SEQ ID NO: 27475 - DNA, 434 bp, Glycine max
  Clone ID: LIB3108-036-QI-K1-G6
cgcgagtatggaaagtttttccatgcttgtgttgtgcattgtccctgaatttgtgcgtggattctgggacgtcactcagtctgagtctgtttctgcaaatttcaaaaccctctctctcgttactcgccatcactagcgagtgctccttcttcctcttcgcgaaattcgtatgcgaagaatgaggtagggattcgcgctcctgctttctcagactgcctaattatcttttattctgcgaagtaactgagagattgaagatgggaggagatgattctggtttggagagtgacaattttgattggaacactgaagatgagcttgaaattcagaactataactcgtcgtcttcatgtttaaccctttcttaatgagatgctcgtacttgctctggagaggcaagctcgtctgcactttggctaattccaagggcttga

SEQ ID NO: 27476 - DNA, 271 bp, Glycine max
  Clone ID: LIB3108-036-QI-K1-G8
tcgatggtatccggagcaaccttcttcgccgttacagctcaagagccaccagcatgtggggagtgtttaagcataacaacgttatccccaatggacacttcaggaaacactggcaaaactatgtgaagacttgattcaatcaaccagcacggaagaccagaaagcgtatatctcggcagaagaaggctgtcaatatgtttccaagacctactgctggacctctcatagcaattgttcatggccagactctgaaatacaacatgaaagtcac

SEQ ID NO: 27477 - DNA, 432 bp, Glycine max
  Clone ID: LIB3108-036-QI-K1-G9
gagaaaagagaagagaagatgacaacacgcttcaagaagaacaggaagaagaggggccacgtcagcgctggccacggtcgaatcggaaagcacaggaagcaccctggaggacgcggtaacgccggaggcatgcaccaccacaggatcctcttcgacaaataccaccctgggttcttcggcaaggtaggaatgcgctattttcacaagcttcgcaacaaattctactctccgatcctcaacatcgacaagctgtggtccctggtcccgcaagaagtgaaggacaaggcctccaaggagaacctaaggcgccgctcatcgacgtcacgcagttcgggtactttaaggttctcggaaagggcgttttgccgcagaaccagcccgttgtggtcaaggccaagcttatttccaagatcgctgagaagaagatcaaag

SEQ ID NO: 27478 - DNA, 429 bp, Glycine max
  Clone ID: LIB3108-036-QI-K1-H11
gctagagatccaaagccaacactccttacgctttccatttcactgtatccgctctgtgcagaacacaccaacatgggcgaacgtgaccacacagaccgtaccactttcgaccccttctatctcagacccctacacacttgaaacgagaaaccacagcggatcatggcaggaacactcctggactatcaggagacccggatgcaattgacaaaaacagggctcctgatgaaatacatgaaaaatcggaccctctagcagatctacctacacatcactcccaatcaagcgagcaccaaatcatttagacaccctcttgaagcccacactgaaggacaaagctataaacatcatacccttacagaatcagacccactccgttcagaaaacacacttcaaggactcacaaatgatcctggacaacaacggcca

SEQ ID NO: 27479 - DNA, 389 bp, Glycine max
  Clone ID: LIB3108-036-QI-K1-H12
cccacgcgtccgagatcatgaccttagatgatcagtttaaggctaactacagctcatctggaagaatgacaagaaaacgtacaaggcagaatgctttggagaaagaagcaaggcttatatcttttgaaaatgatcaagctaattctgtggagagagagtcaactgaaaacacttgcaaggagaccgcttctggtaagctgctggagggctgtaccaaggctaatgatcaaccaggcattgatgtacaggaaagtggtcgtcgtaactggcttattcaagttctttttgagtatgcactggggccctgaaattatccactgactatcaaactgaaggaatttgcctttctgcagtgcatcaatcaagcggttactccttcagtttatcgt

SEQ ID NO: 27480 - DNA, 437 bp, Glycine max
  unsure at all n locations
  Clone ID: LIB3108-036-QI-K1-H3
gngnaacgggggactntggaaatatnctcgtcatcctaactattttggtgaaatattgcgggggtggggaatttttgtggcatctacacctgtactgaagggtgctgaatggctggtgatcattggaccaatctttctcacattattgcttctttttgtcagtggcattccacttcttgaggattcagcggataaaaagtttggcaatgtagatggatataggatatacaaaaagagaaccagccctttaatcccgttgccacgatcaatctatgggaacttatccgcatggttcaaaacaacttttctcttcgagtttccattctacagtcgtaatctaccacaagaagagaactggtgaaatggtattaaattttttagtatctgctcaaggtgcaatgcaaacagtgggaaaatcagtgatgctttgaaaattg

SEQ ID NO: 27481 - DNA, 327 bp, Glycine max
  Clone ID: LIB3108-036-QI-K1-H4
atcgtcttctgcagaaatttgcgccatcgtcgagagaagcgtgagagacttctcgtttgtgatgagagctaagatagtttagttgtcaagtcataaatcagtatcatcactttaaatttcattagaagctgtcaaaatgtcccggaagggtttgatggagcaagacctgagtaagttggatgtaacaaagttgcatccactttctccagaagtcatatctcggcaggctactattaatatcggcactataggtcacgtggcccatggcaagtcaacagttgtgaaagcaatatcaggtgtccagactgtgcgtttcaaaaatgagtt

SEQ ID NO: 27482 - DNA, 131 bp, Glycine max
  Clone ID: LIB3108-036-QI-K1-H5
gcttttgatttggggtgaaaattgttttacttacttttttttatcaatttgtattttcgtgttactttctcactagttgccccgaggggaagacatgcgattcatgaatcatgttggtcaaatgatagtac

SEQ ID NO: 27483 - DNA, 94 bp, Glycine max
  Clone ID: LIB3108-036-QI-K1-H7
gcagtgtacttcaaagcttttcgtgatttttaaaagtgctactctatacttaacattgagtacatttaaattgtcttttaaccttctaaaacat

SEQ ID NO: 27484 - DNA, 458 bp, Glycine max
  Clone ID: LIB3108-036-QI-K1-H9
cgggctataattactaactcgacccacgcgtgctgttacttgatcttacgctgtaagaaatgacttgtaaaacaactagaaacattcctcacataaaaaaaaaaaaaaaaaaaaaaaaaaaaaaaaaaaaaaaaaaaaaaaaaaaaaaaaaaaaaaaaaaaaaaaaaaaaaaaaaaaaaaaaaaaaaaaaaaaaaaaaaggggggtcccctttaaaaaatcaaaattaactatcccatcattgcaacttattaactttttattagttccaccaaaataaatttaattgccctgcttttaaaaacaccttaactgaaaaaaccctacctttaccaattttaaaatccccttgaaaaaaatacccttttcccaagttgtagttatatgaaaaaggcccgttcaaatcgccttttcaaaaatttacgaaccctaaattgaaaatggtaccccccctttaac

SEQ ID NO: 27485 - DNA, 323 bp, Glycine max
  unsure at all n locations
  Clone ID: LIB3108-037-QI-K1-A1
ctctggttgaagtcccaaaacaaacttgataaaatcttcaaattaatagtgccagaagcaccagtcaataatttccccaacttcgaaatcacgaattttgaaactgaagagaaaatattctcaaattgcgtttgaatatggctataagctgcaacaaacaagaattcttgctacgacccgtttttcacgctagagaatccaccacagcgtttctaccttcactaagcctctcacttaaactcccaccgcaatcacattcaaaagtcaggagggttgntaaaatgtctgcaactgaagtcacaagctctaggatatcatacgag

SEQ ID NO: 27486 - DNA, 345 bp, Glycine max
  Clone ID: LIB3108-037-QI-K1-A10
gtcgctgtccggcgtctgtggacctgacgtatctggcgcgggatcatggagctccgaggcgaataatagggtgagccaagccgatgactctctgaggaaagtgatggactttagatgctggagtcagggctgaaccacacgtgatgaacggtggagattaaagtagacggcggagaaagggaaccgcgtctgttttcgggtcgtcatcggatctgagttgacctggccgaatctgatcggatgactcggttggagatatgaacttggagtgctctgatcttgtaaataggatatgtacgtgtatagaggatatgggattgttgtcactcacaagggtagatgatg

SEQ ID NO: 27487 - DNA, 406 bp, Glycine max
  Clone ID: LIB3108-037-QI-K1-A12
aaaaaagcctcgtctctcgtgccgattctccaggacaattcccttcacccaacctagtgggtacttgcaattattgtagaagatgagtacgttggatgcaacaagggctgaacttggtcttcttgttttatatttgggcaaggctgaagcaagggacaaaatatgcagggcaatacaatatggttccaaatttttgagtaacggggaacctggtactgctcagaatgtcgacaaaacaaccagcttggcacgaaaagtcttccgtctttttaagtttgtcaatgacctacatgctttgataagtccaacaccacagggcactcccctccccctaattctgttgggaaagtccaagaatgcactactctccactttcttgtttcttgatcaatttgtgttgcttggc

SEQ ID NO: 27488 - DNA, 370 bp, Glycine max
  Clone ID: LIB3108-037-QI-K1-A3
gcgagttctttccaacacacactttctctctctatctctctctctctctctctctggttggctttcatttggttcattgttgttgatgatgtcacgcgccgccgtgttattacacgcgcaggaggaggaggaggaggagtgtagtacttcgacgtcgtcgtcgatcgggaggaacagcgacgtgtcgtcggagagatcaatggaggaaggagaaaacgaggtggaaagtgcctaccatggacctttgcatgccatggaaactttggaagaggttcttcccatcaggagaagcatctcgaacttttataatggcaagtctaagtcattcacaacccctgcttgatgcagtgtctttcccatcagtgaaaga

SEQ ID NO: 27489 - DNA, 406 bp, Glycine max
  Clone ID: LIB3108-037-QI-K1-A4
gcaaaacatgtctctaatagcttcactctcctccacaacttcacaactcacttccctgccttccctcgcttcttcctcctctccactttctcgcaaatttcccctcactttccgggaaaaaaacagaactccaatcacacctcacaagctccctttttcagcaaggcctaccaccaccagagtggtgttggtgaagtctcaggccacagcacctgcttcttctgaggctgtggcagtgacacctgtgtcttctgagatgaaggcatgggtctatggtgaatatggcggtgtggatgttctgaagctggactccaatgttactgtgcctgatgtgaaggaagatcaggttctaatcaaagttgttgctgctgctcctaaccctgttgatgccaagaggaggcaggga

SEQ ID NO: 27490 - DNA, 439 bp, Glycine max
  Clone ID: LIB3108-037-QI-K1-A5
gcgctctggttgaagtcccaaaacaaactttataaaatcttcaaattaatagtgccagaagcaccagtcaggaatttccccaacttcgaaatcacgaattttgaaactgaagagaaaatattctcaaattgcatttgaatatggctataagctgcaacaaacaagaattcttgctacgacccgtttttcacgctagagaatccaccacagcgtttctacctgcactaagcctctcacttaaactcccaccgcaatcacattcaaaagtcaagagggttgttaaaatgtctgcaactgaagtcacatgctctaggatatcatacgaatcctttgcattaaaacctgctgagcacccaacttatgatttgaaaggcattatcaagctagctctttaaaaaaaagcttggcgatcgatgtgatgtaacatgcttggccacca

SEQ ID NO: 27491 - DNA, 367 bp, Glycine max
  Clone ID: LIB3108-037-QI-K1-A6
tcttcagcgactgcgtttttggatcggaacctcttctgcggcgtggcaatgggacagtccaacgtttggaactctcacccaaaaaactacggtcctggttctcgcacttgccgcgtgtgtgggaatccacatggactgatcaggaagtatggccttatgtgctgcaggcagtgcttccgtagcaatgccaaggaaattggcttcatcaagtatcgctaaaagagcagttgtcaactacggaccaatattgtgttctggcactaggatgttttgaggatgttatgtttgaagaaacttgagactttcttttttcatctaattaattatcagacgtaatttgtggtactaagaatacttttatataaat

SEQ ID NO: 27492 - DNA, 401 bp, Glycine max
  Clone ID: LIB3108-037-QI-K1-A7
cccacgcgtccgactgatagtgttattggtgaaggatgtgtgattgagaactgcaagattcaccattctgtggttgggctgcgatcttgcatatcagaaggtgcaattattgaagacacgttattaatgggggcagattattacgagacggaggctgataagaggtttctggctgccaaaggcagtgttccaattggtataggcaggaactctcatatcaaaagggcaattattgacaagaatgctcgaattggggaaaatgtcaagattattaacagtgacaatgtccaagaagctgcaagggaaacagatgggtatttcataaaaaggggggattgtcacagtaatcaaggatgctttaattcctagtggaacagtcatctaaacacaaccaccttccc

SEQ ID NO: 27493 - DNA, 433 bp, Glycine max
  unsure at all n locations
  Clone ID: LIB3108-037-QI-K1-A8
cccacgcgtccgcccacgcgtccgcaactattctacttaccttttctcttaatccaaatatcatcatctgaaacgatggctgccatggcaaccacaaccctctcttcaaacccgaaactctcatttttccacggaaagcccgttacatattcttcccgcgtcgcacccaccaccaagttattctcatccaaacaaggcacaatctccatgtccctaacccaacccccatacgacctccaatccttcaaattccaacccatcaaagaatccatcgtctcacgcgaaatgacgcgccgctacatgaccgacatgataacctacgccgacaccgacgtcgtaatcgtcggagccggctcggcggggctctcctgtgcgtacgagatcagcaagaaacccgccgtgagcgtcgncataatcgagcagtccgtgagcc

SEQ ID NO: 27494 - DNA, 124 bp, Glycine max
  Clone ID: LIB3108-037-QI-K1-A9
agcagggtaagtcttgtcagtcctgacttttccatcaacaagaacatgtctctgctgggttcatggatgttgtttcaatcccaaaaaccaatgagaactttcgcctggtctatgacacttaaag

SEQ ID NO: 27495 - DNA, 314 bp, Glycine max
  Clone ID: LIB3108-037-QI-K1-B1
atcggccaggaccaaacagcatccgcggcagcgacggtaaccctccaacaacaacaggtccgctgcgaaaaatgtctctggtggcgaacgaggatttccagcacattctgcgtgtgctgaacaccaacgtggatgggaagcagaagataatgttcgcaatgacctccatcaagggtattggaaggagattcgccaacatcgcttgcaagaaggctgatgttgacatgaacaaaagggctggtgagttgactgctgctgagttggatagtgtgatgactgtggtggcgaaccctaggcagttcaagatcccagac

SEQ ID NO: 27496 - DNA, 405 bp, Glycine max
  Clone ID: LIB3108-037-QI-K1-B10
cccacgcgtccgttggaggaggcatttacaaaggaattggatttggaggggttggaggtggtgtaggtgctattggtggtgttggtggtgtcattggtggtttcaagcatgttgaagccaacaagccttgaaaaatcaattgagttaattacgtacgtacgttcaataattccagatttgtgatgataattactaagattagtgtttcattttcacagttatggtttgctattgttaatttgttttctttctaatgtcgttttgtaccccgtggttgtcattttgatccaaattatttcaattttattgtaaaataatgaaatttgccttcctgtttctaaaaaaaaaaaattatttttatttttatatttttatttttttttattttttaatttttttttcttt

SEQ ID NO: 27497 - DNA, 370 bp, Glycine max
  Clone ID: LIB3108-037-QI-K1-B11
ggaaggagccaaactgtgagagctctaaacaaaaatgagcttcacattcaacctccgtgttcccaaagctctgcctcctcttccctcttcatcacgtggaacaacttctctcttcttttcttcaaagcagaaatcataccacaacaacactagtccttgccaatcactacttataacatgcagaagccacaaaccaaattatgatgataccagcctaaagtatacaagtttggcactgcatgtaggagcactcttggccttgggttcttctacgggcaccatctttaaacttcacgaaattccctctggacacttgcttgccagacccttggtctgtacccgaagattcttcaaaaagtacaagttcata

SEQ ID NO: 27498 - DNA, 391 bp, Glycine max
  Clone ID: LIB3108-037-QI-K1-B2
ctttgaagattgagatttttccatattcagtgttttatatgttttttgagcaataccttcatatatggaagactgcactgatcaaccttgctatagctattggtgcagtatttattgtgtgcttgattttcacaagcagtttatggagctcatcaataattttgttggtgttggcaatgattgttgttgatcttatgggtttgatggccattctgaatatccagttgaatgcgctctcggtggtcaaccttgttatgtcagtgggcattgctgttgagttttgtgtgcatatgactcattctttcactgtagcaagtggagacagagatcaacgtgctaaggaagctttgggtacaatgggtgcttcggtgttcagtggtatcacactaac

SEQ ID NO: 27499 - DNA, 369 bp, Glycine max
  Clone ID: LIB3108-037-QI-K1-B3
cccacgcgtccgaaatgttgatcccccagagatcattgttgacaaccaagtctatctgccacctggacgccatcatcacaactctcatgatctctactgctctggtggggtggtgttggcttctcgtgatggaaagattgtgtgtgaaaatactcttgatgcacgacttgatgtagtgttccgtaaaaagcttccagagatccgaaatcagctctttggacaagttgttgcttgaagattttgattgtattgtttggttacccctgtaatatttatattccgaagcataagcttgtctttggacctaaatagctatcttgccatagattctgtcaacttataatggtcttttagataacaccatatttc

SEQ ID NO: 27500 - DNA, 398 bp, Glycine max
  Clone ID: LIB3108-037-QI-K1-B4
gcgagaatttctatctatctcttgtttcaatttcaacaacggttactcctttttcgtttggagtttcaatcgggccatcatcatgtctaccgcatcgcaacccaaggccaagaaaacggcgtcgtccaagaagcccctctcccaccctcccttcgccgtgatgatagcagaggcgattgcgagtctgaaagagagaaccggttcgagccaatacgcgataaccaaatacatcgaagggaagcacaaggagttgcctgcaacctacaagaagcttgtcctcgttcatctcaagaaatctgttgctgctggcaagcttgttaaggtgaaaaactcctttaagctcgcaccgactaagcctgcttccgttaaggccgctgctcccaaaagccaaccaaagc

SEQ ID NO: 27501 - DNA, 352 bp, Glycine max
  Clone ID: LIB3108-037-QI-K1-B5
cccacgcgtccgcccacgcgtccgtaatcagagccaccctttgtagacgttaacgagctcgggagcagcttccatggaggcatagacggagatgcagtcatgaacaggacaaagttcagattcttcttctgagcaaaattttggggcagcaactaactaaatcctcaaaacagtgcaatctagtgaagattgttgggtcagttatggcagcgttgatttccaaaaggatcctacgttgatcttctgggtccttgcattcactaggacgatgttactttgattcacctgggtttgcctctatttataaaccacgtgatgtatgcggcggtttatcttgggagagaatgttttc

SEQ ID NO: 27502 - DNA, 410 bp, Glycine max
  Clone ID: LIB3108-037-QI-K1-B6
cctcaaaccactttccccacactcttttagtgtgtcgtattttttcctctctttctggacaattaggtcttggaccgacccttttgtgtaagtgcaatggccatggctaagcttgtatgtgttctgcttctggcattccttggcatttccatgatcacaactcaagttatggcaacagattctgcctatcacttggatggaaggagttatggacctgggagtctaaagacctcacagtgcccttctgaatgcacaagaagatgtagccagacacagtaccacaagccgtgcatgtttttctgccaaaaatgctgcaaagcgtgcctttgtgttcctcctggctactatggcaacaagtctgtgtgcccctgctacaacaactggaagaacaagcgtggaggacccaaatg

SEQ ID NO: 27503 - DNA, 360 bp, Glycine max
  Clone ID: LIB3108-037-QI-K1-B7
attcgctaaacttgtccagctcaattgactgagctacgtgagtgacttgttttaaagcctttaatatttatgtttgattcttacgtataaaaaaataaattcattagacttgtccaggtctcatggtcattgaattgctcgtgttaatgtgaagtaatttaataaactctcgtgcttgatttttgttttccatttctctgttccaaaactaaaaatgtgttgagatttgagtattactatcttaagaagggttgtttgccaatgttgcctgagagtcttatccacattttccctggttgatacatgtcgggctaaggatgctatttgtcctttactatcacgcatgttttaattaattac

SEQ ID NO: 27504 - DNA, 320 bp, Glycine max
  Clone ID: LIB3108-037-QI-K1-C1
gaacgctgctgccgaaacccttccggaaccctaaggtaagtgagtaatcagtggttgagaatggtggagaaggcgaagggtagaaaggaggaggtggttacccgtgagtacaccattaacctccacaagcgcctccatggctgcacatttaagaagaaagctcctaaagctattaaggagataaggaaatttgcccaaaaggccatggggaccaatgatgtgagggtggatgtgaagttgaacaagtttgtctggagccagggaatcaggagtgttccaaggaggattagagtaagaattgctcgcaagagaaatgatga

SEQ ID NO: 27505 - DNA, 235 bp, Glycine max
  unsure at all n locations
  Clone ID: LIB3108-037-QI-K1-C10
accaaacncaagggcggacgagccgaaaccganaagggaaagcgcacagcgcaacggaaaaangccgcaaagaaggacagcgacgaagagagcagaagcgcgagaacaccagcaacgacacgaacggagcacaacggcgacacagggaacgaagaagngcacaaccagcaagaaggaccgcaccaacaagcacgcgacgcacaggacaaaaaaaggggaaccacaagggagagag

SEQ ID NO: 27506 - DNA, 396 bp, Glycine max
  Clone ID: LIB3108-037-QI-K1-C12
cccacgcgtccgaaaaaagattctaaagaaatataactaatattctttagaataatcgaaaagaatattaaattcaaataaattttagatagaaaaaagacttaaaaaggaggatttgaaatgcgagatctaaaaacatatctttccgtggcaccagtagtaagtactctatggttcggggctttggcgggtctcttgatagagatcaatcgtttttttccagatgcattgatattcccttttttttcattctagttattgacacggaaaggggtgaagaagattatagatccaattaagtattaaatatatgtaattaatatgtaattaatctcctcttctttatttcgtcttttatttcttcttttttttacaattgtaataggaatagttagg

SEQ ID NO: 27507 - DNA, 417 bp, Glycine max
  unsure at all n locations
  Clone ID: LIB3108-037-QI-K1-C2
aatgaattttgtttcttattcgtcggtttttattttatcttttttgtaaagaaggggttcggttaatgaaaagtaaacatagaattaattaaaatagaatgatctattattaattattctgaatctttatctttgtacaatattttttttttcaaaaacattagttcgtttttttaactaatttagtattttttattacaataaacaatatctatgtttggaaaattttagaaaaagtattataatattcaatgttttacttgaaatagtaaaaaatgggaattaagatagataaaatatatggctaattaaagataaatatattttcataaaaatgtctttcacatcgaattctataacaatcaanagctatactaattatatggcagtttcaaaaaagcgcacttctatatcaaa

SEQ ID NO: 27508 - DNA, 404 bp, Glycine max
  unsure at all n locations
  Clone ID: LIB3108-037-QI-K1-C3
nccacgcgtccgcaaatcttagccgccattgatttttcctcttccatttctcttacggtctcagccttggtcgattacccatttggttatttcgccctaatggctcttgctccatccaaagtttccaccttttctggtttttctcccaaacccagtgttgggggtgctcagaaaaacccaacttgctctgtttctctgagctttttgaatgagaaacttggaagcagaaaccttagggtttgtgcctcaacggtgcctctcactggggtgatttttgaaccgtttgaagaggttaagaagagcgagcttgctgttccaactgctccccaagtctcggtggctcgtcagaactacgctgatgagtgtgaatctgcgattaacgagccgataaatgtggaatacaa

SEQ ID NO: 27509 - DNA, 342 bp, Glycine max
  Clone ID: LIB3108-037-QI-K1-C5
cccacgcgtccgaaatgcttctcttcaaattctttttcattctccgtctccctttgggcttatgcagcagaaacacctaacagtttagccattctttctctcattttatttagtaacaacaatttcattcacaggacaagctagaacaaagttcaaccacactaaaccaaattagctacccttttgggtaaagagagtcatggctggagcattaaaaaagtgcatgatgctgtgttgcacgagcaagattgtctcgaaggaagagatggcaggagaatcatacgaggaagccatcacgagtctgaccaagcttctcagtgagaaagctgagctcggtggctt

SEQ ID NO: 27510 - DNA, 440 bp, Glycine max
  unsure at all n locations
  Clone ID: LIB3108-037-QI-K1-C6
attttggttcagttaattagtttctccctttgcactttctcttgtggccacaaagccgtgaaatcacgtcctttgcacatagcaatgtatccatggctggccatgggtcaccaaatcgcattcctccatctatgcaacaagttagccattaggggtcacaaaatctccttcatcaccccaccaaaagcacaagccaagttagaaccattcaacttgcacccaaattcaatcacctttgtcaccatcaatgttccacacgttgaaggccttcctccagatgcacaaacaacagcagatgtcacttaccctttgcagccacagatcatgacagccatggatctcaccaaagatgacatagaaacccttctcactggcctcaaacctgacctcgtcttctatgacttcacacattggatgccagccctagcanagcgtttagg

SEQ ID NO: 27511 - DNA, 383 bp, Glycine max
  Clone ID: LIB3108-037-QI-K1-C7
ctgaaatggcctcttcagtgatggcatctgtggccctcaaacctggccctttcactggtgagaactcctcaatgagaggccttccctctctctcaaggaactcttcttcattcacagttgtggccagtggcaagaacatcaagactgacaaaccttatggaattaatggtggcatggctttgacggatggaactgatgcatctggcaggaaaggaaagggaaagggtgtttaccagtttgtagacaaatactgtgctaatgtcaatggttacagtcctatctactacaccaaagactggtctacaaccggtgatttctacgcttgcggtaccacttgcttttcctatctgggcttagactctacttcggcctttaacttgttg

SEQ ID NO: 27512 - DNA, 142 bp, Glycine max
  Clone ID: LIB3108-037-QI-K1-C8
taaaaaaaaaaaacaataaaaacaaaattaaaaaaacaaaaaaaaacgaaaataaaaaaagacaaaattacatactcatacatccatcataatacctctttcttaatttcacctcatttctactctcaaacccacattttac

SEQ ID NO: 27513 - DNA, 358 bp, Glycine max
  unsure at all n locations
  Clone ID: LIB3108-037-QI-K1-C9
cactagaagtgttggatgcatttctatttctaactaattattgtgcttattattatgggtgagaaagaaaagaatggcaaagttaataaaattctttgagttgaacacaggggccaagattccttctgttgggttaggcacttggcaagctgagcctggtgttgtagccaaagctgtcaccacagccattctggttggatacaggcatattgattgtgctcaagcgtataacaatcaagcagagattggttctgctcttaagaagctttttgatgatggtgtggtgaagcgtgaagacttatggatcacctncaaactctggtgttcacatcatgcttcagaagatgtgcccaaagca

SEQ ID NO: 27514 - DNA, 418 bp, Glycine max
  Clone ID: LIB3108-037-QI-K1-D1
ctgaaattttaattgacttttctcccctcataaaaaaaacctaccaatggctcccgcggaggcagagaagaagcccgcggagaagaagccggcagagaaggccccagcggagaagaagccgaaggcggagaagaagatatcgaaggaaggaggaagcgagaagaagaagaagagaacaaagaagagcgttgagacctacaagatctacatcttcaaggtgttgaagcaagtgcaccccgacatcgggatctccagcaaggctatggggatcatgaacagtttcataaacgacatcttcgagaagctcgcccaggagtcatcgcgtctcgctaggtacaacaggaagcccaccattacttccagggagatccaaacggcggtgcgtttggtccctccctggggagtggccaagcatgcc

SEQ ID NO: 27515 - DNA, 358 bp, Glycine max
  Clone ID: LIB3108-037-QI-K1-D11
gtcatttcttgcccttgagcaagttcatgtgttttggacttgtgatgggtgtgttagggtcatggttgccttgtatatatatatatatataaatgtttggtaattggtcgcttctgtataaagttcggctagttaatctgaattatgaatctctgcttataaaaaaaaaaaaaaaaaaaaaaaaaaaaaaaaaaaaaaaaaaaaaaaaaataaaattaaaaaaaataaattatattaaataaaaaaaataaattaaaaatatattataaaaaaaggggcgccccttttaaaggacccaatttttctaacccgttctttcaacttattaaccttttatatggggccccctaaattaaat

SEQ ID NO: 27516 - DNA, 239 bp, Glycine max
  Clone ID: LIB3108-037-QI-K1-D12
cccacgcgtccgaaaatttatttgaatttaatattctttttgattattctaaagagtgttagttatatttctttagaatcttttttttctttttcatattctattctatattatagtataggaaactaaaaaaaatggcagaaaattagaaaaatgatagatatatattatatatatatctatatatcaacagataaaaatgtggaaaacaagacaaagattctttacaataacactag

SEQ ID NO: 27517 - DNA, 344 bp, Glycine max
  Clone ID: LIB3108-037-QI-K1-D2
cccacgcgtccgcccgtccgaaaacccttgaacaacattgtatgaacagagaacagttgagttgaggctaatcaatgctatatagagcgcaatcatagtccctctttcttctcttccgccatcgttttctttgaaacgcacagcttcaatcaccgaccacaccacccatcaacgacatgcttcctctttcccttctcaagactgcccaaggccaccctatgttggtggaactgaaaaatggggagacatataacgggcatttggttaattgcgacacatggatgaacatccatctgcgagaagtcatttgtacatctaaagacggagatagattttggaggatg

SEQ ID NO: 27518 - DNA, 324 bp, Glycine max
  Clone ID: LIB3108-037-QI-K1-D3
gtctgctgccaaaaaaaaaaaaaaaattaaaaaaaaaaattaaaaaaaaaaaaaaaaaagaaaaaaaaaagaaaaaaaaaaaaaaaaaaaaaaaaaaaaaaaaaaaaaaaaaaaaaaaaaaaaaaaaaaaaaaaaaaaaaaaaaaaaaaaaaaaaaaggggaccacattaaaaataacaaaatttactaaccctttaaattataaaaaatattcatttatagggtacctaaaataaaattaaagggcctaattataaaaacatgggatttgaaaaaacactacgtattcaaaaataaaaaccttttaaaaaaaattccattatt

SEQ ID NO: 27519 - DNA, 430 bp, Glycine max
  unsure at all n locations
  Clone ID: LIB3108-037-QI-K1-D4
cagcaccaaatgcaactgtttaccctctgaagataagagaaggagagaagcctgtgatggaggaaccaatcacttttgctgaaatgtacaggaggaagatgagcaaggacattgagattgcaaggatgaagaagctggctaaggaaaagcatttgcaggaccttgagaatgaaaagcatttgcaagaacttgatcagaaggcaaaacttgaggccaagcctttgaaggagattcttgcttaattaataataattacatatgtatcatttgcatgcccncttggtgtttttagtattttttaagggccatgaattaataatagtccttacctttgtgcttttgtacgtcttatgatttatcctttgtggggatatcatgtgttgtgttcagttgcctatgtcttattagctagctggctcatctatgtata

SEQ ID NO: 27520 - DNA, 369 bp, Glycine max
  Clone ID: LIB3108-037-QI-K1-D5
attattacaaatagttacacatcatctttgtacaaaaaaaagacagggcgatatatggtcaatcaacttattatcacatgattccatttcatttgacaccttctcccattccaccaacccaactcaatataaaaaatttccatattggtggtacttacaaacaactttgaacctttttctcattcctatgatgatgagttcatgtaatgcagcatgcattaggattttcatcactgaagagttgtggaggtggtattctttcaatgacataaagtggagggtactggtaatagtacatcattctcttcaagccttcggtcgcaaatgttattagccaccaacaccacattggcttcttttctggcttct

SEQ ID NO: 27521 - DNA, 378 bp, Glycine max
  Clone ID: LIB3108-037-QI-K1-D6
ctaacacatccttaaaatattcctcttcaatctgctcaatcttccactcttgtgttggcttgtgtgtgtttctccgcctagtcctagatctgtctccccaatggctggtttcttctctcttctaaggcgcctctatctctccctttacaattggaccgttttgtttggatggcgtcaagttctgcattttgttctcaagacattgaacgaatcgggtcatcaacatgtttacagtgcatcataaaaacctttgcattatgctcaaagcgctgctgcgttagagattcttcatggctttggtatggctggtgacgtctacagttacagcaacattgccacagataaattcaaggctgtttctggtttggggcatcttat

SEQ ID NO: 27522 - DNA, 393 bp, Glycine max
  Clone ID: LIB3108-037-QI-K1-D7
cccacgcgtccgaccctttgcacattcttcttcttcttcatctctttctctctctggagcaagtgtgcagagcaattaataaatctagttttgggtcaccccgtgaccgtgatgatcataaagttattgtcttttgagtgatgggtttgtgttcttcggtccccagaaacgctaacgcagacatgaagctcaaactctcgttcggttccaaatctgagaaactggtgattcatccatcacccatcaagggacaacaaccccaaaatgggtggtcaacgaccaccttcaccgaccatggtagcaaataggaagccttttttgatttcaaagcctggttagactcggattgtgaaaattatttcttatagtgtcaatggtgactttacaccattt

SEQ ID NO: 27523 - DNA, 431 bp, Glycine max
  Clone ID: LIB3108-037-QI-K1-D8
tggccctggaaaggccaagctcaaaagaaccatcttcttaacttgggcccaagacgggctaggtaaaagtacagaatggtttcaaaatttgtaaatggcagatcacagatcgataactagctcatcaactagaaattttaagttgcttctacaaaaataggtattccctccaagctatgctaatcacctctggatgaagaggaacttttagcaatcatggacattggatgtcccagcttttttgtatggtaacatctagctagtcttaggctttagtgttaggatcagtcatgtcttcataaatatgtttttatttttattttttattttatcaattttcacaaaaaggggtttaaccagccaaccaattaacaatcttccctttgggtaaggggaggcaatatctaactactggtttttttattctgtaa

SEQ ID NO: 27524 - DNA, 335 bp, Glycine max
  Clone ID: LIB3108-037-QI-K1-E1
cccacgcgtccgctgttttaaccttcttattgtgaaggcaaggggggtaaattgttagttgtgaggttaatgatgttgggataccacttgcaaggtttaacaaatgtgaaagcagttgctgcatcagtcatttttgtgtttgtataagtagtctttctttgcttaataaagctttttaagcttctttttccctatgtgccatataattcttaatcttcccttttttggctgctgccattgtaatttatatgtattaatgggtcttttagtattggatgctggtgtagcttaaacgttgccttgtgttctcaataaaagagcattttgagtattct

SEQ ID NO: 27525 - DNA, 349 bp, Glycine max
  unsure at all n locations
  Clone ID: LIB3108-037-QI-K1-E11
atgaaagtctatgtgactgacgaaaaggagttgattatggaaccatcagtgaagtgggctgggaatcctaacattatagttgcaattaaagcatttgggcttcgagccacagtccaggttgttgatctgcaagtatttgctgctccgcgtataactctgaagcctttggttccaagttttccatgttttgccaatatttacatgtctctcatggagaaggtgttgataatgtcaaactccttaatgactaaatttcattgtagttctgaatgaggactgaggacatagatatctgacacattggtgattctatataactgacatctttctnctctttttcttcgctttt

SEQ ID NO: 27526 - DNA, 424 bp, Glycine max
  Clone ID: LIB3108-037-QI-K1-E2
aatgattttaaggtacatattttttgctgataaggtagagattcaagacataactaagcaaaccagtttttttgttttggtgggacccaaaagtggccaagtgatggagaacttgaaccttggtgatcttgttggaaaaccatatggcacacatctacattttaatgttgataagcagcctataactataggggttggaaacatcatttcggaagatggtttttcattattgatgtctccagccgctgctgcatccatttggaaagctattcttagtcaaggagcaatcccaatgggttctaatgcatggaataaattacggattattcgaggaaggcccactcccggaatggagcttacaaatgaattcaatgtcctggaggcctgtctatggaaactcggttctctaaacaaggggtgttac

SEQ ID NO: 27527 - DNA, 419 bp, Glycine max
  unsure at all n locations
  Clone ID: LIB3108-037-QI-K1-E3
cccacgcgtccgctctccgcatacactctgctcgcagggtttctccaccaagagggaaatggctcccaaaccgcctagtacgggtctgtttgttggactgaacaagggtcacgtcgtcaccaagaaggaattgcctccacgcccctcagatcgtaaggggaaaacaagcaagagggtgcactttgtgaggaacctcataagagaggtagccggttttgcaccctatgaaaagcgtataactgagttgctgaaggttgggaaggataagagggcactgaaggttgcaaagagaaagctcggaacacacaaacgcgcatagaagaagcgtgaggaaatgtccagtgttctcaggaagatgagggctggtggtgctggagacaagaagaaataagtcttatttactggtttncagattcact

SEQ ID NO: 27528 - DNA, 358 bp, Glycine max
  Clone ID: LIB3108-037-QI-K1-E5
ggcttctgcagaagtagagttccgatgctttgttggtgggcttgctggggccaccgaccacgatgctctcgagaaagccttctctcaatttggcgaaatcgtcgaatcgaaggtcatcaacgatcgtgaaactggaagatccagagggtttggatttgtgaccttcgccacagagcaggcgatgagagacgcaattgaaggaatgaacggccagaacctcgacggtcgtaatataaccgtgaacgaggctcaatcccgtggaaaaggtggcggcggcggcggcggcggctacggaggatgtggtggtggttacggtggcggcggatgttacagccgcggtggatgatgatatggtggc

SEQ ID NO: 27529 - DNA, 139 bp, Glycine max; identical to SEQ ID NO: 18082
  Clone ID: LIB3108-037-QI-K1-F1

SEQ ID NO: 27530 - DNA, 231 bp, Glycine max
  Clone ID: LIB3108-037-QI-K1-F10
tacgcgttcgtgaggcgttctcacaaataattgtttttttagttgtgtagtcatgtgtattctgaggaggatttcactcaaagtatggtctgttaattaggtatataaatattcatcaattattagtaatgttctcttagagcacgatggattcccttctgcctttcactggctaaaaaacaaaataaaataaatatattttattattaataatataacttaaaattataa

SEQ ID NO: 27531 - DNA, 333 bp, Glycine max
  Clone ID: LIB3108-037-QI-K1-F2
cccacgcgtccgaaaaaaaatcttattatgagtcatttcaaaaaaagacagactccagcttcaactgcaaaaacacaattccagaaatatctagtctcaccctcacctataacagaactcgtcaagcatcaatcaccactgaattgatagagattatctctggagcttcagcactggaaggttaattacaggagagcaatctgtgtaatatattcaacagtggcgcgatattaagataatatcgatggattcttttgaaatttgttggtgtcatttttttaatcttacttgacttccgtaataagtgttccaaggtcaaacccattgtgggga

SEQ ID NO: 27532 - DNA, 223 bp, Glycine max
  Clone ID: LIB3108-037-QI-K1-F4
gcgccgtatctctttagtcatcctaagccttggcgactatactgctagcatcacctgctgcactctacccgcaatcgcacagttccacctctcaccttaacttctttcactcccaaactctctcttcaccactctacacttccttcgataatctctcagcctatccaacctacactctttccccaacccatcctgagcactgtggcaaacgtgaccccaaaac

SEQ ID NO: 27533 - DNA, 149 bp, Glycine max
  Clone ID: LIB3108-037-QI-K1-F5
ggggtttctgtagaaatcctatcgtactcttgtgcattgtattaggatatatgcaggtcatttgcctcaataatcttctcagcattgccgttgtaaattgatttgtatgtattattccaagaatagaactaattctctatttttggttt

SEQ ID NO: 27534 - DNA, 269 bp, Glycine max
  Clone ID: LIB3108-037-QI-K1-F7
cccacgcgtccgcccacgcgtccgcttacagtggagagaacacatgggggcttgtgggctgaaataatccgtgactggtaaccatctgaatagtacttcctaaaattgaccaatgtgaagaagtcagcttaattgtaaattctctggtttgatgcttttatgtaaagtttattatgtctactggaacttatttgaaaattgtcgcgtttctatcagttctaaattgcataagtttaagggtatgttctttgttcaaaaaaaattaatta

SEQ ID NO: 27535 - DNA, 312 bp, Glycine max
  Clone ID: LIB3108-037-QI-K1-G1
cccacgcgtccgcccacgcgtccgtagtattagtaagagagtgtgtattttcacgcggcaccgctatctatcatggtgcagcaccgcttcctcctcataacctaccccatacaaggccacataaacccctccatccagttcgccaagcgactcgtttccatgggcgtccacgtcaccttcgccaccagcctctacctccaccgtcgcatgctcaaaaagcccaccatccccggcctctccttcgccaccttctccgacggctatgacgacggttacaaagccatcgacgactcctccctctccttctacatg

SEQ ID NO: 27536 - DNA, 290 bp, Glycine max
  unsure at all n locations
  Clone ID: LIB3108-037-QI-K1-G10
gaagaagattttgtaagaaagacgaggagcnagaaggagcgggaagattatggaaggaggaagaggccgataaaggataagtagtacctagtagagacagcatggtgggttgggtatttgcagcaacatcaacaaggtggcatgctgatgggttggaattgggaggagaatatgaatatgccattggtgggaggtgtggtggatgagcaaatgtcatggggctccacttggatccctggttgggacatggacttgttggggggagatgctttcactgccttgtacaatga

SEQ ID NO: 27537 - DNA, 325 bp, Glycine max
  Clone ID: LIB3108-037-QI-K1-G2
aaaaaaaaaaatatataaaataaaaatataataaaaaaataaaaaaaaaaaaaaaaagggaataataaaaaaaaattatatataaaaaaataaaaactaaaaatatataaaaaactattatcttttttaataaattatttaaatatttcaaaaatttaatttattttatactttttctttatatatatgtttttttttttttctatttcttattttattttcttttcttcttttaattcttatttcttttttttattattttctttttattttttttttcttctttttcttttatattttgtttttatttttatatatctttttt

SEQ ID NO: 27538 - DNA, 363 bp, Glycine max
  Clone ID: LIB3108-037-QI-K1-G4
gtctatcgccgcaagtgggtcatccacatcgagcgcatcacccgcgagaaggttaacggctccaccgtcaacgttggcattcacccttccaaggttgtcgtcaccaagcttcgaatggacaaggaccgcaaatccttgctcgatcggaaggccaagggtcgcgccgccgccgacaaggaaaagggtaccaagttcgctcctgaggatgtcatgcagaccgtcgattaatttctctctttacttttttgccctctctgtactttcttatttgctgcttttgtttgtggtttggatctcaagggttccgctattgtgaggcctttctgttttgtttaatttaatcaaatgcttgacattattact

SEQ ID NO: 27539 - DNA, 265 bp, Glycine max
  Clone ID: LIB3108-037-QI-K1-G9
tccgcgcgagcgactttctcagggaattaaactgcttgcgttagtcacacataatgagcggcacgtgtttactgacagctcatgacctctgctaacgctacggggaaagcttcacgggggagaaaaaggatgatatggaatccatggctcttgactacaaactgacttattcgcgtaagaagtctacaattggaggatgtagtgtacacaggaggaaccgtgttgttggtccacacttcgtcagaggcgaagatttctcttatac

SEQ ID NO: 27540 - DNA, 253 bp, Glycine max
  Clone ID: LIB3108-037-QI-K1-H1
tcgcgcacgcgtacgcgctcatgcagatggaactatcgcctagttgggcattcaaagggaagtcagcgtattagtgttgccactgaaactatgttcttgctggaactaagtatatatgtaatttgtctgatttagtgactgttagactcagcttgcaagactctgatgccgtcgattgatgttgctggataaatcaactggttttaaaattctactttaacgggaacattaccatttcccgataaggtaaaaa

SEQ ID NO: 27541 - DNA, 397 bp, Glycine max
  Clone ID: LIB3108-037-QI-K1-H11
cccacgcgtccgattcaaaccagagacaacctgtttgaagaaatgttgcaagaacctgatgagatagctgtgaaaagaaagcgctgtcgagaacttctccgagcttatcagcaggcttttaaggacttggaggaactgcctctggaagctgaaacagttgaaagaggatacagtttgcctgaaacatctggtttgcctaaaattcatggattaccaacatcatccatgtactctacaagcagttctggagactattatgcagcttctccgaagcactctatgtcaaaaaggtcttcccattctggggagctgcaatcaccattgcatgccaatgcagattccaatggaagtggaaggccattcatgttatgtttttatcccacgggggatgcatgag

SEQ ID NO: 27542 - DNA, 397 bp, Glycine max
  unsure at all n locations
  Clone ID: LIB3108-037-QI-K1-H2
tcgccacgcgttcgcggtcgcgtggggatttgtgttgtgaaacagttaaaagtggtcttgatgtctgaggcattggaagaggttgttccttcaatgaaaggagggtgtgaagaagaagggttgaacctgaaggctactgagctgaggcttgggttgccagggtgtgagtcaccagagagggagggtgtgtttaagagtgtggtggtgtctggggccaagaggggtttctctgatgccattgatggaaactggaatggtggaggatctgaaaaagatgccgctgccttgttttctccaacttcaaggngtgctgttagtgttagtgttagtgctgccaagtctctcactctcactgcaacagactgcaccaaccaaccaactgctttgggtgcttctg

SEQ ID NO: 27543 - DNA, 370 bp, Glycine max
  Clone ID: LIB3108-037-QI-K1-H3
cacttgttgttgcaacattttctaccggcatagattccaaatgctttcagttcagggggagtgatccaccagcagaagatgatgttccatatggttatggtttcttccacttcgtttttgccacaggagcaatgtactttgcaatgctattgatcggatggaatagtcatcattctatgagaaaatggacaattgatgtgggatggaccagtgcatgggtcagaatagtaaatgaatggttggcagtttgtgtctactgtaagttaattactgtattttcctaccccttaaactaggcttagcatgaagatttgaattttatctaaagcttcatgagaaaagaggaacttcacaaatcactttttaaaac

SEQ ID NO: 27544 - DNA, 409 bp, Glycine max
  unsure at all n locations
  Clone ID: LIB3108-037-QI-K1-H4
cccacgcgtccgcccacgcgtccgctacctccagacctcatctcttgcatccttttgctttctccagatgcttgtcttccgtcttggatggacttaagtatgcagattcacacgaatgggtcaagcacgaaggctcagtcgccaccattggtatcactgaccatgcccaggaccatcttggagaggttgtgtatgtggagctgccagaatcaggtggcacagttacccagaagtctggcttcggagccgttgaaagtgttaaagcaacaagtgacataaactctccaatctcggnggagattgttgaggttaaccaaaagctcacagagacacctggcctggtcaactcaagcccatacgaagatggatggatgatcaaagtatagccagtgatccatctgaattagat

SEQ ID NO: 27545 - DNA, 296 bp, Glycine max
  Clone ID: LIB3108-037-QI-K1-H9
ggccgtcctttttttttttttttgattaaaatattccttgtccattcgagacttggcggtatcaaatattagcttcattacataacaaagaccattcaaaaggaaacataatacaaatattttgacaaattgtaaaggagatctaattattcatcaaactcatgcatgtgatctaaaaggtagttggcagccagctcctcattttgttacaagcaaagtacacctccaatacagttgcacgatcaaaacccattgcttttagactgcttaattgcttgccgctcctcatgggtgac

SEQ ID NO: 27546 - DNA, 350 bp, Glycine max
  Clone ID: LIB3108-038-QI-K1-A1
cccacgcgtccgcccacgcgtccgagaggagtgagatacttagcttctccagaagaatcgagtgattccactgtcttggaatggcattcttgataaaattcctacttattcttcaatgtcttcttatagattttttggataggtcgtgttaggttctctagcttggcttttttcatcaactgtaacagctatgctttgctatctccttgcattacgtgatttgctttataccgtgtaacctttttcacctttttttcttctttcaattttataccttgaaaacaaataactaatacttttgatgcctgggggcttgctattcagagactggagattgcaaaaagtgattt

SEQ ID NO: 27547 - DNA, 418 bp, Glycine max
  Clone ID: LIB3108-038-QI-K1-A10
ccttcatctctttcgtttcgtccttgccttcaccccaaagcctattttcccattttcccctgttcatgataacaactctccatgtagggcaaacttcacttcaattgaactaacttgtctgtggctttttgtagattgattcaattcaatgggttcagtaatgctcagtggaactgaaaagctcactctcagaaccctaaccgggaacggcttaggtttcactggttcggatttgcacggtaagaacttcccaagagtgagtttcgctgctaccactagtgctaaagttcccaactttagaaggccctagtagtacccaagtgtagtgtctcggcttccaggccaagctcgcagccaaggttcattcagcacaaaaaagaggccttttgggtctataagcttctctcaattgtgtatg

SEQ ID NO: 27548 - DNA, 422 bp, Glycine max
  unsure at all n locations
  Clone ID: LIB3108-038-QI-K1-A11
cccacgcgtccggctagataatgcgcttctttaccaaccctcgcaagcctatgatacttgctcttgctaggccggaccctaaaaagaacatcacaactttggtaaaagcatttggagaatgtcgtcctcttcgagagcttgccaaccttacattaattatgggcaacagagatggaattgatgagatgtcaagcacaaatgcttccgttcttctctcggtacttaagctgattgacaagtatgatctgtatgggcaagtggcctatcctaaacatcacaaacaatatgatgttcctgacatatatnccccctagcagcaaagacaaagggtgttttcattaatccagctttcattgagccatttggtcttaccttaattgaggcagctgctcatggtttgccaattgttgctactaaaaatg

SEQ ID NO: 27549 - DNA, 258 bp, Glycine max
  Clone ID: LIB3108-038-QI-K1-A12
tagtaacgggtcccacgcgtgctgcaactcgtccttatagataacccgcccttttatcaacaccctcaatcttattatacttaggctcgctagatcgtaccctataaataacatcacaactctgttaaagacatcatgaaaatgtaattctcttctaaatccctcctaccttacattaattatacgcatcaaaaatgtaattgattttatatctataacaaacacttgcatttttctttattaactaatctcatttat

SEQ ID NO: 27550 - DNA, 413 bp, Glycine max
  Clone ID: LIB3108-038-QI-K1-A2
acagaatctactctctttttttctaccttagattccttctccaacaatggctctcgccgtgtccactacttcttcctcttcagcagctgctgcagcttctagctccttcttctctcgtctcggatcttcctccgacgcaaaagctcctcaaatcggttcgtttcggtttccggagaggtcgcttgtttcgtctgttgttgtcaatgtaactcaacgacgctccttggtgaggccactcaacgccgaaccgcaacggaacgattctattgttcctcttgcagcaactatcgttgctcctgaggttgagaaggaagaggaagattttgagcaaatagcgaaagaccttgaaaatgcatctcctcttgaaattatggatagggccctcgagaaatttgggaacgacatcgctattg

SEQ ID NO: 27551 - DNA, 403 bp, Glycine max
  Clone ID: LIB3108-038-QI-K1-A3
cccacgcgtccgcggacgcgtgggtgtttggccaaacactcccattcccactgcactgcgggagctgctaaagcctctccctgcaggtgttgaaatcgatgaactccctaagcaaattgatgatacacagtacccaaaaacattcttctataaagaagaccttcatccaggcaaaacaatgaaagtacaattcaccaagcgtccctatgcacaaccttatggtgtatatacatggttaacggatattaaagacacctctaaagaaggatatagttttgaagagatatgcatcaagaaagaagcgtttgaaggagaagagaagttttgtgcaaaatccttgggaacagtaattggttttgccatttcaaagctgggaaagaacattcaagtactttcaagttcc

SEQ ID NO: 27552 - DNA, 410 bp, Glycine max
  unsure at all n locations
  Clone ID: LIB3108-038-QI-K1-A4
acaaaacctacctacacacgtattagagaaaaaacacactattcttctctcatggcactcggtgagggtatctttttcaaatgcaaattgatctattgcagacaaatacttctacaaaaggagcatgctattccaaatcagaactttgttaaaaagtctgcccctcctgcccttaaaggagactagatgctgaagaacatttttgtggacgtgaacaacaaattntagaccgccatatgaatatttaacaacgacaaaatcaccatttacccacaagatccaactgttttttctcattatgcgaaggtcatgaaaacaattatagagaacgcatgcttattgaccgagtaccaagacatactattcaacattgtaattgagacacacgatatttcagatgctccgaccta

SEQ ID NO: 27553 - DNA, 407 bp, Glycine max
  Clone ID: LIB3108-038-QI-K1-A5
caaaaggagaattttgccacaatatgctctctcaacagaaaactatcatcaatgcgatgggtgtcaatgaggagggtgtgatggttactggaggcgacaatggcagcatgtggttctgggattggaagagtggtcacaatttccagcaatcccaaacaattgtccagcctggttcattggacagtgaaactggtatttatgcttgtacctatgatcttactggttcgaggctcataacctgcgaaactgacaagacgataaaaatgtggaaagaagatgagagtgccactccagaaacccatccccttaacttcaggcctgctaaagacatccgtcgattctagacatgctcctcatttatctcaagcaacttattctgctaatacagagtgggtatgtgctatctg

SEQ ID NO: 27554 - DNA, 364 bp, Glycine max
  Clone ID: LIB3108-038-QI-K1-A6
cccacgcgtacttgtgtagagaagtcaaatctttttccatgtaaagatttcttgggatgcgtgacgttaattcatattattgaatgcttgtgttaaaaaaaattaaaactattttcatatgttaaaaaaaagaacacaatttacaaaattaaaaaacaaattgtaacaaactggatcattgaacaatgaaaataatatttatgcttgtacctataatcttactgattcgaggcttataacctgcgaaactgacaaaaacgataaaaatgtgtacaagaaaataaaagtggcactccctaaaaacatccacttaactttacgccttctaaagacatacgtcgatttttgacatgctcctcattta

SEQ ID NO: 27555 - DNA, 433 bp, Glycine max
  Clone ID: LIB3108-038-QI-K1-A9
cccacgcgtccgcccacgcgtccgcaactattctacttaccttttctcttaatccaaataggatcatctgaaacgatggctgccatggcaaccacaaccctctcttcaaacccgaaactctcatttttccacggaaagcccgttacatattcttcccgcgtcgcacccaccaccaagttattctcatccaaacaaggcacaatctccatgtccctaacccaacccccatacgacctccaatccttcaaattccaacccatcaaagaatccatcgtctcacgcgaaatgacgcgccgctacatgaccggaaaatgataacctacgccgacaccgacgtcgtaatcgtcggagccggctcggcggtgctctcctgtgcgtacgagatcagcaagaaccccgccgtgagcgtcgccataatcgagcagtccgtgag

SEQ ID NO: 27556 - DNA, 451 bp, Glycine max
  Clone ID: LIB3108-038-QI-K1-B1
tggaatttccgccgccattcgaagctacagcgatggccataaccgccaccatttccgttggcctcacatcccccagtcgccgcactctcacctccgtcaatagcctctctcccctttctacccgatccactttgcccacaccgcaacgcactttcaaataccctaattcgcgcctcgtcgtgtcttccatgagcaccgaaacagccgtcaaaacttcatccgcctccttcctcaaccgcaaggagtccggcttcctccatttcgccaagtaccacggcctcggaaacgacttcgttttgattgacaatagagactcctccgagcccaagatcagtgctgagaaagcggtgcaactgtgtgatcggaacttcggcgttggagctgacggagttatctttgtcttgcctggcatcagtggcaccgattataccatgaggattttaactctgat

SEQ ID NO: 27557 - DNA, 358 bp, Glycine max
  Clone ID: LIB3108-038-QI-K1-B10
aagagatcacatatcagaatggcttctactcaatgtttcttgctccaccatgctcttaccaccgcggccagatccccatgacaacgcatcatggttagcaccaagcctaaccagcttgtttgcaaggcacagaagcaagaggatattgatgtcagcccaatctctcgccggttagctctaaccgtgctcattggagctgctgctgttggctccaaagtccaacctgctgatgcagcttatggggaagctgcctatgtgtttggaaagccaaagacagacacagattttctgccatacaatggaggaatggattcaaactatcgattccctcaaagtggaacccaagcatagaggttga

SEQ ID NO: 27558 - DNA, 425 bp, Glycine max
  unsure at all n locations
  Clone ID: LIB3108-038-QI-K1-B11
ggtaaaagaacagaggcgaaaaaccttgagcggagttgaagctatgggaagcagattgggaagaagagtggtgcagttcgcgaacctccccataaagcttctgatgccgaacagcttcaccaacatccacgaaatcgctctcaagaccattccttcggccacgaagatcgagatcaagcgcgtccttcaatccctctacggcttcgatgtcgataaggtccgaacgctcaacatggagggcaagaagaagaagcgtggtggcttgttgattgcaaaacccgactacaaaaaagcctacgtcacccncccaaaacccctctctccatttccccggatctctacccgatccgaatcatcgatgaggacaagaagaggatcaataagcaagccaagtccagcctcgttcaggaccacgaggcccacac

SEQ ID NO: 27559 - DNA, 344 bp, Glycine max
  Clone ID: LIB3108-038-QI-K1-B12
cccacgcgtccgcgaggctcccatgtggattcgccgcgcagacaatcattggcaccggccggcgtgagagcgccatcgctcgcgtcgttcttcatgaaggaaccggctaattcataatcaattaccgcgacgctaaggaatatcttcaaggaaatccattgtggcttcaatacattaaggtccccttaataactttgggatatgaaagtaattatgatgctttcgtcaaagctgagggtggtggcctgtctggtcaggctcaggcaatctctcttggcattgctcgtgccttgctgaaggtgaaaaggatgatcatagagcacctttgagacaggaaggacttc

SEQ ID NO: 27560 - DNA, 447 bp, Glycine max
  unsure at all n locations
  Clone ID: LIB3108-038-QI-K1-B2
cccacgcgtccgcccacgcgtccgaacacaaacacaaccttagccaacaacaaagcaaaggggaggaaaggaaagcatgggtttactgtggtggcgaaaggggaataaaacccaagcccaacctgaagcaaagtcgaacggcgcagactcaacgaaacccctcactgaggccccagggatgaacggcgccgtggaggttccccggccctcgaacaccaccgtctcgattttcgagtttggctccgtggccgcctccaacgacaaggtcacgctcgccggctattgccccgtctccgaagacctcgagccctgccgctgggagatcctccccgccgttcagtccaacgccccccactttcgcgtggtcttctgattctgatacccaactttttttctctcttttgccgcttgtgggattcaattntatctactctttttttttttttt

SEQ ID NO: 27561 - DNA, 318 bp, Glycine max
  Clone ID: LIB3108-038-QI-K1-B3
ctccaagatcaccttccccatttctgttaaacagcctggcccaagggagaatctcctacggtgcttgataaaacgcaacccgtccacccaaacatactatttggttcttaagttaacccagacccttgcttaaaaatggaaagttcttttttcttgacgccaatgcagaccttcaacctggacaaattatattattttttttgacccaaatgatatgttaaagggaagcaacttctatgttgggaaactaagatcaaactttcttggaacaaagatcacaatctatgatagccagctgcctcatacaggagcaaagat

SEQ ID NO: 27562 - DNA, 371 bp, Glycine max
  unsure at all n locations
  Clone ID: LIB3108-038-QI-K1-B4
cccacgcgtccgcccacgcgtncgcaagaatggcacaaattaacaacatggcacaagggatacaaacgcttaatcccaattccaatttccataaaccccaagttcctaaatcttcaagttttcttgtttttggatctaaaaaactgaaaaattcagcaaattctatgttggttttgaaaaaagattcaatttttatgcaaaagttttgttcctttatgatttcagcatcagtggctacagcctgcatgcttcacggtgcaagcagccggcccgcaaccgcccgcaaatactctggcctttccggaaccgtccgcattcccggcgacaagtcgatctcccaccggtccttcatgttcggcggtctcgcgagc

SEQ ID NO: 27563 - DNA, 445 bp, Glycine max
  Clone ID: LIB3108-038-QI-K1-B5
ggaagtggtacggacaacatacccgagacagtatctctgccagcggttaaattagatactgaagaagttcttcgaatgctttcaggatgtgtgctttcatctgaatcattataatctgtagcctcagcaaatgtattgacatgtgctccttcttcaacatcttgtatgcccaaagcaaaggcagcagcccgacttttccccatctcctgtacaactctagctgctgcatgaagcacaggtctagaaaagctacggaaagaactctctaaccttctcattacaagtttaataagcagttgaggtcgcttcgtcttctgtttatctttagaactttcctttgatgacgcatctggtaacttgagaatttccctggtcaaacgataccacccagctgcacgctcctcagtcctctcagcattatcatattttcctagtacgcacaaaa

SEQ ID NO: 27564 - DNA, 454 bp, Glycine max
  unsure at all n locations
  Clone ID: LIB3108-038-QI-K1-B6
gnaagtggtacggacaacataccctagacattatctctgccagcggttaaattggatactgtagaagttcttcgaatgctttcangatgtgtgctttcatctgaatcattataatctgtagcctcagcaaatgtattgacatgtgctccttcttcaacatcttgtatgcccaaagcaaaggcagcagcccgacttttccccatctactgtacaactctagctgctgcatgaagcacaggtctagaaaagctacggaaagaactctctaaccttctcattacaagtttaataagcagttgacgtcgcttcgtcttctgtttatctttagaactttcctttgatgacgcatctggtaacttgagaatttccctggtcaaacgataccacccagctgcacgctcctcagtcctctcagcattatcatattttcctagtacgcacaaaattgcctcaa

SEQ ID NO: 27565 - DNA, 432 bp, Glycine max
  Clone ID: LIB3108-038-QI-K1-B7
gcgctagtgctgcttttgcacccttatctatgcctcagggcttgctacttagtacaggccattaagaagccaccagtgacaagcctccagtgtacaagccaccagtgacaaaccaccggtttataagccaaaaccaccggtttacaagccgaaaccaccggtttacaagccaccatataagaagccaccatacaagaaaccaccttatggaaagtaccctccagtagaggacaacacccatgcctaaagcaagcaatgaggtctattatctacttaataaataagaggactgctttggttttctagcattgtgatttacaacttcgtgcaatgcatattcttgactcttgcatgcacttcaatccttcgtagcattaatgatgtggccaagtcatcatgagcatcatacttatttctttgtgaatgtaaatc

SEQ ID NO: 27566 - DNA, 372 bp, Glycine max
  Clone ID: LIB3108-038-QI-K1-B8
ggttataatcacttacattagattagaccaccatgccggtccctgatgacgggtggggtggctagatatgtgaaatggataataaaaagacggacttatgcatttccaccaggagagagctaaggtcatatacttagagcttagctgtactgtcttaatgaaaggcttacatattagagtatcggatgcgactatatatagtctcatgtactagtatgtgtcatgtattaaacgtacctgtcgataccttaaggatggaacgatgtatattatctattaaataaataataagaacgtggtgtccgttttctatcattgtgatttacaacttttttgtgtgcatattcttgaatatttatgcactttaattct

SEQ ID NO: 27567 - DNA, 441 bp, Glycine max
  Clone ID: LIB3108-038-QI-K1-B9
aaaaaaaaataattagtaataacatcatcatggcagcagccactctctccgtccggcccgaccgtgtctcgcccggttcggtgtttcccagaccaccggttcagcctccgctgcgaaaaccaatcgcggcgcccgagccgtggcgcgccgcggcgccgcggatacgcatcatgacggtggcgccggtccaggcgagctcgcgcgccgatgactccgcgccgttcgagatgtcggtggagaacgcgctgaagctgctgggcgtgtcggagggcgcttccttcgacgacatactccgcgccaaaaaaacccaatcgtcgccaattgcaaagatgaccaagatgccattgctcaggttgaggctgcatacgacatgttgcttatgcagagcctaactcagcgtcgggcagggaaagtagtgaacagtagtgttcgttatgctga

SEQ ID NO: 27568 - DNA, 283 bp, Glycine max
  Clone ID: LIB3108-038-QI-K1-C11
ggaagacagacttagattctttgtttgctaccttctctcggaaaaatggttaccttcagcgtgcggcagtaccagttggctgggatgtctcttcccacgtaagcacatcagcaccccaagatctaccgaatgaatctctggcccaccaacaaggttcgagccaagtccaacttctggtattttctgaggaaactgagaaaggtgaagaatatcattggtcaattgcttgccatcaacgagatttttgagaataacccaacccctattaagaaccatggtatat

SEQ ID NO: 27569 - DNA, 291 bp, Glycine max
  Clone ID: LIB3108-038-QI-K1-C12
tccatacatactaatgccataactcactcactatctttttcactactctatccaattacattatcgactattaccattgtccatgatcaacacctaattctttatcccaattttccccaattccaccaagctcgctccatcactaccctcccttctgatcaacctttcatatgtccttatattctcacccctaattcactaaacttttacactctacatcttgtcttggatcaatatttacaaccctcgaaacctgatacaaccccatttttgttgcacttattgccgaca

SEQ ID NO: 27570 - DNA, 369 bp, Glycine max
  unsure at all n locations
  Clone ID: LIB3108-038-QI-K1-C2
cccacgcgtccgctcactgcatctatcctcgtaaaacaaaacaacctaagttaaaccttcggacgtgctttcaccatgtcctggttcagacacctctccaccaagttttccgccatcaccaccacaagcacgcaccgcttaagtcttctgccccggtttagcacctcgaccgctccggttcggcatgcgggcctggagcccactcaggcccacgagaagcccacggtggtggttctgggctccgggtgggccgggtgccgcctcatgaangggctcgacactcaaatctacgacgtcgtttgcgtgtccccgcgcaatcacatggtcttcacgcctctcttggcttccacgtgcgtcggaactctcgag

SEQ ID NO: 27571 - DNA, 457 bp, Glycine max
  unsure at all n locations
  Clone ID: LIB3108-038-QI-K1-C3
gcctggaaaccccagatacattcaaccctttgatcgcatggtacttgtccaacctgcccgcatacggaaccgcaatgagcccactactaacagggatcgaggtgggcctggcccacggataccttctggtgggcccattcatgaaggccgggcctcttaggaacaccgacatcgccgggcaagcgggctctctggccgccggtgggcttgtggagatcctcagcctttgcctcacaatctatgggatttcatccttcaacgaaagagccccattcactgctccgacgctgaccttgacgggccggaagaaggagcccgatcagctccaaactgctgatgggtgggccaagttcaccggacgcttcttcttcagacgcatttccgatgttatttggggctacttactcctctacgtcttggaccttgcatactacatcanatgatgaatgtgcttact

SEQ ID NO: 27572 - DNA, 247 bp, Glycine max
  Clone ID: LIB3108-038-QI-K1-C4
gccaaacaaacgctaattgaatcaatactcttattatataacattttatcattaatcctgcgtacggagccaaacattactcacatacataaatcgattcacactggatatgctccatgccaaccatcaggagcaccaatatccaattgtcgcgcatcttagcaacacggacaatcccggtcaagctgattctatcaccctctttttgctcgcggagaacatcatgcttgtggttatagactataac

SEQ ID NO: 27573 - DNA, 459 bp, Glycine max
  Clone ID: LIB3108-038-QI-K1-C5
cccacgcgtccgaacctcactcaaactcgggatcacagaaaccaacaacagttcttgcagtgaggtttcacgatgttgctggaacttgcacttggtttgtttgtgttagctttgtttctgcacttgcgtcccacaccaagtgcaaaatcaaaagcacttcgccacctcccaaaccctccaagcccaaagcctcgtcttcccttcattggccaccttcacctcttaaaagataaacttctccactatgcactcatcgatctctccaaaaagcatggccccttattctctctctccttcggctccatgccaaccgtcgttgcctccacccctgagttgttcaagctcttcctccaaacccacgaggcaacttccttcaacacaaggttccaaacctctgccataagacgcctcacttacgacaactctgtggccatggttccattcggaccttactggaag

SEQ ID NO: 27574 - DNA, 395 bp, Glycine max
  Clone ID: LIB3108-038-QI-K1-C6
tgtctctctctctcctgtatttgtcttgattccgatgcgaatgaatcatggccaaagctgggggtggcaaggaaccaataaatgaacaagcagtagcaaatatgtatgctgcaatgaggtctgagctcaaccaaatttactccaaaataactgaactggagatggaagttagtgagcacacattggttaccaatgccattcaaccacttgaccaatctagacgatgctatcgtatgattggaggggtgcttgtggagagaaccatcaaagaggtcttgcctgctgtgcagcgaaataaagaaggactcgaagaggttgtggcaaggcttaacgaggcgttggaaaagaagaaaaaggaaatttctgagtttgaggctaattataaaatcacgata

SEQ ID NO: 27575 - DNA, 448 bp, Glycine max
  Clone ID: LIB3108-038-QI-K1-C7
cccacgcgtccgcccacgcgtccgcttttggggaagaggtcgagtttcacagcagcaatggtgtacgtcaaggctcagaaatcaaaagcctacttcaagagatatcaagtcaagttcaagagaagaagagagggaaaaaccgattaccgtgccaggattcggttgattaatcaggacaagaacaaatataacactccgaaataccgatttgttgttcgctttagcaacaaggacattgttgcacaaataatatctgctagcattgctggcgatattgttcttgctgcagcatatgcacatgagctgccacaatatggtcttgaagtacggcttacaaattatgctgcagcttattgcactggtctcctgttggcccgaagagtcctcaatacacttgaaatggatgatgagtatgaaagaaatgttgaggctactggagaggattatt

SEQ ID NO: 27576 - DNA, 425 bp, Glycine max
  Clone ID: LIB3108-038-QI-K1-C8
cccacgcgtccgcccacgcgtccgctcacgcgtacgaccacgcgttcgatctactgattggattgaggagtgggtcaaaattggcttgcctgcaaaggcaaaggtgaagacacagcatggggatgccccttttgctgacttgtgctcacactgtgaaaaggaatctgtgaatggttcccttggaaacctgctaacttacccatctgttagagatggcttggagaacaaaacattgtcactgacaggaggatactatgactatggtaaaggatcttttgagctctggagcctacacataggacttgcatcctctttctccggatgaacatcaaccattatcaacgacctcatattgcgttcctaagtattctgctatctaaaatgtactctcgaattaaatgctcgttgtataatgcatgcatgtg

SEQ ID NO: 27577 - DNA, 385 bp, Glycine max
  Clone ID: LIB3108-038-QI-K1-D11
ggaaaatacccacccaaccatggcagcaaccattcctttctctctgcttaggaactgcgcgccagtgaaactagcaacacctttcgctcgcaaagcctccaactttaatcttcttctccctcttcaaccacgcacgttggtctctagtacctgtgctgtgaacaatgaagaggctgcagcaaaaacagcagctgctaattttgatagtgaagctccaacaatgtagcagccctttcacttctagcatcatttttttaattgattttatcatggctttcttcttattcatggaagtatagttaattcttgtcatgattattgattaacctcaattactcaaatacaagggagtgcatatctctgtgcatgataccaattttccaaa

SEQ ID NO: 27578 - DNA, 401 bp, Glycine max
  unsure at all n locations
  Clone ID: LIB3108-038-QI-K1-D2
cggacgcgtgggtcagccacagtttcggaggagaagaaaatagtcgttcgagatggcccgtgcgaagcaaactgctcgtaagtccacaggaggaaaggctcctaggaagcagcttgcaaccaaggctgcacgtaagtctgcaccaactactggtggtgtgaagaagccacatcgttaccgtcctggtaccgttgctcttcgtgagattaggaaataccagaagagtaccgagcttttgatcaggaagctccccttccagaggctggttcgtgaaattgctcangacttcaagactgatctgcgtttccagagccacgccgtgcttgcattgcaagaagctgctgaggcataccttgttgggctctttgaggacactaacctgtgtgccattcacgctaagc

SEQ ID NO: 27579 - DNA, 299 bp, Glycine max
  Clone ID: LIB3108-038-QI-K1-D3
gttctttgaaaatgcatacagacttaaccttcgctgtcaccaacgttgtgccattggcaccgacagagagtgtctcccatattaccatctttcccaccaaattgaaagccccgcgctcctcacctcgctactctccgattagggttgcaaccggggagcccgacacttaaactgacgactacaactctgcgttctaagtgttttctgcagaagcatgcgaaactgtatgaggggaagcctgcatggcagacatgttccctgaaacgaaccttcagacagaggctcagactgcacgagtc

SEQ ID NO: 27580 - DNA, 423 bp, Glycine max
  Clone ID: LIB3108-038-QI-K1-D4
gaaaaccttagcccaaccggatcttcacgattaggagatggctaagtcgaagaaccacacggctcacaaccagtcctacaaggcccacaagaatggcatcaaaaagccaaagaggcaccgccacactttcaccaaagggatggatccaaagtttctgaggaaccaaaggtacgcgaggaagcataacaagaagagcggtgaaacagccacggaagaagagtaaagtgtcactctcaaatggggctattaggatttgatttgctattcaagtcccatatgttttgtgtcaaatctatatttagtagtatagtcattttgatgagttaatttaatccagagagaatgcaggacttactcttatagcatcgttgctggcttttcgttgttaaagacccttcaaattgtatcgatggattgatgatc

SEQ ID NO: 27581 - DNA, 459 bp, Glycine max
  unsure at all n locations
  Clone ID: LIB3108-038-QI-K1-D5
gggagagggaatcccaagagttgctagaattcatgccaacattaggtgcaggaggcgagagcgaccatctcgctcgctttgctgtanaggaacaaaacaaaagagagaatgcaaatctggagtttgtgggggtgattagggcaaagcagcaggtggtggaagggttcatatactacatcactttggaagcaaaagatggtgaaaccaaaaatgtgtatgaaacgaaggtgtgggtgagatcatggttgaactccaaggaggtcctcgaattcaagcccatcagtattaatcctctttcggtgtcggtctagtctttataaggttacagaaataaatggtcgcaagctgaaagttgtactaaaatttattttttataaaaaaatcgaaggtagtattaaatatgttatatgtatgtattgtgcggaataaatgcagccacgtactatatataatggtaca

SEQ ID NO: 27582 - DNA, 377 bp, Glycine max
  unsure at all n locations
  Clone ID: LIB3108-038-QI-K1-D6
cccacgcgtccgcccacgcgtccgagaaagttctattttatctattcaactaggcgtgagtaagccgtcacaagagccagcaagtaaatagtttatgatcggagaaacaaggatggttcctaatgtatcttgtgaatggtgcattgtctttgagcctttgtagttacaaattgtaaaagcaattttgataatcttaccttgctagagtattttggtatgtatgtattgctttggtttgctcaattgtgaaactttagttgtcatagatgattgtttgatttctgaagtaactgagaaagctctattttatctattcaacaaaggtgattgtttcaaanaaaaaaatcaatgtgggactataaaggacactttataat

SEQ ID NO: 27583 - DNA, 453 bp, Glycine max
  Clone ID: LIB3108-038-QI-K1-D7
tgaagaggaaaagcttgctgaagggataaaactttatgctatagcagccactgccacttgagagcggacaattctttctgatcttgtaactgtttatgcaaagggtgggaagactatagtttttacacagacaaaaagagatgctgatgaagtatcattgtcattaacaaatagtataatgtctgaagcactgcatggtgatatatcccagcccaaacctcttgtcgattggtccaccggcctctgtgactgcttctccgaatgtggaaactgttgcatgacgtgttggtgtccatgtgttacctttggccgagttgcagaaattgttgacaagggatccacatcatgtggtgctagtggggctctgtatacgctgatttgctgtgtcattggctgtggctgcctatactcttgcttctaccgccccaagatgagacgacagtatggtctaaa

SEQ ID NO: 27584 - DNA, 417 bp, Glycine max
  Clone ID: LIB3108-038-QI-K1-D8
ggacaccttcggcgacggagacggccccagcttctcccgcgaccttaagctcttggtcgggaatctccccttcagtgtcgacagtgcgcggctcgcggagctcttcgagagtgcggggaatgtggacgtggttgaggttatttatgataagactactgggaggagcagggggtttgggtttgtgaccatgtctttcgttgaggaagctgaagcggatgctaagcagttcaatggctatgaacttgatggaagatcattgagagtgaattctggaccacctcctgctcggaatgagagtgctcctcggtttagaggtggttcttctttcagatccagacgtcgtggtccttcacatagtgaaaaccgtgttcatgtatgtaatcttgcttggggtgttgacgatgtaacacttgcttc

SEQ ID NO: 27585 - DNA, 418 bp, Glycine max
  Clone ID: LIB3108-038-QI-K1-D9
atacattagtaacgggcgccagcgtgctgtaaataacccttttcagacatcaagatgaccgctactaggtcatgcatagaggtgctgggagcgtgtgcattcggatgcttgagcatataaactggcttcaagccttatctggagaaagctcaaaaccatatcgcgctctaccaatctgacccttttcaagaagaatcatcttcagctttctgcagaacgcccttaataaacacacacactctgatcggcttaagaaaaatggaaagaaacctcgttgccccaaacttgtgacggtaattaactaggtttgtattgttcaactttatttatcgttctttgaatttgctcacataataatatcatgcatgtaccttgaggctagtgtaggcgttgatgatatcatcctgagttggtatac

SEQ ID NO: 27586 - DNA, 433 bp, Glycine max
  Clone ID: LIB3108-038-QI-K1-E1
gggttccacggtgatgtcatgtcaatggctgcaactctcactgctgtaagaattcccacgggccagcgacgccatctcaaacaacacttcacggcaccctcttcctcttccttacgcctcctcaatctcgcaaagatggaaggaagtgagatcagtgagcaagtagtaggggaggatttgggagcaaagaagaaagtttttgtagctggagccactggtagcactggcaaaagaatcgttgagcagttactggcaaagggttttgctgttaaggctggggttagagacatcgacaaggccaagacaaccctttcctctgtcaacccatctcgttaaattgtgaaagctgatgtcacagagggttctgataagctagctgaggccattggtgacgattcaaacgcagtagtatgtgccacaagctttcgcccgg

SEQ ID NO: 27587 - DNA, 231 bp, Glycine max
  Clone ID: LIB3108-038-QI-K1-E10
aaaaaacaaattaaataaggtcagcctctttttaaattcctaacataaccaccactcataataaatccaatttgttcctccattataaaacataaattctaacttccactcactttcaaacacctatttcttctaataaaccccttaaattaccctccctaacccccttttaaaaaatacccatctttgaaaccctttgaataaccaaaattatcacacttatctcacttt

SEQ ID NO: 27588 - DNA, 437 bp, Glycine max
  unsure at all n locations
  Clone ID: LIB3108-038-QI-K1-E11
agctgacctacaaccagccgaagatgtgcacttacattctctcattttctaaaatttatcagattgataaataaaattttatatttttatattttattttattttatttatatttatataattcaactttctaattttattttttataatttacactcactatttangattttcgatcgccactgcccataatacttaagttggatcccaaactgtttaattggcagagtatgaacatccggggtgagagggagactgataaaggctatgcacgcaacaacaatatttttttccatatattccatcaaatcataacgacagtggtatctgtattcttcttatgcaagataaaggcaagaaagtgatgggacagtccataagaaaaaaaatacttttaaggagaaatgggcaaaacatatcttttagttcactttatt

SEQ ID NO: 27589 - DNA, 401 bp, Glycine max
  Clone ID: LIB3108-038-QI-K1-E12
caatttattatctttctctaagaactcttccaatttttttctctctcttcctctttagctggatggccatggcatcaccagcaagaaccttctttgccttcattctcgccgtcgtcgctctcttcttcgccgccgccaatgctcaagacctctccccggctccgagtcccgatgccggagcggcgggatccgtttcgagctccgtcgccatgatcggagcttcggttgtgctgtcattgatggctatcttgaagcattgaattcgttaatttcgttgggtttgtacaaaattgattcgtttttaaaatacagagtggtgattatgagctttggtatctatacttataggtataccggagagagattatacagtatttaatatacttattggtatttggttt

SEQ ID NO: 27590 - DNA, 405 bp, Glycine max
  Clone ID: LIB3108-038-QI-K1-E3
gtgatttcagtgagtgatcggtgttcacttgatctcatcataatcgtcagcgtcaattggggaaggtgccgatcagaaacatcgccgtcggaaggcctgaagaggcgactcaccccgacacgttgaaggcggctttggctgagttcatctcaaccttcatcttcgtgttcgccggctcaggctccggcatcgcctacaacaagctcaccgacaacggcgctgccacccctgccggcctcatctccgcctccatcgcccactgttccagcattcggactctccgctggagttggagttggcaacgccttggtgttggagatcgtgatgaccttcggtctggtgtacacggtctacgcaactgccattgaccccaaaaaaggtaatttgggaattattgctcccatc

SEQ ID NO: 27591 - DNA, 69 bp, Glycine max
  Clone ID: LIB3108-038-QI-K1-E4
tgcacattgtatatcaaaagtttggttggtactatttgcttcaggacaaaatttctttgatgcttggtt

SEQ ID NO: 27592 - DNA, 304 bp, Glycine max
  Clone ID: LIB3108-038-QI-K1-E5
gaaagagctcaagaatggtaggttggccatgttctccatgtttggtttctttgtggagggagttgtgacaggaaagggacccttggaaaaccttgctgatcaccttgctgacccagtcaacaacaatgcttgggcttatgccacaaactttgttcccggaaagtgaaatgacttgtgaattttatgttatttagttaaatatgtattgcatctatcaagtgagaatgtaaattatattattatattttaaaaaataaaactaaaaagaaaaaacataaaaacaattaaaaaaacaatacaatag

SEQ ID NO: 27593 - DNA, 288 bp, Glycine max
  Clone ID: LIB3108-038-QI-K1-E6
ataaaaaatgcacaaagtttacattactattttatcaaattaatcatacattcgcggacgtagttaaaaccactaaaaggaccttaatataaccatactaatcaccacacttacatagttatcatcaacacacttgcttatgccataaaatttcacttaaacttggaaacttacttaacaattcactgatttacaattataaataaactgcatctatctataaagaaacttcattttcttatcatatgttctaatataagtgtaaaacgattaacatagatccctatt

SEQ ID NO: 27594 - DNA, 458 bp, Glycine max
  Clone ID: LIB3108-038-QI-K1-E7
gtgattgttgaaactcgttcttcttcgcctttatcttcttcttttgttgtttgtgggtttgtgtttttctctcacctgaaaatgtcttgctgctgtggtaactgtggttgcggaagcgcctgcaagtgcggcaacggctgcggaggctgcaagatgtacccagacttgagctacaccgagtcaaccaccaccgagaccttggtcatgggagtggcaccagttaaggctcaattcgagagtgctgaaatgggtgttcccgctgagaacgatggctgcaaatgtggagctaactgcacctgcaacccctgcacttgcaagtgaggtgttggagagctaaagcttcaagcagagatggcccttagaaataatgataaaaactatatgtagtttcaaaacttcaaaattatgtagtatgtattatgttgcactctggtgttgtgtgtctaaacaaacaccct

SEQ ID NO: 27595 - DNA, 378 bp, Glycine max
  Clone ID: LIB3108-038-QI-K1-F11
ggaagagagaaaaaccatggcaataacactcaacaatggcttcaagatgcctatcattggattgggcgtgtggcgcatggaaggaaacgaaatcagggacctaattctcaattccatcaaaattggttatcgccattttgattgtgctgctgactacaaaaacgaagcagaagttggagatgcgcttaaggaggcttttgatagtggccttgtgaagagagaggatctcttcattaccaccaagctttggaattctgatcaaggccacgttcttgaggcgtgtaaagacagtctcaagaaagcccctcagttaacgtatctagatttatatcttgttcactttcctgttgccgtaaggcatactggggttggtaatac

SEQ ID NO: 27596 - DNA, 333 bp, Glycine max
  Clone ID: LIB3108-038-QI-K1-F12
ccaagacatacttaccatggtaataacactcatctttggcttcaatattcctatcattggggcagtcgtgtatcacattgaatgaaaccatatccttgacctaattctcaattccatcaaaattgtttatcgacattatgattgtactactgactacaataacgaaacactacttggagatgcgcttaaggacgctcttgatagtatccttctgaagagagagtatctcttcattaccaccaagcttttctattcttttcaaagacaatttcttgaagcttgtaaaaacagtctcaaaaaacattttatttaacgtttctaaatttatatctt

SEQ ID NO: 27597 - DNA, 377 bp, Glycine max
  Clone ID: LIB3108-038-QI-K1-F2
ccacaatgtgtgtttgatcactgggacatgatgtcttctgacccattggaggctggatcagaagctgcacagcttgtcactgacattcgcaagaggaagggcttgaaggaacagatgactcctctctccgagtttgaagacaagctttaaatttgtttcatgaattattttactttgaacttagtcgaatttattttctcttgtgaacaatgctactttagatttaatttctgttagttttttttgtggttttgcccgtgaatgttgtaatgctgttatttggtccttgcatcgatgtatttttgctctaataggattttgcatcggtgttggttcaaattattattttgcgaattttgcttgaaagatagtatttt

SEQ ID NO: 27598 - DNA, 436 bp, Glycine max
  unsure at all n locations
  Clone ID: LIB3108-038-QI-K1-F3
aggaagtgaagaaattgatacaccttgttttccatgccatcgcattaatacttggaatagggggaagttatactgccttcaagtatcacaatgaaagtgggattgccaatctctacagcttgcattcatggcttggaattggggttattgacctttatggcattcaatggatatatgggcttgtgatctttttcttccctggggggactcccgacattaggcgcgcctcacttccatggcatgcgctattcgggctgtttgtatttgtcttggctgtgggcactgctgctcttgggtttctggagaagctcactttccttgaaaactcangattggacaaatatggttctgaagctttgcttgtcaacttcactgctattatcacagtcttattcggngcctttcgtgngttatctgctctagctgatgctccccc

SEQ ID NO: 27599 - DNA, 354 bp, Glycine max
  Clone ID: LIB3108-038-QI-K1-F4
cccacgcgtacgacttgactcgcctttctgctgacatggctattggtatcgtcggaaatgcgggtgttagagctcaatgcacagcatcacaaaactttttgggggaatgattctcatcctcatttatgctgaagctcttgcccttgatggtctaatcgatggtattatcctgtcttctcgtgctggccagtctatatctgactaagaaaggagttgagctgcaaaatattctttgaccacccatctgttttaacctctgtttagatggggtgagggaggtaattattattttttccgagcttagcaatggtcaagcagcattgtcacgctttaacaattgagtgaaagttcaat

SEQ ID NO: 27600 - DNA, 478 bp, Glycine max
  unsure at all n locations
  Clone ID: LIB3108-038-QI-K1-F5
accggnccggaaaacccggggtgaaaaatgggaattaagatagataaaatatatggctaattaaagataaatatattttcataaaaatggcgttcagatcgaattctataacaatcaaaagctatactaattatatggcagttccaaaaaagcgcacttctatatcaaaaaaaaggattcggaacactttatggaaaaagaagggatattttacaacattgaaagctttttcattagcgcaatctatttttacggggaattcaaaaagctttttttgtaacaaatacaaacgttagactaatttcaattaactaggttcaacgaatatttttaaatgcaaaagagaaaaaataaaaaaaaaaaaaaaaaaaaaaaaaaaaaaaaaaaaaaaaaatttaaaaaactaaaaaaaaaaaataaaaaaaataaacaaaaaaaaacaaaacnancaaaaagggggggccgttttaaaaaaaca

SEQ ID NO: 27601 - DNA, 441 bp, Glycine max
  Clone ID: LIB3108-038-QI-K1-F6
gaacaagtagttgagaactaagaaggagaagcaaatggcttcctcaatgatctcttccccggctgttaccactgtcaaccgtgccggtgccggcatggttgctccattcactggcctcaagtccatggctggcttccccaccagaaagaccaacaatgacattacctccattgctagcaacggtggaagagtgcaatgcatgcaggtgtggccaccagttggcaagaagaagtttgagactctttcctacctgccagaccttgatgatgcacaattggcaaaggaagtagaataccttcttaggaagggatggattccttgcttggaattcgagttggagcacggtttcgtgtaccgtgagcacaacaggtcaccaggatactacgatggacgctactggaccatgtggaagctgcctatgtttggttgcactgatgcttc

SEQ ID NO: 27602 - DNA, 343 bp, Glycine max
  Clone ID: LIB3108-038-QI-K1-F7
gcgggaaaatacccacccaaccatggctgcaacccttcctttttctttgattatgaactgcgcgccttttaaacttgcaacacctttcgctcccaaaaccttcaactttaatattgttctccctcttaaaccacgcatgttggtctctaatacctgtgctgacaacaactaaaatgctggcaacaaaacaacagttcttaattttgataggtaagctccaacaatgtagcagacctttgacttttttcattatctttttaacttattttatgaacaatttcttcttattcatggaaaccttcttattgaggcatgaatatttatttacctaaattacttaaat

SEQ ID NO: 27603 - DNA, 430 bp, Glycine max
  unsure at all n locations
  Clone ID: LIB3108-038-QI-K1-F8
cccacacgcccgagcaaacaagaaaaangagctacggcccaggccaacaanggggggaggaggggctgaaacccagcagacaacacgggaaagagaggaacaagggaaccaggcgtcngcctcaacagaangaggcctcacgctaaggagccggcgccaccagcacaagccaacaacaagcaggacaccaccaccacaagngctaccaaaattgatcagaaaactgaaaattcttgcaatgcatgtgaggagaagttcaatgacgggacaaaacccgggtctgtgattgctaagaacatcatgattgnggatgattatagccttgaggacaagagtgctgagcaatgggcactcactcacacaggtcaggaccatgacactatagttattcttcatgtcatgaacccttgtaataaacaagccactgatg

SEQ ID NO: 27604 - DNA, 394 bp, Glycine max
  unsure at all n locations
  Clone ID: LIB3108-038-QI-K1-G1
gaaaaaagatcgaggacgcgtgcgtaaaccttatttctttaaactttatttttgattctgagaatagaactaanagggtgtgggcgtggctatcacaattgcaccttcttttttggttctgcttctggctttccccactgtatttggagctgaccatgaagttggtgacactagtggatgggccctcggagttaattacaacacctgggcctctgtgaaaactttcacagttggagacacatttgtgttcaagaatgactccactcatattatttttttaacttattttatgatcattttcttcttattcatgaaaatatacttattaaggcatgcatatttattaacctaaattactcaaatacaaagtagtgcaaatctcttttcatgatac

SEQ ID NO: 27605 - DNA, 398 bp, Glycine max
  unsure at all n locations
  Clone ID: LIB3108-038-QI-K1-G10
gcgctaaattaacgatagtccaagtgtgtgggagacacacagagacatggctaagtggcgtatgttggtgctggttcttgctctggctgtggctacaaccgccatagatgttcccaatcccaatgatgctggtctcaatgaccagaataacttcatcagctatggtggagttggtggctattctggaattggaagccatggactaccttttggaggtgtcggaataggcggtggcattggcagcggtggacttggtggcggcctcggcggcaccaccgggatacgtgggttgggaggattcggaaaagtcccattgatgcccatcggttggtgtatcaacatacctcatcctaccccttgtatgaacatgcatgcatatcgaatctctntaggttctt

SEQ ID NO: 27606 - DNA, 308 bp, Glycine max
  Clone ID: LIB3108-038-QI-K1-G11
cgacccacgcgtgctgtaattcaaccttacacccattcttccactcacactcctaaactctcccacgtatcataagcatagtcttattctaccaccaactcgccctacaaccactacagataactaaaatcctccacatcactctcccaatgaccataaataactcctcacttatactagcaccccaagcctatatggaaatttaaaccaaagccacaacacttccaacatccccactataccatatcaatctaaaccgttttcttgtccttaacactgtttcccccacttatgtcaataacatttct

SEQ ID NO: 27607 - DNA, 424 bp, Glycine max
  Clone ID: LIB3108-038-QI-K1-G12
atcttgcccctctcttctctgtgccctctttgtttctgtctctctgttcctttctttcttgtctgattttccatacacatattatatataatatatcctctctgcttatactcctagtattatataaggcctagagacaacattcattgcaattggcagcacataattcaaagggcaatggcctcttggaagaagaccatcacaactccattcaaaaaggcttgcactgtatttaaacagcagcaaccaccaagggatcaaaagaagtctcaaacagagcaagagaggcaagtaatgcatctgggccgggtgaagtgatggcatgtgggtatgaagatgttcaagtgatgtggtctattctggataagtccaaatccacaaactgcaatataacctcttcaacctgacccatccaatcaaaaac

SEQ ID NO: 27608 - DNA, 383 bp, Glycine max
  Clone ID: LIB3108-038-QI-K1-G2
cccacgcgtccgctccattgctagcaacggtggaagagtgcaatgcatgcaggtgtggccgccagttggcaagaagaagtttgagactctttcctacctgccagaccttgatgatgcacaattggcaaaggaagtagaataccttcttaggaagggatggattccttgcttggaattcgagttggagcacggtttcgtgtaccgtgagcacaacaggtcaccaggatactacgatggacgctactggaccatgtggaagctgcctatgtttggttgcactgatgcttctcaagtgttgaaggagcttcaagaggctaagactgcataccccaacggcttcatccgtatcatcggattcgacaacgttcgccaagtgcagtgca

SEQ ID NO: 27609 - DNA, 449 bp, Glycine max
  Clone ID: LIB3108-038-QI-K1-G3
caaagagatcagtggtagtgtggtacattgtgttgatcaacgatggaacaaaagaagtttgtggcactattaatggtggtgggggtgatggcttcttctatgtggaaaggatccaaaggtcttagtctctgtaacatggatgaagatggattggaggcttgcaagccctcagtgactcagccaaacccacttgatccatcccctgattgctgcaaggctctggatggtgctgacttgaagtgcctttgctcttacaagaactcatcagagttgcctcttctaagaattgatctaactcttgctgcttcacttcctgcaaagtgcaatctcactcctccagataattgctagttagcttctctgagctatttctgctttttgattgtgtgtgttataatcttttttctgcagatgacctattgagaaaaaaagaaaattattggactcta

SEQ ID NO: 27610 - DNA, 349 bp, Glycine max
  Clone ID: LIB3108-038-QI-K1-G4
cccacgcgtccggacaagaccacttcataagtgacactggagatgttgcttattatcagactgatgtgtctgctcctccactcgcaacgagactgagtttcaaactttttgggttattatttattggattctagctactcaaattactttttttttaatgttatgttttttggagtttaacgttttctgaacaacttgcaaattacttgcatagagagacatggaatatttatttgaaattagcaaggccgtaataataaattttgaattgtcagtttcaaaagaatagaactaactgtaggtgcttcacttcctgcaaactgcaatctcactcctccagatacttgct

SEQ ID NO: 27611 - DNA, 459 bp, Glycine max
  Clone ID: LIB3108-038-QI-K1-G5
atctcattcttcacctgcaactatttggattgctgatttttgttaataccatatggactggtattggcgcatttctttgagaaagttactaattcctagatagaggcaaaaatgttgggaattttcaaggagaagttggttaaagcacccaaagagctgaacagtccagcttcgttgaattcatgcactaagcctaagctaagtcacgaaatccttcaggatttcatgtcctgcaattcctccaatgctttctcaatgtgctttgggaatgaagctttgctagcctattccccttcaaacaagccctccattcatcaaaggttgtttagtggtttggataacatatactgtgtcttcctgggtggcctgcacaaccttagcatgctcaacaagcagtatgggctatcaaagggaacaaatgaggccatgtttatcactgaagcatatcgaactcttcgt

SEQ ID NO: 27612 - DNA, 449 bp, Glycine max
  Clone ID: LIB3108-038-QI-K1-G7
gcggatcgccgtgctgagtgtgaagcgaaggcatcatggggctgacgaatttcgggctggcggtggcgggtgtaagcgccgtcgttcttctccttaggagtgacgtcagacaatctgcctccgtcttccggcgtaacgtcaagcacattcgcaactggctcgaagaagaaaccgccgctacatccaagacaatggaaaagtccactcccaaagaatttgaatcaaaggttcctccgaaagacattcctaaggaggacaaaaaacattaatgtttatacaggtgatgcagatgttactgcagtaattgtgtttctcttattgtttttgaatggatacatgtttttgtgtctttactagaatgaattcttgatcactgtctgttcatattactcttgaatgacccttgtattagtacatatatatttagcaataatatgacggatgacaat

SEQ ID NO: 27613 - DNA, 418 bp, Glycine max
  Clone ID: LIB3108-038-QI-K1-G9
gtggatcagcatcgacagttttctacaatttgaggcaaaaacatcctacgcttgacatgcgagtggtcgactacgacttggcacttcttttccaaccagtgctggtgcttggaatcagcattggagttgccttcaatgtgatttttgctgattggatgatcacagtcttgttactaataattttcgtaggaattgcaaccaaggcattcttaaaaggagttgagacatggaaaaaagaaaccattatcaagaaggaaactgctagacaatcacaatttaatggcactgaaaggaccgcggagggagcgcatatgagcctctaccgggagggccaaacacaagcaatcataaagagcctaaaaaatccaaggaaacgggatcaattcttgagaatgttcgttggaaagcacttggagtt

SEQ ID NO: 27614 - DNA, 417 bp, Glycine max
  Clone ID: LIB3108-038-QI-K1-H1
cacaaattcaaccatcgaatacactattgaccattaactagaaaattttgaaatctcatctgatttttttcaattgaaactgagcttcaaaacatggcagcttttacatcaattgttgtgcagtactcatccacatcatctttacagtctttggtaccttctttagaagctacacgcgatcataattcatggtgggggagagtgagatcatacagatccacaggaaaaaattcactccaacagaatatcacaagaggcttaacaatccaaaatgcagccacaaaaccagctaagtcaccagctgaagaagactggaaggttaagcgagaatatctgctggaaaaaagggtaagaagtgtggatgcaaaggaagctttccgtcttcagaaaaaaaataattttgtgattctcgacgta

SEQ ID NO: 27615 - DNA, 367 bp, Glycine max
  Clone ID: LIB3108-038-QI-K1-H11
acccacgcgtgctggccactcgtcctttgaaccatcgtgagcacctgcttcatgaggaaacaacctattacgacgaagagcgtaaagacattccccaacgctctttttggtctaaaaggtggacgaggtggtcgtgtaacttgcatggcctcgtacaaggtgaaactcataaccccagaaggagaagctgagtttgaatgcccagatgatggtttcattggtgacaatgctgaggaaaaaagcattgaacttccctactcgtgcagggctgattcttgcgttttatgtgttgggaaaattgtgaaacgtgacttttacccccatcaaatggtttcttccttgttgatgaacaaattgcacgtggatt

SEQ ID NO: 27616 - DNA, 373 bp, Glycine max
  Clone ID: LIB3108-038-QI-K1-H2
cccacgcgtccgcaaagaaccaagaaaccaagcaaatcattgatctctctgtcctgtgttgtgtgatttcccccttcaagccaccaccaatggccaacaacgagatgcaagttgagaggggtttggacttggaaaggtacatggggcgttggtatgagatagcctctttcccttcaaggaaccagcccaaggatggcgtgaacaccaaagccacatacactcttaagaatgatggcactgtgcaagtgctcaacgagacttggagtaatggcaagagagggcacatagagggaactgcttttaagtctaaccgcacaagtgatgaggccaagttcaaggtcaaagtttatgtccctgcctttttgcctatcat

SEQ ID NO: 27617 - DNA, 306 bp, Glycine max
  Clone ID: LIB3108-038-QI-K1-H4
aaaccactaaccaataatttaggtttatacacacttaaaatacacaacttttggacaaaccaaacttaacgccatttacaaagatgctgaccttttcatcaatgcaatggcattactcattctaatccaaaaaactgacctataaaaagaaaagaaacgccgtaaagtaaaaagaaaaacaaaatgaaacgggcaaacatttcagactcaataattttgatacctcctcaccacatgctaccattttgaacatgattgaccttactcacatgacaatctccggcttgagaatatttgacttgatct

SEQ ID NO: 27618 - DNA, 437 bp, Glycine max
  Clone ID: LIB3108-038-QI-K1-H5
cccacgcgtccgagatcatgaccttagatgatcagcttaaggctaactacagctgatctgggagaatgacaagaaaacgtacaaggcagaatgctttggaaaaagaagcaaggcttatatcttttgaaaatgatcaagctaatactgtggagagagagtcaactgaaaacacttgcaaggagaccgcttctggtaagctgctggagggctgtaccaaggctaatgatcaaccacgcattgatgtacacgaaagtggtcgtcgtaactggcttattcaaaatctttttgagtatgcactgggcatgaaattatacactgactatcaaactgaaagaatttgcctttctgcagtgcatcaatcaagcggatactccttcaagatatcgcggattagcaaatcctctgatgaagaagcacaactgctggaccatgtttta

SEQ ID NO: 27619 - DNA, 442 bp, Glycine max
  Clone ID: LIB3108-038-QI-K1-H6
cccacgcgttcgatatcatgaccttagatgatcagtttaaggctaactacagcgggtctgtgagaatgacaagaaaacgtacatggcacaatgctttggagaaagaagcaaggcttatatcttttgaaaatgatcaagctaattctgtggagagagagtcaactgaaaacacttgcaaggagaccgcttctggtaagctgctggagggctgtaccaaggctaatgatcaaccaggcattgatgtacaggaaagtggtcgtcgtaactggcttattcaagttctttttgagtatgcactgggcatgaaattatccactgactatcaaactgaatgaatttgcctttctgcactgcatcaatcaagcggctactccttcagtttatcgtggattagcaaatcccctgatgaggaagcagaactgctgtaccatgttttatatct

SEQ ID NO: 27620 - DNA, 364 bp, Glycine max
  Clone ID: LIB3108-038-QI-K1-H7
cccacgctttcgataacacgacctttcaacatcagcttaaacctaactacaccttctctgtgctaattacaataaaacgtacaactcaaaatgctacatacaacaaagctcggcttatatctttagaaaacgatcaagctaattcatatgagagagactcaactaaaaacactatcgatgagaccgtttatagtaacctgcttgactgatcaaccaaggctaatcatcaaccacacattcatgtacatgaaaaacgcttacattactagcttataaacaatcatttttactattcactctccatgacattatccacttactatcaaacttaaggaaaaaacctcattgcactgcatcaatcaaa

SEQ ID NO: 27621 - DNA, 352 bp, Glycine max
  Clone ID: LIB3108-038-QI-K1-H8
cccacgcgtccgcccacgcgtcctttgaaggttagcttagggacggcttatagtgcggtgcgttgattatgggtgcaccgtggctgtcaaaaggctcaaggatgcgaacccttgcgcgaggcatgagtttgagcacatacatggatgtgattgggaagcttaagcatcctaatgttgtgagactcaaagcttattactattccaaggaggaaaagcttcttgtctatgacaatctctccaatggaaacttgcatgctcttcttcacgggaaccttggtccgggaagaattgcattggattggactacaaaaataagcttgctgttaagagcatcaagatgtcttgctaagat

SEQ ID NO: 27622 - DNA, 406 bp, Glycine max
  Clone ID: LIB3108-038-QI-K1-H9
agtaacggacgccagtgtgctggaattcgtccttccagccgtcctcccgacctgtctctggtcagaaagcaaatgatgtaacatattggtgagagtttgaagtgccagaggattttataacaatcggggcaattaagatagaaaaccaacaccgcatagaggtattcgttgaatccgttgttatagaaagcgcacctatcgttcctattaccgtaccatgtgagtcatgggttcattccaagttcaccaaccctgagagtcgtgttttcttcgatgacaaggtatcatgcctaccatcgcaaacacccagcggcctctaatattaaccctatagaaggaattagcggctctttggggcgaaggtgcaccatacaaacctagacaaaagcaagacattatttattat

SEQ ID NO: 27623 - DNA, 468 bp, Glycine max
  Clone ID: LIB3108-039-QI-K1-A10
ttggcttggaacctttgggctgatttatgtgcttgactgagacaatcagaaatagcgcgacgaaaacgaaggcttccgcccctcctgccgtcataaccccggcagtacggtaacgttacgtgcatgacacgcctttctcttgaacgaatatcggtcacggcgtttgcatcttggaggcgaaacgtgtaagccggaggtccgtcgcggaagtatataatactcccggtcccgagattaccttcgaagagcgtgccgaagtaataaaggaacatacttacggtgaataacacagactagatcttaaaatagccaattaataagtccatccccacgttagagattctgaagcttactttaaggatatacccgcggctagcacagacggtattgcatctctcaacaccttacatcataaaaaatacggacacggggcggagaaacccaatctgattccgcacgacgaacggg

SEQ ID NO: 27624 - DNA, 389 bp, Glycine max
  Clone ID: LIB3108-039-QI-K1-A11
tggcttggaacctttgggctgatttatgtgcttgaatatgtgcatgacggttatagcgataaaagcggtagcaccaggcactactaggtgtgcgtgggtagtcgttaatagtgctcagactaataactctgtctgtcccgtcgcagatgattacactaaaagagagaacctagcctcggagcccgctaaggcgaccagcgtatagtagtatgtggccctcggagcgaaccatcatacaataccggaagtaaaatacggcgataccaaaaacgagtacaaagtgaatgcccgggagagggaactttaacagccgtcagaacctacgttaataccaggcgtacgatgtgagactgattacgctgtctgtcccgtcgcacaagaataaaata

SEQ ID NO: 27625 - DNA, 422 bp, Glycine max
  Clone ID: LIB3108-039-QI-K1-A9
tggcttggaacctttgggctgatttatgtgcttgtctccgagtagtagaactcctaggttaagttaggcaagtaagtataatataattttgaaacggtcctcgtcctcgcctttacggtccctctgtcgagtctcgccactaataataataagttcctacttgaagttcctcctaggttatcattttcatggtaattaaagaggatttctcctattataaaggtagcgctaaatcttaaggtctaaactaacgtactcccgaaggagaaggtagccgtaggatctatagtagtcctcgcgatagtactcacggcggccttggaggcggtctacgtcgtcggacacgagcctcttttcctttctaagaatccctcgtcaaatactcccgtcggcgggcccgcctcagcagttacacccggagt

SEQ ID NO: 27626 - DNA, 430 bp, Glycine max
  Clone ID: LIB3108-039-QI-K1-B10
tggcttggaacctttgggctgatttatgtgcttggctaaatatctcgcaatctcccaccccacccctccctccctccctcttgactgtacagtctgtctgtaattattacgttcctttgaagaagaatctctccgaaggctactacctctggcgatagcggggcggggaagatactcccgacgaattaacacgcgaacaagaagcccagcaactagcataaggtaattaccggagtggaccccccaattaaagaagtgtaacctaaacacgggtcccatattccatagacccgggacataaccggttaaaaaagaccttaaagttccgggaccgtccctcaatggggggtcaaccggcggggttctcgaaccgagcaaaacctgagaaaaccccccaaaatttccaaaattgggggggggaaaccccccc

SEQ ID NO: 27627 - DNA, 417 bp, Glycine max
  Clone ID: LIB3108-039-QI-K1-B11
ctgatttatgtgcttgtggatgtgcgggggaagaacactcgagagcgagacatacaaaagaaaaaggaaatttcagggggacagggtaaatactactacgctggatgaagagtattaccctgagcttaaggtagatgttggcgttcctaaaattcatttctagtaagttggcattacctgtaagaatggtcatactgctactaaaggatgttttcgtaaggccgcggaagccctgatccttaaaatcggaaagtatggctatgttaagcgttatcccgccggaaccgacacccctatcgttaagaaatccgaagacaccgcgtttctcctccataatcgcgacgccttctacgcgaactgcatcgaccattagtctaccgacaccgtcgaggacggaacccccgagctcgtccatcg

SEQ ID NO: 27628 - DNA, 330 bp, Glycine max
  unsure at all n locations
  Clone ID: LIB3108-039-QI-K1-B12
tggcttggaacctttgggctgatttatgtgcttgtacagatacggttattgctatcctcgtagtagccctcacctttctacctatcggttctaaggtaagtgtaggtaaagcgagcgttgttgtagccaaagctctagtcttttaagttataaggcctcgtggtactaaggtcctttctaaagatgccggagctgtcgccgcggttatcgtcgtgagtgtagcctcagtcagtaatgttacggttaccgaagcgccatcgggtatcgacgatgggctctcggccnctctctttaatctccctcttgcggttttcgggggaaaagactgcg

SEQ ID NO: 27629 - DNA, 253 bp, Glycine max
  Clone ID: LIB3108-039-QI-K1-B9
ttggaacctttggctgatttagtgcttgaccacgctcacgcgaagcgccactaaacgacgttatatagacctaatgacggtacgtacaggcatcacgatctaatcgttcactacaggcgtgtgtcacctggctcatgtctaaaagaaggtaaagaaatccaagatgacaactccgaatgatgatgcgatcgacgcaggaaagtaagagtaatcctcagacgtagaggttcgatcccactagaaatcattcgtc

SEQ ID NO: 27630 - DNA, 360 bp, Glycine max
  Clone ID: LIB3108-039-QI-K1-C10
ggttggaccttggctgattagtgcatgaacaacccggtccttctagccgacacctgtgagggaagagtctccataaacccgcgacgagataacgcaccgtagaaacccatcgatttaaacaaagggaaaacccgtacctaccgcttccgtaccacacccttaaccaccctcggaccacaaaacgctacaacagagccaccatccctcaaaaaaaataaaaaagggtggttgtctcagaggacttaagtccatgcatgtgcatacgtgatgctacagtctcctcacagcgctattcaaacctaacctaatcggtgctgccccataatgctaagatcgggaaaaattcggtgccatttaatc

SEQ ID NO: 27631 - DNA, 425 bp, Glycine max
  Clone ID: LIB3108-039-QI-K1-C11
tggcttggaacctttgggctgcctgaccctctaccccggcaaaagcctgaggatcaaaaatacaacccgttttaccacgaagcgaagatgagcaggcaaccacacaagaaatcctaacccactgaatgcatacgactggactagaccacaccaatacgtaagactacggctaaccccattacataccgtatagccagccgccttccaacaattcgagcaaagagccggcaaaccccaactagatatattcactccgtacagtcccggaagtttctagacggctttgatgcataagtaaacgcatacggtgagtacaccccgacaagtacaacgtgcccctcgcagtcgcactttttgccgtaataatagtaagaatccgatttccgaacagaggcgacgtcttactataaaccgtataagtatca

SEQ ID NO: 27632 - DNA, 320 bp, Glycine max
  Clone ID: LIB3108-039-QI-K1-C12
gtatcgttgcattggcttggaacctttgggctgatttatgtgcttggccccctggggcctcgccctcatcttcataaaattttatttctgcgaacgctctagaagtttaaaacacccctacagtacccctagaggaaaacggtgggcatggccctgatccgtcctcctcctgcgccctcctccctctcttcctccttcccctagactcttgtcgaggaacttctggagaaggagcctgcatctataccggactatctcaatccctatgatatcgctagtaagtatgaccctactgctgctgagcctcatgttttaacggc

SEQ ID NO: 27633 - DNA, 427 bp, Glycine max
  Clone ID: LIB3108-039-QI-K1-C9
cctttgggctgatttatgtgcttgacgctctaaacactaagccacgatgagcacgtatcatgtagagacggaaaggaatgagagggagactacggcagtcgcggacgagagttaggagagtacgtacgtatgactacggcgtactattaactccacgcatgaaattaataagtccgactcgtcacacgctaggatattcctactcccacatcatgcggacgttgtacggcacaatcagcgtcttgacggcgccgacgtcacggaaaagcatagcacgtatccggtcaacttaggtacggaaagagtcgaagtcgtccgtagagatccgaatgtcatcaacactaacacacgaagagcgtacggagcacgatacgttaagaacgcaacacgtagcgttcgtaagaaatcacaagtcgatattcccggc

SEQ ID NO: 27634 - DNA, 257 bp, Glycine max
  Clone ID: LIB3108-039-QI-K1-D10
tggcttggaacctttgggctgatttatgtgcttgtttatgtgcttgctccactttctcaactatctcagtcgtcgtaaaccctcatcgcctcctaatggtcctcgtagacgccgagccttgccgtcccggcggcgggtccgtccgggctattggcaatgacgtttctgagaaagttcccctaactcatggtgatactgccgaactgaaggccactaatgattgcgatatcgaaaggcttaaatgacctggacccgcg

SEQ ID NO: 27635 - DNA, 375 bp, Glycine max
  Clone ID: LIB3108-039-QI-K1-D9
tggttggaacctttgagctgatttatgtgcttgtccctctcacagctcacatatctaaatttcactctttgatttcgccttttaggtgcacttgctacgacacgaggaatgcttaagattgaactcaagagagttagtctttaaatccgtcgcgaactagcagggacttgctattaaggtcaggaaatttgttagtcaggggaaggtactaaaagatttcattaagttaaagaggttcgtaagcgtacattctgcccacacggatgatcctaagtaggctcccaattaataatacatcgtaaataaagtagcgcacgtcgcgggtaaagttatccgagttaaacggaagattacgctcgacgtctaaaaagtatt

SEQ ID NO: 27636 - DNA, 311 bp, Glycine max
  Clone ID: LIB3108-039-QI-K1-E10
tgcttgacggatgtcacgactcgaaggtaggatccgccgaatgttccggaaaagaccacccggaaggaaccacgaaagacggtcctaccgacgcgacgtagctaggaagccccgaccattgcgcgatcccagaaagcccgacggactgaccagacataaatacgtacgaagtacgttcctagaccgaccaagaacgtagggcctctatagcctacggcctcccagatttagccaccttcgccggagacgtactccgagccgttaagaccacattaaattataagtccaccactacaaagggagtcgcctac

SEQ ID NO: 27637 - DNA, 338 bp, Glycine max
  Clone ID: LIB3108-039-QI-K1-E11
ggcttggaacctttgggctgatttatgtgcttgtttatgtgcttgtttatgtgcttgtgggtcttgatgctattacttctaatgcgtgcgacgaattttatttgtattggttctacttcgatgtcgtaggaaacgggtgttgatactgaagctactaatttgtgttccgttggtggtgaagatgcggtggattcgtgtgcctgtcttcttatgtcgaagggtgctatggcgttggaagattgtgtgttcctgacgactgatgaacacttgacctctgtcgctagttgttgtcctgtggaaggggtgattgcgacgaatggctcggaagaatcttgtgc

SEQ ID NO: 27638 - DNA, 205 bp, Glycine max
  Clone ID: LIB3108-039-QI-K1-E12
gcttgtcggatgtcacgactcgcaagtaggatccgcagaatgttccggaaaagaccacccggaaagaaccacgaacgacggtcctaccgacgcgacgtagctaggaagccccgaccattgcgcgatcccagaaagcccgacggactgaccagacataaatacgtacgaagtaccgttccagaccgacaaagaacgtacggcctcc

SEQ ID NO: 27639 - DNA, 407 bp, Glycine max
  Clone ID: LIB3108-039-QI-K1-F10
cttggcttggaacctttgggctgatttatgtgcttggatgtatatattcctaaccattctgctgataacggtcatatacaccgcgccggcgtagacgaactaaccggaagatagccatttacggtcccctcagagtgcgctaaagacgaacccgcggtaaaacacggcggcggaaaggtcgttatcgtcttcgcgaatagttccaataaggaacccgggttaaagccgagggaatacacgtagcatcgcgccgactacttcgaagagacaagtaagtccgtaaaggcgaaagtctaagccctcgaaaccaaaggcgctacgaaggagaacaccgaaaagggctcagataggggcgataagacagaatcctcggcggataagatcgagaattcctacaattaggtata

SEQ ID NO: 27640 - DNA, 463 bp, Glycine max
  Clone ID: LIB3108-039-QI-K1-F11
ggcttggaacctttgggctgatttatgtgcttgagagcccgccgcgagtcacaagtcagcccactgcgaggagaacacgaagccgcccgcccctcccgccgtcgtagcagccccggcagtacggttacgttacggtgtaggtcattaaaggcctttctcttgaacgaaaatcggtcacggcgagtgcctcctggaggcaaaacgtgtaagccccaggtccgtcgcggaagtatataatacttgagttcccaaaattaccttcgaagagcgtgccgaattaataaaggatcataccaacggtgaataacccagactagatctcaaaatagccaattaataagtccctccccacgtcagcgaatgtgaagcttactataatgatacacccacacctggtacagacaatattgcatctctcaacactttacatcacgaaaaatacggacacggggcggaggaaccc

SEQ ID NO: 27641 - DNA, 273 bp, Glycine max
  Clone ID: LIB3108-039-QI-K1-G11
ttcgaaccttcgggctgatttatgtgcttgtataagctcacgaaacataactttacgctactcacgtctactacagaacggtactcctagcgagctatacatatcacctgcgaagtttgcgacgtcgttcatgacagagaccagtaatgtttcgcgaatagtaccttaagttattagttccttcgtcgacagagatttcgatacgggttaaagatagtctacgaaaacgtcctcctacggcgttatccgatcttaccccgtcagatcgtccac

SEQ ID NO: 27642 - DNA, 308 bp, Glycine max
  Clone ID: LIB3108-039-QI-K1-G9
gaaccattgagctgatttaagtacctcactatgtcaaatattaatcgtatccacatctaggacacaatactaatcacagggttcaataggtatcatgtgacgtattaaccaagacgttaatcacagtggaagactaaaggatcgagaaacgtacgttaagttattaatacctccgtcgacagaactttcagtacggctaccacatagacaacgatctcgtcaaactacggcgttaccacaacttatcccgacgaaacgtccaccatacatatacatccctcggacttcctaaccatatgaatcccata

SEQ ID NO: 27643 - DNA, 414 bp, Glycine max
  Clone ID: LIB3108-039-QI-K1-H11
gcttcgaacctttgggctgatttatgtgcttgtttatgtgcttggcccgtgccgtgcggccggccccgtggcactgaagaagaagacggggaggtaggccgcgttggcgaaactagcgactcatgtgtcccttttcccttagtaaaagaccacgttgggctctcggaaggatccgtttatgaagacctattataaggctcttgagaaccggactagtgttatctccccgtctggcttttctgctcgtattcatgtgcacgcctaaaatcattcgtaaaaggagaagtcggtctataggcatcgagtctccgtaagactcgaccggacaattcctcagcccgacgttccgactccgcccagttatttaacaacgcgatatcgccgaaatccgtcccattgcccgcccccgacacg

SEQ ID NO: 27644 - DNA, 233 bp, Glycine max
  Clone ID: LIB3108-039-QI-K1-H9
ctttgggctgatttatgtgcttgattatgtgcttggacagtgccgtgacggtccctccggcgcactcatcagagatcacctccggtgattccacttcgacgtaactagcgattcatctgtcatcatacccttagtaaaagattacgttgggctcacggaatgatccgtttattaatacctactatatggctcttccacaccgtactagtattatctcaacgtctggaattact

SEQ ID NO: 27645 - DNA, 332 bp, Glycine max
  unsure at all n locations
  Clone ID: LIB3108-040-QI-K1-A1
cgttcatttcccacaaccttaaacccggcggcatcatggtgtccccttctctgcacgagcgttcctcattccctttgcaactttctttgaaagcacccttctctgcttcccatcctttagtcctcacccgaagactctttcctccttcggtttccggcatctgggacgctctcaccggcggcacaacaacaatgcccgcgaagccgttctcgcatttcgacgcggaatgcttctttttcgccaggtttgttctccaaattaaaccaaacctacttccatcttcctcacgttgtgtttctacattatgtgtcacatgtcatgctnatgctatg

SEQ ID NO: 27646 - DNA, 373 bp, Glycine max
  Clone ID: LIB3108-040-QI-K1-A2
cgtgcatttcccacaaccttaaacccttcggcatcatggtgtccccttctctgcaccgccgttcctcgttccctttgcaactttctttgaaagcacccttctctgcttcccatcctttagtcctcacccgaagactcttccttccttcggtttccggcatctgggacgctctcaccgtcggcaacaacaacaatgcccgcgaagccgttctcgcaattcgacgcggaatgcttctttttcgccaggtttgttctccaaattaaaccaaacctacttccatcttcctcacgttgtgtttctacattatgtgtcacatgtcatgcttatgctatgatgtgttagtaatttactaattggagttgctttatataat

SEQ ID NO: 27647 - DNA, 346 bp, Glycine max
  unsure at all n locations
  Clone ID: LIB3108-040-QI-K1-A3
ggaaattataatcatgaatcagactgttataccaagtctgtactcgagttttcaagcggacgattgcgactgacatcgatagcacatgtcgtctgcataacagcctttagtattaaaatattcacaatatcataactgtctttacccactgtgtcaacatcttacccgccgtaacaacatcaattcactgtaagcacaccttaaaccatatctcgacaacgcttntactgctgcaggcccgctcaccaaatcaaaccaatcgtacattaatgttcatcacatgatggacctacattacgagtgacaagacatgctaatgctatgacatgatagtaatggactatat

SEQ ID NO: 27648 - DNA, 354 bp, Glycine max
  unsure at all n locations
  Clone ID: LIB3108-040-QI-K1-A4
tcggaaaaactcaacccccaaattgaaggggaaaaaaaagaaaaaaaaagcactttaggaaacgcaggttttggttcgattgttttgtgcagagtgcaaaatcagtgaaaccaccatgcttcgtagcttgacgaaacttcgttgtttcgccgccgttcaatcacgccaagttctatcatcctcctcttctcgccgtcttcttcaccactcgccgtcgtcgcaaccgcttcactccgctttcaatttccgcatttctcgtccttccttcatttcctcctcatggccttttcacgcatctcatccttccccttccttggttcaagtgcgacatgcttcgtncaaggagagaaagcg

SEQ ID NO: 27649 - DNA, 352 bp, Glycine max
  Clone ID: LIB3108-040-QI-K1-A5
ggaaattctaattctgaatctgactgttttatcaagtgagtgcttgtgtttggaatcagaatatggatggcatgaatgagtatccatccaattttggaccgtgtcgtggaattagtagtagtagtagtagtagtagtatatatgccttccctgttatacactcctaatatagtagtatagtacggaattgtgcgttgtgcaaggtgataagggagtgtatcggccttgcatttttcaacaatcctaccttgtacatagttttactcgcaaccttagtaccggaactcgttaatgtaattaagttgatatacaagggcgattttaaacaaaaaaaaaataaaaaaaaaaataa

SEQ ID NO: 27650 - DNA, 378 bp, Glycine max
  Clone ID: LIB3108-040-QI-K1-A6
ggaaattctaattctgaatctgactgttttatcaagtgagtgcttgggtctggaatgggaatatggatggcatgaatgagtatccatccaattttggaccgtgtcgtggaattagtagtaacagtagtagtagtagtatatatgccttccctgttatacactcctaatatagtagtatactacggaattgtgcgttgtgcaaggtgataagggagtgtatcggccttgcatttttcaacaatcctaccttgtacatagctttactcgcaaccttagtacctgaactcgttaatgtaattaagttgatatacaaagacgattttaaacagaaaaaaaagcgaaagccgatcccttcaacccgtttcaaaggtaacaaaa

SEQ ID NO: 27651 - DNA, 198 bp, Glycine max
  Clone ID: LIB3108-040-QI-K1-A7
actcttccgcgtaattctaattcttaatctgactgttttatcaagtgagtgctagtatctgtagtcagaatatggatggcatgaatgaatatccatccaatttttgaccgtgcagtggaattagtagtagtagtcgtagtagtagtatacatgccttgcctgttatacactcctaatatagcagaatagtacggaatt

SEQ ID NO: 27652 - DNA, 336 bp, Glycine max
  Clone ID: LIB3108-040-QI-K1-A8
actggaccatgtggaagctgcctatgtttggctgcactgatgcttctcaggtgttgaaggagcttcaagaggctaagactgcataccccaatggcttcatccgtatcattggatttgacaacgttcgccaagtgcagtgcatcagcttcatcgcctacaagcccccaggcttctaagtcattgaaaaatttgcaaagcatctgtagccaccccactttgtttgttgtacttaaactacattcccatttgtttttgctttatgagatttcatcatcctgtatttttggtttctgttttcggacttcaatggaaattaatggatgagaactaatgaat

SEQ ID NO: 27653 - DNA, 399 bp, Glycine max
  unsure at all n locations
  Clone ID: LIB3108-040-QI-K1-B1
aaatttattggtgcatgttccttatcatttcttttttgtttctctttatatttttggtgaacagtggtggtaaaaatgttaccagcgtaaatggcacagcattggctccatcaacaaattccacaaattcagggtgcttgtcccaatattacaatggtggattttttacaagcactgtgattcttactttaattttgagtgtagttgtcttgtaaaactacgcactaacatgttcagcattagaatcctatttaatggtgacacactcttcaactaccatttaagagattgctgcatacccatttttgtgttcctcatttagaggatttgaaggatggcnagggtggtcaaaatgtatattggcaatggacaactcacgttacaatacttttcaaactt

SEQ ID NO: 27654 - DNA, 379 bp, Glycine max
  Clone ID: LIB3108-040-QI-K1-B10
ccttaacatgcacaccactttcttcttcttcttattctcagcacaccactctaaagggaaacctcaaccctcttctgggtgcagatgcaacttctaggccatgttctctacccttgaaaagaagaacatgctttactaccaaagccattctctcatccaccagagaagatgtcttgaagcatttcaacgaacgacgagctctcaagattatctcaggcttgcagaatttcaataaagacaatgttgcctcggttgtcactgctgcagacaagggtggagcaactctcgtggatatagcatgtgaccctgagttggtaaagctggccattgacttaactttctgtccggtttgtgtttctttttgtagatcctgcaacat

SEQ ID NO: 27655 - DNA, 396 bp, Glycine max
  Clone ID: LIB3108-040-QI-K1-B11
ggaaggagccaaactgtgagagctctaaacaaaaatgagcttcacattcaacctccgtgttcccaaagctctgcctcctcttccctcttcatcacgtggaacaacttctctcttcttttcttcaaagcagaaatcataccacaacaacactagtccttgccaatcactacttataacatgcagaagccacaaaccaaattatgatgataccagcctaaagtatacaagtttggcactgcaagtaggagcactcttggccttgggttcttctttgggcaccatttttaaacttcaggaaattccctcgggacacttccttgcagtacccttggtctgtacctgaagatccttcaaaaagtacaaagtcatacgcaaagtacccatatgccgaacctg

SEQ ID NO: 27656 - DNA, 282 bp, Glycine max
  Clone ID: LIB3108-040-QI-K1-B12
attccgcgcgacgccacgcgttcggagaactattaagaaggaaaggctttctcatgatctgggcccatctgttaccagcgcaaccgtgccggtgccggcatggttgctccattcaccgtcctcaaatccatggctggctttcctactaggaataccaacaatgacattacctccattgctagcatcgttggaagagtacaatgcatgcatgtgtgtccaccaattgtcaagaagaagtttgagactctttcctacttgtcagacctcgattatgcccaattg

SEQ ID NO: 27657 - DNA, 229 bp, Glycine max
  Clone ID: LIB3108-040-QI-K1-B2
gcgctgccttgctcgtgcttcatgctcccgcttgagattaactgctaaattgtagagagagagagagagcgtttgtgagtatgtatatggcacatcttattattattattgttgattaggacacaactcagagagacctggcgaatttgcaatctctctctctctctaacgtggatctctactttacgctttgtgccgacgatcttggttgacttctttgcatcagtta

SEQ ID NO: 27658 - DNA, 382 bp, Glycine max
  Clone ID: LIB3108-040-QI-K1-B3
cccacgcgtccgtaattttagtggacgcacaaagaaaaacccaaagtatggaacaaatctaaagataccaatttcaacccataacaaaatatcccaaactatctatcaaccatcttcactgcgtcaccggatcgacctcaattcgacgcgtccaagtcggtttggcattccagctctctcctttgacgccctacgtttagatcagattagaagtaacttaacccattgtacgaccaacaaactactccaagtccaagaaggaaattaaatgtcctctgtttcactcttaagttgtcactgatggggagtgggatggctcagaagaattgtatgtgaaaatgggctttcctatgacgccaatgaactgattctcatagatgcc

SEQ ID NO: 27659 - DNA, 386 bp, Glycine max
  Clone ID: LIB3108-040-QI-K1-B4
aaatatcatcatctgaaacgatggctgccatggcaaccacaaccctctcttcaaacccgaaactctcatttttccacggaaagcccgttacatattcttcccgcgtcgcacccaccaccaagttattctcatccaaacaaggcacaatctccatgtccctaacccaacccccatacgacctccaatccttcaaattccaacccatcaaagaatccatcgtctcacgcgaaatgacgcgccgctacatgaccgacatgataacctacgccgacaccgacgtcgtaatcgtcggagccggctcggcggggctctcctgtgcgtacgagatcagcaagaaccccgtcgtgagcgtcgccataatcgagcagtccgtgagccccggcggc

SEQ ID NO: 27660 - DNA, 431 bp, Glycine max
  Clone ID: LIB3108-040-QI-K1-B6
cggaattccggtcgacccagtcttcgaccaatgaaattttaaaaatgactgtgataaacttaagaattagttattgaaagtgaataagtaaacaatttaattggattggtcgaatggtatcaaaaaaatggagtactaactcccatttcttatttattattgaattaaccgatcaacttgctttgttatcgaacatttctttttgatttcaaaaattttccggaaaaaatttgaatctatttttatatgcgaatcaatcctactacttctggtcctgaggtttctgcgcttgaaaaaaaaaatctgggacgtatcgcccaaataattggtcctgtactagatgtagcttttcccccaggtaagatgcctaatatttacaacgctctgatagttaagggtcgagatactgttggtcaacaaattaatgtgac

SEQ ID NO: 27661 - DNA, 429 bp, Glycine max
  unsure at all n locations
  Clone ID: LIB3108-040-QI-K1-B7
cccacgcgttcgcccacgcgtccgcccacgcgtccggtaattccagttttctaccatgtggagcctgcagatgtacgacatcaaagagggagttacaaaaatgcatttaagaagcatgaaaaaagaaacaagactaaggtgcaaatctggagacatgctttaaaaaaatctgctaacattgtaggaattgagacatcaaagattcggtaagctctttatcccccaataaatattcaatattttctagctgttaatatttagtattttatatataggattaaatatgaatatagtccatgtaaggtcacagtttttttaattttggtcctatatatatattnctttatttttagtcttttgtaagttttttttttggtttggtttctataagttttttccttaattttaagttatagaagttcgtgaatt

SEQ ID NO: 27662 - DNA, 450 bp, Glycine max
  unsure at all n locations
  Clone ID: LIB3108-040-QI-K1-B8
gaaaagggtggaaagttgagtgtgtggtacacaaacacaaggctctgtgaagggtcactgccacaattctaccaaggtcatgagaacaaaacagtgctcaatgtgtccttgagtggtcaagtgcagtctggaagcaccctaatgaatgcactgcagcagcaacagcagacagggcgcattccattggatctcaaggtgcatgcaccaatagccatcaaacttgggaggttgaagctgatgaaggtgagagtgttgggagaatgccttttggtggtggatagcttgtcatctaataatctcataagcatcaaggctagcaactgcaagtttagattgaaactttgatatggaaaagcttgccttaattagttcatgtcatttngttatttctattccttggttttttggactggaagacttgattcttttatggatttcttttacactgct

SEQ ID NO: 27663 - DNA, 377 bp, Glycine max
  Clone ID: LIB3108-040-QI-K1-B9
ccttaacatgcacaccactttcttcttcttcttattctcatgacaccactctaaagccaaacctcaaccctcttctgggtgcagatgcaacttctaggccatgttctctacccttgaaaagaagaacatgctttactaccaaagccattctctcatccaccagagaagatgtcttgaagcatttcaacgaacgacgagctctcaagattatctcaggcttgcagaatttcaataaagacaatgttgcctcggttgtcactgctgcagacaagggtggagcaactctcgtggatatagcatgtgaccctgagttggtaaagctggccattgacttaacttcttgtccggtttgtgtttcttctgtagatcctgcaaca

SEQ ID NO: 27664 - DNA, 384 bp, Glycine max
  Clone ID: LIB3108-040-QI-K1-C10
atccaagccatttacaaaaatggtaaccattaaagcatctggcacagtccttccaagtgaaccaactccggagggccttttatggctatctgatattgatcaagtggcacgtctacgccacacacccaccatctacattttccatgcaaaacacaaccatgatacattaattgagaggatgagaaactctcttagcaagattttggttcactactatccaatagccggtcgattgagaaggatataaggtagtggtcgattggaattggattgcaatgcataaggggtggtgttgcttgaagctgaatccacataaacattggatgattatggagactttttacgtgagtccatcaaggacttggtttcaactgttgattacac

SEQ ID NO: 27665 - DNA, 353 bp, Glycine max
  Clone ID: LIB3108-040-QI-K1-C2
cgttaaactgcttcttcttcttcaatggcggcagaatcatctcgcagtatcgctaaaggcccctttatggaagaagacgacgacgaattctccaaaaagccaccagcaaaaagggttaggtttccaaagggaaagaaagtgaagccaggagatgaagtggtggtggacaaagcaaatgttgaggagggtgaagaagttgacttggtgaatgctaaaactgctaccaatgctgccaaagagcgtgaaaaactcagaaggtttctaaagggaaagaaagtgaagccaggagatgaagtagtggtggacaaagcaaatgttgatgagggtgaaagtgacttgatgaatcctaaaat

SEQ ID NO: 27666 - DNA, 127 bp, Glycine max
  Clone ID: LIB3108-040-QI-K1-C3
tcgcccacgcgttcgcaaagaacgaaatgacttttgagagtttttagatttgtgtttggtgaagtacttcagataatgtgaattatcttgtgtatccgaatccaacttaatgttacttgctttttac

SEQ ID NO: 27667 - DNA, 351 bp, Glycine max
  Clone ID: LIB3108-040-QI-K1-C4
cccacgcgtccgcccacgcgtccgcagagactcaagaagttgccgaagtgaaaccaactgagggctctgtcaaccgagatgcagtgcttgcaagagttgcaactgagaagagattgtcactaatcaaagcatgggaagaaagtgaaaaatcaaaagctgaaaacaagtaagagtctacactctttggttcagaagctagaatcttcaattgaatcaccttaatcatggtgattaatcgacctaacatcaagctttatctaaaaatgctcaatctaacatcaagctttatctgaaaatttattggttggtttccttgtttatcttgtgctgatctttgatattttttgcaca

SEQ ID NO: 27668 - DNA, 374 bp, Glycine max
  Clone ID: LIB3108-040-QI-K1-C5
cggacgcgtggtcgtgggtctcgtttttgaccaatatatctggttgtatatagtcgacttagtgaaatgataatcagtaatcggagtaaaaaaaaatgaaaaaaaaaaaaaaaaacaaaaaaaaacacaagctaaaatataaaaccaaagggctgtccatctatagagaccatggttacatccgcggacatacatggaaatgactctcgtatacacagcactaaattcgatatattgcccgactgttaacatatggcaacctgagaaaaccgcttctgaacggacttcatctgcgaaagcccataacacagtttatgcaattggcgttactcagtccaggaccgaaccgatcatacgtgaaaacaggaaatcca

SEQ ID NO: 27669 - DNA, 383 bp, Glycine max
  Clone ID: LIB3108-040-QI-K1-C6
cacaaggcagaaagcaagctcatcctagagttttaaaaatggcagcagcctcctccatggctctctcttccccatccttggctggcaaggccgtgaagctgggcccatcagcccccgaagtcgggagggtcagcatgaggaagaccgtcaccaagcaggcctcctccggaagcccatggtacggcccagaccgcgtcaagtacttgggcccattctctggcgagcccccgtcctacctcactggcgagttcccaggtgactacggctgggacactgctgggctttcggccgacccagaaaccttcgccagaaaccgggagctcgaagtgatccactccaagtgggccatgctcggggccttgggctgcgtcttccccgaacta

SEQ ID NO: 27670 - DNA, 348 bp, Glycine max
  Clone ID: LIB3108-040-QI-K1-C8
ctgacgcgtgggctcttttgctttaccaaattccaatttccaattcgggaccctagggccgttcgaatcaccaaatcgtgatggcaccaaaggcatagaagaagccagcagagaagaagcccgcggaggagaagaaatcgacggtggtagacaaggctccgtcggagaagaagccaatggccggaaagaagcttgcgaaagaggtaggctccggctgataagggaagaagaagaagagaaacaagaagagcgtggagacatacaagatctacatcttcaagggtctgaagcatgttcaccctgacattggtatctcaagcaaggccatgggaatcatgaacagcttca

SEQ ID NO: 27671 - DNA, 235 bp, Glycine max
  Clone ID: LIB3108-040-QI-K1-C9
acacagggagagacaccaacgaaacgacgaggcaggggacaggcacacgcgagcggcacgaacccgggcgaacacacaacacaagaggaggaagaaggggaacacgaagaacgaacaagacgacgaaaggcaagacacgaagcgcggaaaacgaccaccggcaccgacggacaaaagaacgacaagcacgagaggaggacaggacgcggcaaccaaaacaagcaaagaggaagaa

SEQ ID NO: 27672 - DNA, 313 bp, Glycine max
  Clone ID: LIB3108-040-QI-K1-D1
cttcattcacctatcatagacaaagcgctctctctccactactactactactctcgcggaattacaaagatgctttcaaatactatgaaccgaaacgctaatcataaatccctagatgacacttcattagactcccttaatcgaatcgattgtccccttccgaataccctaattgcttgctggctatcaaatacggacatggatcagaatccttcggagctgatagaccacttggtcaagcgtgccttcgatgcctccgacgacgctgcactatactccgttgtcgactaagccacttatcaccctaagatct

SEQ ID NO: 27673 - DNA, 217 bp, Glycine max
  Clone ID: LIB3108-040-QI-K1-D11
atttcttgcccttgatcaagttcatttgttttggacttgttttgggtgtgttagggtcattgttgcctggcatatatatatatatataaatgtttggtaattggtcgcttctgctataaagttcggctagttaatctgaattatgaatctctgcttataaaaaaaattaaatattaatttattttaatattaattttatcttaatttattatttaat

SEQ ID NO: 27674 - DNA, 354 bp, Glycine max
  Clone ID: LIB3108-040-QI-K1-D3
tcgcgctgttgtcgaatcccttcccgatccctaaggtaagtgagtaatcggtggttgagaatggtggataaggcgactggtaggaaggaggaggtggttaccatagagtacaccattaacctccacaagcgccttcatggctgcacatttaagaagaaagctcctaaagctattaaggtgataaggaaatctgcccaaaaggccatggtgaccaatgatgtgagggtggatgtgaagctgaacaagtttgtctggagccagggaatcaggagtgttccaaggaggattatggtaagaattgctcgcatgatgaatgacgatgaagatgccattgaagagctatactctcttgtc

SEQ ID NO: 27675 - DNA, 356 bp, Glycine max
  Clone ID: LIB3108-040-QI-K1-D4
cccacgcgtccgcccacgcgtccggttgagaactaagaaggagaagcaaatggcttgctcaatgatctcttccccagctgttaccactgtcaaccgtgccgttgccggcatggttgctccattcactggcctcaagtccatggctggcttccccaccaggaagaccaacaatgacattacctccattgctagcaacggtggaagagtgcaatgcatgcacgtgtggccaccagttggcaagaagaagtttgagactctgtcctacctgccataccttgatgatgcacaattggcaaaggaagtagaataccttcttaggaagggatggattccttgcttggaattcgagttggagc

SEQ ID NO: 27676 - DNA, 384 bp, Glycine max
  Clone ID: LIB3108-040-QI-K1-D5
aaaaaaaaaaaaaaaaaaaaaaaaaatttaaaaaaaaaaaaaaaagggaaaaaaaaagggaaaaaaaaaaaaaaaaaaaaaaaaaaaaaaaaaaaaaaaaaaaaaaaaaaaaaaaaaaaaaaaaaaaaaaaagggggggccgtttaaagggaccaaagctaacgaccgcgggaaggcaacgaaaaagcccttaaaaggggcccccaaaataaaataaaggggccgccgttaaaaaacgtcggaacgggaaaaacccgggggtacccaaactaaaccgcctggaaaaaaacccccctttcgcaagggggcgaaaaagcaaaaaggcccaaaccaaaggcccttccaaaaattggccaacccgaaagggcaaagggaaccccccct

SEQ ID NO: 27677 - DNA, 350 bp, Glycine max
  Clone ID: LIB3108-040-QI-K1-D6
aacacacgtctactgccgcgggagatttacctgaactctaaggccggatcagagtcgaaggctgaggacgccgcgtggaatgaagtggcgttgcctgagatactcagatgactggctggcaagactacttggacaacccaggcctgatacacgcacaaaggcattcagtgccaatcaggccacccaaagtatcacgatcggggcacacagaggagataccgtcttgctcgagggactcttgatgaacagactgatccaatgtatccacgtggactcgttgacccattgtggctcgctgacgacccagatgctgctgctcatcctgatgccaaagagctcaagaatggcca

SEQ ID NO: 27678 - DNA, 375 bp, Glycine max
  Clone ID: LIB3108-040-QI-K1-D7
agcacacgccctattgtacaacaaatttacagggacgcttatgatggtaccacatacattgtgaagactgatgcaggttaaaggagcttacctatcacagaagctgaatatccaatgagtgaaactgcgggtgattctagggaaatggacgaagtagcaaaagagtgggagcacacacttctccagaatagtatggatagagagttacatgaattgaataaacgcttgcatcagaaagagtctgagatgaagctttatggaatatctgatgctgaagtactcaagcatcactttggagaaagatcatggaattagaagatgaaaagagagtagtgcagagagagagagattgtctttaggctgaagttgaaaatc

SEQ ID NO: 27679 - DNA, 381 bp, Glycine max
  Clone ID: LIB3108-040-QI-K1-D8
aacgaagtactactacaagggaagaaaaacttagctactaaggaaggatcaaagagaatggctcaagcaatggcatcaatggctggcttgcgtggttcctctcaggctgtgttggaaggtagccttcaggtgagtggctccacacgcttgaatgtggggagtggaagcagggtggcctcagtcacacgtgcagggttcacagttagagcacaacaacaacaagtgagtggtgaggtacaaagcagccgtatggcagtgctttcacttgttgctgctggtttggccactggctcttttgttcaagctgtgcttgctgatgccaaatctatcaaagttggaccaccttccccaccttctggtggattgcctggaacgttgaac

SEQ ID NO: 27680 - DNA, 348 bp, Glycine max
  Clone ID: LIB3108-040-QI-K1-E1
ccgaattagggttttccaattcgcagagcaactcatcacaacgaaccaaaccaacagtgtcgcagccgcagcctcagtcgcagccgcaacacgggcaagcggcgctggagcaggtgcagtgcttcggtcgcaagaagacggcggtggccgtgacctactgcaagcgcgggcgcggcctcatcaagatcaacggctgccccatcgagctcgtcgagccggagatcctccgctttaaggccttcgagcccatcctgctgttgggaaagagccgcttcgccggcgtcgacatgcgcatccgcgtcaagggcggcggccacaccttccagatctacgccattcgccagagca

SEQ ID NO: 27681 - DNA, 389 bp, Glycine max
  Clone ID: LIB3108-040-QI-K1-E10
cacaactattaaaagcgtagagagtactgtgtgttcagaggctgccaaaaactcacgcggagaaagtacaagtagaaggagaagaagcacaatgaagctgctctctccaaaattgttcactctcgccattctgctcgcggcggcgctggttttagcttccgccgacgcagtcagtgacaatgagatgcagaaacatgaagccacggaatcaagggacgtggttgaagagaagttgcgagtgcagagcttgaagaattcgtcaatggcagaaaggtcagggggtgctttaaatgaacatgcagttgataatccagaggagattgcttccatggttgatgagagcatacgcaattacacagcttgaaggaacctgaacttcttcttatgcg

SEQ ID NO: 27682 - DNA, 410 bp, Glycine max
  Clone ID: LIB3108-040-QI-K1-E2
caaagagctaacaagagattcaagaccggcatggctaatgaagaggaacagaaaaaccacctcttcggcatcaaagatctcggtcacaagactctccttcagagtgatgcactctatcagtatatacttgaaaccagtgtctatccaagagagcacgagtgcttgaaagagatacgcaagatgactgcaaaacacccactgaacatcatggcaacaccagcagacgaaggacaacttctgagcatgcttgttaagctcacgaattcaaagaacgccttggaaattggtgtattcactggttactctctgctctccactgccctggctcttccccctgatggaaagatcttggctttggatgtgaatcgcgaatactatgaattaagattggccattattcaaaaaggctg

SEQ ID NO: 27683 - DNA, 309 bp, Glycine max
  Clone ID: LIB3108-040-QI-K1-E3
tcggcaaaaacggcctcgttcaccatgacagcttgcattcttggcaacccagacgtcaccgaccggtcgggcgtcgcaacgcacaggacatcaatcgtcatgaatgctgacaaatctgtgaagcatactaggtcacctgtgactatgacatggatcgcaacagcggaaggaagaacctgatgttcactcgcagggacgcatgttgcatgcatctgaagctgagataggcgaaggacgacgatcctaaatcactaacccgagaagccatgaaaaagtctgctccgatatgtgtgaccatgccaactgcta

SEQ ID NO: 27684 - DNA, 357 bp, Glycine max
  Clone ID: LIB3108-040-QI-K1-E4
caacctcacaatttcctctttccactccccgtttctacttcccgcaacctcccactgtcacaaaccctccatttccccagaaactggaatctccgctctctctctccatcgctgcacctaacatacgacgattccgacgaccacgtcatcggcgactgcgtcgtgttcgaggacggcgttttcgacgaacccgttttccacaaccaccacctcaattccgacaatctcgccgtcgataagcccaagcccaagcccgggcgcagttggaggaaaaaagtggaggagacattgggcgagaatttggtcccggacaagtggcgagaggtacaggcggagataaacataacgaagagggag

SEQ ID NO: 27685 - DNA, 272 bp, Glycine max
  Clone ID: LIB3108-040-QI-K1-E5
gcgagtcgtactcgttttccactcatttgaccctgttattgtattagactctgttggagatactacactagtctttgaagtttcggagtgattaaatgtatcttagtagatagttgctcgcaacaattaatcacgtatttgatataataattccaagctactttgattgttgcaaaaaaaaaaaaaaaaaaaaaaaaaaaaaaaaaaaaaaaaaataaaaaaaaaaaaataaaaaaaaaatacaaatgaaaaaaaaaaaaaaaatatatatg

SEQ ID NO: 27686 - DNA, 267 bp, Glycine max
  Clone ID: LIB3108-040-QI-K1-E6
gttttattttcaggtcaaatcttaaaatccaaattccaaaataaaatgtattttggataaaataaggttgggttagttttctttatctgatgttaaaagacttttcttctgattttaagaataataaaaaatggtattctcattcttaaaaaaaaacaaaaaactaaataaataaaaaaaaaaaaaaaataaaaaaaaatcaaatacaaaaaaaaaaaaaacaaaaacactaaaaaaaaccctaacaaaacccaacttaatacaact

SEQ ID NO: 27687 - DNA, 438 bp, Glycine max
  Clone ID: LIB3108-040-QI-K1-E7
gttatattttcaggtcaaattataaaatccaaattccaaaataaaagatattttggggaaaatatgggtggcttagtactatttatctgatgttaaaagacttttcttctgattttaacaataataaaccatggtattctcactctttactacaaaaagatgctaatatttaatactatagagagatacaactaaccatagttggcaaaaacggcttgcccacctcatctatctctcggtcgtgcccttttcgctgtcccaatccagatttgggacagcgatacccgcaatgtatccagctgggctacatcctttaaattcaacattttcttacccaacatatcaaacttatctgacggtctttccttcttattatctcctcttaggtcttaactcctattcactatatatttttttaatcttttatatatttccttt

SEQ ID NO: 27688 - DNA, 353 bp, Glycine max
  Clone ID: LIB3108-040-QI-K1-E8
tcgacccactcttccgaatgcatatacagattaaatgctaattttcaaataacaatatcaaaggtaaatcaaagctcttataagaaaaaatcaagtctctatcataaataccacactttacctactcacagtaaaattaacaaaaaaaaggattctcaatattaaaaaaataactacaaacttccaatatcttacaaatacatcacttgatgcttcccattaacgtatccaataacaattaatttcttatacaactgatatctatatactttctacatataaaccatataataaaaaataaaacaatatctaacataaatagtgctttcttacaaatgtaacttaattcacta

SEQ ID NO: 27689 - DNA, 223 bp, Glycine max
  Clone ID: LIB3108-040-QI-K1-F1
cccacgcgtccgcccacgcgtccgcttaacaagtcccaggcaattgtttagttagattgagttcgctgtaggattgtgttatcagttttgtcaactatagctcaatctttctgtgatagtatgttaattttgaggcaggttttgaatcaatgtttatcatttcagtttcgtcatgaagcatatggattaacattagccctgattaaacggcacttttattacg

SEQ ID NO: 27690 - DNA, 389 bp, Glycine max
  Clone ID: LIB3108-040-QI-K1-F12
cccacgcgtccgctctctctctctcatgctctctgatctggggtggttcaggagccggccgctcctgcagttttctttcgcggctggagtggaaggccattctcgcaacgtttgagttcagcagatccagaatttttcagaaaacaggtttaggagaatgaagaatacggaacgaattgccaatttggctttagcaggcttaaccttagcgcctcttgttgtgaacgtagatccgaatttaaatgttattttgactgcttccctcactgtgtttgtgggctgttaccgctccgttaaaccaaccccaccaactgagacaatgtccaatgaacatgccatgcgttttccctttgatgggagtgcaatgttattgtcactcttcttactct

SEQ ID NO: 27691 - DNA, 382 bp, Glycine max
  Clone ID: LIB3108-040-QI-K1-F2
gaagaaagtgaagaaagacgttaagatgaaaggctcttcatcttctaaggatggcactgctaaatcaacctcttctaagaaaaaagcaagtggctctgatgaagaccacacttcacctactcacagtcaaattgacgagaaagaggaggctccagatgaagatgatgacgacgacgtgcaatggctgacagatacatcacttgatgctgcccgtcaacgtatccaagaacagttaagtgctgtgacagctgatatggttatgctttctacagatgaaccagagaagaagaaaaaaacaataagtaacagaaatggtggttctcacaatggtaactcaatgcactacgggaccctggttggtgaagtgaaaggcaatttcaag

SEQ ID NO: 27692 - DNA, 363 bp, Glycine max
  Clone ID: LIB3108-040-QI-K1-F3
tcgcttaaccagaaacgtggacatgtgttcgaggaaatgcagaggcctggtaccccactgtacaacatcaaagcatacctccctgtcattgagtcctttggtttctcgagcacattgagggctgcaacatcaggccaggctttcccacaatgtgtctttgatcactgggacatgatgtcttctgacccattggagactggatcacaagctgcacagcttgtcaccgacatccgcaagaggaagggcttgaaggaacagatgactcctctctccgagtttgaagacaagctttaaattgtttgaactatttaacttacttttgaacttagccgaatttatttctcatatgaacaatgttacttt

SEQ ID NO: 27693 - DNA, 360 bp, Glycine max
  unsure at all n locations
  Clone ID: LIB3108-040-QI-K1-F4
gagaaactgacattcagtgtcaccaagaccaagcctgagaccggcgaggacatcggagcgttccagagtcttaagccgtccgacactgatttgggtgcagaggctgcaaaggatgtcaagatccacagtatctggtatgctcagcttgactcatagactgcatgcttttgcttcgtgcatttcacgcctaaattggcttgaaacttcatgctgatgctgcattatcatccttcgacccaactttactagctcactctaagatctgtcatataggtgatcattgacgacctncaattccagtgcttaaaatttaaaggattatcagacataatgtgtggaacgaagaacacttttatataa

SEQ ID NO: 27694 - DNA, 343 bp, Glycine max
  Clone ID: LIB3108-040-QI-K1-F5
gttagtcattagcacttcgtcataccttactgactgtacaacaatggcttcaaagagggaactttcgaacccaatgagggaaataaaagtgcagatgctcgttctcaatatctgggtaggcgagagtttagatcgtatcaccagagcccacaaggtgttggaacaacttaatgtccaaaccccagcgttttccaaagctatgtacactattcgttcctttgtgattagaacaaatgagaagattgcattctatatcactgtcaaaggttacagggcaatgcaactatagaagagtggttcgaaagttaatgaatatgaacttctcataaagaatttcaatgat

SEQ ID NO: 27695 - DNA, 383 bp, Glycine max
  Clone ID: LIB3108-040-QI-K1-F6
cccactcgttcgccctcgcgttcgatttggctagttatttgactcgggcaaagttaggttcatctgcatcggtcactagcatcatacaaagcttggttgattggtgttatgcttattgcaagttccgtgattttgacatgaacccacgagcacatcaagttttctattctggctgccaggccatcatgtatattatgtgttttcgcatgacatctttgatggatgttcctaggcttaagttgcagctgcttaatatgcccatggaggcaatcttgaaacataaattgagtcccttgaaggtgtgtttgcccactgtagtagtggaatttcttatacaggcaaaggctgctcaacttttcatggcttcagagtcatttggtttc

SEQ ID NO: 27696 - DNA, 363 bp, Glycine max
  Clone ID: LIB3108-040-QI-K1-F7
gaagcgtggtcgtggtggttcggcggttaacaagttccgcatgtcggggggtcttcgagtggctgcgaccgtgaactgcgcctacaacacggtggcgaagaacctctacatcatttcggtgaaagggatcaaaggccgcttgaaccgtcttccctcggcctgcgttggcgacatggtgatggccaccgtgaagaagggaaaaccccatctgaggaagaaggtcttgccagctgtcatcgttcgccagcgcaagccatggcgccgaaaggacggcgtctacatgtacttcgaagataatgctggtgttattgtcaatcccaagggagaaatgaaagggtctgctatcactggtcccattggaaa

SEQ ID NO: 27697 - DNA, 228 bp, Glycine max
  Clone ID: LIB3108-040-QI-K1-F8
caccttccatcatcacttacaatctatcgtctgtttaacacaacgaataccgtgtcttgcccaggtcacacgcgggctgatgacgacaacaatctcgtcttacaaggcatattccacattcttacttcacatgggcatagcactcacaaagttagacggccaatgaaaaccactgggtggcacaatctggagagtcttaaactcttctccattgcaccattcaccaaa

SEQ ID NO: 27698 - DNA, 360 bp, Glycine max
  Clone ID: LIB3108-040-QI-K1-G1
tcgcccacgcgtccggcttggcaaacaaaatcctcatcttatgcgattgattcaagagcatcaagttgacttccttcgcctaattaatgaacctgttgaagggggtgagggaaatatactgggacagctggctggtgccatgccgcaagcagtgactgtcacccctgaggagcggcaagcaattgagcgtctcgaagcaatgggttttgatcgtgcaactgtattggaggtgtactttgcttgtaacaaaaatgaggagctggctgccaactaccttttagatcacatgcatgagtttgatgaataattagatctcctttacaatttgtcaaaatattggtttatgtttccttttgaatg

SEQ ID NO: 27699 - DNA, 374 bp, Glycine max
  Clone ID: LIB3108-040-QI-K1-G10
acgtccacgctttcggtggtggatttagttcacattgcttagggtcctttatatgtgggttggtcattagtaacaaaggccatgtgtgcttgtgaatccttgatggtagtaaagtatatgacttatcctcaattatactttgagacatttcattgataggatatttgattgtgtacgataatgttaagcaataaattgtttggaagcgagcatgactgttgcatgtcaagcattatattaagaaataataatatatttattccatatagtatgtcttaatttacttcctaagcgtttatattactttatatcattgtttaatttgatcctttttcatgctttaatataatattccatcctctatttaaacattc

SEQ ID NO: 27700 - DNA, 155 bp, Glycine max
  Clone ID: LIB3108-040-QI-K1-G12
tcggtcagcgttcgtctcacgtacggaatatgaacatgcgggggatgcatatagctgaggctctgtagaacatatttttgagaagataatttctggtatgtatttgtatgaaatagtaaggagagttgcgttgaagctgtgtgaagaagttgact

SEQ ID NO: 27701 - DNA, 388 bp, Glycine max
  unsure at all n locations
  Clone ID: LIB3108-040-QI-K1-G2
cccacgcgtccgatcatcaattataagcatgggtttgtggaacacaacgaatacagtgtcttgccgctttcacaagtttggtgatgaccaaaagaatctggtcttccaaggtgatgccacgtcttcttccaggggcatagaactcacaaagttagacggtggaggaaaaccagtgggtggcagtgtggggagagtgttatactcttctccagtgcacctttgggaaagctctacagtggtcgcaagctttgaaaccgacttcaccttttccatctcatcagactctactactccaggtgatggccttgccttcttcattgcaccatttgacactaaaatccctccaaactctggtgggagcaaccttggactcttnccatcagacaat

SEQ ID NO: 27702 - DNA, 306 bp, Glycine max
  Clone ID: LIB3108-040-QI-K1-G4
tcgcccacgcgtccgaatacacagacatccctcttgatttgaaggctgatttgtgcttagtggataaaagttctgacaaatcaagaggagttctcagatcatagagtgtgtgtgtgtgttaaacaatggcttagatctacgctgctatcatcttggcactcattgccattttcatgcttcaaacagtggttatggctgctaatgagcaaggaggacacttgtatgacaacatgagcaaatatggaagtgggagtgtcaagagataccaatgcccatcacaatgctcgaggagatgtatgcagaccc

SEQ ID NO: 27703 - DNA, 432 bp, Glycine max
  Clone ID: LIB3108-040-QI-K1-G7
tagagtttgttgtgagctataagctagtttatcgtgaggagaatatggagttgtttgttttctttgttgctgcagtagttctggtagcatggccatgccatggcgcatgctaccaaaggttccctctccgaatgaaaactggctatggtgagcgttcttcggaggtaaaatgcgcaagttttaggcttgctgtggaagcacacaacatccgagcctttaaaaccattcctgaagagtgcgttgaaccaacaaaggactacattaatggcgaacaatttagatcatactctaaaacagttaaccaacaagctttctcttatgctagtgaacgcgaagtccatcacaacgacatatttatattcggcataaattacaacgtactctctaatttcccatactatgaaaaacattgatattgggttgacgaaatta

SEQ ID NO: 27704 - DNA, 316 bp, Glycine max
  Clone ID: LIB3108-040-QI-K1-G8
tctacccactcttcctaaaaaaaaaaataatctaaaaaacatattttatcaaaaaaaaaatataggatatttaaagatacattaaaaaaaaatctaacatccatacatatttccattcctttattcttactaccattcaattcttctaccatataatactatctctcatttacatacaacattttctaaatccatttaaaatcatctttctctaaaaacacatcaatttccttcctatatatccaatcttcaaaaacccatttcaccatcaaactacttacactaattttatttcaatttatatcacacttataaa

SEQ ID NO: 27705 - DNA, 347 bp, Glycine max
  Clone ID: LIB3108-040-QI-K1-H1
aaataatttgcttctctctctgtctttctcacaagacaacagaggaacactcccaaacaaaccatggacgtgggtcagatgcagagacagtggatcgactacaccaaatccctcttcctcgagggcttcctggatggtcagtttctgcaacttcagcagcttcaggatgagaacaaccctgactttgtggtcgaagttgtctctctcttctttgaagattctgaaaggcttctcaaagatctcacctttgccctagatcagaatggcgttgacttcaaaaaagttgatgctcatgtgcaccagttaaagggtagcagttcaagcataggtgcacaaagggtgaaaaa

SEQ ID NO: 27706 - DNA, 306 bp, Glycine max
  Clone ID: LIB3108-040-QI-K1-H10
cccacgcgtccgcgggcttgcccgcttcagcggcacaaggcctcgcacgggccgcgttccggtcgggatcggcggcaggaggcagcgaatcgccggtgcactacaaatacaaccccgtcaagaccatcaagacgaatgtgatgggcacgcttaacatgcttggccttgcgaagagaaattgggctaggtttctgcttactagtactagtgaggtttacggtgatccgttggagcattctcagaaggagacttattggggaaatgtgaatccaattggggagaggagctgttacaatgaagggaaaa

SEQ ID NO: 27707 - DNA, 292 bp, Glycine max
  Clone ID: LIB3108-040-QI-K1-H12
cccacgcgtccgcccacgcgtccggaatatgatcatgctcgagatgcagagagcttaaaccctggagaacagatttttgagaagataatttctggtatgtatttgggtgaaattgtaaggagagttttgttgaagttggctgaagaagttgacttctttggagatactgttcctccaaaattgagaattcctttcgtacttaggacacctgacatgtctgcaatacatcaagatacatcttcagatctgaaagtggtttggaaacaaattgaaggatatattagagatcaat

SEQ ID NO: 27708 - DNA, 366 bp, Glycine max
  unsure at all n locations
  Clone ID: LIB3108-040-QI-K1-H3
aaaaaaataaaaaagaaaaccaaaaaataatgtcaatggaaatgatggcaacggaacgtgtttgttatgttcactgcaacttctgcaacaccattctagcggttagtgttccatacagcagtttgctaaccatagtgacggttagatgtggacattgtgccaatttgttatcagttaacatgggagcttcacttcaagcatttccccctcaagaccctcagtcacagaaacagcacctaagctttcaagaaccaagcagcaaggaactgggatcatcttcaaaatgtagcaaaatagcgccatttgaggcagtagagcatgaactacctaggattcctnccattcgtcctacagagaagagacatc

SEQ ID NO: 27709 - DNA, 380 bp, Glycine max
  Clone ID: LIB3108-040-QI-K1-H4
aaataatttgcttcgatctccgtctttctcagaagacggcagaggagcactcgcacgcgaccatgggcgtagttcagatgcatgagacagcggatcgactacaccaagatccatatagctcgagggcttaccaggatggccagtttcatgaactcaagcagcttcaggatgagaacatccctgactttgtggtctaagttgtctctctcttctttgaagattctgacaggctcatcacagatctcacctttagcctagatcagaatggcggtgactataaaaaagttgatgctcatgtgcaccatttaaagggtagcagcttaagcatacgagcacaaagggtgaaaaatgcctgcattgctttccgcaacttctgtgag

SEQ ID NO: 27710 - DNA, 291 bp, Glycine max
  Clone ID: LIB3108-040-QI-K1-H5
gagcgaacaactacaaagggatattagatactattgtgagtgagtgcgtgcgattcattgtgtttgtgtagtagtgactttgggttgggtttcgtctcaactcaacatacgtcgtcgttctgcatttcccaaccttcctccaatggcttctgcttacttaatcaactcgttgacttgttcttcgcgtgctcccactcagcactgttccactttcacccgcaccaccgacgtcacgtcactgagacaatttaacagccactgtcggagaccactcgcgactaggatctcgcc

SEQ ID NO: 27711 - DNA, 413 bp, Glycine max
  Clone ID: LIB3108-040-QI-K1-H6
gttctggcccgaaccctttctttcgtcacaatcacaacttggtaagggtactccgtgcaagaaagatgaagctcgagttcgcaaatgtgctacttctgtgccttgtccttagctcttctttcttggaaatctcaatggctggttctcctttctgtgactcaaagtgcgcgcagaggtgtgccaaagctggggttcaggacagatgcttgaggttttgcgggatctgctgcgagaagtgcaactgcgtcccatctgggacttacggaaacaaggacgagtgcccttgctacagggacatgaagaactccaagggcaaggacaaatgcccttgaagaatatctaatttcatcatcacactccattccaataaactaccttgtattgtatcttcagccttccttttcagagtattg

SEQ ID NO: 27712 - DNA, 139 bp, Glycine max
  Clone ID: LIB3108-040-QI-K1-H7
atgcttcccccaacttttgcctacgtgtacaatcacacctcggaacagatactttttgcacactgcatcaagctccacaccacactagccttcttctgttccttcatcttatctctaaccacttggacatctcaatggc

SEQ ID NO: 27713 - DNA, 380 bp, Glycine max
  Clone ID: LIB3108-041-Q1-K1-A1
tttcctgcacgtttaaacgtttatatgagaacgaatttgattgacttttgttgattatcgctaatgcctagtctagaatgggatggttcataacccatgtaacttggttcatatttgagcaacagtttcctactctagaatgggtcttacccgtaccagaaaatttgtaggcttgtgctgaagttcaaatggattgtgatgaaatgaataccttcgtcttgatagcaacgcagtcgttagtgaactttgaaagatttgcacaagtaaggcaaagctgattgatagagaacccaaaacaaaggcccagttttcccattctcttcttagaatcacaaacttgttcttctttcatcaatggcttcctatccctctctctcccc

SEQ ID NO: 27714 - DNA, 353 bp, Glycine max
  Clone ID: LIB3108-041-Q1-K1-A2
cccacgcgtccggtatccgtaacacttgcaacacacatggctacaatcaccaacactttcatattcaaaccccccatctctcatcacccaaagcagcttctttattcccaccgctcttctctacgctttctcaccaaatttaaaaccccctccggagcgaattctcggcggctggttccgaaagccacggcggctcccggggccaagaagacagaaaagccgcacgagagagtccagcgagtccacagcgtggaggagttcgagtcggcgctcgaatccgccaaagacaggcttgtggtggtggaatacgctgccagcgacagcgaagagagcagccaaatataccctttcat

SEQ ID NO: 27715 - DNA, 239 bp, Glycine max
  Clone ID: LIB3108-041-Q1-K1-A3
gtcgcgggtttgaagcatgttcggctgtggactggtgatggtcgatcaccagcaatgggtattggaacgagaagcgatggtggattgacgatagtgtgttcgtttaggccgcacaataatgcgatggcgcatcacatgaacactccgcctcggaagacgcacgcatgggatggataccgaaggcccaccggctacgatgcactccctactcttaatgctgattggagagcttgttattc

SEQ ID NO: 27716 - DNA, 430 bp, Glycine max
  Clone ID: LIB3108-041-Q1-K1-A4
gcttcaacgggccttaccttacctgaagatggcttcggtgtcctttgccgcgggattattaccttgctcttcttcttcttgctatacccgcgtctcttatggttcagttcgatttcccgtattgaacaacgccaactcactgaaactcagctcctcagctaacatctccagtccaattcttcaccaaaagcttggcactgttccttctccccttgctgtaaggcctcgccctctcaccattgtatccgctcagggctacacaatgaaaacccacaaggcatctgcaaagcggtttatggtgacggggcgaggcaagatagtgcgtaggagagctcgcaagcaccatttgctcgtttagaaaaataccaagcgcaaatcccgactgttcaaaatgcatgctgtcagcaggagcgactatgacaatgtaatt

SEQ ID NO: 27717 - DNA, 400 bp, Glycine max
  unsure at all n locations
  Clone ID: LIB3108-041-Q1-K1-A6
gtacggttactgggaccggggcagcacaattgagtcgagcgagagcactttcagggtgaggtgccccgtttatcatcaacgagggcaacgcgcttatgaccacgggtacgctgtacgggtcctcacgaacaacaaaaacgccatcagagcgaattctccgagggtcgttgcgacagccactgaggctcccggggccaagcagacagaaaagccgcacgagagagtccagcgagtccacagcgtggaggagttcgagtcggcgctcgaatacgccaaagacaggcttgtggtgggggaatacgctgccagcgacagcgaggaaagcacccagatatacccttttatggtggagctgagccgganctgcaacgacgtggagttcatactggtgatgggcgac

SEQ ID NO: 27718 - DNA, 341 bp, Glycine max
  Clone ID: LIB3108-041-Q1-K1-A7
caaagggaaggctacaccaactatcaacagcacatgctttggatgcataagtagttgaaggaagctgctcgcgttcggggcaaaaagaataatgcatctgctgaaaaattacgaagttatgagtccattactatgattttgtagatgagtttattaaggtttcctagggatccataaagattatgattttctcatgctcgcgttcgggccatgattgtcataaacctcaatgaggtttaatgtacttattacttatcgctatcaacactaaattttggttgctgggttaaaaatataaaagaactctctgttgcaaaaatggaaagcaatgggatatacac

SEQ ID NO: 27719 - DNA, 234 bp, Glycine max
  Clone ID: LIB3108-041-Q1-K1-A8
gggcttgaaaattctcttacttttacgaagaagaagcatagctggccttataacatgaatggtaactttaagcataagtatggttgagttatataaggggacattatacactatctatacataaaccatagaaagcaagggacaagacatttggaacaagcacctagttaatgcaagaattcttgataaaatggaaaggctcttagctgattaaaaaaaaagcactacggatcg

SEQ ID NO: 27720 - DNA, 429 bp, Glycine max
  Clone ID: LIB3108-041-Q1-K1-A9
tcgcccacgcgttcggcgatcgtgaagaaatggagaaggcggtgagagcgtatgcggaggttctgagattggtgaggctcttaccaaaggacagcagggcttattatgccaagtacgcccgcgagaacttcgtcaattaccgtgatgtcgttgatccttctgatttcgatgacctctttcaacgcacctatactcattctctatgggtccttcataagtattccattgataaatctgctgcggataagctcagagggatatgctgcacttgatgcaatttcaattgccacccaagtgtttgttcttatttctcactcattcacacccttccttgcatgcttgagatgtatctatctgcttcaaaatttaattggtttcattatcacttgaacatgtacaacaaaactacatactccttttttatggatt

SEQ ID NO: 27721 - DNA, 336 bp, Glycine max
  Clone ID: LIB3108-041-Q1-K1-B1
actagttgtagatcacagggcaacacactgtgccaaatgtatttattggtggcaaacacattggcgggtgtacagatacactgaagctgtaccggaaaggagaactagaacctttgctatcagaagcgaatgctaaaaaaactgagagctaagctgttgactggcattctaaagggaacctgatccccttaccaatttgttactttgtaggtcaaagcagatctctcaacgttattgttattcacaaatgctgggtgaaagaaaccagagcgcactgataacttcaaacattggcgtgtagggaagaacttatcgttacaaatatgcagttgaatg

SEQ ID NO: 27722 - DNA, 318 bp, Glycine max
  Clone ID: LIB3108-041-Q1-K1-B12
gttaacctagacggcgtcgacacctcctccattctctccgaagccacctcaaccgtcgccagcatcatcggcaaacccgaggcctatgtgatgattgtattgaaaggatcagtgcctatatctcatggtgggagtgagcagccagcagcttatggtgaattggtgtccattggtggtcttagccctgacgtgaacaagaaacttagtgctggcattgcttcaattctcgaaaacaagttgtctgtgccaaagtcgcgattctacttgaagttttatgacaccaagggttccaactttggaaggaatggatctacattc

SEQ ID NO: 27723 - DNA, 400 bp, Glycine max
  Clone ID: LIB3108-041-Q1-K1-B2
gctccgtgagcagcgactcctcttcgttctcctcggcgtcatcatagcaaccctcttcttcacattcgtcccttcctcttccccttccgcttcctcctcaagcgtttcgtacgagtctctcccgatctcctacttcgagcgcgagtcaaagattccggcgtaccaccaccgcgtggctgcggcggtgcattcggtggggaaggtgccgctggggattaagaggaagggactccggatcgtattgacgggcggcgcggggttcgtggggtcgcacctggtggatcggttgattgcgagaggggacagcgtgatcgtggtggacaatttcttcacgggaagaaaagagaacgtgatgcaccattttgggaaccctagattcgagctcatccgacacgacgtc

SEQ ID NO: 27724 - DNA, 392 bp, Glycine max
  Clone ID: LIB3108-041-Q1-K1-B3
caacacttacgaaccttgcattgtatctacccacttctcaaccaacaatggcaatggcaacccaagcctctctctttaccccacccctcttcggtcttaaacccagcgaccgagccaccgcgccatggaaacaatcctgcaccctctccttcttcacctcgaagcccctcaagttctcgcgaacaatcaaagcagcagccaccgaccagaccacagaggcaccggttgggttcaccccaccggaactggacccaaacacccctttcccgatcttcggaggcagcaccggcgggctcctgcgcaaggcccaagtggaggagttttatgtcatcacatgggactccccggaagaacagatcttttgaatgcccactggcggcgctgccatcatg

SEQ ID NO: 27725 - DNA, 106 bp, Glycine max
  Clone ID: LIB3108-041-Q1-K1-B4
gataaacgtgcaacgtcggggtgaatctactcagagcggcatcaaaacaatgcctggttggacatggctttgtttcgataccagataagagcagttttaaatctaa

SEQ ID NO: 27726 - DNA, 283 bp, Glycine max
  Clone ID: LIB3108-041-Q1-K1-B5
cccacgcgtccgcgggaagggttatacttataagaaagacatggtgtgtgtgcgtggttggcgtttgctttgttttgaaacagaagaagagtagcttctactttaatcttgggagatcagggaggtcatcgccgacatttctgcgctcaagattaacataactacctggcgcacccaggaacagggcattgtggtgtgtaccgaacggacatggacagaatcgattccgtgaggtagccacacactgcaactgcacatctgcgtacttggcctgaaactccca

SEQ ID NO: 27727 - DNA, 248 bp, Glycine max
  Clone ID: LIB3108-041-Q1-K1-B6
gcgtacgcgtacacatacacggggaggtgcatacctacaggaatatatccacgcgagggcgtggagggcgtccggtctgattaaagcaggactgtgtaaatcggactgacacaagaggagaacaagcaagtacgagcgtgccgaaagaatgcgatatagagtataacaccaaccggtggctcccacaaacaataccatgggctgggggtcgctcaggattgaaacgaatggactccggatacaagcaa

SEQ ID NO: 27728 - DNA, 336 bp, Glycine max
  Clone ID: LIB3108-041-Q1-K1-B7
ccggttcgagttcggggacgcgtacgcgtacgtgcgactggatggacgagaactatctctacacctgctttgctcataccggctaggtttggtgaggtatagacattcggaacatgcgaactcttcaatctgaacggtatcggtttattgaggataatatttctgctggagctgatataatcctccaaacatataaaggggttattatgccgaatggcgggcagcacttcacggtcgcatagaggcaaccgttagggctcaccgagagggaactgaacaagacactcctgattacatcatatttggtggcgactagggtgtacatgttactgatca

SEQ ID NO: 27729 - DNA, 429 bp, Glycine max
  Clone ID: LIB3108-041-Q1-K1-B8
gttgttgcttccatctcttcttttggggtgaatcatgagttgactgctatgttataccctctcattatcagttctgtgggtatccttgtttgtttgctcacaaccttatttgcaactgacttctttgagatcaaggctgtaaaggagattgagcctgcattgaagaaacaactcatcatttccactgccctgatgactattgggattgcaattgttagttggattgcactcccaacttccttcactatcttcaattttggagttcagaaagatgtcaagaattggcagctattcttgtgtgttgctgttggtctttgggcacgtcttattattggatttgtaactgagtactatactagcaatgcatatagtccggtgcaagatgttgcagactcctgcaggactggtgctgcaactaatgttatattt

SEQ ID NO: 27730 - DNA, 317 bp, Glycine max
  Clone ID: LIB3108-041-Q1-K1-B9
cccacgcgtccgatgctatgaagtggttccaggtgaaatatgagggagtgatccttaacaagtctcaggcgattgtttagttagactgagttcatttcaggggagtgtttttatcagttttgtcaactatctttctgggatagtatcttaattttgaggcaggttatgaatcaatgtttctcatttcagttttgtgatgaagcacatgtattaacaatagcccttttaaacgacacttttattgcaacaagaacatgtgagacacttttaaatgcattctctttattgattatttattgaaaaacataattttgttt

SEQ ID NO: 27731 - DNA, 386 bp, Glycine max
  Clone ID: LIB3108-041-Q1-K1-C1
ccatcaaagttacttacaacttctcaaatttttctaattttcttgctccctttcttttatggtgtgtgcacttcgtcactttttgtgccattcaaaggtgcagcataagaagtaagaggaagttgcctacggtttgagatgtctggtgttcttctttgggtgagttgtggacccaaggagaaccccatctccattgttggtcttgctggaagacgtggcagaagccagaagaggtttggactgtgcaatgggatcaattttgcaagcttttcaccagcagtggcagacccttcaagatactcagaagagagggtatatgaagtggtgttgaaacaagcagcactggtcaaggagaagaataaaggcaccaagagagcactgaattt

SEQ ID NO: 27732 - DNA, 285 bp, Glycine max
  Clone ID: LIB3108-041-Q1-K1-C12
agcattcataggcgccaattgtgagtgagagagaagtttctgttttttctacttttccatttttttgggagagatagagagagagagatctgattcttcaccataactgtcattgctttgcttctctcactcagcacaagttgacaagaagggcattgccatttcaatcccatacaaaaagcacacaccccaattcaccaccattttcctaaagcttcactcttttctctgcttagagaagaaagcaagaaagaaaaagcccaaatgggtgaatcttagcccaag

SEQ ID NO: 27733 - DNA, 190 bp, Glycine max
  Clone ID: LIB3108-041-Q1-K1-C2
gctacgcgtgcggcaactgctatacttgcttctcagctggatccaatcaaccccactttagacatgggtccctacatattccgcagccgcttcggcctgaagcacttcaaacgagtctcttccgatctcctactaaaagcgcgagtcactgatgtggggattccaccacggcggggccgcaggggcccat

SEQ ID NO: 27734 - DNA, 364 bp, Glycine max
  Clone ID: LIB3108-041-Q1-K1-C3
gaaaaaaatggttcatcttggcttcttccttctggggtgtctctccatgatctcatatgctaatggttatgtcagcaatgggggttggaccaatgcccatgctacattctatggtggaagtgatgcttctgggacaatgggtggggcttgtggttatggaaacttgtatagtcaaggatatgggactaacacagcagcacttagcactgccttgttcaacaatggcttgagttgtggctcatgctaccaaatcaaatgtgcaaatgacccacaatggtgcctccgtggcaccattgtagtcactgccactaatttttgcccccctggtggatggtgtgaccctcccaatcaccattttgatctt

SEQ ID NO: 27735 - DNA, 402 bp, Glycine max
  Clone ID: LIB3108-041-Q1-K1-C4
gaaaaaaaagaaatacccacagtgattgcttgtgaggacaaaaaatcaagatggtgaagcttcatgggtttgcaaaccctggcggaagcgcgcatgtctcactctcatgctatggtatgtgcgacacattgcatacacaacttgcggcttgttgaaatccaaaacaacataaattggtctttaacgcctaaatcgtcgctttgggtaggggcgatgctcatacgcttacgtagataacgccaaaattaaagatgtcagcgtcagatgtggcagcaacaatgccgctaatcgccttatcggaaattgtttgcaaggtgtagacttctatgcgataaataccgatgctcaagcactattaaaatctgctgctgagaaccctattaaaattggagaacttctgac

SEQ ID NO: 27736 - DNA, 360 bp, Glycine max
  Clone ID: LIB3108-041-Q1-K1-C5
gaaaataacaaatgcgactgaggcttcagaggtgatagtacctacttgcatggcttcatggatcatgagtgcacgtatacatgttttgcagccaatgcaacgtgcgatatgggaagtgatacgtatttgactaagggttgagcttgctggtattgaaacttgggtgagcaaggatatgggactaacacagcagcacttagcactgccttgttcaacaatggcttgagttgtggctcatgctaccaaatcaaatgtgcaaatgacccacaatggtgcctccgtggcaccattgtagtcactgccactaatttctggccccctggtggatggtgtgaccctcccaatcaccattttgatctt

SEQ ID NO: 27737 - DNA, 398 bp, Glycine max
  Clone ID: LIB3108-041-Q1-K1-C6
catcgatcgtgtttctcgctaatttgcgtcttccttcgtttccaagtcagcgttaagggtttagtttggtgcgtgccatgaagatcgaggaattggacgatggagagtgtagtagggacgaggaagagaagtgtgagaggcagattgtgagcgttgatgcgaagagagcgttggttggagctggtgctcggatcctgttctaccccacactcttgtataatgtgcttcgtaacaagattgaagctgagttcaggtggtgggatcaaattgacgagtttttgttactgggcgctgttccgttccccaaagacgttcctcacttgaagaagcttggtgtgggtggtgtgattactcttaatgggccctacgaaaccttggtgccatcggcgttgtattat

SEQ ID NO: 27738 - DNA, 78 bp, Glycine max
  Clone ID: LIB3108-041-Q1-K1-C7
catggagcgagagtctcgctaatttgcgtcttcgtgctctgccaagtcagacggtgaggctttacttttgatgacttg

SEQ ID NO: 27739 - DNA, 393 bp, Glycine max
  Clone ID: LIB3108-041-Q1-K1-C9
ctttcctgtttaccgtttcgtttgtttctgcggaaaatgggaggtgaagaaaatgtaaagcatcttgaagattgttctgtttccaatgcattgggcacttgggtattctcagttgcaggagctttgctggctattccagtggggataaagcgcaaatctctggcaccccttgtattttttggcaccactggtactatgttggatattattatgggaattagtgcttgcgaaagggaacatgcagagcgccaaatgaagttacttgaagcgcaaaatgctgcttgccgagacttctttgtgtgaaacagaaattgattcataaactgctatgttgaagttgtcagcattgtcaaatttatttggtcatgattgtaacaaacttaatgcactttt

SEQ ID NO: 27740 - DNA, 422 bp, Glycine max
  Clone ID: LIB3108-041-Q1-K1-D1
ggaatttcgatgctcaatcatctcttttaccattctcttctctcttgctcttgcaggagagagccatgtccatgcatcgctacctgaggaagattattgggaagctgtttggccaaacactcccattgccactgcactgcgagagcttctaaagcctctccctgcaggtgttgaaatcgatgaactccctaagcaaattgatgatacacagtacccaaaaacattcttctataaagaagaccttcatccaggcaaaacaatgaaagtacacttcaccaagcgtgcctatgcacaaccttatggtgtatatacatggttaacggatattaaagacacctctaaagaaagatatagttttgaagagatatgcatcaagaaagaagcgtttgagggagaagagaaagtttgtgcaaaatccttgg

SEQ ID NO: 27741 - DNA, 329 bp, Glycine max
  Clone ID: LIB3108-041-Q1-K1-D10
cccacgcgtccgtccacgcgtccgcccacgcgtccggctacctgaggctgaagccactcctccccttgcagcagcagcacgtaacactagctttggtattcgaaattgcaagccagtttatttgctgtggtctttagccaccactgtttttggggccttgctcgtggcattttgaacagacatttcccttcataaaatctaagtagaagagagtaggagaaaagaaagtgtgtgaagaaaccatttttgggggatcacgctgaatgtgcgtgaacatttggtgcagtgcaatgggttttgttattttattttattttattttaattttg

SEQ ID NO: 27742 - DNA, 314 bp, Glycine max
  Clone ID: LIB3108-041-Q1-K1-D12
aatctgaaccttccggatttacgttttgctttgttcaggtagccagccagtcatggtgctcttcaatgtttcacgcgtagagaccactcccttcgatggccagaagcctggaacctctggtctccgcaagaaggtgaaagtgttcgtgcaacctcattacctccataactttgttcagtcaacattcaatgcattaactgtggaaaaagctagaggtgcaacgctagttgtatctggtgatggtcgtgacattttaaaggggaagctattgagattatccctaacgtgtcagcagcaagtggtgcaacacgtgt

SEQ ID NO: 27743 - DNA, 386 bp, Glycine max
  Clone ID: LIB3108-041-Q1-K1-D2
catcaaacacttctggtattttcttttctttttcttctttgtccaaaaagaaatatgacaattcgtttcgttcctcttcaaaataagctctgtttttcaattgccatgccaccaaactgacgttttactagaaggaatagtttcttacttctcatctaactaaaccttgaaacgtgtgattgtccaaccgaactatacacaaattaaggtatgattggtttaggcggaaactaaggtgcataaataaaactctgtaagaaagttatcacgatatgattccaatagttagattttattgattgaaaatcaataaaatttaacgattgtgattgcatcgtaaaaaaaaaaaaaacaattttagaaatttctctttataaaggggcggc

SEQ ID NO: 27744 - DNA, 135 bp, Glycine max
  Clone ID: LIB3108-041-Q1-K1-D3
gggatagataatattggacctagacgcgtgtctgagcggtagccactggcggcagatgcaggacgggtgtagtacatctattgtggaattgtttgtgtggaaactatgctccgatacatatctgatggcgggaag

SEQ ID NO: 27745 - DNA, 249 bp, Glycine max
  Clone ID: LIB3108-041-Q1-K1-D4
aaaaaaaaaaaaatacccacagtgattgagagagagaacaaaaaataaaaatggtgatgcttgattcgcttacaaaccccaacccaaacgagcttgtgtgactctcatgctctgatatattccaccacaatgcattcacaacttgcggtttcttcaagcccagaacaacaaaaatggctccttaacgcctaaagcggcggttcggttcggggagatgctcctacgcttacgtagataacgccaaaatta

SEQ ID NO: 27746 - DNA, 174 bp, Glycine max
  Clone ID: LIB3108-041-Q1-K1-D5
aaaaaaaataaactactcacagtgattgagagagtgacatgatctcaaaagggagaggcttgattcttttacaatccgtaacggaaactagcttgagtcactctcatgccaaaacatatatcaccacaatgcatgcacaactttcgtatgcttgaagcccaggacaacgaaaat

SEQ ID NO: 27747 - DNA, 302 bp, Glycine max
  Clone ID: LIB3108-041-Q1-K1-D6
acgctttctttgactagacttgccatttgcacctgtatgatcgtacaaattatcatggttgggttgaatcttcactgaacaataatattataatagagaatcttggatcaaaacagacggtttaatagaaaaaaaaaggataggacttgtgatctcactgaacaagagaaacgcgtgatggtgcaaaacgaaataaaaacacgggggggcgtgctaagggtgtccaaggttactaaggcgggcatgcgaaaattaaggttgtttgttgtgtccactaaattcaattaagtgggcggtgtttt

SEQ ID NO: 27748 - DNA, 220 bp, Glycine max
  Clone ID: LIB3108-041-Q1-K1-D7
aaaaaatgtgtactgctcctaagttgtagcttgctgacgtgtaaagacaacgttgagggtttactgctttgcgtgacgctaatcacgctagattggctgatagttatggtcgtagtgaacagtaaaaacgatgtgctgacgacatagatgatgacagatgtgtacaaagaaaatgatggatctggtgctacggacctgttctacttcaaagagatgcata

SEQ ID NO: 27749 - DNA, 134 bp, Glycine max
  Clone ID: LIB3108-041-Q1-K1-D8
agaccagtgcgagtgcgcctaaagtcggaccgtatgcccattgtggcaagatctggaccttgactataaatctctccgaccataaaagttgatggaacgactgacaagcccataacaaccggcaagaagattgt

SEQ ID NO: 27750 - DNA, 368 bp, Glycine max
  Clone ID: LIB3108-041-Q1-K1-E1
atctgaagctaagtttcgttgccactgaggaatgaaatggccaatggtaacaacattagtcatttcttcaagctcttgcttttccttctaactttccactcttgtctcgctgagattttctttcaagagagattcgaagatggatggaagagccgttgggtgctatccgattggaaaaggagcgagggaaaagcgggtaccttcaagcacacagcagggaaatggtctggggatcctgatgacaaacgtcttcagacatataatgacgccaagcatttcgccatatctgcaaagataccggagcttagtaacaaggacagaaccctggtggtgcagtattctattaggtgtgagcacgacattgaatg

SEQ ID NO: 27751 - DNA, 242 bp, Glycine max
  Clone ID: LIB3108-041-Q1-K1-E12
gtcggttgcaaataaagaaacccataatcgattcctttcttttctctctattttccattttcctggtttgcttgggttctccgaatccaaaatgttggcacttacactattcattctcataaacgctacactctcttttttgccacattagacctctcactatacctctttcactctctagagccctcctttttctctataaacctcttcccgaccttctccgaatggcgatccgtgcgcgc

SEQ ID NO: 27752 - DNA, 386 bp, Glycine max
  Clone ID: LIB3108-041-Q1-K1-E2
gggctagagaacactgaagctaaccgccaggcgtaccgtaccctccttgtgacagttccaggacttggtcagtacatctctggtgccattctctttgaggaaactctctaccaatccacaactgatggcaggaagattgttgacgtgctcctcgagcaaaacattgttcccggtattaaagtcgacacgggtttggtaccccttgctggttccaacgatgagtcatggtgccaaggtcttgatggtcttgcctctcgctcggctgcatactaccaacaaggtgcccgtttcgccaaatggcgtactgttgtgagcatccccaacggtccctctgctctggcagttaaggaaagcaccttgggtctggctcgctatgccgcaattgc

SEQ ID NO: 27753 - DNA, 322 bp, Glycine max
  Clone ID: LIB3108-041-Q1-K1-E3
gggctggaggacactgaagctaaccgccaggtgtaccgcacgcttcttgagacaactccaggacttggtcaggacatctatgtgtgccattctctttgaggaaactctctaccaaatcacaactgatggcgggacaattgatggcgtgctcctacgagcaaaacattgatgccggcattaaagtcgacaaggggttgggacccctatctcgttgcaaccataagtcatggagccaaggtcttgatggtctagcctctcgctcggctgcgatactaccagcaaggtgcccgttttgccaaactgcgtactgctgtgagcattc

SEQ ID NO: 27754 - DNA, 433 bp, Glycine max
  Clone ID: LIB3108-041-Q1-K1-E4
agctcagatatactcctaatatgaagaagcatattggcatgattgctggaggcacaggaattactcctatgcttcacgtaattgaagctatattgaggaatcctgatgacaaaactcagatatctttactttatgctaatgtctccccggatgacatactgcttaaacaaaagcttgacattcttgcaacaagccacccaaacttaaagatattctacactgtcgataatccaacgaaaaattggagaggaggtgcacgttacatatcaaaggatgtggttgtgaaaggcttacccagtcctagtgatgatactctaatacttgtgtgtggacccccgggtatgatgaaagcaatatctggagaaaaggccaaagactggacacaaggagaggtttctggcatcctaaaagaggctggatacactgaacaaat

SEQ ID NO: 27755 - DNA, 259 bp, Glycine max
  Clone ID: LIB3108-041-Q1-K1-E5
gatggatgagcacgtggatgctatccgattggaaaaggagccagggaggcgcgggtgccttcaagcacacagcagggaaatggtctggggatcctgatgacaaacgtcttcagacatataatgacgccaagcattgaggcatatcgtgaaagataccggagcttaatgacaaggacagaaccatggtggtgcagtattctattagggttgagcaggacattgaatgcggtggcgggtacattaagcttctttcttgtta

SEQ ID NO: 27756 - DNA, 397 bp, Glycine max
  Clone ID: LIB3108-041-Q1-K1-E6
accgattcgaattcggggacgcgtacgcgtccgatacgcttccgcatccatggactggttctcttggctatccagaaccactctcgagccttccttaatctacgactatggccatacctttggccgcaacgagctccaattggaagatgctctgctcttaaaccacgagtttcttcactagcatgagaatcttaattgccgagcacaagctaaaaattctgaagcttgtgaagaaacatgaaggaggagctacagcacggaccaataagaagctctgtggggtcatcatgaagtgcctaaggaagtgcatgaacaagtttgcttctcgcgaagatcatgatcatcatcatgcagtgaacacgcgccatgctccatggtgcctgtgtagtgccaacac

SEQ ID NO: 27757 - DNA, 250 bp, Glycine max
  Clone ID: LIB3108-041-Q1-K1-E7
ggctcacatatactcccactaatgtgtggcctagtgacctgagagctaaacgcggaggcttgactcctatacttgacggaaatgaagctagattgaggaatcgtgatgccaaaactgagatgtgcagactttatgctgatggcctcgcgggtgacataccgattaaacaaaatcttggcacacgtgctacggaccacgctaacttcaaagtattgtatactgcgcttcgtatcacgaaccaatgtgaagg

SEQ ID NO: 27758 - DNA, 263 bp, Glycine max
  Clone ID: LIB3108-041-Q1-K1-E8
ggtatacttgtactatcaacaacgattttgttcttgttgctggaggcacaggcaggagctctatactttacgggacgcaaatatattgtggagtgctgatgtcaaaacacaaaaagattggcgagatgctaatgagtcggcggctgacatactgcttttataaaagggcgacatgttagccccgaggggggcggactttaatacattgtatgctgtactgtgttgaacgcatagaatgaaaggaggggcaggttacatttcat

SEQ ID NO: 27759 - DNA, 375 bp, Glycine max
  Clone ID: LIB3108-041-Q1-K1-F1
gccacgcgtccggatcgagagtggccccaggttaggctcaattctagagtgctgaaatgggtgtgttccgctgaaaacgatggctgccaatgtggagctaactgcacctgaaacccccacacttgcaagtgaggtgtttgagagctaaatcttcaagcaaagattgcccttagaaataatgataaaaactgtgtgtggtctcaaaacttcgaaattatgtggtgtgaattatgtcacgccctgatgttttgggtgtaaacaaagatgcttacaataaagaggtaaccactttgccctgatcgcgtacaagtgtttggaacctctaatgtgcgtgtgaagtgccaggctggcttcatatatatatatggatcaatg

SEQ ID NO: 27760 - DNA, 383 bp, Glycine max
  Clone ID: LIB3108-041-Q1-K1-F12
acattacattactaagtctttgttcatttgagtagtagtgatggctagcctcaaggttgcatgtgtggttgctgtgatgtgcatggttgtggtggccatgagtgctgcacccatggcacaggccgcaatcacgtgcgggcaggtcgccggcgacatgtctccgtgcttcagttatcttcgaagcggcggaaaaccgtcgcaggcctgctgcaacggagtgaagtccctcagcagcgcggcgaataccaccgcggaccgccagggggcgtgcagttgcctgaaaaaccttgccaataatatgggacagagtttgaatgccggcaacgcagcctctctccctggcaaatgtggcgtcaacattccttacaagatcaagaccttca

SEQ ID NO: 27761 - DNA, 321 bp, Glycine max
  Clone ID: LIB3108-041-Q1-K1-F4
aaaaaaaataatatacaaacataaaaaaaaatataaaagcacaccaaaattaaaaaaaaaacaaaaaaaataaaagggcctgggggctctaaaaattcttttttatggaacactaaaaagcacaccatgggctgtggcattctaaacacttgaattgggcgaaacccggcctttttttacgttttggggatggaacaacttcggcttttcccaatttacccaaatagcaaaaaagccccccccgtcccactttccaaaaaggaaagaagcctgattgtgaacaggattggacccttttctcaatcttaaagggcgaggggg

SEQ ID NO: 27762 - DNA, 255 bp, Glycine max
  Clone ID: LIB3108-041-Q1-K1-F5
gggaaacccatgctcatcaatcttattgtggttgtcattgctgagattgatcttgtgggaggtgcagaatactacagaattattaatggtctgaatggcgaagacaaacttcaaccaggtggtgcatatgacccattggggctcgcaaatgatacataccaagtcgcactgataatggcgaaggaaatgaaacacggaagactggctatgtatgccatgctgggtttctacttacaagcttatggcactggagaa

SEQ ID NO: 27763 - DNA, 247 bp, Glycine max
  Clone ID: LIB3108-041-Q1-K1-F6
cttgtgtccacgcgtgctgccacacgtccggtgggggggggatataacggcgcactcaaccattgttgtgatgggacattaaaaagcacacgaaggctgtgacatgcttttcactttatgtgccgaaaaacaaccctttatgcggttcctctgatgaaaccatattggtgtggaaaatgttgcactacaagctgggctgtgttgaagctatagcattgaatggaccaaatcatgatttgtgggcaca

SEQ ID NO: 27764 - DNA, 274 bp, Glycine max
  Clone ID: LIB3108-041-Q1-K1-F7
gcattacccgacaaaacaaaaaaaaatagagtaactgataaagcagggaatacaacattggggggatcataaggagaccaatggaacaaatctcctcggaggccacaaaaggacaaagcaggaccgttgtacactttctaatctcctgtacttaattgaggaggtccttcacctttcaacgatctagcttggtcctatctatctatgtgtaattcgatgcggttcaaataggggcactcgctaaactttatgctgtttcaactgtgtgtcaaca

SEQ ID NO: 27765 - DNA, 190 bp, Glycine max
  Clone ID: LIB3108-041-Q1-K1-F8
cgaacggtggagtttctgcttgcggaggagcatgacccacaccctctgttgcaggtgtggccggctggacttaaaacgggggaagtgacaatgctgtgcgtgcgctatcgataggtgcccacacgaggaaggattactggagcgtgaaggtcattcagaaaaacaccacctgaactgcgacgatgaagaa

SEQ ID NO: 27766 - DNA, 391 bp, Glycine max
  unsure at all n locations
  Clone ID: LIB3108-041-Q1-K1-G1
tccaaatgcagtttcatacaaaacagcagcgagagagaaactgataaggcagggatacaacattgttgggatcattggagaccaatggagcgatctcctcggaggccacataggcgaaagcaggacctttaagcttcctaatcccctgtactacattcagaagttccttcacctctcaacaatctagcttgctcctatctatctatatgtaataagatgcgtgcaaataggggcactagcttcactttatgttgtttcagctgcgtgtcaacaagtcatgtaagacacttcactatgaatggttctctatcgtggctttaataaattatgcgcccttgtgccatactttctnanacaaacaaatttggaacaggggaagggaccttttaag

SEQ ID NO: 27767 - DNA, 284 bp, Glycine max
  Clone ID: LIB3108-041-Q1-K1-G11
actaagcattcggcttgtaactcgttctagctaagtattcaattctgttatgaattgaactgtctatagcccgtgccagcttgactctaattattggcccaggtttagcaatcaagttggatccaactgatcaagatatgatggagagtggaagctggctctgggattacaagatagaaggttctcacattatgctagaattagtagaatcataaaccactaaccactttaaacggatgctgcgtgaatcatggttcacaactggcattgcggatcattaccta

SEQ ID NO: 27768 - DNA, 385 bp, Glycine max
  Clone ID: LIB3108-041-Q1-K1-G12
cccacgcgtccggaacattgctgataaccccaccaatgtgcagcttccaggtatgtacaacaaggaagagaacccccgtgttcccatcattgtcaccggtaacgatttctcaacactctatgcacctctcatccgtgatgggcgtatggagaagttctactgggcaccaacaagggaagaccgcattggtgtttgcaccggaattttccgcactgatggtattcctgaacaggacattgtcaagcttgttgacaccttccctggccaatccattgatttctttggtgcactgagggccagagtatatgatgatgaagtgaggaagtggatttctggtgttggcgttgacagtgttgggaagaagcttgtgaactcaaaagatgga

SEQ ID NO: 27769 - DNA, 349 bp, Glycine max
  Clone ID: LIB3108-041-Q1-K1-G2
gaaaatgatcaactgaatgttgcctttgatgatgttggacatgctagcgtgcaagtatgcattgctggatttaaaaaggggccgctgaaagtgttgtcccaatcatatgataggtccctacgtgggagggacttttacgaggttctgttcaatcattaaactgccacgtttaaggaggcgtacaagattgatgtattccaaaatgctagggcttgtctgaggttgagggctgctcgcgacaagctgaataaagtgcttaatgcttattccgaggcacctttaaacattgagcgcttaatggatgagaatgatgtcagacgctatatcaagcgcgatgagcttgagcaac

SEQ ID NO: 27770 - DNA, 352 bp, Glycine max
  Clone ID: LIB3108-041-Q1-K1-G3
gaaaatgatcacactgaatgttgcctttgttgatgttggacatgctagcatgcaagtatgcgttgctggatttaaaaaggggcagctgaaagtgttgtcccaatcatatgataggtccataggtgggagggacttttacgaggttctgttcaatcattacgctgcaaagtttaaggaggagtacaagattgatgtgttccaaaaagccatggcttgtctgaggtggagggctgcttgcgagaaactgaagaaagtgcttaatgctaatcccgcagcacctttaaacattgagtgcttaatggatgagaaggatgtcaaacgctttattaagcgcgatgagtctgaacaactg

SEQ ID NO: 27771 - DNA, 381 bp, Glycine max
  Clone ID: LIB3108-041-Q1-K1-G4
gggagctataagctagcttatcgcgaggagaatatgaagacgcctgctttctttgttgctgcaggagttttggtaacatggccatgccatggcgcaggctaccaaaagttccctctccgaatgaaaactggctatggtgagcgttctttggaggtaaaatgcgcaagttttaagcttgctgtggaaacacacaacatccgaacctttaaaaccattcctgaagagtgcgctgaaccaacaaaggactacattaatggcgaacaatttagatcagactcttaaacacattaccaacaaactttcttttatgctagtgaacgcgaaattcatcacaacgacgtatttatatttggcatagataacaccggactctgtcatatc

SEQ ID NO: 27772 - DNA, 116 bp, Glycine max
  Clone ID: LIB3108-041-Q1-K1-G6
gcgaacgatcaacttaatgattcctaggaggatattggacatgctggcatgcaagtatgcgtagctggattgataacgtggccattcaatgtgtcgtgctaatcacatgatacgtc

SEQ ID NO: 27773 - DNA, 398 bp, Glycine max
  Clone ID: LIB3108-041-Q1-K1-G7
cccacgcgtccgcccacgcgtccgcccacgcgtccgtcagaagaagaagagagaggtctctcaacaatggccactgccactgtttcaatttcaactttatgcgctactttcggaacccattgcgccatttcccacaacccaaaacctctattttctcaacctttcaatctcaatcactttccttctaactcttacaagctcgctttctcgcctcgctcacctctttcaccccttcccaaggcctctgaatccgcggtagccgaaaccgaacccggttcggccgagcccgaaccggcccaaatttgcccggcccaaccttccttctgggaacccggtctcttcgctgtcgtaatgattggcggacgccaatatattgttcacccggggcgacatcttac

SEQ ID NO: 27774 - DNA, 399 bp, Glycine max
  Clone ID: LIB3108-041-Q1-K1-G8
gcgagctcatacctagttgatcatgcggaggatatgacgaacgttgcatacttcgctactgcagcagctatggtagcctggccatgccatggcgcacggtaccaaacggttccttctacaatgaaaaccggctattgtgcagccacttctgaagggaaaaacgcacgttttacgctcgctgtggcacacacaacatgccagccttttaaaccattcctgaagagggcgttgaaccaacacatgactacattaatgcgcgaacaacctaaaccagactctgaaacagctaaccaacaagctgtcttttatgctggtgaacagcctattcatcgcaacgacgtctttatattctgcgtagattacaccgcactctctaatatgccatactatgaaagacat

SEQ ID NO: 27775 - DNA, 431 bp, Glycine max
  Clone ID: LIB3108-041-Q1-K1-H1
cccacgcgtccgtcgaaacgaagaaagaaagcgttgtgaagaatggcggaagagggacaagtgatcggtgtccacagcgtagaggagtggaaggaacatctcaagaagggagaagagtccaagaaattgattgtggtggattttactgcttcttggtgcggtccatgccgtttcattgccccaattcttgcagagtttgctaaaaagttgccgaatgtcaccttcctcaaggtggatgtggatgaattggagactgtttccaaggagtggggaattgaggctatgccaaccttcctgttcttgaaagaaggcaagctggtggacaaggttgtgggtgccaagaaagaggagctgcaattgacaatagccaaacatgccgcaattgctgctgcttgaagtgccatatgaatatgttaaaaataatagactat

SEQ ID NO: 27776 - DNA, 317 bp, Glycine max
  Clone ID: LIB3108-041-Q1-K1-H11
tcgtatcatcttacatattgctactgaagcctattggttgtggaaataaagagttaccatgtggatcagactcatcataccaaacgattttattctatgtttccatatacctaatagctctaggaaatggaggataccaacctaacattgctacatttggggctgatcaatttgatgaaggagatcccagggaacaacattcaaaaattgtatttttcagctatttgtatttggctgtgaacattgggtcactcttcttcaacaccataatggaatatttagaggatgatggactatggactttggggttcttggct

SEQ ID NO: 27777 - DNA, 373 bp, Glycine max
  Clone ID: LIB3108-041-Q1-K1-H12
gtttcgggggaagagatccagcagcaatggtgtacgtcaaggctcagaaatcaaaagcctacttcaagagatatcaagtcaagttcaagagaagaagagagggaaaaaccgattaccgtgccaggattcggttgattaatcaggacaagaacaaatataacactccgaaataccgatttgtggttcgctttagcaacaaggacattgttgcacaaataatatctgctagcattgccggcgatttagttcttgctacagcatattcacatgagctgccacgatatggtcttgaagtaggacttacaaattatgcagcagcttattgcactgggctcctgttggcccgaagagtcctcaaaacacttgaaatgga

SEQ ID NO: 27778 - DNA, 407 bp, Glycine max
  Clone ID: LIB3108-041-Q1-K1-H2
cccacgcgtccgctagttctgtattcagattacattgcaaaaatggcatcattcaccatgacagcttctatctttggctgcccagctgtcaccaaacggtcggcagtggctgcgcagaggagattactcgtagtgagtgctgccaaagctgaaggggaaaaggtcaggtatgacaacaatgatagcaatggaaggaggaacttgatgttcgctgtggctgctgctgctggtttctctgttgctgggatggcagtggcagatgagcctaaaccaggaacctcagaagccaagaaaaagtatgccccggtttgtgtcaccaatcctacagctaggatttgtcgcaattgaggatctcctgtttcattttacctctgatgatcggaaatgtactgttgggatgtgataat

SEQ ID NO: 27779 - DNA, 316 bp, Glycine max
  Clone ID: LIB3108-041-Q1-K1-H3
cccacgcgtccgctagaactgaaaaagaatttctttttgaaaatggcctaagacggccaagtgatctgtatacacagcgtgtaagattggaacgaacatttcacgaagggtgaacagtgcaaaaaattgattgtgggggctcttacagcttcttggtgcgggccatgccatttcattaccccaattcttgcaaagtttgcataaaaagttgcctaatgtcaccttcctcaatgtggatgtggatgaattggatactgtttacaacgagtggggaattgatgctattccaacctccctgtttttgtaagaatgcaag

SEQ ID NO: 27780 - DNA, 287 bp, Glycine max
  Clone ID: LIB3108-041-Q1-K1-H4
gccaaacgttagttcgttctgtcttccgatttcatttgaaacattggatactgaaacaccacagcacatatgcttggctgaccagctgttgataaacggtgggcagtagctgttcaatagaaattacacttggtgcgggctgcctaatctggaggggaaaagcgcacttatgacacctagcttggaaaatagaaggagggacgaagtgtttgacatggctgttattgctggtttaatcgacgctggaatagcagaatcacaatacccgtaaacatgagccttaaaag

SEQ ID NO: 27781 - DNA, 371 bp, Glycine max
  Clone ID: LIB3108-041-Q1-K1-H5
ggtcaatgctaatccagcacccaacactcttcttgtgcttgaccaatggaggctgacggaccagagaacacaggctctgcttaatttatggtgattttgtctgggctctacgttttgtataacaatttgaattggacctggaaaaatcttcgtgggtgagatttgatgctgtttattctttgctgtaaaaattggtaatgagtgaattatctgagattctgattatttttggtcaaatctacattctatactgggaattacgatgcttgaatacatgttatttaaatcaccctatttttgtttgaaagaaagctggtggacaatgttgtgggtccaaaaaaaaagggctggcgttttaaatgatccaacct

SEQ ID NO: 27782 - DNA, 272 bp, Glycine max
  Clone ID: LIB3108-041-Q1-K1-H6
gtacaatgcttatgcagccccaccatctgcatctgctgaaccaattggaaactgacaaaccggtgtacacaggctcggcttaattttcgatgagtttgtctgggctctaccttatgaaataacaattcgaattgtgcctgcaaacatcgtcgggagtgagacattgatgctggcattctttgctggagaaagtggtaatgggtgaatgatctgacatccgcattatttttggtcgaatctacgatctataagtggaattacactgcttgttt

SEQ ID NO: 27783 - DNA, 428 bp, Glycine max
  Clone ID: LIB3108-041-Q1-K1-H7
gacgcgtccgcgacccgtacggtgtccgtaacacttgcaacacacatggctacaatcaccaacacttgcgtattcaaaccccccatctctgatcacccaaagcagctaactttattccgcaccgctcttgtctacgctttctcaccaaatttaaaaccccctccggagcgaattctcggcggctggttccgaaagccacggcggctcccggggccaagaagacagaaaagccgcacgagagagtccagcgagtccacagcgtggaggagttcgagtcggcgctcgaatccgccaaagacaggcttgtggtggtggaatacgctgccagcgacagcgaggagagcagacacatataccctttcatggtggagctgagccgcagctgcaacgacgtggagttcattctggtgatgggcgacgagtcggag

SEQ ID NO: 27784 - DNA, 222 bp, Glycine max
  Clone ID: LIB3108-041-Q1-K1-H8
ccgggtcgacggcacgccgtccgcgagcggtcacgcttgttgattcttgcggagtatattttaaagattgttttctttgttgctgcagcagtttttgttgcatggccatcccatgacgcacgctaccaaaaggtttctcttcgcataaaaaactccttttgggggcgcccttctgagggggaaaagcgcacgttttatgctttctgttgaaacacacaacat

SEQ ID NO: 27785 - DNA, 65 bp, Glycine max
  Clone ID: LIB3108-041-Q1-K1-H9
acgcgtccgacggactggaggagtacgatgactatggcgatgtatatgatgatgcctagcccctt

SEQ ID NO: 27786 - DNA, 417 bp, Glycine max
  Clone ID: LIB3108-042-Q1-K1-A1
attggccttgtacacagcactaggaggagttagaccatcagcatgtttgcctattacgattgatgtggggacaaacaatgagaaattactaaatgatgagttttacattgggcttagacaaaagagggcaactgggcaggaatattctgaacttttgcacgagttcatgactgctgtcaagcaaaactacggagaaaaagttcttgttcagtttgaagattttgcaaaccacaatgcttttgagttgcttgcaaaatatggcacaactcatcttgttttcaacgatgatattcaggggactgcatctgttgttcttgctggggttgtggcagccttgaagctcattggaggtactctggctgaccacacattcttgtttcttggtgctggagaggcaggaactggaatagcagaact

SEQ ID NO: 27787 - DNA, 236 bp, Glycine max
  Clone ID: LIB3108-042-Q1-K1-A10
gctacgcgttcgctcgtcgtatgacttcatacctgagcatcgacatgtcaaacgtgctcgctgatcatgggaaacatgtctgcataagatgtagacatcgccgtagtgctcacatgacggacgactcatgcttgtaggcccactacgtactgcgccgacaaggtgatgtgaatgttgaacgcgtgtctgatcaaacacgacagagagtacatcatgctatgagtgaaggatatgag

SEQ ID NO: 27788 - DNA, 266 bp, Glycine max
  Clone ID: LIB3108-042-Q1-K1-A11
gcggttacgcagtagctcaacgtatgacttggtaagtgaccattaactatatccaacgagaccgggatcatgtgttacatgtgtgggagaatatgtagacatcgccgtatatgctccatgacggcgactcgttctttgtaggcacagtacttacacctctgacaaggtgatgtgaatgttgaacgcaaggatgatcagactctacatacattacaacatgctatgtgagaaggagattaggtttcatatatttaactgcaatctgt

SEQ ID NO: 27789 - DNA, 133 bp, Glycine max
  Clone ID: LIB3108-042-Q1-K1-A2
gtagttgagaactaagaaggagaagcaaatggcttcctcaatgatctcttccccagctgttaccactgtcaaccgtgccggtgccggcatggttgctccattcactggcctcaagtccatggctggctttccc

SEQ ID NO: 27790 - DNA, 335 bp, Glycine max
  Clone ID: LIB3108-042-Q1-K1-A3
aaagcaatcttacccagatgacacgctgaccgaactgcccgattcttgtctgagaaattacgagcattcggtctgcagtacctgtgtgttttccttctgtcactctatgacctctgatatttatatatctaaggctatctgtgtcatctacgatcaggatgcaacggtccaaaatgttcggagcttgtgctgatggctgacccaggatttagagctagcaagcttgagaatcaactgattcatcttcaggacatccttcctagcattacagaatcaggtttccacagggaatttggactgtaattcggaccaaatgacaattgaactgcattctc

SEQ ID NO: 27791 - DNA, 413 bp, Glycine max
  Clone ID: LIB3108-042-Q1-K1-A4
cccacgcgtccggtttcaaacctaggaagttggaagtcatggcagcaacattgatggcagcaacaagttctggcactcttaaagcaactcctttcctaggccaaggcaagggtgccaatgccaatgctcttagggatgttgtttccatgggaactgggaagtacaccatgggcaatgatttgtggtatggaccagacagagtgaaatacttgggacccttttcagctcagaccccttcatacttgaaaggagaattcccaggggattatggatgggacactgctggcttatctgctgacccggaagcatttgccaagaacagggctcttgaggttatccatgggagatgggccatgcttggagcactaggatgcatcaccccagaggtgctagagaagtggttgagagtggac

SEQ ID NO: 27792 - DNA, 160 bp, Glycine max
  Clone ID: LIB3108-042-Q1-K1-A7
gtgtacactgccattgtgatgcctgtcaatgagttgcacacttcgggggtatgggaacactagcagacggtccgctgctcatgtgcgtgttccttgtgcctctctgtgacctatgtcatttctatctccaggctctctgtgtatctaccatcaggatcct

SEQ ID NO: 27793 - DNA, 412 bp, Glycine max
  Clone ID: LIB3108-042-Q1-K1-A8
aagtcatacaaattgtcagagctgagtgatgctgagcttcgcagcctcatcgctcgccctcgcattgatttctcttcggttttcgctctggtcaaccctatcgttgaccacgttcgcgaaagaggcgatgctgctgtcaaagaatacacattgagattcgacaaagctgaattggataacatcgttgaacttgtctccgaccttcctgatccacaactcgatgcgcatgttaaggaagcttttgatgtcgcctacaacaatatatatgcctttcatgctgctcagaagacacccgagagaaatgttgaaaatatgaaaggagtccaatgcaagcgagttgcaagaagtattaattctgttggtctttatgttccagggggaactgctgtattaccctcaacagctctgatgc

SEQ ID NO: 27794 - DNA, 366 bp, Glycine max
  Clone ID: LIB3108-042-Q1-K1-A9
aacacacaacataataaccacgcttctgtttagctttgctcagatgattctgagaaagtagggtcgtttcttcttggtctaatggctgctgcaactgctgcaagattcatcaagtgtgtgacccttggcgatggatgctgtaaggaagacctgcatgctcatttgctataccagctacaaatttcccacggactatattcccactgtgtatgataatttcagtgcaaatgtgggtgttgaaggcataactgtcaatttaggcctttgggaatcagctgatttctctttttgtctctaatctgtatgcacttgtcactggattccttaaactccagtattttttgccctgggcatcccaattggtat

SEQ ID NO: 27795 - DNA, 317 bp, Glycine max
  Clone ID: LIB3108-042-Q1-K1-B1
acgcacacgcgtgccgtgttaagctatggaacctgtgcaactgtcccacttactcatgcccgatcagggcagccttgaacacttagcagcagcaaagcttatcctttatgaccttgcaagcaaaggagctgatcacatccaacacacttacactgcatcaagatgtttgtacctggactcggagaagcatcaccagaagcaaaggctactcaaaacctgcacagaaggttaaacttgtgtgcaatgaagattgtggctggtcaactagagagctacaaccatcaatcgtataatgcgctaccgatatacttagaggg

SEQ ID NO: 27796 - DNA, 345 bp, Glycine max
  Clone ID: LIB3108-042-Q1-K1-B10
gcctaccatggcctcctctctgcttctccaacttggttctacttgtggtaaaagtccctcttttgctcctcctcaaagcattttggttgacaaacttcgaagattagtgattaaagtcaagtcctcagagacaagggaatgcaccacagctatgtttaatgccaattcacgtagagactttcttgggttagctttaagagtctcgggtctcttcatcggttcgctggatgcaaatggagctggtttgcccccagaggaaaagcctaaactgtgtgatgacacttgtgaaaaaagagcttgaaaaatgtgcctacggtaactactggatcaagttttgcattacaa

SEQ ID NO: 27797 - DNA, 281 bp, Glycine max
  Clone ID: LIB3108-042-Q1-K1-B11
gcctaccatggccttctatgtgcttatccaacttggttctactggtggtaaacgtccttgtttagctcctgctcaaagcattgcggttgacaaacacctaatattaatgattaaagtcaagttctaatagacaagggattgcaccactgctatgtacaatgccaattgactgaaagactctctagggttagctgtaggagtctcttctctcttcactggttcggtggatgcaaatggagctgttttgtccccagtggagaagcctaaactgggtgatgaca

SEQ ID NO: 27798 - DNA, 382 bp, Glycine max
  Clone ID: LIB3108-042-Q1-K1-B12
cacgcgtgcgcccacgcgtgcggatgaaatctgtgtccgctgcctagtcatactctgtatcatgttcatttcgataatcatccataggtactgctgaaaatggcaaccatctacgctgctatcacaaccacatcgatcacccgcgcatgtctagtgcaaaaacgttctcttgggtactcatctgccgttcttggtttgccagcaatggctaacgtgggaagagtgagttgctccatggcggaaaagccttcttctgtgaaggaaagcacttcaagcatgctgtggatgggggcatctttgaaggcagccgccagcgccgcagccatgtcaggcccagccatgggcttggtggatgagagacttaacacttgaagaaccgggc

SEQ ID NO: 27799 - DNA, 418 bp, Glycine max
  Clone ID: LIB3108-042-Q1-K1-B2
cccacgcgtccgacttactactatagtgtctgattcacaggccagagggcaaagattttgagcacaatggcctcgacacaatgctttttgcaccaccacgccctcaccactccagctagagcttcaacacagcgcctagttgtgagcaccaaaccaaaccacattgtttgcaaggcagcacagaagcaggttactgtccaagagggtgaggacactactactggccttgtctctcgcaggttggccctcactgtgctcattggtgctgctgctgttggctctaaggtggcacctgctgatgcagcctatggagaagctgccaatgtgtttggaaaaccaaagacaaacacagacttcctttcatacaatgggaatggattcaaactctcaattccctcaaagtggaacccaagcaaag

SEQ ID NO: 27800 - DNA, 200 bp, Glycine max
  Clone ID: LIB3108-042-Q1-K1-B3
cccacgcgtgcggtttcttgtgagctataagctagtttatcgcgaggagaatatgacgtgctttgctgtctttgttgctagctgcaatctcgcttgctcggtcatactcagataccaagctacctactgttccctcttcgaatgaaaactgactatggtgagcgttcttcgcatgtaaaatgcgcaagttctacgcttgc

SEQ ID NO: 27801 - DNA, 360 bp, Glycine max
  Clone ID: LIB3108-042-Q1-K1-B4
cccacgcgtccgcttgatgatatgggaagtcgcataaatgagttggaacaaagcatcaatgacctaagagcagagatgggagtggagtcctctccatcacctgcgacccctgctaagccaacagaggaaatcaccaaagaagagggttcagcttaagtggcgtgttctgatttcagttgctcgttattcatgtattcatgtattgtattgcacaaggattgatgttatgcatctacttttgtctgctgtagtggttcagaaaacagatgtgctgtatagctatgagtgcatctgattatttgtagctaactcgtattttttttatgacttatgggtacacctatactttatgttgcgatt

SEQ ID NO: 27802 - DNA, 318 bp, Glycine max
  Clone ID: LIB3108-042-Q1-K1-B5
gtgttaagctatggaatcctgtgcaactcttccactttctcagctggcttatgtggacccttcaacacttagcagcaacaaagcttatcctttttggccttgcaggcgaaggagctaatcacacccaacacgctaacactgcagcaagaagtttgtacctgatttgggagaaccatacccgaagccaaaggctgttcaaaacttcccaatttcttcaccttcggtgcagtgaaaattgttgctgctcaacttgagagctacaatcatgaagcatatgaggagctgatggaattcttgagtagacactcgttgaatgat

SEQ ID NO: 27803 - DNA, 410 bp, Glycine max
  Clone ID: LIB3108-042-Q1-K1-B6
tctggatgcagctgaaaatgctggagtggagctaccttactcatgcagagctggagcatgctctacttgtgctggccatgttgtttcaggctctgtggatcaagcagatcaatcctttcttgatgaccatcaaatcaaaaagggttaccttctgacatgtgtttcatacccgtaatcagattgtgtgattcacacccacaaggaggaagatctcgtttaagtggtggtggtgtgtgtcttgtgttagatcttctaagcttggatatgtgtcatggtagctagacatattgtgaaactctgttggtgttggtacaactttttgaatcgatctaaatttatgtgaactttaatatgtagccattacatcgattcattcaagaataaggctatgtttcgcccaatattatgtt

SEQ ID NO: 27804 - DNA, 444 bp, Glycine max
  Clone ID: LIB3108-042-Q1-K1-B7
taccggtccgtcgtcccacgcgtgcgcccacgcgtccggtttgctgtgagctataagcatgattatcgtgacgagaatatgaaggggttagcggtcctttatgctgaattggttgtggtagcatggccatgccatggctcacgctaccaaaggttccctcctcgaatgactactggctatgagtgagcgttcttcggaggtaaaaggcgcaagttttaggcttgctcgggaagcacacaacatccgtacctttgaaaccattcctgaagagtgcattgaaccaactaaggactacattaatggcgaacagatgtagatcagactctaaaacatgtataccaacaagcttccctttatgctagtgaacgcgaagtccatcacaacgacatatttatattctgcatatattaacaccgtactttctaaaattccatactatgaaaa

SEQ ID NO: 27805 - DNA, 213 bp, Glycine max
  Clone ID: LIB3108-042-Q1-K1-B8
acctctcgtgcagaggattgctggctaccagagcagccacactccttcagggacatgtgaaactgttagtagcactcgaaacgcttcatgcacacacatccctgatcaatcttatgacctgtcacactcatgatagaaacctggcacattcatactgtcaataaccactacccccataccaactccagtccttcaaattccagcccatcaaag

SEQ ID NO: 27806 - DNA, 398 bp, Glycine max
  Clone ID: LIB3108-042-Q1-K1-B9
ctcgtcactagctctgtgcattcttctctcgctctctgccttccatcacactcggcattggctttcccaagatagtagaagatggcagacactgaggatattcaacctcttgtttgtgacaatggaacaggaatggttaaggctggatttgctggagatgatgccccacgtgctgtgtttcccagcattgtaggtcgtcctcgtcacactggtgtgatggttggcatgggccaaaaagatgcatatgttggtgatgaggcacaatctaagaggggtattttgactctcaagtaccccattgaacatggaattgtgagcaattgggatgatatggaaaagatttggcaaactttgcaagagcatacaccgtggaattcggtagttgcaagttccctgag

SEQ ID NO: 27807 - DNA, 329 bp, Glycine max
  Clone ID: LIB3108-042-Q1-K1-C1
gcatttgggcaattttgctagcacatgtgatcatcatcgtggttactcctttatagtagttttatccttgcatagtcttaggtgttttgtttaagttatatttttaagtttctgccgatttcatgtagccgtaactttcaaaactaggttcttgatcggcggtggtcaattttcattgctgtttgtttttgatgagtactgttttttgttttgatggtaagaagagtctgagatatttcgaatttcacaagcagctatagggttttagtccatttcctttgctgctgagggatgttttaagttgcatttaatttataacgaagttttat

SEQ ID NO: 27808 - DNA, 420 bp, Glycine max
  Clone ID: LIB3108-042-Q1-K1-C11
gctagtttatcgtgaggagaatatgaagttgtttgttttctttgttgctgcagtagttttggtagcatggccatgccatggcgcaggctaccaaaggttccctctccgaatgaaaactggctatggtgagcgttcttcggaggtaaaatgcgcaagttttaggcttgctgtggaagcacacaacatccgagcctttaaaaccattcctgaagagtgcgttgaaccaacaaaggactacattaatggcgaacaatttagatcagactctaaaacagttaaccaacaagctttcttttatgctagtgaacgcgaagtccatcacaacgacatatttatattcggcttagataacaccgtactctctaatatcccatactatgaaaaacatggatatggggtggaggaatttaatgaaacctt

SEQ ID NO: 27809 - DNA, 429 bp, Glycine max
  Clone ID: LIB3108-042-Q1-K1-C2
tctgctattcatagacttttcaataaatggctgaccatgttgcgcacacaaccatcaagccaagaagtggagaagatttttgaagaacctgcatcagaaggaattttaccaaaaactcagcaagagactcaaattaaggaaagacgtgcaattttgaaggtggcatggtcccattttctggccctcgatgcaacaataaagattcctttgttggtattcattcctctatacctggctgttaatgtaaaatatggtgctgaagtttccaaggagttaactcctttatggattttgggcccacttattgtggctacccaaatcttggcaatccgttggctatgtgcactctatgttttcagcttcaatcagactgtcaaattactcaagaattctccttattactgcattttggcctacagctatgttttt

SEQ ID NO: 27810 - DNA, 418 bp, Glycine max
  Clone ID: LIB3108-042-Q1-K1-C3
cggacgcgtggggcacaaagcaaagctcatccttgagttaaaaaatggcagcagcttcttccatggctctctcatccccatccttggctggcaaggccgtgaagctgggcccatcagccccagaagtgggaagggtgagcatgaggaagaccgtcaccaagcaggtctcctcaggaagcccatggtacggcccagaccgagtcaagtacttgggcccattctctggcgagcccccgtcctacctaaccggtgagttcccaggcgactacggctgggacactgctgggctttccgcagacccagaaaccttcgccaagaaccgtgaactcgaagtgatccactccaggtgggccatgctcggagccttgggctgcgtcttcccggagttgctgtcccgcaacggggtgaagttcggaga

SEQ ID NO: 27811 - DNA, 428 bp, Glycine max
  Clone ID: LIB3108-042-Q1-K1-C4
attgatgatcaaattcggcaacttcaagcaaaacgaaaccggataactaatggccttgaaaccatgaagaagactaaagctgagctgacttccgagctaacaaatgtcgctaactcaatttcaaccattggtcatgacattaaacatggattatcgcaaaagtcaaaattggagctgaagaaagccaacaatatccggcgtgtagccgagatacaagaaaagttcatcactttaagagggttaacattttaatgaaactcgtctagattttctcagtttcacaaaaacacttttggatagcgagctatgccagtgtcagtgatttataatgtatttatccatgtttctaacttatgggtctgcatctgtggaagttgtgctatataacattgtttttagactttgtgacaatgcatgtagttatgtta

SEQ ID NO: 27812 - DNA, 405 bp, Glycine max
  Clone ID: LIB3108-042-Q1-K1-C5
cccacgcgtccgaaaaagcgtaccatatgcctggtgtacgacgccaaagagaaaccaacggaagttttctgaaaaccgagatgcatagcttgcaagagttgacaaatgaaaagagattggggctgcccgaaagcacgggacgaaggtgacgaacgcggagctgaaaacaagtaacagtctacactcgtcgcttaagaagcttgaacgggccatcgtttcacaccgatcatgctgataaaaccatctcgcatccaactttatctacctgggctcactctaccattaagcctgatgtccaaatagccaggaggccttacccgatcatcttgcccaactcttggacatcctgaatgcatagtgctctctccctggctaagccacattatccatggatagtgtcatgga

SEQ ID NO: 27813 - DNA, 423 bp, Glycine max
  Clone ID: LIB3108-042-Q1-K1-C6
cggcagccgcgatatcatcttcttatagccactcgaaaatgaccaagagaaccaagaaggccggtattgttggaaaatacggcacccgatatggtgctagtttaaggaaacaaatcaagaagatggaagttagtcagcacagtaaattcttctgcgagttctgtggaaagtatgctgttaagaggaaggctgtgggtatttggggctgcaaagattgtggaaaagtgaaggctggaggtgcttacacattgaacactgccagtgctgtcactgtccggagcaccattcggaggctgagagagcagactgagagttgaaagcagtttacacttttcatttgttttcaaatcataaattttgctgctgtttattttgaaattagcatacttgctttggatagttgatggaattttggcaggtctt

SEQ ID NO: 27814 - DNA, 302 bp, Glycine max
  Clone ID: LIB3108-042-Q1-K1-C8
ctcgtagaaaatgctaatacttctctataccgtctaacttttgacctggggactatggagaagtctaagagctgagctaactcacgagctaacaaatgtcactaactcaattataaccattgatcatgacatgaaacatgaattattgcaaaagtcaaaattgtagctgaattttgccatcattatccgatatgcatccgagatacatgaaatgatcatcactataaaaggcttaacattttaatgaaactttgatagattatttcactatcacaaattcacctatacattgcaagctattt

SEQ ID NO: 27815 - DNA, 209 bp, Glycine max
  Clone ID: LIB3108-042-Q1-K1-C9
gtatgagactctatcctacctgccagaccttgatgatgcacacttggcagaggaagccgtgtaccttcttaggaacgtatggattactatcttgaaattcgagttgcagcaccgtttattgtaacgggagcacaacagcttatcatgatactaccttggactctagtgaaccatgtggtagctacctatgttgaggatgcactggtgct

SEQ ID NO: 27816 - DNA, 388 bp, Glycine max
  Clone ID: LIB3108-042-Q1-K1-D11
cccacgcgtccgcacaccgcagggagacggtttctttcactctctgcgattcgcgatggctgacgaggactatgaagatattgacatggggtacgaagatgaaccgccagagcccgagattgaggaaggtgcagaggaagatgtggagaacaaaaacgatgaaataactggagagcctattgacaccgaggataaggaagaggaacaaccagtgaagcggcctcgaaagacatcgaaatatatgactaagtatgagcgtgctagaattttgggcacccgtgctcttcagatcagtatgaatgcacctgtcatggtcgagttggagggggaaactgacccactcgagattgctatgaatgagcttcgagagcgggaaataccctttaca

SEQ ID NO: 27817 - DNA, 425 bp, Glycine max
  Clone ID: LIB3108-042-Q1-K1-D3
cccacgcgtccgatgaattcaaaaacttaagttcattccttgcgtattgctttcttcctcaaaaccaaacatgtcgaacacatgcggcaactgcgactgcgctgacaagactagctgcaccaagggaaacagctatggtgttattgtagagactgagaagagttacatcgagactgttgtcatggatgttccagcagctgagcatgatgggaagtgcaagtgtggcactaactgcacttgcacggactgcacctgtggccattaatgaatatgtatgaaaatgtaattgccatgtgtttggcaatacatatatccaaataatgtaatcttcgtatgaataaatgtgtgtgctgttatcctacttcaggtctgtgtagtcatgcagtctgaatcatttcaagttcctgtcttagttaatataacag

SEQ ID NO: 27818 - DNA, 425 bp, Glycine max
  unsure at all n locations
  Clone ID: LIB3108-042-Q1-K1-D4
cggacgcgtgggcggacgcgtgggcggatcttgcccctctcttctctgtgccctctgtgtttctgtctctctgttcctttctttcttttcttattttccatacacatattatatataatatatcctctctgcttatactcctagtattatataaggcctagagacaacattcattgcaattggcagcacataattcaaagggcaatggcctcttggaagaagaccatcacaactccattcaaaaaggcttgcactgtatttaaacagcagcaaccaccaagggatcaaaagaagtctcaaacagagcaagagaggcaagtaatggatctgcagggtgaagtgatggcatgtgggtatgaagatgttcaagtgatgtggtctattctggataagtccaaatccacanactgcaatataacctcttc

SEQ ID NO: 27819 - DNA, 412 bp, Glycine max
  Clone ID: LIB3108-042-Q1-K1-D5
cccacgcgtccgaccacgcgtacggttgtgaactaagaaggagaagcaaatggcttccgtcaatgatctcttccccagctgttaccactgtcaaccgtgccggtgccggcatggttgctccattcactggcctcaagtccatggctggcttccccaccacgaagaccaacaatgacattacctccattgctagcaacagtggaagagtgccatgcatgcaagtgtggccaccagcttgcacgaagaattttgagactctttcctacctgccataccttgatgatgcacagttggcaaaggcagtagtataccttcctaagaaggcatggatttcttgctgggcattcgagttggagcacgtgtacctgtaccgtgagcacatcatgtcaccaggatactactatggacgcta

SEQ ID NO: 27820 - DNA, 375 bp, Glycine max
  Clone ID: LIB3108-042-Q1-K1-D6
aagaaataccatatcaatcaatatatgggcgatattcaaatattccttcacacatatcaccttgtttccgtgttaaggaaggagatcatgttattattggccaatgcaggccaatctcaaagacagtgaggttcaatgtgttgaaagtgatccccgctggatcctctagcggtgcaaagaaggcttttactggaatgtgagatttgaattttcagttctcattgaagggtagtgttaccttacaaagttagtagaagcctctgttcaaatacatcaaggttgagttaaagattgaatcaattttttgatatcttgtaatgctttgagtggttatatgttacagactttaattgttgaatagtagttgcagttatt

SEQ ID NO: 27821 - DNA, 406 bp, Glycine max
  Clone ID: LIB3108-042-Q1-K1-D7
gttatgctcatatcttccttgtcactgtccgtgtgtcgacggcatggccaccgtcaccacccaagcctgcgccgcaattttccgggcatgtacctagaaatccaggattctgaccggctcttacggttaacttaaccggaaagtgactataccgtcactggggtgccctccttctggctgtactcaaggttgaagccaagaagggagagtgggtacctgacttggcctgcccaacttacctcaatggcactctacctggtgacaatggatttgaccctctggggctagctgaggacccacagaacttgaggtggtacgttcaagccgagcttgtgaatggacgttgggccatgttgtgggttgcaggcatgacgcttgctgatgttttcaccaagcttggaatcat

SEQ ID NO: 27822 - DNA, 403 bp, Glycine max
  Clone ID: LIB3108-042-Q1-K1-D8
cccacgcgtccgtgtttgtcagctctttcttgcttccatagttcatggggtgtgttcaagtcatcacaggtcttctctttgcattggctcttgcaaaaattgacccctcaacatgccaaatggtgcagggcagagtcttctgcgttgactgcactcacaactatgacttatctggtttgtgccaactctaatgcattatatatctactagctttaattaaatttaaataaatgttcattctatccattactctattcgttagccaactaccatctgtgtgtaattttcgttgtgtactagtaacgaagtttgataaacctagtacttcatatgtaaactatttaaatctctcaccactaagcagactctgataagttaatctgtgtgtatatgtattctaagc

SEQ ID NO: 27823 - DNA, 416 bp, Glycine max
  Clone ID: LIB3108-042-Q1-K1-D9
cagcggtatgcaatgtggagttgatacaaggagacacaattgtcatgggatccgacgggcgtttcgataatgtttttgatcatgaaattgtgccaaccattgttagatacaaagatgttgcacaggctgcaaaggcattagctaacttggcaagcagtcatgcaatggattcaaattttgattctccctattcggtggaagccaggtctaagggttttgagccacccttatggaagaagattcttggaatgaaacttacaagtggaaagcttgatgatattactgtaatacttggtcagattgtgagttcatgagatttgctaaatcttaaagaagacatagtcctgaatgctgagatcactagaaaagggtttggcttaagtatactggagcaacttaattttggtgatgctctg

SEQ ID NO: 27824 - DNA, 334 bp, Glycine max
  Clone ID: LIB3108-042-Q1-K1-E11
caaatatcgctgtgaatatgagcggatcggtgaagaaagttagcgatgtagcattcaaggtgggaaggaacatcgattgggatggaatggcgaagcttctggtctccgatgaggctcgcagggagttctccaatctccgtcgctgcttcgacgaggttaactcccaactccaaaccaagtttagccaggaacctgagcccattgattgtgattactatagaaagggaattggcactcgtttggtggatatgtacaaggagcatttatgagagcatttgacatccctatatttgttgatacagtaactccttaatatatccctaaatttgatgcc

SEQ ID NO: 27825 - DNA, 404 bp, Glycine max
  unsure at all n locations
  Clone ID: LIB3108-042-Q1-K1-E12
ctcgctctatttctcagtctctgtgtttgcggctgaggattccgaacgagtgaccttcttcgtttctcgcaaagtttaagtaatcatgggtaaggaaaaggttcacatcaacattgtcgtcattggacatgtcgactctgggaagtcaactaccactggtcacttgatctacaagcttggaggtattgacaagcgtgtgattgagaggttcgagaaggaggctgccgagatgaacaagaggtcattcaagtatgcctgggtgctcgacaagctcaaagctgagcgtgaaagaggaattaccattgatattgctttgtggaagtttgaaaccaccaagtactactgcacggtcattgatgctcctggacatcgtgactntatcaagaacatgattactggtacct

SEQ ID NO: 27826 - DNA, 403 bp, Glycine max
  Clone ID: LIB3108-042-Q1-K1-E2
cctcctagggtttcacgtttccatgtgaaaacggattgagaatctctctctcattctctctctattttatattttctttcacgtcaattagggtttttttgctggcgtgattctgaaggcttggatctggatatcttctttgcttctttgctatggaagactcggattcagttgctacactgatagattctactacttctaagatacaacagctgcagaaggcatttgctgaacttgaaagttatcgggctgttactcttaacttgaaatggaaagaactagaggaacatttccatggtcttgagaaatccttgaagaggcgctttgatgaattggaagaccaagagaaagagtttgaaaacaaaacgaggaaagctcgtgagatactggagaagcgggaagc

SEQ ID NO: 27827 - DNA, 340 bp, Glycine max
  Clone ID: LIB3108-042-Q1-K1-E3
atcctcgtggagacgttcggtctgataagcacacacagattgatcgatgatggatacgttgaccacatcttgttctgcaactcttccatggtcttattgttgctttgacatttacgcttcaggaagagctagcctttatgcttccatgactatgcaatatcgcttaccatacggcaagcgtgacgatgcttgtgattcaaactccagagaactgaacaagctatcaactcttagtgatcgctgtctctctgttacccctctttacaaagatgctgagatggggctgcagctgagtgctgcgacagtctgaggatggaccacgtgtgcagggatggaaggc

SEQ ID NO: 27828 - DNA, 421 bp, Glycine max
  unsure at all n locations
  Clone ID: LIB3108-042-Q1-K1-E4
aaacaacttgcgattatacatgtatttggtatttctagctatacatattatctgctggaaagtggatagtagttgaaagatgggccgggaaaggaatgcctcaattcaatatgtaaatcttgttgatgcttccttgggtgaaattcatttgctcgaacccaaaaatatgcttaatatcttttaattgtaattgataaaatgcttcctctttttttcttgttccttttgggtaggagcctaggaggtaattgtgagtgaaagctgttagacatgggaaaaatatgtttcttcaactcactgctcttagttcacaaggaaatcatatgttgtgtataaatttgttgggtcttaaaacattttccaaacttcaccttgccttaacanactgtaaaatttggaaaagtttctgatgctaagctac

SEQ ID NO: 27829 - DNA, 346 bp, Glycine max
  Clone ID: LIB3108-042-Q1-K1-E5
cccacgcgtccgatttaattcaatgttgcatatcattataaaatgatcctcatgaacgtgacacacatgtgttgcctattacgttaatttactttcttgtgtaaattaatgcaactaaaactgttattattgttggtttgtgctttgttgagcactactccattgtttgtggcgaaagataattatagcgtgcaaaattatattcatggcagtgtatatgtgctgaaattgtaaagtattttcattaataaaattgttggagttttattaaaaaagaacaaaaagcattaaaacaaaaataaaataaaaaaaaaaaacaaataggtacaaacagaaataaacacaa

SEQ ID NO: 27830 - DNA, 403 bp, Glycine max
  unsure at all n locations
  Clone ID: LIB3108-042-Q1-K1-E6
cccacgcgtccgcccacgcgtccgcccacgcgtccgctggtttatagatctttgcgaaggaggtttacagcgctcaaccaaagatgcagaacgaggaaggacagatcactgagctttacattcctaggaagtgctccgccacaaacagattgattaccgctaaggaccatgcttcggttcagatcaacattgggcatgtggatgagaatggcgtctacaatggccatttctccacttttgccctctgcggattcatccgtgctcagggtgatgctgacagtgctctagaccgcttgtggcagaagaagaaagttgaagttaagcaacagtagacacccatgatagtttgttacttcgttatgtattaatttctactctggctagagatatntgagtactatga

SEQ ID NO: 27831 - DNA, 289 bp, Glycine max
  Clone ID: LIB3108-042-Q1-K1-E7
cccacgcgtccgatttcgcttactgtcgcacatccttataaatagatactgatgaacgggacgcacatgtggcgcatcttacgttgctttactttcttgtgcagatcaatgctcttaacattgttattatggtcgctttgacgctcagatgagcactactctatggctctgcgcaaacgctgattatcgctggcaaaattgtatagatggccgtgtacatttgctaaatttgtacattagccccatgcatattaatgttggctcttgatgatactggcggagctttaaa

SEQ ID NO: 27832 - DNA, 354 bp, Glycine max
  Clone ID: LIB3108-042-Q1-K1-E8
gaaatttattggcttaatttagcagctagacattgactgtattactaaggagcttgcaggtgatactggtgctaacaaattcatcagctgtagacatgtcaataatatcacaatgacgaacgctcatgcggatagggccacgaggcgcaccgacgacaaggtgatgtcaatgttcgaggcgtggctggtgaaacacgacaagggggacaacgcgctaggagagaaggagatgaggtatcagatctgcaagaacaatctgcgctttatcgatgaacgaatctctctgaacggaacctacaacaagtgactgaacgtgttagctgatctgactaaggcggagtacagagccatgta

SEQ ID NO: 27833 - DNA, 301 bp, Glycine max
  Clone ID: LIB3108-042-Q1-K1-E9
tgcttgcttttgcagcgccgcaaaacctctttgatattagatgcatcgaagtacatactgggtttaaagcataagttgcaagaattgaaccaattatcatttgctgcaactcataaagacattgagtatggtccaatgcctatgcttaatgtggaacaacaatatgaggggtatctgatcaaggtgtagagtcaaatgatttgccatgtgtctgtttcgtttatattgtaagcctttgaaaggctctattctttgaagtacttctagtctatgactttcttgtgtggtatagcttttgttt

SEQ ID NO: 27834 - DNA, 426 bp, Glycine max
  unsure at all n locations
  Clone ID: LIB3108-042-Q1-K1-F1
cctcctagggtttcacgtttccatgtgaaaacggattgagaatctctctctcattctctctctattttatattttctttcacgtcaattagggtttttttgctggcgtgattctgaaggcttggatctggatatcttctttgcttctttgctatggaagactcggattcagttgctacactgatagattctactacttctaagatacaacagctgcagaaagcatttgctgaacttgaaagttatcgggctgttactcttaactngaaatggaaagaactagaggaacatttccatggtcttgagaaatccttgaagaggcgctttgatgaattggaagaccaagagaaagagtttgaaaacaaaacgaggaaggctcgtgagatactggagaagcggggagcagctngttttgctaaggagcaag

SEQ ID NO: 27835 - DNA, 409 bp, Glycine max
  Clone ID: LIB3108-042-Q1-K1-F10
cccacgcgtccgcccacgcgtccggtatttttcaagtaacttaaggtttcaaacctaggaagttggaagtcatggcagcaacattgatggcagcaacaagttctggcactcttaaagcaactcctttcctaggccaaggcaagggtgccaatgccaatgctcttagggatgttgtttccatgggaactgggaagtacaccatgggcaatgatttgtggtatggaccagacagagtgaaatacttgggacccttttcagctcagaccccttcatacttgaaaggagaattcccaggggattatggatgggacactgctggcttatctgctgacccggaagcatttgccaagaacagggctcttgaggttatccatgggagatgggccatgcttggagcactaggatgcat

SEQ ID NO: 27836 - DNA, 383 bp, Glycine max
  Clone ID: LIB3108-042-Q1-K1-F2
gcacgatggagatcattatgccaagtttggagagagacttaaatgacacgagggggtattatgagagtggaaagactaaggaagcgtcctggagagaatcgcagctcaaagggttgcgtcgttttctcattgaaaaacaagaagatatcatgaatgccctcatgcatgatttaaggaaacatcaacttgaagctttcagagacgagataggaacgttgattaagaccttaaatctggcgttgaagtctttgaaacattggatgtcaggcaaaaaggctgcgttgccgcaattagcattgctaaccagtgcagaaattgttcccgagcccacttgtgtggtcctcattaattcatcttggaaatttccctttggaatatccttg

SEQ ID NO: 27837 - DNA, 224 bp, Glycine max
  Clone ID: LIB3108-042-Q1-K1-F3
gctcgtaggagatcatgatgccaagtttttacagagacataaatgacacgtgattgtatcattagagtatatagactaaggaagcagtctggagagaatcgcagctcagagggttgcgtcttggattcagataataacaatagctatatcatgtatgccctactgcatgacatatgctaccatgatctagtatacttcttatacgatacagcaactgtgatata

SEQ ID NO: 27838 - DNA, 426 bp, Glycine max
  Clone ID: LIB3108-042-Q1-K1-F4
cccacgcgtccgcccacgcgtccgcccacgcgtccgggcagctgcttctcctatggcaagccaactcaagtccaccttcactaaaactcttgtagctcccaagggcctctctgcctcttcaccactccacctcctgccttctaagaggcaatttagcttcactgttagggccatccaatcagaaaagccaacctatcaagtgattcaaccaatcaacggtgatcccttcattggaagccttgaaaccccagttacatccagccccttgattgcatggtacttatcgaacctccccgcatacaggaccgcagtgagcccactactaagagggatcgaggtgggcctggcccatggctaccttctggtgggcccattcgtgaaggccgggcctctgaggaacaccgagatcgccgggcaagcgggctc

SEQ ID NO: 27839 - DNA, 419 bp, Glycine max
  Clone ID: LIB3108-042-Q1-K1-F6
gtttgttttgtgctttagataaaagttctgccaaatcaagaggggttttaagatcatagtgtgtgttttgcaacaatggctaagttctttgctgctatgatcttggcactctttgccatttccatacttcaaacagtggtaatggctgctaatgaacaaggaggccacttgtatgacaacaagagcaaatatggaagtggaagtgtcaagagttaccaatgcccatcacaatgctcgaggagatgtagccagacccaataccacaagccctgcatgtttttctgtcagaagtgctgcaggaaatgcctgtgtgtgcccccggggtattatggtaataaagctgtgtgcccttgctacaacaactggaagaccaaggaaggaggacccaagtgcccttgagcttcaacttgttcaacttc

SEQ ID NO: 27840 - DNA, 422 bp, Glycine max
  Clone ID: LIB3108-042-Q1-K1-F8
gtttgtcattagcacttcttcttttcacactgccgctgcaacaatggcttcagagaagaaactttcgaacccaatgagggagataaaagtgcagaagctcgttctcaatatctctgttggcgagagtggagatcgtctcaccagagccgccaaggtgttggaacaacttagtggccaaaccccagtgttttccaaagcaaggtacactgttcgttcctttgggattagaagaaatgagaagattgcatgctatgtcactgtcagaggtgacaaggcaatgcaacttttggagagtggtttgaaggttaaggaatatgaacttctcagaaggaatttcagtgatactggttgcttcggctttggtattcaggagcatatcgatttgggaatcaagtatgatccttcaactggtatttatggaa

SEQ ID NO: 27841 - DNA, 405 bp, Glycine max
  Clone ID: LIB3108-042-Q1-K1-F9
gtttggtgttgtaactcgttcttcttcttttgttgttctgtgtttgtgtatgtttcttctgtcacctgaaaatgtcttgctgcggtggtaactgtggttgcggaagctcctgcaagtgcggcaacggctgcggaggctgcaagatgtacccagacttgagctacactgagtcaaccaccaccgagaccttggtcatgggagtggcacctgttaaggctcaatttgagggtgctgaaatgggtgtgcccgctgagaacgatggctgcaaatgtggaccaaactgctcctgcaacccctgcacttgcacgtgaggtgttgggagagcaagcttcaagcagagataggccttacttaggaataatgattaactattaatgtgtacctaaaaacctatgtattatgtct

SEQ ID NO: 27842 - DNA, 56 bp, Glycine max
  Clone ID: LIB3108-042-Q1-K1-G1
cgtgggttcacgggatattttgtaataatatactttcaaaacgatttttgaaaatc

SEQ ID NO: 27843 - DNA, 315 bp, Glycine max
  Clone ID: LIB3108-042-Q1-K1-G10
gcctttggcagttctcgccggaggccccacatttcgctgcccagtcccgtcccggcactggccaccgtaaattccgcgtcgtggccggaaaattcagccccatgctgaacggccggaacctccgcgtggcggaggtgggcggcggtcccgccggaggagccgccgcggagacgctggcgaatggcggcttggagacgtttctgatcgatcgaagtatgtactaactgcaagccttgcggcggtgccatcccgctgtgcatggtggtggagttcgacctttcgctggacatcatctaccggctcgtgacgaagatg

SEQ ID NO: 27844 - DNA, 267 bp, Glycine max
  Clone ID: LIB3108-042-Q1-K1-G2
tcggaattcttaactctgaatctgcaaagggagaatgtacagatcattggccgcatgtcgaccatctagggaacggggaaaaagttcaaaagacagggaggagcatttgctctgtgcattattgaacaaaaagagagatcaactgcttaaccttcatctactacttcgccgtgtgcatattatatatgaataacactggtttgtgaaaaagatacagcatcagagaaattcggacagatttaatcgagaattggagggacatgcttt

SEQ ID NO: 27845 - DNA, 423 bp, Glycine max
  unsure at all n locations
  Clone ID: LIB3108-042-Q1-K1-G3
aacacacaacatatcaaccccacttctgttttgttttgcttaaattattctgagaaagtttcttcttttcttcttgttccaatggctgctgcaactgccccaagattcatcaagtgtgtgaccgttggcgatggagctgtagggaagacctgcatgctcatttgctataccagcaacaaattccccacggactatatccccactgtgtttgataatttcagtgcaaatgtggttgttgaaggcataactgtcaatttaggcctttgggatacagctgatttctcttttgttctctaatttgtatgcactgtccagtggatccctgaactccagcattttgcccctggcatcccattggtattaagtggcacanaaatggatctgcgcgaagacaggcactatatggctgatcatcctggcttg

SEQ ID NO: 27846 - DNA, 119 bp, Glycine max
  Clone ID: LIB3108-042-Q1-K1-G5
tccacgcgtccgaacacacatacaactttcttgatttggacgcagatttgggcttatggataaacgttttgtcaaatctggatgagctcaccgatcatctagagcgtgtgtgttgctaa

SEQ ID NO: 27847 - DNA, 412 bp, Glycine max
  Clone ID: LIB3108-042-Q1-K1-G6
ggatcttaccctcttgtttgctaatattctcattcttctgtctctgctgcttctccttctgaactaagagatggggttgtctttcaccaagctttttagccggctctttgctaagaaagagatgcgtattctcatggtaggtcttgatgctgctggtaagactaccatcttgtacaagctcaagctgggagaaattgtcacaaccattcccacaattggattcaatgtggagactgtggaatataagaatattagctttactgtatgggatgtgggtggccaagataagatccgtcctttatggagacactacttccaaaacactcaggggcttatctttgctgtggatagcaatgatcgtgaccgtgtagttgaggctagagatgagcttcaacggatgttgaatgaggat

SEQ ID NO: 27848 - DNA, 396 bp, Glycine max
  Clone ID: LIB3108-042-Q1-K1-G7
aacacacagcacaccaaccctacttctgtttcgtattgcttaactcattctgagaaagtggcttcttttcttcttgttccaatggctgctgcaactgccccaagattcatcaagtgtgtgaccgttgacgatggagctgtacggaagacctgcatgctcatttgctataccagcaacaaattccccacggactatatccccactgtgtttgataatttcagtgcaaatgtggttgttgaaggcataactgtcaatttaggcctttgggatacagctgatttctcttttgttctctaatttgtatgcactgtccagtgcatccctgaactctagcattttgcccctggcatcccattgttattagttggcacaaaattggatctgcgcgaaaacagg
